United States Patent Application Publication US 2005/0118625 A1 - sequence listing, part 8

SEQ ID NO: 111811 - DNA, 25 bp, Probe Sequence
gtctgagaggtaagagagaaggaac

SEQ ID NO: 111812 - DNA, 25 bp, Probe Sequence
agtctgagaggtaagagagaaggaa

SEQ ID NO: 111813 - DNA, 25 bp, Probe Sequence
aagtctgagaggtaagagagaagga

SEQ ID NO: 111814 - DNA, 25 bp, Probe Sequence
gagaggtaagagagaaggaacacac

SEQ ID NO: 111815 - DNA, 25 bp, Probe Sequence
cctgctcttataatgactggttctt

SEQ ID NO: 111816 - DNA, 25 bp, Probe Sequence
tctgagaggtaagagagaaggaaca

SEQ ID NO: 111817 - DNA, 25 bp, Probe Sequence
agaggtaagagagaaggaacacact

SEQ ID NO: 111818 - DNA, 25 bp, Probe Sequence
tgagaggtaagagagaaggaacaca

SEQ ID NO: 111819 - DNA, 25 bp, Probe Sequence
gtttggcttatttactggtctatgg

SEQ ID NO: 111820 - DNA, 25 bp, Probe Sequence
aacaaaggtaagtctgagaggtaag

SEQ ID NO: 111821 - DNA, 25 bp, Probe Sequence
gaacaaaggtaagtctgagaggtaa

SEQ ID NO: 111822 - DNA, 25 bp, Probe Sequence
tttggcttatttactggtctatggg

SEQ ID NO: 111823 - DNA, 25 bp, Probe Sequence
tgtttggcttatttactggtctatg

SEQ ID NO: 111824 - DNA, 25 bp, Probe Sequence
aagcctgctcttataatgactggtt

SEQ ID NO: 111825 - DNA, 25 bp, Probe Sequence
cagaagcctgctcttataatgactg

SEQ ID NO: 111826 - DNA, 25 bp, Probe Sequence
aaaggtaagtctgagaggtaagaga

SEQ ID NO: 111827 - DNA, 25 bp, Probe Sequence
caaaggtaagtctgagaggtaagag

SEQ ID NO: 111828 - DNA, 25 bp, Probe Sequence
cagagatgttgacgcctaagaagaa

SEQ ID NO: 111829 - DNA, 25 bp, Probe Sequence
agagatgttgacgcctaagaagaac

SEQ ID NO: 111830 - DNA, 25 bp, Probe Sequence
gagatgttgacgcctaagaagaacc

SEQ ID NO: 111831 - DNA, 25 bp, Probe Sequence
aacactttgcctggagacatttcta

SEQ ID NO: 111832 - DNA, 25 bp, Probe Sequence
ctaaaggtctgtatgtgaggagtgc

SEQ ID NO: 111833 - DNA, 25 bp, Probe Sequence
aattctagtttagaggcggatttgg

SEQ ID NO: 111834 - DNA, 25 bp, Probe Sequence
taaaggtctgtatgtgaggagtgct

SEQ ID NO: 111835 - DNA, 25 bp, Probe Sequence
actttgcctggagacatttctactg

SEQ ID NO: 111836 - DNA, 25 bp, Probe Sequence
cactttgcctggagacatttctact

SEQ ID NO: 111837 - DNA, 25 bp, Probe Sequence
attctagtttagaggcggatttggt

SEQ ID NO: 111838 - DNA, 25 bp, Probe Sequence
cctaaaggtctgtatgtgaggagtg

SEQ ID NO: 111839 - DNA, 25 bp, Probe Sequence
acactttgcctggagacatttctac

SEQ ID NO: 111840 - DNA, 25 bp, Probe Sequence
ttctagtttagaggcggatttggtc

SEQ ID NO: 111841 - DNA, 25 bp, Probe Sequence
ctttgcctggagacatttctactgg

SEQ ID NO: 111842 - DNA, 25 bp, Probe Sequence
gcagagatgttgacgcctaagaaga

SEQ ID NO: 111843 - DNA, 25 bp, Probe Sequence
gaacactttgcctggagacatttct

SEQ ID NO: 111844 - DNA, 25 bp, Probe Sequence
ctgtatgtgaggagtgctgtgctac

SEQ ID NO: 111845 - DNA, 25 bp, Probe Sequence
gtaaaactggagaggattcttttgc

SEQ ID NO: 111846 - DNA, 25 bp, Probe Sequence
tctgtatgtgaggagtgctgtgcta

SEQ ID NO: 111847 - DNA, 25 bp, Probe Sequence
gaattctagtttagaggcggatttg

SEQ ID NO: 111848 - DNA, 25 bp, Probe Sequence
agatgttgacgcctaagaagaaccg

SEQ ID NO: 111849 - DNA, 25 bp, Probe Sequence
tcagcaaccgaattctagtttagag

SEQ ID NO: 111850 - DNA, 25 bp, Probe Sequence
agtaaaactggagaggattcttttg

SEQ ID NO: 111851 - DNA, 25 bp, Probe Sequence
gtcagcaaccgaattctagtttaga

SEQ ID NO: 111852 - DNA, 25 bp, Probe Sequence
ggattggtggataatatggtagttc

SEQ ID NO: 111853 - DNA, 25 bp, Probe Sequence
gattggtggataatatggtagttct

SEQ ID NO: 111854 - DNA, 25 bp, Probe Sequence
ttctaacgggtatgattacagtagc

SEQ ID NO: 111855 - DNA, 25 bp, Probe Sequence
gggattggtggataatatggtagtt

SEQ ID NO: 111856 - DNA, 25 bp, Probe Sequence
atagtgggattggtggataatatgg

SEQ ID NO: 111857 - DNA, 25 bp, Probe Sequence
gtgggattggtggataatatggtag

SEQ ID NO: 111858 - DNA, 25 bp, Probe Sequence
tgggattggtggataatatggtagt

SEQ ID NO: 111859 - DNA, 25 bp, Probe Sequence
agtgggattggtggataatatggta

SEQ ID NO: 111860 - DNA, 25 bp, Probe Sequence
tagtgggattggtggataatatggt

SEQ ID NO: 111861 - DNA, 25 bp, Probe Sequence
aataatttacattgccaccaacagt

SEQ ID NO: 111862 - DNA, 25 bp, Probe Sequence
ttggtggataatatggtagttctat

SEQ ID NO: 111863 - DNA, 25 bp, Probe Sequence
attggtggataatatggtagttcta

SEQ ID NO: 111864 - DNA, 25 bp, Probe Sequence
caccttatcctagaacttgaggctg

SEQ ID NO: 111865 - DNA, 25 bp, Probe Sequence
tcaccttatcctagaacttgaggct

SEQ ID NO: 111866 - DNA, 25 bp, Probe Sequence
aatagtgggattggtggataatatg

SEQ ID NO: 111867 - DNA, 25 bp, Probe Sequence
tggtggataatatggtagttctatt

SEQ ID NO: 111868 - DNA, 25 bp, Probe Sequence
caaatagtgggattggtggataata

SEQ ID NO: 111869 - DNA, 25 bp, Probe Sequence
cattctaacgggtatgattacagta

SEQ ID NO: 111870 - DNA, 25 bp, Probe Sequence
ataatttacattgccaccaacagtg

SEQ ID NO: 111871 - DNA, 25 bp, Probe Sequence
attctaacgggtatgattacagtag

SEQ ID NO: 111872 - DNA, 25 bp, Probe Sequence
cttgataatagtcattctaacgggt

SEQ ID NO: 111873 - DNA, 25 bp, Probe Sequence
taataatttacattgccaccaacag

SEQ ID NO: 111874 - DNA, 25 bp, Probe Sequence
ctaacgggtatgattacagtagctt

SEQ ID NO: 111875 - DNA, 25 bp, Probe Sequence
gctataataatttacattgccacca

SEQ ID NO: 111876 - DNA, 25 bp, Probe Sequence
ctggtcaccttttctcttccaagtg

SEQ ID NO: 111877 - DNA, 25 bp, Probe Sequence
tttctcttccaagtgcccagaacag

SEQ ID NO: 111878 - DNA, 25 bp, Probe Sequence
cttttctcttccaagtgcccagaac

SEQ ID NO: 111879 - DNA, 25 bp, Probe Sequence
cctggtcaccttttctcttccaagt

SEQ ID NO: 111880 - DNA, 25 bp, Probe Sequence
ttttctcttccaagtgcccagaaca

SEQ ID NO: 111881 - DNA, 25 bp, Probe Sequence
ccttttctcttccaagtgcccagaa

SEQ ID NO: 111882 - DNA, 25 bp, Probe Sequence
gttagagtaacacatatcctgcctt

SEQ ID NO: 111883 - DNA, 25 bp, Probe Sequence
gagaaggagagaaacagaaatgaga

SEQ ID NO: 111884 - DNA, 25 bp, Probe Sequence
agagaaggagagaaacagaaatgag

SEQ ID NO: 111885 - DNA, 25 bp, Probe Sequence
gagagaaggagagaaacagaaatga

SEQ ID NO: 111886 - DNA, 25 bp, Probe Sequence
agagagaaggagagaaacagaaatg

SEQ ID NO: 111887 - DNA, 25 bp, Probe Sequence
gaagagagaaggagagaaacagaaa

SEQ ID NO: 111888 - DNA, 25 bp, Probe Sequence
atttggaagagagaaggagagaaac

SEQ ID NO: 111889 - DNA, 25 bp, Probe Sequence
aaggagagaaacagaaatgagaagg

SEQ ID NO: 111890 - DNA, 25 bp, Probe Sequence
agaaggagagaaacagaaatgagaa

SEQ ID NO: 111891 - DNA, 25 bp, Probe Sequence
gaaggagagaaacagaaatgagaag

SEQ ID NO: 111892 - DNA, 25 bp, Probe Sequence
aagagagaaggagagaaacagaaat

SEQ ID NO: 111893 - DNA, 25 bp, Probe Sequence
ttagagtaacacatatcctgccttt

SEQ ID NO: 111894 - DNA, 25 bp, Probe Sequence
gaatttggaagagagaaggagagaa

SEQ ID NO: 111895 - DNA, 25 bp, Probe Sequence
cagaaggcttgaataaagtgatacg

SEQ ID NO: 111896 - DNA, 25 bp, Probe Sequence
aatttggaagagagaaggagagaaa

SEQ ID NO: 111897 - DNA, 25 bp, Probe Sequence
ctgaatttggaagagagaaggagag

SEQ ID NO: 111898 - DNA, 25 bp, Probe Sequence
cttaaacatagggataatggcaagc

SEQ ID NO: 111899 - DNA, 25 bp, Probe Sequence
tgaatttggaagagagaaggagaga

SEQ ID NO: 111900 - DNA, 25 bp, Probe Sequence
acagaaatgagaaggtttgcttaaa

SEQ ID NO: 111901 - DNA, 25 bp, Probe Sequence
aggagagaaacagaaatgagaaggt

SEQ ID NO: 111902 - DNA, 25 bp, Probe Sequence
cgttagagtaacacatatcctgcct

SEQ ID NO: 111903 - DNA, 25 bp, Probe Sequence
ggagagaaacagaaatgagaaggtt

SEQ ID NO: 111904 - DNA, 25 bp, Probe Sequence
tttggaagagagaaggagagaaaca

SEQ ID NO: 111905 - DNA, 25 bp, Probe Sequence
aacagaaatgagaaggtttgcttaa

SEQ ID NO: 111906 - DNA, 25 bp, Probe Sequence
ccaactagattgttattctggcatc

SEQ ID NO: 111907 - DNA, 25 bp, Probe Sequence
tccaactagattgttattctggcat

SEQ ID NO: 111908 - DNA, 25 bp, Probe Sequence
ttccaactagattgttattctggca

SEQ ID NO: 111909 - DNA, 25 bp, Probe Sequence
attccaactagattgttattctggc

SEQ ID NO: 111910 - DNA, 25 bp, Probe Sequence
tattctggcatcttgggaagtaaat

SEQ ID NO: 111911 - DNA, 25 bp, Probe Sequence
ttattctggcatcttgggaagtaaa

SEQ ID NO: 111912 - DNA, 25 bp, Probe Sequence
ctagattgttattctggcatcttgg

SEQ ID NO: 111913 - DNA, 25 bp, Probe Sequence
aaacagagaccctaagttgaagaag

SEQ ID NO: 111914 - DNA, 25 bp, Probe Sequence
gcaagtatgtctacaaatggaagga

SEQ ID NO: 111915 - DNA, 25 bp, Probe Sequence
gttattctggcatcttgggaagtaa

SEQ ID NO: 111916 - DNA, 25 bp, Probe Sequence
aagtatgtctacaaatggaaggaac

SEQ ID NO: 111917 - DNA, 25 bp, Probe Sequence
caagtatgtctacaaatggaaggaa

SEQ ID NO: 111918 - DNA, 25 bp, Probe Sequence
actagattgttattctggcatcttg

SEQ ID NO: 111919 - DNA, 25 bp, Probe Sequence
caactagattgttattctggcatct

SEQ ID NO: 111920 - DNA, 25 bp, Probe Sequence
ttctaggactaattctccaagaagc

SEQ ID NO: 111921 - DNA, 25 bp, Probe Sequence
ctaggactaattctccaagaagcag

SEQ ID NO: 111922 - DNA, 25 bp, Probe Sequence
actaattctccaagaagcagtcata

SEQ ID NO: 111923 - DNA, 25 bp, Probe Sequence
attctggcatcttgggaagtaaatg

SEQ ID NO: 111924 - DNA, 25 bp, Probe Sequence
attgttattctggcatcttgggaag

SEQ ID NO: 111925 - DNA, 25 bp, Probe Sequence
gattgttattctggcatcttgggaa

SEQ ID NO: 111926 - DNA, 25 bp, Probe Sequence
gaagaaggtgttgtttcagataggg

SEQ ID NO: 111927 - DNA, 25 bp, Probe Sequence
gaatcttcagtttcttcagcacttg

SEQ ID NO: 111928 - DNA, 25 bp, Probe Sequence
taattctccaagaagcagtcatacg

SEQ ID NO: 111929 - DNA, 25 bp, Probe Sequence
ctaattctccaagaagcagtcatac

SEQ ID NO: 111930 - DNA, 25 bp, Probe Sequence
agaactgtggtgtcaatgtgtaatt

SEQ ID NO: 111931 - DNA, 25 bp, Probe Sequence
cagaactgtggtgtcaatgtgtaat

SEQ ID NO: 111932 - DNA, 25 bp, Probe Sequence
caggtggactacatgaagataacat

SEQ ID NO: 111933 - DNA, 25 bp, Probe Sequence
gaactgtggtgtcaatgtgtaatta

SEQ ID NO: 111934 - DNA, 25 bp, Probe Sequence
aactgtggtgtcaatgtgtaattaa

SEQ ID NO: 111935 - DNA, 25 bp, Probe Sequence
actgtggtgtcaatgtgtaattaat

SEQ ID NO: 111936 - DNA, 25 bp, Probe Sequence
tcaggtggactacatgaagataaca

SEQ ID NO: 111937 - DNA, 25 bp, Probe Sequence
ttccaagcaacaaactccttaattt

SEQ ID NO: 111938 - DNA, 25 bp, Probe Sequence
gttccaagcaacaaactccttaatt

SEQ ID NO: 111939 - DNA, 25 bp, Probe Sequence
aactgttgatgttcaggtggactac

SEQ ID NO: 111940 - DNA, 25 bp, Probe Sequence
gggatgctgtgtctagtgattaaac

SEQ ID NO: 111941 - DNA, 25 bp, Probe Sequence
ggtttaatctttccattgtgtcttt

SEQ ID NO: 111942 - DNA, 25 bp, Probe Sequence
acagtatccaatttatccaaacaga

SEQ ID NO: 111943 - DNA, 25 bp, Probe Sequence
tgggatgctgtgtctagtgattaaa

SEQ ID NO: 111944 - DNA, 25 bp, Probe Sequence
gatgctgtgtctagtgattaaacaa

SEQ ID NO: 111945 - DNA, 25 bp, Probe Sequence
ggatgctgtgtctagtgattaaaca

SEQ ID NO: 111946 - DNA, 25 bp, Probe Sequence
gaaatgttataggtttgtttggagt

SEQ ID NO: 111947 - DNA, 25 bp, Probe Sequence
tgaaatgttataggtttgtttggag

SEQ ID NO: 111948 - DNA, 25 bp, Probe Sequence
atgctgtgtctagtgattaaacaaa

SEQ ID NO: 111949 - DNA, 25 bp, Probe Sequence
acagaactgtggtgtcaatgtgtaa

SEQ ID NO: 111950 - DNA, 25 bp, Probe Sequence
aacagaactgtggtgtcaatgtgta

SEQ ID NO: 111951 - DNA, 25 bp, Probe Sequence
ttcaggtggactacatgaagataac

SEQ ID NO: 111952 - DNA, 25 bp, Probe Sequence
gttcaggtggactacatgaagataa

SEQ ID NO: 111953 - DNA, 25 bp, Probe Sequence
tgttcaggtggactacatgaagata

SEQ ID NO: 111954 - DNA, 25 bp, Probe Sequence
tgatctggtgacaataggattacat

SEQ ID NO: 111955 - DNA, 25 bp, Probe Sequence
atgatctggtgacaataggattaca

SEQ ID NO: 111956 - DNA, 25 bp, Probe Sequence
tcaatgatctggtgacaataggatt

SEQ ID NO: 111957 - DNA, 25 bp, Probe Sequence
gatctggtgacaataggattacatt

SEQ ID NO: 111958 - DNA, 25 bp, Probe Sequence
aatgatctggtgacaataggattac

SEQ ID NO: 111959 - DNA, 25 bp, Probe Sequence
caatgatctggtgacaataggatta

SEQ ID NO: 111960 - DNA, 25 bp, Probe Sequence
tttggctttcatcattatccctact

SEQ ID NO: 111961 - DNA, 25 bp, Probe Sequence
ttggctttcatcattatccctacta

SEQ ID NO: 111962 - DNA, 25 bp, Probe Sequence
tggtgacaataggattacattggag

SEQ ID NO: 111963 - DNA, 25 bp, Probe Sequence
ctggtgacaataggattacattgga

SEQ ID NO: 111964 - DNA, 25 bp, Probe Sequence
tctggtgacaataggattacattgg

SEQ ID NO: 111965 - DNA, 25 bp, Probe Sequence
tggctttcatcattatccctactag

SEQ ID NO: 111966 - DNA, 25 bp, Probe Sequence
ggctttcatcattatccctactaga

SEQ ID NO: 111967 - DNA, 25 bp, Probe Sequence
atctggtgacaataggattacattg

SEQ ID NO: 111968 - DNA, 25 bp, Probe Sequence
gtgacaataggattacattggagcc

SEQ ID NO: 111969 - DNA, 25 bp, Probe Sequence
ggtgacaataggattacattggagc

SEQ ID NO: 111970 - DNA, 25 bp, Probe Sequence
tgacaataggattacattggagcca

SEQ ID NO: 111971 - DNA, 25 bp, Probe Sequence
gacaataggattacattggagccaa

SEQ ID NO: 111972 - DNA, 25 bp, Probe Sequence
tccctactagatgttatgtgttctt

SEQ ID NO: 111973 - DNA, 25 bp, Probe Sequence
atccctactagatgttatgtgttct

SEQ ID NO: 111974 - DNA, 25 bp, Probe Sequence
taacaatttggtgtcaatgatctgg

SEQ ID NO: 111975 - DNA, 25 bp, Probe Sequence
gcagtttatttgtagtttctctctt

SEQ ID NO: 111976 - DNA, 25 bp, Probe Sequence
ttattagcaccaagtgtttctcaaa

SEQ ID NO: 111977 - DNA, 25 bp, Probe Sequence
attattagcaccaagtgtttctcaa

SEQ ID NO: 111978 - DNA, 25 bp, Probe Sequence
tggctttcacttcatctaataactg

SEQ ID NO: 111979 - DNA, 25 bp, Probe Sequence
ttggctttcacttcatctaataact

SEQ ID NO: 111980 - DNA, 25 bp, Probe Sequence
ggctttcacttcatctaataactga

SEQ ID NO: 111981 - DNA, 25 bp, Probe Sequence
tttggctttcacttcatctaataac

SEQ ID NO: 111982 - DNA, 25 bp, Probe Sequence
atttggctttcacttcatctaataa

SEQ ID NO: 111983 - DNA, 25 bp, Probe Sequence
aatttggctttcacttcatctaata

SEQ ID NO: 111984 - DNA, 25 bp, Probe Sequence
catctaataactgaattgtcaggct

SEQ ID NO: 111985 - DNA, 25 bp, Probe Sequence
tcatctaataactgaattgtcaggc

SEQ ID NO: 111986 - DNA, 25 bp, Probe Sequence
atctaataactgaattgtcaggctt

SEQ ID NO: 111987 - DNA, 25 bp, Probe Sequence
taactgaattgtcaggctttgattg

SEQ ID NO: 111988 - DNA, 25 bp, Probe Sequence
ataactgaattgtcaggctttgatt

SEQ ID NO: 111989 - DNA, 25 bp, Probe Sequence
aataactgaattgtcaggctttgat

SEQ ID NO: 111990 - DNA, 25 bp, Probe Sequence
acttcatctaataactgaattgtca

SEQ ID NO: 111991 - DNA, 25 bp, Probe Sequence
tcacttcatctaataactgaattgt

SEQ ID NO: 111992 - DNA, 25 bp, Probe Sequence
gctttcacttcatctaataactgaa

SEQ ID NO: 111993 - DNA, 25 bp, Probe Sequence
cacttcatctaataactgaattgtc

SEQ ID NO: 111994 - DNA, 25 bp, Probe Sequence
taataactgaattgtcaggctttga

SEQ ID NO: 111995 - DNA, 25 bp, Probe Sequence
ttcatctaataactgaattgtcagg

SEQ ID NO: 111996 - DNA, 25 bp, Probe Sequence
aactgaattgtcaggctttgattga

SEQ ID NO: 111997 - DNA, 25 bp, Probe Sequence
ctaataactgaattgtcaggctttg

SEQ ID NO: 111998 - DNA, 25 bp, Probe Sequence
tctaataactgaattgtcaggcttt

SEQ ID NO: 111999 - DNA, 25 bp, Probe Sequence
ttcacttcatctaataactgaattg

SEQ ID NO: 112000 - DNA, 25 bp, Probe Sequence
cttcatctaataactgaattgtcag

SEQ ID NO: 112001 - DNA, 25 bp, Probe Sequence
ctttcacttcatctaataactgaat

SEQ ID NO: 112002 - DNA, 25 bp, Probe Sequence
agattgtcttaatggtaggtcaagt

SEQ ID NO: 112003 - DNA, 25 bp, Probe Sequence
cagtctgattataccatgtgtgcta

SEQ ID NO: 112004 - DNA, 25 bp, Probe Sequence
taccagtctgattataccatgtgtg

SEQ ID NO: 112005 - DNA, 25 bp, Probe Sequence
agtctgattataccatgtgtgctaa

SEQ ID NO: 112006 - DNA, 25 bp, Probe Sequence
ttaccagtctgattataccatgtgt

SEQ ID NO: 112007 - DNA, 25 bp, Probe Sequence
gcttcctgattaccagtctgattat

SEQ ID NO: 112008 - DNA, 25 bp, Probe Sequence
cctgattaccagtctgattatacca

SEQ ID NO: 112009 - DNA, 25 bp, Probe Sequence
ttgtattgcttcctgattaccagtc

SEQ ID NO: 112010 - DNA, 25 bp, Probe Sequence
tcctgattaccagtctgattatacc

SEQ ID NO: 112011 - DNA, 25 bp, Probe Sequence
gattgtcttaatggtaggtcaagta

SEQ ID NO: 112012 - DNA, 25 bp, Probe Sequence
tgcttcctgattaccagtctgatta

SEQ ID NO: 112013 - DNA, 25 bp, Probe Sequence
tattgcttcctgattaccagtctga

SEQ ID NO: 112014 - DNA, 25 bp, Probe Sequence
gtattgcttcctgattaccagtctg

SEQ ID NO: 112015 - DNA, 25 bp, Probe Sequence
gtctgattataccatgtgtgctaat

SEQ ID NO: 112016 - DNA, 25 bp, Probe Sequence
tgtattgcttcctgattaccagtct

SEQ ID NO: 112017 - DNA, 25 bp, Probe Sequence
tagattgtcttaatggtaggtcaag

SEQ ID NO: 112018 - DNA, 25 bp, Probe Sequence
attaccagtctgattataccatgtg

SEQ ID NO: 112019 - DNA, 25 bp, Probe Sequence
attgcttcctgattaccagtctgat

SEQ ID NO: 112020 - DNA, 25 bp, Probe Sequence
ttgtcttaatggtaggtcaagtaat

SEQ ID NO: 112021 - DNA, 25 bp, Probe Sequence
attgtcttaatggtaggtcaagtaa

SEQ ID NO: 112022 - DNA, 25 bp, Probe Sequence
gattaccagtctgattataccatgt

SEQ ID NO: 112023 - DNA, 25 bp, Probe Sequence
tgattaccagtctgattataccatg

SEQ ID NO: 112024 - DNA, 25 bp, Probe Sequence
ttgcttcctgattaccagtctgatt

SEQ ID NO: 112025 - DNA, 25 bp, Probe Sequence
tagaaagtatagatggcgaaaggac

SEQ ID NO: 112026 - DNA, 25 bp, Probe Sequence
actccttgattgaatgtagaaacct

SEQ ID NO: 112027 - DNA, 25 bp, Probe Sequence
aactccttgattgaatgtagaaacc

SEQ ID NO: 112028 - DNA, 25 bp, Probe Sequence
ttccctctctcttcctgttaaactt

SEQ ID NO: 112029 - DNA, 25 bp, Probe Sequence
tttccctctctcttcctgttaaact

SEQ ID NO: 112030 - DNA, 25 bp, Probe Sequence
ttgtagcaactattggatgattatc

SEQ ID NO: 112031 - DNA, 25 bp, Probe Sequence
tccctctctcttcctgttaaacttg

SEQ ID NO: 112032 - DNA, 25 bp, Probe Sequence
ctccttgattgaatgtagaaaccta

SEQ ID NO: 112033 - DNA, 25 bp, Probe Sequence
tccttgattgaatgtagaaacctaa

SEQ ID NO: 112034 - DNA, 25 bp, Probe Sequence
aaactccttgattgaatgtagaaac

SEQ ID NO: 112035 - DNA, 25 bp, Probe Sequence
tctctcttcctgttaaacttggctc

SEQ ID NO: 112036 - DNA, 25 bp, Probe Sequence
ctctctcttcctgttaaacttggct

SEQ ID NO: 112037 - DNA, 25 bp, Probe Sequence
ccctctctcttcctgttaaacttgg

SEQ ID NO: 112038 - DNA, 25 bp, Probe Sequence
ctatatttgcttaacgtggtgcttt

SEQ ID NO: 112039 - DNA, 25 bp, Probe Sequence
tagaagaaagggagtgggatggaaa

SEQ ID NO: 112040 - DNA, 25 bp, Probe Sequence
ttagaagaaagggagtgggatggaa

SEQ ID NO: 112041 - DNA, 25 bp, Probe Sequence
ccttgattgaatgtagaaacctaat

SEQ ID NO: 112042 - DNA, 25 bp, Probe Sequence
aaagggagtgggatggaaacaaatt

SEQ ID NO: 112043 - DNA, 25 bp, Probe Sequence
atgttgctatatttgcttaacgtgg

SEQ ID NO: 112044 - DNA, 25 bp, Probe Sequence
agcaactattggatgattatccgaa

SEQ ID NO: 112045 - DNA, 25 bp, Probe Sequence
tagcaactattggatgattatccga

SEQ ID NO: 112046 - DNA, 25 bp, Probe Sequence
gtagcaactattggatgattatccg

SEQ ID NO: 112047 - DNA, 25 bp, Probe Sequence
ctcttcctgttaaacttggctcctc

SEQ ID NO: 112048 - DNA, 25 bp, Probe Sequence
ctctcttcctgttaaacttggctcc

SEQ ID NO: 112049 - DNA, 25 bp, Probe Sequence
cctctctcttcctgttaaacttggc

SEQ ID NO: 112050 - DNA, 25 bp, Probe Sequence
tgctttcaaccaatcgtagatgttt

SEQ ID NO: 112051 - DNA, 25 bp, Probe Sequence
gtgctttcaaccaatcgtagatgtt

SEQ ID NO: 112052 - DNA, 25 bp, Probe Sequence
gtgtgctttcaaccaatcgtagatg

SEQ ID NO: 112053 - DNA, 25 bp, Probe Sequence
tgtgctttcaaccaatcgtagatgt

SEQ ID NO: 112054 - DNA, 25 bp, Probe Sequence
tgtgtgctttcaaccaatcgtagat

SEQ ID NO: 112055 - DNA, 25 bp, Probe Sequence
ctgtgtgctttcaaccaatcgtaga

SEQ ID NO: 112056 - DNA, 25 bp, Probe Sequence
tctgtgtgctttcaaccaatcgtag

SEQ ID NO: 112057 - DNA, 25 bp, Probe Sequence
gctttcaaccaatcgtagatgtttt

SEQ ID NO: 112058 - DNA, 25 bp, Probe Sequence
gaagcatacttggaactaatgaagg

SEQ ID NO: 112059 - DNA, 25 bp, Probe Sequence
tagtattcatcctccaggtgtctta

SEQ ID NO: 112060 - DNA, 25 bp, Probe Sequence
gttcttagtattcatcctccaggtg

SEQ ID NO: 112061 - DNA, 25 bp, Probe Sequence
ttgtgaccagaagatgtagtaactt

SEQ ID NO: 112062 - DNA, 25 bp, Probe Sequence
tattcatcctccaggtgtcttactt

SEQ ID NO: 112063 - DNA, 25 bp, Probe Sequence
ttagtattcatcctccaggtgtctt

SEQ ID NO: 112064 - DNA, 25 bp, Probe Sequence
ttcttagtattcatcctccaggtgt

SEQ ID NO: 112065 - DNA, 25 bp, Probe Sequence
cagaagcatacttggaactaatgaa

SEQ ID NO: 112066 - DNA, 25 bp, Probe Sequence
ttcagaagcatacttggaactaatg

SEQ ID NO: 112067 - DNA, 25 bp, Probe Sequence
cttagtattcatcctccaggtgtct

SEQ ID NO: 112068 - DNA, 25 bp, Probe Sequence
tcttagtattcatcctccaggtgtc

SEQ ID NO: 112069 - DNA, 25 bp, Probe Sequence
agaagcatacttggaactaatgaag

SEQ ID NO: 112070 - DNA, 25 bp, Probe Sequence
tcagaagcatacttggaactaatga

SEQ ID NO: 112071 - DNA, 25 bp, Probe Sequence
gtattcatcctccaggtgtcttact

SEQ ID NO: 112072 - DNA, 25 bp, Probe Sequence
agtattcatcctccaggtgtcttac

SEQ ID NO: 112073 - DNA, 25 bp, Probe Sequence
cgttcttagtattcatcctccaggt

SEQ ID NO: 112074 - DNA, 25 bp, Probe Sequence
attcatcctccaggtgtcttacttc

SEQ ID NO: 112075 - DNA, 25 bp, Probe Sequence
atccttatctcattgctggcttctt

SEQ ID NO: 112076 - DNA, 25 bp, Probe Sequence
attcagaagcatacttggaactaat

SEQ ID NO: 112077 - DNA, 25 bp, Probe Sequence
attattcagaagcatacttggaact

SEQ ID NO: 112078 - DNA, 25 bp, Probe Sequence
gattattcagaagcatacttggaac

SEQ ID NO: 112079 - DNA, 25 bp, Probe Sequence
tctgaatagaacatgacatgccatt

SEQ ID NO: 112080 - DNA, 25 bp, Probe Sequence
attgttcattaatcttccgttaggc

SEQ ID NO: 112081 - DNA, 25 bp, Probe Sequence
agattattcagaagcatacttggaa

SEQ ID NO: 112082 - DNA, 25 bp, Probe Sequence
accttcacgttgtctaccttcataa

SEQ ID NO: 112083 - DNA, 25 bp, Probe Sequence
ccttcacgttgtctaccttcataac

SEQ ID NO: 112084 - DNA, 25 bp, Probe Sequence
cttcacgttgtctaccttcataaca

SEQ ID NO: 112085 - DNA, 25 bp, Probe Sequence
aaccttcacgttgtctaccttcata

SEQ ID NO: 112086 - DNA, 25 bp, Probe Sequence
gaaccttcacgttgtctaccttcat

SEQ ID NO: 112087 - DNA, 25 bp, Probe Sequence
aagaaccttcacgttgtctaccttc

SEQ ID NO: 112088 - DNA, 25 bp, Probe Sequence
ttcacgttgtctaccttcataacaa

SEQ ID NO: 112089 - DNA, 25 bp, Probe Sequence
agaaccttcacgttgtctaccttca

SEQ ID NO: 112090 - DNA, 25 bp, Probe Sequence
gaagaaccttcacgttgtctacctt

SEQ ID NO: 112091 - DNA, 25 bp, Probe Sequence
gttctgatttgggtcttcctccttc

SEQ ID NO: 112092 - DNA, 25 bp, Probe Sequence
tgttctgatttgggtcttcctcctt

SEQ ID NO: 112093 - DNA, 25 bp, Probe Sequence
cagtgttctgatttgggtcttcctc

SEQ ID NO: 112094 - DNA, 25 bp, Probe Sequence
ttctgatttgggtcttcctccttcc

SEQ ID NO: 112095 - DNA, 25 bp, Probe Sequence
gtgttctgatttgggtcttcctcct

SEQ ID NO: 112096 - DNA, 25 bp, Probe Sequence
agtgttctgatttgggtcttcctcc

SEQ ID NO: 112097 - DNA, 25 bp, Probe Sequence
gtccagtgttctgatttgggtcttc

SEQ ID NO: 112098 - DNA, 25 bp, Probe Sequence
gatttgggtcttcctccttccctta

SEQ ID NO: 112099 - DNA, 25 bp, Probe Sequence
atttgggtcttcctccttcccttac

SEQ ID NO: 112100 - DNA, 25 bp, Probe Sequence
ccagtgttctgatttgggtcttcct

SEQ ID NO: 112101 - DNA, 25 bp, Probe Sequence
tccagtgttctgatttgggtcttcc

SEQ ID NO: 112102 - DNA, 25 bp, Probe Sequence
ggtccagtgttctgatttgggtctt

SEQ ID NO: 112103 - DNA, 25 bp, Probe Sequence
tgatttgggtcttcctccttccctt

SEQ ID NO: 112104 - DNA, 25 bp, Probe Sequence
ggtccagtgttctgatttggaactg

SEQ ID NO: 112105 - DNA, 25 bp, Probe Sequence
gtggtccagtgttctgatttggaac

SEQ ID NO: 112106 - DNA, 25 bp, Probe Sequence
tggtccagtgttctgatttggaact

SEQ ID NO: 112107 - DNA, 25 bp, Probe Sequence
agtggtccagtgttctgatttggaa

SEQ ID NO: 112108 - DNA, 25 bp, Probe Sequence
ttctgatttggaactgggcaccaat

SEQ ID NO: 112109 - DNA, 25 bp, Probe Sequence
gagtggtccagtgttctgatttgga

SEQ ID NO: 112110 - DNA, 25 bp, Probe Sequence
ccagttatggatgctatgtgatcaa

SEQ ID NO: 112111 - DNA, 25 bp, Probe Sequence
cagttatggatgctatgtgatcaaa

SEQ ID NO: 112112 - DNA, 25 bp, Probe Sequence
gcccagttatggatgctatgtgatc

SEQ ID NO: 112113 - DNA, 25 bp, Probe Sequence
tacattttgggttaccgagagcttt

SEQ ID NO: 112114 - DNA, 25 bp, Probe Sequence
cattttgggttaccgagagcttttg

SEQ ID NO: 112115 - DNA, 25 bp, Probe Sequence
cccagttatggatgctatgtgatca

SEQ ID NO: 112116 - DNA, 25 bp, Probe Sequence
gtacattttgggttaccgagagctt

SEQ ID NO: 112117 - DNA, 25 bp, Probe Sequence
acattttgggttaccgagagctttt

SEQ ID NO: 112118 - DNA, 25 bp, Probe Sequence
cagtacattttgggttaccgagagc

SEQ ID NO: 112119 - DNA, 25 bp, Probe Sequence
gcagtacattttgggttaccgagag

SEQ ID NO: 112120 - DNA, 25 bp, Probe Sequence
agttatggatgctatgtgatcaaaa

SEQ ID NO: 112121 - DNA, 25 bp, Probe Sequence
cgcccagttatggatgctatgtgat

SEQ ID NO: 112122 - DNA, 25 bp, Probe Sequence
agtacattttgggttaccgagagct

SEQ ID NO: 112123 - DNA, 25 bp, Probe Sequence
aaggcagtacattttgggttaccga

SEQ ID NO: 112124 - DNA, 25 bp, Probe Sequence
attttgggttaccgagagcttttgc

SEQ ID NO: 112125 - DNA, 25 bp, Probe Sequence
ggcagtacattttgggttaccgaga

SEQ ID NO: 112126 - DNA, 25 bp, Probe Sequence
aggcagtacattttgggttaccgag

SEQ ID NO: 112127 - DNA, 25 bp, Probe Sequence
agatcacaaggtcaagatatcaaga

SEQ ID NO: 112128 - DNA, 25 bp, Probe Sequence
cagatcacaaggtcaagatatcaag

SEQ ID NO: 112129 - DNA, 25 bp, Probe Sequence
gcagatcacaaggtcaagatatcaa

SEQ ID NO: 112130 - DNA, 25 bp, Probe Sequence
gatcacaaggtcaagatatcaagac

SEQ ID NO: 112131 - DNA, 25 bp, Probe Sequence
ggcagatcacaaggtcaagatatca

SEQ ID NO: 112132 - DNA, 25 bp, Probe Sequence
acaaacaaatacacccctcattagt

SEQ ID NO: 112133 - DNA, 25 bp, Probe Sequence
aaaacaaacaaatacacccctcatt

SEQ ID NO: 112134 - DNA, 25 bp, Probe Sequence
aaacaaaacaaacaaatacacccct

SEQ ID NO: 112135 - DNA, 25 bp, Probe Sequence
caaaacaaacaaatacacccctcat

SEQ ID NO: 112136 - DNA, 25 bp, Probe Sequence
aaaacaaaacaaacaaatacacccc

SEQ ID NO: 112137 - DNA, 25 bp, Probe Sequence
aacaaacaaatacacccctcattag

SEQ ID NO: 112138 - DNA, 25 bp, Probe Sequence
aacaaaacaaacaaatacacccctc

SEQ ID NO: 112139 - DNA, 25 bp, Probe Sequence
accccatctctactaaacatacaaa

SEQ ID NO: 112140 - DNA, 25 bp, Probe Sequence
aaccccatctctactaaacatacaa

SEQ ID NO: 112141 - DNA, 25 bp, Probe Sequence
aaaccccatctctactaaacataca

SEQ ID NO: 112142 - DNA, 25 bp, Probe Sequence
cattagttaaggataaagatgaggg

SEQ ID NO: 112143 - DNA, 25 bp, Probe Sequence
aaacaaacaaatacacccctcatta

SEQ ID NO: 112144 - DNA, 25 bp, Probe Sequence
tgaaaccccatctctactaaacata

SEQ ID NO: 112145 - DNA, 25 bp, Probe Sequence
caaacaaatacacccctcattagtt

SEQ ID NO: 112146 - DNA, 25 bp, Probe Sequence
gaaaccccatctctactaaacatac

SEQ ID NO: 112147 - DNA, 25 bp, Probe Sequence
acaaaacaaacaaatacacccctca

SEQ ID NO: 112148 - DNA, 25 bp, Probe Sequence
acaaatacacccctcattagttaag

SEQ ID NO: 112149 - DNA, 25 bp, Probe Sequence
gtcaagatatcaagaccatcctggc

SEQ ID NO: 112150 - DNA, 25 bp, Probe Sequence
aaacaaatacacccctcattagtta

SEQ ID NO: 112151 - DNA, 25 bp, Probe Sequence
agcaaatacttccctggacaagaaa

SEQ ID NO: 112152 - DNA, 25 bp, Probe Sequence
gagcaaatacttccctggacaagaa

SEQ ID NO: 112153 - DNA, 25 bp, Probe Sequence
aagagcaaatacttccctggacaag

SEQ ID NO: 112154 - DNA, 25 bp, Probe Sequence
agagcaaatacttccctggacaaga

SEQ ID NO: 112155 - DNA, 25 bp, Probe Sequence
gaagagcaaatacttccctggacaa

SEQ ID NO: 112156 - DNA, 25 bp, Probe Sequence
ctgaagagcaaatacttccctggac

SEQ ID NO: 112157 - DNA, 25 bp, Probe Sequence
tgaagagcaaatacttccctggaca

SEQ ID NO: 112158 - DNA, 25 bp, Probe Sequence
cctgaagagcaaatacttccctgga

SEQ ID NO: 112159 - DNA, 25 bp, Probe Sequence
ccctgaagagcaaatacttccctgg

SEQ ID NO: 112160 - DNA, 25 bp, Probe Sequence
ttatagaccatgctaatgctagacc

SEQ ID NO: 112161 - DNA, 25 bp, Probe Sequence
tatagaccatgctaatgctagacca

SEQ ID NO: 112162 - DNA, 25 bp, Probe Sequence
ggtacataatcactgaggagctatt

SEQ ID NO: 112163 - DNA, 25 bp, Probe Sequence
tggtacataatcactgaggagctat

SEQ ID NO: 112164 - DNA, 25 bp, Probe Sequence
accatgctaatgctagaccagtatt

SEQ ID NO: 112165 - DNA, 25 bp, Probe Sequence
atagaccatgctaatgctagaccag

SEQ ID NO: 112166 - DNA, 25 bp, Probe Sequence
ctggtacataatcactgaggagcta

SEQ ID NO: 112167 - DNA, 25 bp, Probe Sequence
tagctggtacataatcactgaggag

SEQ ID NO: 112168 - DNA, 25 bp, Probe Sequence
gaccatgctaatgctagaccagtat

SEQ ID NO: 112169 - DNA, 25 bp, Probe Sequence
gtagctggtacataatcactgagga

SEQ ID NO: 112170 - DNA, 25 bp, Probe Sequence
agtatttaagggctaatctcacacc

SEQ ID NO: 112171 - DNA, 25 bp, Probe Sequence
ccagtatttaagggctaatctcaca

SEQ ID NO: 112172 - DNA, 25 bp, Probe Sequence
accagtatttaagggctaatctcac

SEQ ID NO: 112173 - DNA, 25 bp, Probe Sequence
gaccagtatttaagggctaatctca

SEQ ID NO: 112174 - DNA, 25 bp, Probe Sequence
tagtagctggtacataatcactgag

SEQ ID NO: 112175 - DNA, 25 bp, Probe Sequence
ctagtagctggtacataatcactga

SEQ ID NO: 112176 - DNA, 25 bp, Probe Sequence
cagtatttaagggctaatctcacac

SEQ ID NO: 112177 - DNA, 25 bp, Probe Sequence
taatctcacacctccttagctgtaa

SEQ ID NO: 112178 - DNA, 25 bp, Probe Sequence
agaccagtatttaagggctaatctc

SEQ ID NO: 112179 - DNA, 25 bp, Probe Sequence
acattgtctagcattgatttggttc

SEQ ID NO: 112180 - DNA, 25 bp, Probe Sequence
gctagaccagtatttaagggctaat

SEQ ID NO: 112181 - DNA, 25 bp, Probe Sequence
taatgctagaccagtatttaagggc

SEQ ID NO: 112182 - DNA, 25 bp, Probe Sequence
agtagctggtacataatcactgagg

SEQ ID NO: 112183 - DNA, 25 bp, Probe Sequence
attgtctagcattgatttggttcct

SEQ ID NO: 112184 - DNA, 25 bp, Probe Sequence
aatacattcaggcactcattcatct

SEQ ID NO: 112185 - DNA, 25 bp, Probe Sequence
tacattcaggcactcattcatctat

SEQ ID NO: 112186 - DNA, 25 bp, Probe Sequence
atacattcaggcactcattcatcta

SEQ ID NO: 112187 - DNA, 25 bp, Probe Sequence
attcaggcactcattcatctatcac

SEQ ID NO: 112188 - DNA, 25 bp, Probe Sequence
cattcaggcactcattcatctatca

SEQ ID NO: 112189 - DNA, 25 bp, Probe Sequence
acattcaggcactcattcatctatc

SEQ ID NO: 112190 - DNA, 25 bp, Probe Sequence
ttcaggcactcattcatctatcact

SEQ ID NO: 112191 - DNA, 25 bp, Probe Sequence
agtgtgtgtattaattagtgtgcct

SEQ ID NO: 112192 - DNA, 25 bp, Probe Sequence
tgtattaattagtgtgccttctgga

SEQ ID NO: 112193 - DNA, 25 bp, Probe Sequence
gtgtattaattagtgtgccttctgg

SEQ ID NO: 112194 - DNA, 25 bp, Probe Sequence
gtgtgtgtattaattagtgtgcctt

SEQ ID NO: 112195 - DNA, 25 bp, Probe Sequence
aagtgtgtgtattaattagtgtgcc

SEQ ID NO: 112196 - DNA, 25 bp, Probe Sequence
gtattaattagtgtgccttctggac

SEQ ID NO: 112197 - DNA, 25 bp, Probe Sequence
tgtgtgtattaattagtgtgccttc

SEQ ID NO: 112198 - DNA, 25 bp, Probe Sequence
agacagaattgacataactcatgga

SEQ ID NO: 112199 - DNA, 25 bp, Probe Sequence
tgtgtattaattagtgtgccttctg

SEQ ID NO: 112200 - DNA, 25 bp, Probe Sequence
gtgtgtattaattagtgtgccttct

SEQ ID NO: 112201 - DNA, 25 bp, Probe Sequence
aagaagacagaattgacataactca

SEQ ID NO: 112202 - DNA, 25 bp, Probe Sequence
aagacagaattgacataactcatgg

SEQ ID NO: 112203 - DNA, 25 bp, Probe Sequence
cattacctcctctggatgttacttc

SEQ ID NO: 112204 - DNA, 25 bp, Probe Sequence
gacagaattgacataactcatggat

SEQ ID NO: 112205 - DNA, 25 bp, Probe Sequence
agaagacagaattgacataactcat

SEQ ID NO: 112206 - DNA, 25 bp, Probe Sequence
acagaattgacataactcatggatt

SEQ ID NO: 112207 - DNA, 25 bp, Probe Sequence
tattaattagtgtgccttctggaca

SEQ ID NO: 112208 - DNA, 25 bp, Probe Sequence
gtgagcagacagtagtagtgataat

SEQ ID NO: 112209 - DNA, 25 bp, Probe Sequence
tgctcttcgttaatcttattcctga

SEQ ID NO: 112210 - DNA, 25 bp, Probe Sequence
ttgctcttcgttaatcttattcctg

SEQ ID NO: 112211 - DNA, 25 bp, Probe Sequence
ttactgcttgtgtccttattgttgg

SEQ ID NO: 112212 - DNA, 25 bp, Probe Sequence
gctcttcgttaatcttattcctgat

SEQ ID NO: 112213 - DNA, 25 bp, Probe Sequence
tgagcagacagtagtagtgataata

SEQ ID NO: 112214 - DNA, 25 bp, Probe Sequence
gatcatccatacagaaccaacaatt

SEQ ID NO: 112215 - DNA, 25 bp, Probe Sequence
aggtaacataatgacagtggtgtaa

SEQ ID NO: 112216 - DNA, 25 bp, Probe Sequence
ataggtaacataatgacagtggtgt

SEQ ID NO: 112217 - DNA, 25 bp, Probe Sequence
tgtgagcagacagtagtagtgataa

SEQ ID NO: 112218 - DNA, 25 bp, Probe Sequence
ttgtgagcagacagtagtagtgata

SEQ ID NO: 112219 - DNA, 25 bp, Probe Sequence
catgaagtggactcttagaaggatt

SEQ ID NO: 112220 - DNA, 25 bp, Probe Sequence
tataggtaacataatgacagtggtg

SEQ ID NO: 112221 - DNA, 25 bp, Probe Sequence
taggtaacataatgacagtggtgta

SEQ ID NO: 112222 - DNA, 25 bp, Probe Sequence
gagcagacagtagtagtgataataa

SEQ ID NO: 112223 - DNA, 25 bp, Probe Sequence
tgttacaatgtatgttggatgtctt

SEQ ID NO: 112224 - DNA, 25 bp, Probe Sequence
tcttcgttaatcttattcctgatga

SEQ ID NO: 112225 - DNA, 25 bp, Probe Sequence
ctcttcgttaatcttattcctgatg

SEQ ID NO: 112226 - DNA, 25 bp, Probe Sequence
ttgttacaatgtatgttggatgtct

SEQ ID NO: 112227 - DNA, 25 bp, Probe Sequence
tttactgcttgtgtccttattgttg

SEQ ID NO: 112228 - DNA, 25 bp, Probe Sequence
agcaggagaagactttaatcagaat

SEQ ID NO: 112229 - DNA, 25 bp, Probe Sequence
gagcaggagaagactttaatcagaa

SEQ ID NO: 112230 - DNA, 25 bp, Probe Sequence
aaacagagcaggagaagactttaat

SEQ ID NO: 112231 - DNA, 25 bp, Probe Sequence
aacagagcaggagaagactttaatc

SEQ ID NO: 112232 - DNA, 25 bp, Probe Sequence
gaaagctcttcactgactttgttaa

SEQ ID NO: 112233 - DNA, 25 bp, Probe Sequence
agaaagctcttcactgactttgtta

SEQ ID NO: 112234 - DNA, 25 bp, Probe Sequence
aaagctcttcactgactttgttaat

SEQ ID NO: 112235 - DNA, 25 bp, Probe Sequence
taagaaagctcttcactgactttgt

SEQ ID NO: 112236 - DNA, 25 bp, Probe Sequence
ttaagaaagctcttcactgactttg

SEQ ID NO: 112237 - DNA, 25 bp, Probe Sequence
aagaaagctcttcactgactttgtt

SEQ ID NO: 112238 - DNA, 25 bp, Probe Sequence
tttaagaaagctcttcactgacttt

SEQ ID NO: 112239 - DNA, 25 bp, Probe Sequence
atttaagaaagctcttcactgactt

SEQ ID NO: 112240 - DNA, 25 bp, Probe Sequence
gtatttaagaaagctcttcactgac

SEQ ID NO: 112241 - DNA, 25 bp, Probe Sequence
tatttaagaaagctcttcactgact

SEQ ID NO: 112242 - DNA, 25 bp, Probe Sequence
agtatttaagaaagctcttcactga

SEQ ID NO: 112243 - DNA, 25 bp, Probe Sequence
tcagtatttaagaaagctcttcact

SEQ ID NO: 112244 - DNA, 25 bp, Probe Sequence
atcagtatttaagaaagctcttcac

SEQ ID NO: 112245 - DNA, 25 bp, Probe Sequence
aatcagtatttaagaaagctcttca

SEQ ID NO: 112246 - DNA, 25 bp, Probe Sequence
cagtatttaagaaagctcttcactg

SEQ ID NO: 112247 - DNA, 25 bp, Probe Sequence
acagaaaatcagtatttaagaaagc

SEQ ID NO: 112248 - DNA, 25 bp, Probe Sequence
aaatcagtatttaagaaagctcttc

SEQ ID NO: 112249 - DNA, 25 bp, Probe Sequence
gctacagaaaatcagtatttaagaa

SEQ ID NO: 112250 - DNA, 25 bp, Probe Sequence
cagaaaatcagtatttaagaaagct

SEQ ID NO: 112251 - DNA, 25 bp, Probe Sequence
gaaaatcagtatttaagaaagctct

SEQ ID NO: 112252 - DNA, 25 bp, Probe Sequence
agaaaatcagtatttaagaaagctc

SEQ ID NO: 112253 - DNA, 25 bp, Probe Sequence
aaaatcagtatttaagaaagctctt

SEQ ID NO: 112254 - DNA, 25 bp, Probe Sequence
tgtgtatgtatttctgctgagtgat

SEQ ID NO: 112255 - DNA, 25 bp, Probe Sequence
atgtgtatgtatttctgctgagtga

SEQ ID NO: 112256 - DNA, 25 bp, Probe Sequence
gatgtgtatgtatttctgctgagtg

SEQ ID NO: 112257 - DNA, 25 bp, Probe Sequence
ctttgtttgtgagagatgtgtatgt

SEQ ID NO: 112258 - DNA, 25 bp, Probe Sequence
gctttgtttgtgagagatgtgtatg

SEQ ID NO: 112259 - DNA, 25 bp, Probe Sequence
tgctttgtttgtgagagatgtgtat

SEQ ID NO: 112260 - DNA, 25 bp, Probe Sequence
ttgctttgtttgtgagagatgtgta

SEQ ID NO: 112261 - DNA, 25 bp, Probe Sequence
atcatagacattaaggaaagcggtg

SEQ ID NO: 112262 - DNA, 25 bp, Probe Sequence
agatgtgtatgtatttctgctgagt

SEQ ID NO: 112263 - DNA, 25 bp, Probe Sequence
gtgagagatgtgtatgtatttctgc

SEQ ID NO: 112264 - DNA, 25 bp, Probe Sequence
agagatgtgtatgtatttctgctga

SEQ ID NO: 112265 - DNA, 25 bp, Probe Sequence
tgagagatgtgtatgtatttctgct

SEQ ID NO: 112266 - DNA, 25 bp, Probe Sequence
gagatgtgtatgtatttctgctgag

SEQ ID NO: 112267 - DNA, 25 bp, Probe Sequence
gagagatgtgtatgtatttctgctg

SEQ ID NO: 112268 - DNA, 25 bp, Probe Sequence
gtgtatgtatttctgctgagtgata

SEQ ID NO: 112269 - DNA, 25 bp, Probe Sequence
tttgtttgtgagagatgtgtatgta

SEQ ID NO: 112270 - DNA, 25 bp, Probe Sequence
gatcatagacattaaggaaagcggt

SEQ ID NO: 112271 - DNA, 25 bp, Probe Sequence
tgtttgtgagagatgtgtatgtatt

SEQ ID NO: 112272 - DNA, 25 bp, Probe Sequence
ttgtttgtgagagatgtgtatgtat

SEQ ID NO: 112273 - DNA, 25 bp, Probe Sequence
tttgctttgtttgtgagagatgtgt

SEQ ID NO: 112274 - DNA, 25 bp, Probe Sequence
atagacattaaggaaagcggtgtag

SEQ ID NO: 112275 - DNA, 25 bp, Probe Sequence
tgtgagagatgtgtatgtatttctg

SEQ ID NO: 112276 - DNA, 25 bp, Probe Sequence
catagacattaaggaaagcggtgta

SEQ ID NO: 112277 - DNA, 25 bp, Probe Sequence
cagtgttcagatcatagattaatgg

SEQ ID NO: 112278 - DNA, 25 bp, Probe Sequence
ttgtggtggcaaatgtttggtagaa

SEQ ID NO: 112279 - DNA, 25 bp, Probe Sequence
gtggtggcaaatgtttggtagaact

SEQ ID NO: 112280 - DNA, 25 bp, Probe Sequence
tgtggtggcaaatgtttggtagaac

SEQ ID NO: 112281 - DNA, 25 bp, Probe Sequence
atacttgtattttgtggtggcaaat

SEQ ID NO: 112282 - DNA, 25 bp, Probe Sequence
tacttgtattttgtggtggcaaatg

SEQ ID NO: 112283 - DNA, 25 bp, Probe Sequence
ttgtattttgtggtggcaaatgttt

SEQ ID NO: 112284 - DNA, 25 bp, Probe Sequence
tttgtggtggcaaatgtttggtaga

SEQ ID NO: 112285 - DNA, 25 bp, Probe Sequence
cttgtattttgtggtggcaaatgtt

SEQ ID NO: 112286 - DNA, 25 bp, Probe Sequence
aatacttgtattttgtggtggcaaa

SEQ ID NO: 112287 - DNA, 25 bp, Probe Sequence
tgtattttgtggtggcaaatgtttg

SEQ ID NO: 112288 - DNA, 25 bp, Probe Sequence
gtattttgtggtggcaaatgtttgg

SEQ ID NO: 112289 - DNA, 25 bp, Probe Sequence
acttgtattttgtggtggcaaatgt

SEQ ID NO: 112290 - DNA, 25 bp, Probe Sequence
aaatacttgtattttgtggtggcaa

SEQ ID NO: 112291 - DNA, 25 bp, Probe Sequence
attttgtggtggcaaatgtttggta

SEQ ID NO: 112292 - DNA, 25 bp, Probe Sequence
tattttgtggtggcaaatgtttggt

SEQ ID NO: 112293 - DNA, 25 bp, Probe Sequence
ttttgtggtggcaaatgtttggtag

SEQ ID NO: 112294 - DNA, 25 bp, Probe Sequence
aaaatacttgtattttgtggtggca

SEQ ID NO: 112295 - DNA, 25 bp, Probe Sequence
ggctggagaagaaagagaaatgatg

SEQ ID NO: 112296 - DNA, 25 bp, Probe Sequence
gctggagaagaaagagaaatgatgc

SEQ ID NO: 112297 - DNA, 25 bp, Probe Sequence
gggctggagaagaaagagaaatgat

SEQ ID NO: 112298 - DNA, 25 bp, Probe Sequence
ctctgtttccttctccctttcttgg

SEQ ID NO: 112299 - DNA, 25 bp, Probe Sequence
cctctgtttccttctccctttcttg

SEQ ID NO: 112300 - DNA, 25 bp, Probe Sequence
tggagaagaaagagaaatgatgcag

SEQ ID NO: 112301 - DNA, 25 bp, Probe Sequence
ctggagaagaaagagaaatgatgca

SEQ ID NO: 112302 - DNA, 25 bp, Probe Sequence
gagaagaaagagaaatgatgcagct

SEQ ID NO: 112303 - DNA, 25 bp, Probe Sequence
ttttgtattgtggactgattttgcc

SEQ ID NO: 112304 - DNA, 25 bp, Probe Sequence
attttgtattgtggactgattttgc

SEQ ID NO: 112305 - DNA, 25 bp, Probe Sequence
ggagaagaaagagaaatgatgcagc

SEQ ID NO: 112306 - DNA, 25 bp, Probe Sequence
tttgtattgtggactgattttgcct

SEQ ID NO: 112307 - DNA, 25 bp, Probe Sequence
gacagaatccaaagagggaacagag

SEQ ID NO: 112308 - DNA, 25 bp, Probe Sequence
ttgtattgtggactgattttgcctc

SEQ ID NO: 112309 - DNA, 25 bp, Probe Sequence
tggactgattttgcctcacattaaa

SEQ ID NO: 112310 - DNA, 25 bp, Probe Sequence
ggactgattttgcctcacattaaaa

SEQ ID NO: 112311 - DNA, 25 bp, Probe Sequence
gtgacagaatccaaagagggaacag

SEQ ID NO: 112312 - DNA, 25 bp, Probe Sequence
cagtgacagaatccaaagagggaac

SEQ ID NO: 112313 - DNA, 25 bp, Probe Sequence
tgacagaatccaaagagggaacaga

SEQ ID NO: 112314 - DNA, 25 bp, Probe Sequence
gattttgtattgtggactgattttg

SEQ ID NO: 112315 - DNA, 25 bp, Probe Sequence
agattttgtattgtggactgatttt

SEQ ID NO: 112316 - DNA, 25 bp, Probe Sequence
agtgacagaatccaaagagggaaca

SEQ ID NO: 112317 - DNA, 25 bp, Probe Sequence
gtggactgattttgcctcacattaa

SEQ ID NO: 112318 - DNA, 25 bp, Probe Sequence
gcctctgtttccttctccctttctt

SEQ ID NO: 112319 - DNA, 25 bp, Probe Sequence
ggttgctgaatgaagaacagaatct

SEQ ID NO: 112320 - DNA, 25 bp, Probe Sequence
tggttgctgaatgaagaacagaatc

SEQ ID NO: 112321 - DNA, 25 bp, Probe Sequence
aaggatgagactcaagaaccaagat

SEQ ID NO: 112322 - DNA, 25 bp, Probe Sequence
gtggttgctgaatgaagaacagaat

SEQ ID NO: 112323 - DNA, 25 bp, Probe Sequence
tgtgttcattaagggctcaataaat

SEQ ID NO: 112324 - DNA, 25 bp, Probe Sequence
aggatgagactcaagaaccaagatg

SEQ ID NO: 112325 - DNA, 25 bp, Probe Sequence
atgtgttcattaagggctcaataaa

SEQ ID NO: 112326 - DNA, 25 bp, Probe Sequence
ctgaatgaagaacagaatcttggtg

SEQ ID NO: 112327 - DNA, 25 bp, Probe Sequence
ttgctgaatgaagaacagaatcttg

SEQ ID NO: 112328 - DNA, 25 bp, Probe Sequence
gttgctgaatgaagaacagaatctt

SEQ ID NO: 112329 - DNA, 25 bp, Probe Sequence
gtcattccagcattcctctcagaag

SEQ ID NO: 112330 - DNA, 25 bp, Probe Sequence
aatgaagaacagaatcttggtgctt

SEQ ID NO: 112331 - DNA, 25 bp, Probe Sequence
tcttatgtgttcattaagggctcaa

SEQ ID NO: 112332 - DNA, 25 bp, Probe Sequence
aactcttatgtgttcattaagggct

SEQ ID NO: 112333 - DNA, 25 bp, Probe Sequence
tatgtgttcattaagggctcaataa

SEQ ID NO: 112334 - DNA, 25 bp, Probe Sequence
ttatgtgttcattaagggctcaata

SEQ ID NO: 112335 - DNA, 25 bp, Probe Sequence
aaactcttatgtgttcattaagggc

SEQ ID NO: 112336 - DNA, 25 bp, Probe Sequence
gaatgaagaacagaatcttggtgct

SEQ ID NO: 112337 - DNA, 25 bp, Probe Sequence
gctgaatgaagaacagaatcttggt

SEQ ID NO: 112338 - DNA, 25 bp, Probe Sequence
tgctgaatgaagaacagaatcttgg

SEQ ID NO: 112339 - DNA, 25 bp, Probe Sequence
ctcttatgtgttcattaagggctca

SEQ ID NO: 112340 - DNA, 25 bp, Probe Sequence
actcttatgtgttcattaagggctc

SEQ ID NO: 112341 - DNA, 25 bp, Probe Sequence
cttatgtgttcattaagggctcaat

SEQ ID NO: 112342 - DNA, 25 bp, Probe Sequence
gaagcaacttaaagtgaaggtcaac

SEQ ID NO: 112343 - DNA, 25 bp, Probe Sequence
aaggcatgtggaacttctttatttc

SEQ ID NO: 112344 - DNA, 25 bp, Probe Sequence
ggcatgtggaacttctttatttcaa

SEQ ID NO: 112345 - DNA, 25 bp, Probe Sequence
aggcatgtggaacttctttatttca

SEQ ID NO: 112346 - DNA, 25 bp, Probe Sequence
gcatgtggaacttctttatttcaaa

SEQ ID NO: 112347 - DNA, 25 bp, Probe Sequence
agaaggaagcaagaaagacaggttc

SEQ ID NO: 112348 - DNA, 25 bp, Probe Sequence
cagaaggaagcaagaaagacaggtt

SEQ ID NO: 112349 - DNA, 25 bp, Probe Sequence
caaaggcatgtggaacttctttatt

SEQ ID NO: 112350 - DNA, 25 bp, Probe Sequence
aaaggcatgtggaacttctttattt

SEQ ID NO: 112351 - DNA, 25 bp, Probe Sequence
acacaaaataaagacacacaaggac

SEQ ID NO: 112352 - DNA, 25 bp, Probe Sequence
cacacaaaataaagacacacaagga

SEQ ID NO: 112353 - DNA, 25 bp, Probe Sequence
acacacacaaaataaagacacacaa

SEQ ID NO: 112354 - DNA, 25 bp, Probe Sequence
acacacaaaataaagacacacaagg

SEQ ID NO: 112355 - DNA, 25 bp, Probe Sequence
cacacacaaaataaagacacacaag

SEQ ID NO: 112356 - DNA, 25 bp, Probe Sequence
cacacacacaaaataaagacacaca

SEQ ID NO: 112357 - DNA, 25 bp, Probe Sequence
acacacacacaaaataaagacacac

SEQ ID NO: 112358 - DNA, 25 bp, Probe Sequence
cacacacacacaaaataaagacaca

SEQ ID NO: 112359 - DNA, 25 bp, Probe Sequence
acacacacacacaaaataaagacac

SEQ ID NO: 112360 - DNA, 25 bp, Probe Sequence
cacacacacacacaaaataaagaca

SEQ ID NO: 112361 - DNA, 25 bp, Probe Sequence
acacacacacacacaaaataaagac

SEQ ID NO: 112362 - DNA, 25 bp, Probe Sequence
cacacacacacacacaaaataaaga

SEQ ID NO: 112363 - DNA, 25 bp, Probe Sequence
acacacacacacacacaaaataaag

SEQ ID NO: 112364 - DNA, 25 bp, Probe Sequence
ttacgtgaatgtgatgttcatgctt

SEQ ID NO: 112365 - DNA, 25 bp, Probe Sequence
cacaaaataaagacacacaaggacg

SEQ ID NO: 112366 - DNA, 25 bp, Probe Sequence
cacacacacacacacacaaaataaa

SEQ ID NO: 112367 - DNA, 25 bp, Probe Sequence
cctacttctggctcttctatttggg

SEQ ID NO: 112368 - DNA, 25 bp, Probe Sequence
ccctacttctggctcttctatttgg

SEQ ID NO: 112369 - DNA, 25 bp, Probe Sequence
taacatccgaggaccacattctttg

SEQ ID NO: 112370 - DNA, 25 bp, Probe Sequence
attctttgtgctttccaaatcatca

SEQ ID NO: 112371 - DNA, 25 bp, Probe Sequence
acattctttgtgctttccaaatcat

SEQ ID NO: 112372 - DNA, 25 bp, Probe Sequence
cattctttgtgctttccaaatcatc

SEQ ID NO: 112373 - DNA, 25 bp, Probe Sequence
ttctttgtgctttccaaatcatcac

SEQ ID NO: 112374 - DNA, 25 bp, Probe Sequence
ctttgtgctttccaaatcatcacct

SEQ ID NO: 112375 - DNA, 25 bp, Probe Sequence
tctttgtgctttccaaatcatcacc

SEQ ID NO: 112376 - DNA, 25 bp, Probe Sequence
ctacttctggctcttctatttgggg

SEQ ID NO: 112377 - DNA, 25 bp, Probe Sequence
cccctacttctggctcttctatttg

SEQ ID NO: 112378 - DNA, 25 bp, Probe Sequence
tttgtgctttccaaatcatcacctg

SEQ ID NO: 112379 - DNA, 25 bp, Probe Sequence
ctgaggaagaggacacagtaaaagt

SEQ ID NO: 112380 - DNA, 25 bp, Probe Sequence
tgaggaagaggacacagtaaaagtg

SEQ ID NO: 112381 - DNA, 25 bp, Probe Sequence
cctgaggaagaggacacagtaaaag

SEQ ID NO: 112382 - DNA, 25 bp, Probe Sequence
gaggaagaggacacagtaaaagtgg

SEQ ID NO: 112383 - DNA, 25 bp, Probe Sequence
aacatccgaggaccacattctttgt

SEQ ID NO: 112384 - DNA, 25 bp, Probe Sequence
ttgtgctttccaaatcatcacctgc

SEQ ID NO: 112385 - DNA, 25 bp, Probe Sequence
gaagaggacacagtaaaagtggtgg

SEQ ID NO: 112386 - DNA, 25 bp, Probe Sequence
ggaagaggacacagtaaaagtggtg

SEQ ID NO: 112387 - DNA, 25 bp, Probe Sequence
aggaagaggacacagtaaaagtggt

SEQ ID NO: 112388 - DNA, 25 bp, Probe Sequence
cacattctttgtgctttccaaatca

SEQ ID NO: 112389 - DNA, 25 bp, Probe Sequence
ccacattctttgtgctttccaaatc

SEQ ID NO: 112390 - DNA, 25 bp, Probe Sequence
accacattctttgtgctttccaaat

SEQ ID NO: 112391 - DNA, 25 bp, Probe Sequence
catgtatctcttctatggcaacaag

SEQ ID NO: 112392 - DNA, 25 bp, Probe Sequence
gcatgtatctcttctatggcaacaa

SEQ ID NO: 112393 - DNA, 25 bp, Probe Sequence
gagttgctgaataagtttgtgtgta

SEQ ID NO: 112394 - DNA, 25 bp, Probe Sequence
gatgagttgctgaataagtttgtgt

SEQ ID NO: 112395 - DNA, 25 bp, Probe Sequence
atgagttgctgaataagtttgtgtg

SEQ ID NO: 112396 - DNA, 25 bp, Probe Sequence
agttgctgaataagtttgtgtgtaa

SEQ ID NO: 112397 - DNA, 25 bp, Probe Sequence
gttgctgaataagtttgtgtgtaag

SEQ ID NO: 112398 - DNA, 25 bp, Probe Sequence
tgctgaataagtttgtgtgtaagaa

SEQ ID NO: 112399 - DNA, 25 bp, Probe Sequence
ttgctgaataagtttgtgtgtaaga

SEQ ID NO: 112400 - DNA, 25 bp, Probe Sequence
cgatgagttgctgaataagtttgtg

SEQ ID NO: 112401 - DNA, 25 bp, Probe Sequence
tgagttgctgaataagtttgtgtgt

SEQ ID NO: 112402 - DNA, 25 bp, Probe Sequence
gctgtgtattattgtgagcgaataa

SEQ ID NO: 112403 - DNA, 25 bp, Probe Sequence
tgtatctcttctatggcaacaagac

SEQ ID NO: 112404 - DNA, 25 bp, Probe Sequence
atgtatctcttctatggcaacaaga

SEQ ID NO: 112405 - DNA, 25 bp, Probe Sequence
gctgaataagtttgtgtgtaagaac

SEQ ID NO: 112406 - DNA, 25 bp, Probe Sequence
agtgaccatcaacaagttcttccag

SEQ ID NO: 112407 - DNA, 25 bp, Probe Sequence
tatctcttctatggcaacaagacct

SEQ ID NO: 112408 - DNA, 25 bp, Probe Sequence
gtatctcttctatggcaacaagacc

SEQ ID NO: 112409 - DNA, 25 bp, Probe Sequence
ccgatgagttgctgaataagtttgt

SEQ ID NO: 112410 - DNA, 25 bp, Probe Sequence
tattgtgagcgaataaacagagaga

SEQ ID NO: 112411 - DNA, 25 bp, Probe Sequence
ggctgtgtattattgtgagcgaata

SEQ ID NO: 112412 - DNA, 25 bp, Probe Sequence
ttcatctgctgctgtttacattctg

SEQ ID NO: 112413 - DNA, 25 bp, Probe Sequence
gttcatctgctgctgtttacattct

SEQ ID NO: 112414 - DNA, 25 bp, Probe Sequence
cagtgaccatcaacaagttcttcca

SEQ ID NO: 112415 - DNA, 25 bp, Probe Sequence
ctttatctgttgagcctttatgtgg

SEQ ID NO: 112416 - DNA, 25 bp, Probe Sequence
gcactttatctgttgagcctttatg

SEQ ID NO: 112417 - DNA, 25 bp, Probe Sequence
agcactttatctgttgagcctttat

SEQ ID NO: 112418 - DNA, 25 bp, Probe Sequence
actttatctgttgagcctttatgtg

SEQ ID NO: 112419 - DNA, 25 bp, Probe Sequence
cactttatctgttgagcctttatgt

SEQ ID NO: 112420 - DNA, 25 bp, Probe Sequence
cagcactttatctgttgagccttta

SEQ ID NO: 112421 - DNA, 25 bp, Probe Sequence
catctgtcaggcttagttctcccat

SEQ ID NO: 112422 - DNA, 25 bp, Probe Sequence
ccagcactttatctgttgagccttt

SEQ ID NO: 112423 - DNA, 25 bp, Probe Sequence
atctgtcaggcttagttctcccatg

SEQ ID NO: 112424 - DNA, 25 bp, Probe Sequence
cgtttccccaataaagccttttaaa

SEQ ID NO: 112425 - DNA, 25 bp, Probe Sequence
tacgtttccccaataaagcctttta

SEQ ID NO: 112426 - DNA, 25 bp, Probe Sequence
cacatctgtcaggcttagttctccc

SEQ ID NO: 112427 - DNA, 25 bp, Probe Sequence
ctacgtttccccaataaagcctttt

SEQ ID NO: 112428 - DNA, 25 bp, Probe Sequence
acgtttccccaataaagccttttaa

SEQ ID NO: 112429 - DNA, 25 bp, Probe Sequence
ctcaagaggcaccagcactttatct

SEQ ID NO: 112430 - DNA, 25 bp, Probe Sequence
tttatctgttgagcctttatgtggc

SEQ ID NO: 112431 - DNA, 25 bp, Probe Sequence
cactattacccggttttacagatga

SEQ ID NO: 112432 - DNA, 25 bp, Probe Sequence
tattacccggttttacagatgatgg

SEQ ID NO: 112433 - DNA, 25 bp, Probe Sequence
actattacccggttttacagatgat

SEQ ID NO: 112434 - DNA, 25 bp, Probe Sequence
accagcactttatctgttgagcctt

SEQ ID NO: 112435 - DNA, 25 bp, Probe Sequence
aagaggcaccagcactttatctgtt

SEQ ID NO: 112436 - DNA, 25 bp, Probe Sequence
ctattacccggttttacagatgatg

SEQ ID NO: 112437 - DNA, 25 bp, Probe Sequence
tctacgtttccccaataaagccttt

SEQ ID NO: 112438 - DNA, 25 bp, Probe Sequence
acatctgtcaggcttagttctccca

SEQ ID NO: 112439 - DNA, 25 bp, Probe Sequence
gatcttcttcttggacgagtacagg

SEQ ID NO: 112440 - DNA, 25 bp, Probe Sequence
atcttcttcttggacgagtacagga

SEQ ID NO: 112441 - DNA, 25 bp, Probe Sequence
tcttcttcttggacgagtacaggag

SEQ ID NO: 112442 - DNA, 25 bp, Probe Sequence
agatcttcttcttggacgagtacag

SEQ ID NO: 112443 - DNA, 25 bp, Probe Sequence
cttcttcttggacgagtacaggagc

SEQ ID NO: 112444 - DNA, 25 bp, Probe Sequence
cttcttggacgagtacaggagcatg

SEQ ID NO: 112445 - DNA, 25 bp, Probe Sequence
tcttcttggacgagtacaggagcat

SEQ ID NO: 112446 - DNA, 25 bp, Probe Sequence
gccacataaaggctcaacagataaa

SEQ ID NO: 112447 - DNA, 25 bp, Probe Sequence
tcatctgtaaaaccgggtaatagtg

SEQ ID NO: 112448 - DNA, 25 bp, Probe Sequence
ccatcatctgtaaaaccgggtaata

SEQ ID NO: 112449 - DNA, 25 bp, Probe Sequence
atcatctgtaaaaccgggtaatagt

SEQ ID NO: 112450 - DNA, 25 bp, Probe Sequence
catcatctgtaaaaccgggtaatag

SEQ ID NO: 112451 - DNA, 25 bp, Probe Sequence
tgccacataaaggctcaacagataa

SEQ ID NO: 112452 - DNA, 25 bp, Probe Sequence
catctgtaaaaccgggtaatagtgc

SEQ ID NO: 112453 - DNA, 25 bp, Probe Sequence
tccatcatctgtaaaaccgggtaat

SEQ ID NO: 112454 - DNA, 25 bp, Probe Sequence
atctgtaaaaccgggtaatagtgca

SEQ ID NO: 112455 - DNA, 25 bp, Probe Sequence
ctccatcatctgtaaaaccgggtaa

SEQ ID NO: 112456 - DNA, 25 bp, Probe Sequence
gtgccacataaaggctcaacagata

SEQ ID NO: 112457 - DNA, 25 bp, Probe Sequence
cttctgggcctccatcatctgtaaa

SEQ ID NO: 112458 - DNA, 25 bp, Probe Sequence
cctccatcatctgtaaaaccgggta

SEQ ID NO: 112459 - DNA, 25 bp, Probe Sequence
ttctgggcctccatcatctgtaaaa

SEQ ID NO: 112460 - DNA, 25 bp, Probe Sequence
cctgtaggggatgaagggagatcat

SEQ ID NO: 112461 - DNA, 25 bp, Probe Sequence
tctgggcctccatcatctgtaaaac

SEQ ID NO: 112462 - DNA, 25 bp, Probe Sequence
actggacacatactttgaatacctt

SEQ ID NO: 112463 - DNA, 25 bp, Probe Sequence
cactggacacatactttgaatacct

SEQ ID NO: 112464 - DNA, 25 bp, Probe Sequence
ctggacacatactttgaataccttt

SEQ ID NO: 112465 - DNA, 25 bp, Probe Sequence
aagcactggacacatactttgaata

SEQ ID NO: 112466 - DNA, 25 bp, Probe Sequence
agcactggacacatactttgaatac

SEQ ID NO: 112467 - DNA, 25 bp, Probe Sequence
gagttctgctggttaagtttgttaa

SEQ ID NO: 112468 - DNA, 25 bp, Probe Sequence
ggagttctgctggttaagtttgtta

SEQ ID NO: 112469 - DNA, 25 bp, Probe Sequence
tggacacatactttgaatacctttc

SEQ ID NO: 112470 - DNA, 25 bp, Probe Sequence
agttctgctggttaagtttgttaaa

SEQ ID NO: 112471 - DNA, 25 bp, Probe Sequence
gcactggacacatactttgaatacc

SEQ ID NO: 112472 - DNA, 25 bp, Probe Sequence
tgctgaaacacagtagtcttatgaa

SEQ ID NO: 112473 - DNA, 25 bp, Probe Sequence
ttgctgaaacacagtagtcttatga

SEQ ID NO: 112474 - DNA, 25 bp, Probe Sequence
tgacacaatagggactctatggaaa

SEQ ID NO: 112475 - DNA, 25 bp, Probe Sequence
taaacttagttgaaactgggaacct

SEQ ID NO: 112476 - DNA, 25 bp, Probe Sequence
tttgctgaaacacagtagtcttatg

SEQ ID NO: 112477 - DNA, 25 bp, Probe Sequence
gcatatttgttggttctctgattaa

SEQ ID NO: 112478 - DNA, 25 bp, Probe Sequence
gctgaaacacagtagtcttatgaaa

SEQ ID NO: 112479 - DNA, 25 bp, Probe Sequence
ctttgctgaaacacagtagtcttat

SEQ ID NO: 112480 - DNA, 25 bp, Probe Sequence
ttaaacttagttgaaactgggaacc

SEQ ID NO: 112481 - DNA, 25 bp, Probe Sequence
cctttgctgaaacacagtagtctta

SEQ ID NO: 112482 - DNA, 25 bp, Probe Sequence
aaacttagttgaaactgggaacctg

SEQ ID NO: 112483 - DNA, 25 bp, Probe Sequence
tgttaaacttagttgaaactgggaa

SEQ ID NO: 112484 - DNA, 25 bp, Probe Sequence
ttgttaaacttagttgaaactggga

SEQ ID NO: 112485 - DNA, 25 bp, Probe Sequence
gtgacacaatagggactctatggaa

SEQ ID NO: 112486 - DNA, 25 bp, Probe Sequence
aaatccctttcttgtaaacttacgg

SEQ ID NO: 112487 - DNA, 25 bp, Probe Sequence
tttcttgtaaacttacggacacctc

SEQ ID NO: 112488 - DNA, 25 bp, Probe Sequence
ctttcttgtaaacttacggacacct

SEQ ID NO: 112489 - DNA, 25 bp, Probe Sequence
aatccctttcttgtaaacttacgga

SEQ ID NO: 112490 - DNA, 25 bp, Probe Sequence
atccctttcttgtaaacttacggac

SEQ ID NO: 112491 - DNA, 25 bp, Probe Sequence
cctttcttgtaaacttacggacacc

SEQ ID NO: 112492 - DNA, 25 bp, Probe Sequence
ccctttcttgtaaacttacggacac

SEQ ID NO: 112493 - DNA, 25 bp, Probe Sequence
tccctttcttgtaaacttacggaca

SEQ ID NO: 112494 - DNA, 25 bp, Probe Sequence
atacacagagttatcagacattatt

SEQ ID NO: 112495 - DNA, 25 bp, Probe Sequence
aaaatccctttcttgtaaacttacg

SEQ ID NO: 112496 - DNA, 25 bp, Probe Sequence
ttgcactgaacaagaccaaatctct

SEQ ID NO: 112497 - DNA, 25 bp, Probe Sequence
gttgcactgaacaagaccaaatctc

SEQ ID NO: 112498 - DNA, 25 bp, Probe Sequence
acacagagttatcagacattattta

SEQ ID NO: 112499 - DNA, 25 bp, Probe Sequence
tacacagagttatcagacattattt

SEQ ID NO: 112500 - DNA, 25 bp, Probe Sequence
tgcactgaacaagaccaaatctctg

SEQ ID NO: 112501 - DNA, 25 bp, Probe Sequence
gcactgaacaagaccaaatctctgg

SEQ ID NO: 112502 - DNA, 25 bp, Probe Sequence
cgttgcactgaacaagaccaaatct

SEQ ID NO: 112503 - DNA, 25 bp, Probe Sequence
tttatatacacagagttatcagaca

SEQ ID NO: 112504 - DNA, 25 bp, Probe Sequence
ctgaacaagaccaaatctctggttg

SEQ ID NO: 112505 - DNA, 25 bp, Probe Sequence
gaacaagaccaaatctctggttgtg

SEQ ID NO: 112506 - DNA, 25 bp, Probe Sequence
actgaacaagaccaaatctctggtt

SEQ ID NO: 112507 - DNA, 25 bp, Probe Sequence
tgaacaagaccaaatctctggttgt

SEQ ID NO: 112508 - DNA, 25 bp, Probe Sequence
cactgaacaagaccaaatctctggt

SEQ ID NO: 112509 - DNA, 25 bp, Probe Sequence
aacaagaccaaatctctggttgtgc

SEQ ID NO: 112510 - DNA, 25 bp, Probe Sequence
ccaaatctctggttgtgcgcttaac

SEQ ID NO: 112511 - DNA, 25 bp, Probe Sequence
tagaagtctaaggagtagcaagtca

SEQ ID NO: 112512 - DNA, 25 bp, Probe Sequence
agaagtctaaggagtagcaagtcag

SEQ ID NO: 112513 - DNA, 25 bp, Probe Sequence
gaagtctaaggagtagcaagtcagt

SEQ ID NO: 112514 - DNA, 25 bp, Probe Sequence
aacctaactcgcattgatgtattaa

SEQ ID NO: 112515 - DNA, 25 bp, Probe Sequence
ttaacctaactcgcattgatgtatt

SEQ ID NO: 112516 - DNA, 25 bp, Probe Sequence
aagtctaaggagtagcaagtcagtg

SEQ ID NO: 112517 - DNA, 25 bp, Probe Sequence
gctgagtatagtaagtcctcttcca

SEQ ID NO: 112518 - DNA, 25 bp, Probe Sequence
ctgagtatagtaagtcctcttccaa

SEQ ID NO: 112519 - DNA, 25 bp, Probe Sequence
taacctaactcgcattgatgtatta

SEQ ID NO: 112520 - DNA, 25 bp, Probe Sequence
cgtaagagctgagtatagtaagtcc

SEQ ID NO: 112521 - DNA, 25 bp, Probe Sequence
gcgtaagagctgagtatagtaagtc

SEQ ID NO: 112522 - DNA, 25 bp, Probe Sequence
gagctattcttcactggtccttaac

SEQ ID NO: 112523 - DNA, 25 bp, Probe Sequence
ctattcttcactggtccttaacctt

SEQ ID NO: 112524 - DNA, 25 bp, Probe Sequence
tattcttcactggtccttaaccttg

SEQ ID NO: 112525 - DNA, 25 bp, Probe Sequence
gtaagagctgagtatagtaagtcct

SEQ ID NO: 112526 - DNA, 25 bp, Probe Sequence
ttagaagtctaaggagtagcaagtc

SEQ ID NO: 112527 - DNA, 25 bp, Probe Sequence
aagttagcaaggaaagtgtatgtca

SEQ ID NO: 112528 - DNA, 25 bp, Probe Sequence
tacatttgagaatacgctgaagagg

SEQ ID NO: 112529 - DNA, 25 bp, Probe Sequence
gagctgagtatagtaagtcctcttc

SEQ ID NO: 112530 - DNA, 25 bp, Probe Sequence
agctgagtatagtaagtcctcttcc

SEQ ID NO: 112531 - DNA, 25 bp, Probe Sequence
ctttaacctaactcgcattgatgta

SEQ ID NO: 112532 - DNA, 25 bp, Probe Sequence
atacatttgagaatacgctgaagag

SEQ ID NO: 112533 - DNA, 25 bp, Probe Sequence
attagaagtctaaggagtagcaagt

SEQ ID NO: 112534 - DNA, 25 bp, Probe Sequence
taagttagcaaggaaagtgtatgtc

SEQ ID NO: 112535 - DNA, 25 bp, Probe Sequence
cacacatcttcttggtcttgcataa

SEQ ID NO: 112536 - DNA, 25 bp, Probe Sequence
acacatcttcttggtcttgcataag

SEQ ID NO: 112537 - DNA, 25 bp, Probe Sequence
gattccacacatcttcttggtcttg

SEQ ID NO: 112538 - DNA, 25 bp, Probe Sequence
tgattccacacatcttcttggtctt

SEQ ID NO: 112539 - DNA, 25 bp, Probe Sequence
cacatcttcttggtcttgcataagg

SEQ ID NO: 112540 - DNA, 25 bp, Probe Sequence
cttgaatgtgactctgttgagacat

SEQ ID NO: 112541 - DNA, 25 bp, Probe Sequence
gcttgaatgtgactctgttgagaca

SEQ ID NO: 112542 - DNA, 25 bp, Probe Sequence
gtgattccacacatcttcttggtct

SEQ ID NO: 112543 - DNA, 25 bp, Probe Sequence
ttgaatgtgactctgttgagacatg

SEQ ID NO: 112544 - DNA, 25 bp, Probe Sequence
ggcttgaatgtgactctgttgagac

SEQ ID NO: 112545 - DNA, 25 bp, Probe Sequence
attccacacatcttcttggtcttgc

SEQ ID NO: 112546 - DNA, 25 bp, Probe Sequence
acatcttcttggtcttgcataaggc

SEQ ID NO: 112547 - DNA, 25 bp, Probe Sequence
tgaatgtgactctgttgagacatgg

SEQ ID NO: 112548 - DNA, 25 bp, Probe Sequence
ccacacatcttcttggtcttgcata

SEQ ID NO: 112549 - DNA, 25 bp, Probe Sequence
gaatgggtactgtctaggaggactg

SEQ ID NO: 112550 - DNA, 25 bp, Probe Sequence
caattctggcacttggctgtcattc

SEQ ID NO: 112551 - DNA, 25 bp, Probe Sequence
atcttcttggtcttgcataaggcag

SEQ ID NO: 112552 - DNA, 25 bp, Probe Sequence
gaatgtgactctgttgagacatggc

SEQ ID NO: 112553 - DNA, 25 bp, Probe Sequence
gagaagcggaatgggtactgtctag

SEQ ID NO: 112554 - DNA, 25 bp, Probe Sequence
catcttcttggtcttgcataaggca

SEQ ID NO: 112555 - DNA, 25 bp, Probe Sequence
cttcttggtcttgcataaggcagtt

SEQ ID NO: 112556 - DNA, 25 bp, Probe Sequence
ttcttggtcttgcataaggcagttc

SEQ ID NO: 112557 - DNA, 25 bp, Probe Sequence
ggaatgggtactgtctaggaggact

SEQ ID NO: 112558 - DNA, 25 bp, Probe Sequence
ggaggttcttttgagtcacacacaa

SEQ ID NO: 112559 - DNA, 25 bp, Probe Sequence
atgtcttattggaacaaccactgag

SEQ ID NO: 112560 - DNA, 25 bp, Probe Sequence
gatgtcttattggaacaaccactga

SEQ ID NO: 112561 - DNA, 25 bp, Probe Sequence
ctgatgtcttattggaacaaccact

SEQ ID NO: 112562 - DNA, 25 bp, Probe Sequence
tgatgtcttattggaacaaccactg

SEQ ID NO: 112563 - DNA, 25 bp, Probe Sequence
cctgatgtcttattggaacaaccac

SEQ ID NO: 112564 - DNA, 25 bp, Probe Sequence
aacctgagatgaggaagacttcaag

SEQ ID NO: 112565 - DNA, 25 bp, Probe Sequence
gatgggctaggcactttatatctgt

SEQ ID NO: 112566 - DNA, 25 bp, Probe Sequence
tgatgggctaggcactttatatctg

SEQ ID NO: 112567 - DNA, 25 bp, Probe Sequence
aatccctgatgtcttattggaacaa

SEQ ID NO: 112568 - DNA, 25 bp, Probe Sequence
gctaggcactttatatctgtgtgaa

SEQ ID NO: 112569 - DNA, 25 bp, Probe Sequence
agaatccctgatgtcttattggaac

SEQ ID NO: 112570 - DNA, 25 bp, Probe Sequence
cttattggaacaaccactgagctac

SEQ ID NO: 112571 - DNA, 25 bp, Probe Sequence
tcttattggaacaaccactgagcta

SEQ ID NO: 112572 - DNA, 25 bp, Probe Sequence
acaggttaataaacttatccaaggt

SEQ ID NO: 112573 - DNA, 25 bp, Probe Sequence
gaatccctgatgtcttattggaaca

SEQ ID NO: 112574 - DNA, 25 bp, Probe Sequence
ggcactttatatctgtgtgaataca

SEQ ID NO: 112575 - DNA, 25 bp, Probe Sequence
atccctgatgtcttattggaacaac

SEQ ID NO: 112576 - DNA, 25 bp, Probe Sequence
aggttctgcttgggataatgaagag

SEQ ID NO: 112577 - DNA, 25 bp, Probe Sequence
gaggttctgcttgggataatgaaga

SEQ ID NO: 112578 - DNA, 25 bp, Probe Sequence
agaggttctgcttgggataatgaag

SEQ ID NO: 112579 - DNA, 25 bp, Probe Sequence
aggcactttatatctgtgtgaatac

SEQ ID NO: 112580 - DNA, 25 bp, Probe Sequence
aggttaataaacttatccaaggtca

SEQ ID NO: 112581 - DNA, 25 bp, Probe Sequence
caggttaataaacttatccaaggtc

SEQ ID NO: 112582 - DNA, 25 bp, Probe Sequence
ctaggcactttatatctgtgtgaat

SEQ ID NO: 112583 - DNA, 25 bp, Probe Sequence
ggcagatatgtaagtaggtaagtgg

SEQ ID NO: 112584 - DNA, 25 bp, Probe Sequence
gcagatatgtaagtaggtaagtggg

SEQ ID NO: 112585 - DNA, 25 bp, Probe Sequence
gggcagatatgtaagtaggtaagtg

SEQ ID NO: 112586 - DNA, 25 bp, Probe Sequence
tgtttcctaatgggcagatatgtaa

SEQ ID NO: 112587 - DNA, 25 bp, Probe Sequence
tgggcagatatgtaagtaggtaagt

SEQ ID NO: 112588 - DNA, 25 bp, Probe Sequence
tttcctaatgggcagatatgtaagt

SEQ ID NO: 112589 - DNA, 25 bp, Probe Sequence
atgggcagatatgtaagtaggtaag

SEQ ID NO: 112590 - DNA, 25 bp, Probe Sequence
ctaatgggcagatatgtaagtaggt

SEQ ID NO: 112591 - DNA, 25 bp, Probe Sequence
gtttcctaatgggcagatatgtaag

SEQ ID NO: 112592 - DNA, 25 bp, Probe Sequence
tcctaatgggcagatatgtaagtag

SEQ ID NO: 112593 - DNA, 25 bp, Probe Sequence
gaactaaagactgtgctatttcctg

SEQ ID NO: 112594 - DNA, 25 bp, Probe Sequence
agaactaaagactgtgctatttcct

SEQ ID NO: 112595 - DNA, 25 bp, Probe Sequence
aatgggcagatatgtaagtaggtaa

SEQ ID NO: 112596 - DNA, 25 bp, Probe Sequence
cagatatgtaagtaggtaagtggga

SEQ ID NO: 112597 - DNA, 25 bp, Probe Sequence
ttcctaatgggcagatatgtaagta

SEQ ID NO: 112598 - DNA, 25 bp, Probe Sequence
aaagattatgctgtttcctaatggg

SEQ ID NO: 112599 - DNA, 25 bp, Probe Sequence
ctcactaaggagttaggaatggcag

SEQ ID NO: 112600 - DNA, 25 bp, Probe Sequence
gagtgctcactaaggagttaggaat

SEQ ID NO: 112601 - DNA, 25 bp, Probe Sequence
tgagatccaggactaaagattatgc

SEQ ID NO: 112602 - DNA, 25 bp, Probe Sequence
gagatccaggactaaagattatgct

SEQ ID NO: 112603 - DNA, 25 bp, Probe Sequence
taatgggcagatatgtaagtaggta

SEQ ID NO: 112604 - DNA, 25 bp, Probe Sequence
agtgctcactaaggagttaggaatg

SEQ ID NO: 112605 - DNA, 25 bp, Probe Sequence
aagattatgctgtttcctaatgggc

SEQ ID NO: 112606 - DNA, 25 bp, Probe Sequence
gtgctcactaaggagttaggaatgg

SEQ ID NO: 112607 - DNA, 25 bp, Probe Sequence
caataacccaaacatcaaaggaact

SEQ ID NO: 112608 - DNA, 25 bp, Probe Sequence
tcaataacccaaacatcaaaggaac

SEQ ID NO: 112609 - DNA, 25 bp, Probe Sequence
caccctcagcagtaaacaagataaa

SEQ ID NO: 112610 - DNA, 25 bp, Probe Sequence
gttcaataacccaaacatcaaagga

SEQ ID NO: 112611 - DNA, 25 bp, Probe Sequence
aataacccaaacatcaaaggaactt

SEQ ID NO: 112612 - DNA, 25 bp, Probe Sequence
ttcaataacccaaacatcaaaggaa

SEQ ID NO: 112613 - DNA, 25 bp, Probe Sequence
ataacccaaacatcaaaggaacttg

SEQ ID NO: 112614 - DNA, 25 bp, Probe Sequence
acaccctcagcagtaaacaagataa

SEQ ID NO: 112615 - DNA, 25 bp, Probe Sequence
taacccaaacatcaaaggaacttgt

SEQ ID NO: 112616 - DNA, 25 bp, Probe Sequence
gacaccctcagcagtaaacaagata

SEQ ID NO: 112617 - DNA, 25 bp, Probe Sequence
ggctgtcgagaaacctttaatattt

SEQ ID NO: 112618 - DNA, 25 bp, Probe Sequence
tggctgtcgagaaacctttaatatt

SEQ ID NO: 112619 - DNA, 25 bp, Probe Sequence
gtggctgtcgagaaacctttaatat

SEQ ID NO: 112620 - DNA, 25 bp, Probe Sequence
gctgtcgagaaacctttaatatttg

SEQ ID NO: 112621 - DNA, 25 bp, Probe Sequence
aacccaaacatcaaaggaacttgtg

SEQ ID NO: 112622 - DNA, 25 bp, Probe Sequence
ccctcagcagtaaacaagataaaac

SEQ ID NO: 112623 - DNA, 25 bp, Probe Sequence
accctcagcagtaaacaagataaaa

SEQ ID NO: 112624 - DNA, 25 bp, Probe Sequence
tgtggctgtcgagaaacctttaata

SEQ ID NO: 112625 - DNA, 25 bp, Probe Sequence
cctcagcagtaaacaagataaaaca

SEQ ID NO: 112626 - DNA, 25 bp, Probe Sequence
ctgtcgagaaacctttaatatttga

SEQ ID NO: 112627 - DNA, 25 bp, Probe Sequence
caaacatcaaaggaacttgtggctg

SEQ ID NO: 112628 - DNA, 25 bp, Probe Sequence
taagcctgagcatgtaggtgtaaac

SEQ ID NO: 112629 - DNA, 25 bp, Probe Sequence
gctgtaatggcctttcttatactgt

SEQ ID NO: 112630 - DNA, 25 bp, Probe Sequence
ctcagcagtaaacaagataaaacaa

SEQ ID NO: 112631 - DNA, 25 bp, Probe Sequence
gaccatgatgtctcagtcactccac

SEQ ID NO: 112632 - DNA, 25 bp, Probe Sequence
cataaaatgcctgctcttcacctcc

SEQ ID NO: 112633 - DNA, 25 bp, Probe Sequence
ccataaaatgcctgctcttcacctc

SEQ ID NO: 112634 - DNA, 25 bp, Probe Sequence
ctcccataaaatgcctgctcttcac

SEQ ID NO: 112635 - DNA, 25 bp, Probe Sequence
ataaaatgcctgctcttcacctccc

SEQ ID NO: 112636 - DNA, 25 bp, Probe Sequence
cctcccataaaatgcctgctcttca

SEQ ID NO: 112637 - DNA, 25 bp, Probe Sequence
cccataaaatgcctgctcttcacct

SEQ ID NO: 112638 - DNA, 25 bp, Probe Sequence
tcccataaaatgcctgctcttcacc

SEQ ID NO: 112639 - DNA, 25 bp, Probe Sequence
gacaggtttctccctggatactctt

SEQ ID NO: 112640 - DNA, 25 bp, Probe Sequence
acaggtttctccctggatactcttg

SEQ ID NO: 112641 - DNA, 25 bp, Probe Sequence
caggtttctccctggatactcttgg

SEQ ID NO: 112642 - DNA, 25 bp, Probe Sequence
ggacaggtttctccctggatactct

SEQ ID NO: 112643 - DNA, 25 bp, Probe Sequence
tatgtgcttcttctgattcttgcta

SEQ ID NO: 112644 - DNA, 25 bp, Probe Sequence
gatatgtgcttcttctgattcttgc

SEQ ID NO: 112645 - DNA, 25 bp, Probe Sequence
atatgtgcttcttctgattcttgct

SEQ ID NO: 112646 - DNA, 25 bp, Probe Sequence
tgtgcttcttctgattcttgctaat

SEQ ID NO: 112647 - DNA, 25 bp, Probe Sequence
atgtgcttcttctgattcttgctaa

SEQ ID NO: 112648 - DNA, 25 bp, Probe Sequence
gtgcttcttctgattcttgctaatt

SEQ ID NO: 112649 - DNA, 25 bp, Probe Sequence
tgatatgtgcttcttctgattcttg

SEQ ID NO: 112650 - DNA, 25 bp, Probe Sequence
cctatgaagattacagtcctgatga

SEQ ID NO: 112651 - DNA, 25 bp, Probe Sequence
gcctatgaagattacagtcctgatg

SEQ ID NO: 112652 - DNA, 25 bp, Probe Sequence
tgattgatatgtgcttcttctgatt

SEQ ID NO: 112653 - DNA, 25 bp, Probe Sequence
ttgattgatatgtgcttcttctgat

SEQ ID NO: 112654 - DNA, 25 bp, Probe Sequence
ttgatatgtgcttcttctgattctt

SEQ ID NO: 112655 - DNA, 25 bp, Probe Sequence
attgatatgtgcttcttctgattct

SEQ ID NO: 112656 - DNA, 25 bp, Probe Sequence
ttcactgtagacactatcacgagac

SEQ ID NO: 112657 - DNA, 25 bp, Probe Sequence
gattgatatgtgcttcttctgattc

SEQ ID NO: 112658 - DNA, 25 bp, Probe Sequence
atgaagattacagtcctgatgacaa

SEQ ID NO: 112659 - DNA, 25 bp, Probe Sequence
cgcctatgaagattacagtcctgat

SEQ ID NO: 112660 - DNA, 25 bp, Probe Sequence
catcgcctatgaagattacagtcct

SEQ ID NO: 112661 - DNA, 25 bp, Probe Sequence
atcgcctatgaagattacagtcctg

SEQ ID NO: 112662 - DNA, 25 bp, Probe Sequence
tatgaagattacagtcctgatgaca

SEQ ID NO: 112663 - DNA, 25 bp, Probe Sequence
ctatgaagattacagtcctgatgac

SEQ ID NO: 112664 - DNA, 25 bp, Probe Sequence
agttgtttgttgctaagaggtagta

SEQ ID NO: 112665 - DNA, 25 bp, Probe Sequence
atttgagttgtttgttgctaagagg

SEQ ID NO: 112666 - DNA, 25 bp, Probe Sequence
ggctgtatttgattgatatgtgctt

SEQ ID NO: 112667 - DNA, 25 bp, Probe Sequence
ttatactatggaagtgtggattctt

SEQ ID NO: 112668 - DNA, 25 bp, Probe Sequence
agtgtttatactatggaagtgtgga

SEQ ID NO: 112669 - DNA, 25 bp, Probe Sequence
gtgtttatactatggaagtgtggat

SEQ ID NO: 112670 - DNA, 25 bp, Probe Sequence
agtgtggattctttaaacgctctag

SEQ ID NO: 112671 - DNA, 25 bp, Probe Sequence
aagtgtggattctttaaacgctcta

SEQ ID NO: 112672 - DNA, 25 bp, Probe Sequence
tatggaagtgtggattctttaaacg

SEQ ID NO: 112673 - DNA, 25 bp, Probe Sequence
tgtttatactatggaagtgtggatt

SEQ ID NO: 112674 - DNA, 25 bp, Probe Sequence
gaagtgtggattctttaaacgctct

SEQ ID NO: 112675 - DNA, 25 bp, Probe Sequence
tactatggaagtgtggattctttaa

SEQ ID NO: 112676 - DNA, 25 bp, Probe Sequence
gtttatactatggaagtgtggattc

SEQ ID NO: 112677 - DNA, 25 bp, Probe Sequence
atactatggaagtgtggattcttta

SEQ ID NO: 112678 - DNA, 25 bp, Probe Sequence
tatactatggaagtgtggattcttt

SEQ ID NO: 112679 - DNA, 25 bp, Probe Sequence
tttatactatggaagtgtggattct

SEQ ID NO: 112680 - DNA, 25 bp, Probe Sequence
atggaagtgtggattctttaaacgc

SEQ ID NO: 112681 - DNA, 25 bp, Probe Sequence
ctatggaagtgtggattctttaaac

SEQ ID NO: 112682 - DNA, 25 bp, Probe Sequence
actatggaagtgtggattctttaaa

SEQ ID NO: 112683 - DNA, 25 bp, Probe Sequence
ggaagtgtggattctttaaacgctc

SEQ ID NO: 112684 - DNA, 25 bp, Probe Sequence
tggaagtgtggattctttaaacgct

SEQ ID NO: 112685 - DNA, 25 bp, Probe Sequence
atcacaaagtggaacgaaaatgaaa

SEQ ID NO: 112686 - DNA, 25 bp, Probe Sequence
tcacaaagtggaacgaaaatgaaag

SEQ ID NO: 112687 - DNA, 25 bp, Probe Sequence
aaagtggaacgaaaatgaaagctac

SEQ ID NO: 112688 - DNA, 25 bp, Probe Sequence
caaagtggaacgaaaatgaaagcta

SEQ ID NO: 112689 - DNA, 25 bp, Probe Sequence
gatcacaaagtggaacgaaaatgaa

SEQ ID NO: 112690 - DNA, 25 bp, Probe Sequence
cagtggatcacaaagtggaacgaaa

SEQ ID NO: 112691 - DNA, 25 bp, Probe Sequence
cacaggtttctaagcatgaattgag

SEQ ID NO: 112692 - DNA, 25 bp, Probe Sequence
caggtttctaagcatgaattgagga

SEQ ID NO: 112693 - DNA, 25 bp, Probe Sequence
acaggtttctaagcatgaattgagg

SEQ ID NO: 112694 - DNA, 25 bp, Probe Sequence
ccacaggtttctaagcatgaattga

SEQ ID NO: 112695 - DNA, 25 bp, Probe Sequence
ctaaaggctgcaacaaagaaacaaa

SEQ ID NO: 112696 - DNA, 25 bp, Probe Sequence
cccacaggtttctaagcatgaattg

SEQ ID NO: 112697 - DNA, 25 bp, Probe Sequence
gctaaaggctgcaacaaagaaacaa

SEQ ID NO: 112698 - DNA, 25 bp, Probe Sequence
taaaggctgcaacaaagaaacaaaa

SEQ ID NO: 112699 - DNA, 25 bp, Probe Sequence
ccccacaggtttctaagcatgaatt

SEQ ID NO: 112700 - DNA, 25 bp, Probe Sequence
ggctaaaggctgcaacaaagaaaca

SEQ ID NO: 112701 - DNA, 25 bp, Probe Sequence
tcagcatagtgtacttgtccttaat

SEQ ID NO: 112702 - DNA, 25 bp, Probe Sequence
atcagcatagtgtacttgtccttaa

SEQ ID NO: 112703 - DNA, 25 bp, Probe Sequence
aatcagcatagtgtacttgtcctta

SEQ ID NO: 112704 - DNA, 25 bp, Probe Sequence
taatcagcatagtgtacttgtcctt

SEQ ID NO: 112705 - DNA, 25 bp, Probe Sequence
ataatcagcatagtgtacttgtcct

SEQ ID NO: 112706 - DNA, 25 bp, Probe Sequence
agcatagtgtacttgtccttaatgt

SEQ ID NO: 112707 - DNA, 25 bp, Probe Sequence
cagcatagtgtacttgtccttaatg

SEQ ID NO: 112708 - DNA, 25 bp, Probe Sequence
ttagaaggcagacattggttaggag

SEQ ID NO: 112709 - DNA, 25 bp, Probe Sequence
gcatagtgtacttgtccttaatgtt

SEQ ID NO: 112710 - DNA, 25 bp, Probe Sequence
cttgtccttaatgttatagcatggc

SEQ ID NO: 112711 - DNA, 25 bp, Probe Sequence
cttagaaggcagacattggttagga

SEQ ID NO: 112712 - DNA, 25 bp, Probe Sequence
aataatcagcatagtgtacttgtcc

SEQ ID NO: 112713 - DNA, 25 bp, Probe Sequence
ttgtccttaatgttatagcatggca

SEQ ID NO: 112714 - DNA, 25 bp, Probe Sequence
tgtccttaatgttatagcatggcag

SEQ ID NO: 112715 - DNA, 25 bp, Probe Sequence
acttgtccttaatgttatagcatgg

SEQ ID NO: 112716 - DNA, 25 bp, Probe Sequence
gaatcactcctgtgttaccttactc

SEQ ID NO: 112717 - DNA, 25 bp, Probe Sequence
gagaatcactcctgtgttaccttac

SEQ ID NO: 112718 - DNA, 25 bp, Probe Sequence
atcactcctgtgttaccttactctt

SEQ ID NO: 112719 - DNA, 25 bp, Probe Sequence
aatcactcctgtgttaccttactct

SEQ ID NO: 112720 - DNA, 25 bp, Probe Sequence
agaatcactcctgtgttaccttact

SEQ ID NO: 112721 - DNA, 25 bp, Probe Sequence
tgagaatcactcctgtgttacctta

SEQ ID NO: 112722 - DNA, 25 bp, Probe Sequence
gtgttggctgtcagtgttattactc

SEQ ID NO: 112723 - DNA, 25 bp, Probe Sequence
ggtctcataatgacaataatcagca

SEQ ID NO: 112724 - DNA, 25 bp, Probe Sequence
tggtctcataatgacaataatcagc

SEQ ID NO: 112725 - DNA, 25 bp, Probe Sequence
gaaggaggtgggaaatgattagatt

SEQ ID NO: 112726 - DNA, 25 bp, Probe Sequence
ctgttggtatgtagcctggataaat

SEQ ID NO: 112727 - DNA, 25 bp, Probe Sequence
attgaaggaggtgggaaatgattag

SEQ ID NO: 112728 - DNA, 25 bp, Probe Sequence
tgttggtatgtagcctggataaatg

SEQ ID NO: 112729 - DNA, 25 bp, Probe Sequence
aagaaatataaagggtttgggagca

SEQ ID NO: 112730 - DNA, 25 bp, Probe Sequence
aaagaaatataaagggtttgggagc

SEQ ID NO: 112731 - DNA, 25 bp, Probe Sequence
gaggtgggaaatgattagattctga

SEQ ID NO: 112732 - DNA, 25 bp, Probe Sequence
aaggaggtgggaaatgattagattc

SEQ ID NO: 112733 - DNA, 25 bp, Probe Sequence
ggtgggaaatgattagattctgaac

SEQ ID NO: 112734 - DNA, 25 bp, Probe Sequence
aggtgggaaatgattagattctgaa

SEQ ID NO: 112735 - DNA, 25 bp, Probe Sequence
gccaacatggtgaattatctctact

SEQ ID NO: 112736 - DNA, 25 bp, Probe Sequence
tgaaggaggtgggaaatgattagat

SEQ ID NO: 112737 - DNA, 25 bp, Probe Sequence
aataataataatagccaggcgtggt

SEQ ID NO: 112738 - DNA, 25 bp, Probe Sequence
ttgaaggaggtgggaaatgattaga

SEQ ID NO: 112739 - DNA, 25 bp, Probe Sequence
gtgggaaatgattagattctgaaca

SEQ ID NO: 112740 - DNA, 25 bp, Probe Sequence
ggaggtgggaaatgattagattctg

SEQ ID NO: 112741 - DNA, 25 bp, Probe Sequence
aggaggtgggaaatgattagattct

SEQ ID NO: 112742 - DNA, 25 bp, Probe Sequence
agaaatataaagggtttgggagcaa

SEQ ID NO: 112743 - DNA, 25 bp, Probe Sequence
aagtctttgttctcaaggaatttgc

SEQ ID NO: 112744 - DNA, 25 bp, Probe Sequence
ataataataatagccaggcgtggtg

SEQ ID NO: 112745 - DNA, 25 bp, Probe Sequence
ttagttggagagatacaggaagcct

SEQ ID NO: 112746 - DNA, 25 bp, Probe Sequence
ttaataaagttgttggacgggaagc

SEQ ID NO: 112747 - DNA, 25 bp, Probe Sequence
gttggtatgtagcctggataaatgc

SEQ ID NO: 112748 - DNA, 25 bp, Probe Sequence
tttagttggagagatacaggaagcc

SEQ ID NO: 112749 - DNA, 25 bp, Probe Sequence
ttccttggctcataacatagtatcc

SEQ ID NO: 112750 - DNA, 25 bp, Probe Sequence
cttggctcataacatagtatcctca

SEQ ID NO: 112751 - DNA, 25 bp, Probe Sequence
ccttggctcataacatagtatcctc

SEQ ID NO: 112752 - DNA, 25 bp, Probe Sequence
tccttggctcataacatagtatcct

SEQ ID NO: 112753 - DNA, 25 bp, Probe Sequence
tggctcataacatagtatcctcatt

SEQ ID NO: 112754 - DNA, 25 bp, Probe Sequence
ttggctcataacatagtatcctcat

SEQ ID NO: 112755 - DNA, 25 bp, Probe Sequence
ggctcataacatagtatcctcattg

SEQ ID NO: 112756 - DNA, 25 bp, Probe Sequence
catagtatcctcattgatccaagca

SEQ ID NO: 112757 - DNA, 25 bp, Probe Sequence
acatagtatcctcattgatccaagc

SEQ ID NO: 112758 - DNA, 25 bp, Probe Sequence
atagtatcctcattgatccaagcat

SEQ ID NO: 112759 - DNA, 25 bp, Probe Sequence
tagtatcctcattgatccaagcatg

SEQ ID NO: 112760 - DNA, 25 bp, Probe Sequence
gctcataacatagtatcctcattga

SEQ ID NO: 112761 - DNA, 25 bp, Probe Sequence
aacatagtatcctcattgatccaag

SEQ ID NO: 112762 - DNA, 25 bp, Probe Sequence
attgtatgtttggcttcttgaggtc

SEQ ID NO: 112763 - DNA, 25 bp, Probe Sequence
tttccttggctcataacatagtatc

SEQ ID NO: 112764 - DNA, 25 bp, Probe Sequence
cattgtatgtttggcttcttgaggt

SEQ ID NO: 112765 - DNA, 25 bp, Probe Sequence
tacatttgagaaaccaatcctcttt

SEQ ID NO: 112766 - DNA, 25 bp, Probe Sequence
ttacatttgagaaaccaatcctctt

SEQ ID NO: 112767 - DNA, 25 bp, Probe Sequence
tttacatttgagaaaccaatcctct

SEQ ID NO: 112768 - DNA, 25 bp, Probe Sequence
taacatagtatcctcattgatccaa

SEQ ID NO: 112769 - DNA, 25 bp, Probe Sequence
ataacatagtatcctcattgatcca

SEQ ID NO: 112770 - DNA, 25 bp, Probe Sequence
ttgtatgtttggcttcttgaggtct

SEQ ID NO: 112771 - DNA, 25 bp, Probe Sequence
cataacatagtatcctcattgatcc

SEQ ID NO: 112772 - DNA, 25 bp, Probe Sequence
aatatccacaaattcagtgcccaat

SEQ ID NO: 112773 - DNA, 25 bp, Probe Sequence
tctcatacagtgcttaggatgtctt

SEQ ID NO: 112774 - DNA, 25 bp, Probe Sequence
ttgtgtctcatacagtgcttaggat

SEQ ID NO: 112775 - DNA, 25 bp, Probe Sequence
gtctcatacagtgcttaggatgtct

SEQ ID NO: 112776 - DNA, 25 bp, Probe Sequence
tgtctcatacagtgcttaggatgtc

SEQ ID NO: 112777 - DNA, 25 bp, Probe Sequence
gtgtctcatacagtgcttaggatgt

SEQ ID NO: 112778 - DNA, 25 bp, Probe Sequence
tgtgtctcatacagtgcttaggatg

SEQ ID NO: 112779 - DNA, 25 bp, Probe Sequence
gttgtgtctcatacagtgcttagga

SEQ ID NO: 112780 - DNA, 25 bp, Probe Sequence
tgttgtgtctcatacagtgcttagg

SEQ ID NO: 112781 - DNA, 25 bp, Probe Sequence
ctcatacagtgcttaggatgtcttt

SEQ ID NO: 112782 - DNA, 25 bp, Probe Sequence
tcatacagtgcttaggatgtctttc

SEQ ID NO: 112783 - DNA, 25 bp, Probe Sequence
catacagtgcttaggatgtctttca

SEQ ID NO: 112784 - DNA, 25 bp, Probe Sequence
atacagtgcttaggatgtctttcac

SEQ ID NO: 112785 - DNA, 25 bp, Probe Sequence
tgtatcaagaacatgattatccagg

SEQ ID NO: 112786 - DNA, 25 bp, Probe Sequence
tacagtgcttaggatgtctttcaca

SEQ ID NO: 112787 - DNA, 25 bp, Probe Sequence
cttaggatgtctttcacagagctta

SEQ ID NO: 112788 - DNA, 25 bp, Probe Sequence
aggatgtctttcacagagcttatta

SEQ ID NO: 112789 - DNA, 25 bp, Probe Sequence
taggatgtctttcacagagcttatt

SEQ ID NO: 112790 - DNA, 25 bp, Probe Sequence
ttaggatgtctttcacagagcttat

SEQ ID NO: 112791 - DNA, 25 bp, Probe Sequence
ggatgtctttcacagagcttattaa

SEQ ID NO: 112792 - DNA, 25 bp, Probe Sequence
agtgcttaggatgtctttcacagag

SEQ ID NO: 112793 - DNA, 25 bp, Probe Sequence
cagtgcttaggatgtctttcacaga

SEQ ID NO: 112794 - DNA, 25 bp, Probe Sequence
acagtgcttaggatgtctttcacag

SEQ ID NO: 112795 - DNA, 25 bp, Probe Sequence
gtatcaagaacatgattatccaggg

SEQ ID NO: 112796 - DNA, 25 bp, Probe Sequence
tccaggggtattttctaattcagat

SEQ ID NO: 112797 - DNA, 25 bp, Probe Sequence
gaaggcaacatacatccataattgt

SEQ ID NO: 112798 - DNA, 25 bp, Probe Sequence
ggaaggcaacatacatccataattg

SEQ ID NO: 112799 - DNA, 25 bp, Probe Sequence
agtatttggagaactcactgatgaa

SEQ ID NO: 112800 - DNA, 25 bp, Probe Sequence
gtatttggagaactcactgatgaaa

SEQ ID NO: 112801 - DNA, 25 bp, Probe Sequence
cataacagtatttggagaactcact

SEQ ID NO: 112802 - DNA, 25 bp, Probe Sequence
tcataacagtatttggagaactcac

SEQ ID NO: 112803 - DNA, 25 bp, Probe Sequence
gtcataacagtatttggagaactca

SEQ ID NO: 112804 - DNA, 25 bp, Probe Sequence
tgtcataacagtatttggagaactc

SEQ ID NO: 112805 - DNA, 25 bp, Probe Sequence
atgtcataacagtatttggagaact

SEQ ID NO: 112806 - DNA, 25 bp, Probe Sequence
aaggcaacatacatccataattgtt

SEQ ID NO: 112807 - DNA, 25 bp, Probe Sequence
gatgtcataacagtatttggagaac

SEQ ID NO: 112808 - DNA, 25 bp, Probe Sequence
agatgtcataacagtatttggagaa

SEQ ID NO: 112809 - DNA, 25 bp, Probe Sequence
tgaaacacaggaagtatgccagatg

SEQ ID NO: 112810 - DNA, 25 bp, Probe Sequence
tagatgtcataacagtatttggaga

SEQ ID NO: 112811 - DNA, 25 bp, Probe Sequence
tttggagaactcactgatgaaaatg

SEQ ID NO: 112812 - DNA, 25 bp, Probe Sequence
ttggagaactcactgatgaaaatgt

SEQ ID NO: 112813 - DNA, 25 bp, Probe Sequence
gtgaaacacaggaagtatgccagat

SEQ ID NO: 112814 - DNA, 25 bp, Probe Sequence
gaaacacaggaagtatgccagatgg

SEQ ID NO: 112815 - DNA, 25 bp, Probe Sequence
atttggagaactcactgatgaaaat

SEQ ID NO: 112816 - DNA, 25 bp, Probe Sequence
tgatagatgtcataacagtatttgg

SEQ ID NO: 112817 - DNA, 25 bp, Probe Sequence
tatttggagaactcactgatgaaaa

SEQ ID NO: 112818 - DNA, 25 bp, Probe Sequence
aggcaacatacatccataattgttt

SEQ ID NO: 112819 - DNA, 25 bp, Probe Sequence
aaacacaggaagtatgccagatgga

SEQ ID NO: 112820 - DNA, 25 bp, Probe Sequence
tggagaactcactgatgaaaatgtg

SEQ ID NO: 112821 - DNA, 25 bp, Probe Sequence
gtgccaagtaagtatcatcctcatt

SEQ ID NO: 112822 - DNA, 25 bp, Probe Sequence
tgtgccaagtaagtatcatcctcat

SEQ ID NO: 112823 - DNA, 25 bp, Probe Sequence
ttgtgccaagtaagtatcatcctca

SEQ ID NO: 112824 - DNA, 25 bp, Probe Sequence
taggaccatctagttagttccacaa

SEQ ID NO: 112825 - DNA, 25 bp, Probe Sequence
tgccaagtaagtatcatcctcattt

SEQ ID NO: 112826 - DNA, 25 bp, Probe Sequence
ctaggaccatctagttagttccaca

SEQ ID NO: 112827 - DNA, 25 bp, Probe Sequence
tttgtgccaagtaagtatcatcctc

SEQ ID NO: 112828 - DNA, 25 bp, Probe Sequence
ctagttagttccacaaagacagatg

SEQ ID NO: 112829 - DNA, 25 bp, Probe Sequence
gccaagtaagtatcatcctcattta

SEQ ID NO: 112830 - DNA, 25 bp, Probe Sequence
gaccatctagttagttccacaaaga

SEQ ID NO: 112831 - DNA, 25 bp, Probe Sequence
ccatctagttagttccacaaagaca

SEQ ID NO: 112832 - DNA, 25 bp, Probe Sequence
accatctagttagttccacaaagac

SEQ ID NO: 112833 - DNA, 25 bp, Probe Sequence
tctagttagttccacaaagacagat

SEQ ID NO: 112834 - DNA, 25 bp, Probe Sequence
atctagttagttccacaaagacaga

SEQ ID NO: 112835 - DNA, 25 bp, Probe Sequence
catctagttagttccacaaagacag

SEQ ID NO: 112836 - DNA, 25 bp, Probe Sequence
gttagttccacaaagacagatgttt

SEQ ID NO: 112837 - DNA, 25 bp, Probe Sequence
agttagttccacaaagacagatgtt

SEQ ID NO: 112838 - DNA, 25 bp, Probe Sequence
tagttagttccacaaagacagatgt

SEQ ID NO: 112839 - DNA, 25 bp, Probe Sequence
ttctacctatcaagttctgttaggc

SEQ ID NO: 112840 - DNA, 25 bp, Probe Sequence
ggaccatctagttagttccacaaag

SEQ ID NO: 112841 - DNA, 25 bp, Probe Sequence
aggaccatctagttagttccacaaa

SEQ ID NO: 112842 - DNA, 25 bp, Probe Sequence
cttctacctatcaagttctgttagg

SEQ ID NO: 112843 - DNA, 25 bp, Probe Sequence
acttctacctatcaagttctgttag

SEQ ID NO: 112844 - DNA, 25 bp, Probe Sequence
tgttttgtgccaagtaagtatcatc

SEQ ID NO: 112845 - DNA, 25 bp, Probe Sequence
gtaaggtcactcttggtgtctctaa

SEQ ID NO: 112846 - DNA, 25 bp, Probe Sequence
ttggtagcaagctagaagttgtatg

SEQ ID NO: 112847 - DNA, 25 bp, Probe Sequence
agtaaggtcactcttggtgtctcta

SEQ ID NO: 112848 - DNA, 25 bp, Probe Sequence
tactccttactgtagaagcctggaa

SEQ ID NO: 112849 - DNA, 25 bp, Probe Sequence
tctaaagaagtgggtctggaagtag

SEQ ID NO: 112850 - DNA, 25 bp, Probe Sequence
ctctaaagaagtgggtctggaagta

SEQ ID NO: 112851 - DNA, 25 bp, Probe Sequence
tggtagcaagctagaagttgtatgg

SEQ ID NO: 112852 - DNA, 25 bp, Probe Sequence
ctaaagaagtgggtctggaagtagg

SEQ ID NO: 112853 - DNA, 25 bp, Probe Sequence
taaggtcactcttggtgtctctaaa

SEQ ID NO: 112854 - DNA, 25 bp, Probe Sequence
gtctctaaagaagtgggtctggaag

SEQ ID NO: 112855 - DNA, 25 bp, Probe Sequence
aagtgtttgtgttacaggttccaag

SEQ ID NO: 112856 - DNA, 25 bp, Probe Sequence
gtactccttactgtagaagcctgga

SEQ ID NO: 112857 - DNA, 25 bp, Probe Sequence
tttggtagcaagctagaagttgtat

SEQ ID NO: 112858 - DNA, 25 bp, Probe Sequence
caagtgtttgtgttacaggttccaa

SEQ ID NO: 112859 - DNA, 25 bp, Probe Sequence
tctctaaagaagtgggtctggaagt

SEQ ID NO: 112860 - DNA, 25 bp, Probe Sequence
cttggtgtctctaaagaagtgggtc

SEQ ID NO: 112861 - DNA, 25 bp, Probe Sequence
aaggtcactcttggtgtctctaaag

SEQ ID NO: 112862 - DNA, 25 bp, Probe Sequence
tgtctctaaagaagtgggtctggaa

SEQ ID NO: 112863 - DNA, 25 bp, Probe Sequence
actccttactgtagaagcctggaac

SEQ ID NO: 112864 - DNA, 25 bp, Probe Sequence
ttggtgtctctaaagaagtgggtct

SEQ ID NO: 112865 - DNA, 25 bp, Probe Sequence
cttactgtagaagcctggaacctgg

SEQ ID NO: 112866 - DNA, 25 bp, Probe Sequence
ccttactgtagaagcctggaacctg

SEQ ID NO: 112867 - DNA, 25 bp, Probe Sequence
gtcactcttggtgtctctaaagaag

SEQ ID NO: 112868 - DNA, 25 bp, Probe Sequence
taaagaagtgggtctggaagtaggg

SEQ ID NO: 112869 - DNA, 25 bp, Probe Sequence
gattcaagtgattctcctacctcag

SEQ ID NO: 112870 - DNA, 25 bp, Probe Sequence
attcaagtgattctcctacctcagc

SEQ ID NO: 112871 - DNA, 25 bp, Probe Sequence
ctcctggattcaagtgattctccta

SEQ ID NO: 112872 - DNA, 25 bp, Probe Sequence
ggattcaagtgattctcctacctca

SEQ ID NO: 112873 - DNA, 25 bp, Probe Sequence
tggattcaagtgattctcctacctc

SEQ ID NO: 112874 - DNA, 25 bp, Probe Sequence
ctggattcaagtgattctcctacct

SEQ ID NO: 112875 - DNA, 25 bp, Probe Sequence
tcctggattcaagtgattctcctac

SEQ ID NO: 112876 - DNA, 25 bp, Probe Sequence
gccctatttagttgcttcttctgta

SEQ ID NO: 112877 - DNA, 25 bp, Probe Sequence
ccctatttagttgcttcttctgtaa

SEQ ID NO: 112878 - DNA, 25 bp, Probe Sequence
cttgtggtaggtacttgttgaaatg

SEQ ID NO: 112879 - DNA, 25 bp, Probe Sequence
tagtctagttgctaagggtacagta

SEQ ID NO: 112880 - DNA, 25 bp, Probe Sequence
tggtaggtacttgttgaaatggtag

SEQ ID NO: 112881 - DNA, 25 bp, Probe Sequence
ctaagggtacagtagtgaacaatct

SEQ ID NO: 112882 - DNA, 25 bp, Probe Sequence
gtggtaggtacttgttgaaatggta

SEQ ID NO: 112883 - DNA, 25 bp, Probe Sequence
tagttgctaagggtacagtagtgaa

SEQ ID NO: 112884 - DNA, 25 bp, Probe Sequence
agtctagttgctaagggtacagtag

SEQ ID NO: 112885 - DNA, 25 bp, Probe Sequence
ctagtctagttgctaagggtacagt

SEQ ID NO: 112886 - DNA, 25 bp, Probe Sequence
gctaagggtacagtagtgaacaatc

SEQ ID NO: 112887 - DNA, 25 bp, Probe Sequence
cctggattcaagtgattctcctacc

SEQ ID NO: 112888 - DNA, 25 bp, Probe Sequence
ctagttgctaagggtacagtagtga

SEQ ID NO: 112889 - DNA, 25 bp, Probe Sequence
tctagttgctaagggtacagtagtg

SEQ ID NO: 112890 - DNA, 25 bp, Probe Sequence
gtctagttgctaagggtacagtagt

SEQ ID NO: 112891 - DNA, 25 bp, Probe Sequence
ttgtggtaggtacttgttgaaatgg

SEQ ID NO: 112892 - DNA, 25 bp, Probe Sequence
tgccctcagaacattctagtaaaga

SEQ ID NO: 112893 - DNA, 25 bp, Probe Sequence
gagtcttcgctcatctaccactcag

SEQ ID NO: 112894 - DNA, 25 bp, Probe Sequence
attcaccattccacttaccttactt

SEQ ID NO: 112895 - DNA, 25 bp, Probe Sequence
ttcaccattccacttaccttacttc

SEQ ID NO: 112896 - DNA, 25 bp, Probe Sequence
aattcaccattccacttaccttact

SEQ ID NO: 112897 - DNA, 25 bp, Probe Sequence
caccattccacttaccttacttctg

SEQ ID NO: 112898 - DNA, 25 bp, Probe Sequence
tcaccattccacttaccttacttct

SEQ ID NO: 112899 - DNA, 25 bp, Probe Sequence
agtattcactcaacatcatcctcag

SEQ ID NO: 112900 - DNA, 25 bp, Probe Sequence
gaagcagtattcactcaacatcatc

SEQ ID NO: 112901 - DNA, 25 bp, Probe Sequence
gtattcactcaacatcatcctcagt

SEQ ID NO: 112902 - DNA, 25 bp, Probe Sequence
cagtattcactcaacatcatcctca

SEQ ID NO: 112903 - DNA, 25 bp, Probe Sequence
aagcagtattcactcaacatcatcc

SEQ ID NO: 112904 - DNA, 25 bp, Probe Sequence
ggaagcagtattcactcaacatcat

SEQ ID NO: 112905 - DNA, 25 bp, Probe Sequence
ggcagccaccataatgatactatat

SEQ ID NO: 112906 - DNA, 25 bp, Probe Sequence
gcagtattcactcaacatcatcctc

SEQ ID NO: 112907 - DNA, 25 bp, Probe Sequence
catcaagaatgtatccgttgcctac

SEQ ID NO: 112908 - DNA, 25 bp, Probe Sequence
agcagtattcactcaacatcatcct

SEQ ID NO: 112909 - DNA, 25 bp, Probe Sequence
cacataagtggattatcaagcacaa

SEQ ID NO: 112910 - DNA, 25 bp, Probe Sequence
ggatattaatcggtggagactacat

SEQ ID NO: 112911 - DNA, 25 bp, Probe Sequence
cataagtggattatcaagcacaagt

SEQ ID NO: 112912 - DNA, 25 bp, Probe Sequence
acataagtggattatcaagcacaag

SEQ ID NO: 112913 - DNA, 25 bp, Probe Sequence
gcagccaccataatgatactatatg

SEQ ID NO: 112914 - DNA, 25 bp, Probe Sequence
ccaactcttattattagtgtctcca

SEQ ID NO: 112915 - DNA, 25 bp, Probe Sequence
ggaggttgatgtaatggtgactctt

SEQ ID NO: 112916 - DNA, 25 bp, Probe Sequence
gccaccataatgatactatatgtgt

SEQ ID NO: 112917 - DNA, 25 bp, Probe Sequence
tgttggtatctttccctaatcatca

SEQ ID NO: 112918 - DNA, 25 bp, Probe Sequence
atagtattccgtggtgtgtatgtac

SEQ ID NO: 112919 - DNA, 25 bp, Probe Sequence
gtgtccatgtattctcattgttcag

SEQ ID NO: 112920 - DNA, 25 bp, Probe Sequence
ctgtgtccatgtattctcattgttc

SEQ ID NO: 112921 - DNA, 25 bp, Probe Sequence
tgtgtccatgtattctcattgttca

SEQ ID NO: 112922 - DNA, 25 bp, Probe Sequence
catagtattccgtggtgtgtatgta

SEQ ID NO: 112923 - DNA, 25 bp, Probe Sequence
cctgtgtccatgtattctcattgtt

SEQ ID NO: 112924 - DNA, 25 bp, Probe Sequence
tgtccatgtattctcattgttcagc

SEQ ID NO: 112925 - DNA, 25 bp, Probe Sequence
tccatgtattctcattgttcagctc

SEQ ID NO: 112926 - DNA, 25 bp, Probe Sequence
gtccatgtattctcattgttcagct

SEQ ID NO: 112927 - DNA, 25 bp, Probe Sequence
agtgaagtttatgtaatgaagccct

SEQ ID NO: 112928 - DNA, 25 bp, Probe Sequence
cagtgaagtttatgtaatgaagccc

SEQ ID NO: 112929 - DNA, 25 bp, Probe Sequence
ctgtgttagtttgctgaggataatg

SEQ ID NO: 112930 - DNA, 25 bp, Probe Sequence
gggcaatcagtgaagtttatgtaat

SEQ ID NO: 112931 - DNA, 25 bp, Probe Sequence
tgggcaatcagtgaagtttatgtaa

SEQ ID NO: 112932 - DNA, 25 bp, Probe Sequence
tgtgttagtttgctgaggataatgg

SEQ ID NO: 112933 - DNA, 25 bp, Probe Sequence
ttagtttgctgaggataatggcttc

SEQ ID NO: 112934 - DNA, 25 bp, Probe Sequence
gtgaagtttatgtaatgaagcccta

SEQ ID NO: 112935 - DNA, 25 bp, Probe Sequence
cattacacctggctaattgttgtat

SEQ ID NO: 112936 - DNA, 25 bp, Probe Sequence
gttagtttgctgaggataatggctt

SEQ ID NO: 112937 - DNA, 25 bp, Probe Sequence
ccatgtattctcattgttcagctcc

SEQ ID NO: 112938 - DNA, 25 bp, Probe Sequence
gtctaacaatgtgatttcagatggg

SEQ ID NO: 112939 - DNA, 25 bp, Probe Sequence
ggcaatcagtgaagtttatgtaatg

SEQ ID NO: 112940 - DNA, 25 bp, Probe Sequence
ccattacacctggctaattgttgta

SEQ ID NO: 112941 - DNA, 25 bp, Probe Sequence
gtgggcaatcagtgaagtttatgta

SEQ ID NO: 112942 - DNA, 25 bp, Probe Sequence
accgtgtaaatagaatccaagtcaa

SEQ ID NO: 112943 - DNA, 25 bp, Probe Sequence
cctaccgtgtaaatagaatccaagt

SEQ ID NO: 112944 - DNA, 25 bp, Probe Sequence
atgtccctaccgtgtaaatagaatc

SEQ ID NO: 112945 - DNA, 25 bp, Probe Sequence
caatgtccctaccgtgtaaatagaa

SEQ ID NO: 112946 - DNA, 25 bp, Probe Sequence
taccgtgtaaatagaatccaagtca

SEQ ID NO: 112947 - DNA, 25 bp, Probe Sequence
aatgtccctaccgtgtaaatagaat

SEQ ID NO: 112948 - DNA, 25 bp, Probe Sequence
ccgtgtaaatagaatccaagtcaat

SEQ ID NO: 112949 - DNA, 25 bp, Probe Sequence
ccctaccgtgtaaatagaatccaag

SEQ ID NO: 112950 - DNA, 25 bp, Probe Sequence
atactccagacagttgacaagcatc

SEQ ID NO: 112951 - DNA, 25 bp, Probe Sequence
gatactccagacagttgacaagcat

SEQ ID NO: 112952 - DNA, 25 bp, Probe Sequence
atcatcaaggtcagagggtaaattc

SEQ ID NO: 112953 - DNA, 25 bp, Probe Sequence
catcatcaaggtcagagggtaaatt

SEQ ID NO: 112954 - DNA, 25 bp, Probe Sequence
ctaccgtgtaaatagaatccaagtc

SEQ ID NO: 112955 - DNA, 25 bp, Probe Sequence
tccctaccgtgtaaatagaatccaa

SEQ ID NO: 112956 - DNA, 25 bp, Probe Sequence
gtgactgcaattccaagttagtatt

SEQ ID NO: 112957 - DNA, 25 bp, Probe Sequence
tgtgactgcaattccaagttagtat

SEQ ID NO: 112958 - DNA, 25 bp, Probe Sequence
ttgtgactgcaattccaagttagta

SEQ ID NO: 112959 - DNA, 25 bp, Probe Sequence
acatcatcaaggtcagagggtaaat

SEQ ID NO: 112960 - DNA, 25 bp, Probe Sequence
gtccctaccgtgtaaatagaatcca

SEQ ID NO: 112961 - DNA, 25 bp, Probe Sequence
tgtccctaccgtgtaaatagaatcc

SEQ ID NO: 112962 - DNA, 25 bp, Probe Sequence
gaggatactccagacagttgacaag

SEQ ID NO: 112963 - DNA, 25 bp, Probe Sequence
tcatcaaggtcagagggtaaattcc

SEQ ID NO: 112964 - DNA, 25 bp, Probe Sequence
agaggatactccagacagttgacaa

SEQ ID NO: 112965 - DNA, 25 bp, Probe Sequence
acaatgtccctaccgtgtaaataga

SEQ ID NO: 112966 - DNA, 25 bp, Probe Sequence
aataatttctgctgctgaaacattg

SEQ ID NO: 112967 - DNA, 25 bp, Probe Sequence
aaataatttctgctgctgaaacatt

SEQ ID NO: 112968 - DNA, 25 bp, Probe Sequence
gaaataatttctgctgctgaaacat

SEQ ID NO: 112969 - DNA, 25 bp, Probe Sequence
agaaataatttctgctgctgaaaca

SEQ ID NO: 112970 - DNA, 25 bp, Probe Sequence
agaaagaaataatttctgctgctga

SEQ ID NO: 112971 - DNA, 25 bp, Probe Sequence
aagaaataatttctgctgctgaaac

SEQ ID NO: 112972 - DNA, 25 bp, Probe Sequence
gaaagaaataatttctgctgctgaa

SEQ ID NO: 112973 - DNA, 25 bp, Probe Sequence
aagaaagaaataatttctgctgctg

SEQ ID NO: 112974 - DNA, 25 bp, Probe Sequence
aaagaaataatttctgctgctgaaa

SEQ ID NO: 112975 - DNA, 25 bp, Probe Sequence
taagaaagaaataatttctgctgct

SEQ ID NO: 112976 - DNA, 25 bp, Probe Sequence
ttaagaaagaaataatttctgctgc

SEQ ID NO: 112977 - DNA, 25 bp, Probe Sequence
acttaagaaagaaataatttctgct

SEQ ID NO: 112978 - DNA, 25 bp, Probe Sequence
cttaagaaagaaataatttctgctg

SEQ ID NO: 112979 - DNA, 25 bp, Probe Sequence
tataaactgctgaagaaggtgaaac

SEQ ID NO: 112980 - DNA, 25 bp, Probe Sequence
actaattgtcttaactctttccagc

SEQ ID NO: 112981 - DNA, 25 bp, Probe Sequence
accagatactaattgtcttaactct

SEQ ID NO: 112982 - DNA, 25 bp, Probe Sequence
tgttataaactgctgaagaaggtga

SEQ ID NO: 112983 - DNA, 25 bp, Probe Sequence
ttgttataaactgctgaagaaggtg

SEQ ID NO: 112984 - DNA, 25 bp, Probe Sequence
gttataaactgctgaagaaggtgaa

SEQ ID NO: 112985 - DNA, 25 bp, Probe Sequence
attgtcttaactctttccagcttca

SEQ ID NO: 112986 - DNA, 25 bp, Probe Sequence
ttataaactgctgaagaaggtgaaa

SEQ ID NO: 112987 - DNA, 25 bp, Probe Sequence
aattgtcttaactctttccagcttc

SEQ ID NO: 112988 - DNA, 25 bp, Probe Sequence
tttgttataaactgctgaagaaggt

SEQ ID NO: 112989 - DNA, 25 bp, Probe Sequence
ttgtcttaactctttccagcttcag

SEQ ID NO: 112990 - DNA, 25 bp, Probe Sequence
ctgaagaaggtgaaaccagatacta

SEQ ID NO: 112991 - DNA, 25 bp, Probe Sequence
tcttaactctttccagcttcagatg

SEQ ID NO: 112992 - DNA, 25 bp, Probe Sequence
gtcttaactctttccagcttcagat

SEQ ID NO: 112993 - DNA, 25 bp, Probe Sequence
aggtgaaaccagatactaattgtct

SEQ ID NO: 112994 - DNA, 25 bp, Probe Sequence
ctaattgtcttaactctttccagct

SEQ ID NO: 112995 - DNA, 25 bp, Probe Sequence
tgaagaaggtgaaaccagatactaa

SEQ ID NO: 112996 - DNA, 25 bp, Probe Sequence
aaccagatactaattgtcttaactc

SEQ ID NO: 112997 - DNA, 25 bp, Probe Sequence
ctttgttataaactgctgaagaagg

SEQ ID NO: 112998 - DNA, 25 bp, Probe Sequence
ggtgaaaccagatactaattgtctt

SEQ ID NO: 112999 - DNA, 25 bp, Probe Sequence
aaggtgaaaccagatactaattgtc

SEQ ID NO: 113000 - DNA, 25 bp, Probe Sequence
gaaggtgaaaccagatactaattgt

SEQ ID NO: 113001 - DNA, 25 bp, Probe Sequence
taattgtcttaactctttccagctt

SEQ ID NO: 113002 - DNA, 25 bp, Probe Sequence
ataaactgctgaagaaggtgaaacc

SEQ ID NO: 113003 - DNA, 25 bp, Probe Sequence
aagtgctgagattacaggtgttcta

SEQ ID NO: 113004 - DNA, 25 bp, Probe Sequence
ctgagattacaggtgttctaggtcc

SEQ ID NO: 113005 - DNA, 25 bp, Probe Sequence
agtgctgagattacaggtgttctag

SEQ ID NO: 113006 - DNA, 25 bp, Probe Sequence
gctgagattacaggtgttctaggtc

SEQ ID NO: 113007 - DNA, 25 bp, Probe Sequence
attacaggtgttctaggtcccaatt

SEQ ID NO: 113008 - DNA, 25 bp, Probe Sequence
gtgctgagattacaggtgttctagg

SEQ ID NO: 113009 - DNA, 25 bp, Probe Sequence
gattacaggtgttctaggtcccaat

SEQ ID NO: 113010 - DNA, 25 bp, Probe Sequence
ttacaggtgttctaggtcccaattc

SEQ ID NO: 113011 - DNA, 25 bp, Probe Sequence
tgctgagattacaggtgttctaggt

SEQ ID NO: 113012 - DNA, 25 bp, Probe Sequence
ggtgttctaggtcccaattctactg

SEQ ID NO: 113013 - DNA, 25 bp, Probe Sequence
aggtgttctaggtcccaattctact

SEQ ID NO: 113014 - DNA, 25 bp, Probe Sequence
caggtgttctaggtcccaattctac

SEQ ID NO: 113015 - DNA, 25 bp, Probe Sequence
acaggtgttctaggtcccaattcta

SEQ ID NO: 113016 - DNA, 25 bp, Probe Sequence
tacaggtgttctaggtcccaattct

SEQ ID NO: 113017 - DNA, 25 bp, Probe Sequence
aaagtgctgagattacaggtgttct

SEQ ID NO: 113018 - DNA, 25 bp, Probe Sequence
caaagtgctgagattacaggtgttc

SEQ ID NO: 113019 - DNA, 25 bp, Probe Sequence
agattacaggtgttctaggtcccaa

SEQ ID NO: 113020 - DNA, 25 bp, Probe Sequence
gtgttctaggtcccaattctactgc

SEQ ID NO: 113021 - DNA, 25 bp, Probe Sequence
gagattacaggtgttctaggtccca

SEQ ID NO: 113022 - DNA, 25 bp, Probe Sequence
tgagattacaggtgttctaggtccc

SEQ ID NO: 113023 - DNA, 25 bp, Probe Sequence
ccaaagtgctgagattacaggtgtt

SEQ ID NO: 113024 - DNA, 25 bp, Probe Sequence
tgttctaggtcccaattctactgca

SEQ ID NO: 113025 - DNA, 25 bp, Probe Sequence
gtccttcaccttcttactcgtagtc

SEQ ID NO: 113026 - DNA, 25 bp, Probe Sequence
tgaaactgcccaagaatgagtatat

SEQ ID NO: 113027 - DNA, 25 bp, Probe Sequence
tgcccaagaatgagtatatatcctg

SEQ ID NO: 113028 - DNA, 25 bp, Probe Sequence
gtgaaactgcccaagaatgagtata

SEQ ID NO: 113029 - DNA, 25 bp, Probe Sequence
ctgcccaagaatgagtatatatcct

SEQ ID NO: 113030 - DNA, 25 bp, Probe Sequence
gcccaagaatgagtatatatcctgc

SEQ ID NO: 113031 - DNA, 25 bp, Probe Sequence
ccaagaatgagtatatatcctgcat

SEQ ID NO: 113032 - DNA, 25 bp, Probe Sequence
gattgtgggtagatcaaggatgttt

SEQ ID NO: 113033 - DNA, 25 bp, Probe Sequence
actgcccaagaatgagtatatatcc

SEQ ID NO: 113034 - DNA, 25 bp, Probe Sequence
tccttcaccttcttactcgtagtcg

SEQ ID NO: 113035 - DNA, 25 bp, Probe Sequence
tgatgggtttcttcgggaatattaa

SEQ ID NO: 113036 - DNA, 25 bp, Probe Sequence
ttgatgggtttcttcgggaatatta

SEQ ID NO: 113037 - DNA, 25 bp, Probe Sequence
tgttgatgggtttcttcgggaatat

SEQ ID NO: 113038 - DNA, 25 bp, Probe Sequence
gatgggtttcttcgggaatattaat

SEQ ID NO: 113039 - DNA, 25 bp, Probe Sequence
gaaactgcccaagaatgagtatata

SEQ ID NO: 113040 - DNA, 25 bp, Probe Sequence
gttgatgggtttcttcgggaatatt

SEQ ID NO: 113041 - DNA, 25 bp, Probe Sequence
atgggtttcttcgggaatattaatt

SEQ ID NO: 113042 - DNA, 25 bp, Probe Sequence
cccaagaatgagtatatatcctgca

SEQ ID NO: 113043 - DNA, 25 bp, Probe Sequence
aactgcccaagaatgagtatatatc

SEQ ID NO: 113044 - DNA, 25 bp, Probe Sequence
tgtgaaactgcccaagaatgagtat

SEQ ID NO: 113045 - DNA, 25 bp, Probe Sequence
caagaatgagtatatatcctgcatg

SEQ ID NO: 113046 - DNA, 25 bp, Probe Sequence
ggtccttcaccttcttactcgtagt

SEQ ID NO: 113047 - DNA, 25 bp, Probe Sequence
tgggtttcttcgggaatattaatta

SEQ ID NO: 113048 - DNA, 25 bp, Probe Sequence
aaactgcccaagaatgagtatatat

SEQ ID NO: 113049 - DNA, 25 bp, Probe Sequence
acaagccaaatacatgacataagat

SEQ ID NO: 113050 - DNA, 25 bp, Probe Sequence
tacaagccaaatacatgacataaga

SEQ ID NO: 113051 - DNA, 25 bp, Probe Sequence
ttacaagccaaatacatgacataag

SEQ ID NO: 113052 - DNA, 25 bp, Probe Sequence
ctgtttcattttgttttgccgtatt

SEQ ID NO: 113053 - DNA, 25 bp, Probe Sequence
tctgtttcattttgttttgccgtat

SEQ ID NO: 113054 - DNA, 25 bp, Probe Sequence
atctgtttcattttgttttgccgta

SEQ ID NO: 113055 - DNA, 25 bp, Probe Sequence
tttacaagccaaatacatgacataa

SEQ ID NO: 113056 - DNA, 25 bp, Probe Sequence
tgtttcattttgttttgccgtattt

SEQ ID NO: 113057 - DNA, 25 bp, Probe Sequence
aatttacaagccaaatacatgacat

SEQ ID NO: 113058 - DNA, 25 bp, Probe Sequence
gtttcattttgttttgccgtatttc

SEQ ID NO: 113059 - DNA, 25 bp, Probe Sequence
tttcattttgttttgccgtatttct

SEQ ID NO: 113060 - DNA, 25 bp, Probe Sequence
gccaggaaggactaaaataaaagtt

SEQ ID NO: 113061 - DNA, 25 bp, Probe Sequence
tcattttgttttgccgtatttctag

SEQ ID NO: 113062 - DNA, 25 bp, Probe Sequence
ttcattttgttttgccgtatttcta

SEQ ID NO: 113063 - DNA, 25 bp, Probe Sequence
aaatttacaagccaaatacatgaca

SEQ ID NO: 113064 - DNA, 25 bp, Probe Sequence
atttacaagccaaatacatgacata

SEQ ID NO: 113065 - DNA, 25 bp, Probe Sequence
gatctgtttcattttgttttgccgt

SEQ ID NO: 113066 - DNA, 25 bp, Probe Sequence
gtacaaggagagatctgtttcattt

SEQ ID NO: 113067 - DNA, 25 bp, Probe Sequence
tgtacaaggagagatctgtttcatt

SEQ ID NO: 113068 - DNA, 25 bp, Probe Sequence
atgtacaaggagagatctgtttcat

SEQ ID NO: 113069 - DNA, 25 bp, Probe Sequence
tatgtacaaggagagatctgtttca

SEQ ID NO: 113070 - DNA, 25 bp, Probe Sequence
ccaggaaggactaaaataaaagttt

SEQ ID NO: 113071 - DNA, 25 bp, Probe Sequence
gtcgtctatcaatggttcgaatgaa

SEQ ID NO: 113072 - DNA, 25 bp, Probe Sequence
cgtctatcaatggttcgaatgaaat

SEQ ID NO: 113073 - DNA, 25 bp, Probe Sequence
gagagacaagaagagaaactgaaga

SEQ ID NO: 113074 - DNA, 25 bp, Probe Sequence
agagagacaagaagagaaactgaag

SEQ ID NO: 113075 - DNA, 25 bp, Probe Sequence
agagacaagaagagaaactgaagaa

SEQ ID NO: 113076 - DNA, 25 bp, Probe Sequence
tagagagacaagaagagaaactgaa

SEQ ID NO: 113077 - DNA, 25 bp, Probe Sequence
gagacaagaagagaaactgaagaat

SEQ ID NO: 113078 - DNA, 25 bp, Probe Sequence
tgtttaacccttgtaactgtttgtt

SEQ ID NO: 113079 - DNA, 25 bp, Probe Sequence
ttgtttaacccttgtaactgtttgt

SEQ ID NO: 113080 - DNA, 25 bp, Probe Sequence
atagagagacaagaagagaaactga

SEQ ID NO: 113081 - DNA, 25 bp, Probe Sequence
gtttaacccttgtaactgtttgttt

SEQ ID NO: 113082 - DNA, 25 bp, Probe Sequence
tttgtttaacccttgtaactgtttg

SEQ ID NO: 113083 - DNA, 25 bp, Probe Sequence
gtttgtttaacccttgtaactgttt

SEQ ID NO: 113084 - DNA, 25 bp, Probe Sequence
aatagagagacaagaagagaaactg

SEQ ID NO: 113085 - DNA, 25 bp, Probe Sequence
agacaagaagagaaactgaagaata

SEQ ID NO: 113086 - DNA, 25 bp, Probe Sequence
caacagagatctatcaatggttcga

SEQ ID NO: 113087 - DNA, 25 bp, Probe Sequence
gaagagaaactgaagaataacaaca

SEQ ID NO: 113088 - DNA, 25 bp, Probe Sequence
acaacagagatctatcaatggttcg

SEQ ID NO: 113089 - DNA, 25 bp, Probe Sequence
aaatagagagacaagaagagaaact

SEQ ID NO: 113090 - DNA, 25 bp, Probe Sequence
ttcaagccaaatacatgacataaga

SEQ ID NO: 113091 - DNA, 25 bp, Probe Sequence
agaagagaaactgaagaataacaac

SEQ ID NO: 113092 - DNA, 25 bp, Probe Sequence
caagaagagaaactgaagaataaca

SEQ ID NO: 113093 - DNA, 25 bp, Probe Sequence
acaagaagagaaactgaagaataac

SEQ ID NO: 113094 - DNA, 25 bp, Probe Sequence
tcaagccaaatacatgacataagat

SEQ ID NO: 113095 - DNA, 25 bp, Probe Sequence
aacaacagagatctatcaatggttc

SEQ ID NO: 113096 - DNA, 25 bp, Probe Sequence
agaaactgaagaataacaacagaga

SEQ ID NO: 113097 - DNA, 25 bp, Probe Sequence
ttatggtacttcattgctcttcctt

SEQ ID NO: 113098 - DNA, 25 bp, Probe Sequence
tatggtacttcattgctcttccttc

SEQ ID NO: 113099 - DNA, 25 bp, Probe Sequence
cttcattgctcttccttcacctcta

SEQ ID NO: 113100 - DNA, 25 bp, Probe Sequence
tacttcattgctcttccttcacctc

SEQ ID NO: 113101 - DNA, 25 bp, Probe Sequence
ttcattgctcttccttcacctctag

SEQ ID NO: 113102 - DNA, 25 bp, Probe Sequence
atggtacttcattgctcttccttca

SEQ ID NO: 113103 - DNA, 25 bp, Probe Sequence
cattgctcttccttcacctctagtc

SEQ ID NO: 113104 - DNA, 25 bp, Probe Sequence
attggaagtgtaccattggcatatt

SEQ ID NO: 113105 - DNA, 25 bp, Probe Sequence
aattggaagtgtaccattggcatat

SEQ ID NO: 113106 - DNA, 25 bp, Probe Sequence
gtacttcattgctcttccttcacct

SEQ ID NO: 113107 - DNA, 25 bp, Probe Sequence
cttcttcccaacttcctacttccta

SEQ ID NO: 113108 - DNA, 25 bp, Probe Sequence
tgcttaaatactgtgaaattgctct

SEQ ID NO: 113109 - DNA, 25 bp, Probe Sequence
taccattggcatatttgtcttcctt

SEQ ID NO: 113110 - DNA, 25 bp, Probe Sequence
cctctagtcactttctattgctacc

SEQ ID NO: 113111 - DNA, 25 bp, Probe Sequence
tccttcacctctagtcactttctat

SEQ ID NO: 113112 - DNA, 25 bp, Probe Sequence
ttcacctctagtcactttctattgc

SEQ ID NO: 113113 - DNA, 25 bp, Probe Sequence
ttccttcacctctagtcactttcta

SEQ ID NO: 113114 - DNA, 25 bp, Probe Sequence
gcttaaatactgtgaaattgctctg

SEQ ID NO: 113115 - DNA, 25 bp, Probe Sequence
tctagtcactttctattgctacctg

SEQ ID NO: 113116 - DNA, 25 bp, Probe Sequence
acctctagtcactttctattgctac

SEQ ID NO: 113117 - DNA, 25 bp, Probe Sequence
cacctctagtcactttctattgcta

SEQ ID NO: 113118 - DNA, 25 bp, Probe Sequence
ccttcacctctagtcactttctatt

SEQ ID NO: 113119 - DNA, 25 bp, Probe Sequence
tggtacttcattgctcttccttcac

SEQ ID NO: 113120 - DNA, 25 bp, Probe Sequence
ctctagtcactttctattgctacct

SEQ ID NO: 113121 - DNA, 25 bp, Probe Sequence
gcagcatcaacctattaaaatacat

SEQ ID NO: 113122 - DNA, 25 bp, Probe Sequence
aggaatgacccttttgtgtctatga

SEQ ID NO: 113123 - DNA, 25 bp, Probe Sequence
caggaatgacccttttgtgtctatg

SEQ ID NO: 113124 - DNA, 25 bp, Probe Sequence
tgcagcatcaacctattaaaataca

SEQ ID NO: 113125 - DNA, 25 bp, Probe Sequence
ccaggaatgacccttttgtgtctat

SEQ ID NO: 113126 - DNA, 25 bp, Probe Sequence
cagcatcaacctattaaaatacatt

SEQ ID NO: 113127 - DNA, 25 bp, Probe Sequence
cccaggaatgacccttttgtgtcta

SEQ ID NO: 113128 - DNA, 25 bp, Probe Sequence
agcatcaacctattaaaatacattt

SEQ ID NO: 113129 - DNA, 25 bp, Probe Sequence
aaggtaatcatgttactaacaacct

SEQ ID NO: 113130 - DNA, 25 bp, Probe Sequence
ggtaatcatgttactaacaacctat

SEQ ID NO: 113131 - DNA, 25 bp, Probe Sequence
aaaggtaatcatgttactaacaacc

SEQ ID NO: 113132 - DNA, 25 bp, Probe Sequence
aggtaatcatgttactaacaaccta

SEQ ID NO: 113133 - DNA, 25 bp, Probe Sequence
taaaggtaatcatgttactaacaac

SEQ ID NO: 113134 - DNA, 25 bp, Probe Sequence
attgaatggtcttggcactattaca

SEQ ID NO: 113135 - DNA, 25 bp, Probe Sequence
ttgaatggtcttggcactattacac

SEQ ID NO: 113136 - DNA, 25 bp, Probe Sequence
cattgaatggtcttggcactattac

SEQ ID NO: 113137 - DNA, 25 bp, Probe Sequence
gaatggtcttggcactattacacaa

SEQ ID NO: 113138 - DNA, 25 bp, Probe Sequence
tgaatggtcttggcactattacaca

SEQ ID NO: 113139 - DNA, 25 bp, Probe Sequence
aatggtcttggcactattacacaaa

SEQ ID NO: 113140 - DNA, 25 bp, Probe Sequence
gataacatctatttgtagtcccagc

SEQ ID NO: 113141 - DNA, 25 bp, Probe Sequence
gtgcttactgtagtaccacactgtt

SEQ ID NO: 113142 - DNA, 25 bp, Probe Sequence
atccaggcatgataacatctatttg

SEQ ID NO: 113143 - DNA, 25 bp, Probe Sequence
tccaggcatgataacatctatttgt

SEQ ID NO: 113144 - DNA, 25 bp, Probe Sequence
ccaggcatgataacatctatttgta

SEQ ID NO: 113145 - DNA, 25 bp, Probe Sequence
tgataacatctatttgtagtcccag

SEQ ID NO: 113146 - DNA, 25 bp, Probe Sequence
tgcttactgtagtaccacactgttt

SEQ ID NO: 113147 - DNA, 25 bp, Probe Sequence
ataacatctatttgtagtcccagct

SEQ ID NO: 113148 - DNA, 25 bp, Probe Sequence
taacatctatttgtagtcccagcta

SEQ ID NO: 113149 - DNA, 25 bp, Probe Sequence
gaagttcaagaccagaatgggaaac

SEQ ID NO: 113150 - DNA, 25 bp, Probe Sequence
agaagttcaagaccagaatgggaaa

SEQ ID NO: 113151 - DNA, 25 bp, Probe Sequence
aggcatgataacatctatttgtagt

SEQ ID NO: 113152 - DNA, 25 bp, Probe Sequence
ctgtgtgcctgtgcttactgtagta

SEQ ID NO: 113153 - DNA, 25 bp, Probe Sequence
atgataacatctatttgtagtccca

SEQ ID NO: 113154 - DNA, 25 bp, Probe Sequence
gcatgataacatctatttgtagtcc

SEQ ID NO: 113155 - DNA, 25 bp, Probe Sequence
ggcatgataacatctatttgtagtc

SEQ ID NO: 113156 - DNA, 25 bp, Probe Sequence
caggcatgataacatctatttgtag

SEQ ID NO: 113157 - DNA, 25 bp, Probe Sequence
tatccaggcatgataacatctattt

SEQ ID NO: 113158 - DNA, 25 bp, Probe Sequence
cgagagaagtggtataaggaagtac

SEQ ID NO: 113159 - DNA, 25 bp, Probe Sequence
agtggtataaggaagtacattctgg

SEQ ID NO: 113160 - DNA, 25 bp, Probe Sequence
gagagaagtggtataaggaagtaca

SEQ ID NO: 113161 - DNA, 25 bp, Probe Sequence
gtggtataaggaagtacattctggc

SEQ ID NO: 113162 - DNA, 25 bp, Probe Sequence
agagaagtggtataaggaagtacat

SEQ ID NO: 113163 - DNA, 25 bp, Probe Sequence
tcgagagaagtggtataaggaagta

SEQ ID NO: 113164 - DNA, 25 bp, Probe Sequence
aagtggtataaggaagtacattctg

SEQ ID NO: 113165 - DNA, 25 bp, Probe Sequence
gttcgagagaagtggtataaggaag

SEQ ID NO: 113166 - DNA, 25 bp, Probe Sequence
gagaagtggtataaggaagtacatt

SEQ ID NO: 113167 - DNA, 25 bp, Probe Sequence
ttcgagagaagtggtataaggaagt

SEQ ID NO: 113168 - DNA, 25 bp, Probe Sequence
gaagtggtataaggaagtacattct

SEQ ID NO: 113169 - DNA, 25 bp, Probe Sequence
agaagtggtataaggaagtacattc

SEQ ID NO: 113170 - DNA, 25 bp, Probe Sequence
ggttcgagagaagtggtataaggaa

SEQ ID NO: 113171 - DNA, 25 bp, Probe Sequence
gttcactccattgtactctagcctg

SEQ ID NO: 113172 - DNA, 25 bp, Probe Sequence
agttcactccattgtactctagcct

SEQ ID NO: 113173 - DNA, 25 bp, Probe Sequence
tggttcgagagaagtggtataagga

SEQ ID NO: 113174 - DNA, 25 bp, Probe Sequence
gtggttcgagagaagtggtataagg

SEQ ID NO: 113175 - DNA, 25 bp, Probe Sequence
ggtggttcgagagaagtggtataag

SEQ ID NO: 113176 - DNA, 25 bp, Probe Sequence
aggtggttcgagagaagtggtataa

SEQ ID NO: 113177 - DNA, 25 bp, Probe Sequence
gaggtggttcgagagaagtggtata

SEQ ID NO: 113178 - DNA, 25 bp, Probe Sequence
tggtataaggaagtacattctggcc

SEQ ID NO: 113179 - DNA, 25 bp, Probe Sequence
taagccgagttcactccattgtact

SEQ ID NO: 113180 - DNA, 25 bp, Probe Sequence
gtaagccgagttcactccattgtac

SEQ ID NO: 113181 - DNA, 25 bp, Probe Sequence
agtaagccgagttcactccattgta

SEQ ID NO: 113182 - DNA, 25 bp, Probe Sequence
tgttatgtccacttattcactaggt

SEQ ID NO: 113183 - DNA, 25 bp, Probe Sequence
agtgacatgaagtggatagattctc

SEQ ID NO: 113184 - DNA, 25 bp, Probe Sequence
aagtgacatgaagtggatagattct

SEQ ID NO: 113185 - DNA, 25 bp, Probe Sequence
ttgttatgtccacttattcactagg

SEQ ID NO: 113186 - DNA, 25 bp, Probe Sequence
gattactaagaggcagttagagaca

SEQ ID NO: 113187 - DNA, 25 bp, Probe Sequence
tgattactaagaggcagttagagac

SEQ ID NO: 113188 - DNA, 25 bp, Probe Sequence
gtgacatgaagtggatagattctca

SEQ ID NO: 113189 - DNA, 25 bp, Probe Sequence
tgacatgaagtggatagattctcaa

SEQ ID NO: 113190 - DNA, 25 bp, Probe Sequence
attactaagaggcagttagagacaa

SEQ ID NO: 113191 - DNA, 25 bp, Probe Sequence
ttgattactaagaggcagttagaga

SEQ ID NO: 113192 - DNA, 25 bp, Probe Sequence
cttgattactaagaggcagttagag

SEQ ID NO: 113193 - DNA, 25 bp, Probe Sequence
gttatgtccacttattcactaggta

SEQ ID NO: 113194 - DNA, 25 bp, Probe Sequence
cataagtgacatgaagtggatagat

SEQ ID NO: 113195 - DNA, 25 bp, Probe Sequence
gacatgaagtggatagattctcaat

SEQ ID NO: 113196 - DNA, 25 bp, Probe Sequence
taagtgacatgaagtggatagattc

SEQ ID NO: 113197 - DNA, 25 bp, Probe Sequence
agtaatgatggtccctgtggtatat

SEQ ID NO: 113198 - DNA, 25 bp, Probe Sequence
ccataagtgacatgaagtggataga

SEQ ID NO: 113199 - DNA, 25 bp, Probe Sequence
gagtaatgatggtccctgtggtata

SEQ ID NO: 113200 - DNA, 25 bp, Probe Sequence
acatgaagtggatagattctcaatt

SEQ ID NO: 113201 - DNA, 25 bp, Probe Sequence
ataagtgacatgaagtggatagatt

SEQ ID NO: 113202 - DNA, 25 bp, Probe Sequence
ggcagttagagacaaaccaatttaa

SEQ ID NO: 113203 - DNA, 25 bp, Probe Sequence
aggcagttagagacaaaccaattta

SEQ ID NO: 113204 - DNA, 25 bp, Probe Sequence
tactttctcctactctagcaaacat

SEQ ID NO: 113205 - DNA, 25 bp, Probe Sequence
atactttctcctactctagcaaaca

SEQ ID NO: 113206 - DNA, 25 bp, Probe Sequence
tagaggttattccaggagagttgat

SEQ ID NO: 113207 - DNA, 25 bp, Probe Sequence
gtagaggttattccaggagagttga

SEQ ID NO: 113208 - DNA, 25 bp, Probe Sequence
gcctgagatattgatgatattgtga

SEQ ID NO: 113209 - DNA, 25 bp, Probe Sequence
gaggttattccaggagagttgatga

SEQ ID NO: 113210 - DNA, 25 bp, Probe Sequence
agaggttattccaggagagttgatg

SEQ ID NO: 113211 - DNA, 25 bp, Probe Sequence
aggttattccaggagagttgatgac

SEQ ID NO: 113212 - DNA, 25 bp, Probe Sequence
ggtagaggttattccaggagagttg

SEQ ID NO: 113213 - DNA, 25 bp, Probe Sequence
cattagattggtcttcaagaacagt

SEQ ID NO: 113214 - DNA, 25 bp, Probe Sequence
aggtagaggttattccaggagagtt

SEQ ID NO: 113215 - DNA, 25 bp, Probe Sequence
tcattagattggtcttcaagaacag

SEQ ID NO: 113216 - DNA, 25 bp, Probe Sequence
agaggtagaggttattccaggagag

SEQ ID NO: 113217 - DNA, 25 bp, Probe Sequence
gagaggtagaggttattccaggaga

SEQ ID NO: 113218 - DNA, 25 bp, Probe Sequence
ttcattagattggtcttcaagaaca

SEQ ID NO: 113219 - DNA, 25 bp, Probe Sequence
gaggtagaggttattccaggagagt

SEQ ID NO: 113220 - DNA, 25 bp, Probe Sequence
ttattccaggagagttgatgacctt

SEQ ID NO: 113221 - DNA, 25 bp, Probe Sequence
ttggtcttcaagaacagtattagtt

SEQ ID NO: 113222 - DNA, 25 bp, Probe Sequence
taagcatggtcaaggagtgaactat

SEQ ID NO: 113223 - DNA, 25 bp, Probe Sequence
ataagcatggtcaaggagtgaacta

SEQ ID NO: 113224 - DNA, 25 bp, Probe Sequence
tattccaggagagttgatgaccttc

SEQ ID NO: 113225 - DNA, 25 bp, Probe Sequence
attggtcttcaagaacagtattagt

SEQ ID NO: 113226 - DNA, 25 bp, Probe Sequence
tttgtttctgtttgccgtaaatagt

SEQ ID NO: 113227 - DNA, 25 bp, Probe Sequence
attcacagcgagaggtagaggttat

SEQ ID NO: 113228 - DNA, 25 bp, Probe Sequence
gttattccaggagagttgatgacct

SEQ ID NO: 113229 - DNA, 25 bp, Probe Sequence
atttgaggtggtgatttgtgaagta

SEQ ID NO: 113230 - DNA, 25 bp, Probe Sequence
tctgtcctatatcaaccttaccact

SEQ ID NO: 113231 - DNA, 25 bp, Probe Sequence
ctgtcctatatcaaccttaccactt

SEQ ID NO: 113232 - DNA, 25 bp, Probe Sequence
catctgtcctatatcaaccttacca

SEQ ID NO: 113233 - DNA, 25 bp, Probe Sequence
atctgtcctatatcaaccttaccac

SEQ ID NO: 113234 - DNA, 25 bp, Probe Sequence
acatctgtcctatatcaaccttacc

SEQ ID NO: 113235 - DNA, 25 bp, Probe Sequence
agacaattacttacttctacagcca

SEQ ID NO: 113236 - DNA, 25 bp, Probe Sequence
tgtcctatatcaaccttaccactta

SEQ ID NO: 113237 - DNA, 25 bp, Probe Sequence
gacaattacttacttctacagccat

SEQ ID NO: 113238 - DNA, 25 bp, Probe Sequence
cgtggaagtcattgaactatgttat

SEQ ID NO: 113239 - DNA, 25 bp, Probe Sequence
cacatctgtcctatatcaaccttac

SEQ ID NO: 113240 - DNA, 25 bp, Probe Sequence
agcaatagtggataacaatctgaat

SEQ ID NO: 113241 - DNA, 25 bp, Probe Sequence
acaattacttacttctacagccatt

SEQ ID NO: 113242 - DNA, 25 bp, Probe Sequence
tgctgctgtgttaatgtcatatatt

SEQ ID NO: 113243 - DNA, 25 bp, Probe Sequence
ttgctgctgtgttaatgtcatatat

SEQ ID NO: 113244 - DNA, 25 bp, Probe Sequence
tgtaatcatgttctggtatgtctca

SEQ ID NO: 113245 - DNA, 25 bp, Probe Sequence
gcttgctgatattgttacggaactt

SEQ ID NO: 113246 - DNA, 25 bp, Probe Sequence
cagcaatagtggataacaatctgaa

SEQ ID NO: 113247 - DNA, 25 bp, Probe Sequence
acacatctgtcctatatcaacctta

SEQ ID NO: 113248 - DNA, 25 bp, Probe Sequence
tacacatctgtcctatatcaacctt

SEQ ID NO: 113249 - DNA, 25 bp, Probe Sequence
aaccttaccacttatattcatcaca

SEQ ID NO: 113250 - DNA, 25 bp, Probe Sequence
gtacacatctgtcctatatcaacct

SEQ ID NO: 113251 - DNA, 25 bp, Probe Sequence
agtacacatctgtcctatatcaacc

SEQ ID NO: 113252 - DNA, 25 bp, Probe Sequence
tggaagtcattgaactatgttatca

SEQ ID NO: 113253 - DNA, 25 bp, Probe Sequence
gcaatagtggataacaatctgaatt

SEQ ID NO: 113254 - DNA, 25 bp, Probe Sequence
acctcatataatacttgctcaacag

SEQ ID NO: 113255 - DNA, 25 bp, Probe Sequence
ctaatcctccattaagcgagcatac

SEQ ID NO: 113256 - DNA, 25 bp, Probe Sequence
tctaatcctccattaagcgagcata

SEQ ID NO: 113257 - DNA, 25 bp, Probe Sequence
tatgctgagtagtccagagagttaa

SEQ ID NO: 113258 - DNA, 25 bp, Probe Sequence
ttatgctgagtagtccagagagtta

SEQ ID NO: 113259 - DNA, 25 bp, Probe Sequence
cctcatataatacttgctcaacagt

SEQ ID NO: 113260 - DNA, 25 bp, Probe Sequence
cttatgctgagtagtccagagagtt

SEQ ID NO: 113261 - DNA, 25 bp, Probe Sequence
taagaaccagagccatagaattatt

SEQ ID NO: 113262 - DNA, 25 bp, Probe Sequence
ttaagaaccagagccatagaattat

SEQ ID NO: 113263 - DNA, 25 bp, Probe Sequence
taccttatgctgagtagtccagaga

SEQ ID NO: 113264 - DNA, 25 bp, Probe Sequence
tacctcatataatacttgctcaaca

SEQ ID NO: 113265 - DNA, 25 bp, Probe Sequence
taatcctccattaagcgagcatacc

SEQ ID NO: 113266 - DNA, 25 bp, Probe Sequence
ctctaatcctccattaagcgagcat

SEQ ID NO: 113267 - DNA, 25 bp, Probe Sequence
cctcaagtgggtctattagcattta

SEQ ID NO: 113268 - DNA, 25 bp, Probe Sequence
tcactccaccaaatcttacaaatca

SEQ ID NO: 113269 - DNA, 25 bp, Probe Sequence
tacttgctcaacagtatagtggtac

SEQ ID NO: 113270 - DNA, 25 bp, Probe Sequence
cactccaccaaatcttacaaatcat

SEQ ID NO: 113271 - DNA, 25 bp, Probe Sequence
ttcactccaccaaatcttacaaatc

SEQ ID NO: 113272 - DNA, 25 bp, Probe Sequence
tactaaatatcacactgcgatggag

SEQ ID NO: 113273 - DNA, 25 bp, Probe Sequence
atactaaatatcacactgcgatgga

SEQ ID NO: 113274 - DNA, 25 bp, Probe Sequence
taccaatgcaactactctacatagc

SEQ ID NO: 113275 - DNA, 25 bp, Probe Sequence
attatgtgcaatgttcaatacctca

SEQ ID NO: 113276 - DNA, 25 bp, Probe Sequence
accatttccagatttgagtttgaag

SEQ ID NO: 113277 - DNA, 25 bp, Probe Sequence
tttcactccaccaaatcttacaaat

SEQ ID NO: 113278 - DNA, 25 bp, Probe Sequence
catggacaatgagaatgtgaggttc

SEQ ID NO: 113279 - DNA, 25 bp, Probe Sequence
atggacaatgagaatgtgaggttcc

SEQ ID NO: 113280 - DNA, 25 bp, Probe Sequence
tggacaatgagaatgtgaggttccc

SEQ ID NO: 113281 - DNA, 25 bp, Probe Sequence
ccatggacaatgagaatgtgaggtt

SEQ ID NO: 113282 - DNA, 25 bp, Probe Sequence
gacaatgagaatgtgaggttcccct

SEQ ID NO: 113283 - DNA, 25 bp, Probe Sequence
ggacaatgagaatgtgaggttcccc

SEQ ID NO: 113284 - DNA, 25 bp, Probe Sequence
acaatgagaatgtgaggttcccctc

SEQ ID NO: 113285 - DNA, 25 bp, Probe Sequence
ggcagttggagtctctacattatta

SEQ ID NO: 113286 - DNA, 25 bp, Probe Sequence
tggagtctctacattattaggcttg

SEQ ID NO: 113287 - DNA, 25 bp, Probe Sequence
gttggagtctctacattattaggct

SEQ ID NO: 113288 - DNA, 25 bp, Probe Sequence
agttggagtctctacattattaggc

SEQ ID NO: 113289 - DNA, 25 bp, Probe Sequence
taaggcagttggagtctctacatta

SEQ ID NO: 113290 - DNA, 25 bp, Probe Sequence
ggagtctctacattattaggcttgc

SEQ ID NO: 113291 - DNA, 25 bp, Probe Sequence
ttggagtctctacattattaggctt

SEQ ID NO: 113292 - DNA, 25 bp, Probe Sequence
gcagttggagtctctacattattag

SEQ ID NO: 113293 - DNA, 25 bp, Probe Sequence
aggcagttggagtctctacattatt

SEQ ID NO: 113294 - DNA, 25 bp, Probe Sequence
aaggcagttggagtctctacattat

SEQ ID NO: 113295 - DNA, 25 bp, Probe Sequence
ttaaggcagttggagtctctacatt

SEQ ID NO: 113296 - DNA, 25 bp, Probe Sequence
cagttggagtctctacattattagg

SEQ ID NO: 113297 - DNA, 25 bp, Probe Sequence
gagtctctacattattaggcttgca

SEQ ID NO: 113298 - DNA, 25 bp, Probe Sequence
agtctctacattattaggcttgcat

SEQ ID NO: 113299 - DNA, 25 bp, Probe Sequence
ttccattgctccttagatccacatc

SEQ ID NO: 113300 - DNA, 25 bp, Probe Sequence
atgagtaagtcttagcaagctcttc

SEQ ID NO: 113301 - DNA, 25 bp, Probe Sequence
catgagtaagtcttagcaagctctt

SEQ ID NO: 113302 - DNA, 25 bp, Probe Sequence
gtctctacattattaggcttgcatt

SEQ ID NO: 113303 - DNA, 25 bp, Probe Sequence
cagttctttccattgctccttagat

SEQ ID NO: 113304 - DNA, 25 bp, Probe Sequence
ctcagttctttccattgctccttag

SEQ ID NO: 113305 - DNA, 25 bp, Probe Sequence
tttaaggcagttggagtctctacat

SEQ ID NO: 113306 - DNA, 25 bp, Probe Sequence
gcagatacaaacaaagcatgagtaa

SEQ ID NO: 113307 - DNA, 25 bp, Probe Sequence
agttctttccattgctccttagatc

SEQ ID NO: 113308 - DNA, 25 bp, Probe Sequence
tcagttctttccattgctccttaga

SEQ ID NO: 113309 - DNA, 25 bp, Probe Sequence
gtgtgtgctgatgagattctaagtt

SEQ ID NO: 113310 - DNA, 25 bp, Probe Sequence
gagtgtgtgctgatgagattctaag

SEQ ID NO: 113311 - DNA, 25 bp, Probe Sequence
agtgtgtgctgatgagattctaagt

SEQ ID NO: 113312 - DNA, 25 bp, Probe Sequence
agagtgtgtgctgatgagattctaa

SEQ ID NO: 113313 - DNA, 25 bp, Probe Sequence
aactaatcacagccaagtacctatg

SEQ ID NO: 113314 - DNA, 25 bp, Probe Sequence
gagagtgtgtgctgatgagattcta

SEQ ID NO: 113315 - DNA, 25 bp, Probe Sequence
agtaatggtagaataagccaacctg

SEQ ID NO: 113316 - DNA, 25 bp, Probe Sequence
gtagtaatggtagaataagccaacc

SEQ ID NO: 113317 - DNA, 25 bp, Probe Sequence
tttgaatgcggtgtagaaatgttta

SEQ ID NO: 113318 - DNA, 25 bp, Probe Sequence
tcggtaactgaatgtatcttaatca

SEQ ID NO: 113319 - DNA, 25 bp, Probe Sequence
tagtaatggtagaataagccaacct

SEQ ID NO: 113320 - DNA, 25 bp, Probe Sequence
gtgctgatgagattctaagtttgtg

SEQ ID NO: 113321 - DNA, 25 bp, Probe Sequence
gtgtgctgatgagattctaagtttg

SEQ ID NO: 113322 - DNA, 25 bp, Probe Sequence
ttgaatgcggtgtagaaatgtttac

SEQ ID NO: 113323 - DNA, 25 bp, Probe Sequence
gtcaacattagactctacatcttca

SEQ ID NO: 113324 - DNA, 25 bp, Probe Sequence
tgctgatgagattctaagtttgtgt

SEQ ID NO: 113325 - DNA, 25 bp, Probe Sequence
tgtgctgatgagattctaagtttgt

SEQ ID NO: 113326 - DNA, 25 bp, Probe Sequence
tgtgtgctgatgagattctaagttt

SEQ ID NO: 113327 - DNA, 25 bp, Probe Sequence
gaatgcggtgtagaaatgtttactg

SEQ ID NO: 113328 - DNA, 25 bp, Probe Sequence
ctgatgagattctaagtttgtgtgt

SEQ ID NO: 113329 - DNA, 25 bp, Probe Sequence
tggctgagaagacttaaactttaca

SEQ ID NO: 113330 - DNA, 25 bp, Probe Sequence
gtggctgagaagacttaaactttac

SEQ ID NO: 113331 - DNA, 25 bp, Probe Sequence
tgtggctgagaagacttaaacttta

SEQ ID NO: 113332 - DNA, 25 bp, Probe Sequence
gtgtagaaatgtttactgtggtgta

SEQ ID NO: 113333 - DNA, 25 bp, Probe Sequence
atgacctagaagatgaagtctatgc

SEQ ID NO: 113334 - DNA, 25 bp, Probe Sequence
cgatgacctagaagatgaagtctat

SEQ ID NO: 113335 - DNA, 25 bp, Probe Sequence
ctcctctcctttccattctctctat

SEQ ID NO: 113336 - DNA, 25 bp, Probe Sequence
tgacctagaagatgaagtctatgcc

SEQ ID NO: 113337 - DNA, 25 bp, Probe Sequence
cctcctttgctgcttaataaattct

SEQ ID NO: 113338 - DNA, 25 bp, Probe Sequence
ccctcctttgctgcttaataaattc

SEQ ID NO: 113339 - DNA, 25 bp, Probe Sequence
tcctctcctttccattctctctatg

SEQ ID NO: 113340 - DNA, 25 bp, Probe Sequence
accctcctttgctgcttaataaatt

SEQ ID NO: 113341 - DNA, 25 bp, Probe Sequence
gctgcttaataaattctgaacttgg

SEQ ID NO: 113342 - DNA, 25 bp, Probe Sequence
tcctttgctgcttaataaattctga

SEQ ID NO: 113343 - DNA, 25 bp, Probe Sequence
tctcctctcctttccattctctcta

SEQ ID NO: 113344 - DNA, 25 bp, Probe Sequence
gatgacctagaagatgaagtctatg

SEQ ID NO: 113345 - DNA, 25 bp, Probe Sequence
ctcctttgctgcttaataaattctg

SEQ ID NO: 113346 - DNA, 25 bp, Probe Sequence
aagtctatgcccagaagatgaagta

SEQ ID NO: 113347 - DNA, 25 bp, Probe Sequence
caccctcctttgctgcttaataaat

SEQ ID NO: 113348 - DNA, 25 bp, Probe Sequence
aagatgaagtctatgcccagaagat

SEQ ID NO: 113349 - DNA, 25 bp, Probe Sequence
tcgatgacctagaagatgaagtcta

SEQ ID NO: 113350 - DNA, 25 bp, Probe Sequence
gacaagtattccaccaaagaagata

SEQ ID NO: 113351 - DNA, 25 bp, Probe Sequence
tgctgcttaataaattctgaacttg

SEQ ID NO: 113352 - DNA, 25 bp, Probe Sequence
cctttgctgcttaataaattctgaa

SEQ ID NO: 113353 - DNA, 25 bp, Probe Sequence
cttctctcctctcctttccattctc

SEQ ID NO: 113354 - DNA, 25 bp, Probe Sequence
ctcttctctcctctcctttccattc

SEQ ID NO: 113355 - DNA, 25 bp, Probe Sequence
ctatgcccagaagatgaagtacaag

SEQ ID NO: 113356 - DNA, 25 bp, Probe Sequence
atgaagtctatgcccagaagatgaa

SEQ ID NO: 113357 - DNA, 25 bp, Probe Sequence
tataggtgacgggcagaattattgg

SEQ ID NO: 113358 - DNA, 25 bp, Probe Sequence
ctataggtgacgggcagaattattg

SEQ ID NO: 113359 - DNA, 25 bp, Probe Sequence
tatacatgttgagatggaagagctg

SEQ ID NO: 113360 - DNA, 25 bp, Probe Sequence
catatacatgttgagatggaagagc

SEQ ID NO: 113361 - DNA, 25 bp, Probe Sequence
atatacatgttgagatggaagagct

SEQ ID NO: 113362 - DNA, 25 bp, Probe Sequence
aacctgcttcttcaaacagaacttt

SEQ ID NO: 113363 - DNA, 25 bp, Probe Sequence
tttccaacctgcttcttcaaacaga

SEQ ID NO: 113364 - DNA, 25 bp, Probe Sequence
caacctgcttcttcaaacagaactt

SEQ ID NO: 113365 - DNA, 25 bp, Probe Sequence
cttcttcaaacagaactttgttggt

SEQ ID NO: 113366 - DNA, 25 bp, Probe Sequence
tcatatacatgttgagatggaagag

SEQ ID NO: 113367 - DNA, 25 bp, Probe Sequence
ttcttcaaacagaactttgttggtg

SEQ ID NO: 113368 - DNA, 25 bp, Probe Sequence
ctgcttcttcaaacagaactttgtt

SEQ ID NO: 113369 - DNA, 25 bp, Probe Sequence
cctgcttcttcaaacagaactttgt

SEQ ID NO: 113370 - DNA, 25 bp, Probe Sequence
acctgcttcttcaaacagaactttg

SEQ ID NO: 113371 - DNA, 25 bp, Probe Sequence
tgcttcttcaaacagaactttgttg

SEQ ID NO: 113372 - DNA, 25 bp, Probe Sequence
cttttccaacctgcttcttcaaaca

SEQ ID NO: 113373 - DNA, 25 bp, Probe Sequence
acttttccaacctgcttcttcaaac

SEQ ID NO: 113374 - DNA, 25 bp, Probe Sequence
cacttttccaacctgcttcttcaaa

SEQ ID NO: 113375 - DNA, 25 bp, Probe Sequence
gaattattgggtagggcgggaagat

SEQ ID NO: 113376 - DNA, 25 bp, Probe Sequence
cctgattttggctttagaaaacatt

SEQ ID NO: 113377 - DNA, 25 bp, Probe Sequence
gcttcttcaaacagaactttgttgg

SEQ ID NO: 113378 - DNA, 25 bp, Probe Sequence
atacatgttgagatggaagagctgc

SEQ ID NO: 113379 - DNA, 25 bp, Probe Sequence
ttccaacctgcttcttcaaacagaa

SEQ ID NO: 113380 - DNA, 25 bp, Probe Sequence
aattattgggtagggcgggaagatg

SEQ ID NO: 113381 - DNA, 25 bp, Probe Sequence
gcccaatattcaaagctgctaaatg

SEQ ID NO: 113382 - DNA, 25 bp, Probe Sequence
aaaggagatgcccaatattcaaagc

SEQ ID NO: 113383 - DNA, 25 bp, Probe Sequence
tgcccaatattcaaagctgctaaat

SEQ ID NO: 113384 - DNA, 25 bp, Probe Sequence
atgcccaatattcaaagctgctaaa

SEQ ID NO: 113385 - DNA, 25 bp, Probe Sequence
gatgcccaatattcaaagctgctaa

SEQ ID NO: 113386 - DNA, 25 bp, Probe Sequence
aaggagatgcccaatattcaaagct

SEQ ID NO: 113387 - DNA, 25 bp, Probe Sequence
agatgcccaatattcaaagctgcta

SEQ ID NO: 113388 - DNA, 25 bp, Probe Sequence
aggagatgcccaatattcaaagctg

SEQ ID NO: 113389 - DNA, 25 bp, Probe Sequence
aaaaggagatgcccaatattcaaag

SEQ ID NO: 113390 - DNA, 25 bp, Probe Sequence
gagatgcccaatattcaaagctgct

SEQ ID NO: 113391 - DNA, 25 bp, Probe Sequence
ggagatgcccaatattcaaagctgc

SEQ ID NO: 113392 - DNA, 25 bp, Probe Sequence
cttcaggcagcagtgtttatctctg

SEQ ID NO: 113393 - DNA, 25 bp, Probe Sequence
ttcaggcagcagtgtttatctctgg

SEQ ID NO: 113394 - DNA, 25 bp, Probe Sequence
gcttcaggcagcagtgtttatctct

SEQ ID NO: 113395 - DNA, 25 bp, Probe Sequence
agcttcaggcagcagtgtttatctc

SEQ ID NO: 113396 - DNA, 25 bp, Probe Sequence
gagcttcaggcagcagtgtttatct

SEQ ID NO: 113397 - DNA, 25 bp, Probe Sequence
aattgtatctgagcacacataggaa

SEQ ID NO: 113398 - DNA, 25 bp, Probe Sequence
tcactaattgtatctgagcacacat

SEQ ID NO: 113399 - DNA, 25 bp, Probe Sequence
ttcactaattgtatctgagcacaca

SEQ ID NO: 113400 - DNA, 25 bp, Probe Sequence
cttcactaattgtatctgagcacac

SEQ ID NO: 113401 - DNA, 25 bp, Probe Sequence
taattgtatctgagcacacatagga

SEQ ID NO: 113402 - DNA, 25 bp, Probe Sequence
ctaattgtatctgagcacacatagg

SEQ ID NO: 113403 - DNA, 25 bp, Probe Sequence
cactaattgtatctgagcacacata

SEQ ID NO: 113404 - DNA, 25 bp, Probe Sequence
actaattgtatctgagcacacatag

SEQ ID NO: 113405 - DNA, 25 bp, Probe Sequence
atctgagcacacataggaaagtcta

SEQ ID NO: 113406 - DNA, 25 bp, Probe Sequence
tatctgagcacacataggaaagtct

SEQ ID NO: 113407 - DNA, 25 bp, Probe Sequence
gtatctgagcacacataggaaagtc

SEQ ID NO: 113408 - DNA, 25 bp, Probe Sequence
cagaactgatccttgacacttccaa

SEQ ID NO: 113409 - DNA, 25 bp, Probe Sequence
attgtatctgagcacacataggaaa

SEQ ID NO: 113410 - DNA, 25 bp, Probe Sequence
gcttcactaattgtatctgagcaca

SEQ ID NO: 113411 - DNA, 25 bp, Probe Sequence
ttgtatctgagcacacataggaaag

SEQ ID NO: 113412 - DNA, 25 bp, Probe Sequence
tctgagcacacataggaaagtctag

SEQ ID NO: 113413 - DNA, 25 bp, Probe Sequence
ttatggctctgtagcaactgagtaa

SEQ ID NO: 113414 - DNA, 25 bp, Probe Sequence
cacagaactgatccttgacacttcc

SEQ ID NO: 113415 - DNA, 25 bp, Probe Sequence
ccacagaactgatccttgacacttc

SEQ ID NO: 113416 - DNA, 25 bp, Probe Sequence
tgtatctgagcacacataggaaagt

SEQ ID NO: 113417 - DNA, 25 bp, Probe Sequence
tatggctctgtagcaactgagtaac

SEQ ID NO: 113418 - DNA, 25 bp, Probe Sequence
acagaactgatccttgacacttcca

SEQ ID NO: 113419 - DNA, 25 bp, Probe Sequence
agaactgatccttgacacttccaaa

SEQ ID NO: 113420 - DNA, 25 bp, Probe Sequence
ttcaatgtcatgcagttgccaattc

SEQ ID NO: 113421 - DNA, 25 bp, Probe Sequence
tagagatcaccaatctggactgtac

SEQ ID NO: 113422 - DNA, 25 bp, Probe Sequence
gtagagatcaccaatctggactgta

SEQ ID NO: 113423 - DNA, 25 bp, Probe Sequence
gagatcaccaatctggactgtactc

SEQ ID NO: 113424 - DNA, 25 bp, Probe Sequence
ctgtagagatcaccaatctggactg

SEQ ID NO: 113425 - DNA, 25 bp, Probe Sequence
agagatcaccaatctggactgtact

SEQ ID NO: 113426 - DNA, 25 bp, Probe Sequence
tgtagagatcaccaatctggactgt

SEQ ID NO: 113427 - DNA, 25 bp, Probe Sequence
aaatgtttctgcacctgtagagatc

SEQ ID NO: 113428 - DNA, 25 bp, Probe Sequence
cctgtagagatcaccaatctggact

SEQ ID NO: 113429 - DNA, 25 bp, Probe Sequence
aatgtttctgcacctgtagagatca

SEQ ID NO: 113430 - DNA, 25 bp, Probe Sequence
ttctgcacctgtagagatcaccaat

SEQ ID NO: 113431 - DNA, 25 bp, Probe Sequence
acctgtagagatcaccaatctggac

SEQ ID NO: 113432 - DNA, 25 bp, Probe Sequence
cacctgtagagatcaccaatctgga

SEQ ID NO: 113433 - DNA, 25 bp, Probe Sequence
agatcaccaatctggactgtactcg

SEQ ID NO: 113434 - DNA, 25 bp, Probe Sequence
atgtttctgcacctgtagagatcac

SEQ ID NO: 113435 - DNA, 25 bp, Probe Sequence
tctgcacctgtagagatcaccaatc

SEQ ID NO: 113436 - DNA, 25 bp, Probe Sequence
gatcaccaatctggactgtactcgg

SEQ ID NO: 113437 - DNA, 25 bp, Probe Sequence
aaaatgtttctgcacctgtagagat

SEQ ID NO: 113438 - DNA, 25 bp, Probe Sequence
ctgcacctgtagagatcaccaatct

SEQ ID NO: 113439 - DNA, 25 bp, Probe Sequence
tttctgcacctgtagagatcaccaa

SEQ ID NO: 113440 - DNA, 25 bp, Probe Sequence
tgcacctgtagagatcaccaatctg

SEQ ID NO: 113441 - DNA, 25 bp, Probe Sequence
gcacctgtagagatcaccaatctgg

SEQ ID NO: 113442 - DNA, 25 bp, Probe Sequence
gtttctgcacctgtagagatcacca

SEQ ID NO: 113443 - DNA, 25 bp, Probe Sequence
tgtttctgcacctgtagagatcacc

SEQ ID NO: 113444 - DNA, 25 bp, Probe Sequence
attcaactccccacggaattgaaaa

SEQ ID NO: 113445 - DNA, 25 bp, Probe Sequence
tgttccttttccacagattgtctaa

SEQ ID NO: 113446 - DNA, 25 bp, Probe Sequence
gttccttttccacagattgtctaaa

SEQ ID NO: 113447 - DNA, 25 bp, Probe Sequence
gtgttccttttccacagattgtcta

SEQ ID NO: 113448 - DNA, 25 bp, Probe Sequence
ttccttttccacagattgtctaaag

SEQ ID NO: 113449 - DNA, 25 bp, Probe Sequence
cagattgtctaaagccccaggaaaa

SEQ ID NO: 113450 - DNA, 25 bp, Probe Sequence
tccttttccacagattgtctaaagc

SEQ ID NO: 113451 - DNA, 25 bp, Probe Sequence
cttttccacagattgtctaaagccc

SEQ ID NO: 113452 - DNA, 25 bp, Probe Sequence
ccttttccacagattgtctaaagcc

SEQ ID NO: 113453 - DNA, 25 bp, Probe Sequence
ttttccacagattgtctaaagcccc

SEQ ID NO: 113454 - DNA, 25 bp, Probe Sequence
acagattgtctaaagccccaggaaa

SEQ ID NO: 113455 - DNA, 25 bp, Probe Sequence
tttccacagattgtctaaagcccca

SEQ ID NO: 113456 - DNA, 25 bp, Probe Sequence
ctgacgctgattgtgttccttttcc

SEQ ID NO: 113457 - DNA, 25 bp, Probe Sequence
cacagattgtctaaagccccaggaa

SEQ ID NO: 113458 - DNA, 25 bp, Probe Sequence
ttccacagattgtctaaagccccag

SEQ ID NO: 113459 - DNA, 25 bp, Probe Sequence
gctgacgctgattgtgttccttttc

SEQ ID NO: 113460 - DNA, 25 bp, Probe Sequence
gattgtgttccttttccacagattg

SEQ ID NO: 113461 - DNA, 25 bp, Probe Sequence
tgattgtgttccttttccacagatt

SEQ ID NO: 113462 - DNA, 25 bp, Probe Sequence
attgtgttccttttccacagattgt

SEQ ID NO: 113463 - DNA, 25 bp, Probe Sequence
gacgctgattgtgttccttttccac

SEQ ID NO: 113464 - DNA, 25 bp, Probe Sequence
ctgattgtgttccttttccacagat

SEQ ID NO: 113465 - DNA, 25 bp, Probe Sequence
ttgtgttccttttccacagattgtc

SEQ ID NO: 113466 - DNA, 25 bp, Probe Sequence
tgtgttccttttccacagattgtct

SEQ ID NO: 113467 - DNA, 25 bp, Probe Sequence
gctgattgtgttccttttccacaga

SEQ ID NO: 113468 - DNA, 25 bp, Probe Sequence
cgctgattgtgttccttttccacag

SEQ ID NO: 113469 - DNA, 25 bp, Probe Sequence
cacaaggtcaattcacaactgatat

SEQ ID NO: 113470 - DNA, 25 bp, Probe Sequence
ccacaaggtcaattcacaactgata

SEQ ID NO: 113471 - DNA, 25 bp, Probe Sequence
agatcaatcacttgtatgtctcacg

SEQ ID NO: 113472 - DNA, 25 bp, Probe Sequence
catgagatcaatcacttgtatgtct

SEQ ID NO: 113473 - DNA, 25 bp, Probe Sequence
gatcaatcacttgtatgtctcacgc

SEQ ID NO: 113474 - DNA, 25 bp, Probe Sequence
atcaatcacttgtatgtctcacgca

SEQ ID NO: 113475 - DNA, 25 bp, Probe Sequence
gtaatcctcctaatgaacccacaag

SEQ ID NO: 113476 - DNA, 25 bp, Probe Sequence
gatatgtttactcccaatctcccat

SEQ ID NO: 113477 - DNA, 25 bp, Probe Sequence
tatgtttactcccaatctcccattt

SEQ ID NO: 113478 - DNA, 25 bp, Probe Sequence
tgatatgtttactcccaatctccca

SEQ ID NO: 113479 - DNA, 25 bp, Probe Sequence
atcacttgtatgtctcacgcaactt

SEQ ID NO: 113480 - DNA, 25 bp, Probe Sequence
aatcacttgtatgtctcacgcaact

SEQ ID NO: 113481 - DNA, 25 bp, Probe Sequence
caatcacttgtatgtctcacgcaac

SEQ ID NO: 113482 - DNA, 25 bp, Probe Sequence
tcaatcacttgtatgtctcacgcaa

SEQ ID NO: 113483 - DNA, 25 bp, Probe Sequence
atatgtttactcccaatctcccatt

SEQ ID NO: 113484 - DNA, 25 bp, Probe Sequence
ttgatatgtttactcccaatctccc

SEQ ID NO: 113485 - DNA, 25 bp, Probe Sequence
agatataagtagaggaagctcacct

SEQ ID NO: 113486 - DNA, 25 bp, Probe Sequence
cttgatatgtttactcccaatctcc

SEQ ID NO: 113487 - DNA, 25 bp, Probe Sequence
tagatataagtagaggaagctcacc

SEQ ID NO: 113488 - DNA, 25 bp, Probe Sequence
acaaggtcaattcacaactgatatc

SEQ ID NO: 113489 - DNA, 25 bp, Probe Sequence
caaggtcaattcacaactgatatct

SEQ ID NO: 113490 - DNA, 25 bp, Probe Sequence
ggattcctaagtcaaagaccagttt

SEQ ID NO: 113491 - DNA, 25 bp, Probe Sequence
aaggtcaattcacaactgatatctt

SEQ ID NO: 113492 - DNA, 25 bp, Probe Sequence
tgtagatataagtagaggaagctca

SEQ ID NO: 113493 - DNA, 25 bp, Probe Sequence
attgatgaccagattacaagcacct

SEQ ID NO: 113494 - DNA, 25 bp, Probe Sequence
cattgatgaccagattacaagcacc

SEQ ID NO: 113495 - DNA, 25 bp, Probe Sequence
ggatgagatacagacaaggatagct

SEQ ID NO: 113496 - DNA, 25 bp, Probe Sequence
ttgatgaccagattacaagcacctt

SEQ ID NO: 113497 - DNA, 25 bp, Probe Sequence
ttagggatgagatacagacaaggat

SEQ ID NO: 113498 - DNA, 25 bp, Probe Sequence
attagggatgagatacagacaagga

SEQ ID NO: 113499 - DNA, 25 bp, Probe Sequence
tagggatgagatacagacaaggata

SEQ ID NO: 113500 - DNA, 25 bp, Probe Sequence
agggatgagatacagacaaggatag

SEQ ID NO: 113501 - DNA, 25 bp, Probe Sequence
atggcattgatgaccagattacaag

SEQ ID NO: 113502 - DNA, 25 bp, Probe Sequence
gatggcattgatgaccagattacaa

SEQ ID NO: 113503 - DNA, 25 bp, Probe Sequence
tattagggatgagatacagacaagg

SEQ ID NO: 113504 - DNA, 25 bp, Probe Sequence
gcattgatgaccagattacaagcac

SEQ ID NO: 113505 - DNA, 25 bp, Probe Sequence
gggatgagatacagacaaggatagc

SEQ ID NO: 113506 - DNA, 25 bp, Probe Sequence
ctattagggatgagatacagacaag

SEQ ID NO: 113507 - DNA, 25 bp, Probe Sequence
gatgagatacagacaaggatagcta

SEQ ID NO: 113508 - DNA, 25 bp, Probe Sequence
acctattagggatgagatacagaca

SEQ ID NO: 113509 - DNA, 25 bp, Probe Sequence
tgatgaccagattacaagcaccttt

SEQ ID NO: 113510 - DNA, 25 bp, Probe Sequence
ggcattgatgaccagattacaagca

SEQ ID NO: 113511 - DNA, 25 bp, Probe Sequence
ggatggcattgatgaccagattaca

SEQ ID NO: 113512 - DNA, 25 bp, Probe Sequence
cctattagggatgagatacagacaa

SEQ ID NO: 113513 - DNA, 25 bp, Probe Sequence
tacctattagggatgagatacagac

SEQ ID NO: 113514 - DNA, 25 bp, Probe Sequence
gtacctattagggatgagatacaga

SEQ ID NO: 113515 - DNA, 25 bp, Probe Sequence
tggcattgatgaccagattacaagc

SEQ ID NO: 113516 - DNA, 25 bp, Probe Sequence
atgaccagattacaagcaccttttc

SEQ ID NO: 113517 - DNA, 25 bp, Probe Sequence
atgaaaggagattccaacctacttc

SEQ ID NO: 113518 - DNA, 25 bp, Probe Sequence
aatgaaaggagattccaacctactt

SEQ ID NO: 113519 - DNA, 25 bp, Probe Sequence
aaatgaaaggagattccaacctact

SEQ ID NO: 113520 - DNA, 25 bp, Probe Sequence
tgaaatgaaaggagattccaaccta

SEQ ID NO: 113521 - DNA, 25 bp, Probe Sequence
cttgaaatgaaaggagattccaacc

SEQ ID NO: 113522 - DNA, 25 bp, Probe Sequence
acttgaaatgaaaggagattccaac

SEQ ID NO: 113523 - DNA, 25 bp, Probe Sequence
gagattccaacctacttcagcaagc

SEQ ID NO: 113524 - DNA, 25 bp, Probe Sequence
gaaatgaaaggagattccaacctac

SEQ ID NO: 113525 - DNA, 25 bp, Probe Sequence
ttgaaatgaaaggagattccaacct

SEQ ID NO: 113526 - DNA, 25 bp, Probe Sequence
tcaggatttacttgaaatgaaagga

SEQ ID NO: 113527 - DNA, 25 bp, Probe Sequence
gaaaggagattccaacctacttcag

SEQ ID NO: 113528 - DNA, 25 bp, Probe Sequence
aggatttacttgaaatgaaaggaga

SEQ ID NO: 113529 - DNA, 25 bp, Probe Sequence
caggatttacttgaaatgaaaggag

SEQ ID NO: 113530 - DNA, 25 bp, Probe Sequence
ctcaggatttacttgaaatgaaagg

SEQ ID NO: 113531 - DNA, 25 bp, Probe Sequence
ggagattccaacctacttcagcaag

SEQ ID NO: 113532 - DNA, 25 bp, Probe Sequence
tacttgaaatgaaaggagattccaa

SEQ ID NO: 113533 - DNA, 25 bp, Probe Sequence
ttacttgaaatgaaaggagattcca

SEQ ID NO: 113534 - DNA, 25 bp, Probe Sequence
aggagattccaacctacttcagcaa

SEQ ID NO: 113535 - DNA, 25 bp, Probe Sequence
aaggagattccaacctacttcagca

SEQ ID NO: 113536 - DNA, 25 bp, Probe Sequence
actcaggatttacttgaaatgaaag

SEQ ID NO: 113537 - DNA, 25 bp, Probe Sequence
ggatttacttgaaatgaaaggagat

SEQ ID NO: 113538 - DNA, 25 bp, Probe Sequence
aactcaggatttacttgaaatgaaa

SEQ ID NO: 113539 - DNA, 25 bp, Probe Sequence
aaaggagattccaacctacttcagc

SEQ ID NO: 113540 - DNA, 25 bp, Probe Sequence
tttacttgaaatgaaaggagattcc

SEQ ID NO: 113541 - DNA, 25 bp, Probe Sequence
gagcagaggacccagttgttataag

SEQ ID NO: 113542 - DNA, 25 bp, Probe Sequence
tagacttaaagatggggtgctattg

SEQ ID NO: 113543 - DNA, 25 bp, Probe Sequence
ctagacttaaagatggggtgctatt

SEQ ID NO: 113544 - DNA, 25 bp, Probe Sequence
ccagggacttcttctctagacttaa

SEQ ID NO: 113545 - DNA, 25 bp, Probe Sequence
cagggacttcttctctagacttaaa

SEQ ID NO: 113546 - DNA, 25 bp, Probe Sequence
agggacttcttctctagacttaaag

SEQ ID NO: 113547 - DNA, 25 bp, Probe Sequence
agacttaaagatggggtgctattgg

SEQ ID NO: 113548 - DNA, 25 bp, Probe Sequence
cccagggacttcttctctagactta

SEQ ID NO: 113549 - DNA, 25 bp, Probe Sequence
aagtgaagaagaaggcagtgggaaa

SEQ ID NO: 113550 - DNA, 25 bp, Probe Sequence
agcagaggacccagttgttataagg

SEQ ID NO: 113551 - DNA, 25 bp, Probe Sequence
ggagcagaggacccagttgttataa

SEQ ID NO: 113552 - DNA, 25 bp, Probe Sequence
gttccataaaggtggctccagaaag

SEQ ID NO: 113553 - DNA, 25 bp, Probe Sequence
aggagcagaggacccagttgttata

SEQ ID NO: 113554 - DNA, 25 bp, Probe Sequence
ctcctatccagcttctactgcaagg

SEQ ID NO: 113555 - DNA, 25 bp, Probe Sequence
gggacttcttctctagacttaaaga

SEQ ID NO: 113556 - DNA, 25 bp, Probe Sequence
gacttaaagatggggtgctattggg

SEQ ID NO: 113557 - DNA, 25 bp, Probe Sequence
cttcttctctagacttaaagatggg

SEQ ID NO: 113558 - DNA, 25 bp, Probe Sequence
caagtgaagaagaaggcagtgggaa

SEQ ID NO: 113559 - DNA, 25 bp, Probe Sequence
cttctctagacttaaagatggggtg

SEQ ID NO: 113560 - DNA, 25 bp, Probe Sequence
gtgggaaaactgggtttatctcaag

SEQ ID NO: 113561 - DNA, 25 bp, Probe Sequence
tctagacttaaagatggggtgctat

SEQ ID NO: 113562 - DNA, 25 bp, Probe Sequence
gttgcccacggaaaatccaataaaa

SEQ ID NO: 113563 - DNA, 25 bp, Probe Sequence
ctctagacttaaagatggggtgcta

SEQ ID NO: 113564 - DNA, 25 bp, Probe Sequence
gaaaactgggtttatctcaaggcag

SEQ ID NO: 113565 - DNA, 25 bp, Probe Sequence
gcaatggttgtatcaactatgaaga

SEQ ID NO: 113566 - DNA, 25 bp, Probe Sequence
aatggttgtatcaactatgaagagc

SEQ ID NO: 113567 - DNA, 25 bp, Probe Sequence
atggttgtatcaactatgaagagct

SEQ ID NO: 113568 - DNA, 25 bp, Probe Sequence
caatggttgtatcaactatgaagag

SEQ ID NO: 113569 - DNA, 25 bp, Probe Sequence
ttgtatcaactatgaagagctcgtc

SEQ ID NO: 113570 - DNA, 25 bp, Probe Sequence
tgtatcaactatgaagagctcgtcc

SEQ ID NO: 113571 - DNA, 25 bp, Probe Sequence
gtatcaactatgaagagctcgtccg

SEQ ID NO: 113572 - DNA, 25 bp, Probe Sequence
tggttgtatcaactatgaagagctc

SEQ ID NO: 113573 - DNA, 25 bp, Probe Sequence
gttgtatcaactatgaagagctcgt

SEQ ID NO: 113574 - DNA, 25 bp, Probe Sequence
ggttgtatcaactatgaagagctcg

SEQ ID NO: 113575 - DNA, 25 bp, Probe Sequence
tatcaactatgaagagctcgtccgc

SEQ ID NO: 113576 - DNA, 25 bp, Probe Sequence
ttaaggactatggaatggatctcat

SEQ ID NO: 113577 - DNA, 25 bp, Probe Sequence
ggtgaagaagatagtaggaaacagt

SEQ ID NO: 113578 - DNA, 25 bp, Probe Sequence
cggtgaagaagatagtaggaaacag

SEQ ID NO: 113579 - DNA, 25 bp, Probe Sequence
gtgaagaagatagtaggaaacagtc

SEQ ID NO: 113580 - DNA, 25 bp, Probe Sequence
ggactatggaatggatctcattgaa

SEQ ID NO: 113581 - DNA, 25 bp, Probe Sequence
aaggactatggaatggatctcattg

SEQ ID NO: 113582 - DNA, 25 bp, Probe Sequence
agaagatagtaggaaacagtctgga

SEQ ID NO: 113583 - DNA, 25 bp, Probe Sequence
actatggaatggatctcattgaagt

SEQ ID NO: 113584 - DNA, 25 bp, Probe Sequence
aagatagtaggaaacagtctggatg

SEQ ID NO: 113585 - DNA, 25 bp, Probe Sequence
aagaagatagtaggaaacagtctgg

SEQ ID NO: 113586 - DNA, 25 bp, Probe Sequence
aggactatggaatggatctcattga

SEQ ID NO: 113587 - DNA, 25 bp, Probe Sequence
gaagatagtaggaaacagtctggat

SEQ ID NO: 113588 - DNA, 25 bp, Probe Sequence
gcttaaggactatggaatggatctc

SEQ ID NO: 113589 - DNA, 25 bp, Probe Sequence
cttaaggactatggaatggatctca

SEQ ID NO: 113590 - DNA, 25 bp, Probe Sequence
agcttaaggactatggaatggatct

SEQ ID NO: 113591 - DNA, 25 bp, Probe Sequence
gactatggaatggatctcattgaag

SEQ ID NO: 113592 - DNA, 25 bp, Probe Sequence
tgaagaagatagtaggaaacagtct

SEQ ID NO: 113593 - DNA, 25 bp, Probe Sequence
gatagtaggaaacagtctggatgct

SEQ ID NO: 113594 - DNA, 25 bp, Probe Sequence
actgcggtgaagaagatagtaggaa

SEQ ID NO: 113595 - DNA, 25 bp, Probe Sequence
taaggactatggaatggatctcatt

SEQ ID NO: 113596 - DNA, 25 bp, Probe Sequence
ctatggaatggatctcattgaagtt

SEQ ID NO: 113597 - DNA, 25 bp, Probe Sequence
aactgtgagtcaattaaacctcttt

SEQ ID NO: 113598 - DNA, 25 bp, Probe Sequence
aaactgtgagtcaattaaacctctt

SEQ ID NO: 113599 - DNA, 25 bp, Probe Sequence
agatagtaggaaacagtctggatgc

SEQ ID NO: 113600 - DNA, 25 bp, Probe Sequence
ttatctcactggattctcatggtag

SEQ ID NO: 113601 - DNA, 25 bp, Probe Sequence
tatctcactggattctcatggtagg

SEQ ID NO: 113602 - DNA, 25 bp, Probe Sequence
tgtagattgtatgtccagaatgact

SEQ ID NO: 113603 - DNA, 25 bp, Probe Sequence
ctcactggattctcatggtaggatt

SEQ ID NO: 113604 - DNA, 25 bp, Probe Sequence
ttgtagattgtatgtccagaatgac

SEQ ID NO: 113605 - DNA, 25 bp, Probe Sequence
gtagattgtatgtccagaatgactt

SEQ ID NO: 113606 - DNA, 25 bp, Probe Sequence
aagcagcgaagtctgataatgaatg

SEQ ID NO: 113607 - DNA, 25 bp, Probe Sequence
ctacttacagtgtacttggcattgc

SEQ ID NO: 113608 - DNA, 25 bp, Probe Sequence
gctacttacagtgtacttggcattg

SEQ ID NO: 113609 - DNA, 25 bp, Probe Sequence
ttgctttatctcactggattctcat

SEQ ID NO: 113610 - DNA, 25 bp, Probe Sequence
attgctttatctcactggattctca

SEQ ID NO: 113611 - DNA, 25 bp, Probe Sequence
cattgctttatctcactggattctc

SEQ ID NO: 113612 - DNA, 25 bp, Probe Sequence
tctcactggattctcatggtaggat

SEQ ID NO: 113613 - DNA, 25 bp, Probe Sequence
tgttaagtatggtcgcagtaaatga

SEQ ID NO: 113614 - DNA, 25 bp, Probe Sequence
atgttaagtatggtcgcagtaaatg

SEQ ID NO: 113615 - DNA, 25 bp, Probe Sequence
atctcactggattctcatggtagga

SEQ ID NO: 113616 - DNA, 25 bp, Probe Sequence
tttgaaatcattgtaaagcagcgaa

SEQ ID NO: 113617 - DNA, 25 bp, Probe Sequence
tatggtcgcagtaaatgaaattgtg

SEQ ID NO: 113618 - DNA, 25 bp, Probe Sequence
gtatggtcgcagtaaatgaaattgt

SEQ ID NO: 113619 - DNA, 25 bp, Probe Sequence
agtatggtcgcagtaaatgaaattg

SEQ ID NO: 113620 - DNA, 25 bp, Probe Sequence
gttaagtatggtcgcagtaaatgaa

SEQ ID NO: 113621 - DNA, 25 bp, Probe Sequence
atttgaaatcattgtaaagcagcga

SEQ ID NO: 113622 - DNA, 25 bp, Probe Sequence
gtcagaggcactttatttgtatcat

SEQ ID NO: 113623 - DNA, 25 bp, Probe Sequence
aagtatggtcgcagtaaatgaaatt

SEQ ID NO: 113624 - DNA, 25 bp, Probe Sequence
aactctcatcaggcttccacttcaa

SEQ ID NO: 113625 - DNA, 25 bp, Probe Sequence
aacttgaaactctcatcaggcttcc

SEQ ID NO: 113626 - DNA, 25 bp, Probe Sequence
gaaactctcatcaggcttccacttc

SEQ ID NO: 113627 - DNA, 25 bp, Probe Sequence
ctctcatcaggcttccacttcaaac

SEQ ID NO: 113628 - DNA, 25 bp, Probe Sequence
actctcatcaggcttccacttcaaa

SEQ ID NO: 113629 - DNA, 25 bp, Probe Sequence
aaactctcatcaggcttccacttca

SEQ ID NO: 113630 - DNA, 25 bp, Probe Sequence
cttgaaactctcatcaggcttccac

SEQ ID NO: 113631 - DNA, 25 bp, Probe Sequence
tgaaactctcatcaggcttccactt

SEQ ID NO: 113632 - DNA, 25 bp, Probe Sequence
ttgaaactctcatcaggcttccact

SEQ ID NO: 113633 - DNA, 25 bp, Probe Sequence
acttgaaactctcatcaggcttcca

SEQ ID NO: 113634 - DNA, 25 bp, Probe Sequence
catcaggcttccacttcaaaccttc

SEQ ID NO: 113635 - DNA, 25 bp, Probe Sequence
tctcatcaggcttccacttcaaacc

SEQ ID NO: 113636 - DNA, 25 bp, Probe Sequence
atcaggcttccacttcaaaccttca

SEQ ID NO: 113637 - DNA, 25 bp, Probe Sequence
tcatcaggcttccacttcaaacctt

SEQ ID NO: 113638 - DNA, 25 bp, Probe Sequence
ctcatcaggcttccacttcaaacct

SEQ ID NO: 113639 - DNA, 25 bp, Probe Sequence
tcaggcttccacttcaaaccttcag

SEQ ID NO: 113640 - DNA, 25 bp, Probe Sequence
gcttccacttcaaaccttcagtgag

SEQ ID NO: 113641 - DNA, 25 bp, Probe Sequence
aggaagagatgtattggattagact

SEQ ID NO: 113642 - DNA, 25 bp, Probe Sequence
aaggaagagatgtattggattagac

SEQ ID NO: 113643 - DNA, 25 bp, Probe Sequence
cttgtgtaagttaagtcttgactct

SEQ ID NO: 113644 - DNA, 25 bp, Probe Sequence
ctttgggctttagttcctctcataa

SEQ ID NO: 113645 - DNA, 25 bp, Probe Sequence
taatcttgacctctttgggctttag

SEQ ID NO: 113646 - DNA, 25 bp, Probe Sequence
gtaatcttgacctctttgggcttta

SEQ ID NO: 113647 - DNA, 25 bp, Probe Sequence
ggaagagatgtattggattagacta

SEQ ID NO: 113648 - DNA, 25 bp, Probe Sequence
agaacttaaatagaaggcaacagga

SEQ ID NO: 113649 - DNA, 25 bp, Probe Sequence
cagaacttaaatagaaggcaacagg

SEQ ID NO: 113650 - DNA, 25 bp, Probe Sequence
tctttgggctttagttcctctcata

SEQ ID NO: 113651 - DNA, 25 bp, Probe Sequence
ttgtgtaagttaagtcttgactctt

SEQ ID NO: 113652 - DNA, 25 bp, Probe Sequence
ctatgtaatcttgacctctttgggc

SEQ ID NO: 113653 - DNA, 25 bp, Probe Sequence
gctatgtaatcttgacctctttggg

SEQ ID NO: 113654 - DNA, 25 bp, Probe Sequence
acagaacttaaatagaaggcaacag

SEQ ID NO: 113655 - DNA, 25 bp, Probe Sequence
gaacttaaatagaaggcaacaggaa

SEQ ID NO: 113656 - DNA, 25 bp, Probe Sequence
ttgactttgttagatgagggaggaa

SEQ ID NO: 113657 - DNA, 25 bp, Probe Sequence
tttgactttgttagatgagggagga

SEQ ID NO: 113658 - DNA, 25 bp, Probe Sequence
tttgggctttagttcctctcataaa

SEQ ID NO: 113659 - DNA, 25 bp, Probe Sequence
tgactttgttagatgagggaggaaa

SEQ ID NO: 113660 - DNA, 25 bp, Probe Sequence
gtccattagtaaacttgtgttgcta

SEQ ID NO: 113661 - DNA, 25 bp, Probe Sequence
tatgtaatcttgacctctttgggct

SEQ ID NO: 113662 - DNA, 25 bp, Probe Sequence
aacttaaatagaaggcaacaggaaa

SEQ ID NO: 113663 - DNA, 25 bp, Probe Sequence
gttgctaagtgctaaacagaatact

SEQ ID NO: 113664 - DNA, 25 bp, Probe Sequence
gcagagaaataagtgacccaacaaa

SEQ ID NO: 113665 - DNA, 25 bp, Probe Sequence
tactaatcacctcttctgtcattcc

SEQ ID NO: 113666 - DNA, 25 bp, Probe Sequence
gttactaatcacctcttctgtcatt

SEQ ID NO: 113667 - DNA, 25 bp, Probe Sequence
ttactaatcacctcttctgtcattc

SEQ ID NO: 113668 - DNA, 25 bp, Probe Sequence
taatcacctcttctgtcattccgtc

SEQ ID NO: 113669 - DNA, 25 bp, Probe Sequence
ctaatcacctcttctgtcattccgt

SEQ ID NO: 113670 - DNA, 25 bp, Probe Sequence
actaatcacctcttctgtcattccg

SEQ ID NO: 113671 - DNA, 25 bp, Probe Sequence
ggtaagtgtgatgtcgatggattaa

SEQ ID NO: 113672 - DNA, 25 bp, Probe Sequence
atgtggttactaatcacctcttctg

SEQ ID NO: 113673 - DNA, 25 bp, Probe Sequence
ggttactaatcacctcttctgtcat

SEQ ID NO: 113674 - DNA, 25 bp, Probe Sequence
gtggttactaatcacctcttctgtc

SEQ ID NO: 113675 - DNA, 25 bp, Probe Sequence
gtaagtgtgatgtcgatggattaat

SEQ ID NO: 113676 - DNA, 25 bp, Probe Sequence
tggttactaatcacctcttctgtca

SEQ ID NO: 113677 - DNA, 25 bp, Probe Sequence
ctgtgtgtatcttcatctggctgtt

SEQ ID NO: 113678 - DNA, 25 bp, Probe Sequence
tgtatcttcatctggctgtttactt

SEQ ID NO: 113679 - DNA, 25 bp, Probe Sequence
taatctgactgtagctcataagacc

SEQ ID NO: 113680 - DNA, 25 bp, Probe Sequence
tgtggttactaatcacctcttctgt

SEQ ID NO: 113681 - DNA, 25 bp, Probe Sequence
gtgtatcttcatctggctgtttact

SEQ ID NO: 113682 - DNA, 25 bp, Probe Sequence
gtgtgtatcttcatctggctgttta

SEQ ID NO: 113683 - DNA, 25 bp, Probe Sequence
tatgtggttactaatcacctcttct

SEQ ID NO: 113684 - DNA, 25 bp, Probe Sequence
tgtgtatcttcatctggctgtttac

SEQ ID NO: 113685 - DNA, 25 bp, Probe Sequence
cctgtcattgagaagaaagcattat

SEQ ID NO: 113686 - DNA, 25 bp, Probe Sequence
taagtgtgatgtcgatggattaatt

SEQ ID NO: 113687 - DNA, 25 bp, Probe Sequence
ttcatctggctgtttacttatttgt

SEQ ID NO: 113688 - DNA, 25 bp, Probe Sequence
tcggaaggagaatgtttatctgttt

SEQ ID NO: 113689 - DNA, 25 bp, Probe Sequence
actacctaattgttactgtggagat

SEQ ID NO: 113690 - DNA, 25 bp, Probe Sequence
gactcaattcaggctatgtatgact

SEQ ID NO: 113691 - DNA, 25 bp, Probe Sequence
tactacctaattgttactgtggaga

SEQ ID NO: 113692 - DNA, 25 bp, Probe Sequence
actcaattcaggctatgtatgacta

SEQ ID NO: 113693 - DNA, 25 bp, Probe Sequence
ggactcaattcaggctatgtatgac

SEQ ID NO: 113694 - DNA, 25 bp, Probe Sequence
ctacctaattgttactgtggagatt

SEQ ID NO: 113695 - DNA, 25 bp, Probe Sequence
ttgttactgtggagattaagttcaa

SEQ ID NO: 113696 - DNA, 25 bp, Probe Sequence
caattcaggctatgtatgactatga

SEQ ID NO: 113697 - DNA, 25 bp, Probe Sequence
tcaattcaggctatgtatgactatg

SEQ ID NO: 113698 - DNA, 25 bp, Probe Sequence
attgttactgtggagattaagttca

SEQ ID NO: 113699 - DNA, 25 bp, Probe Sequence
atactacctaattgttactgtggag

SEQ ID NO: 113700 - DNA, 25 bp, Probe Sequence
ctcaattcaggctatgtatgactat

SEQ ID NO: 113701 - DNA, 25 bp, Probe Sequence
tattctagccagtaatggacttcag

SEQ ID NO: 113702 - DNA, 25 bp, Probe Sequence
ctagccagtaatggacttcagaatc

SEQ ID NO: 113703 - DNA, 25 bp, Probe Sequence
acctaattgttactgtggagattaa

SEQ ID NO: 113704 - DNA, 25 bp, Probe Sequence
ttattctagccagtaatggacttca

SEQ ID NO: 113705 - DNA, 25 bp, Probe Sequence
tagccagtaatggacttcagaatct

SEQ ID NO: 113706 - DNA, 25 bp, Probe Sequence
tctagccagtaatggacttcagaat

SEQ ID NO: 113707 - DNA, 25 bp, Probe Sequence
attctagccagtaatggacttcaga

SEQ ID NO: 113708 - DNA, 25 bp, Probe Sequence
aatactacctaattgttactgtgga

SEQ ID NO: 113709 - DNA, 25 bp, Probe Sequence
cctaattgttactgtggagattaag

SEQ ID NO: 113710 - DNA, 25 bp, Probe Sequence
agccagtaatggacttcagaatctt

SEQ ID NO: 113711 - DNA, 25 bp, Probe Sequence
aattgttactgtggagattaagttc

SEQ ID NO: 113712 - DNA, 25 bp, Probe Sequence
attattctagccagtaatggacttc

SEQ ID NO: 113713 - DNA, 25 bp, Probe Sequence
tgggtaaggaaatggaatactgaag

SEQ ID NO: 113714 - DNA, 25 bp, Probe Sequence
ttgggtaaggaaatggaatactgaa

SEQ ID NO: 113715 - DNA, 25 bp, Probe Sequence
actgaattgaggactatggaaatgt

SEQ ID NO: 113716 - DNA, 25 bp, Probe Sequence
ggtaaggaaatggaatactgaaggg

SEQ ID NO: 113717 - DNA, 25 bp, Probe Sequence
gggtaaggaaatggaatactgaagg

SEQ ID NO: 113718 - DNA, 25 bp, Probe Sequence
cttgggtaaggaaatggaatactga

SEQ ID NO: 113719 - DNA, 25 bp, Probe Sequence
tcttgggtaaggaaatggaatactg

SEQ ID NO: 113720 - DNA, 25 bp, Probe Sequence
tgttcttgggtaaggaaatggaata

SEQ ID NO: 113721 - DNA, 25 bp, Probe Sequence
aattgaggactatggaaatgtaggc

SEQ ID NO: 113722 - DNA, 25 bp, Probe Sequence
ttcttgggtaaggaaatggaatact

SEQ ID NO: 113723 - DNA, 25 bp, Probe Sequence
gttcttgggtaaggaaatggaatac

SEQ ID NO: 113724 - DNA, 25 bp, Probe Sequence
cctttcagtgttattagtgtatgct

SEQ ID NO: 113725 - DNA, 25 bp, Probe Sequence
tcctttcagtgttattagtgtatgc

SEQ ID NO: 113726 - DNA, 25 bp, Probe Sequence
gcattctttctgtattgagtatcct

SEQ ID NO: 113727 - DNA, 25 bp, Probe Sequence
ctgttcttgggtaaggaaatggaat

SEQ ID NO: 113728 - DNA, 25 bp, Probe Sequence
gaattgaggactatggaaatgtagg

SEQ ID NO: 113729 - DNA, 25 bp, Probe Sequence
aactgaattgaggactatggaaatg

SEQ ID NO: 113730 - DNA, 25 bp, Probe Sequence
gtaaggaaatggaatactgaagggc

SEQ ID NO: 113731 - DNA, 25 bp, Probe Sequence
aaactgaattgaggactatggaaat

SEQ ID NO: 113732 - DNA, 25 bp, Probe Sequence
taaggaaaggaattggcatgtgtat

SEQ ID NO: 113733 - DNA, 25 bp, Probe Sequence
tgaattgaggactatggaaatgtag

SEQ ID NO: 113734 - DNA, 25 bp, Probe Sequence
ctgaattgaggactatggaaatgta

SEQ ID NO: 113735 - DNA, 25 bp, Probe Sequence
ctaaggaaaggaattggcatgtgta

SEQ ID NO: 113736 - DNA, 25 bp, Probe Sequence
tctgtattgagtatcctttcagtgt

SEQ ID NO: 113737 - DNA, 25 bp, Probe Sequence
caccaaaggaccttcgttaagtgat

SEQ ID NO: 113738 - DNA, 25 bp, Probe Sequence
gagcaccaaaggaccttcgttaagt

SEQ ID NO: 113739 - DNA, 25 bp, Probe Sequence
gatttggcatctgaagggtataaag

SEQ ID NO: 113740 - DNA, 25 bp, Probe Sequence
atttggcatctgaagggtataaagg

SEQ ID NO: 113741 - DNA, 25 bp, Probe Sequence
tttctttatgtttcaccagctcatg

SEQ ID NO: 113742 - DNA, 25 bp, Probe Sequence
tctttatgtttcaccagctcatgta

SEQ ID NO: 113743 - DNA, 25 bp, Probe Sequence
ctttatgtttcaccagctcatgtaa

SEQ ID NO: 113744 - DNA, 25 bp, Probe Sequence
ttctttatgtttcaccagctcatgt

SEQ ID NO: 113745 - DNA, 25 bp, Probe Sequence
tttatgtttcaccagctcatgtaaa

SEQ ID NO: 113746 - DNA, 25 bp, Probe Sequence
agatttggcatctgaagggtataaa

SEQ ID NO: 113747 - DNA, 25 bp, Probe Sequence
tttggcatctgaagggtataaaggc

SEQ ID NO: 113748 - DNA, 25 bp, Probe Sequence
cttagatttggcatctgaagggtat

SEQ ID NO: 113749 - DNA, 25 bp, Probe Sequence
tagatttggcatctgaagggtataa

SEQ ID NO: 113750 - DNA, 25 bp, Probe Sequence
ttagatttggcatctgaagggtata

SEQ ID NO: 113751 - DNA, 25 bp, Probe Sequence
tcttagatttggcatctgaagggta

SEQ ID NO: 113752 - DNA, 25 bp, Probe Sequence
gttcttagatttggcatctgaaggg

SEQ ID NO: 113753 - DNA, 25 bp, Probe Sequence
ggttcttagatttggcatctgaagg

SEQ ID NO: 113754 - DNA, 25 bp, Probe Sequence
ttcttagatttggcatctgaagggt

SEQ ID NO: 113755 - DNA, 25 bp, Probe Sequence
ttatgtttcaccagctcatgtaaac

SEQ ID NO: 113756 - DNA, 25 bp, Probe Sequence
tatgtttcaccagctcatgtaaact

SEQ ID NO: 113757 - DNA, 25 bp, Probe Sequence
gccattttctttatgtttcaccagc

SEQ ID NO: 113758 - DNA, 25 bp, Probe Sequence
atgtttcaccagctcatgtaaactg

SEQ ID NO: 113759 - DNA, 25 bp, Probe Sequence
attttctttatgtttcaccagctca

SEQ ID NO: 113760 - DNA, 25 bp, Probe Sequence
ccattttctttatgtttcaccagct

SEQ ID NO: 113761 - DNA, 25 bp, Probe Sequence
ttttctttatgtttcaccagctcat

SEQ ID NO: 113762 - DNA, 25 bp, Probe Sequence
cattttctttatgtttcaccagctc

SEQ ID NO: 113763 - DNA, 25 bp, Probe Sequence
gtgaatagtgaagtggctatcctaa

SEQ ID NO: 113764 - DNA, 25 bp, Probe Sequence
aatgtgaatagtgaagtggctatcc

SEQ ID NO: 113765 - DNA, 25 bp, Probe Sequence
tgtgaatagtgaagtggctatccta

SEQ ID NO: 113766 - DNA, 25 bp, Probe Sequence
atgtgaatagtgaagtggctatcct

SEQ ID NO: 113767 - DNA, 25 bp, Probe Sequence
tgttgtaagtacagttggcaagatc

SEQ ID NO: 113768 - DNA, 25 bp, Probe Sequence
ttcatcatttggtgcttagtctttg

SEQ ID NO: 113769 - DNA, 25 bp, Probe Sequence
gttcatcatttggtgcttagtcttt

SEQ ID NO: 113770 - DNA, 25 bp, Probe Sequence
gtttatctccacccacactatcata

SEQ ID NO: 113771 - DNA, 25 bp, Probe Sequence
catcatttggtgcttagtctttgta

SEQ ID NO: 113772 - DNA, 25 bp, Probe Sequence
agttcatcatttggtgcttagtctt

SEQ ID NO: 113773 - DNA, 25 bp, Probe Sequence
aaacagttcatcatttggtgcttag

SEQ ID NO: 113774 - DNA, 25 bp, Probe Sequence
tcatcatttggtgcttagtctttgt

SEQ ID NO: 113775 - DNA, 25 bp, Probe Sequence
ccacccacactatcatagatttctt

SEQ ID NO: 113776 - DNA, 25 bp, Probe Sequence
tttatctccacccacactatcatag

SEQ ID NO: 113777 - DNA, 25 bp, Probe Sequence
ctccacccacactatcatagatttc

SEQ ID NO: 113778 - DNA, 25 bp, Probe Sequence
atcatttggtgcttagtctttgtaa

SEQ ID NO: 113779 - DNA, 25 bp, Probe Sequence
tccacccacactatcatagatttct

SEQ ID NO: 113780 - DNA, 25 bp, Probe Sequence
aacagttcatcatttggtgcttagt

SEQ ID NO: 113781 - DNA, 25 bp, Probe Sequence
cagttcatcatttggtgcttagtct

SEQ ID NO: 113782 - DNA, 25 bp, Probe Sequence
ttatctccacccacactatcataga

SEQ ID NO: 113783 - DNA, 25 bp, Probe Sequence
tctccacccacactatcatagattt

SEQ ID NO: 113784 - DNA, 25 bp, Probe Sequence
ctaccgttaaatgaggacaaatcac

SEQ ID NO: 113785 - DNA, 25 bp, Probe Sequence
acagttcatcatttggtgcttagtc

SEQ ID NO: 113786 - DNA, 25 bp, Probe Sequence
gcttgagattgttctgaaagtatca

SEQ ID NO: 113787 - DNA, 25 bp, Probe Sequence
tttaatgagtgctttagtgagtcct

SEQ ID NO: 113788 - DNA, 25 bp, Probe Sequence
ttaatgagtgctttagtgagtcctc

SEQ ID NO: 113789 - DNA, 25 bp, Probe Sequence
ttttaatgagtgctttagtgagtcc

SEQ ID NO: 113790 - DNA, 25 bp, Probe Sequence
aaaacaatagcagcatttctcaaaa

SEQ ID NO: 113791 - DNA, 25 bp, Probe Sequence
gaagaggacttttgggaagagattc

SEQ ID NO: 113792 - DNA, 25 bp, Probe Sequence
ccaaaataattgaaagcagggactc

SEQ ID NO: 113793 - DNA, 25 bp, Probe Sequence
agaagaggacttttgggaagagatt

SEQ ID NO: 113794 - DNA, 25 bp, Probe Sequence
caaaataattgaaagcagggactcg

SEQ ID NO: 113795 - DNA, 25 bp, Probe Sequence
tatgatttagcaatgctgtttctgg

SEQ ID NO: 113796 - DNA, 25 bp, Probe Sequence
aagttaccatatgatttagcaatgc

SEQ ID NO: 113797 - DNA, 25 bp, Probe Sequence
aaaataattgaaagcagggactcgg

SEQ ID NO: 113798 - DNA, 25 bp, Probe Sequence
tagcaatgctgtttctgggtatata

SEQ ID NO: 113799 - DNA, 25 bp, Probe Sequence
ttagcaatgctgtttctgggtatat

SEQ ID NO: 113800 - DNA, 25 bp, Probe Sequence
tttagcaatgctgtttctgggtata

SEQ ID NO: 113801 - DNA, 25 bp, Probe Sequence
aaataattgaaagcagggactcggc

SEQ ID NO: 113802 - DNA, 25 bp, Probe Sequence
gccagaagacatgattttaatgagt

SEQ ID NO: 113803 - DNA, 25 bp, Probe Sequence
cagaagaggacttttgggaagagat

SEQ ID NO: 113804 - DNA, 25 bp, Probe Sequence
atttagcaatgctgtttctgggtat

SEQ ID NO: 113805 - DNA, 25 bp, Probe Sequence
ttacttatcccaggcagaagaggac

SEQ ID NO: 113806 - DNA, 25 bp, Probe Sequence
gttacttatcccaggcagaagagga

SEQ ID NO: 113807 - DNA, 25 bp, Probe Sequence
cagaagacatgattttaatgagtgc

SEQ ID NO: 113808 - DNA, 25 bp, Probe Sequence
agaagacatgattttaatgagtgct

SEQ ID NO: 113809 - DNA, 25 bp, Probe Sequence
attttaatgagtgctttagtgagtc

SEQ ID NO: 113810 - DNA, 25 bp, Probe Sequence
gattttaatgagtgctttagtgagt

SEQ ID NO: 113811 - DNA, 25 bp, Probe Sequence
tgtgataaactaagaagcccattga

SEQ ID NO: 113812 - DNA, 25 bp, Probe Sequence
gtgataaactaagaagcccattgaa

SEQ ID NO: 113813 - DNA, 25 bp, Probe Sequence
atgtgataaactaagaagcccattg

SEQ ID NO: 113814 - DNA, 25 bp, Probe Sequence
aaagtgccagtccttatgtgataaa

SEQ ID NO: 113815 - DNA, 25 bp, Probe Sequence
gttcagccattagcactcatttaac

SEQ ID NO: 113816 - DNA, 25 bp, Probe Sequence
tgataaactaagaagcccattgaat

SEQ ID NO: 113817 - DNA, 25 bp, Probe Sequence
aagtgccagtccttatgtgataaac

SEQ ID NO: 113818 - DNA, 25 bp, Probe Sequence
tgccagtccttatgtgataaactaa

SEQ ID NO: 113819 - DNA, 25 bp, Probe Sequence
gtgccagtccttatgtgataaacta

SEQ ID NO: 113820 - DNA, 25 bp, Probe Sequence
ccattagcactcatttaaccctgtt

SEQ ID NO: 113821 - DNA, 25 bp, Probe Sequence
ttcagccattagcactcatttaacc

SEQ ID NO: 113822 - DNA, 25 bp, Probe Sequence
ttatactatcgcagaagtaagcatt

SEQ ID NO: 113823 - DNA, 25 bp, Probe Sequence
cgttcagccattagcactcatttaa

SEQ ID NO: 113824 - DNA, 25 bp, Probe Sequence
ccttatgtgataaactaagaagccc

SEQ ID NO: 113825 - DNA, 25 bp, Probe Sequence
gccagtccttatgtgataaactaag

SEQ ID NO: 113826 - DNA, 25 bp, Probe Sequence
tatgtgataaactaagaagcccatt

SEQ ID NO: 113827 - DNA, 25 bp, Probe Sequence
agtgccagtccttatgtgataaact

SEQ ID NO: 113828 - DNA, 25 bp, Probe Sequence
ttatgtgataaactaagaagcccat

SEQ ID NO: 113829 - DNA, 25 bp, Probe Sequence
gaatatgagattaacttcctacagg

SEQ ID NO: 113830 - DNA, 25 bp, Probe Sequence
cttatgtgataaactaagaagccca

SEQ ID NO: 113831 - DNA, 25 bp, Probe Sequence
ttgctaagggaatatgagattaact

SEQ ID NO: 113832 - DNA, 25 bp, Probe Sequence
cactcatttaaccctgttagcaata

SEQ ID NO: 113833 - DNA, 25 bp, Probe Sequence
cattagcactcatttaaccctgtta

SEQ ID NO: 113834 - DNA, 25 bp, Probe Sequence
tcataactggaattgccaaataagc

SEQ ID NO: 113835 - DNA, 25 bp, Probe Sequence
tcacttaactctcgcaataccataa

SEQ ID NO: 113836 - DNA, 25 bp, Probe Sequence
ctcacttaactctcgcaataccata

SEQ ID NO: 113837 - DNA, 25 bp, Probe Sequence
aattaggaataagtgtgctgtgagg

SEQ ID NO: 113838 - DNA, 25 bp, Probe Sequence
cagtgtagaagaatggactatctgt

SEQ ID NO: 113839 - DNA, 25 bp, Probe Sequence
agtgtagaagaatggactatctgtc

SEQ ID NO: 113840 - DNA, 25 bp, Probe Sequence
tattactggtggaataatatccgcc

SEQ ID NO: 113841 - DNA, 25 bp, Probe Sequence
gtattactggtggaataatatccgc

SEQ ID NO: 113842 - DNA, 25 bp, Probe Sequence
ccagtgtagaagaatggactatctg

SEQ ID NO: 113843 - DNA, 25 bp, Probe Sequence
gaccagtgtagaagaatggactatc

SEQ ID NO: 113844 - DNA, 25 bp, Probe Sequence
accagtgtagaagaatggactatct

SEQ ID NO: 113845 - DNA, 25 bp, Probe Sequence
gcccaatagtatcacatttcctttc

SEQ ID NO: 113846 - DNA, 25 bp, Probe Sequence
agcccaatagtatcacatttccttt

SEQ ID NO: 113847 - DNA, 25 bp, Probe Sequence
ggtattactggtggaataatatccg

SEQ ID NO: 113848 - DNA, 25 bp, Probe Sequence
cttaactctcgcaataccataaacg

SEQ ID NO: 113849 - DNA, 25 bp, Probe Sequence
aacacagcccaatagtatcacattt

SEQ ID NO: 113850 - DNA, 25 bp, Probe Sequence
aaacacagcccaatagtatcacatt

SEQ ID NO: 113851 - DNA, 25 bp, Probe Sequence
gatgcacattccttcaagatacaga

SEQ ID NO: 113852 - DNA, 25 bp, Probe Sequence
cagcccaatagtatcacatttcctt

SEQ ID NO: 113853 - DNA, 25 bp, Probe Sequence
tctgtcttccctcctttgtttacta

SEQ ID NO: 113854 - DNA, 25 bp, Probe Sequence
ggaccagtgtagaagaatggactat

SEQ ID NO: 113855 - DNA, 25 bp, Probe Sequence
tgaaattaggaataagtgtgctgtg

SEQ ID NO: 113856 - DNA, 25 bp, Probe Sequence
acttaactctcgcaataccataaac

SEQ ID NO: 113857 - DNA, 25 bp, Probe Sequence
cacttaactctcgcaataccataaa

SEQ ID NO: 113858 - DNA, 25 bp, Probe Sequence
gctcacttaactctcgcaataccat

SEQ ID NO: 113859 - DNA, 25 bp, Probe Sequence
atgaggtcaggagttaaagattagc

SEQ ID NO: 113860 - DNA, 25 bp, Probe Sequence
gctaatgaggtcaggagttaaagat

SEQ ID NO: 113861 - DNA, 25 bp, Probe Sequence
tgaggtcaggagttaaagattagcc

SEQ ID NO: 113862 - DNA, 25 bp, Probe Sequence
ggctaatgaggtcaggagttaaaga

SEQ ID NO: 113863 - DNA, 25 bp, Probe Sequence
aatgaggtcaggagttaaagattag

SEQ ID NO: 113864 - DNA, 25 bp, Probe Sequence
ctaatgaggtcaggagttaaagatt

SEQ ID NO: 113865 - DNA, 25 bp, Probe Sequence
tggctaatgaggtcaggagttaaag

SEQ ID NO: 113866 - DNA, 25 bp, Probe Sequence
gtggctaatgaggtcaggagttaaa

SEQ ID NO: 113867 - DNA, 25 bp, Probe Sequence
ggtggctaatgaggtcaggagttaa

SEQ ID NO: 113868 - DNA, 25 bp, Probe Sequence
gaggtcaggagttaaagattagcct

SEQ ID NO: 113869 - DNA, 25 bp, Probe Sequence
cagcctcttcctaagtttacaccag

SEQ ID NO: 113870 - DNA, 25 bp, Probe Sequence
ctcttcctaagtttacaccagtgtg

SEQ ID NO: 113871 - DNA, 25 bp, Probe Sequence
agcctcttcctaagtttacaccagt

SEQ ID NO: 113872 - DNA, 25 bp, Probe Sequence
gcctcttcctaagtttacaccagtg

SEQ ID NO: 113873 - DNA, 25 bp, Probe Sequence
taatgaggtcaggagttaaagatta

SEQ ID NO: 113874 - DNA, 25 bp, Probe Sequence
cctcttcctaagtttacaccagtgt

SEQ ID NO: 113875 - DNA, 25 bp, Probe Sequence
ggcagttttagagtagggtttgtta

SEQ ID NO: 113876 - DNA, 25 bp, Probe Sequence
gcagttttagagtagggtttgttaa

SEQ ID NO: 113877 - DNA, 25 bp, Probe Sequence
tcttcctaagtttacaccagtgtgg

SEQ ID NO: 113878 - DNA, 25 bp, Probe Sequence
aggcagttttagagtagggtttgtt

SEQ ID NO: 113879 - DNA, 25 bp, Probe Sequence
ccagcctcttcctaagtttacacca

SEQ ID NO: 113880 - DNA, 25 bp, Probe Sequence
agacagaacagttctttcttcctta

SEQ ID NO: 113881 - DNA, 25 bp, Probe Sequence
tcaggcagttttagagtagggtttg

SEQ ID NO: 113882 - DNA, 25 bp, Probe Sequence
gtcaggcagttttagagtagggttt

SEQ ID NO: 113883 - DNA, 25 bp, Probe Sequence
tcaagtgtttctcacggatggaatt

SEQ ID NO: 113884 - DNA, 25 bp, Probe Sequence
ttcaagtgtttctcacggatggaat

SEQ ID NO: 113885 - DNA, 25 bp, Probe Sequence
tttcagtgacgttcaagtgtttctc

SEQ ID NO: 113886 - DNA, 25 bp, Probe Sequence
gttcaagtgtttctcacggatggaa

SEQ ID NO: 113887 - DNA, 25 bp, Probe Sequence
ttcagtgacgttcaagtgtttctca

SEQ ID NO: 113888 - DNA, 25 bp, Probe Sequence
caagtgtttctcacggatggaattc

SEQ ID NO: 113889 - DNA, 25 bp, Probe Sequence
ttttcagtgacgttcaagtgtttct

SEQ ID NO: 113890 - DNA, 25 bp, Probe Sequence
gacgttcaagtgtttctcacggatg

SEQ ID NO: 113891 - DNA, 25 bp, Probe Sequence
tcagtgacgttcaagtgtttctcac

SEQ ID NO: 113892 - DNA, 25 bp, Probe Sequence
tgacgttcaagtgtttctcacggat

SEQ ID NO: 113893 - DNA, 25 bp, Probe Sequence
cagtgacgttcaagtgtttctcacg

SEQ ID NO: 113894 - DNA, 25 bp, Probe Sequence
cacctttaggactagagggaccttc

SEQ ID NO: 113895 - DNA, 25 bp, Probe Sequence
tcacctttaggactagagggacctt

SEQ ID NO: 113896 - DNA, 25 bp, Probe Sequence
gtcacctttaggactagagggacct

SEQ ID NO: 113897 - DNA, 25 bp, Probe Sequence
acctttaggactagagggaccttcc

SEQ ID NO: 113898 - DNA, 25 bp, Probe Sequence
ctttaggactagagggaccttcctg

SEQ ID NO: 113899 - DNA, 25 bp, Probe Sequence
ttaggactagagggaccttcctgaa

SEQ ID NO: 113900 - DNA, 25 bp, Probe Sequence
tttaggactagagggaccttcctga

SEQ ID NO: 113901 - DNA, 25 bp, Probe Sequence
taggactagagggaccttcctgaag

SEQ ID NO: 113902 - DNA, 25 bp, Probe Sequence
cctttaggactagagggaccttcct

SEQ ID NO: 113903 - DNA, 25 bp, Probe Sequence
ggtcacctttaggactagagggacc

SEQ ID NO: 113904 - DNA, 25 bp, Probe Sequence
aaccctagtatgtcctctgctttct

SEQ ID NO: 113905 - DNA, 25 bp, Probe Sequence
caaccctagtatgtcctctgctttc

SEQ ID NO: 113906 - DNA, 25 bp, Probe Sequence
accctagtatgtcctctgctttctg

SEQ ID NO: 113907 - DNA, 25 bp, Probe Sequence
ccaaccctagtatgtcctctgcttt

SEQ ID NO: 113908 - DNA, 25 bp, Probe Sequence
tagtatgtcctctgctttctgccac

SEQ ID NO: 113909 - DNA, 25 bp, Probe Sequence
ctagtatgtcctctgctttctgcca

SEQ ID NO: 113910 - DNA, 25 bp, Probe Sequence
ttatagtcattctaactgcactttg

SEQ ID NO: 113911 - DNA, 25 bp, Probe Sequence
gagttccatctacctctcatgctgg

SEQ ID NO: 113912 - DNA, 25 bp, Probe Sequence
tatagtcattctaactgcactttgc

SEQ ID NO: 113913 - DNA, 25 bp, Probe Sequence
atagtcattctaactgcactttgcg

SEQ ID NO: 113914 - DNA, 25 bp, Probe Sequence
cctagtatgtcctctgctttctgcc

SEQ ID NO: 113915 - DNA, 25 bp, Probe Sequence
ccctagtatgtcctctgctttctgc

SEQ ID NO: 113916 - DNA, 25 bp, Probe Sequence
ctgagttccatctacctctcatgct

SEQ ID NO: 113917 - DNA, 25 bp, Probe Sequence
tttatagtcattctaactgcacttt

SEQ ID NO: 113918 - DNA, 25 bp, Probe Sequence
atttatagtcattctaactgcactt

SEQ ID NO: 113919 - DNA, 25 bp, Probe Sequence
aatttatagtcattctaactgcact

SEQ ID NO: 113920 - DNA, 25 bp, Probe Sequence
tgagttccatctacctctcatgctg

SEQ ID NO: 113921 - DNA, 25 bp, Probe Sequence
tagtcattctaactgcactttgcga

SEQ ID NO: 113922 - DNA, 25 bp, Probe Sequence
gatcagagctgtgagttaacacaac

SEQ ID NO: 113923 - DNA, 25 bp, Probe Sequence
aaatttatagtcattctaactgcac

SEQ ID NO: 113924 - DNA, 25 bp, Probe Sequence
cgctgagttccatctacctctcatg

SEQ ID NO: 113925 - DNA, 25 bp, Probe Sequence
atcagagctgtgagttaacacaaca

SEQ ID NO: 113926 - DNA, 25 bp, Probe Sequence
agtcattctaactgcactttgcgag

SEQ ID NO: 113927 - DNA, 25 bp, Probe Sequence
ttccatctacctctcatgctggatg

SEQ ID NO: 113928 - DNA, 25 bp, Probe Sequence
aatagacgagcaacaattaccataa

SEQ ID NO: 113929 - DNA, 25 bp, Probe Sequence
tatagggaaacagcacacaagtcta

SEQ ID NO: 113930 - DNA, 25 bp, Probe Sequence
gatatagggaaacagcacacaagtc

SEQ ID NO: 113931 - DNA, 25 bp, Probe Sequence
atagacgagcaacaattaccataaa

SEQ ID NO: 113932 - DNA, 25 bp, Probe Sequence
aaatagacgagcaacaattaccata

SEQ ID NO: 113933 - DNA, 25 bp, Probe Sequence
atatagggaaacagcacacaagtct

SEQ ID NO: 113934 - DNA, 25 bp, Probe Sequence
cagatgggaggatatagggaaacag

SEQ ID NO: 113935 - DNA, 25 bp, Probe Sequence
atagggaaacagcacacaagtctaa

SEQ ID NO: 113936 - DNA, 25 bp, Probe Sequence
tttagacttcctgatcctcaaagac

SEQ ID NO: 113937 - DNA, 25 bp, Probe Sequence
aggatatagggaaacagcacacaag

SEQ ID NO: 113938 - DNA, 25 bp, Probe Sequence
gaggatatagggaaacagcacacaa

SEQ ID NO: 113939 - DNA, 25 bp, Probe Sequence
tagggaaacagcacacaagtctaag

SEQ ID NO: 113940 - DNA, 25 bp, Probe Sequence
ggatatagggaaacagcacacaagt

SEQ ID NO: 113941 - DNA, 25 bp, Probe Sequence
ttagacttcctgatcctcaaagacc

SEQ ID NO: 113942 - DNA, 25 bp, Probe Sequence
tagacttcctgatcctcaaagacct

SEQ ID NO: 113943 - DNA, 25 bp, Probe Sequence
ggctttagacttcctgatcctcaaa

SEQ ID NO: 113944 - DNA, 25 bp, Probe Sequence
ctttagacttcctgatcctcaaaga

SEQ ID NO: 113945 - DNA, 25 bp, Probe Sequence
agatgggaggatatagggaaacagc

SEQ ID NO: 113946 - DNA, 25 bp, Probe Sequence
agcagatgggaggatatagggaaac

SEQ ID NO: 113947 - DNA, 25 bp, Probe Sequence
cagcagatgggaggatatagggaaa

SEQ ID NO: 113948 - DNA, 25 bp, Probe Sequence
gctttagacttcctgatcctcaaag

SEQ ID NO: 113949 - DNA, 25 bp, Probe Sequence
ttaaaatcctgacccaaaacacaac

SEQ ID NO: 113950 - DNA, 25 bp, Probe Sequence
gatgggaggatatagggaaacagca

SEQ ID NO: 113951 - DNA, 25 bp, Probe Sequence
gcagatgggaggatatagggaaaca

SEQ ID NO: 113952 - DNA, 25 bp, Probe Sequence
atatgcttctgattcctacatcgtt

SEQ ID NO: 113953 - DNA, 25 bp, Probe Sequence
aatatgcttctgattcctacatcgt

SEQ ID NO: 113954 - DNA, 25 bp, Probe Sequence
aagataaggaatggcaagaacaatt

SEQ ID NO: 113955 - DNA, 25 bp, Probe Sequence
gaattggttggatactggagtgtag

SEQ ID NO: 113956 - DNA, 25 bp, Probe Sequence
ttggttggatactggagtgtagaat

SEQ ID NO: 113957 - DNA, 25 bp, Probe Sequence
attggttggatactggagtgtagaa

SEQ ID NO: 113958 - DNA, 25 bp, Probe Sequence
atgatgctgttaggtcctggtatta

SEQ ID NO: 113959 - DNA, 25 bp, Probe Sequence
tggttggatactggagtgtagaatt

SEQ ID NO: 113960 - DNA, 25 bp, Probe Sequence
tgatgctgttaggtcctggtattaa

SEQ ID NO: 113961 - DNA, 25 bp, Probe Sequence
tgaattggttggatactggagtgta

SEQ ID NO: 113962 - DNA, 25 bp, Probe Sequence
cattatgaaggctacatctgtgctt

SEQ ID NO: 113963 - DNA, 25 bp, Probe Sequence
tcaactacctagtatctcagcagaa

SEQ ID NO: 113964 - DNA, 25 bp, Probe Sequence
gctcttctactgtattctgacaact

SEQ ID NO: 113965 - DNA, 25 bp, Probe Sequence
ctcactctgaattggttggatactg

SEQ ID NO: 113966 - DNA, 25 bp, Probe Sequence
aatgatgctgttaggtcctggtatt

SEQ ID NO: 113967 - DNA, 25 bp, Probe Sequence
gtcaactacctagtatctcagcaga

SEQ ID NO: 113968 - DNA, 25 bp, Probe Sequence
aagtgtcaactacctagtatctcag

SEQ ID NO: 113969 - DNA, 25 bp, Probe Sequence
tgtcaactacctagtatctcagcag

SEQ ID NO: 113970 - DNA, 25 bp, Probe Sequence
agtgtcaactacctagtatctcagc

SEQ ID NO: 113971 - DNA, 25 bp, Probe Sequence
gtgtcaactacctagtatctcagca

SEQ ID NO: 113972 - DNA, 25 bp, Probe Sequence
tcttctactgtattctgacaactct

SEQ ID NO: 113973 - DNA, 25 bp, Probe Sequence
tataggatctgtctgctaatggtgc

SEQ ID NO: 113974 - DNA, 25 bp, Probe Sequence
tctgaattggttggatactggagtg

SEQ ID NO: 113975 - DNA, 25 bp, Probe Sequence
cactctgaattggttggatactgga

SEQ ID NO: 113976 - DNA, 25 bp, Probe Sequence
aacttcctctctccttccacttatt

SEQ ID NO: 113977 - DNA, 25 bp, Probe Sequence
gaacttcctctctccttccacttat

SEQ ID NO: 113978 - DNA, 25 bp, Probe Sequence
tccttccacttatttcctcaaactt

SEQ ID NO: 113979 - DNA, 25 bp, Probe Sequence
ctctccttccacttatttcctcaaa

SEQ ID NO: 113980 - DNA, 25 bp, Probe Sequence
cttcctctctccttccacttatttc

SEQ ID NO: 113981 - DNA, 25 bp, Probe Sequence
ctccttccacttatttcctcaaact

SEQ ID NO: 113982 - DNA, 25 bp, Probe Sequence
tctccttccacttatttcctcaaac

SEQ ID NO: 113983 - DNA, 25 bp, Probe Sequence
tagtggaaccatctaactggaactt

SEQ ID NO: 113984 - DNA, 25 bp, Probe Sequence
ccttccacttatttcctcaaacttg

SEQ ID NO: 113985 - DNA, 25 bp, Probe Sequence
gccatcaagagcaataaagcattaa

SEQ ID NO: 113986 - DNA, 25 bp, Probe Sequence
tctctccttccacttatttcctcaa

SEQ ID NO: 113987 - DNA, 25 bp, Probe Sequence
acttcctctctccttccacttattt

SEQ ID NO: 113988 - DNA, 25 bp, Probe Sequence
cttccacttatttcctcaaacttgt

SEQ ID NO: 113989 - DNA, 25 bp, Probe Sequence
gggttctcttgatgtaatgaaatgc

SEQ ID NO: 113990 - DNA, 25 bp, Probe Sequence
ttccacttatttcctcaaacttgtt

SEQ ID NO: 113991 - DNA, 25 bp, Probe Sequence
ctctctccttccacttatttcctca

SEQ ID NO: 113992 - DNA, 25 bp, Probe Sequence
ctagtggaaccatctaactggaact

SEQ ID NO: 113993 - DNA, 25 bp, Probe Sequence
cacttatttcctcaaacttgttgct

SEQ ID NO: 113994 - DNA, 25 bp, Probe Sequence
tccacttatttcctcaaacttgttg

SEQ ID NO: 113995 - DNA, 25 bp, Probe Sequence
acttatttcctcaaacttgttgctt

SEQ ID NO: 113996 - DNA, 25 bp, Probe Sequence
ttcctctctccttccacttatttcc

SEQ ID NO: 113997 - DNA, 25 bp, Probe Sequence
ccacttatttcctcaaacttgttgc

SEQ ID NO: 113998 - DNA, 25 bp, Probe Sequence
ccatcaagagcaataaagcattaaa

SEQ ID NO: 113999 - DNA, 25 bp, Probe Sequence
cccagattagcaacactcatagttt

SEQ ID NO: 114000 - DNA, 25 bp, Probe Sequence
cttccttccacacccagatctcttg

SEQ ID NO: 114001 - DNA, 25 bp, Probe Sequence
ttccttccacacccagatctcttgt

SEQ ID NO: 114002 - DNA, 25 bp, Probe Sequence
agtgttgaatggagtgaatgctatt

SEQ ID NO: 114003 - DNA, 25 bp, Probe Sequence
aagtgttgaatggagtgaatgctat

SEQ ID NO: 114004 - DNA, 25 bp, Probe Sequence
agttagttgacctcttagttgcctc

SEQ ID NO: 114005 - DNA, 25 bp, Probe Sequence
caagtgttgaatggagtgaatgcta

SEQ ID NO: 114006 - DNA, 25 bp, Probe Sequence
gagttagttgacctcttagttgcct

SEQ ID NO: 114007 - DNA, 25 bp, Probe Sequence
gttagttgacctcttagttgcctca

SEQ ID NO: 114008 - DNA, 25 bp, Probe Sequence
gtgttgaatggagtgaatgctattt

SEQ ID NO: 114009 - DNA, 25 bp, Probe Sequence
gaattgtagtttgtttagcctggtt

SEQ ID NO: 114010 - DNA, 25 bp, Probe Sequence
aggagttagttgacctcttagttgc

SEQ ID NO: 114011 - DNA, 25 bp, Probe Sequence
aattgtagtttgtttagcctggttt

SEQ ID NO: 114012 - DNA, 25 bp, Probe Sequence
atgggaattgtagtttgtttagcct

SEQ ID NO: 114013 - DNA, 25 bp, Probe Sequence
tggtttcataggtagatagaaggac

SEQ ID NO: 114014 - DNA, 25 bp, Probe Sequence
tgttgaatggagtgaatgctattta

SEQ ID NO: 114015 - DNA, 25 bp, Probe Sequence
actggtttcataggtagatagaagg

SEQ ID NO: 114016 - DNA, 25 bp, Probe Sequence
gttatggagaaaccttgaggagtta

SEQ ID NO: 114017 - DNA, 25 bp, Probe Sequence
ttatggagaaaccttgaggagttag

SEQ ID NO: 114018 - DNA, 25 bp, Probe Sequence
ggtttcataggtagatagaaggact

SEQ ID NO: 114019 - DNA, 25 bp, Probe Sequence
ctggtttcataggtagatagaagga

SEQ ID NO: 114020 - DNA, 25 bp, Probe Sequence
tatggagaaaccttgaggagttagt

SEQ ID NO: 114021 - DNA, 25 bp, Probe Sequence
ggaattgtagtttgtttagcctggt

SEQ ID NO: 114022 - DNA, 25 bp, Probe Sequence
tgggaattgtagtttgtttagcctg

SEQ ID NO: 114023 - DNA, 25 bp, Probe Sequence
ggagttagttgacctcttagttgcc

SEQ ID NO: 114024 - DNA, 25 bp, Probe Sequence
gagaaaccttgaggagttagttgac

SEQ ID NO: 114025 - DNA, 25 bp, Probe Sequence
aggtagatagaaggactaaatgtga

SEQ ID NO: 114026 - DNA, 25 bp, Probe Sequence
tccttacttcattcattcactcacc

SEQ ID NO: 114027 - DNA, 25 bp, Probe Sequence
ttccttacttcattcattcactcac

SEQ ID NO: 114028 - DNA, 25 bp, Probe Sequence
atgctatactgaactcaacaagatc

SEQ ID NO: 114029 - DNA, 25 bp, Probe Sequence
catgctatactgaactcaacaagat

SEQ ID NO: 114030 - DNA, 25 bp, Probe Sequence
ggtatcttcagcttgtggagaataa

SEQ ID NO: 114031 - DNA, 25 bp, Probe Sequence
aggtatcttcagcttgtggagaata

SEQ ID NO: 114032 - DNA, 25 bp, Probe Sequence
ttacttcattcattcactcacccag

SEQ ID NO: 114033 - DNA, 25 bp, Probe Sequence
cttacttcattcattcactcaccca

SEQ ID NO: 114034 - DNA, 25 bp, Probe Sequence
acctttccttacttcattcattcac

SEQ ID NO: 114035 - DNA, 25 bp, Probe Sequence
acttaaatgttctacggaaggttct

SEQ ID NO: 114036 - DNA, 25 bp, Probe Sequence
cctttccttacttcattcattcact

SEQ ID NO: 114037 - DNA, 25 bp, Probe Sequence
cttaaatgttctacggaaggttctg

SEQ ID NO: 114038 - DNA, 25 bp, Probe Sequence
ttaatgccagtcctcatgtaacctc

SEQ ID NO: 114039 - DNA, 25 bp, Probe Sequence
ttaaatgttctacggaaggttctgg

SEQ ID NO: 114040 - DNA, 25 bp, Probe Sequence
ccttacttcattcattcactcaccc

SEQ ID NO: 114041 - DNA, 25 bp, Probe Sequence
gcttgtggagaataaatctggttta

SEQ ID NO: 114042 - DNA, 25 bp, Probe Sequence
tttccttacttcattcattcactca

SEQ ID NO: 114043 - DNA, 25 bp, Probe Sequence
ctcatgtaacctcaggtatcttcag

SEQ ID NO: 114044 - DNA, 25 bp, Probe Sequence
tacttaaatgttctacggaaggttc

SEQ ID NO: 114045 - DNA, 25 bp, Probe Sequence
taaatgttctacggaaggttctggt

SEQ ID NO: 114046 - DNA, 25 bp, Probe Sequence
tttgttgcctagaaagttctggaat

SEQ ID NO: 114047 - DNA, 25 bp, Probe Sequence
tcctcatgtaacctcaggtatcttc

SEQ ID NO: 114048 - DNA, 25 bp, Probe Sequence
caggtatcttcagcttgtggagaat

SEQ ID NO: 114049 - DNA, 25 bp, Probe Sequence
ttacttaaatgttctacggaaggtt

SEQ ID NO: 114050 - DNA, 25 bp, Probe Sequence
taatgactccagaaacatgtgacag

SEQ ID NO: 114051 - DNA, 25 bp, Probe Sequence
ctaatgactccagaaacatgtgaca

SEQ ID NO: 114052 - DNA, 25 bp, Probe Sequence
tttgctaatgactccagaaacatgt

SEQ ID NO: 114053 - DNA, 25 bp, Probe Sequence
gaaacatgtgacagaagaagcagat

SEQ ID NO: 114054 - DNA, 25 bp, Probe Sequence
ctccagaaacatgtgacagaagaag

SEQ ID NO: 114055 - DNA, 25 bp, Probe Sequence
ttgctaatgactccagaaacatgtg

SEQ ID NO: 114056 - DNA, 25 bp, Probe Sequence
aaacatgtgacagaagaagcagatg

SEQ ID NO: 114057 - DNA, 25 bp, Probe Sequence
actccagaaacatgtgacagaagaa

SEQ ID NO: 114058 - DNA, 25 bp, Probe Sequence
gctaatgactccagaaacatgtgac

SEQ ID NO: 114059 - DNA, 25 bp, Probe Sequence
atgactccagaaacatgtgacagaa

SEQ ID NO: 114060 - DNA, 25 bp, Probe Sequence
aatgactccagaaacatgtgacaga

SEQ ID NO: 114061 - DNA, 25 bp, Probe Sequence
agaaacatgtgacagaagaagcaga

SEQ ID NO: 114062 - DNA, 25 bp, Probe Sequence
cagaaacatgtgacagaagaagcag

SEQ ID NO: 114063 - DNA, 25 bp, Probe Sequence
tgctaatgactccagaaacatgtga

SEQ ID NO: 114064 - DNA, 25 bp, Probe Sequence
gactccagaaacatgtgacagaaga

SEQ ID NO: 114065 - DNA, 25 bp, Probe Sequence
tgactccagaaacatgtgacagaag

SEQ ID NO: 114066 - DNA, 25 bp, Probe Sequence
aacatgtgacagaagaagcagatgt

SEQ ID NO: 114067 - DNA, 25 bp, Probe Sequence
tccagaaacatgtgacagaagaagc

SEQ ID NO: 114068 - DNA, 25 bp, Probe Sequence
ccagaaacatgtgacagaagaagca

SEQ ID NO: 114069 - DNA, 25 bp, Probe Sequence
acatgtgacagaagaagcagatgtc

SEQ ID NO: 114070 - DNA, 25 bp, Probe Sequence
ccttgagataatcctacaaccacat

SEQ ID NO: 114071 - DNA, 25 bp, Probe Sequence
tccaggatattgacaagaatacacg

SEQ ID NO: 114072 - DNA, 25 bp, Probe Sequence
caccttgagataatcctacaaccac

SEQ ID NO: 114073 - DNA, 25 bp, Probe Sequence
actccaggatattgacaagaataca

SEQ ID NO: 114074 - DNA, 25 bp, Probe Sequence
accttgagataatcctacaaccaca

SEQ ID NO: 114075 - DNA, 25 bp, Probe Sequence
ctccaggatattgacaagaatacac

SEQ ID NO: 114076 - DNA, 25 bp, Probe Sequence
cactccaggatattgacaagaatac

SEQ ID NO: 114077 - DNA, 25 bp, Probe Sequence
atcactccaggatattgacaagaat

SEQ ID NO: 114078 - DNA, 25 bp, Probe Sequence
tcactccaggatattgacaagaata

SEQ ID NO: 114079 - DNA, 25 bp, Probe Sequence
gatcactccaggatattgacaagaa

SEQ ID NO: 114080 - DNA, 25 bp, Probe Sequence
cttgagataatcctacaaccacatg

SEQ ID NO: 114081 - DNA, 25 bp, Probe Sequence
ttgagataatcctacaaccacatgc

SEQ ID NO: 114082 - DNA, 25 bp, Probe Sequence
gcaccttgagataatcctacaacca

SEQ ID NO: 114083 - DNA, 25 bp, Probe Sequence
ttgacaagaatacacgttactgatc

SEQ ID NO: 114084 - DNA, 25 bp, Probe Sequence
tgacaagaatacacgttactgatct

SEQ ID NO: 114085 - DNA, 25 bp, Probe Sequence
ccaggatattgacaagaatacacgt

SEQ ID NO: 114086 - DNA, 25 bp, Probe Sequence
gagataatcctacaaccacatgcag

SEQ ID NO: 114087 - DNA, 25 bp, Probe Sequence
caggatattgacaagaatacacgtt

SEQ ID NO: 114088 - DNA, 25 bp, Probe Sequence
attgacaagaatacacgttactgat

SEQ ID NO: 114089 - DNA, 25 bp, Probe Sequence
gataatcctacaaccacatgcagtt

SEQ ID NO: 114090 - DNA, 25 bp, Probe Sequence
atacacgttactgatcttactcaca

SEQ ID NO: 114091 - DNA, 25 bp, Probe Sequence
ctgcaccttgagataatcctacaac

SEQ ID NO: 114092 - DNA, 25 bp, Probe Sequence
agataatcctacaaccacatgcagt

SEQ ID NO: 114093 - DNA, 25 bp, Probe Sequence
tgagataatcctacaaccacatgca

SEQ ID NO: 114094 - DNA, 25 bp, Probe Sequence
cgggattgtgggactttaccaaatc

SEQ ID NO: 114095 - DNA, 25 bp, Probe Sequence
acgggattgtgggactttaccaaat

SEQ ID NO: 114096 - DNA, 25 bp, Probe Sequence
tactggcacatctaacatctacatt

SEQ ID NO: 114097 - DNA, 25 bp, Probe Sequence
gtactggcacatctaacatctacat

SEQ ID NO: 114098 - DNA, 25 bp, Probe Sequence
atggtactggcacatctaacatcta

SEQ ID NO: 114099 - DNA, 25 bp, Probe Sequence
ggtactggcacatctaacatctaca

SEQ ID NO: 114100 - DNA, 25 bp, Probe Sequence
tggtactggcacatctaacatctac

SEQ ID NO: 114101 - DNA, 25 bp, Probe Sequence
atattgtgtgtcctggcttaacctg

SEQ ID NO: 114102 - DNA, 25 bp, Probe Sequence
tggcacatctaacatctacatttct

SEQ ID NO: 114103 - DNA, 25 bp, Probe Sequence
ctggcacatctaacatctacatttc

SEQ ID NO: 114104 - DNA, 25 bp, Probe Sequence
actggcacatctaacatctacattt

SEQ ID NO: 114105 - DNA, 25 bp, Probe Sequence
ggcacatctaacatctacatttctc

SEQ ID NO: 114106 - DNA, 25 bp, Probe Sequence
aatattgtgtgtcctggcttaacct

SEQ ID NO: 114107 - DNA, 25 bp, Probe Sequence
aaggatgactttcgcttaactcttt

SEQ ID NO: 114108 - DNA, 25 bp, Probe Sequence
gatgactttcgcttaactctttcct

SEQ ID NO: 114109 - DNA, 25 bp, Probe Sequence
aggatgactttcgcttaactctttc

SEQ ID NO: 114110 - DNA, 25 bp, Probe Sequence
gcacatctaacatctacatttctct

SEQ ID NO: 114111 - DNA, 25 bp, Probe Sequence
atgactttcgcttaactctttcctg

SEQ ID NO: 114112 - DNA, 25 bp, Probe Sequence
ttagttctgacactttaatgggctt

SEQ ID NO: 114113 - DNA, 25 bp, Probe Sequence
cttagttctgacactttaatgggct

SEQ ID NO: 114114 - DNA, 25 bp, Probe Sequence
tcttagttctgacactttaatgggc

SEQ ID NO: 114115 - DNA, 25 bp, Probe Sequence
tagttctgacactttaatgggcttg

SEQ ID NO: 114116 - DNA, 25 bp, Probe Sequence
gtcttagttctgacactttaatggg

SEQ ID NO: 114117 - DNA, 25 bp, Probe Sequence
ggtcttagttctgacactttaatgg

SEQ ID NO: 114118 - DNA, 25 bp, Probe Sequence
tggtcttagttctgacactttaatg

SEQ ID NO: 114119 - DNA, 25 bp, Probe Sequence
aacatctacatttctctagctcagc

SEQ ID NO: 114120 - DNA, 25 bp, Probe Sequence
tcagaaccgtattataacagagagg

SEQ ID NO: 114121 - DNA, 25 bp, Probe Sequence
cctcagaaccgtattataacagaga

SEQ ID NO: 114122 - DNA, 25 bp, Probe Sequence
gcctcagaaccgtattataacagag

SEQ ID NO: 114123 - DNA, 25 bp, Probe Sequence
aattcctcctcttgaaggtctactg

SEQ ID NO: 114124 - DNA, 25 bp, Probe Sequence
tcctcttgaaggtctactgtgattc

SEQ ID NO: 114125 - DNA, 25 bp, Probe Sequence
ctcctcttgaaggtctactgtgatt

SEQ ID NO: 114126 - DNA, 25 bp, Probe Sequence
ttcgcctcagaaccgtattataaca

SEQ ID NO: 114127 - DNA, 25 bp, Probe Sequence
taaagactattcaggaaagatgccc

SEQ ID NO: 114128 - DNA, 25 bp, Probe Sequence
tatttagccattcttatctcctccc

SEQ ID NO: 114129 - DNA, 25 bp, Probe Sequence
atttagccattcttatctcctccct

SEQ ID NO: 114130 - DNA, 25 bp, Probe Sequence
tttagccattcttatctcctccctt

SEQ ID NO: 114131 - DNA, 25 bp, Probe Sequence
gcaggataaagactattcaggaaag

SEQ ID NO: 114132 - DNA, 25 bp, Probe Sequence
tctcatctttcataaccacaaggaa

SEQ ID NO: 114133 - DNA, 25 bp, Probe Sequence
gtggttaaacaaagtcaagacaagt

SEQ ID NO: 114134 - DNA, 25 bp, Probe Sequence
ctcagaaccgtattataacagagag

SEQ ID NO: 114135 - DNA, 25 bp, Probe Sequence
cgcctcagaaccgtattataacaga

SEQ ID NO: 114136 - DNA, 25 bp, Probe Sequence
tcgcctcagaaccgtattataacag

SEQ ID NO: 114137 - DNA, 25 bp, Probe Sequence
gtctcatctttcataaccacaagga

SEQ ID NO: 114138 - DNA, 25 bp, Probe Sequence
ttcaggaaacaagcaagaacattat

SEQ ID NO: 114139 - DNA, 25 bp, Probe Sequence
attcaggaaacaagcaagaacatta

SEQ ID NO: 114140 - DNA, 25 bp, Probe Sequence
aattcaggaaacaagcaagaacatt

SEQ ID NO: 114141 - DNA, 25 bp, Probe Sequence
tacagggaagataaattcaccagac

SEQ ID NO: 114142 - DNA, 25 bp, Probe Sequence
ttagccattcttatctcctcccttc

SEQ ID NO: 114143 - DNA, 25 bp, Probe Sequence
aaactccacatcacaattctccaaa

SEQ ID NO: 114144 - DNA, 25 bp, Probe Sequence
cttctgccaatgtctcgtctattat

SEQ ID NO: 114145 - DNA, 25 bp, Probe Sequence
ttctgccaatgtctcgtctattatg

SEQ ID NO: 114146 - DNA, 25 bp, Probe Sequence
ctgccaatgtctcgtctattatgtt

SEQ ID NO: 114147 - DNA, 25 bp, Probe Sequence
tcttctgccaatgtctcgtctatta

SEQ ID NO: 114148 - DNA, 25 bp, Probe Sequence
ccaatgtctcgtctattatgttgtt

SEQ ID NO: 114149 - DNA, 25 bp, Probe Sequence
tctgccaatgtctcgtctattatgt

SEQ ID NO: 114150 - DNA, 25 bp, Probe Sequence
tgtctcgtctattatgttgttgatt

SEQ ID NO: 114151 - DNA, 25 bp, Probe Sequence
aatgtctcgtctattatgttgttga

SEQ ID NO: 114152 - DNA, 25 bp, Probe Sequence
gccaatgtctcgtctattatgttgt

SEQ ID NO: 114153 - DNA, 25 bp, Probe Sequence
tgccaatgtctcgtctattatgttg

SEQ ID NO: 114154 - DNA, 25 bp, Probe Sequence
atcttctgccaatgtctcgtctatt

SEQ ID NO: 114155 - DNA, 25 bp, Probe Sequence
atgtctcgtctattatgttgttgat

SEQ ID NO: 114156 - DNA, 25 bp, Probe Sequence
caatgtctcgtctattatgttgttg

SEQ ID NO: 114157 - DNA, 25 bp, Probe Sequence
gatcttctgccaatgtctcgtctat

SEQ ID NO: 114158 - DNA, 25 bp, Probe Sequence
atcaagtgatcttctgccaatgtct

SEQ ID NO: 114159 - DNA, 25 bp, Probe Sequence
tcaagtgatcttctgccaatgtctc

SEQ ID NO: 114160 - DNA, 25 bp, Probe Sequence
tgatcttctgccaatgtctcgtcta

SEQ ID NO: 114161 - DNA, 25 bp, Probe Sequence
gtctcgtctattatgttgttgattt

SEQ ID NO: 114162 - DNA, 25 bp, Probe Sequence
cagtctttaaattgacccatcatca

SEQ ID NO: 114163 - DNA, 25 bp, Probe Sequence
acagtctttaaattgacccatcatc

SEQ ID NO: 114164 - DNA, 25 bp, Probe Sequence
caagtgatcttctgccaatgtctcg

SEQ ID NO: 114165 - DNA, 25 bp, Probe Sequence
tgttgattttctatctctgtggact

SEQ ID NO: 114166 - DNA, 25 bp, Probe Sequence
tgttgttgattttctatctctgtgg

SEQ ID NO: 114167 - DNA, 25 bp, Probe Sequence
agtctttaaattgacccatcatcat

SEQ ID NO: 114168 - DNA, 25 bp, Probe Sequence
tcagtcttcttccatgtctattagc

SEQ ID NO: 114169 - DNA, 25 bp, Probe Sequence
ggtcagtcttcttccatgtctatta

SEQ ID NO: 114170 - DNA, 25 bp, Probe Sequence
aggtcagtcttcttccatgtctatt

SEQ ID NO: 114171 - DNA, 25 bp, Probe Sequence
gtcagtcttcttccatgtctattag

SEQ ID NO: 114172 - DNA, 25 bp, Probe Sequence
caggtcagtcttcttccatgtctat

SEQ ID NO: 114173 - DNA, 25 bp, Probe Sequence
cagtcttcttccatgtctattagct

SEQ ID NO: 114174 - DNA, 25 bp, Probe Sequence
agtcttcttccatgtctattagctc

SEQ ID NO: 114175 - DNA, 25 bp, Probe Sequence
gtcttcttccatgtctattagctcc

SEQ ID NO: 114176 - DNA, 25 bp, Probe Sequence
cttcttccatgtctattagctccac

SEQ ID NO: 114177 - DNA, 25 bp, Probe Sequence
tcttcttccatgtctattagctcca

SEQ ID NO: 114178 - DNA, 25 bp, Probe Sequence
tcttccatgtctattagctccacaa

SEQ ID NO: 114179 - DNA, 25 bp, Probe Sequence
ttcttccatgtctattagctccaca

SEQ ID NO: 114180 - DNA, 25 bp, Probe Sequence
ccaggtcagtcttcttccatgtcta

SEQ ID NO: 114181 - DNA, 25 bp, Probe Sequence
taccaggtcagtcttcttccatgtc

SEQ ID NO: 114182 - DNA, 25 bp, Probe Sequence
ttccatgtctattagctccacaaag

SEQ ID NO: 114183 - DNA, 25 bp, Probe Sequence
cttccatgtctattagctccacaaa

SEQ ID NO: 114184 - DNA, 25 bp, Probe Sequence
gtctattagctccacaaagccaatc

SEQ ID NO: 114185 - DNA, 25 bp, Probe Sequence
accaggtcagtcttcttccatgtct

SEQ ID NO: 114186 - DNA, 25 bp, Probe Sequence
tgtctattagctccacaaagccaat

SEQ ID NO: 114187 - DNA, 25 bp, Probe Sequence
atgtctattagctccacaaagccaa

SEQ ID NO: 114188 - DNA, 25 bp, Probe Sequence
tccatgtctattagctccacaaagc

SEQ ID NO: 114189 - DNA, 25 bp, Probe Sequence
catgtctattagctccacaaagcca

SEQ ID NO: 114190 - DNA, 25 bp, Probe Sequence
ccatgtctattagctccacaaagcc

SEQ ID NO: 114191 - DNA, 25 bp, Probe Sequence
accctattcatgtctctacccacta

SEQ ID NO: 114192 - DNA, 25 bp, Probe Sequence
ctttgaccctattcatgtctctacc

SEQ ID NO: 114193 - DNA, 25 bp, Probe Sequence
cctttgaccctattcatgtctctac

SEQ ID NO: 114194 - DNA, 25 bp, Probe Sequence
ccctttgaccctattcatgtctcta

SEQ ID NO: 114195 - DNA, 25 bp, Probe Sequence
tttgaccctattcatgtctctaccc

SEQ ID NO: 114196 - DNA, 25 bp, Probe Sequence
ttgaccctattcatgtctctaccca

SEQ ID NO: 114197 - DNA, 25 bp, Probe Sequence
gaccctattcatgtctctacccact

SEQ ID NO: 114198 - DNA, 25 bp, Probe Sequence
tgaccctattcatgtctctacccac

SEQ ID NO: 114199 - DNA, 25 bp, Probe Sequence
tttcctcccctttgaccctattcat

SEQ ID NO: 114200 - DNA, 25 bp, Probe Sequence
ttttcctcccctttgaccctattca

SEQ ID NO: 114201 - DNA, 25 bp, Probe Sequence
ttttaaatctgaaggttctggtaac

SEQ ID NO: 114202 - DNA, 25 bp, Probe Sequence
tttaaatctgaaggttctggtaacc

SEQ ID NO: 114203 - DNA, 25 bp, Probe Sequence
attttaaatctgaaggttctggtaa

SEQ ID NO: 114204 - DNA, 25 bp, Probe Sequence
ttattttaaatctgaaggttctggt

SEQ ID NO: 114205 - DNA, 25 bp, Probe Sequence
ttcctcccctttgaccctattcatg

SEQ ID NO: 114206 - DNA, 25 bp, Probe Sequence
cccctttgaccctattcatgtctct

SEQ ID NO: 114207 - DNA, 25 bp, Probe Sequence
tcccctttgaccctattcatgtctc

SEQ ID NO: 114208 - DNA, 25 bp, Probe Sequence
ctcccctttgaccctattcatgtct

SEQ ID NO: 114209 - DNA, 25 bp, Probe Sequence
tattttaaatctgaaggttctggta

SEQ ID NO: 114210 - DNA, 25 bp, Probe Sequence
cctcccctttgaccctattcatgtc

SEQ ID NO: 114211 - DNA, 25 bp, Probe Sequence
tttattttaaatctgaaggttctgg

SEQ ID NO: 114212 - DNA, 25 bp, Probe Sequence
tcctcccctttgaccctattcatgt

SEQ ID NO: 114213 - DNA, 25 bp, Probe Sequence
gatacatctgctcagactacttctc

SEQ ID NO: 114214 - DNA, 25 bp, Probe Sequence
tacatctgctcagactacttctcat

SEQ ID NO: 114215 - DNA, 25 bp, Probe Sequence
atacatctgctcagactacttctca

SEQ ID NO: 114216 - DNA, 25 bp, Probe Sequence
ttggatacatctgctcagactactt

SEQ ID NO: 114217 - DNA, 25 bp, Probe Sequence
ggatacatctgctcagactacttct

SEQ ID NO: 114218 - DNA, 25 bp, Probe Sequence
tggatacatctgctcagactacttc

SEQ ID NO: 114219 - DNA, 25 bp, Probe Sequence
acatctgctcagactacttctcatg

SEQ ID NO: 114220 - DNA, 25 bp, Probe Sequence
atgaacttaccattccaaacgattt

SEQ ID NO: 114221 - DNA, 25 bp, Probe Sequence
atttatccacaatccctttctgctg

SEQ ID NO: 114222 - DNA, 25 bp, Probe Sequence
catgaacttaccattccaaacgatt

SEQ ID NO: 114223 - DNA, 25 bp, Probe Sequence
aataaatgagatccgtcagatgtct

SEQ ID NO: 114224 - DNA, 25 bp, Probe Sequence
aaataaatgagatccgtcagatgtc

SEQ ID NO: 114225 - DNA, 25 bp, Probe Sequence
tttggatacatctgctcagactact

SEQ ID NO: 114226 - DNA, 25 bp, Probe Sequence
gtttggatacatctgctcagactac

SEQ ID NO: 114227 - DNA, 25 bp, Probe Sequence
ataaatgagatccgtcagatgtctg

SEQ ID NO: 114228 - DNA, 25 bp, Probe Sequence
cagctagaacaatgcagatttatcc

SEQ ID NO: 114229 - DNA, 25 bp, Probe Sequence
gctagaacaatgcagatttatccac

SEQ ID NO: 114230 - DNA, 25 bp, Probe Sequence
agctagaacaatgcagatttatcca

SEQ ID NO: 114231 - DNA, 25 bp, Probe Sequence
ggtttggatacatctgctcagacta

SEQ ID NO: 114232 - DNA, 25 bp, Probe Sequence
gatttatccacaatccctttctgct

SEQ ID NO: 114233 - DNA, 25 bp, Probe Sequence
agatttatccacaatccctttctgc

SEQ ID NO: 114234 - DNA, 25 bp, Probe Sequence
gcagatttatccacaatccctttct

SEQ ID NO: 114235 - DNA, 25 bp, Probe Sequence
agaacaatgcagatttatccacaat

SEQ ID NO: 114236 - DNA, 25 bp, Probe Sequence
acttctcatgaacttaccattccaa

SEQ ID NO: 114237 - DNA, 25 bp, Probe Sequence
taacacctgtgacttacttgaattg

SEQ ID NO: 114238 - DNA, 25 bp, Probe Sequence
cataacacctgtgacttacttgaat

SEQ ID NO: 114239 - DNA, 25 bp, Probe Sequence
caatagacagtgttggtaatggttg

SEQ ID NO: 114240 - DNA, 25 bp, Probe Sequence
tccagcacacattctcatacatact

SEQ ID NO: 114241 - DNA, 25 bp, Probe Sequence
gtccagcacacattctcatacatac

SEQ ID NO: 114242 - DNA, 25 bp, Probe Sequence
tagcaatagacagtgttggtaatgg

SEQ ID NO: 114243 - DNA, 25 bp, Probe Sequence
agtgactatgagaagagagacaagt

SEQ ID NO: 114244 - DNA, 25 bp, Probe Sequence
tagtgactatgagaagagagacaag

SEQ ID NO: 114245 - DNA, 25 bp, Probe Sequence
aacacctgtgacttacttgaattgg

SEQ ID NO: 114246 - DNA, 25 bp, Probe Sequence
ctagcaatagacagtgttggtaatg

SEQ ID NO: 114247 - DNA, 25 bp, Probe Sequence
cttagtgactatgagaagagagaca

SEQ ID NO: 114248 - DNA, 25 bp, Probe Sequence
acttagtgactatgagaagagagac

SEQ ID NO: 114249 - DNA, 25 bp, Probe Sequence
tgacttagtgactatgagaagagag

SEQ ID NO: 114250 - DNA, 25 bp, Probe Sequence
ataacacctgtgacttacttgaatt

SEQ ID NO: 114251 - DNA, 25 bp, Probe Sequence
aatagacagtgttggtaatggttgt

SEQ ID NO: 114252 - DNA, 25 bp, Probe Sequence
acataacacctgtgacttacttgaa

SEQ ID NO: 114253 - DNA, 25 bp, Probe Sequence
aacataacacctgtgacttacttga

SEQ ID NO: 114254 - DNA, 25 bp, Probe Sequence
caacataacacctgtgacttacttg

SEQ ID NO: 114255 - DNA, 25 bp, Probe Sequence
acaacataacacctgtgacttactt

SEQ ID NO: 114256 - DNA, 25 bp, Probe Sequence
ttagtgactatgagaagagagacaa

SEQ ID NO: 114257 - DNA, 25 bp, Probe Sequence
gacttagtgactatgagaagagaga

SEQ ID NO: 114258 - DNA, 25 bp, Probe Sequence
gacaacataacacctgtgacttact

SEQ ID NO: 114259 - DNA, 25 bp, Probe Sequence
agacaacataacacctgtgacttac

SEQ ID NO: 114260 - DNA, 25 bp, Probe Sequence
gcaatagacagtgttggtaatggtt

SEQ ID NO: 114261 - DNA, 25 bp, Probe Sequence
ttagaggcaatgttattctcaccaa

SEQ ID NO: 114262 - DNA, 25 bp, Probe Sequence
attagaggcaatgttattctcacca

SEQ ID NO: 114263 - DNA, 25 bp, Probe Sequence
gattagaggcaatgttattctcacc

SEQ ID NO: 114264 - DNA, 25 bp, Probe Sequence
tgattagaggcaatgttattctcac

SEQ ID NO: 114265 - DNA, 25 bp, Probe Sequence
tgaaggatgaatcacagagaagatc

SEQ ID NO: 114266 - DNA, 25 bp, Probe Sequence
ctgattagaggcaatgttattctca

SEQ ID NO: 114267 - DNA, 25 bp, Probe Sequence
ttataactgtacttctggtgactgt

SEQ ID NO: 114268 - DNA, 25 bp, Probe Sequence
tggcaatacctatctgtatgagaag

SEQ ID NO: 114269 - DNA, 25 bp, Probe Sequence
tataactgtacttctggtgactgta

SEQ ID NO: 114270 - DNA, 25 bp, Probe Sequence
ggcaatacctatctgtatgagaaga

SEQ ID NO: 114271 - DNA, 25 bp, Probe Sequence
cctgattagaggcaatgttattctc

SEQ ID NO: 114272 - DNA, 25 bp, Probe Sequence
ttggcaatacctatctgtatgagaa

SEQ ID NO: 114273 - DNA, 25 bp, Probe Sequence
gcaatacctatctgtatgagaagac

SEQ ID NO: 114274 - DNA, 25 bp, Probe Sequence
agaatatctctgaagctggattgat

SEQ ID NO: 114275 - DNA, 25 bp, Probe Sequence
agtccattgaagaagagagtttgaa

SEQ ID NO: 114276 - DNA, 25 bp, Probe Sequence
ggtagtccattgaagaagagagttt

SEQ ID NO: 114277 - DNA, 25 bp, Probe Sequence
ggaacacttacttagaaccctgatt

SEQ ID NO: 114278 - DNA, 25 bp, Probe Sequence
atcacagggaacacttacttagaac

SEQ ID NO: 114279 - DNA, 25 bp, Probe Sequence
tggtagtccattgaagaagagagtt

SEQ ID NO: 114280 - DNA, 25 bp, Probe Sequence
ttggtagtccattgaagaagagagt

SEQ ID NO: 114281 - DNA, 25 bp, Probe Sequence
taaaggagataaagccaaggtgaag

SEQ ID NO: 114282 - DNA, 25 bp, Probe Sequence
ctaaaggagataaagccaaggtgaa

SEQ ID NO: 114283 - DNA, 25 bp, Probe Sequence
ccattgaagaagagagtttgaaagt

SEQ ID NO: 114284 - DNA, 25 bp, Probe Sequence
gtccattgaagaagagagtttgaaa

SEQ ID NO: 114285 - DNA, 25 bp, Probe Sequence
gcaaggcaaagagaatagacattag

SEQ ID NO: 114286 - DNA, 25 bp, Probe Sequence
aggcaaagagaatagacattagaca

SEQ ID NO: 114287 - DNA, 25 bp, Probe Sequence
aagagaatagacattagacagggac

SEQ ID NO: 114288 - DNA, 25 bp, Probe Sequence
gcaaagagaatagacattagacagg

SEQ ID NO: 114289 - DNA, 25 bp, Probe Sequence
ggcaaagagaatagacattagacag

SEQ ID NO: 114290 - DNA, 25 bp, Probe Sequence
agagaatagacattagacagggacc

SEQ ID NO: 114291 - DNA, 25 bp, Probe Sequence
ggcaaggcaaagagaatagacatta

SEQ ID NO: 114292 - DNA, 25 bp, Probe Sequence
gagaatagacattagacagggacct

SEQ ID NO: 114293 - DNA, 25 bp, Probe Sequence
caaagagaatagacattagacaggg

SEQ ID NO: 114294 - DNA, 25 bp, Probe Sequence
aaagagaatagacattagacaggga

SEQ ID NO: 114295 - DNA, 25 bp, Probe Sequence
aaggcaaagagaatagacattagac

SEQ ID NO: 114296 - DNA, 25 bp, Probe Sequence
caaggcaaagagaatagacattaga

SEQ ID NO: 114297 - DNA, 25 bp, Probe Sequence
ctgctaaggctaaagttgatctgaa

SEQ ID NO: 114298 - DNA, 25 bp, Probe Sequence
aagtaagggcaaggcaaagagaata

SEQ ID NO: 114299 - DNA, 25 bp, Probe Sequence
gctaaggctaaagttgatctgaaca

SEQ ID NO: 114300 - DNA, 25 bp, Probe Sequence
tgctaaggctaaagttgatctgaac

SEQ ID NO: 114301 - DNA, 25 bp, Probe Sequence
ctaaggctaaagttgatctgaacaa

SEQ ID NO: 114302 - DNA, 25 bp, Probe Sequence
taaggctaaagttgatctgaacaaa

SEQ ID NO: 114303 - DNA, 25 bp, Probe Sequence
taagggcaaggcaaagagaatagac

SEQ ID NO: 114304 - DNA, 25 bp, Probe Sequence
gtaagggcaaggcaaagagaataga

SEQ ID NO: 114305 - DNA, 25 bp, Probe Sequence
agtaagggcaaggcaaagagaatag

SEQ ID NO: 114306 - DNA, 25 bp, Probe Sequence
aaattccctgctaaggctaaagttg

SEQ ID NO: 114307 - DNA, 25 bp, Probe Sequence
caaattccctgctaaggctaaagtt

SEQ ID NO: 114308 - DNA, 25 bp, Probe Sequence
aaagtaagggcaaggcaaagagaat

SEQ ID NO: 114309 - DNA, 25 bp, Probe Sequence
aaagtatagtaaagcagtttgattt

SEQ ID NO: 114310 - DNA, 25 bp, Probe Sequence
agtatagtaaagcagtttgattttg

SEQ ID NO: 114311 - DNA, 25 bp, Probe Sequence
aagtatagtaaagcagtttgatttt

SEQ ID NO: 114312 - DNA, 25 bp, Probe Sequence
gtctatacaggattctcagcaagtt

SEQ ID NO: 114313 - DNA, 25 bp, Probe Sequence
attcctataccagtgccagtctata

SEQ ID NO: 114314 - DNA, 25 bp, Probe Sequence
atacaggattctcagcaagttacag

SEQ ID NO: 114315 - DNA, 25 bp, Probe Sequence
cttatcctgtgcctcttactacttg

SEQ ID NO: 114316 - DNA, 25 bp, Probe Sequence
ctcttggctctgactgatgatataa

SEQ ID NO: 114317 - DNA, 25 bp, Probe Sequence
cagtctatacaggattctcagcaag

SEQ ID NO: 114318 - DNA, 25 bp, Probe Sequence
agtctatacaggattctcagcaagt

SEQ ID NO: 114319 - DNA, 25 bp, Probe Sequence
actcttggctctgactgatgatata

SEQ ID NO: 114320 - DNA, 25 bp, Probe Sequence
tatacaggattctcagcaagttaca

SEQ ID NO: 114321 - DNA, 25 bp, Probe Sequence
ttcctataccagtgccagtctatac

SEQ ID NO: 114322 - DNA, 25 bp, Probe Sequence
tcttggctctgactgatgatataag

SEQ ID NO: 114323 - DNA, 25 bp, Probe Sequence
atccttatcctgtgcctcttactac

SEQ ID NO: 114324 - DNA, 25 bp, Probe Sequence
catccttatcctgtgcctcttacta

SEQ ID NO: 114325 - DNA, 25 bp, Probe Sequence
ctatacaggattctcagcaagttac

SEQ ID NO: 114326 - DNA, 25 bp, Probe Sequence
tctatacaggattctcagcaagtta

SEQ ID NO: 114327 - DNA, 25 bp, Probe Sequence
gattcctataccagtgccagtctat

SEQ ID NO: 114328 - DNA, 25 bp, Probe Sequence
tctcagcaagttacagaagtatctt

SEQ ID NO: 114329 - DNA, 25 bp, Probe Sequence
ccttatcctgtgcctcttactactt

SEQ ID NO: 114330 - DNA, 25 bp, Probe Sequence
ttatcctgtgcctcttactacttgg

SEQ ID NO: 114331 - DNA, 25 bp, Probe Sequence
cttggctctgactgatgatataagt

SEQ ID NO: 114332 - DNA, 25 bp, Probe Sequence
ctataccagtgccagtctatacagg

SEQ ID NO: 114333 - DNA, 25 bp, Probe Sequence
cctataccagtgccagtctatacag

SEQ ID NO: 114334 - DNA, 25 bp, Probe Sequence
ttggctctgactgatgatataagtt

SEQ ID NO: 114335 - DNA, 25 bp, Probe Sequence
ccagtctatacaggattctcagcaa

SEQ ID NO: 114336 - DNA, 25 bp, Probe Sequence
gcaataagaataaatccgtaggtcg

SEQ ID NO: 114337 - DNA, 25 bp, Probe Sequence
ggcaataagaataaatccgtaggtc

SEQ ID NO: 114338 - DNA, 25 bp, Probe Sequence
ctgggcaataagaataaatccgtag

SEQ ID NO: 114339 - DNA, 25 bp, Probe Sequence
gggcaataagaataaatccgtaggt

SEQ ID NO: 114340 - DNA, 25 bp, Probe Sequence
tgggcaataagaataaatccgtagg

SEQ ID NO: 114341 - DNA, 25 bp, Probe Sequence
cctgggcaataagaataaatccgta

SEQ ID NO: 114342 - DNA, 25 bp, Probe Sequence
caagcctgggcaataagaataaatc

SEQ ID NO: 114343 - DNA, 25 bp, Probe Sequence
tcaagcctgggcaataagaataaat

SEQ ID NO: 114344 - DNA, 25 bp, Probe Sequence
aagcctgggcaataagaataaatcc

SEQ ID NO: 114345 - DNA, 25 bp, Probe Sequence
ctcaagcctgggcaataagaataaa

SEQ ID NO: 114346 - DNA, 25 bp, Probe Sequence
gagagtcagagacagaacatgaaag

SEQ ID NO: 114347 - DNA, 25 bp, Probe Sequence
tgagagtcagagacagaacatgaaa

SEQ ID NO: 114348 - DNA, 25 bp, Probe Sequence
actcaagcctgggcaataagaataa

SEQ ID NO: 114349 - DNA, 25 bp, Probe Sequence
agagtcagagacagaacatgaaagg

SEQ ID NO: 114350 - DNA, 25 bp, Probe Sequence
cagactgtgttggtggtggtaattt

SEQ ID NO: 114351 - DNA, 25 bp, Probe Sequence
cactcaagcctgggcaataagaata

SEQ ID NO: 114352 - DNA, 25 bp, Probe Sequence
ctgagagtcagagacagaacatgaa

SEQ ID NO: 114353 - DNA, 25 bp, Probe Sequence
agcctgggcaataagaataaatccg

SEQ ID NO: 114354 - DNA, 25 bp, Probe Sequence
gcctgggcaataagaataaatccgt

SEQ ID NO: 114355 - DNA, 25 bp, Probe Sequence
gagtcagagacagaacatgaaaggc

SEQ ID NO: 114356 - DNA, 25 bp, Probe Sequence
ctgtgttggtggtggtaattttgtc

SEQ ID NO: 114357 - DNA, 25 bp, Probe Sequence
gactgtgttggtggtggtaattttg

SEQ ID NO: 114358 - DNA, 25 bp, Probe Sequence
agactgtgttggtggtggtaatttt

SEQ ID NO: 114359 - DNA, 25 bp, Probe Sequence
actgtgttggtggtggtaattttgt

SEQ ID NO: 114360 - DNA, 25 bp, Probe Sequence
tggcaaaaccctactaaagatacaa

SEQ ID NO: 114361 - DNA, 25 bp, Probe Sequence
atggcaaaaccctactaaagataca

SEQ ID NO: 114362 - DNA, 25 bp, Probe Sequence
ggcaaaaccctactaaagatacaaa

SEQ ID NO: 114363 - DNA, 25 bp, Probe Sequence
gcaaaaccctactaaagatacaaaa

SEQ ID NO: 114364 - DNA, 25 bp, Probe Sequence
ttaaggttaagagcagaggtttact

SEQ ID NO: 114365 - DNA, 25 bp, Probe Sequence
aagcacttaaatcactccaaagaag

SEQ ID NO: 114366 - DNA, 25 bp, Probe Sequence
gaagcacttaaatcactccaaagaa

SEQ ID NO: 114367 - DNA, 25 bp, Probe Sequence
aagaagcacttaaatcactccaaag

SEQ ID NO: 114368 - DNA, 25 bp, Probe Sequence
gcacttaaatcactccaaagaagac

SEQ ID NO: 114369 - DNA, 25 bp, Probe Sequence
agcacttaaatcactccaaagaaga

SEQ ID NO: 114370 - DNA, 25 bp, Probe Sequence
agaagcacttaaatcactccaaaga

SEQ ID NO: 114371 - DNA, 25 bp, Probe Sequence
aaggttaagagcagaggtttactag

SEQ ID NO: 114372 - DNA, 25 bp, Probe Sequence
cacttaaatcactccaaagaagact

SEQ ID NO: 114373 - DNA, 25 bp, Probe Sequence
tttaaggttaagagcagaggtttac

SEQ ID NO: 114374 - DNA, 25 bp, Probe Sequence
taaggttaagagcagaggtttacta

SEQ ID NO: 114375 - DNA, 25 bp, Probe Sequence
aggttaagagcagaggtttactagg

SEQ ID NO: 114376 - DNA, 25 bp, Probe Sequence
acttaaatcactccaaagaagactt

SEQ ID NO: 114377 - DNA, 25 bp, Probe Sequence
taagaatctgagtctaaacagcaca

SEQ ID NO: 114378 - DNA, 25 bp, Probe Sequence
aagaatctgagtctaaacagcacag

SEQ ID NO: 114379 - DNA, 25 bp, Probe Sequence
cgactttcataattagcatctacca

SEQ ID NO: 114380 - DNA, 25 bp, Probe Sequence
ttaagaatctgagtctaaacagcac

SEQ ID NO: 114381 - DNA, 25 bp, Probe Sequence
taagaagcacttaaatcactccaaa

SEQ ID NO: 114382 - DNA, 25 bp, Probe Sequence
ataagaagcacttaaatcactccaa

SEQ ID NO: 114383 - DNA, 25 bp, Probe Sequence
aataagaagcacttaaatcactcca

SEQ ID NO: 114384 - DNA, 25 bp, Probe Sequence
ggatcacgaggtaggagttaaagac

SEQ ID NO: 114385 - DNA, 25 bp, Probe Sequence
attaagaatctgagtctaaacagca

SEQ ID NO: 114386 - DNA, 25 bp, Probe Sequence
tggatcacgaggtaggagttaaaga

SEQ ID NO: 114387 - DNA, 25 bp, Probe Sequence
ggttaagagcagaggtttactaggc

SEQ ID NO: 114388 - DNA, 25 bp, Probe Sequence
gcttgacctgaatgagatgtagaat

SEQ ID NO: 114389 - DNA, 25 bp, Probe Sequence
cttgacctgaatgagatgtagaatg

SEQ ID NO: 114390 - DNA, 25 bp, Probe Sequence
ttgacctgaatgagatgtagaatgc

SEQ ID NO: 114391 - DNA, 25 bp, Probe Sequence
ttatgttgaggtgaccacttaattg

SEQ ID NO: 114392 - DNA, 25 bp, Probe Sequence
cttatgttgaggtgaccacttaatt

SEQ ID NO: 114393 - DNA, 25 bp, Probe Sequence
tgcttgacctgaatgagatgtagaa

SEQ ID NO: 114394 - DNA, 25 bp, Probe Sequence
tatgttgaggtgaccacttaattgc

SEQ ID NO: 114395 - DNA, 25 bp, Probe Sequence
catctcattgtgcttcgtatcagtc

SEQ ID NO: 114396 - DNA, 25 bp, Probe Sequence
atctcattgtgcttcgtatcagtca

SEQ ID NO: 114397 - DNA, 25 bp, Probe Sequence
ctgcttgacctgaatgagatgtaga

SEQ ID NO: 114398 - DNA, 25 bp, Probe Sequence
tgacctgaatgagatgtagaatgcc

SEQ ID NO: 114399 - DNA, 25 bp, Probe Sequence
ccttatgttgaggtgaccacttaat

SEQ ID NO: 114400 - DNA, 25 bp, Probe Sequence
tctgcttgacctgaatgagatgtag

SEQ ID NO: 114401 - DNA, 25 bp, Probe Sequence
tctcattgtgcttcgtatcagtcag

SEQ ID NO: 114402 - DNA, 25 bp, Probe Sequence
ttaagatggttaagacctctgagac

SEQ ID NO: 114403 - DNA, 25 bp, Probe Sequence
ctctgcttgacctgaatgagatgta

SEQ ID NO: 114404 - DNA, 25 bp, Probe Sequence
taagatggttaagacctctgagacc

SEQ ID NO: 114405 - DNA, 25 bp, Probe Sequence
tgacttggaagataaactgaaatgc

SEQ ID NO: 114406 - DNA, 25 bp, Probe Sequence
atgttgaggtgaccacttaattgct

SEQ ID NO: 114407 - DNA, 25 bp, Probe Sequence
tgggagaaagagaaatcaatagtgc

SEQ ID NO: 114408 - DNA, 25 bp, Probe Sequence
ctcattgtgcttcgtatcagtcagt

SEQ ID NO: 114409 - DNA, 25 bp, Probe Sequence
ccatctcattgtgcttcgtatcagt

SEQ ID NO: 114410 - DNA, 25 bp, Probe Sequence
tttgaaataaagaaccagtccctcc

SEQ ID NO: 114411 - DNA, 25 bp, Probe Sequence
cctccttgaaagaaagaagattgtg

SEQ ID NO: 114412 - DNA, 25 bp, Probe Sequence
tgtgtgattggcttaaatccagttt

SEQ ID NO: 114413 - DNA, 25 bp, Probe Sequence
ttgtgtgattggcttaaatccagtt

SEQ ID NO: 114414 - DNA, 25 bp, Probe Sequence
tttgtgtgattggcttaaatccagt

SEQ ID NO: 114415 - DNA, 25 bp, Probe Sequence
aggaattttgtgtgattggcttaaa

SEQ ID NO: 114416 - DNA, 25 bp, Probe Sequence
caggaattttgtgtgattggcttaa

SEQ ID NO: 114417 - DNA, 25 bp, Probe Sequence
ggaattttgtgtgattggcttaaat

SEQ ID NO: 114418 - DNA, 25 bp, Probe Sequence
attttgtgtgattggcttaaatcca

SEQ ID NO: 114419 - DNA, 25 bp, Probe Sequence
gtgattggcttaaatccagttttca

SEQ ID NO: 114420 - DNA, 25 bp, Probe Sequence
tgtgattggcttaaatccagttttc

SEQ ID NO: 114421 - DNA, 25 bp, Probe Sequence
tgattggcttaaatccagttttcaa

SEQ ID NO: 114422 - DNA, 25 bp, Probe Sequence
ttggttccaggaattttgtgtgatt

SEQ ID NO: 114423 - DNA, 25 bp, Probe Sequence
gtgtgattggcttaaatccagtttt

SEQ ID NO: 114424 - DNA, 25 bp, Probe Sequence
ttttgtgtgattggcttaaatccag

SEQ ID NO: 114425 - DNA, 25 bp, Probe Sequence
gacaaaatctcctggctttacagac

SEQ ID NO: 114426 - DNA, 25 bp, Probe Sequence
aattttgtgtgattggcttaaatcc

SEQ ID NO: 114427 - DNA, 25 bp, Probe Sequence
aaaatccttttctcatttggggagg

SEQ ID NO: 114428 - DNA, 25 bp, Probe Sequence
cttggttccaggaattttgtgtgat

SEQ ID NO: 114429 - DNA, 25 bp, Probe Sequence
tggttccaggaattttgtgtgattg

SEQ ID NO: 114430 - DNA, 25 bp, Probe Sequence
cggaaacaaaatccttttctcattt

SEQ ID NO: 114431 - DNA, 25 bp, Probe Sequence
gaattttgtgtgattggcttaaatc

SEQ ID NO: 114432 - DNA, 25 bp, Probe Sequence
ccaggaattttgtgtgattggctta

SEQ ID NO: 114433 - DNA, 25 bp, Probe Sequence
aacaaaatccttttctcatttgggg

SEQ ID NO: 114434 - DNA, 25 bp, Probe Sequence
caaaatccttttctcatttggggag

SEQ ID NO: 114435 - DNA, 25 bp, Probe Sequence
acaaaatccttttctcatttgggga

SEQ ID NO: 114436 - DNA, 25 bp, Probe Sequence
gtgaagatgtctcaggagccatatc

SEQ ID NO: 114437 - DNA, 25 bp, Probe Sequence
tgaagatgtctcaggagccatatca

SEQ ID NO: 114438 - DNA, 25 bp, Probe Sequence
agtgaagatgtctcaggagccatat

SEQ ID NO: 114439 - DNA, 25 bp, Probe Sequence
aagtgaagatgtctcaggagccata

SEQ ID NO: 114440 - DNA, 25 bp, Probe Sequence
ttaaagtgaagatgtctcaggagcc

SEQ ID NO: 114441 - DNA, 25 bp, Probe Sequence
gcatttaaagtgaagatgtctcagg

SEQ ID NO: 114442 - DNA, 25 bp, Probe Sequence
ggcatttaaagtgaagatgtctcag

SEQ ID NO: 114443 - DNA, 25 bp, Probe Sequence
tttaaagtgaagatgtctcaggagc

SEQ ID NO: 114444 - DNA, 25 bp, Probe Sequence
catttaaagtgaagatgtctcagga

SEQ ID NO: 114445 - DNA, 25 bp, Probe Sequence
atttaaagtgaagatgtctcaggag

SEQ ID NO: 114446 - DNA, 25 bp, Probe Sequence
cggcatttaaagtgaagatgtctca

SEQ ID NO: 114447 - DNA, 25 bp, Probe Sequence
taaagtgaagatgtctcaggagcca

SEQ ID NO: 114448 - DNA, 25 bp, Probe Sequence
aaagtgaagatgtctcaggagccat

SEQ ID NO: 114449 - DNA, 25 bp, Probe Sequence
ccggcatttaaagtgaagatgtctc

SEQ ID NO: 114450 - DNA, 25 bp, Probe Sequence
ctacctcccggcatttaaagtgaag

SEQ ID NO: 114451 - DNA, 25 bp, Probe Sequence
cccggcatttaaagtgaagatgtct

SEQ ID NO: 114452 - DNA, 25 bp, Probe Sequence
tcccggcatttaaagtgaagatgtc

SEQ ID NO: 114453 - DNA, 25 bp, Probe Sequence
ctcccggcatttaaagtgaagatgt

SEQ ID NO: 114454 - DNA, 25 bp, Probe Sequence
tacctcccggcatttaaagtgaaga

SEQ ID NO: 114455 - DNA, 25 bp, Probe Sequence
cctcccggcatttaaagtgaagatg

SEQ ID NO: 114456 - DNA, 25 bp, Probe Sequence
acctcccggcatttaaagtgaagat

SEQ ID NO: 114457 - DNA, 25 bp, Probe Sequence
cctacctcccggcatttaaagtgaa

SEQ ID NO: 114458 - DNA, 25 bp, Probe Sequence
cctctagtctctgcttctctggatc

SEQ ID NO: 114459 - DNA, 25 bp, Probe Sequence
gaaggaagaaaacagcccaaagatg

SEQ ID NO: 114460 - DNA, 25 bp, Probe Sequence
agaaggaagaaaacagcccaaagat

SEQ ID NO: 114461 - DNA, 25 bp, Probe Sequence
ctactatcgcctccctctagtctct

SEQ ID NO: 114462 - DNA, 25 bp, Probe Sequence
aaggaagaaaacagcccaaagatga

SEQ ID NO: 114463 - DNA, 25 bp, Probe Sequence
ccctctagtctctgcttctctggat

SEQ ID NO: 114464 - DNA, 25 bp, Probe Sequence
aggaagaaaacagcccaaagatgag

SEQ ID NO: 114465 - DNA, 25 bp, Probe Sequence
tactatcgcctccctctagtctctg

SEQ ID NO: 114466 - DNA, 25 bp, Probe Sequence
cagaaggaagaaaacagcccaaaga

SEQ ID NO: 114467 - DNA, 25 bp, Probe Sequence
ctccctctagtctctgcttctctgg

SEQ ID NO: 114468 - DNA, 25 bp, Probe Sequence
cctccctctagtctctgcttctctg

SEQ ID NO: 114469 - DNA, 25 bp, Probe Sequence
cctactatcgcctccctctagtctc

SEQ ID NO: 114470 - DNA, 25 bp, Probe Sequence
ctctagtctctgcttctctggatcc

SEQ ID NO: 114471 - DNA, 25 bp, Probe Sequence
gtcctactatcgcctccctctagtc

SEQ ID NO: 114472 - DNA, 25 bp, Probe Sequence
tcctactatcgcctccctctagtct

SEQ ID NO: 114473 - DNA, 25 bp, Probe Sequence
gcagaaggaagaaaacagcccaaag

SEQ ID NO: 114474 - DNA, 25 bp, Probe Sequence
gaggagggcagaaggaagaaaacag

SEQ ID NO: 114475 - DNA, 25 bp, Probe Sequence
ctgaggagggcagaaggaagaaaac

SEQ ID NO: 114476 - DNA, 25 bp, Probe Sequence
ctagtctctgcttctctggatccct

SEQ ID NO: 114477 - DNA, 25 bp, Probe Sequence
tctagtctctgcttctctggatccc

SEQ ID NO: 114478 - DNA, 25 bp, Probe Sequence
tagtctctgcttctctggatccctg

SEQ ID NO: 114479 - DNA, 25 bp, Probe Sequence
tttctctcttgtcactttctcaaac

SEQ ID NO: 114480 - DNA, 25 bp, Probe Sequence
gtttctctcttgtcactttctcaaa

SEQ ID NO: 114481 - DNA, 25 bp, Probe Sequence
agtttctctcttgtcactttctcaa

SEQ ID NO: 114482 - DNA, 25 bp, Probe Sequence
tcagtttctctcttgtcactttctc

SEQ ID NO: 114483 - DNA, 25 bp, Probe Sequence
ctcagtttctctcttgtcactttct

SEQ ID NO: 114484 - DNA, 25 bp, Probe Sequence
ttctctcttgtcactttctcaaacc

SEQ ID NO: 114485 - DNA, 25 bp, Probe Sequence
cagtttctctcttgtcactttctca

SEQ ID NO: 114486 - DNA, 25 bp, Probe Sequence
ctctcttgtcactttctcaaacctg

SEQ ID NO: 114487 - DNA, 25 bp, Probe Sequence
tctctcttgtcactttctcaaacct

SEQ ID NO: 114488 - DNA, 25 bp, Probe Sequence
cctcagtttctctcttgtcactttc

SEQ ID NO: 114489 - DNA, 25 bp, Probe Sequence
ctgatgattccagagcctgtatcca

SEQ ID NO: 114490 - DNA, 25 bp, Probe Sequence
gcctcagtttctctcttgtcacttt

SEQ ID NO: 114491 - DNA, 25 bp, Probe Sequence
tgatgattccagagcctgtatccac

SEQ ID NO: 114492 - DNA, 25 bp, Probe Sequence
tctcttgtcactttctcaaacctgc

SEQ ID NO: 114493 - DNA, 25 bp, Probe Sequence
catctcgaagtgttctggaatttgg

SEQ ID NO: 114494 - DNA, 25 bp, Probe Sequence
catcaagaacttctgatctcctgcc

SEQ ID NO: 114495 - DNA, 25 bp, Probe Sequence
ccatcaagaacttctgatctcctgc

SEQ ID NO: 114496 - DNA, 25 bp, Probe Sequence
gccatcaagaacttctgatctcctg

SEQ ID NO: 114497 - DNA, 25 bp, Probe Sequence
cagccatcaagaacttctgatctcc

SEQ ID NO: 114498 - DNA, 25 bp, Probe Sequence
ccagccatcaagaacttctgatctc

SEQ ID NO: 114499 - DNA, 25 bp, Probe Sequence
agccatcaagaacttctgatctcct

SEQ ID NO: 114500 - DNA, 25 bp, Probe Sequence
agcctcagtttctctcttgtcactt

SEQ ID NO: 114501 - DNA, 25 bp, Probe Sequence
gattccagagcctgtatccaccttc

SEQ ID NO: 114502 - DNA, 25 bp, Probe Sequence
gatgattccagagcctgtatccacc

SEQ ID NO: 114503 - DNA, 25 bp, Probe Sequence
atacaatgaatcacgcaaccactaa

SEQ ID NO: 114504 - DNA, 25 bp, Probe Sequence
aatctgtatgtggtggagaagtatt

SEQ ID NO: 114505 - DNA, 25 bp, Probe Sequence
gacattattctcctgatcctcctac

SEQ ID NO: 114506 - DNA, 25 bp, Probe Sequence
attattctcctgatcctcctacctg

SEQ ID NO: 114507 - DNA, 25 bp, Probe Sequence
cattattctcctgatcctcctacct

SEQ ID NO: 114508 - DNA, 25 bp, Probe Sequence
gaaccaattatgagcagtctcctta

SEQ ID NO: 114509 - DNA, 25 bp, Probe Sequence
acattattctcctgatcctcctacc

SEQ ID NO: 114510 - DNA, 25 bp, Probe Sequence
aaccaattatgagcagtctccttac

SEQ ID NO: 114511 - DNA, 25 bp, Probe Sequence
catacaatgaatcacgcaaccacta

SEQ ID NO: 114512 - DNA, 25 bp, Probe Sequence
accaattatgagcagtctccttact

SEQ ID NO: 114513 - DNA, 25 bp, Probe Sequence
aatcttcacctgaaccaattatgag

SEQ ID NO: 114514 - DNA, 25 bp, Probe Sequence
atcttcacctgaaccaattatgagc

SEQ ID NO: 114515 - DNA, 25 bp, Probe Sequence
tgaaccaattatgagcagtctcctt

SEQ ID NO: 114516 - DNA, 25 bp, Probe Sequence
ctgagacatgccttgtagaatgatt

SEQ ID NO: 114517 - DNA, 25 bp, Probe Sequence
cttacagcattgtggaatcatgttg

SEQ ID NO: 114518 - DNA, 25 bp, Probe Sequence
ggacattattctcctgatcctccta

SEQ ID NO: 114519 - DNA, 25 bp, Probe Sequence
ttattctcctgatcctcctacctgg

SEQ ID NO: 114520 - DNA, 25 bp, Probe Sequence
gaacttcaagctgtgattctatctc

SEQ ID NO: 114521 - DNA, 25 bp, Probe Sequence
tgtatgtggtggagaagtatttgaa

SEQ ID NO: 114522 - DNA, 25 bp, Probe Sequence
ctgtatgtggtggagaagtatttga

SEQ ID NO: 114523 - DNA, 25 bp, Probe Sequence
ggaacttcaagctgtgattctatct

SEQ ID NO: 114524 - DNA, 25 bp, Probe Sequence
aggaacttcaagctgtgattctatc

SEQ ID NO: 114525 - DNA, 25 bp, Probe Sequence
ctatccagttaagtgcaggtagttc

SEQ ID NO: 114526 - DNA, 25 bp, Probe Sequence
aacttcaagctgtgattctatctcg

SEQ ID NO: 114527 - DNA, 25 bp, Probe Sequence
ggacttctgtgagattgtagttgta

SEQ ID NO: 114528 - DNA, 25 bp, Probe Sequence
gatgtgttatgttgtatgtacgcat

SEQ ID NO: 114529 - DNA, 25 bp, Probe Sequence
tgacagattccaacagaagtgtatt

SEQ ID NO: 114530 - DNA, 25 bp, Probe Sequence
gtggacttctgtgagattgtagttg

SEQ ID NO: 114531 - DNA, 25 bp, Probe Sequence
agtggacttctgtgagattgtagtt

SEQ ID NO: 114532 - DNA, 25 bp, Probe Sequence
ggatgtgttatgttgtatgtacgca

SEQ ID NO: 114533 - DNA, 25 bp, Probe Sequence
ctgacagattccaacagaagtgtat

SEQ ID NO: 114534 - DNA, 25 bp, Probe Sequence
acttctgtgagattgtagttgtact

SEQ ID NO: 114535 - DNA, 25 bp, Probe Sequence
tggacttctgtgagattgtagttgt

SEQ ID NO: 114536 - DNA, 25 bp, Probe Sequence
gacttctgtgagattgtagttgtac

SEQ ID NO: 114537 - DNA, 25 bp, Probe Sequence
cttctgtgagattgtagttgtactt

SEQ ID NO: 114538 - DNA, 25 bp, Probe Sequence
ttgttgggatgtgttatgttgtatg

SEQ ID NO: 114539 - DNA, 25 bp, Probe Sequence
ttctcttaattggcagatgttccag

SEQ ID NO: 114540 - DNA, 25 bp, Probe Sequence
tgttgggatgtgttatgttgtatgt

SEQ ID NO: 114541 - DNA, 25 bp, Probe Sequence
tgtgttatgttgtatgtacgcatat

SEQ ID NO: 114542 - DNA, 25 bp, Probe Sequence
atgtgttatgttgtatgtacgcata

SEQ ID NO: 114543 - DNA, 25 bp, Probe Sequence
ggtaaagagttaagtgtccaaaggt

SEQ ID NO: 114544 - DNA, 25 bp, Probe Sequence
gttgggatgtgttatgttgtatgta

SEQ ID NO: 114545 - DNA, 25 bp, Probe Sequence
tttgttgggatgtgttatgttgtat

SEQ ID NO: 114546 - DNA, 25 bp, Probe Sequence
ataacctcatcagaaacgcctttag

SEQ ID NO: 114547 - DNA, 25 bp, Probe Sequence
gtaaagagttaagtgtccaaaggtt

SEQ ID NO: 114548 - DNA, 25 bp, Probe Sequence
cataacctcatcagaaacgccttta

SEQ ID NO: 114549 - DNA, 25 bp, Probe Sequence
ctttctcttaattggcagatgttcc

SEQ ID NO: 114550 - DNA, 25 bp, Probe Sequence
gggtaaagagttaagtgtccaaagg

SEQ ID NO: 114551 - DNA, 25 bp, Probe Sequence
tataatgtaatcgctcaagcctgat

SEQ ID NO: 114552 - DNA, 25 bp, Probe Sequence
gttataatgtaatcgctcaagcctg

SEQ ID NO: 114553 - DNA, 25 bp, Probe Sequence
ggttataatgtaatcgctcaagcct

SEQ ID NO: 114554 - DNA, 25 bp, Probe Sequence
ataatgtaatcgctcaagcctgatc

SEQ ID NO: 114555 - DNA, 25 bp, Probe Sequence
ttataatgtaatcgctcaagcctga

SEQ ID NO: 114556 - DNA, 25 bp, Probe Sequence
cttctccgtgacatctatgcctatg

SEQ ID NO: 114557 - DNA, 25 bp, Probe Sequence
ctatatccacagaatcagtcgaggt

SEQ ID NO: 114558 - DNA, 25 bp, Probe Sequence
taatgtaatcgctcaagcctgatct

SEQ ID NO: 114559 - DNA, 25 bp, Probe Sequence
aactatatccacagaatcagtcgag

SEQ ID NO: 114560 - DNA, 25 bp, Probe Sequence
actatatccacagaatcagtcgagg

SEQ ID NO: 114561 - DNA, 25 bp, Probe Sequence
ccaggcagtcatcttcatcaatacc

SEQ ID NO: 114562 - DNA, 25 bp, Probe Sequence
tacctatctcccaaatacatcaaga

SEQ ID NO: 114563 - DNA, 25 bp, Probe Sequence
ccttctccgtgacatctatgcctat

SEQ ID NO: 114564 - DNA, 25 bp, Probe Sequence
tatatccacagaatcagtcgaggtg

SEQ ID NO: 114565 - DNA, 25 bp, Probe Sequence
tgatatgcttaaccggagataccta

SEQ ID NO: 114566 - DNA, 25 bp, Probe Sequence
gatatgcttaaccggagatacctat

SEQ ID NO: 114567 - DNA, 25 bp, Probe Sequence
atatgcttaaccggagatacctatc

SEQ ID NO: 114568 - DNA, 25 bp, Probe Sequence
atacctatctcccaaatacatcaag

SEQ ID NO: 114569 - DNA, 25 bp, Probe Sequence
tacaatgccttctgatgtgcttgag

SEQ ID NO: 114570 - DNA, 25 bp, Probe Sequence
ctacaatgccttctgatgtgcttga

SEQ ID NO: 114571 - DNA, 25 bp, Probe Sequence
gatacctatctcccaaatacatcaa

SEQ ID NO: 114572 - DNA, 25 bp, Probe Sequence
aatgtaatcgctcaagcctgatctg

SEQ ID NO: 114573 - DNA, 25 bp, Probe Sequence
aagatgtggctattaacatggtgac

SEQ ID NO: 114574 - DNA, 25 bp, Probe Sequence
ttctccgtgacatctatgcctatgg

SEQ ID NO: 114575 - DNA, 25 bp, Probe Sequence
tataatgtaatcgctcaagcctgat

SEQ ID NO: 114576 - DNA, 25 bp, Probe Sequence
gttataatgtaatcgctcaagcctg

SEQ ID NO: 114577 - DNA, 25 bp, Probe Sequence
ggttataatgtaatcgctcaagcct

SEQ ID NO: 114578 - DNA, 25 bp, Probe Sequence
ataatgtaatcgctcaagcctgatc

SEQ ID NO: 114579 - DNA, 25 bp, Probe Sequence
ttataatgtaatcgctcaagcctga

SEQ ID NO: 114580 - DNA, 25 bp, Probe Sequence
cttctccgtgacatctatgcctatg

SEQ ID NO: 114581 - DNA, 25 bp, Probe Sequence
ctatatccacagaatcagtcgaggt

SEQ ID NO: 114582 - DNA, 25 bp, Probe Sequence
taatgtaatcgctcaagcctgatct

SEQ ID NO: 114583 - DNA, 25 bp, Probe Sequence
aactatatccacagaatcagtcgag

SEQ ID NO: 114584 - DNA, 25 bp, Probe Sequence
actatatccacagaatcagtcgagg

SEQ ID NO: 114585 - DNA, 25 bp, Probe Sequence
ccaggcagtcatcttcatcaatacc

SEQ ID NO: 114586 - DNA, 25 bp, Probe Sequence
tacctatctcccaaatacatcaaga

SEQ ID NO: 114587 - DNA, 25 bp, Probe Sequence
ccttctccgtgacatctatgcctat

SEQ ID NO: 114588 - DNA, 25 bp, Probe Sequence
tatatccacagaatcagtcgaggtg

SEQ ID NO: 114589 - DNA, 25 bp, Probe Sequence
tgatatgcttaaccggagataccta

SEQ ID NO: 114590 - DNA, 25 bp, Probe Sequence
gatatgcttaaccggagatacctat

SEQ ID NO: 114591 - DNA, 25 bp, Probe Sequence
atatgcttaaccggagatacctatc

SEQ ID NO: 114592 - DNA, 25 bp, Probe Sequence
atacctatctcccaaatacatcaag

SEQ ID NO: 114593 - DNA, 25 bp, Probe Sequence
tacaatgccttctgatgtgcttgag

SEQ ID NO: 114594 - DNA, 25 bp, Probe Sequence
ctacaatgccttctgatgtgcttga

SEQ ID NO: 114595 - DNA, 25 bp, Probe Sequence
gatacctatctcccaaatacatcaa

SEQ ID NO: 114596 - DNA, 25 bp, Probe Sequence
aatgtaatcgctcaagcctgatctg

SEQ ID NO: 114597 - DNA, 25 bp, Probe Sequence
aagatgtggctattaacatggtgac

SEQ ID NO: 114598 - DNA, 25 bp, Probe Sequence
ttctccgtgacatctatgcctatgg

SEQ ID NO: 114599 - DNA, 25 bp, Probe Sequence
atataacaagcataacacaccactg

SEQ ID NO: 114600 - DNA, 25 bp, Probe Sequence
ttacaacagttcatccattcacaat

SEQ ID NO: 114601 - DNA, 25 bp, Probe Sequence
tgttgacacattattactgctgtta

SEQ ID NO: 114602 - DNA, 25 bp, Probe Sequence
tatataacaagcataacacaccact

SEQ ID NO: 114603 - DNA, 25 bp, Probe Sequence
gttgacacattattactgctgttag

SEQ ID NO: 114604 - DNA, 25 bp, Probe Sequence
tcatacatcattcattcaagggcta

SEQ ID NO: 114605 - DNA, 25 bp, Probe Sequence
tttcatacatcattcattcaagggc

SEQ ID NO: 114606 - DNA, 25 bp, Probe Sequence
ttcatacatcattcattcaagggct

SEQ ID NO: 114607 - DNA, 25 bp, Probe Sequence
catacatcattcattcaagggctaa

SEQ ID NO: 114608 - DNA, 25 bp, Probe Sequence
tttacaacagttcatccattcacaa

SEQ ID NO: 114609 - DNA, 25 bp, Probe Sequence
cagagcagatttcatacatcattca

SEQ ID NO: 114610 - DNA, 25 bp, Probe Sequence
acagagcagatttcatacatcattc

SEQ ID NO: 114611 - DNA, 25 bp, Probe Sequence
tacaacagttcatccattcacaatg

SEQ ID NO: 114612 - DNA, 25 bp, Probe Sequence
acatcattcattcaagggctaaatt

SEQ ID NO: 114613 - DNA, 25 bp, Probe Sequence
ttctaatgtgaagcaagacagagca

SEQ ID NO: 114614 - DNA, 25 bp, Probe Sequence
ggcaactttatacagacttgaacat

SEQ ID NO: 114615 - DNA, 25 bp, Probe Sequence
aggcaactttatacagacttgaaca

SEQ ID NO: 114616 - DNA, 25 bp, Probe Sequence
cttacagagcagatttcatacatca

SEQ ID NO: 114617 - DNA, 25 bp, Probe Sequence
acttacagagcagatttcatacatc

SEQ ID NO: 114618 - DNA, 25 bp, Probe Sequence
tacatcattcattcaagggctaaat

SEQ ID NO: 114619 - DNA, 25 bp, Probe Sequence
atacatcattcattcaagggctaaa

SEQ ID NO: 114620 - DNA, 25 bp, Probe Sequence
ttgacacattattactgctgttagc

SEQ ID NO: 114621 - DNA, 25 bp, Probe Sequence
gcttataggcaactttatacagact

SEQ ID NO: 114622 - DNA, 25 bp, Probe Sequence
caggtacttacagagcagatttcat

SEQ ID NO: 114623 - DNA, 25 bp, Probe Sequence
catctggaggagatttgctttcttt

SEQ ID NO: 114624 - DNA, 25 bp, Probe Sequence
tcatctggaggagatttgctttctt

SEQ ID NO: 114625 - DNA, 25 bp, Probe Sequence
aaaaggggaggaaattgaaactgag

SEQ ID NO: 114626 - DNA, 25 bp, Probe Sequence
gtcatctggaggagatttgctttct

SEQ ID NO: 114627 - DNA, 25 bp, Probe Sequence
caaaaggggaggaaattgaaactga

SEQ ID NO: 114628 - DNA, 25 bp, Probe Sequence
aaaggggaggaaattgaaactgagt

SEQ ID NO: 114629 - DNA, 25 bp, Probe Sequence
ccaaaaggggaggaaattgaaactg

SEQ ID NO: 114630 - DNA, 25 bp, Probe Sequence
aaggggaggaaattgaaactgagtg

SEQ ID NO: 114631 - DNA, 25 bp, Probe Sequence
atctggaggagatttgctttctttt

SEQ ID NO: 114632 - DNA, 25 bp, Probe Sequence
cgtcatctggaggagatttgctttc

SEQ ID NO: 114633 - DNA, 25 bp, Probe Sequence
tccaaaaggggaggaaattgaaact

SEQ ID NO: 114634 - DNA, 25 bp, Probe Sequence
aggggaggaaattgaaactgagtgg

SEQ ID NO: 114635 - DNA, 25 bp, Probe Sequence
acgtcatctggaggagatttgcttt

SEQ ID NO: 114636 - DNA, 25 bp, Probe Sequence
ttttctccaaaaggggaggaaattg

SEQ ID NO: 114637 - DNA, 25 bp, Probe Sequence
ctccaaaaggggaggaaattgaaac

SEQ ID NO: 114638 - DNA, 25 bp, Probe Sequence
tctccaaaaggggaggaaattgaaa

SEQ ID NO: 114639 - DNA, 25 bp, Probe Sequence
ttctccaaaaggggaggaaattgaa

SEQ ID NO: 114640 - DNA, 25 bp, Probe Sequence
tttctccaaaaggggaggaaattga

SEQ ID NO: 114641 - DNA, 25 bp, Probe Sequence
ctccattatcgctgtcttctacttc

SEQ ID NO: 114642 - DNA, 25 bp, Probe Sequence
cttctccattatcgctgtcttctac

SEQ ID NO: 114643 - DNA, 25 bp, Probe Sequence
cattatcgctgtcttctacttcctg

SEQ ID NO: 114644 - DNA, 25 bp, Probe Sequence
tctccattatcgctgtcttctactt

SEQ ID NO: 114645 - DNA, 25 bp, Probe Sequence
ttctccattatcgctgtcttctact

SEQ ID NO: 114646 - DNA, 25 bp, Probe Sequence
cttgatgcttgagtagagtgaagag

SEQ ID NO: 114647 - DNA, 25 bp, Probe Sequence
gtcttgatgcttgagtagagtgaag

SEQ ID NO: 114648 - DNA, 25 bp, Probe Sequence
ccttctccattatcgctgtcttcta

SEQ ID NO: 114649 - DNA, 25 bp, Probe Sequence
ccattatcgctgtcttctacttcct

SEQ ID NO: 114650 - DNA, 25 bp, Probe Sequence
tccattatcgctgtcttctacttcc

SEQ ID NO: 114651 - DNA, 25 bp, Probe Sequence
ttgatgcttgagtagagtgaagagg

SEQ ID NO: 114652 - DNA, 25 bp, Probe Sequence
cttcatcaatcgcaactacaggtac

SEQ ID NO: 114653 - DNA, 25 bp, Probe Sequence
attatcgctgtcttctacttcctgc

SEQ ID NO: 114654 - DNA, 25 bp, Probe Sequence
actaaggatgacactaattgttagc

SEQ ID NO: 114655 - DNA, 25 bp, Probe Sequence
ggtcttgatgcttgagtagagtgaa

SEQ ID NO: 114656 - DNA, 25 bp, Probe Sequence
ttgactaaggatgacactaattgtt

SEQ ID NO: 114657 - DNA, 25 bp, Probe Sequence
gcctggacttctgtaagataggatt

SEQ ID NO: 114658 - DNA, 25 bp, Probe Sequence
gcatccattctctctttctcttgat

SEQ ID NO: 114659 - DNA, 25 bp, Probe Sequence
tccattctctctttctcttgatgac

SEQ ID NO: 114660 - DNA, 25 bp, Probe Sequence
aggatgacactaattgttagctgtt

SEQ ID NO: 114661 - DNA, 25 bp, Probe Sequence
aaggatgacactaattgttagctgt

SEQ ID NO: 114662 - DNA, 25 bp, Probe Sequence
atccattctctctttctcttgatga

SEQ ID NO: 114663 - DNA, 25 bp, Probe Sequence
gcttgcctggacttctgtaagatag

SEQ ID NO: 114664 - DNA, 25 bp, Probe Sequence
gcttcatcaatcgcaactacaggta

SEQ ID NO: 114665 - DNA, 25 bp, Probe Sequence
caatagtgtaggttatggatggagg

SEQ ID NO: 114666 - DNA, 25 bp, Probe Sequence
aatagtgtaggttatggatggaggt

SEQ ID NO: 114667 - DNA, 25 bp, Probe Sequence
gccaataatagcattctctctgaca

SEQ ID NO: 114668 - DNA, 25 bp, Probe Sequence
atagtgtaggttatggatggaggtg

SEQ ID NO: 114669 - DNA, 25 bp, Probe Sequence
ccaataatagcattctctctgacat

SEQ ID NO: 114670 - DNA, 25 bp, Probe Sequence
caggtcagaagaatgatggaatgtt

SEQ ID NO: 114671 - DNA, 25 bp, Probe Sequence
aacaggtcagaagaatgatggaatg

SEQ ID NO: 114672 - DNA, 25 bp, Probe Sequence
ttctgtgtgtagacattgtattcca

SEQ ID NO: 114673 - DNA, 25 bp, Probe Sequence
accttattctgtgtgtagacattgt

SEQ ID NO: 114674 - DNA, 25 bp, Probe Sequence
tggacaatagtgtaggttatggatg

SEQ ID NO: 114675 - DNA, 25 bp, Probe Sequence
gtggacaatagtgtaggttatggat

SEQ ID NO: 114676 - DNA, 25 bp, Probe Sequence
acaatagtgtaggttatggatggag

SEQ ID NO: 114677 - DNA, 25 bp, Probe Sequence
gacaatagtgtaggttatggatgga

SEQ ID NO: 114678 - DNA, 25 bp, Probe Sequence
ggacaatagtgtaggttatggatgg

SEQ ID NO: 114679 - DNA, 25 bp, Probe Sequence
ccaaccttattctgtgtgtagacat

SEQ ID NO: 114680 - DNA, 25 bp, Probe Sequence
agtggacaatagtgtaggttatgga

SEQ ID NO: 114681 - DNA, 25 bp, Probe Sequence
tagtggacaatagtgtaggttatgg

SEQ ID NO: 114682 - DNA, 25 bp, Probe Sequence
aaccttattctgtgtgtagacattg

SEQ ID NO: 114683 - DNA, 25 bp, Probe Sequence
caaccttattctgtgtgtagacatt

SEQ ID NO: 114684 - DNA, 25 bp, Probe Sequence
attctgtgtgtagacattgtattcc

SEQ ID NO: 114685 - DNA, 25 bp, Probe Sequence
tagtgtaggttatggatggaggtgt

SEQ ID NO: 114686 - DNA, 25 bp, Probe Sequence
tctgtgtgtagacattgtattccac

SEQ ID NO: 114687 - DNA, 25 bp, Probe Sequence
ccttattctgtgtgtagacattgta

SEQ ID NO: 114688 - DNA, 25 bp, Probe Sequence
acaggtcagaagaatgatggaatgt

SEQ ID NO: 114689 - DNA, 25 bp, Probe Sequence
tcaaagaagtgtggtgaataacaat

SEQ ID NO: 114690 - DNA, 25 bp, Probe Sequence
caaagaagtgtggtgaataacaatt

SEQ ID NO: 114691 - DNA, 25 bp, Probe Sequence
ttcatcccacagctttgttaaattg

SEQ ID NO: 114692 - DNA, 25 bp, Probe Sequence
gttcatcccacagctttgttaaatt

SEQ ID NO: 114693 - DNA, 25 bp, Probe Sequence
aaagaagtgtggtgaataacaattc

SEQ ID NO: 114694 - DNA, 25 bp, Probe Sequence
tcatcccacagctttgttaaattgt

SEQ ID NO: 114695 - DNA, 25 bp, Probe Sequence
tgttcatcccacagctttgttaaat

SEQ ID NO: 114696 - DNA, 25 bp, Probe Sequence
acagctttgttaaattgtgacattt

SEQ ID NO: 114697 - DNA, 25 bp, Probe Sequence
ttcaaagaagtgtggtgaataacaa

SEQ ID NO: 114698 - DNA, 25 bp, Probe Sequence
gtgttcatcccacagctttgttaaa

SEQ ID NO: 114699 - DNA, 25 bp, Probe Sequence
ataacaattcaagtgttcatcccac

SEQ ID NO: 114700 - DNA, 25 bp, Probe Sequence
taacaattcaagtgttcatcccaca

SEQ ID NO: 114701 - DNA, 25 bp, Probe Sequence
aataacaattcaagtgttcatccca

SEQ ID NO: 114702 - DNA, 25 bp, Probe Sequence
gaataacaattcaagtgttcatccc

SEQ ID NO: 114703 - DNA, 25 bp, Probe Sequence
agtgttcatcccacagctttgttaa

SEQ ID NO: 114704 - DNA, 25 bp, Probe Sequence
aagtgttcatcccacagctttgtta

SEQ ID NO: 114705 - DNA, 25 bp, Probe Sequence
aacaattcaagtgttcatcccacag

SEQ ID NO: 114706 - DNA, 25 bp, Probe Sequence
attcaagtgttcatcccacagcttt

SEQ ID NO: 114707 - DNA, 25 bp, Probe Sequence
aattcaagtgttcatcccacagctt

SEQ ID NO: 114708 - DNA, 25 bp, Probe Sequence
agtgtttcatgcattcaaagaagtg

SEQ ID NO: 114709 - DNA, 25 bp, Probe Sequence
cagtgtttcatgcattcaaagaagt

SEQ ID NO: 114710 - DNA, 25 bp, Probe Sequence
acaattcaagtgttcatcccacagc

SEQ ID NO: 114711 - DNA, 25 bp, Probe Sequence
tgtttcatgcattcaaagaagtgtg

SEQ ID NO: 114712 - DNA, 25 bp, Probe Sequence
gtgtttcatgcattcaaagaagtgt

SEQ ID NO: 114713 - DNA, 25 bp, Probe Sequence
aacttgacttcttatgtgtgctcta

SEQ ID NO: 114714 - DNA, 25 bp, Probe Sequence
ttgacttcttatgtgtgctctatga

SEQ ID NO: 114715 - DNA, 25 bp, Probe Sequence
acttgacttcttatgtgtgctctat

SEQ ID NO: 114716 - DNA, 25 bp, Probe Sequence
taggctatggatgtgatacttggta

SEQ ID NO: 114717 - DNA, 25 bp, Probe Sequence
cttgacttcttatgtgtgctctatg

SEQ ID NO: 114718 - DNA, 25 bp, Probe Sequence
aataggctatggatgtgatacttgg

SEQ ID NO: 114719 - DNA, 25 bp, Probe Sequence
ggaataggctatggatgtgatactt

SEQ ID NO: 114720 - DNA, 25 bp, Probe Sequence
aggaataggctatggatgtgatact

SEQ ID NO: 114721 - DNA, 25 bp, Probe Sequence
ttggagtagacctgaccttgttatt

SEQ ID NO: 114722 - DNA, 25 bp, Probe Sequence
ataggctatggatgtgatacttggt

SEQ ID NO: 114723 - DNA, 25 bp, Probe Sequence
taggaataggctatggatgtgatac

SEQ ID NO: 114724 - DNA, 25 bp, Probe Sequence
aattaggaataggctatggatgtga

SEQ ID NO: 114725 - DNA, 25 bp, Probe Sequence
gaataggctatggatgtgatacttg

SEQ ID NO: 114726 - DNA, 25 bp, Probe Sequence
gaacttgacttcttatgtgtgctct

SEQ ID NO: 114727 - DNA, 25 bp, Probe Sequence
attaggaataggctatggatgtgat

SEQ ID NO: 114728 - DNA, 25 bp, Probe Sequence
tgaacttgacttcttatgtgtgctc

SEQ ID NO: 114729 - DNA, 25 bp, Probe Sequence
gacttcttatgtgtgctctatgagt

SEQ ID NO: 114730 - DNA, 25 bp, Probe Sequence
tgacttcttatgtgtgctctatgag

SEQ ID NO: 114731 - DNA, 25 bp, Probe Sequence
acttcttatgtgtgctctatgagtt

SEQ ID NO: 114732 - DNA, 25 bp, Probe Sequence
gtgaacttgacttcttatgtgtgct

SEQ ID NO: 114733 - DNA, 25 bp, Probe Sequence
ttaggaataggctatggatgtgata

SEQ ID NO: 114734 - DNA, 25 bp, Probe Sequence
cagatactgacttgttgccattaag

SEQ ID NO: 114735 - DNA, 25 bp, Probe Sequence
agtgaacttgacttcttatgtgtgc

SEQ ID NO: 114736 - DNA, 25 bp, Probe Sequence
cttgttgccattaagtgaacttgac

SEQ ID NO: 114737 - DNA, 25 bp, Probe Sequence
ttgccttaccagaccagttaatatg

SEQ ID NO: 114738 - DNA, 25 bp, Probe Sequence
acaatgtccttaactctaatgcctg

SEQ ID NO: 114739 - DNA, 25 bp, Probe Sequence
cacaatgtccttaactctaatgcct

SEQ ID NO: 114740 - DNA, 25 bp, Probe Sequence
tgccacaatgtccttaactctaatg

SEQ ID NO: 114741 - DNA, 25 bp, Probe Sequence
ccttaccagaccagttaatatgtgc

SEQ ID NO: 114742 - DNA, 25 bp, Probe Sequence
gccttaccagaccagttaatatgtg

SEQ ID NO: 114743 - DNA, 25 bp, Probe Sequence
ttgccacaatgtccttaactctaat

SEQ ID NO: 114744 - DNA, 25 bp, Probe Sequence
caatgtccttaactctaatgcctgg

SEQ ID NO: 114745 - DNA, 25 bp, Probe Sequence
tgccttaccagaccagttaatatgt

SEQ ID NO: 114746 - DNA, 25 bp, Probe Sequence
ccacaatgtccttaactctaatgcc

SEQ ID NO: 114747 - DNA, 25 bp, Probe Sequence
atacaacagactgattcggatggat

SEQ ID NO: 114748 - DNA, 25 bp, Probe Sequence
tagtattcaccagcataatcactgt

SEQ ID NO: 114749 - DNA, 25 bp, Probe Sequence
tattcaccagcataatcactgtctg

SEQ ID NO: 114750 - DNA, 25 bp, Probe Sequence
gtattcaccagcataatcactgtct

SEQ ID NO: 114751 - DNA, 25 bp, Probe Sequence
agtattcaccagcataatcactgtc

SEQ ID NO: 114752 - DNA, 25 bp, Probe Sequence
gcatgttatgtatattgtctcgtgt

SEQ ID NO: 114753 - DNA, 25 bp, Probe Sequence
agcatgttatgtatattgtctcgtg

SEQ ID NO: 114754 - DNA, 25 bp, Probe Sequence
ttgtccttgaataagcatgttatgt

SEQ ID NO: 114755 - DNA, 25 bp, Probe Sequence
gccacaatgtccttaactctaatgc

SEQ ID NO: 114756 - DNA, 25 bp, Probe Sequence
ttagtattcaccagcataatcactg

SEQ ID NO: 114757 - DNA, 25 bp, Probe Sequence
aagcatgttatgtatattgtctcgt

SEQ ID NO: 114758 - DNA, 25 bp, Probe Sequence
tacaacagactgattcggatggatg

SEQ ID NO: 114759 - DNA, 25 bp, Probe Sequence
gaggtggattaccagtattgttcaa

SEQ ID NO: 114760 - DNA, 25 bp, Probe Sequence
gagaggtggattaccagtattgttc

SEQ ID NO: 114761 - DNA, 25 bp, Probe Sequence
tcagataacattgctgtatgaacca

SEQ ID NO: 114762 - DNA, 25 bp, Probe Sequence
cagataacattgctgtatgaaccat

SEQ ID NO: 114763 - DNA, 25 bp, Probe Sequence
atcagataacattgctgtatgaacc

SEQ ID NO: 114764 - DNA, 25 bp, Probe Sequence
acattgctgtatgaaccataagatt

SEQ ID NO: 114765 - DNA, 25 bp, Probe Sequence
aacattgctgtatgaaccataagat

SEQ ID NO: 114766 - DNA, 25 bp, Probe Sequence
catcagataacattgctgtatgaac

SEQ ID NO: 114767 - DNA, 25 bp, Probe Sequence
gctaagatttatggcaagtgtcaaa

SEQ ID NO: 114768 - DNA, 25 bp, Probe Sequence
taacattgctgtatgaaccataaga

SEQ ID NO: 114769 - DNA, 25 bp, Probe Sequence
agataacattgctgtatgaaccata

SEQ ID NO: 114770 - DNA, 25 bp, Probe Sequence
aatcatcagataacattgctgtatg

SEQ ID NO: 114771 - DNA, 25 bp, Probe Sequence
ctgttcctttgaaagccaagatatt

SEQ ID NO: 114772 - DNA, 25 bp, Probe Sequence
ataacattgctgtatgaaccataag

SEQ ID NO: 114773 - DNA, 25 bp, Probe Sequence
gataacattgctgtatgaaccataa

SEQ ID NO: 114774 - DNA, 25 bp, Probe Sequence
tgttcctttgaaagccaagatatta

SEQ ID NO: 114775 - DNA, 25 bp, Probe Sequence
ttcaggcagttgatatttgacctaa

SEQ ID NO: 114776 - DNA, 25 bp, Probe Sequence
tttcaggcagttgatatttgaccta

SEQ ID NO: 114777 - DNA, 25 bp, Probe Sequence
tcaggcagttgatatttgacctaag

SEQ ID NO: 114778 - DNA, 25 bp, Probe Sequence
tcatcagataacattgctgtatgaa

SEQ ID NO: 114779 - DNA, 25 bp, Probe Sequence
ggtatgccatatttagtagagatgt

SEQ ID NO: 114780 - DNA, 25 bp, Probe Sequence
atcatcagataacattgctgtatga

SEQ ID NO: 114781 - DNA, 25 bp, Probe Sequence
agtgtggtatgccatatttagtaga

SEQ ID NO: 114782 - DNA, 25 bp, Probe Sequence
tgtggtatgccatatttagtagaga

SEQ ID NO: 114783 - DNA, 25 bp, Probe Sequence
gtgtggtatgccatatttagtagag

SEQ ID NO: 114784 - DNA, 25 bp, Probe Sequence
aagtaaagtgtggtatgccatattt

SEQ ID NO: 114785 - DNA, 25 bp, Probe Sequence
cttcaagcaatcctagttgacactg

SEQ ID NO: 114786 - DNA, 25 bp, Probe Sequence
gataagatttaaacatttccagccc

SEQ ID NO: 114787 - DNA, 25 bp, Probe Sequence
atggtgaagccctgtctctactaaa

SEQ ID NO: 114788 - DNA, 25 bp, Probe Sequence
caagcaatcctagttgacactgagg

SEQ ID NO: 114789 - DNA, 25 bp, Probe Sequence
ttcaagcaatcctagttgacactga

SEQ ID NO: 114790 - DNA, 25 bp, Probe Sequence
tcaagcaatcctagttgacactgag

SEQ ID NO: 114791 - DNA, 25 bp, Probe Sequence
atcagttgaggtcaggagtttgaga

SEQ ID NO: 114792 - DNA, 25 bp, Probe Sequence
ccttcaagcaatcctagttgacact

SEQ ID NO: 114793 - DNA, 25 bp, Probe Sequence
gatcagttgaggtcaggagtttgag

SEQ ID NO: 114794 - DNA, 25 bp, Probe Sequence
cctggtggatcttaattgtgatggg

SEQ ID NO: 114795 - DNA, 25 bp, Probe Sequence
ccctggtggatcttaattgtgatgg

SEQ ID NO: 114796 - DNA, 25 bp, Probe Sequence
ggataagatttaaacatttccagcc

SEQ ID NO: 114797 - DNA, 25 bp, Probe Sequence
aatagctgggagaaatgtcctgttt

SEQ ID NO: 114798 - DNA, 25 bp, Probe Sequence
aaatagctgggagaaatgtcctgtt

SEQ ID NO: 114799 - DNA, 25 bp, Probe Sequence
tagcacatggagtttggtaggagtt

SEQ ID NO: 114800 - DNA, 25 bp, Probe Sequence
catggtgaagccctgtctctactaa

SEQ ID NO: 114801 - DNA, 25 bp, Probe Sequence
cacatggagtttggtaggagtttgg

SEQ ID NO: 114802 - DNA, 25 bp, Probe Sequence
gccctggtggatcttaattgtgatg

SEQ ID NO: 114803 - DNA, 25 bp, Probe Sequence
gatcacggctcactgaagtctctac

SEQ ID NO: 114804 - DNA, 25 bp, Probe Sequence
cctcactagagtgcagtaggatcac

SEQ ID NO: 114805 - DNA, 25 bp, Probe Sequence
atggagtttggtaggagtttgggac

SEQ ID NO: 114806 - DNA, 25 bp, Probe Sequence
ataagatttaaacatttccagcccc

SEQ ID NO: 114807 - DNA, 25 bp, Probe Sequence
taagatttaaacatttccagcccca

SEQ ID NO: 114808 - DNA, 25 bp, Probe Sequence
gaagtctctacctaccggctcaatt

SEQ ID NO: 114809 - DNA, 25 bp, Probe Sequence
accattcaccaagagccaatatcta

SEQ ID NO: 114810 - DNA, 25 bp, Probe Sequence
cattcaccaagagccaatatctagg

SEQ ID NO: 114811 - DNA, 25 bp, Probe Sequence
ccattcaccaagagccaatatctag

SEQ ID NO: 114812 - DNA, 25 bp, Probe Sequence
ttagtggtgatggagaggagagtta

SEQ ID NO: 114813 - DNA, 25 bp, Probe Sequence
tagtggtgatggagaggagagttaa

SEQ ID NO: 114814 - DNA, 25 bp, Probe Sequence
attagtggtgatggagaggagagtt

SEQ ID NO: 114815 - DNA, 25 bp, Probe Sequence
aaccattcaccaagagccaatatct

SEQ ID NO: 114816 - DNA, 25 bp, Probe Sequence
agattagtggtgatggagaggagag

SEQ ID NO: 114817 - DNA, 25 bp, Probe Sequence
gagattagtggtgatggagaggaga

SEQ ID NO: 114818 - DNA, 25 bp, Probe Sequence
gattagtggtgatggagaggagagt

SEQ ID NO: 114819 - DNA, 25 bp, Probe Sequence
cgggagttagatgtatagagtgttt

SEQ ID NO: 114820 - DNA, 25 bp, Probe Sequence
tcgggagttagatgtatagagtgtt

SEQ ID NO: 114821 - DNA, 25 bp, Probe Sequence
ttcgggagttagatgtatagagtgt

SEQ ID NO: 114822 - DNA, 25 bp, Probe Sequence
ttgtcctccttgttatttctgtttg

SEQ ID NO: 114823 - DNA, 25 bp, Probe Sequence
tgtcctccttgttatttctgtttgt

SEQ ID NO: 114824 - DNA, 25 bp, Probe Sequence
taaaccattcaccaagagccaatat

SEQ ID NO: 114825 - DNA, 25 bp, Probe Sequence
aatgactagagtagaatgacagcta

SEQ ID NO: 114826 - DNA, 25 bp, Probe Sequence
tttcgggagttagatgtatagagtg

SEQ ID NO: 114827 - DNA, 25 bp, Probe Sequence
gtcctccttgttatttctgtttgta

SEQ ID NO: 114828 - DNA, 25 bp, Probe Sequence
ctaaaccattcaccaagagccaata

SEQ ID NO: 114829 - DNA, 25 bp, Probe Sequence
tttctttcctaaaccattcaccaag

SEQ ID NO: 114830 - DNA, 25 bp, Probe Sequence
tcaagaagtcactgtcagagaaata

SEQ ID NO: 114831 - DNA, 25 bp, Probe Sequence
attgtcctccttgttatttctgttt

SEQ ID NO: 114832 - DNA, 25 bp, Probe Sequence
ttcaagaagtcactgtcagagaaat

SEQ ID NO: 114833 - DNA, 25 bp, Probe Sequence
aactacatcacaacacttctaagcc

SEQ ID NO: 114834 - DNA, 25 bp, Probe Sequence
taactacatcacaacacttctaagc

SEQ ID NO: 114835 - DNA, 25 bp, Probe Sequence
gtaactacatcacaacacttctaag

SEQ ID NO: 114836 - DNA, 25 bp, Probe Sequence
aacttgaacccagacttatgtaact

SEQ ID NO: 114837 - DNA, 25 bp, Probe Sequence
ataaggaaggaaagtatagccagtc

SEQ ID NO: 114838 - DNA, 25 bp, Probe Sequence
aataaggaaggaaagtatagccagt

SEQ ID NO: 114839 - DNA, 25 bp, Probe Sequence
aaacttgaacccagacttatgtaac

SEQ ID NO: 114840 - DNA, 25 bp, Probe Sequence
acttgaacccagacttatgtaacta

SEQ ID NO: 114841 - DNA, 25 bp, Probe Sequence
tgtaactacatcacaacacttctaa

SEQ ID NO: 114842 - DNA, 25 bp, Probe Sequence
cttgaacccagacttatgtaactac

SEQ ID NO: 114843 - DNA, 25 bp, Probe Sequence
ggtaataaggaaggaaagtatagcc

SEQ ID NO: 114844 - DNA, 25 bp, Probe Sequence
gggtaataaggaaggaaagtatagc

SEQ ID NO: 114845 - DNA, 25 bp, Probe Sequence
tcagttacttacccaggatcacaaa

SEQ ID NO: 114846 - DNA, 25 bp, Probe Sequence
ttcagttacttacccaggatcacaa

SEQ ID NO: 114847 - DNA, 25 bp, Probe Sequence
cagttacttacccaggatcacaaag

SEQ ID NO: 114848 - DNA, 25 bp, Probe Sequence
catcctgaccatgactatcattcaa

SEQ ID NO: 114849 - DNA, 25 bp, Probe Sequence
gtaataaggaaggaaagtatagcca

SEQ ID NO: 114850 - DNA, 25 bp, Probe Sequence
ttgaacccagacttatgtaactaca

SEQ ID NO: 114851 - DNA, 25 bp, Probe Sequence
taataaggaaggaaagtatagccag

SEQ ID NO: 114852 - DNA, 25 bp, Probe Sequence
gttcagttacttacccaggatcaca

SEQ ID NO: 114853 - DNA, 25 bp, Probe Sequence
actacatcacaacacttctaagccc

SEQ ID NO: 114854 - DNA, 25 bp, Probe Sequence
aaccactaaagctagatgtttacct

SEQ ID NO: 114855 - DNA, 25 bp, Probe Sequence
accactaaagctagatgtttaccta

SEQ ID NO: 114856 - DNA, 25 bp, Probe Sequence
cattcaaagacatgcaatttagagc

SEQ ID NO: 114857 - DNA, 25 bp, Probe Sequence
tgtagacttgaaattaaactcagca

SEQ ID NO: 114858 - DNA, 25 bp, Probe Sequence
gtagacttgaaattaaactcagcat

SEQ ID NO: 114859 - DNA, 25 bp, Probe Sequence
atgtagacttgaaattaaactcagc

SEQ ID NO: 114860 - DNA, 25 bp, Probe Sequence
agacttgaaattaaactcagcataa

SEQ ID NO: 114861 - DNA, 25 bp, Probe Sequence
gacttgaaattaaactcagcataaa

SEQ ID NO: 114862 - DNA, 25 bp, Probe Sequence
tagactagaattaaaggtatggggt

SEQ ID NO: 114863 - DNA, 25 bp, Probe Sequence
tagacttgaaattaaactcagcata

SEQ ID NO: 114864 - DNA, 25 bp, Probe Sequence
catgtagacttgaaattaaactcag

SEQ ID NO: 114865 - DNA, 25 bp, Probe Sequence
ttagactagaattaaaggtatgggg

SEQ ID NO: 114866 - DNA, 25 bp, Probe Sequence
tttagactagaattaaaggtatggg

SEQ ID NO: 114867 - DNA, 25 bp, Probe Sequence
acttgaaattaaactcagcataaat

SEQ ID NO: 114868 - DNA, 25 bp, Probe Sequence
actcagcataaataagagttctctc

SEQ ID NO: 114869 - DNA, 25 bp, Probe Sequence
atgcctttcttcttaaagtattact

SEQ ID NO: 114870 - DNA, 25 bp, Probe Sequence
tgcctttcttcttaaagtattactt

SEQ ID NO: 114871 - DNA, 25 bp, Probe Sequence
agtattacttctcatggaaatctta

SEQ ID NO: 114872 - DNA, 25 bp, Probe Sequence
acatgtagacttgaaattaaactca

SEQ ID NO: 114873 - DNA, 25 bp, Probe Sequence
gcctttcttcttaaagtattacttc

SEQ ID NO: 114874 - DNA, 25 bp, Probe Sequence
aagtattacttctcatggaaatctt

SEQ ID NO: 114875 - DNA, 25 bp, Probe Sequence
aaagtattacttctcatggaaatct

SEQ ID NO: 114876 - DNA, 25 bp, Probe Sequence
tttctgttaaacaggctgcttcctt

SEQ ID NO: 114877 - DNA, 25 bp, Probe Sequence
tcttaaagtattacttctcatggaa

SEQ ID NO: 114878 - DNA, 25 bp, Probe Sequence
ttcttaaagtattacttctcatgga

SEQ ID NO: 114879 - DNA, 25 bp, Probe Sequence
cttcttaaagtattacttctcatgg

SEQ ID NO: 114880 - DNA, 25 bp, Probe Sequence
ttctgttaaacaggctgcttccttg

SEQ ID NO: 114881 - DNA, 25 bp, Probe Sequence
ttttctgttaaacaggctgcttcct

SEQ ID NO: 114882 - DNA, 25 bp, Probe Sequence
cataggaacaggtagactttcaact

SEQ ID NO: 114883 - DNA, 25 bp, Probe Sequence
tcataggaacaggtagactttcaac

SEQ ID NO: 114884 - DNA, 25 bp, Probe Sequence
ctcataggaacaggtagactttcaa

SEQ ID NO: 114885 - DNA, 25 bp, Probe Sequence
aggaacaggtagactttcaactatt

SEQ ID NO: 114886 - DNA, 25 bp, Probe Sequence
ggaacaggtagactttcaactattg

SEQ ID NO: 114887 - DNA, 25 bp, Probe Sequence
taggaacaggtagactttcaactat

SEQ ID NO: 114888 - DNA, 25 bp, Probe Sequence
ataggaacaggtagactttcaacta

SEQ ID NO: 114889 - DNA, 25 bp, Probe Sequence
gctcataggaacaggtagactttca

SEQ ID NO: 114890 - DNA, 25 bp, Probe Sequence
gaacaggtagactttcaactattgt

SEQ ID NO: 114891 - DNA, 25 bp, Probe Sequence
agctcataggaacaggtagactttc

SEQ ID NO: 114892 - DNA, 25 bp, Probe Sequence
acaggtagactttcaactattgtta

SEQ ID NO: 114893 - DNA, 25 bp, Probe Sequence
caggtagactttcaactattgttag

SEQ ID NO: 114894 - DNA, 25 bp, Probe Sequence
aggtagactttcaactattgttaga

SEQ ID NO: 114895 - DNA, 25 bp, Probe Sequence
aactattgttagatgttggtatgta

SEQ ID NO: 114896 - DNA, 25 bp, Probe Sequence
actattgttagatgttggtatgtat

SEQ ID NO: 114897 - DNA, 25 bp, Probe Sequence
atttgaaatgtttaggtaactgcaa

SEQ ID NO: 114898 - DNA, 25 bp, Probe Sequence
attttgtcatagggaggatttgagc

SEQ ID NO: 114899 - DNA, 25 bp, Probe Sequence
ttatttgaaatgtttaggtaactgc

SEQ ID NO: 114900 - DNA, 25 bp, Probe Sequence
agactttcaactattgttagatgtt

SEQ ID NO: 114901 - DNA, 25 bp, Probe Sequence
ggtagactttcaactattgttagat

SEQ ID NO: 114902 - DNA, 25 bp, Probe Sequence
tattttgtcatagggaggatttgag

SEQ ID NO: 114903 - DNA, 25 bp, Probe Sequence
tatttgaaatgtttaggtaactgca

SEQ ID NO: 114904 - DNA, 25 bp, Probe Sequence
tctttattttgtcatagggaggatt

SEQ ID NO: 114905 - DNA, 25 bp, Probe Sequence
ctctttattttgtcatagggaggat

SEQ ID NO: 114906 - DNA, 25 bp, Probe Sequence
tcttgtgtgtggttattgcttaatg

SEQ ID NO: 114907 - DNA, 25 bp, Probe Sequence
catcttgtgtgtggttattgcttaa

SEQ ID NO: 114908 - DNA, 25 bp, Probe Sequence
tcatcttgtgtgtggttattgctta

SEQ ID NO: 114909 - DNA, 25 bp, Probe Sequence
atcttgtgtgtggttattgcttaat

SEQ ID NO: 114910 - DNA, 25 bp, Probe Sequence
cataatcataagcacctcaacactt

SEQ ID NO: 114911 - DNA, 25 bp, Probe Sequence
aacttggaacactcactatggttaa

SEQ ID NO: 114912 - DNA, 25 bp, Probe Sequence
tgagacacagtaggtagtatggttg

SEQ ID NO: 114913 - DNA, 25 bp, Probe Sequence
ttcatcttgtgtgtggttattgctt

SEQ ID NO: 114914 - DNA, 25 bp, Probe Sequence
gcataatcataagcacctcaacact

SEQ ID NO: 114915 - DNA, 25 bp, Probe Sequence
ataatcataagcacctcaacacttg

SEQ ID NO: 114916 - DNA, 25 bp, Probe Sequence
cacagccatcctcataatacacaag

SEQ ID NO: 114917 - DNA, 25 bp, Probe Sequence
cttgtgtgtggttattgcttaatgc

SEQ ID NO: 114918 - DNA, 25 bp, Probe Sequence
tcacagccatcctcataatacacaa

SEQ ID NO: 114919 - DNA, 25 bp, Probe Sequence
tgtgtgtggttattgcttaatgctt

SEQ ID NO: 114920 - DNA, 25 bp, Probe Sequence
ttgtgtgtggttattgcttaatgct

SEQ ID NO: 114921 - DNA, 25 bp, Probe Sequence
agtcacagccatcctcataatacac

SEQ ID NO: 114922 - DNA, 25 bp, Probe Sequence
cagtcacagccatcctcataataca

SEQ ID NO: 114923 - DNA, 25 bp, Probe Sequence
gagacacagtaggtagtatggttgt

SEQ ID NO: 114924 - DNA, 25 bp, Probe Sequence
tcagtgagacacagtaggtagtatg

SEQ ID NO: 114925 - DNA, 25 bp, Probe Sequence
gtcacagccatcctcataatacaca

SEQ ID NO: 114926 - DNA, 25 bp, Probe Sequence
gtgagacacagtaggtagtatggtt

SEQ ID NO: 114927 - DNA, 25 bp, Probe Sequence
cagtgagacacagtaggtagtatgg

SEQ ID NO: 114928 - DNA, 25 bp, Probe Sequence
ttaactctatgctgactcagtgaga

SEQ ID NO: 114929 - DNA, 25 bp, Probe Sequence
ctgtaatctaaatgctggctcaaat

SEQ ID NO: 114930 - DNA, 25 bp, Probe Sequence
tctgtggtagattgaacggaatatc

SEQ ID NO: 114931 - DNA, 25 bp, Probe Sequence
tggtagattgaacggaatatcacag

SEQ ID NO: 114932 - DNA, 25 bp, Probe Sequence
ctgtggtagattgaacggaatatca

SEQ ID NO: 114933 - DNA, 25 bp, Probe Sequence
aaccatctgctcatcgtaagtgtaa

SEQ ID NO: 114934 - DNA, 25 bp, Probe Sequence
tcatcgtaagtgtaaggcttaacaa

SEQ ID NO: 114935 - DNA, 25 bp, Probe Sequence
ctcatcgtaagtgtaaggcttaaca

SEQ ID NO: 114936 - DNA, 25 bp, Probe Sequence
ggtagattgaacggaatatcacagc

SEQ ID NO: 114937 - DNA, 25 bp, Probe Sequence
gtggtagattgaacggaatatcaca

SEQ ID NO: 114938 - DNA, 25 bp, Probe Sequence
tgtggtagattgaacggaatatcac

SEQ ID NO: 114939 - DNA, 25 bp, Probe Sequence
accatctgctcatcgtaagtgtaag

SEQ ID NO: 114940 - DNA, 25 bp, Probe Sequence
tccgttattggatatggtatctcct

SEQ ID NO: 114941 - DNA, 25 bp, Probe Sequence
ttccgttattggatatggtatctcc

SEQ ID NO: 114942 - DNA, 25 bp, Probe Sequence
ttctacttccgttattggatatggt

SEQ ID NO: 114943 - DNA, 25 bp, Probe Sequence
acttccgttattggatatggtatct

SEQ ID NO: 114944 - DNA, 25 bp, Probe Sequence
ccgttattggatatggtatctccta

SEQ ID NO: 114945 - DNA, 25 bp, Probe Sequence
cttctacttccgttattggatatgg

SEQ ID NO: 114946 - DNA, 25 bp, Probe Sequence
gctcatcgtaagtgtaaggcttaac

SEQ ID NO: 114947 - DNA, 25 bp, Probe Sequence
cttccgttattggatatggtatctc

SEQ ID NO: 114948 - DNA, 25 bp, Probe Sequence
taaggaagaattggagtgacgtatc

SEQ ID NO: 114949 - DNA, 25 bp, Probe Sequence
ttaaggaagaattggagtgacgtat

SEQ ID NO: 114950 - DNA, 25 bp, Probe Sequence
tctacttccgttattggatatggta

SEQ ID NO: 114951 - DNA, 25 bp, Probe Sequence
aaactgttctttgctcctatttgtg

SEQ ID NO: 114952 - DNA, 25 bp, Probe Sequence
ctataagatatggtgccctgtgtat

SEQ ID NO: 114953 - DNA, 25 bp, Probe Sequence
gtagattgaacggaatatcacagct

SEQ ID NO: 114954 - DNA, 25 bp, Probe Sequence
tgattccatatctttgctattgtga

SEQ ID NO: 114955 - DNA, 25 bp, Probe Sequence
gtacattgatggacacttaagatga

SEQ ID NO: 114956 - DNA, 25 bp, Probe Sequence
acattgatggacacttaagatgatt

SEQ ID NO: 114957 - DNA, 25 bp, Probe Sequence
cattgatggacacttaagatgattc

SEQ ID NO: 114958 - DNA, 25 bp, Probe Sequence
gattccatatctttgctattgtgaa

SEQ ID NO: 114959 - DNA, 25 bp, Probe Sequence
atgattccatatctttgctattgtg

SEQ ID NO: 114960 - DNA, 25 bp, Probe Sequence
tacattgatggacacttaagatgat

SEQ ID NO: 114961 - DNA, 25 bp, Probe Sequence
ttgctattgtgaatagtgcttcaat

SEQ ID NO: 114962 - DNA, 25 bp, Probe Sequence
gatgattccatatctttgctattgt

SEQ ID NO: 114963 - DNA, 25 bp, Probe Sequence
attgatggacacttaagatgattcc

SEQ ID NO: 114964 - DNA, 25 bp, Probe Sequence
tgtacattgatggacacttaagatg

SEQ ID NO: 114965 - DNA, 25 bp, Probe Sequence
gccccacattttctttatccatttg

SEQ ID NO: 114966 - DNA, 25 bp, Probe Sequence
tgctattgtgaatagtgcttcaata

SEQ ID NO: 114967 - DNA, 25 bp, Probe Sequence
ttgtacattgatggacacttaagat

SEQ ID NO: 114968 - DNA, 25 bp, Probe Sequence
ggacacttaagatgattccatatct

SEQ ID NO: 114969 - DNA, 25 bp, Probe Sequence
ccccacattttctttatccatttgt

SEQ ID NO: 114970 - DNA, 25 bp, Probe Sequence
agtgcttcaataaatatgtgaatgc

SEQ ID NO: 114971 - DNA, 25 bp, Probe Sequence
ttccatatctttgctattgtgaata

SEQ ID NO: 114972 - DNA, 25 bp, Probe Sequence
gctattgtgaatagtgcttcaataa

SEQ ID NO: 114973 - DNA, 25 bp, Probe Sequence
ctttgctattgtgaatagtgcttca

SEQ ID NO: 114974 - DNA, 25 bp, Probe Sequence
tctttgctattgtgaatagtgcttc

SEQ ID NO: 114975 - DNA, 25 bp, Probe Sequence
tttgctattgtgaatagtgcttcaa

SEQ ID NO: 114976 - DNA, 25 bp, Probe Sequence
atctttgctattgtgaatagtgctt

SEQ ID NO: 114977 - DNA, 25 bp, Probe Sequence
attccatatctttgctattgtgaat

SEQ ID NO: 114978 - DNA, 25 bp, Probe Sequence
agaaagttgaagaagattgtgaaga

SEQ ID NO: 114979 - DNA, 25 bp, Probe Sequence
cagaaagttgaagaagattgtgaag

SEQ ID NO: 114980 - DNA, 25 bp, Probe Sequence
gaaagttgaagaagattgtgaagaa

SEQ ID NO: 114981 - DNA, 25 bp, Probe Sequence
acagaaagttgaagaagattgtgaa

SEQ ID NO: 114982 - DNA, 25 bp, Probe Sequence
aacagaaagttgaagaagattgtga

SEQ ID NO: 114983 - DNA, 25 bp, Probe Sequence
aaagttgaagaagattgtgaagaaa

SEQ ID NO: 114984 - DNA, 25 bp, Probe Sequence
aaacagaaagttgaagaagattgtg

SEQ ID NO: 114985 - DNA, 25 bp, Probe Sequence
ttatgacagtgagacattctgattt

SEQ ID NO: 114986 - DNA, 25 bp, Probe Sequence
tttatgacagtgagacattctgatt

SEQ ID NO: 114987 - DNA, 25 bp, Probe Sequence
atttatgacagtgagacattctgat

SEQ ID NO: 114988 - DNA, 25 bp, Probe Sequence
tatttatgacagtgagacattctga

SEQ ID NO: 114989 - DNA, 25 bp, Probe Sequence
ttatttatgacagtgagacattctg

SEQ ID NO: 114990 - DNA, 25 bp, Probe Sequence
tttatttatgacagtgagacattct

SEQ ID NO: 114991 - DNA, 25 bp, Probe Sequence
gacagtgagacattctgattttaca

SEQ ID NO: 114992 - DNA, 25 bp, Probe Sequence
tgacagtgagacattctgattttac

SEQ ID NO: 114993 - DNA, 25 bp, Probe Sequence
ttgaagaagattgtgaagaaaatgt

SEQ ID NO: 114994 - DNA, 25 bp, Probe Sequence
aagttgaagaagattgtgaagaaaa

SEQ ID NO: 114995 - DNA, 25 bp, Probe Sequence
acagtgagacattctgattttacat

SEQ ID NO: 114996 - DNA, 25 bp, Probe Sequence
gttgaagaagattgtgaagaaaatg

SEQ ID NO: 114997 - DNA, 25 bp, Probe Sequence
agttgaagaagattgtgaagaaaat

SEQ ID NO: 114998 - DNA, 25 bp, Probe Sequence
atgacagtgagacattctgatttta

SEQ ID NO: 114999 - DNA, 25 bp, Probe Sequence
tatgacagtgagacattctgatttt

SEQ ID NO: 115000 - DNA, 25 bp, Probe Sequence
aaaacagaaagttgaagaagattgt

SEQ ID NO: 115001 - DNA, 25 bp, Probe Sequence
tgaagaagattgtgaagaaaatgta

SEQ ID NO: 115002 - DNA, 25 bp, Probe Sequence
tctgattctgattgctgttacttga

SEQ ID NO: 115003 - DNA, 25 bp, Probe Sequence
acttctgattctgattgctgttact

SEQ ID NO: 115004 - DNA, 25 bp, Probe Sequence
tctgattgctgttacttgaatagga

SEQ ID NO: 115005 - DNA, 25 bp, Probe Sequence
ttctgattctgattgctgttacttg

SEQ ID NO: 115006 - DNA, 25 bp, Probe Sequence
acattaagattacctaccgaagcaa

SEQ ID NO: 115007 - DNA, 25 bp, Probe Sequence
attaagattacctaccgaagcaact

SEQ ID NO: 115008 - DNA, 25 bp, Probe Sequence
cattaagattacctaccgaagcaac

SEQ ID NO: 115009 - DNA, 25 bp, Probe Sequence
cttctgattctgattgctgttactt

SEQ ID NO: 115010 - DNA, 25 bp, Probe Sequence
tacattctctgagccaacatctatc

SEQ ID NO: 115011 - DNA, 25 bp, Probe Sequence
catacattctctgagccaacatcta

SEQ ID NO: 115012 - DNA, 25 bp, Probe Sequence
ctgattgctgttacttgaataggaa

SEQ ID NO: 115013 - DNA, 25 bp, Probe Sequence
ttaagattacctaccgaagcaacta

SEQ ID NO: 115014 - DNA, 25 bp, Probe Sequence
cacattaagattacctaccgaagca

SEQ ID NO: 115015 - DNA, 25 bp, Probe Sequence
ggcaaggttcatagaatataatggc

SEQ ID NO: 115016 - DNA, 25 bp, Probe Sequence
atacattctctgagccaacatctat

SEQ ID NO: 115017 - DNA, 25 bp, Probe Sequence
ctgattctgattgctgttacttgaa

SEQ ID NO: 115018 - DNA, 25 bp, Probe Sequence
aacttctgattctgattgctgttac

SEQ ID NO: 115019 - DNA, 25 bp, Probe Sequence
gaacttctgattctgattgctgtta

SEQ ID NO: 115020 - DNA, 25 bp, Probe Sequence
taagattacctaccgaagcaactag

SEQ ID NO: 115021 - DNA, 25 bp, Probe Sequence
ttctgattgctgttacttgaatagg

SEQ ID NO: 115022 - DNA, 25 bp, Probe Sequence
gcaaggttcatagaatataatggct

SEQ ID NO: 115023 - DNA, 25 bp, Probe Sequence
gctggcaaggttcatagaatataat

SEQ ID NO: 115024 - DNA, 25 bp, Probe Sequence
gattacctaccgaagcaactagatg

SEQ ID NO: 115025 - DNA, 25 bp, Probe Sequence
agattacctaccgaagcaactagat

SEQ ID NO: 115026 - DNA, 25 bp, Probe Sequence
tttatggcttcattgagaaactggg

SEQ ID NO: 115027 - DNA, 25 bp, Probe Sequence
gaaagtttatggcttcattgagaaa

SEQ ID NO: 115028 - DNA, 25 bp, Probe Sequence
tatggcttcattgagaaactgggaa

SEQ ID NO: 115029 - DNA, 25 bp, Probe Sequence
ttatggcttcattgagaaactggga

SEQ ID NO: 115030 - DNA, 25 bp, Probe Sequence
atggcttcattgagaaactgggaaa

SEQ ID NO: 115031 - DNA, 25 bp, Probe Sequence
gtttatggcttcattgagaaactgg

SEQ ID NO: 115032 - DNA, 25 bp, Probe Sequence
aaagtttatggcttcattgagaaac

SEQ ID NO: 115033 - DNA, 25 bp, Probe Sequence
ctgaaagtttatggcttcattgaga

SEQ ID NO: 115034 - DNA, 25 bp, Probe Sequence
tctgaaagtttatggcttcattgag

SEQ ID NO: 115035 - DNA, 25 bp, Probe Sequence
tgaaagtttatggcttcattgagaa

SEQ ID NO: 115036 - DNA, 25 bp, Probe Sequence
caatgagatctgaaagtttatggct

SEQ ID NO: 115037 - DNA, 25 bp, Probe Sequence
atctgaaagtttatggcttcattga

SEQ ID NO: 115038 - DNA, 25 bp, Probe Sequence
cacaaccaatgagatctgaaagttt

SEQ ID NO: 115039 - DNA, 25 bp, Probe Sequence
gatctgaaagtttatggcttcattg

SEQ ID NO: 115040 - DNA, 25 bp, Probe Sequence
atgagatctgaaagtttatggcttc

SEQ ID NO: 115041 - DNA, 25 bp, Probe Sequence
tcacaaccaatgagatctgaaagtt

SEQ ID NO: 115042 - DNA, 25 bp, Probe Sequence
aatgagatctgaaagtttatggctt

SEQ ID NO: 115043 - DNA, 25 bp, Probe Sequence
acaaccaatgagatctgaaagttta

SEQ ID NO: 115044 - DNA, 25 bp, Probe Sequence
gcttcattgagaaactgggaaaagt

SEQ ID NO: 115045 - DNA, 25 bp, Probe Sequence
ggcttcattgagaaactgggaaaag

SEQ ID NO: 115046 - DNA, 25 bp, Probe Sequence
ccaatgagatctgaaagtttatggc

SEQ ID NO: 115047 - DNA, 25 bp, Probe Sequence
accaatgagatctgaaagtttatgg

SEQ ID NO: 115048 - DNA, 25 bp, Probe Sequence
aaccaatgagatctgaaagtttatg

SEQ ID NO: 115049 - DNA, 25 bp, Probe Sequence
caaccaatgagatctgaaagtttat

SEQ ID NO: 115050 - DNA, 25 bp, Probe Sequence
taacagaatctcaaggcagaagaat

SEQ ID NO: 115051 - DNA, 25 bp, Probe Sequence
ttaacagaatctcaaggcagaagaa

SEQ ID NO: 115052 - DNA, 25 bp, Probe Sequence
attaacagaatctcaaggcagaaga

SEQ ID NO: 115053 - DNA, 25 bp, Probe Sequence
aacagaatctcaaggcagaagaatt

SEQ ID NO: 115054 - DNA, 25 bp, Probe Sequence
cttaatccattcaactctgtgacac

SEQ ID NO: 115055 - DNA, 25 bp, Probe Sequence
ccttaatccattcaactctgtgaca

SEQ ID NO: 115056 - DNA, 25 bp, Probe Sequence
agtaacaatctgatctctcttgctt

SEQ ID NO: 115057 - DNA, 25 bp, Probe Sequence
cagtaacaatctgatctctcttgct

SEQ ID NO: 115058 - DNA, 25 bp, Probe Sequence
acagtaacaatctgatctctcttgc

SEQ ID NO: 115059 - DNA, 25 bp, Probe Sequence
cacagtaacaatctgatctctcttg

SEQ ID NO: 115060 - DNA, 25 bp, Probe Sequence
gattaacagaatctcaaggcagaag

SEQ ID NO: 115061 - DNA, 25 bp, Probe Sequence
ttaatccattcaactctgtgacaca

SEQ ID NO: 115062 - DNA, 25 bp, Probe Sequence
acagaatctcaaggcagaagaattt

SEQ ID NO: 115063 - DNA, 25 bp, Probe Sequence
cccttaatccattcaactctgtgac

SEQ ID NO: 115064 - DNA, 25 bp, Probe Sequence
tacttgagattagggagtggtgatg

SEQ ID NO: 115065 - DNA, 25 bp, Probe Sequence
gtaacaatctgatctctcttgcttt

SEQ ID NO: 115066 - DNA, 25 bp, Probe Sequence
cttgagattagggagtggtgatgac

SEQ ID NO: 115067 - DNA, 25 bp, Probe Sequence
gtacttgagattagggagtggtgat

SEQ ID NO: 115068 - DNA, 25 bp, Probe Sequence
ccacaggttgtcattacttaattat

SEQ ID NO: 115069 - DNA, 25 bp, Probe Sequence
cccacaggttgtcattacttaatta

SEQ ID NO: 115070 - DNA, 25 bp, Probe Sequence
acttgagattagggagtggtgatga

SEQ ID NO: 115071 - DNA, 25 bp, Probe Sequence
gcccttaatccattcaactctgtga

SEQ ID NO: 115072 - DNA, 25 bp, Probe Sequence
ttgtgtccctgggtacttgagatta

SEQ ID NO: 115073 - DNA, 25 bp, Probe Sequence
cagaatctcaaggcagaagaatttt

SEQ ID NO: 115074 - DNA, 25 bp, Probe Sequence
atgagcagaactgtaaggatatact

SEQ ID NO: 115075 - DNA, 25 bp, Probe Sequence
tgagcagaactgtaaggatatactg

SEQ ID NO: 115076 - DNA, 25 bp, Probe Sequence
tatgagcagaactgtaaggatatac

SEQ ID NO: 115077 - DNA, 25 bp, Probe Sequence
ttatgagcagaactgtaaggatata

SEQ ID NO: 115078 - DNA, 25 bp, Probe Sequence
actatgggtttagttcaacatttgc

SEQ ID NO: 115079 - DNA, 25 bp, Probe Sequence
tttatgagcagaactgtaaggatat

SEQ ID NO: 115080 - DNA, 25 bp, Probe Sequence
ctatgggtttagttcaacatttgca

SEQ ID NO: 115081 - DNA, 25 bp, Probe Sequence
ccattttatgagcagaactgtaagg

SEQ ID NO: 115082 - DNA, 25 bp, Probe Sequence
gccattttatgagcagaactgtaag

SEQ ID NO: 115083 - DNA, 25 bp, Probe Sequence
cattttatgagcagaactgtaagga

SEQ ID NO: 115084 - DNA, 25 bp, Probe Sequence
caaagagagacaacactgaaaaggg

SEQ ID NO: 115085 - DNA, 25 bp, Probe Sequence
aagagagacaacactgaaaagggaa

SEQ ID NO: 115086 - DNA, 25 bp, Probe Sequence
aaagagagacaacactgaaaaggga

SEQ ID NO: 115087 - DNA, 25 bp, Probe Sequence
attttatgagcagaactgtaaggat

SEQ ID NO: 115088 - DNA, 25 bp, Probe Sequence
aaggaactgacttcatgtgcaacag

SEQ ID NO: 115089 - DNA, 25 bp, Probe Sequence
cgtaacatcaaaatagccaactatg

SEQ ID NO: 115090 - DNA, 25 bp, Probe Sequence
ttttatgagcagaactgtaaggata

SEQ ID NO: 115091 - DNA, 25 bp, Probe Sequence
gcaaagagagacaacactgaaaagg

SEQ ID NO: 115092 - DNA, 25 bp, Probe Sequence
agagagacaacactgaaaagggaac

SEQ ID NO: 115093 - DNA, 25 bp, Probe Sequence
catcaaaatagccaactatgggttt

SEQ ID NO: 115094 - DNA, 25 bp, Probe Sequence
caaaatagccaactatgggtttagt

SEQ ID NO: 115095 - DNA, 25 bp, Probe Sequence
acatcaaaatagccaactatgggtt

SEQ ID NO: 115096 - DNA, 25 bp, Probe Sequence
aacatcaaaatagccaactatgggt

SEQ ID NO: 115097 - DNA, 25 bp, Probe Sequence
gaacgtaacatcaaaatagccaact

SEQ ID NO: 115098 - DNA, 25 bp, Probe Sequence
aagacagaagaatagaagaattgct

SEQ ID NO: 115099 - DNA, 25 bp, Probe Sequence
ggagatccagttaccttgttgaatg

SEQ ID NO: 115100 - DNA, 25 bp, Probe Sequence
atattagaataacatgcggtggctc

SEQ ID NO: 115101 - DNA, 25 bp, Probe Sequence
agacagaagaatagaagaattgctt

SEQ ID NO: 115102 - DNA, 25 bp, Probe Sequence
aatattagaataacatgcggtggct

SEQ ID NO: 115103 - DNA, 25 bp, Probe Sequence
tattagaataacatgcggtggctca

SEQ ID NO: 115104 - DNA, 25 bp, Probe Sequence
ttagaataacatgcggtggctcata

SEQ ID NO: 115105 - DNA, 25 bp, Probe Sequence
tttatgaatgaggaaattgagggca

SEQ ID NO: 115106 - DNA, 25 bp, Probe Sequence
agaatagaagaattgcttaaacccg

SEQ ID NO: 115107 - DNA, 25 bp, Probe Sequence
gagatccagttaccttgttgaatgg

SEQ ID NO: 115108 - DNA, 25 bp, Probe Sequence
ttatgaatgaggaaattgagggcag

SEQ ID NO: 115109 - DNA, 25 bp, Probe Sequence
taagacagaagaatagaagaattgc

SEQ ID NO: 115110 - DNA, 25 bp, Probe Sequence
attagaataacatgcggtggctcat

SEQ ID NO: 115111 - DNA, 25 bp, Probe Sequence
ttctcaatactattgcttcaggctt

SEQ ID NO: 115112 - DNA, 25 bp, Probe Sequence
gacagaagaatagaagaattgctta

SEQ ID NO: 115113 - DNA, 25 bp, Probe Sequence
cttctcaatactattgcttcaggct

SEQ ID NO: 115114 - DNA, 25 bp, Probe Sequence
ttgcttctcaatactattgcttcag

SEQ ID NO: 115115 - DNA, 25 bp, Probe Sequence
tagaataacatgcggtggctcatac

SEQ ID NO: 115116 - DNA, 25 bp, Probe Sequence
tgcttctcaatactattgcttcagg

SEQ ID NO: 115117 - DNA, 25 bp, Probe Sequence
attgcttctcaatactattgcttca

SEQ ID NO: 115118 - DNA, 25 bp, Probe Sequence
ggagtctaagacagaagaatagaag

SEQ ID NO: 115119 - DNA, 25 bp, Probe Sequence
aaatattagaataacatgcggtggc

SEQ ID NO: 115120 - DNA, 25 bp, Probe Sequence
tagaaagtgtcagaacccagatgtg

SEQ ID NO: 115121 - DNA, 25 bp, Probe Sequence
ctagaaagtgtcagaacccagatgt

SEQ ID NO: 115122 - DNA, 25 bp, Probe Sequence
gcacatgcttactatgatatgatgg

SEQ ID NO: 115123 - DNA, 25 bp, Probe Sequence
tggcaacatcattggaacattacaa

SEQ ID NO: 115124 - DNA, 25 bp, Probe Sequence
ttggcaacatcattggaacattaca

SEQ ID NO: 115125 - DNA, 25 bp, Probe Sequence
agacctgaatccacagtattatctg

SEQ ID NO: 115126 - DNA, 25 bp, Probe Sequence
ctgaccatattgaagttgtccaaga

SEQ ID NO: 115127 - DNA, 25 bp, Probe Sequence
atattgaagttgtccaagaccacag

SEQ ID NO: 115128 - DNA, 25 bp, Probe Sequence
tgaccatattgaagttgtccaagac

SEQ ID NO: 115129 - DNA, 25 bp, Probe Sequence
actgaccatattgaagttgtccaag

SEQ ID NO: 115130 - DNA, 25 bp, Probe Sequence
catattgaagttgtccaagaccaca

SEQ ID NO: 115131 - DNA, 25 bp, Probe Sequence
cactgaccatattgaagttgtccaa

SEQ ID NO: 115132 - DNA, 25 bp, Probe Sequence
tgtagacctgaatccacagtattat

SEQ ID NO: 115133 - DNA, 25 bp, Probe Sequence
gaccatattgaagttgtccaagacc

SEQ ID NO: 115134 - DNA, 25 bp, Probe Sequence
cacatgcttactatgatatgatgga

SEQ ID NO: 115135 - DNA, 25 bp, Probe Sequence
aatggagagattcagaaccaagatg

SEQ ID NO: 115136 - DNA, 25 bp, Probe Sequence
gtagacctgaatccacagtattatc

SEQ ID NO: 115137 - DNA, 25 bp, Probe Sequence
tagacctgaatccacagtattatct

SEQ ID NO: 115138 - DNA, 25 bp, Probe Sequence
ccatattgaagttgtccaagaccac

SEQ ID NO: 115139 - DNA, 25 bp, Probe Sequence
tcactgaccatattgaagttgtcca

SEQ ID NO: 115140 - DNA, 25 bp, Probe Sequence
atgtcactgaccatattgaagttgt

SEQ ID NO: 115141 - DNA, 25 bp, Probe Sequence
tcttaataagtcagcactgaagtac

SEQ ID NO: 115142 - DNA, 25 bp, Probe Sequence
atgatatgatggatttgaaggttgc

SEQ ID NO: 115143 - DNA, 25 bp, Probe Sequence
tccctgagagacccaaataaagtat

SEQ ID NO: 115144 - DNA, 25 bp, Probe Sequence
tattgaagttgtccaagaccacagt

SEQ ID NO: 115145 - DNA, 25 bp, Probe Sequence
cttattgggtcagcactatgtcttt

SEQ ID NO: 115146 - DNA, 25 bp, Probe Sequence
gagtccagaggtgtcagtaattaac

SEQ ID NO: 115147 - DNA, 25 bp, Probe Sequence
ggagtccagaggtgtcagtaattaa

SEQ ID NO: 115148 - DNA, 25 bp, Probe Sequence
agtccagaggtgtcagtaattaaca

SEQ ID NO: 115149 - DNA, 25 bp, Probe Sequence
agatgctttgtaatctactgtccag

SEQ ID NO: 115150 - DNA, 25 bp, Probe Sequence
gagatgctttgtaatctactgtcca

SEQ ID NO: 115151 - DNA, 25 bp, Probe Sequence
atcggagatgctttgtaatctactg

SEQ ID NO: 115152 - DNA, 25 bp, Probe Sequence
gatcggagatgctttgtaatctact

SEQ ID NO: 115153 - DNA, 25 bp, Probe Sequence
ggagatgctttgtaatctactgtcc

SEQ ID NO: 115154 - DNA, 25 bp, Probe Sequence
tgatcggagatgctttgtaatctac

SEQ ID NO: 115155 - DNA, 25 bp, Probe Sequence
gtgatcggagatgctttgtaatcta

SEQ ID NO: 115156 - DNA, 25 bp, Probe Sequence
cggagatgctttgtaatctactgtc

SEQ ID NO: 115157 - DNA, 25 bp, Probe Sequence
tcggagatgctttgtaatctactgt

SEQ ID NO: 115158 - DNA, 25 bp, Probe Sequence
gatgctttgtaatctactgtccagc

SEQ ID NO: 115159 - DNA, 25 bp, Probe Sequence
gggagtccagaggtgtcagtaatta

SEQ ID NO: 115160 - DNA, 25 bp, Probe Sequence
taacgtgatcggagatgctttgtaa

SEQ ID NO: 115161 - DNA, 25 bp, Probe Sequence
ttaacgtgatcggagatgctttgta

SEQ ID NO: 115162 - DNA, 25 bp, Probe Sequence
aacgtgatcggagatgctttgtaat

SEQ ID NO: 115163 - DNA, 25 bp, Probe Sequence
agaggtgtcagtaattaacactgtg

SEQ ID NO: 115164 - DNA, 25 bp, Probe Sequence
cagaggtgtcagtaattaacactgt

SEQ ID NO: 115165 - DNA, 25 bp, Probe Sequence
ccagaggtgtcagtaattaacactg

SEQ ID NO: 115166 - DNA, 25 bp, Probe Sequence
tccagaggtgtcagtaattaacact

SEQ ID NO: 115167 - DNA, 25 bp, Probe Sequence
gtccagaggtgtcagtaattaacac

SEQ ID NO: 115168 - DNA, 25 bp, Probe Sequence
gaggtgtcagtaattaacactgtgg

SEQ ID NO: 115169 - DNA, 25 bp, Probe Sequence
atgctttgtaatctactgtccagct

SEQ ID NO: 115170 - DNA, 25 bp, Probe Sequence
aattagatgaagcaagcatgacaga

SEQ ID NO: 115171 - DNA, 25 bp, Probe Sequence
gaacagcagattactgacagacaat

SEQ ID NO: 115172 - DNA, 25 bp, Probe Sequence
attagatgaagcaagcatgacagac

SEQ ID NO: 115173 - DNA, 25 bp, Probe Sequence
tctgtaatataccattctctgtggc

SEQ ID NO: 115174 - DNA, 25 bp, Probe Sequence
tctgaccttctcttcatgtgtgtaa

SEQ ID NO: 115175 - DNA, 25 bp, Probe Sequence
attcatagccacgagtttgttattg

SEQ ID NO: 115176 - DNA, 25 bp, Probe Sequence
cattcatagccacgagtttgttatt

SEQ ID NO: 115177 - DNA, 25 bp, Probe Sequence
ctctgaccttctcttcatgtgtgta

SEQ ID NO: 115178 - DNA, 25 bp, Probe Sequence
aacagcagattactgacagacaatc

SEQ ID NO: 115179 - DNA, 25 bp, Probe Sequence
aagtgcaggaacagttattctatga

SEQ ID NO: 115180 - DNA, 25 bp, Probe Sequence
agtgcaggaacagttattctatgag

SEQ ID NO: 115181 - DNA, 25 bp, Probe Sequence
tgaacagcagattactgacagacaa

SEQ ID NO: 115182 - DNA, 25 bp, Probe Sequence
gtgcaggaacagttattctatgaga

SEQ ID NO: 115183 - DNA, 25 bp, Probe Sequence
gcaggaacagttattctatgagaac

SEQ ID NO: 115184 - DNA, 25 bp, Probe Sequence
ttagatgaagcaagcatgacagaca

SEQ ID NO: 115185 - DNA, 25 bp, Probe Sequence
ctgaacagcagattactgacagaca

SEQ ID NO: 115186 - DNA, 25 bp, Probe Sequence
aactagaaattagatgaagcaagca

SEQ ID NO: 115187 - DNA, 25 bp, Probe Sequence
accttctcttcatgtgtgtaaatct

SEQ ID NO: 115188 - DNA, 25 bp, Probe Sequence
ccttctcttcatgtgtgtaaatctg

SEQ ID NO: 115189 - DNA, 25 bp, Probe Sequence
gaccttctcttcatgtgtgtaaatc

SEQ ID NO: 115190 - DNA, 25 bp, Probe Sequence
gcattcatagccacgagtttgttat

SEQ ID NO: 115191 - DNA, 25 bp, Probe Sequence
agaaattagatgaagcaagcatgac

SEQ ID NO: 115192 - DNA, 25 bp, Probe Sequence
gagtttgttattgctacaggctact

SEQ ID NO: 115193 - DNA, 25 bp, Probe Sequence
aaattagatgaagcaagcatgacag

SEQ ID NO: 115194 - DNA, 25 bp, Probe Sequence
ttacatcctaacagtataatccagc

SEQ ID NO: 115195 - DNA, 25 bp, Probe Sequence
catcctaacagtataatccagctca

SEQ ID NO: 115196 - DNA, 25 bp, Probe Sequence
acatcctaacagtataatccagctc

SEQ ID NO: 115197 - DNA, 25 bp, Probe Sequence
tcctaacagtataatccagctcagt

SEQ ID NO: 115198 - DNA, 25 bp, Probe Sequence
atcctaacagtataatccagctcag

SEQ ID NO: 115199 - DNA, 25 bp, Probe Sequence
cctaacagtataatccagctcagta

SEQ ID NO: 115200 - DNA, 25 bp, Probe Sequence
tacatcctaacagtataatccagct

SEQ ID NO: 115201 - DNA, 25 bp, Probe Sequence
ctaacagtataatccagctcagtat

SEQ ID NO: 115202 - DNA, 25 bp, Probe Sequence
tacccagaaataagataactccatc

SEQ ID NO: 115203 - DNA, 25 bp, Probe Sequence
agaaataagataactccatctcgcc

SEQ ID NO: 115204 - DNA, 25 bp, Probe Sequence
cagaaataagataactccatctcgc

SEQ ID NO: 115205 - DNA, 25 bp, Probe Sequence
gaaataagataactccatctcgccc

SEQ ID NO: 115206 - DNA, 25 bp, Probe Sequence
ccagaaataagataactccatctcg

SEQ ID NO: 115207 - DNA, 25 bp, Probe Sequence
acccagaaataagataactccatct

SEQ ID NO: 115208 - DNA, 25 bp, Probe Sequence
cccagaaataagataactccatctc

SEQ ID NO: 115209 - DNA, 25 bp, Probe Sequence
ggaaaacagaaagcagacaaagaaa

SEQ ID NO: 115210 - DNA, 25 bp, Probe Sequence
gaaaacagaaagcagacaaagaaaa

SEQ ID NO: 115211 - DNA, 25 bp, Probe Sequence
gggaaaacagaaagcagacaaagaa

SEQ ID NO: 115212 - DNA, 25 bp, Probe Sequence
aagggaaaacagaaagcagacaaag

SEQ ID NO: 115213 - DNA, 25 bp, Probe Sequence
gaagggaaaacagaaagcagacaaa

SEQ ID NO: 115214 - DNA, 25 bp, Probe Sequence
tttacatcctaacagtataatccag

SEQ ID NO: 115215 - DNA, 25 bp, Probe Sequence
ctttacatcctaacagtataatcca

SEQ ID NO: 115216 - DNA, 25 bp, Probe Sequence
agggaaaacagaaagcagacaaaga

SEQ ID NO: 115217 - DNA, 25 bp, Probe Sequence
actttacatcctaacagtataatcc

SEQ ID NO: 115218 - DNA, 25 bp, Probe Sequence
tacttaattggatgatggaggagga

SEQ ID NO: 115219 - DNA, 25 bp, Probe Sequence
atacttaattggatgatggaggagg

SEQ ID NO: 115220 - DNA, 25 bp, Probe Sequence
cagaagagttcagagaagagtatgc

SEQ ID NO: 115221 - DNA, 25 bp, Probe Sequence
gcagaagagttcagagaagagtatg

SEQ ID NO: 115222 - DNA, 25 bp, Probe Sequence
ttaattggatgatggaggaggagaa

SEQ ID NO: 115223 - DNA, 25 bp, Probe Sequence
cttaattggatgatggaggaggaga

SEQ ID NO: 115224 - DNA, 25 bp, Probe Sequence
acttaattggatgatggaggaggag

SEQ ID NO: 115225 - DNA, 25 bp, Probe Sequence
aatacttaattggatgatggaggag

SEQ ID NO: 115226 - DNA, 25 bp, Probe Sequence
cgtatctaagatgctgacacagaag

SEQ ID NO: 115227 - DNA, 25 bp, Probe Sequence
gaagagttcagagaagagtatgcaa

SEQ ID NO: 115228 - DNA, 25 bp, Probe Sequence
aagagttcagagaagagtatgcaac

SEQ ID NO: 115229 - DNA, 25 bp, Probe Sequence
agaagagttcagagaagagtatgca

SEQ ID NO: 115230 - DNA, 25 bp, Probe Sequence
tgcagaagagttcagagaagagtat

SEQ ID NO: 115231 - DNA, 25 bp, Probe Sequence
gatgatggaggaggagaaattgttt

SEQ ID NO: 115232 - DNA, 25 bp, Probe Sequence
gagttcagagaagagtatgcaacaa

SEQ ID NO: 115233 - DNA, 25 bp, Probe Sequence
taattggatgatggaggaggagaaa

SEQ ID NO: 115234 - DNA, 25 bp, Probe Sequence
tgcagaagttaggtaacataagact

SEQ ID NO: 115235 - DNA, 25 bp, Probe Sequence
attggatgatggaggaggagaaatt

SEQ ID NO: 115236 - DNA, 25 bp, Probe Sequence
aattggatgatggaggaggagaaat

SEQ ID NO: 115237 - DNA, 25 bp, Probe Sequence
agagttcagagaagagtatgcaaca

SEQ ID NO: 115238 - DNA, 25 bp, Probe Sequence
ttattaagttgtttattccctgcct

SEQ ID NO: 115239 - DNA, 25 bp, Probe Sequence
aattctattctgggtcaaatccttg

SEQ ID NO: 115240 - DNA, 25 bp, Probe Sequence
attcaaacagatgtccataatcagt

SEQ ID NO: 115241 - DNA, 25 bp, Probe Sequence
ctggtagaaggagggtcatttagtc

SEQ ID NO: 115242 - DNA, 25 bp, Probe Sequence
ttgagcctggtgaagaatgtattaa

SEQ ID NO: 115243 - DNA, 25 bp, Probe Sequence
gttgagcctggtgaagaatgtatta

SEQ ID NO: 115244 - DNA, 25 bp, Probe Sequence
gtagtcaactggtaaggatgaactg

SEQ ID NO: 115245 - DNA, 25 bp, Probe Sequence
ctgtagtcaactggtaaggatgaac

SEQ ID NO: 115246 - DNA, 25 bp, Probe Sequence
tagtcaactggtaaggatgaactga

SEQ ID NO: 115247 - DNA, 25 bp, Probe Sequence
gagaagacagttggagatggaagat

SEQ ID NO: 115248 - DNA, 25 bp, Probe Sequence
tgtagtcaactggtaaggatgaact

SEQ ID NO: 115249 - DNA, 25 bp, Probe Sequence
actgtagtcaactggtaaggatgaa

SEQ ID NO: 115250 - DNA, 25 bp, Probe Sequence
aagagaagacagttggagatggaag

SEQ ID NO: 115251 - DNA, 25 bp, Probe Sequence
ccagattgttctatgagacaggtat

SEQ ID NO: 115252 - DNA, 25 bp, Probe Sequence
tccagattgttctatgagacaggta

SEQ ID NO: 115253 - DNA, 25 bp, Probe Sequence
agaagacagttggagatggaagatg

SEQ ID NO: 115254 - DNA, 25 bp, Probe Sequence
agattgttctatgagacaggtatgt

SEQ ID NO: 115255 - DNA, 25 bp, Probe Sequence
agcctggtgaagaatgtattaatga

SEQ ID NO: 115256 - DNA, 25 bp, Probe Sequence
tgagcctggtgaagaatgtattaat

SEQ ID NO: 115257 - DNA, 25 bp, Probe Sequence
ttccagattgttctatgagacaggt

SEQ ID NO: 115258 - DNA, 25 bp, Probe Sequence
gcctggtgaagaatgtattaatgag

SEQ ID NO: 115259 - DNA, 25 bp, Probe Sequence
gagcctggtgaagaatgtattaatg

SEQ ID NO: 115260 - DNA, 25 bp, Probe Sequence
cagattgttctatgagacaggtatg

SEQ ID NO: 115261 - DNA, 25 bp, Probe Sequence
gtgattgatgacctcgatatggatt

SEQ ID NO: 115262 - DNA, 25 bp, Probe Sequence
agagaagacagttggagatggaaga

SEQ ID NO: 115263 - DNA, 25 bp, Probe Sequence
catggaagagacagtctacagagag

SEQ ID NO: 115264 - DNA, 25 bp, Probe Sequence
cctggtgaagaatgtattaatgaga

SEQ ID NO: 115265 - DNA, 25 bp, Probe Sequence
agtgattgatgacctcgatatggat

SEQ ID NO: 115266 - DNA, 25 bp, Probe Sequence
aaattaaagacgataaccctcacct

SEQ ID NO: 115267 - DNA, 25 bp, Probe Sequence
gaaattaaagacgataaccctcacc

SEQ ID NO: 115268 - DNA, 25 bp, Probe Sequence
aattaaagacgataaccctcacctg

SEQ ID NO: 115269 - DNA, 25 bp, Probe Sequence
attaaagacgataaccctcacctga

SEQ ID NO: 115270 - DNA, 25 bp, Probe Sequence
agaaattaaagacgataaccctcac

SEQ ID NO: 115271 - DNA, 25 bp, Probe Sequence
gaagagaaggtcaagttggaggaac

SEQ ID NO: 115272 - DNA, 25 bp, Probe Sequence
ttaaagacgataaccctcacctgaa

SEQ ID NO: 115273 - DNA, 25 bp, Probe Sequence
taaagacgataaccctcacctgaag

SEQ ID NO: 115274 - DNA, 25 bp, Probe Sequence
aagaaattaaagacgataaccctca

SEQ ID NO: 115275 - DNA, 25 bp, Probe Sequence
agaagaaattaaagacgataaccct

SEQ ID NO: 115276 - DNA, 25 bp, Probe Sequence
gaagaaattaaagacgataaccctc

SEQ ID NO: 115277 - DNA, 25 bp, Probe Sequence
aagagaaggtcaagttggaggaaca

SEQ ID NO: 115278 - DNA, 25 bp, Probe Sequence
taaccctcacctgaagaacctctat

SEQ ID NO: 115279 - DNA, 25 bp, Probe Sequence
ataaccctcacctgaagaacctcta

SEQ ID NO: 115280 - DNA, 25 bp, Probe Sequence
catgactgaagtccagatccagaag

SEQ ID NO: 115281 - DNA, 25 bp, Probe Sequence
ggaagagaaggtcaagttggaggaa

SEQ ID NO: 115282 - DNA, 25 bp, Probe Sequence
aagaagaaattaaagacgataaccc

SEQ ID NO: 115283 - DNA, 25 bp, Probe Sequence
aaatataaacgagctttggcagaca

SEQ ID NO: 115284 - DNA, 25 bp, Probe Sequence
agagaaggtcaagttggaggaacag

SEQ ID NO: 115285 - DNA, 25 bp, Probe Sequence
aatataaacgagctttggcagacac

SEQ ID NO: 115286 - DNA, 25 bp, Probe Sequence
aagacgataaccctcacctgaagaa

SEQ ID NO: 115287 - DNA, 25 bp, Probe Sequence
aaagacgataaccctcacctgaaga

SEQ ID NO: 115288 - DNA, 25 bp, Probe Sequence
gaagtccagatccagaaggtgttca

SEQ ID NO: 115289 - DNA, 25 bp, Probe Sequence
tgaagtccagatccagaaggtgttc

SEQ ID NO: 115290 - DNA, 25 bp, Probe Sequence
atgctttaggaaatgtctactgagg

SEQ ID NO: 115291 - DNA, 25 bp, Probe Sequence
tgatgctttaggaaatgtctactga

SEQ ID NO: 115292 - DNA, 25 bp, Probe Sequence
ctgatgctttaggaaatgtctactg

SEQ ID NO: 115293 - DNA, 25 bp, Probe Sequence
gatgctttaggaaatgtctactgag

SEQ ID NO: 115294 - DNA, 25 bp, Probe Sequence
cctgatggatggaaagaaatgtatt

SEQ ID NO: 115295 - DNA, 25 bp, Probe Sequence
gcctgatggatggaaagaaatgtat

SEQ ID NO: 115296 - DNA, 25 bp, Probe Sequence
tgctttaggaaatgtctactgagga

SEQ ID NO: 115297 - DNA, 25 bp, Probe Sequence
gggcagaataggtagtatttaagca

SEQ ID NO: 115298 - DNA, 25 bp, Probe Sequence
ggcagaataggtagtatttaagcaa

SEQ ID NO: 115299 - DNA, 25 bp, Probe Sequence
cttattccagatgctgagagtgacc

SEQ ID NO: 115300 - DNA, 25 bp, Probe Sequence
ccttattccagatgctgagagtgac

SEQ ID NO: 115301 - DNA, 25 bp, Probe Sequence
ctttaggaaatgtctactgaggacc

SEQ ID NO: 115302 - DNA, 25 bp, Probe Sequence
tgcctgatggatggaaagaaatgta

SEQ ID NO: 115303 - DNA, 25 bp, Probe Sequence
gctttaggaaatgtctactgaggac

SEQ ID NO: 115304 - DNA, 25 bp, Probe Sequence
tttaggaaatgtctactgaggaccc

SEQ ID NO: 115305 - DNA, 25 bp, Probe Sequence
ctgatggatggaaagaaatgtattt

SEQ ID NO: 115306 - DNA, 25 bp, Probe Sequence
ttattccagatgctgagagtgacca

SEQ ID NO: 115307 - DNA, 25 bp, Probe Sequence
gttgcctgatggatggaaagaaatg

SEQ ID NO: 115308 - DNA, 25 bp, Probe Sequence
ttgcctgatggatggaaagaaatgt

SEQ ID NO: 115309 - DNA, 25 bp, Probe Sequence
tgttgcctgatggatggaaagaaat

SEQ ID NO: 115310 - DNA, 25 bp, Probe Sequence
atgttgcctgatggatggaaagaaa

SEQ ID NO: 115311 - DNA, 25 bp, Probe Sequence
gcagaataggtagtatttaagcaaa

SEQ ID NO: 115312 - DNA, 25 bp, Probe Sequence
tattccagatgctgagagtgaccag

SEQ ID NO: 115313 - DNA, 25 bp, Probe Sequence
ttaggaaatgtctactgaggaccct

SEQ ID NO: 115314 - DNA, 25 bp, Probe Sequence
gtcattaaatggaagtgtctgccag

SEQ ID NO: 115315 - DNA, 25 bp, Probe Sequence
tcattaaatggaagtgtctgccagc

SEQ ID NO: 115316 - DNA, 25 bp, Probe Sequence
cattaaatggaagtgtctgccagct

SEQ ID NO: 115317 - DNA, 25 bp, Probe Sequence
ttcactcctactgatgagacaagat

SEQ ID NO: 115318 - DNA, 25 bp, Probe Sequence
attcactcctactgatgagacaaga

SEQ ID NO: 115319 - DNA, 25 bp, Probe Sequence
cattcactcctactgatgagacaag

SEQ ID NO: 115320 - DNA, 25 bp, Probe Sequence
catgtgtcaatgtcataactgtctt

SEQ ID NO: 115321 - DNA, 25 bp, Probe Sequence
tcactcctactgatgagacaagatg

SEQ ID NO: 115322 - DNA, 25 bp, Probe Sequence
ccattcactcctactgatgagacaa

SEQ ID NO: 115323 - DNA, 25 bp, Probe Sequence
gcatgtgtcaatgtcataactgtct

SEQ ID NO: 115324 - DNA, 25 bp, Probe Sequence
ctatggagacctgaagcatctgaag

SEQ ID NO: 115325 - DNA, 25 bp, Probe Sequence
taactgtctttatacgcttaggctc

SEQ ID NO: 115326 - DNA, 25 bp, Probe Sequence
tatggagacctgaagcatctgaaga

SEQ ID NO: 115327 - DNA, 25 bp, Probe Sequence
tctatggagacctgaagcatctgaa

SEQ ID NO: 115328 - DNA, 25 bp, Probe Sequence
cataactgtctttatacgcttaggc

SEQ ID NO: 115329 - DNA, 25 bp, Probe Sequence
ataactgtctttatacgcttaggct

SEQ ID NO: 115330 - DNA, 25 bp, Probe Sequence
atgtgtcaatgtcataactgtcttt

SEQ ID NO: 115331 - DNA, 25 bp, Probe Sequence
aactgtctttatacgcttaggctct

SEQ ID NO: 115332 - DNA, 25 bp, Probe Sequence
cactcctactgatgagacaagatgc

SEQ ID NO: 115333 - DNA, 25 bp, Probe Sequence
tgtgtcaatgtcataactgtcttta

SEQ ID NO: 115334 - DNA, 25 bp, Probe Sequence
ctgtctttatacgcttaggctctct

SEQ ID NO: 115335 - DNA, 25 bp, Probe Sequence
caatgtcataactgtctttatacgc

SEQ ID NO: 115336 - DNA, 25 bp, Probe Sequence
tgtctttatacgcttaggctctctg

SEQ ID NO: 115337 - DNA, 25 bp, Probe Sequence
actgtctttatacgcttaggctctc

SEQ ID NO: 115338 - DNA, 25 bp, Probe Sequence
tgcatgtgtcaatgtcataactgtc

SEQ ID NO: 115339 - DNA, 25 bp, Probe Sequence
atgtcataactgtctttatacgctt

SEQ ID NO: 115340 - DNA, 25 bp, Probe Sequence
aatgtcataactgtctttatacgct

SEQ ID NO: 115341 - DNA, 25 bp, Probe Sequence
tagagttctctgaggataaggttcg

SEQ ID NO: 115342 - DNA, 25 bp, Probe Sequence
atagagttctctgaggataaggttc

SEQ ID NO: 115343 - DNA, 25 bp, Probe Sequence
aatagagttctctgaggataaggtt

SEQ ID NO: 115344 - DNA, 25 bp, Probe Sequence
agttctctgaggataaggttcggat

SEQ ID NO: 115345 - DNA, 25 bp, Probe Sequence
ttattcttcagaggtaacatgcagt

SEQ ID NO: 115346 - DNA, 25 bp, Probe Sequence
gttctctgaggataaggttcggatc

SEQ ID NO: 115347 - DNA, 25 bp, Probe Sequence
tcatcttccatcctttcatagtcac

SEQ ID NO: 115348 - DNA, 25 bp, Probe Sequence
ttatcagtattcatcttccatcctt

SEQ ID NO: 115349 - DNA, 25 bp, Probe Sequence
atcttccatcctttcatagtcacaa

SEQ ID NO: 115350 - DNA, 25 bp, Probe Sequence
catcttccatcctttcatagtcaca

SEQ ID NO: 115351 - DNA, 25 bp, Probe Sequence
ttcatcttccatcctttcatagtca

SEQ ID NO: 115352 - DNA, 25 bp, Probe Sequence
tcagtattcatcttccatcctttca

SEQ ID NO: 115353 - DNA, 25 bp, Probe Sequence
tattcttcagaggtaacatgcagtt

SEQ ID NO: 115354 - DNA, 25 bp, Probe Sequence
tccatcctttcatagtcacaagttt

SEQ ID NO: 115355 - DNA, 25 bp, Probe Sequence
ttccatcctttcatagtcacaagtt

SEQ ID NO: 115356 - DNA, 25 bp, Probe Sequence
tcttccatcctttcatagtcacaag

SEQ ID NO: 115357 - DNA, 25 bp, Probe Sequence
cttccatcctttcatagtcacaagt

SEQ ID NO: 115358 - DNA, 25 bp, Probe Sequence
taatagagttctctgaggataaggt

SEQ ID NO: 115359 - DNA, 25 bp, Probe Sequence
gagttctctgaggataaggttcgga

SEQ ID NO: 115360 - DNA, 25 bp, Probe Sequence
cagtattcatcttccatcctttcat

SEQ ID NO: 115361 - DNA, 25 bp, Probe Sequence
attcttcagaggtaacatgcagttg

SEQ ID NO: 115362 - DNA, 25 bp, Probe Sequence
attcatcttccatcctttcatagtc

SEQ ID NO: 115363 - DNA, 25 bp, Probe Sequence
atcagtattcatcttccatcctttc

SEQ ID NO: 115364 - DNA, 25 bp, Probe Sequence
gtaatagagttctctgaggataagg

SEQ ID NO: 115365 - DNA, 25 bp, Probe Sequence
aaatcctttcagaatgtagcactca

SEQ ID NO: 115366 - DNA, 25 bp, Probe Sequence
aatcctttcagaatgtagcactcac

SEQ ID NO: 115367 - DNA, 25 bp, Probe Sequence
taaatcctttcagaatgtagcactc

SEQ ID NO: 115368 - DNA, 25 bp, Probe Sequence
ataaatcctttcagaatgtagcact

SEQ ID NO: 115369 - DNA, 25 bp, Probe Sequence
aataaatcctttcagaatgtagcac

SEQ ID NO: 115370 - DNA, 25 bp, Probe Sequence
aatgtagcactcacgccctaataag

SEQ ID NO: 115371 - DNA, 25 bp, Probe Sequence
gaatgtagcactcacgccctaataa

SEQ ID NO: 115372 - DNA, 25 bp, Probe Sequence
atcctttcagaatgtagcactcacg

SEQ ID NO: 115373 - DNA, 25 bp, Probe Sequence
aaataaatcctttcagaatgtagca

SEQ ID NO: 115374 - DNA, 25 bp, Probe Sequence
agaatgtagcactcacgccctaata

SEQ ID NO: 115375 - DNA, 25 bp, Probe Sequence
tgtcccaaaataaatcctttcagaa

SEQ ID NO: 115376 - DNA, 25 bp, Probe Sequence
ccttgtcccaaaataaatcctttca

SEQ ID NO: 115377 - DNA, 25 bp, Probe Sequence
ccatcaataaaagtaatttcacccg

SEQ ID NO: 115378 - DNA, 25 bp, Probe Sequence
gccttgtcccaaaataaatcctttc

SEQ ID NO: 115379 - DNA, 25 bp, Probe Sequence
cgctcaccatcaataaaagtaattt

SEQ ID NO: 115380 - DNA, 25 bp, Probe Sequence
cttgtgccttgtcccaaaataaatc

SEQ ID NO: 115381 - DNA, 25 bp, Probe Sequence
ctaataaggagcgaatcctacatcc

SEQ ID NO: 115382 - DNA, 25 bp, Probe Sequence
cctaataaggagcgaatcctacatc

SEQ ID NO: 115383 - DNA, 25 bp, Probe Sequence
ttgtcccaaaataaatcctttcaga

SEQ ID NO: 115384 - DNA, 25 bp, Probe Sequence
tgccttgtcccaaaataaatccttt

SEQ ID NO: 115385 - DNA, 25 bp, Probe Sequence
cttgtcccaaaataaatcctttcag

SEQ ID NO: 115386 - DNA, 25 bp, Probe Sequence
taataaggagcgaatcctacatcca

SEQ ID NO: 115387 - DNA, 25 bp, Probe Sequence
cccaaaataaatcctttcagaatgt

SEQ ID NO: 115388 - DNA, 25 bp, Probe Sequence
gtgccttgtcccaaaataaatcctt

SEQ ID NO: 115389 - DNA, 25 bp, Probe Sequence
cggatgataatctcaagaaactaac

SEQ ID NO: 115390 - DNA, 25 bp, Probe Sequence
gtgtgtccgaatgactttcctttac

SEQ ID NO: 115391 - DNA, 25 bp, Probe Sequence
agtgtgtccgaatgactttccttta

SEQ ID NO: 115392 - DNA, 25 bp, Probe Sequence
cgaatgactttcctttaccctccag

SEQ ID NO: 115393 - DNA, 25 bp, Probe Sequence
gaatgactttcctttaccctccagc

SEQ ID NO: 115394 - DNA, 25 bp, Probe Sequence
tgtgtccgaatgactttcctttacc

SEQ ID NO: 115395 - DNA, 25 bp, Probe Sequence
ggatgataatctcaagaaactaaca

SEQ ID NO: 115396 - DNA, 25 bp, Probe Sequence
gtccgaatgactttcctttaccctc

SEQ ID NO: 115397 - DNA, 25 bp, Probe Sequence
cagtgtgtccgaatgactttccttt

SEQ ID NO: 115398 - DNA, 25 bp, Probe Sequence
gtgtccgaatgactttcctttaccc

SEQ ID NO: 115399 - DNA, 25 bp, Probe Sequence
tccgaatgactttcctttaccctcc

SEQ ID NO: 115400 - DNA, 25 bp, Probe Sequence
tgtccgaatgactttcctttaccct

SEQ ID NO: 115401 - DNA, 25 bp, Probe Sequence
acaacagtgtgtccgaatgactttc

SEQ ID NO: 115402 - DNA, 25 bp, Probe Sequence
ccgaatgactttcctttaccctcca

SEQ ID NO: 115403 - DNA, 25 bp, Probe Sequence
aatgactttcctttaccctccagct

SEQ ID NO: 115404 - DNA, 25 bp, Probe Sequence
caacagtgtgtccgaatgactttcc

SEQ ID NO: 115405 - DNA, 25 bp, Probe Sequence
acagtgtgtccgaatgactttcctt

SEQ ID NO: 115406 - DNA, 25 bp, Probe Sequence
aacagtgtgtccgaatgactttcct

SEQ ID NO: 115407 - DNA, 25 bp, Probe Sequence
tgataatctcaagaaactaacaaag

SEQ ID NO: 115408 - DNA, 25 bp, Probe Sequence
gataatctcaagaaactaacaaaga

SEQ ID NO: 115409 - DNA, 25 bp, Probe Sequence
gatgataatctcaagaaactaacaa

SEQ ID NO: 115410 - DNA, 25 bp, Probe Sequence
gacttgtgttggtggcggtaatttt

SEQ ID NO: 115411 - DNA, 25 bp, Probe Sequence
agacaacagtgtgtccgaatgactt

SEQ ID NO: 115412 - DNA, 25 bp, Probe Sequence
ttgtgttggtggcggtaattttgtc

SEQ ID NO: 115413 - DNA, 25 bp, Probe Sequence
aagtattggaagagcagaattgagg

SEQ ID NO: 115414 - DNA, 25 bp, Probe Sequence
caagtattggaagagcagaattgag

SEQ ID NO: 115415 - DNA, 25 bp, Probe Sequence
ctcaagtattggaagagcagaattg

SEQ ID NO: 115416 - DNA, 25 bp, Probe Sequence
cctcaagtattggaagagcagaatt

SEQ ID NO: 115417 - DNA, 25 bp, Probe Sequence
ctatcctcaagtattggaagagcag

SEQ ID NO: 115418 - DNA, 25 bp, Probe Sequence
tatcctcaagtattggaagagcaga

SEQ ID NO: 115419 - DNA, 25 bp, Probe Sequence
tcctcaagtattggaagagcagaat

SEQ ID NO: 115420 - DNA, 25 bp, Probe Sequence
atcctcaagtattggaagagcagaa

SEQ ID NO: 115421 - DNA, 25 bp, Probe Sequence
ggtgggctatgggatatactatttc

SEQ ID NO: 115422 - DNA, 25 bp, Probe Sequence
tggtgggctatgggatatactattt

SEQ ID NO: 115423 - DNA, 25 bp, Probe Sequence
atcctttctatcactgtttggtagc

SEQ ID NO: 115424 - DNA, 25 bp, Probe Sequence
gtgggctatgggatatactatttca

SEQ ID NO: 115425 - DNA, 25 bp, Probe Sequence
cctatcctcaagtattggaagagca

SEQ ID NO: 115426 - DNA, 25 bp, Probe Sequence
tgcctatcctcaagtattggaagag

SEQ ID NO: 115427 - DNA, 25 bp, Probe Sequence
gtgcctatcctcaagtattggaaga

SEQ ID NO: 115428 - DNA, 25 bp, Probe Sequence
gtggtgggctatgggatatactatt

SEQ ID NO: 115429 - DNA, 25 bp, Probe Sequence
aatcctttctatcactgtttggtag

SEQ ID NO: 115430 - DNA, 25 bp, Probe Sequence
tcctttctatcactgtttggtagca

SEQ ID NO: 115431 - DNA, 25 bp, Probe Sequence
atctggaggatatctatgtgatgcc

SEQ ID NO: 115432 - DNA, 25 bp, Probe Sequence
atcaggtgaagatcagtgaagaagc

SEQ ID NO: 115433 - DNA, 25 bp, Probe Sequence
tgggctatgggatatactatttcat

SEQ ID NO: 115434 - DNA, 25 bp, Probe Sequence
caatcctttctatcactgtttggta

SEQ ID NO: 115435 - DNA, 25 bp, Probe Sequence
gacaatcctttctatcactgtttgg

SEQ ID NO: 115436 - DNA, 25 bp, Probe Sequence
acaatcctttctatcactgtttggt

SEQ ID NO: 115437 - DNA, 25 bp, Probe Sequence
atgaacccaaatgctacactatctc

SEQ ID NO: 115438 - DNA, 25 bp, Probe Sequence
gatgaacccaaatgctacactatct

SEQ ID NO: 115439 - DNA, 25 bp, Probe Sequence
ctgatgaacccaaatgctacactat

SEQ ID NO: 115440 - DNA, 25 bp, Probe Sequence
ccaaatgctacactatctcaggttt

SEQ ID NO: 115441 - DNA, 25 bp, Probe Sequence
tgatgaacccaaatgctacactatc

SEQ ID NO: 115442 - DNA, 25 bp, Probe Sequence
gaacccaaatgctacactatctcag

SEQ ID NO: 115443 - DNA, 25 bp, Probe Sequence
tctgatgaacccaaatgctacacta

SEQ ID NO: 115444 - DNA, 25 bp, Probe Sequence
tgaacccaaatgctacactatctca

SEQ ID NO: 115445 - DNA, 25 bp, Probe Sequence
cccaaatgctacactatctcaggtt

SEQ ID NO: 115446 - DNA, 25 bp, Probe Sequence
aacccaaatgctacactatctcagg

SEQ ID NO: 115447 - DNA, 25 bp, Probe Sequence
atttgtcatggatataatttgcagc

SEQ ID NO: 115448 - DNA, 25 bp, Probe Sequence
caaatgctacactatctcaggtttt

SEQ ID NO: 115449 - DNA, 25 bp, Probe Sequence
acccaaatgctacactatctcaggt

SEQ ID NO: 115450 - DNA, 25 bp, Probe Sequence
tcaatttgtcatggatataatttgc

SEQ ID NO: 115451 - DNA, 25 bp, Probe Sequence
caatttgtcatggatataatttgca

SEQ ID NO: 115452 - DNA, 25 bp, Probe Sequence
ggtctgatgaacccaaatgctacac

SEQ ID NO: 115453 - DNA, 25 bp, Probe Sequence
aatttgtcatggatataatttgcag

SEQ ID NO: 115454 - DNA, 25 bp, Probe Sequence
gcaaaatgttatcaatttgtcatgg

SEQ ID NO: 115455 - DNA, 25 bp, Probe Sequence
aaatgttatcaatttgtcatggata

SEQ ID NO: 115456 - DNA, 25 bp, Probe Sequence
aatgttatcaatttgtcatggatat

SEQ ID NO: 115457 - DNA, 25 bp, Probe Sequence
tgcaaaatgttatcaatttgtcatg

SEQ ID NO: 115458 - DNA, 25 bp, Probe Sequence
caaaatgttatcaatttgtcatgga

SEQ ID NO: 115459 - DNA, 25 bp, Probe Sequence
aaaatgttatcaatttgtcatggat

SEQ ID NO: 115460 - DNA, 25 bp, Probe Sequence
agaaactttgtagaaagtccaagaa

SEQ ID NO: 115461 - DNA, 25 bp, Probe Sequence
ctacagtgacagcatacgtgagaag

SEQ ID NO: 115462 - DNA, 25 bp, Probe Sequence
ctctacagtgacagcatacgtgaga

SEQ ID NO: 115463 - DNA, 25 bp, Probe Sequence
tctacagtgacagcatacgtgagaa

SEQ ID NO: 115464 - DNA, 25 bp, Probe Sequence
actctacagtgacagcatacgtgag

SEQ ID NO: 115465 - DNA, 25 bp, Probe Sequence
ttctaaaactctacagtgacagcat

SEQ ID NO: 115466 - DNA, 25 bp, Probe Sequence
cttctaaaactctacagtgacagca

SEQ ID NO: 115467 - DNA, 25 bp, Probe Sequence
taaaactctacagtgacagcatacg

SEQ ID NO: 115468 - DNA, 25 bp, Probe Sequence
aactctacagtgacagcatacgtga

SEQ ID NO: 115469 - DNA, 25 bp, Probe Sequence
ctaaaactctacagtgacagcatac

SEQ ID NO: 115470 - DNA, 25 bp, Probe Sequence
tctaaaactctacagtgacagcata

SEQ ID NO: 115471 - DNA, 25 bp, Probe Sequence
ccttctaaaactctacagtgacagc

SEQ ID NO: 115472 - DNA, 25 bp, Probe Sequence
tacagtgacagcatacgtgagaagg

SEQ ID NO: 115473 - DNA, 25 bp, Probe Sequence
aaactctacagtgacagcatacgtg

SEQ ID NO: 115474 - DNA, 25 bp, Probe Sequence
aaaactctacagtgacagcatacgt

SEQ ID NO: 115475 - DNA, 25 bp, Probe Sequence
aagaacacgatgagaattagacact

SEQ ID NO: 115476 - DNA, 25 bp, Probe Sequence
agaacacgatgagaattagacactg

SEQ ID NO: 115477 - DNA, 25 bp, Probe Sequence
gaacacgatgagaattagacactgg

SEQ ID NO: 115478 - DNA, 25 bp, Probe Sequence
acacgatgagaattagacactggaa

SEQ ID NO: 115479 - DNA, 25 bp, Probe Sequence
aacacgatgagaattagacactgga

SEQ ID NO: 115480 - DNA, 25 bp, Probe Sequence
gaagtgtgagactgatgtcaatgag

SEQ ID NO: 115481 - DNA, 25 bp, Probe Sequence
agaagtgtgagactgatgtcaatga

SEQ ID NO: 115482 - DNA, 25 bp, Probe Sequence
cagaagtgtgagactgatgtcaatg

SEQ ID NO: 115483 - DNA, 25 bp, Probe Sequence
aagtgtgagactgatgtcaatgagt

SEQ ID NO: 115484 - DNA, 25 bp, Probe Sequence
aaagaacacgatgagaattagacac

SEQ ID NO: 115485 - DNA, 25 bp, Probe Sequence
cacgatgagaattagacactggaaa

SEQ ID NO: 115486 - DNA, 25 bp, Probe Sequence
tgtatgtgtggttaataaagtgctt

SEQ ID NO: 115487 - DNA, 25 bp, Probe Sequence
atgtatgtgtggttaataaagtgct

SEQ ID NO: 115488 - DNA, 25 bp, Probe Sequence
agtgtgagactgatgtcaatgagtg

SEQ ID NO: 115489 - DNA, 25 bp, Probe Sequence
gtgtgagactgatgtcaatgagtgt

SEQ ID NO: 115490 - DNA, 25 bp, Probe Sequence
gtatgtgtggttaataaagtgcttt

SEQ ID NO: 115491 - DNA, 25 bp, Probe Sequence
gcagaagtgtgagactgatgtcaat

SEQ ID NO: 115492 - DNA, 25 bp, Probe Sequence
tatgtatgtgtggttaataaagtgc

SEQ ID NO: 115493 - DNA, 25 bp, Probe Sequence
gaatggaaaagaacacgatgagaat

SEQ ID NO: 115494 - DNA, 25 bp, Probe Sequence
atgtgtggttaataaagtgctttaa

SEQ ID NO: 115495 - DNA, 25 bp, Probe Sequence
acgatgagaattagacactggaaaa

SEQ ID NO: 115496 - DNA, 25 bp, Probe Sequence
aatggaaaagaacacgatgagaatt

SEQ ID NO: 115497 - DNA, 25 bp, Probe Sequence
tggaaaagaacacgatgagaattag

SEQ ID NO: 115498 - DNA, 25 bp, Probe Sequence
cgatgagaattagacactggaaaat

SEQ ID NO: 115499 - DNA, 25 bp, Probe Sequence
agagacatagagatagagacagaga

SEQ ID NO: 115500 - DNA, 25 bp, Probe Sequence
agagagacatagagatagagacaga

SEQ ID NO: 115501 - DNA, 25 bp, Probe Sequence
agagagagacatagagatagagaca

SEQ ID NO: 115502 - DNA, 25 bp, Probe Sequence
gagacatagagatagagacagagag

SEQ ID NO: 115503 - DNA, 25 bp, Probe Sequence
gagagacatagagatagagacagag

SEQ ID NO: 115504 - DNA, 25 bp, Probe Sequence
gagagagacatagagatagagacag

SEQ ID NO: 115505 - DNA, 25 bp, Probe Sequence
gagagagagacatagagatagagac

SEQ ID NO: 115506 - DNA, 25 bp, Probe Sequence
agacatagagatagagacagagagg

SEQ ID NO: 115507 - DNA, 25 bp, Probe Sequence
ggagagagagacatagagatagaga

SEQ ID NO: 115508 - DNA, 25 bp, Probe Sequence
gtatctctgtgttggtgtatctgtg

SEQ ID NO: 115509 - DNA, 25 bp, Probe Sequence
catagagatagagacagagaggcag

SEQ ID NO: 115510 - DNA, 25 bp, Probe Sequence
atagagatagagacagagaggcaga

SEQ ID NO: 115511 - DNA, 25 bp, Probe Sequence
gacatagagatagagacagagaggc

SEQ ID NO: 115512 - DNA, 25 bp, Probe Sequence
acatagagatagagacagagaggca

SEQ ID NO: 115513 - DNA, 25 bp, Probe Sequence
tagagatagagacagagaggcagag

SEQ ID NO: 115514 - DNA, 25 bp, Probe Sequence
ggtatctctgtgttggtgtatctgt

SEQ ID NO: 115515 - DNA, 25 bp, Probe Sequence
cagaatgtcaggagactcatcttac

SEQ ID NO: 115516 - DNA, 25 bp, Probe Sequence
gaatgtcaggagactcatcttacac

SEQ ID NO: 115517 - DNA, 25 bp, Probe Sequence
agaatgtcaggagactcatcttaca

SEQ ID NO: 115518 - DNA, 25 bp, Probe Sequence
tatctctgtgttggtgtatctgtgc

SEQ ID NO: 115519 - DNA, 25 bp, Probe Sequence
atagagacagagaggcagagaagag

SEQ ID NO: 115520 - DNA, 25 bp, Probe Sequence
gatagagacagagaggcagagaaga

SEQ ID NO: 115521 - DNA, 25 bp, Probe Sequence
agatagagacagagaggcagagaag

SEQ ID NO: 115522 - DNA, 25 bp, Probe Sequence
gagatagagacagagaggcagagaa

SEQ ID NO: 115523 - DNA, 25 bp, Probe Sequence
aggaggagatgttaaagtaacccat

SEQ ID NO: 115524 - DNA, 25 bp, Probe Sequence
caggaggagatgttaaagtaaccca

SEQ ID NO: 115525 - DNA, 25 bp, Probe Sequence
acaggaggagatgttaaagtaaccc

SEQ ID NO: 115526 - DNA, 25 bp, Probe Sequence
aaaggagaacattggagaaaacagg

SEQ ID NO: 115527 - DNA, 25 bp, Probe Sequence
aacattggagaaaacaggaggagat

SEQ ID NO: 115528 - DNA, 25 bp, Probe Sequence
aaggagaacattggagaaaacagga

SEQ ID NO: 115529 - DNA, 25 bp, Probe Sequence
aacaggaggagatgttaaagtaacc

SEQ ID NO: 115530 - DNA, 25 bp, Probe Sequence
gaacattggagaaaacaggaggaga

SEQ ID NO: 115531 - DNA, 25 bp, Probe Sequence
agaacattggagaaaacaggaggag

SEQ ID NO: 115532 - DNA, 25 bp, Probe Sequence
gagaacattggagaaaacaggagga

SEQ ID NO: 115533 - DNA, 25 bp, Probe Sequence
aggagaacattggagaaaacaggag

SEQ ID NO: 115534 - DNA, 25 bp, Probe Sequence
aaacaggaggagatgttaaagtaac

SEQ ID NO: 115535 - DNA, 25 bp, Probe Sequence
acattggagaaaacaggaggagatg

SEQ ID NO: 115536 - DNA, 25 bp, Probe Sequence
cattggagaaaacaggaggagatgt

SEQ ID NO: 115537 - DNA, 25 bp, Probe Sequence
ggagaacattggagaaaacaggagg

SEQ ID NO: 115538 - DNA, 25 bp, Probe Sequence
agaaaacaggaggagatgttaaagt

SEQ ID NO: 115539 - DNA, 25 bp, Probe Sequence
ggagaaaacaggaggagatgttaaa

SEQ ID NO: 115540 - DNA, 25 bp, Probe Sequence
gagaaaacaggaggagatgttaaag

SEQ ID NO: 115541 - DNA, 25 bp, Probe Sequence
tggagaaaacaggaggagatgttaa

SEQ ID NO: 115542 - DNA, 25 bp, Probe Sequence
ttggagaaaacaggaggagatgtta

SEQ ID NO: 115543 - DNA, 25 bp, Probe Sequence
gaaaacaggaggagatgttaaagta

SEQ ID NO: 115544 - DNA, 25 bp, Probe Sequence
attggagaaaacaggaggagatgtt

SEQ ID NO: 115545 - DNA, 25 bp, Probe Sequence
aaaacaggaggagatgttaaagtaa

SEQ ID NO: 115546 - DNA, 25 bp, Probe Sequence
gagaccatacaccgtgatccttatt

SEQ ID NO: 115547 - DNA, 25 bp, Probe Sequence
agaccatacaccgtgatccttattg

SEQ ID NO: 115548 - DNA, 25 bp, Probe Sequence
aatcctgaaacaaagagaccataca

SEQ ID NO: 115549 - DNA, 25 bp, Probe Sequence
tgaatcctgaaacaaagagaccata

SEQ ID NO: 115550 - DNA, 25 bp, Probe Sequence
gaatcctgaaacaaagagaccatac

SEQ ID NO: 115551 - DNA, 25 bp, Probe Sequence
ataaagaaagacacacacaactgga

SEQ ID NO: 115552 - DNA, 25 bp, Probe Sequence
ccaacagttagaaatcgtaagagtc

SEQ ID NO: 115553 - DNA, 25 bp, Probe Sequence
atcctgaaacaaagagaccatacac

SEQ ID NO: 115554 - DNA, 25 bp, Probe Sequence
aaggagaagttcaagtatcagataa

SEQ ID NO: 115555 - DNA, 25 bp, Probe Sequence
agagaccatacaccgtgatccttat

SEQ ID NO: 115556 - DNA, 25 bp, Probe Sequence
taaagaaagacacacacaactggag

SEQ ID NO: 115557 - DNA, 25 bp, Probe Sequence
gtgaatcctgaaacaaagagaccat

SEQ ID NO: 115558 - DNA, 25 bp, Probe Sequence
caacagttagaaatcgtaagagtca

SEQ ID NO: 115559 - DNA, 25 bp, Probe Sequence
gccaacagttagaaatcgtaagagt

SEQ ID NO: 115560 - DNA, 25 bp, Probe Sequence
atcagataaagaaagacacacacaa

SEQ ID NO: 115561 - DNA, 25 bp, Probe Sequence
aagagaccatacaccgtgatcctta

SEQ ID NO: 115562 - DNA, 25 bp, Probe Sequence
acagttagaaatcgtaagagtcaaa

SEQ ID NO: 115563 - DNA, 25 bp, Probe Sequence
aatgtgtgaatcctgaaacaaagag

SEQ ID NO: 115564 - DNA, 25 bp, Probe Sequence
aacagttagaaatcgtaagagtcaa

SEQ ID NO: 115565 - DNA, 25 bp, Probe Sequence
aaatgtgtgaatcctgaaacaaaga

SEQ ID NO: 115566 - DNA, 25 bp, Probe Sequence
atgtgtgaatcctgaaacaaagaga

SEQ ID NO: 115567 - DNA, 25 bp, Probe Sequence
gagccatgaaggacatccactattc

SEQ ID NO: 115568 - DNA, 25 bp, Probe Sequence
ctaaaggagaagttcaagtatcaga

SEQ ID NO: 115569 - DNA, 25 bp, Probe Sequence
tatcagataaagaaagacacacaca

SEQ ID NO: 115570 - DNA, 25 bp, Probe Sequence
cataacttgagtctattgccttgcc

SEQ ID NO: 115571 - DNA, 25 bp, Probe Sequence
ccataacttgagtctattgccttgc

SEQ ID NO: 115572 - DNA, 25 bp, Probe Sequence
gccataacttgagtctattgccttg

SEQ ID NO: 115573 - DNA, 25 bp, Probe Sequence
ataacttgagtctattgccttgcct

SEQ ID NO: 115574 - DNA, 25 bp, Probe Sequence
taacttgagtctattgccttgcctt

SEQ ID NO: 115575 - DNA, 25 bp, Probe Sequence
aatattcgacaggccataacttgag

SEQ ID NO: 115576 - DNA, 25 bp, Probe Sequence
atattcgacaggccataacttgagt

SEQ ID NO: 115577 - DNA, 25 bp, Probe Sequence
gacaggccataacttgagtctattg

SEQ ID NO: 115578 - DNA, 25 bp, Probe Sequence
acaggccataacttgagtctattgc

SEQ ID NO: 115579 - DNA, 25 bp, Probe Sequence
ctttaagttgataactccctctggg

SEQ ID NO: 115580 - DNA, 25 bp, Probe Sequence
gagtaaatattcgacaggccataac

SEQ ID NO: 115581 - DNA, 25 bp, Probe Sequence
aaatattcgacaggccataacttga

SEQ ID NO: 115582 - DNA, 25 bp, Probe Sequence
taaatattcgacaggccataacttg

SEQ ID NO: 115583 - DNA, 25 bp, Probe Sequence
gtaaatattcgacaggccataactt

SEQ ID NO: 115584 - DNA, 25 bp, Probe Sequence
cgacaggccataacttgagtctatt

SEQ ID NO: 115585 - DNA, 25 bp, Probe Sequence
tattcgacaggccataacttgagtc

SEQ ID NO: 115586 - DNA, 25 bp, Probe Sequence
agtaaatattcgacaggccataact

SEQ ID NO: 115587 - DNA, 25 bp, Probe Sequence
tcgacaggccataacttgagtctat

SEQ ID NO: 115588 - DNA, 25 bp, Probe Sequence
ttcgacaggccataacttgagtcta

SEQ ID NO: 115589 - DNA, 25 bp, Probe Sequence
attcgacaggccataacttgagtct

SEQ ID NO: 115590 - DNA, 25 bp, Probe Sequence
ggccataacttgagtctattgcctt

SEQ ID NO: 115591 - DNA, 25 bp, Probe Sequence
caggccataacttgagtctattgcc

SEQ ID NO: 115592 - DNA, 25 bp, Probe Sequence
tttgctatttggaagtgattgaagg

SEQ ID NO: 115593 - DNA, 25 bp, Probe Sequence
ttgctatttggaagtgattgaaggg

SEQ ID NO: 115594 - DNA, 25 bp, Probe Sequence
cttctgaactcgggtttcttagtaa

SEQ ID NO: 115595 - DNA, 25 bp, Probe Sequence
ttctgaactcgggtttcttagtaag

SEQ ID NO: 115596 - DNA, 25 bp, Probe Sequence
ccacctgacagtacataaagaagtt

SEQ ID NO: 115597 - DNA, 25 bp, Probe Sequence
cacctgacagtacataaagaagttt

SEQ ID NO: 115598 - DNA, 25 bp, Probe Sequence
gatccctccctcctttgatactaaa

SEQ ID NO: 115599 - DNA, 25 bp, Probe Sequence
tatgcttctgaactcgggtttctta

SEQ ID NO: 115600 - DNA, 25 bp, Probe Sequence
atgatctacttggctgccttcaatt

SEQ ID NO: 115601 - DNA, 25 bp, Probe Sequence
aatgatctacttggctgccttcaat

SEQ ID NO: 115602 - DNA, 25 bp, Probe Sequence
tcccacctgacagtacataaagaag

SEQ ID NO: 115603 - DNA, 25 bp, Probe Sequence
cccacctgacagtacataaagaagt

SEQ ID NO: 115604 - DNA, 25 bp, Probe Sequence
ttatgcttctgaactcgggtttctt

SEQ ID NO: 115605 - DNA, 25 bp, Probe Sequence
tttatgcttctgaactcgggtttct

SEQ ID NO: 115606 - DNA, 25 bp, Probe Sequence
gtttatgcttctgaactcgggtttc

SEQ ID NO: 115607 - DNA, 25 bp, Probe Sequence
aaccacagttctgatacttcacgtt

SEQ ID NO: 115608 - DNA, 25 bp, Probe Sequence
gcttctgaactcgggtttcttagta

SEQ ID NO: 115609 - DNA, 25 bp, Probe Sequence
atgcttctgaactcgggtttcttag

SEQ ID NO: 115610 - DNA, 25 bp, Probe Sequence
ctgatacttcacgtttatgcttctg

SEQ ID NO: 115611 - DNA, 25 bp, Probe Sequence
tctgatacttcacgtttatgcttct

SEQ ID NO: 115612 - DNA, 25 bp, Probe Sequence
tgatacttcacgtttatgcttctga

SEQ ID NO: 115613 - DNA, 25 bp, Probe Sequence
gttctgatacttcacgtttatgctt

SEQ ID NO: 115614 - DNA, 25 bp, Probe Sequence
agttctgatacttcacgtttatgct

SEQ ID NO: 115615 - DNA, 25 bp, Probe Sequence
cagttctgatacttcacgtttatgc

SEQ ID NO: 115616 - DNA, 25 bp, Probe Sequence
tacaggtcagagacaatggcttata

SEQ ID NO: 115617 - DNA, 25 bp, Probe Sequence
ctacaatacaggtcagagacaatgg

SEQ ID NO: 115618 - DNA, 25 bp, Probe Sequence
gctacaatacaggtcagagacaatg

SEQ ID NO: 115619 - DNA, 25 bp, Probe Sequence
atacaggtcagagacaatggcttat

SEQ ID NO: 115620 - DNA, 25 bp, Probe Sequence
aatacaggtcagagacaatggctta

SEQ ID NO: 115621 - DNA, 25 bp, Probe Sequence
tataaaggtttagtgtggtctcagg

SEQ ID NO: 115622 - DNA, 25 bp, Probe Sequence
ggctacaatacaggtcagagacaat

SEQ ID NO: 115623 - DNA, 25 bp, Probe Sequence
acaggtcagagacaatggcttataa

SEQ ID NO: 115624 - DNA, 25 bp, Probe Sequence
taaaggtttagtgtggtctcaggat

SEQ ID NO: 115625 - DNA, 25 bp, Probe Sequence
ataaaggtttagtgtggtctcagga

SEQ ID NO: 115626 - DNA, 25 bp, Probe Sequence
tacaatacaggtcagagacaatggc

SEQ ID NO: 115627 - DNA, 25 bp, Probe Sequence
caatacaggtcagagacaatggctt

SEQ ID NO: 115628 - DNA, 25 bp, Probe Sequence
atggcttataaaggtttagtgtggt

SEQ ID NO: 115629 - DNA, 25 bp, Probe Sequence
tcagagacaatggcttataaaggtt

SEQ ID NO: 115630 - DNA, 25 bp, Probe Sequence
aggctacaatacaggtcagagacaa

SEQ ID NO: 115631 - DNA, 25 bp, Probe Sequence
ggcttataaaggtttagtgtggtct

SEQ ID NO: 115632 - DNA, 25 bp, Probe Sequence
gcttataaaggtttagtgtggtctc

SEQ ID NO: 115633 - DNA, 25 bp, Probe Sequence
tggcttataaaggtttagtgtggtc

SEQ ID NO: 115634 - DNA, 25 bp, Probe Sequence
aatggcttataaaggtttagtgtgg

SEQ ID NO: 115635 - DNA, 25 bp, Probe Sequence
cagagacaatggcttataaaggttt

SEQ ID NO: 115636 - DNA, 25 bp, Probe Sequence
aaaggtttagtgtggtctcaggatg

SEQ ID NO: 115637 - DNA, 25 bp, Probe Sequence
ctcaaggacaggctacaatacaggt

SEQ ID NO: 115638 - DNA, 25 bp, Probe Sequence
caatggcttataaaggtttagtgtg

SEQ ID NO: 115639 - DNA, 25 bp, Probe Sequence
ttataaaggtttagtgtggtctcag

SEQ ID NO: 115640 - DNA, 25 bp, Probe Sequence
tggtaagagagttgtcactactaga

SEQ ID NO: 115641 - DNA, 25 bp, Probe Sequence
ctggtaagagagttgtcactactag

SEQ ID NO: 115642 - DNA, 25 bp, Probe Sequence
gctggtaagagagttgtcactacta

SEQ ID NO: 115643 - DNA, 25 bp, Probe Sequence
ggtaagagagttgtcactactagat

SEQ ID NO: 115644 - DNA, 25 bp, Probe Sequence
tcatcagaattaacaaggcttgaat

SEQ ID NO: 115645 - DNA, 25 bp, Probe Sequence
atcatcagaattaacaaggcttgaa

SEQ ID NO: 115646 - DNA, 25 bp, Probe Sequence
aatcatcagaattaacaaggcttga

SEQ ID NO: 115647 - DNA, 25 bp, Probe Sequence
catcagaattaacaaggcttgaatc

SEQ ID NO: 115648 - DNA, 25 bp, Probe Sequence
atcagaattaacaaggcttgaatct

SEQ ID NO: 115649 - DNA, 25 bp, Probe Sequence
taacaaggcttgaatctgtattacc

SEQ ID NO: 115650 - DNA, 25 bp, Probe Sequence
caaccatcaatgaacccaaagataa

SEQ ID NO: 115651 - DNA, 25 bp, Probe Sequence
agaattaacaaggcttgaatctgta

SEQ ID NO: 115652 - DNA, 25 bp, Probe Sequence
ctgctggtaagagagttgtcactac

SEQ ID NO: 115653 - DNA, 25 bp, Probe Sequence
aaccatcaatgaacccaaagataaa

SEQ ID NO: 115654 - DNA, 25 bp, Probe Sequence
accatcaatgaacccaaagataaat

SEQ ID NO: 115655 - DNA, 25 bp, Probe Sequence
ccaaccatcaatgaacccaaagata

SEQ ID NO: 115656 - DNA, 25 bp, Probe Sequence
gtaagagagttgtcactactagatt

SEQ ID NO: 115657 - DNA, 25 bp, Probe Sequence
tgctggtaagagagttgtcactact

SEQ ID NO: 115658 - DNA, 25 bp, Probe Sequence
ccatcaatgaacccaaagataaatc

SEQ ID NO: 115659 - DNA, 25 bp, Probe Sequence
gaattaacaaggcttgaatctgtat

SEQ ID NO: 115660 - DNA, 25 bp, Probe Sequence
tcatcaatcaacctcaagcccatat

SEQ ID NO: 115661 - DNA, 25 bp, Probe Sequence
agaagagtttcagagtgaccctaag

SEQ ID NO: 115662 - DNA, 25 bp, Probe Sequence
tgaacccaaagataaatcatcagaa

SEQ ID NO: 115663 - DNA, 25 bp, Probe Sequence
ttcatcaatcaacctcaagcccata

SEQ ID NO: 115664 - DNA, 25 bp, Probe Sequence
aattgctatgattgtattgtacgtt

SEQ ID NO: 115665 - DNA, 25 bp, Probe Sequence
tgattgaaacacaaatttacatgca

SEQ ID NO: 115666 - DNA, 25 bp, Probe Sequence
tgctatgattgtattgtacgttatt

SEQ ID NO: 115667 - DNA, 25 bp, Probe Sequence
ttgctatgattgtattgtacgttat

SEQ ID NO: 115668 - DNA, 25 bp, Probe Sequence
attgctatgattgtattgtacgtta

SEQ ID NO: 115669 - DNA, 25 bp, Probe Sequence
ctgattgaaacacaaatttacatgc

SEQ ID NO: 115670 - DNA, 25 bp, Probe Sequence
gaggtcttctctttaatgttacttt

SEQ ID NO: 115671 - DNA, 25 bp, Probe Sequence
tgtctgattgaaacacaaatttaca

SEQ ID NO: 115672 - DNA, 25 bp, Probe Sequence
aaattgctatgattgtattgtacgt

SEQ ID NO: 115673 - DNA, 25 bp, Probe Sequence
taaataaaagcaaaaccgccacaga

SEQ ID NO: 115674 - DNA, 25 bp, Probe Sequence
cgttatttaatgtctgattgaaaca

SEQ ID NO: 115675 - DNA, 25 bp, Probe Sequence
cacagaactagaggtcttctcttta

SEQ ID NO: 115676 - DNA, 25 bp, Probe Sequence
acagaactagaggtcttctctttaa

SEQ ID NO: 115677 - DNA, 25 bp, Probe Sequence
ccacagaactagaggtcttctcttt

SEQ ID NO: 115678 - DNA, 25 bp, Probe Sequence
aaataaaagcaaaaccgccacagaa

SEQ ID NO: 115679 - DNA, 25 bp, Probe Sequence
ttaatgtctgattgaaacacaaatt

SEQ ID NO: 115680 - DNA, 25 bp, Probe Sequence
tttaatgtctgattgaaacacaaat

SEQ ID NO: 115681 - DNA, 25 bp, Probe Sequence
atttaatgtctgattgaaacacaaa

SEQ ID NO: 115682 - DNA, 25 bp, Probe Sequence
tctgattgaaacacaaatttacatg

SEQ ID NO: 115683 - DNA, 25 bp, Probe Sequence
gtctgattgaaacacaaatttacat

SEQ ID NO: 115684 - DNA, 25 bp, Probe Sequence
tgtacgttatttaatgtctgattga

SEQ ID NO: 115685 - DNA, 25 bp, Probe Sequence
gccacagaactagaggtcttctctt

SEQ ID NO: 115686 - DNA, 25 bp, Probe Sequence
aggtcttctctttaatgttacttta

SEQ ID NO: 115687 - DNA, 25 bp, Probe Sequence
atgtctgattgaaacacaaatttac

SEQ ID NO: 115688 - DNA, 25 bp, Probe Sequence
tgaaggaaatagagacacacaagaa

SEQ ID NO: 115689 - DNA, 25 bp, Probe Sequence
ctgaaggaaatagagacacacaaga

SEQ ID NO: 115690 - DNA, 25 bp, Probe Sequence
aactgaaggaaatagagacacacaa

SEQ ID NO: 115691 - DNA, 25 bp, Probe Sequence
agaactgaaggaaatagagacacac

SEQ ID NO: 115692 - DNA, 25 bp, Probe Sequence
gtgcaatcatactagaactcaggat

SEQ ID NO: 115693 - DNA, 25 bp, Probe Sequence
gaaggaaatagagacacacaagaac

SEQ ID NO: 115694 - DNA, 25 bp, Probe Sequence
gaaatgaaggcagaagtaaagatgt

SEQ ID NO: 115695 - DNA, 25 bp, Probe Sequence
taacgaaatgaaggcagaagtaaag

SEQ ID NO: 115696 - DNA, 25 bp, Probe Sequence
actgaaggaaatagagacacacaag

SEQ ID NO: 115697 - DNA, 25 bp, Probe Sequence
gaactgaaggaaatagagacacaca

SEQ ID NO: 115698 - DNA, 25 bp, Probe Sequence
cgaaatgaaggcagaagtaaagatg

SEQ ID NO: 115699 - DNA, 25 bp, Probe Sequence
aaggaaatagagacacacaagaacc

SEQ ID NO: 115700 - DNA, 25 bp, Probe Sequence
acgaaatgaaggcagaagtaaagat

SEQ ID NO: 115701 - DNA, 25 bp, Probe Sequence
aaatgaaggcagaagtaaagatgtt

SEQ ID NO: 115702 - DNA, 25 bp, Probe Sequence
aacgaaatgaaggcagaagtaaaga

SEQ ID NO: 115703 - DNA, 25 bp, Probe Sequence
cataacgaaatgaaggcagaagtaa

SEQ ID NO: 115704 - DNA, 25 bp, Probe Sequence
aatgaaggcagaagtaaagatgttc

SEQ ID NO: 115705 - DNA, 25 bp, Probe Sequence
ataacgaaatgaaggcagaagtaaa

SEQ ID NO: 115706 - DNA, 25 bp, Probe Sequence
acataacgaaatgaaggcagaagta

SEQ ID NO: 115707 - DNA, 25 bp, Probe Sequence
tacataacgaaatgaaggcagaagt

SEQ ID NO: 115708 - DNA, 25 bp, Probe Sequence
aagaagaaatgattaaccctggagg

SEQ ID NO: 115709 - DNA, 25 bp, Probe Sequence
aaatagagacacacaagaacccttc

SEQ ID NO: 115710 - DNA, 25 bp, Probe Sequence
gaaatagagacacacaagaaccctt

SEQ ID NO: 115711 - DNA, 25 bp, Probe Sequence
aaagaagaaatgattaaccctggag

SEQ ID NO: 115712 - DNA, 25 bp, Probe Sequence
gatgtggactcaagtggaaagaaat

SEQ ID NO: 115713 - DNA, 25 bp, Probe Sequence
tagatgtggactcaagtggaaagaa

SEQ ID NO: 115714 - DNA, 25 bp, Probe Sequence
atgtggactcaagtggaaagaaatg

SEQ ID NO: 115715 - DNA, 25 bp, Probe Sequence
gtagatgtggactcaagtggaaaga

SEQ ID NO: 115716 - DNA, 25 bp, Probe Sequence
agatgtggactcaagtggaaagaaa

SEQ ID NO: 115717 - DNA, 25 bp, Probe Sequence
aagtagatgtggactcaagtggaaa

SEQ ID NO: 115718 - DNA, 25 bp, Probe Sequence
aaagtagatgtggactcaagtggaa

SEQ ID NO: 115719 - DNA, 25 bp, Probe Sequence
agtagatgtggactcaagtggaaag

SEQ ID NO: 115720 - DNA, 25 bp, Probe Sequence
caaagtagatgtggactcaagtgga

SEQ ID NO: 115721 - DNA, 25 bp, Probe Sequence
aaaggtttctggcatttgaagtcaa

SEQ ID NO: 115722 - DNA, 25 bp, Probe Sequence
aagtggaaagaaatgcaaagagaaa

SEQ ID NO: 115723 - DNA, 25 bp, Probe Sequence
caagtggaaagaaatgcaaagagaa

SEQ ID NO: 115724 - DNA, 25 bp, Probe Sequence
tcaagtggaaagaaatgcaaagaga

SEQ ID NO: 115725 - DNA, 25 bp, Probe Sequence
gactcaagtggaaagaaatgcaaag

SEQ ID NO: 115726 - DNA, 25 bp, Probe Sequence
actcaagtggaaagaaatgcaaaga

SEQ ID NO: 115727 - DNA, 25 bp, Probe Sequence
ctcaagtggaaagaaatgcaaagag

SEQ ID NO: 115728 - DNA, 25 bp, Probe Sequence
ttcagaaaacctccaaagtagatgt

SEQ ID NO: 115729 - DNA, 25 bp, Probe Sequence
tcagaaaacctccaaagtagatgtg

SEQ ID NO: 115730 - DNA, 25 bp, Probe Sequence
ggactcaagtggaaagaaatgcaaa

SEQ ID NO: 115731 - DNA, 25 bp, Probe Sequence
cttcagaaaacctccaaagtagatg

SEQ ID NO: 115732 - DNA, 25 bp, Probe Sequence
tcttcagaaaacctccaaagtagat

SEQ ID NO: 115733 - DNA, 25 bp, Probe Sequence
aaaagtacagacagaacacaaaagg

SEQ ID NO: 115734 - DNA, 25 bp, Probe Sequence
gaaacaaaagtacagacagaacaca

SEQ ID NO: 115735 - DNA, 25 bp, Probe Sequence
tgaaacaaaagtacagacagaacac

SEQ ID NO: 115736 - DNA, 25 bp, Probe Sequence
agcagaagagagataagttgatgtc

SEQ ID NO: 115737 - DNA, 25 bp, Probe Sequence
cagaagagagataagttgatgtcca

SEQ ID NO: 115738 - DNA, 25 bp, Probe Sequence
aagcagaagagagataagttgatgt

SEQ ID NO: 115739 - DNA, 25 bp, Probe Sequence
agaggaatatgaccaggaagaagaa

SEQ ID NO: 115740 - DNA, 25 bp, Probe Sequence
aagaggaatatgaccaggaagaaga

SEQ ID NO: 115741 - DNA, 25 bp, Probe Sequence
gcagaagagagataagttgatgtcc

SEQ ID NO: 115742 - DNA, 25 bp, Probe Sequence
agaagagagataagttgatgtccat

SEQ ID NO: 115743 - DNA, 25 bp, Probe Sequence
caagcagaagagagataagttgatg

SEQ ID NO: 115744 - DNA, 25 bp, Probe Sequence
gtattacctgactgcttaaccgatg

SEQ ID NO: 115745 - DNA, 25 bp, Probe Sequence
tgtattacctgactgcttaaccgat

SEQ ID NO: 115746 - DNA, 25 bp, Probe Sequence
gagagataagttgatgtccatgaga

SEQ ID NO: 115747 - DNA, 25 bp, Probe Sequence
agagagataagttgatgtccatgag

SEQ ID NO: 115748 - DNA, 25 bp, Probe Sequence
agagataagttgatgtccatgagaa

SEQ ID NO: 115749 - DNA, 25 bp, Probe Sequence
aagagagataagttgatgtccatga

SEQ ID NO: 115750 - DNA, 25 bp, Probe Sequence
gaagagagataagttgatgtccatg

SEQ ID NO: 115751 - DNA, 25 bp, Probe Sequence
tattacctgactgcttaaccgatgg

SEQ ID NO: 115752 - DNA, 25 bp, Probe Sequence
tgacctatacagagattcatcagga

SEQ ID NO: 115753 - DNA, 25 bp, Probe Sequence
ttgacctatacagagattcatcagg

SEQ ID NO: 115754 - DNA, 25 bp, Probe Sequence
gtgtattacctgactgcttaaccga

SEQ ID NO: 115755 - DNA, 25 bp, Probe Sequence
gacctatacagagattcatcaggaa

SEQ ID NO: 115756 - DNA, 25 bp, Probe Sequence
aatggtgtattacctgactgcttaa

SEQ ID NO: 115757 - DNA, 25 bp, Probe Sequence
atggtgtattacctgactgcttaac

SEQ ID NO: 115758 - DNA, 25 bp, Probe Sequence
attgacctatacagagattcatcag

SEQ ID NO: 115759 - DNA, 25 bp, Probe Sequence
aaatgacagagaaaccagaaatgac

SEQ ID NO: 115760 - DNA, 25 bp, Probe Sequence
cagttcggtagaagagagataagtg

SEQ ID NO: 115761 - DNA, 25 bp, Probe Sequence
ttcggtagaagagagataagtgctg

SEQ ID NO: 115762 - DNA, 25 bp, Probe Sequence
gttcggtagaagagagataagtgct

SEQ ID NO: 115763 - DNA, 25 bp, Probe Sequence
agttcggtagaagagagataagtgc

SEQ ID NO: 115764 - DNA, 25 bp, Probe Sequence
gcagttcggtagaagagagataagt

SEQ ID NO: 115765 - DNA, 25 bp, Probe Sequence
tcggtagaagagagataagtgctgg

SEQ ID NO: 115766 - DNA, 25 bp, Probe Sequence
tgcagttcggtagaagagagataag

SEQ ID NO: 115767 - DNA, 25 bp, Probe Sequence
gcttaacttactctttcatccgatg

SEQ ID NO: 115768 - DNA, 25 bp, Probe Sequence
ttactctttcatccgatgtttactg

SEQ ID NO: 115769 - DNA, 25 bp, Probe Sequence
acttactctttcatccgatgtttac

SEQ ID NO: 115770 - DNA, 25 bp, Probe Sequence
tactctttcatccgatgtttactga

SEQ ID NO: 115771 - DNA, 25 bp, Probe Sequence
cttactctttcatccgatgtttact

SEQ ID NO: 115772 - DNA, 25 bp, Probe Sequence
cttaacttactctttcatccgatgt

SEQ ID NO: 115773 - DNA, 25 bp, Probe Sequence
actctttcatccgatgtttactgag

SEQ ID NO: 115774 - DNA, 25 bp, Probe Sequence
agcttaacttactctttcatccgat

SEQ ID NO: 115775 - DNA, 25 bp, Probe Sequence
cagcttaacttactctttcatccga

SEQ ID NO: 115776 - DNA, 25 bp, Probe Sequence
tcagcttaacttactctttcatccg

SEQ ID NO: 115777 - DNA, 25 bp, Probe Sequence
cctttcagcttaacttactctttca

SEQ ID NO: 115778 - DNA, 25 bp, Probe Sequence
gtcctttcagcttaacttactcttt

SEQ ID NO: 115779 - DNA, 25 bp, Probe Sequence
aacttactctttcatccgatgttta

SEQ ID NO: 115780 - DNA, 25 bp, Probe Sequence
taacttactctttcatccgatgttt

SEQ ID NO: 115781 - DNA, 25 bp, Probe Sequence
ttaacttactctttcatccgatgtt

SEQ ID NO: 115782 - DNA, 25 bp, Probe Sequence
ttcagcttaacttactctttcatcc

SEQ ID NO: 115783 - DNA, 25 bp, Probe Sequence
tcctttcagcttaacttactctttc

SEQ ID NO: 115784 - DNA, 25 bp, Probe Sequence
gaggattatgaagaggatgaggaag

SEQ ID NO: 115785 - DNA, 25 bp, Probe Sequence
agtgatgatgaagaagaggatgatg

SEQ ID NO: 115786 - DNA, 25 bp, Probe Sequence
cagtgatgatgaagaagaggatgat

SEQ ID NO: 115787 - DNA, 25 bp, Probe Sequence
aggattatgaagaggatgaggaaga

SEQ ID NO: 115788 - DNA, 25 bp, Probe Sequence
gtgatgatgaagaagaggatgatga

SEQ ID NO: 115789 - DNA, 25 bp, Probe Sequence
atgaggattatgaagaggatgagga

SEQ ID NO: 115790 - DNA, 25 bp, Probe Sequence
tgaggattatgaagaggatgaggaa

SEQ ID NO: 115791 - DNA, 25 bp, Probe Sequence
tgatgaagaagaggatgatgatgaa

SEQ ID NO: 115792 - DNA, 25 bp, Probe Sequence
tatgaagaggatgaggaagatgatg

SEQ ID NO: 115793 - DNA, 25 bp, Probe Sequence
ggattatgaagaggatgaggaagat

SEQ ID NO: 115794 - DNA, 25 bp, Probe Sequence
atgatgaagaagaggatgatgatga

SEQ ID NO: 115795 - DNA, 25 bp, Probe Sequence
tgatgatgaagaagaggatgatgat

SEQ ID NO: 115796 - DNA, 25 bp, Probe Sequence
tgaagaggatgaggaagatgatgat

SEQ ID NO: 115797 - DNA, 25 bp, Probe Sequence
atgaagaggatgaggaagatgatga

SEQ ID NO: 115798 - DNA, 25 bp, Probe Sequence
gatgatgaagaagaggatgatgatg

SEQ ID NO: 115799 - DNA, 25 bp, Probe Sequence
ttatgaagaggatgaggaagatgat

SEQ ID NO: 115800 - DNA, 25 bp, Probe Sequence
attatgaagaggatgaggaagatga

SEQ ID NO: 115801 - DNA, 25 bp, Probe Sequence
gattatgaagaggatgaggaagatg

SEQ ID NO: 115802 - DNA, 25 bp, Probe Sequence
tggagaacatgaggattatgaagag

SEQ ID NO: 115803 - DNA, 25 bp, Probe Sequence
catgaggattatgaagaggatgagg

SEQ ID NO: 115804 - DNA, 25 bp, Probe Sequence
acatgaggattatgaagaggatgag

SEQ ID NO: 115805 - DNA, 25 bp, Probe Sequence
gagaacatgaggattatgaagagga

SEQ ID NO: 115806 - DNA, 25 bp, Probe Sequence
ggagaacatgaggattatgaagagg

SEQ ID NO: 115807 - DNA, 25 bp, Probe Sequence
tgatggagaacatgaggattatgaa

SEQ ID NO: 115808 - DNA, 25 bp, Probe Sequence
ctgaaggtctccaattagatagtcc

SEQ ID NO: 115809 - DNA, 25 bp, Probe Sequence
cctgaaggtctccaattagatagtc

SEQ ID NO: 115810 - DNA, 25 bp, Probe Sequence
gcctgaaggtctccaattagatagt

SEQ ID NO: 115811 - DNA, 25 bp, Probe Sequence
tgcctgaaggtctccaattagatag

SEQ ID NO: 115812 - DNA, 25 bp, Probe Sequence
ctgcctgaaggtctccaattagata

SEQ ID NO: 115813 - DNA, 25 bp, Probe Sequence
tgaaggtctccaattagatagtcct

SEQ ID NO: 115814 - DNA, 25 bp, Probe Sequence
cttcaagaccttgttcagagtgttc

SEQ ID NO: 115815 - DNA, 25 bp, Probe Sequence
cattagtgtctgtagggttaaaggt

SEQ ID NO: 115816 - DNA, 25 bp, Probe Sequence
attagtgtctgtagggttaaaggtc

SEQ ID NO: 115817 - DNA, 25 bp, Probe Sequence
ttagtgtctgtagggttaaaggtct

SEQ ID NO: 115818 - DNA, 25 bp, Probe Sequence
ctccaattagatagtcctttcccaa

SEQ ID NO: 115819 - DNA, 25 bp, Probe Sequence
tccaattagatagtcctttcccaaa

SEQ ID NO: 115820 - DNA, 25 bp, Probe Sequence
gcattagtgtctgtagggttaaagg

SEQ ID NO: 115821 - DNA, 25 bp, Probe Sequence
ggcattagtgtctgtagggttaaag

SEQ ID NO: 115822 - DNA, 25 bp, Probe Sequence
ttcaagaccttgttcagagtgttca

SEQ ID NO: 115823 - DNA, 25 bp, Probe Sequence
gtctccaattagatagtcctttccc

SEQ ID NO: 115824 - DNA, 25 bp, Probe Sequence
ggtctccaattagatagtcctttcc

SEQ ID NO: 115825 - DNA, 25 bp, Probe Sequence
gagacaacaccagaggaatgatgac

SEQ ID NO: 115826 - DNA, 25 bp, Probe Sequence
tagtgtctgtagggttaaaggtctg

SEQ ID NO: 115827 - DNA, 25 bp, Probe Sequence
tctccaattagatagtcctttccca

SEQ ID NO: 115828 - DNA, 25 bp, Probe Sequence
aggcattagtgtctgtagggttaaa

SEQ ID NO: 115829 - DNA, 25 bp, Probe Sequence
aaggcattagtgtctgtagggttaa

SEQ ID NO: 115830 - DNA, 25 bp, Probe Sequence
tcaagaccttgttcagagtgttcag

SEQ ID NO: 115831 - DNA, 25 bp, Probe Sequence
ttcatgcttcaagaccttgttcaga

SEQ ID NO: 115832 - DNA, 25 bp, Probe Sequence
ggactatctaattggagaccttcag

SEQ ID NO: 115833 - DNA, 25 bp, Probe Sequence
gactatctaattggagaccttcagg

SEQ ID NO: 115834 - DNA, 25 bp, Probe Sequence
tatctaattggagaccttcaggcag

SEQ ID NO: 115835 - DNA, 25 bp, Probe Sequence
ctatctaattggagaccttcaggca

SEQ ID NO: 115836 - DNA, 25 bp, Probe Sequence
actatctaattggagaccttcaggc

SEQ ID NO: 115837 - DNA, 25 bp, Probe Sequence
aggactatctaattggagaccttca

SEQ ID NO: 115838 - DNA, 25 bp, Probe Sequence
gaacactctgaacaaggtcttgaag

SEQ ID NO: 115839 - DNA, 25 bp, Probe Sequence
acctttaaccctacagacactaatg

SEQ ID NO: 115840 - DNA, 25 bp, Probe Sequence
gacctttaaccctacagacactaat

SEQ ID NO: 115841 - DNA, 25 bp, Probe Sequence
agacctttaaccctacagacactaa

SEQ ID NO: 115842 - DNA, 25 bp, Probe Sequence
aatgaggaaatgaatgtaaagcact

SEQ ID NO: 115843 - DNA, 25 bp, Probe Sequence
atgaggaaatgaatgtaaagcactt

SEQ ID NO: 115844 - DNA, 25 bp, Probe Sequence
ttgggaaaggactatctaattggag

SEQ ID NO: 115845 - DNA, 25 bp, Probe Sequence
tttgggaaaggactatctaattgga

SEQ ID NO: 115846 - DNA, 25 bp, Probe Sequence
ctttaaccctacagacactaatgcc

SEQ ID NO: 115847 - DNA, 25 bp, Probe Sequence
cctttaaccctacagacactaatgc

SEQ ID NO: 115848 - DNA, 25 bp, Probe Sequence
ggaaaggactatctaattggagacc

SEQ ID NO: 115849 - DNA, 25 bp, Probe Sequence
gggaaaggactatctaattggagac

SEQ ID NO: 115850 - DNA, 25 bp, Probe Sequence
tgaacactctgaacaaggtcttgaa

SEQ ID NO: 115851 - DNA, 25 bp, Probe Sequence
cagacctttaaccctacagacacta

SEQ ID NO: 115852 - DNA, 25 bp, Probe Sequence
gtcatcattcctctggtgttgtctc

SEQ ID NO: 115853 - DNA, 25 bp, Probe Sequence
tgaggaaatgaatgtaaagcactta

SEQ ID NO: 115854 - DNA, 25 bp, Probe Sequence
tgggaaaggactatctaattggaga

SEQ ID NO: 115855 - DNA, 25 bp, Probe Sequence
aaatgaggaaatgaatgtaaagcac

SEQ ID NO: 115856 - DNA, 25 bp, Probe Sequence
ggatgataatctcaagacacctgcc

SEQ ID NO: 115857 - DNA, 25 bp, Probe Sequence
gatgataatctcaagacacctgccg

SEQ ID NO: 115858 - DNA, 25 bp, Probe Sequence
atgataatctcaagacacctgccga

SEQ ID NO: 115859 - DNA, 25 bp, Probe Sequence
gataatctcaagacacctgccgagt

SEQ ID NO: 115860 - DNA, 25 bp, Probe Sequence
tgataatctcaagacacctgccgag

SEQ ID NO: 115861 - DNA, 25 bp, Probe Sequence
ataatctcaagacacctgccgagtg

SEQ ID NO: 115862 - DNA, 25 bp, Probe Sequence
aatctcaagacacctcctgagtgtg

SEQ ID NO: 115863 - DNA, 25 bp, Probe Sequence
atctcaagacacctcctgagtgtgt

SEQ ID NO: 115864 - DNA, 25 bp, Probe Sequence
gtcacaaagaaagtcaaccatcatt

SEQ ID NO: 115865 - DNA, 25 bp, Probe Sequence
acaaagaaagtcaaccatcattaca

SEQ ID NO: 115866 - DNA, 25 bp, Probe Sequence
cacaaagaaagtcaaccatcattac

SEQ ID NO: 115867 - DNA, 25 bp, Probe Sequence
tcacaaagaaagtcaaccatcatta

SEQ ID NO: 115868 - DNA, 25 bp, Probe Sequence
gcaataagaagaaatctgtgagtgg

SEQ ID NO: 115869 - DNA, 25 bp, Probe Sequence
ggcaataagaagaaatctgtgagtg

SEQ ID NO: 115870 - DNA, 25 bp, Probe Sequence
gggcaataagaagaaatctgtgagt

SEQ ID NO: 115871 - DNA, 25 bp, Probe Sequence
tgggcaataagaagaaatctgtgag

SEQ ID NO: 115872 - DNA, 25 bp, Probe Sequence
ctgggcaataagaagaaatctgtga

SEQ ID NO: 115873 - DNA, 25 bp, Probe Sequence
ataagaagaaatctgtgagtggaac

SEQ ID NO: 115874 - DNA, 25 bp, Probe Sequence
caataagaagaaatctgtgagtgga

SEQ ID NO: 115875 - DNA, 25 bp, Probe Sequence
tgaaagaaatacacacctacaagaa

SEQ ID NO: 115876 - DNA, 25 bp, Probe Sequence
caaagaaagtcaaccatcattacaa

SEQ ID NO: 115877 - DNA, 25 bp, Probe Sequence
ccaaagaacacctgaggaaactaag

SEQ ID NO: 115878 - DNA, 25 bp, Probe Sequence
taagaagaaatctgtgagtggaaca

SEQ ID NO: 115879 - DNA, 25 bp, Probe Sequence
atgaaagaaatacacacctacaaga

SEQ ID NO: 115880 - DNA, 25 bp, Probe Sequence
agaagaaatctgtgagtggaacaaa

SEQ ID NO: 115881 - DNA, 25 bp, Probe Sequence
aagaagaaatctgtgagtggaacaa

SEQ ID NO: 115882 - DNA, 25 bp, Probe Sequence
ctgaggaaactaagcatgaaagaat

SEQ ID NO: 115883 - DNA, 25 bp, Probe Sequence
aaactaagcatgaaagaatgtgagc

SEQ ID NO: 115884 - DNA, 25 bp, Probe Sequence
ggaaactaagcatgaaagaatgtga

SEQ ID NO: 115885 - DNA, 25 bp, Probe Sequence
aggaaactaagcatgaaagaatgtg

SEQ ID NO: 115886 - DNA, 25 bp, Probe Sequence
gaggaaactaagcatgaaagaatgt

SEQ ID NO: 115887 - DNA, 25 bp, Probe Sequence
tgaggaaactaagcatgaaagaatg

SEQ ID NO: 115888 - DNA, 25 bp, Probe Sequence
taatgaaacttcctttccagggagg

SEQ ID NO: 115889 - DNA, 25 bp, Probe Sequence
gagcatcttattttgtttaaaggca

SEQ ID NO: 115890 - DNA, 25 bp, Probe Sequence
agagcatcttattttgtttaaaggc

SEQ ID NO: 115891 - DNA, 25 bp, Probe Sequence
agcatcttattttgtttaaaggcaa

SEQ ID NO: 115892 - DNA, 25 bp, Probe Sequence
gcatcttattttgtttaaaggcaag

SEQ ID NO: 115893 - DNA, 25 bp, Probe Sequence
tctgagagcatcttattttgtttaa

SEQ ID NO: 115894 - DNA, 25 bp, Probe Sequence
ctctgagagcatcttattttgttta

SEQ ID NO: 115895 - DNA, 25 bp, Probe Sequence
gagagcatcttattttgtttaaagg

SEQ ID NO: 115896 - DNA, 25 bp, Probe Sequence
tgagagcatcttattttgtttaaag

SEQ ID NO: 115897 - DNA, 25 bp, Probe Sequence
ctgagagcatcttattttgtttaaa

SEQ ID NO: 115898 - DNA, 25 bp, Probe Sequence
aatgaaacttcctttccagggagga

SEQ ID NO: 115899 - DNA, 25 bp, Probe Sequence
catcttattttgtttaaaggcaaga

SEQ ID NO: 115900 - DNA, 25 bp, Probe Sequence
tcttattttgtttaaaggcaagaaa

SEQ ID NO: 115901 - DNA, 25 bp, Probe Sequence
atcttattttgtttaaaggcaagaa

SEQ ID NO: 115902 - DNA, 25 bp, Probe Sequence
cttattttgtttaaaggcaagaaat

SEQ ID NO: 115903 - DNA, 25 bp, Probe Sequence
ggcaagaaataaaatttccttttgt

SEQ ID NO: 115904 - DNA, 25 bp, Probe Sequence
aggcaagaaataaaatttccttttg

SEQ ID NO: 115905 - DNA, 25 bp, Probe Sequence
ttttgtttaaaggcaagaaataaaa

SEQ ID NO: 115906 - DNA, 25 bp, Probe Sequence
gtaccctgagaactcagagcagttg

SEQ ID NO: 115907 - DNA, 25 bp, Probe Sequence
gcaagaaataaaatttccttttgtg

SEQ ID NO: 115908 - DNA, 25 bp, Probe Sequence
tgtaccctgagaactcagagcagtt

SEQ ID NO: 115909 - DNA, 25 bp, Probe Sequence
aaggcaagaaataaaatttcctttt

SEQ ID NO: 115910 - DNA, 25 bp, Probe Sequence
caagaaataaaatttccttttgtgg

SEQ ID NO: 115911 - DNA, 25 bp, Probe Sequence
taaaggcaagaaataaaatttcctt

SEQ ID NO: 115912 - DNA, 25 bp, Probe Sequence
gccagttaattcattctcagccaat

SEQ ID NO: 115913 - DNA, 25 bp, Probe Sequence
ccagttaattcattctcagccaatg

SEQ ID NO: 115914 - DNA, 25 bp, Probe Sequence
taaacttgaagtggttgtgttgtag

SEQ ID NO: 115915 - DNA, 25 bp, Probe Sequence
ataaacttgaagtggttgtgttgta

SEQ ID NO: 115916 - DNA, 25 bp, Probe Sequence
tataaacttgaagtggttgtgttgt

SEQ ID NO: 115917 - DNA, 25 bp, Probe Sequence
tgtataaacttgaagtggttgtgtt

SEQ ID NO: 115918 - DNA, 25 bp, Probe Sequence
ctcagccaatgaaggtttgtctaag

SEQ ID NO: 115919 - DNA, 25 bp, Probe Sequence
gtataaacttgaagtggttgtgttg

SEQ ID NO: 115920 - DNA, 25 bp, Probe Sequence
atgtataaacttgaagtggttgtgt

SEQ ID NO: 115921 - DNA, 25 bp, Probe Sequence
tctcagccaatgaaggtttgtctaa

SEQ ID NO: 115922 - DNA, 25 bp, Probe Sequence
ttctcagccaatgaaggtttgtcta

SEQ ID NO: 115923 - DNA, 25 bp, Probe Sequence
ccctcagactttgtccatgtataaa

SEQ ID NO: 115924 - DNA, 25 bp, Probe Sequence
catgtataaacttgaagtggttgtg

SEQ ID NO: 115925 - DNA, 25 bp, Probe Sequence
cctcagactttgtccatgtataaac

SEQ ID NO: 115926 - DNA, 25 bp, Probe Sequence
aaacttgaagtggttgtgttgtagg

SEQ ID NO: 115927 - DNA, 25 bp, Probe Sequence
tccctcagactttgtccatgtataa

SEQ ID NO: 115928 - DNA, 25 bp, Probe Sequence
ctccctcagactttgtccatgtata

SEQ ID NO: 115929 - DNA, 25 bp, Probe Sequence
ctcagactttgtccatgtataaact

SEQ ID NO: 115930 - DNA, 25 bp, Probe Sequence
tgtccatgtataaacttgaagtggt

SEQ ID NO: 115931 - DNA, 25 bp, Probe Sequence
ccatgtataaacttgaagtggttgt

SEQ ID NO: 115932 - DNA, 25 bp, Probe Sequence
attctcagccaatgaaggtttgtct

SEQ ID NO: 115933 - DNA, 25 bp, Probe Sequence
tccatgtataaacttgaagtggttg

SEQ ID NO: 115934 - DNA, 25 bp, Probe Sequence
gtccatgtataaacttgaagtggtt

SEQ ID NO: 115935 - DNA, 25 bp, Probe Sequence
ttgtccatgtataaacttgaagtgg

SEQ ID NO: 115936 - DNA, 25 bp, Probe Sequence
ataaagcatatgtgttggcttgttg

SEQ ID NO: 115937 - DNA, 25 bp, Probe Sequence
taaagcatatgtgttggcttgttgt

SEQ ID NO: 115938 - DNA, 25 bp, Probe Sequence
ctggctaacattgctatattgaaca

SEQ ID NO: 115939 - DNA, 25 bp, Probe Sequence
gctggctaacattgctatattgaac

SEQ ID NO: 115940 - DNA, 25 bp, Probe Sequence
gaacagaagaggacttaggagagat

SEQ ID NO: 115941 - DNA, 25 bp, Probe Sequence
tgaagatgagatgttctatgtggat

SEQ ID NO: 115942 - DNA, 25 bp, Probe Sequence
atgaagatgagatgttctatgtgga

SEQ ID NO: 115943 - DNA, 25 bp, Probe Sequence
ggctggctaacattgctatattgaa

SEQ ID NO: 115944 - DNA, 25 bp, Probe Sequence
gatgaagatgagatgttctatgtgg

SEQ ID NO: 115945 - DNA, 25 bp, Probe Sequence
ttgaacaacaacttgaataccttga

SEQ ID NO: 115946 - DNA, 25 bp, Probe Sequence
tgaacaacaacttgaataccttgat

SEQ ID NO: 115947 - DNA, 25 bp, Probe Sequence
tggctaacattgctatattgaacaa

SEQ ID NO: 115948 - DNA, 25 bp, Probe Sequence
ggctaacattgctatattgaacaac

SEQ ID NO: 115949 - DNA, 25 bp, Probe Sequence
gctctgtccttatccattacctcaa

SEQ ID NO: 115950 - DNA, 25 bp, Probe Sequence
tgatgaagatgagatgttctatgtg

SEQ ID NO: 115951 - DNA, 25 bp, Probe Sequence
tgaagacagaatgttccatatcaga

SEQ ID NO: 115952 - DNA, 25 bp, Probe Sequence
aacagaagaggacttaggagagatc

SEQ ID NO: 115953 - DNA, 25 bp, Probe Sequence
aagacagaatgttccatatcagagc

SEQ ID NO: 115954 - DNA, 25 bp, Probe Sequence
caacaacttgaataccttgatccag

SEQ ID NO: 115955 - DNA, 25 bp, Probe Sequence
aacaacaacttgaataccttgatcc

SEQ ID NO: 115956 - DNA, 25 bp, Probe Sequence
attgaacaacaacttgaataccttg

SEQ ID NO: 115957 - DNA, 25 bp, Probe Sequence
ctgaacagaagaggacttaggagag

SEQ ID NO: 115958 - DNA, 25 bp, Probe Sequence
tgaacagaagaggacttaggagaga

SEQ ID NO: 115959 - DNA, 25 bp, Probe Sequence
acaacaacttgaataccttgatcca

SEQ ID NO: 115960 - DNA, 25 bp, Probe Sequence
cctgaagacagaatgttccatatca

SEQ ID NO: 115961 - DNA, 25 bp, Probe Sequence
gaagacagaatgttccatatcagag

SEQ ID NO: 115962 - DNA, 25 bp, Probe Sequence
gataatctcaagacacctcccttag

SEQ ID NO: 115963 - DNA, 25 bp, Probe Sequence
tgataatctcaagacacctccctta

SEQ ID NO: 115964 - DNA, 25 bp, Probe Sequence
atgataatctcaagacacctccctt

SEQ ID NO: 115965 - DNA, 25 bp, Probe Sequence
ataatctcaagacacctcccttagc

SEQ ID NO: 115966 - DNA, 25 bp, Probe Sequence
gatgataatctcaagacacctccct

SEQ ID NO: 115967 - DNA, 25 bp, Probe Sequence
actcaagcctgagcaataagaataa

SEQ ID NO: 115968 - DNA, 25 bp, Probe Sequence
cctgagcaataagaataaaaccgag

SEQ ID NO: 115969 - DNA, 25 bp, Probe Sequence
aagcctgagcaataagaataaaacc

SEQ ID NO: 115970 - DNA, 25 bp, Probe Sequence
ctgagcaataagaataaaaccgagt

SEQ ID NO: 115971 - DNA, 25 bp, Probe Sequence
cactcaagcctgagcaataagaata

SEQ ID NO: 115972 - DNA, 25 bp, Probe Sequence
caagcctgagcaataagaataaaac

SEQ ID NO: 115973 - DNA, 25 bp, Probe Sequence
gcctgagcaataagaataaaaccga

SEQ ID NO: 115974 - DNA, 25 bp, Probe Sequence
agcctgagcaataagaataaaaccg

SEQ ID NO: 115975 - DNA, 25 bp, Probe Sequence
tgagcaataagaataaaaccgagta

SEQ ID NO: 115976 - DNA, 25 bp, Probe Sequence
tcaagcctgagcaataagaataaaa

SEQ ID NO: 115977 - DNA, 25 bp, Probe Sequence
agcaataagaataaaaccgagtaga

SEQ ID NO: 115978 - DNA, 25 bp, Probe Sequence
gagcaataagaataaaaccgagtag

SEQ ID NO: 115979 - DNA, 25 bp, Probe Sequence
gcaataagaataaaaccgagtagaa

SEQ ID NO: 115980 - DNA, 25 bp, Probe Sequence
aagaataaaaccgagtagaacaaaa

SEQ ID NO: 115981 - DNA, 25 bp, Probe Sequence
ctcaagcctgagcaataagaataaa

SEQ ID NO: 115982 - DNA, 25 bp, Probe Sequence
aatctcaagacacctcccttagcta

SEQ ID NO: 115983 - DNA, 25 bp, Probe Sequence
agaataaaaccgagtagaacaaaat

SEQ ID NO: 115984 - DNA, 25 bp, Probe Sequence
atctcaagacacctcccttagctac

SEQ ID NO: 115985 - DNA, 25 bp, Probe Sequence
taagaataaaaccgagtagaacaaa

SEQ ID NO: 115986 - DNA, 25 bp, Probe Sequence
aggactcctccaaaattacgtggac

SEQ ID NO: 115987 - DNA, 25 bp, Probe Sequence
caggactcctccaaaattacgtgga

SEQ ID NO: 115988 - DNA, 25 bp, Probe Sequence
ctcctccaaaattacgtggaccgta

SEQ ID NO: 115989 - DNA, 25 bp, Probe Sequence
tcctccaaaattacgtggaccgtac

SEQ ID NO: 115990 - DNA, 25 bp, Probe Sequence
ggactcctccaaaattacgtggacc

SEQ ID NO: 115991 - DNA, 25 bp, Probe Sequence
ctaaggatgaagccaaggaagagtc

SEQ ID NO: 115992 - DNA, 25 bp, Probe Sequence
ttccaggctttaggtatcatcacta

SEQ ID NO: 115993 - DNA, 25 bp, Probe Sequence
tttccaggctttaggtatcatcact

SEQ ID NO: 115994 - DNA, 25 bp, Probe Sequence
aactacttccttaagatcatccagc

SEQ ID NO: 115995 - DNA, 25 bp, Probe Sequence
agacaatgtgaactccaagcagatg

SEQ ID NO: 115996 - DNA, 25 bp, Probe Sequence
cagacaatgtgaactccaagcagat

SEQ ID NO: 115997 - DNA, 25 bp, Probe Sequence
actacttccttaagatcatccagct

SEQ ID NO: 115998 - DNA, 25 bp, Probe Sequence
acttccttaagatcatccagctatt

SEQ ID NO: 115999 - DNA, 25 bp, Probe Sequence
ctacttccttaagatcatccagcta

SEQ ID NO: 116000 - DNA, 25 bp, Probe Sequence
aacctcacctctcttcactcttcag

SEQ ID NO: 116001 - DNA, 25 bp, Probe Sequence
cttccttaagatcatccagctattg

SEQ ID NO: 116002 - DNA, 25 bp, Probe Sequence
caactacttccttaagatcatccag

SEQ ID NO: 116003 - DNA, 25 bp, Probe Sequence
atatgggattgggtctctttgacta

SEQ ID NO: 116004 - DNA, 25 bp, Probe Sequence
tccaggctttaggtatcatcactaa

SEQ ID NO: 116005 - DNA, 25 bp, Probe Sequence
tatgggattgggtctctttgactaa

SEQ ID NO: 116006 - DNA, 25 bp, Probe Sequence
tacttccttaagatcatccagctat

SEQ ID NO: 116007 - DNA, 25 bp, Probe Sequence
caacctcacctctcttcactcttca

SEQ ID NO: 116008 - DNA, 25 bp, Probe Sequence
atgggattgggtctctttgactaat

SEQ ID NO: 116009 - DNA, 25 bp, Probe Sequence
gagactgatgacaacttcctgcttg

SEQ ID NO: 116010 - DNA, 25 bp, Probe Sequence
ctttgaaacgaggcagaattgagtt

SEQ ID NO: 116011 - DNA, 25 bp, Probe Sequence
ctcatggaagtgacatcgtctttaa

SEQ ID NO: 116012 - DNA, 25 bp, Probe Sequence
gatatgggattgggtctctttgact

SEQ ID NO: 116013 - DNA, 25 bp, Probe Sequence
aggatatgggattgggtctctttga

SEQ ID NO: 116014 - DNA, 25 bp, Probe Sequence
gctattggatgattatctgaaatgt

SEQ ID NO: 116015 - DNA, 25 bp, Probe Sequence
taacaacattacaggaagagaggag

SEQ ID NO: 116016 - DNA, 25 bp, Probe Sequence
gattattgtcctggctctgttatga

SEQ ID NO: 116017 - DNA, 25 bp, Probe Sequence
aacattacaggaagagaggagagaa

SEQ ID NO: 116018 - DNA, 25 bp, Probe Sequence
tgattattgtcctggctctgttatg

SEQ ID NO: 116019 - DNA, 25 bp, Probe Sequence
gtgattattgtcctggctctgttat

SEQ ID NO: 116020 - DNA, 25 bp, Probe Sequence
aacaacattacaggaagagaggaga

SEQ ID NO: 116021 - DNA, 25 bp, Probe Sequence
agtgtcttctatgatgagatggatg

SEQ ID NO: 116022 - DNA, 25 bp, Probe Sequence
cagtgtcttctatgatgagatggat

SEQ ID NO: 116023 - DNA, 25 bp, Probe Sequence
caacattacaggaagagaggagaga

SEQ ID NO: 116024 - DNA, 25 bp, Probe Sequence
acaacattacaggaagagaggagag

SEQ ID NO: 116025 - DNA, 25 bp, Probe Sequence
gtgtcttctatgatgagatggatgc

SEQ ID NO: 116026 - DNA, 25 bp, Probe Sequence
caccagtgtcttctatgatgagatg

SEQ ID NO: 116027 - DNA, 25 bp, Probe Sequence
tgtgattattgtcctggctctgtta

SEQ ID NO: 116028 - DNA, 25 bp, Probe Sequence
attattgtcctggctctgttatgac

SEQ ID NO: 116029 - DNA, 25 bp, Probe Sequence
tattgtcctggctctgttatgacta

SEQ ID NO: 116030 - DNA, 25 bp, Probe Sequence
atgtgattattgtcctggctctgtt

SEQ ID NO: 116031 - DNA, 25 bp, Probe Sequence
tgtcttctatgatgagatggatgcc

SEQ ID NO: 116032 - DNA, 25 bp, Probe Sequence
cttcctgccttcagtaacaacatta

SEQ ID NO: 116033 - DNA, 25 bp, Probe Sequence
gtaacaacattacaggaagagagga

SEQ ID NO: 116034 - DNA, 25 bp, Probe Sequence
agtaacaacattacaggaagagagg

SEQ ID NO: 116035 - DNA, 25 bp, Probe Sequence
tgtcctggctctgttatgactaatt

SEQ ID NO: 116036 - DNA, 25 bp, Probe Sequence
ttgtcctggctctgttatgactaat

SEQ ID NO: 116037 - DNA, 25 bp, Probe Sequence
attgtcctggctctgttatgactaa

SEQ ID NO: 116038 - DNA, 25 bp, Probe Sequence
ttattgtcctggctctgttatgact

SEQ ID NO: 116039 - DNA, 25 bp, Probe Sequence
atgctggtggtggaatgtaactcaa

SEQ ID NO: 116040 - DNA, 25 bp, Probe Sequence
gatgctggtggtggaatgtaactca

SEQ ID NO: 116041 - DNA, 25 bp, Probe Sequence
tgatgctggtggtggaatgtaactc

SEQ ID NO: 116042 - DNA, 25 bp, Probe Sequence
ggtggtggaatgtaactcaaaactg

SEQ ID NO: 116043 - DNA, 25 bp, Probe Sequence
ctggtggtggaatgtaactcaaaac

SEQ ID NO: 116044 - DNA, 25 bp, Probe Sequence
gtgatgctggtggtggaatgtaact

SEQ ID NO: 116045 - DNA, 25 bp, Probe Sequence
ctgtgatgctggtggtggaatgtaa

SEQ ID NO: 116046 - DNA, 25 bp, Probe Sequence
taacaataaactgtagaggaatctg

SEQ ID NO: 116047 - DNA, 25 bp, Probe Sequence
tggtggtggaatgtaactcaaaact

SEQ ID NO: 116048 - DNA, 25 bp, Probe Sequence
tgctggtggtggaatgtaactcaaa

SEQ ID NO: 116049 - DNA, 25 bp, Probe Sequence
gctggtggtggaatgtaactcaaaa

SEQ ID NO: 116050 - DNA, 25 bp, Probe Sequence
ttcaagcctgttatattcagtgtgt

SEQ ID NO: 116051 - DNA, 25 bp, Probe Sequence
tcaagcctgttatattcagtgtgtg

SEQ ID NO: 116052 - DNA, 25 bp, Probe Sequence
gttggaggtttgctttatttgagaa

SEQ ID NO: 116053 - DNA, 25 bp, Probe Sequence
ttgttggaggtttgctttatttgag

SEQ ID NO: 116054 - DNA, 25 bp, Probe Sequence
cttgttggaggtttgctttatttga

SEQ ID NO: 116055 - DNA, 25 bp, Probe Sequence
ttggaggtttgctttatttgagaag

SEQ ID NO: 116056 - DNA, 25 bp, Probe Sequence
gaggtttgctttatttgagaaggaa

SEQ ID NO: 116057 - DNA, 25 bp, Probe Sequence
tgttggaggtttgctttatttgaga

SEQ ID NO: 116058 - DNA, 25 bp, Probe Sequence
ggtttgctttatttgagaaggaaca

SEQ ID NO: 116059 - DNA, 25 bp, Probe Sequence
aggtttgctttatttgagaaggaac

SEQ ID NO: 116060 - DNA, 25 bp, Probe Sequence
tgccacaggattgaaataaatgaca

SEQ ID NO: 116061 - DNA, 25 bp, Probe Sequence
ggtgtctctggtatagtctttgcta

SEQ ID NO: 116062 - DNA, 25 bp, Probe Sequence
gccacaggattgaaataaatgacaa

SEQ ID NO: 116063 - DNA, 25 bp, Probe Sequence
gtgccacaggattgaaataaatgac

SEQ ID NO: 116064 - DNA, 25 bp, Probe Sequence
caagcctgttatattcagtgtgtgc

SEQ ID NO: 116065 - DNA, 25 bp, Probe Sequence
tatttgagaaggaacaacttggagt

SEQ ID NO: 116066 - DNA, 25 bp, Probe Sequence
tgctttatttgagaaggaacaactt

SEQ ID NO: 116067 - DNA, 25 bp, Probe Sequence
ttgctttatttgagaaggaacaact

SEQ ID NO: 116068 - DNA, 25 bp, Probe Sequence
ggaggtttgctttatttgagaagga

SEQ ID NO: 116069 - DNA, 25 bp, Probe Sequence
ttatttgagaaggaacaacttggag

SEQ ID NO: 116070 - DNA, 25 bp, Probe Sequence
gctttatttgagaaggaacaacttg

SEQ ID NO: 116071 - DNA, 25 bp, Probe Sequence
tggaggtttgctttatttgagaagg

SEQ ID NO: 116072 - DNA, 25 bp, Probe Sequence
tttatttgagaaggaacaacttgga

SEQ ID NO: 116073 - DNA, 25 bp, Probe Sequence
gcttgttggaggtttgctttatttg

SEQ ID NO: 116074 - DNA, 25 bp, Probe Sequence
tatgttattcaagtcttctggagcc

SEQ ID NO: 116075 - DNA, 25 bp, Probe Sequence
ttatgttattcaagtcttctggagc

SEQ ID NO: 116076 - DNA, 25 bp, Probe Sequence
atgttattcaagtcttctggagcct

SEQ ID NO: 116077 - DNA, 25 bp, Probe Sequence
atggtctattgctgtattcagtgtt

SEQ ID NO: 116078 - DNA, 25 bp, Probe Sequence
gtctattgctgtattcagtgttcac

SEQ ID NO: 116079 - DNA, 25 bp, Probe Sequence
agatggtctattgctgtattcagtg

SEQ ID NO: 116080 - DNA, 25 bp, Probe Sequence
tgttattcaagtcttctggagcctt

SEQ ID NO: 116081 - DNA, 25 bp, Probe Sequence
gatggtctattgctgtattcagtgt

SEQ ID NO: 116082 - DNA, 25 bp, Probe Sequence
ggtctattgctgtattcagtgttca

SEQ ID NO: 116083 - DNA, 25 bp, Probe Sequence
tggtctattgctgtattcagtgttc

SEQ ID NO: 116084 - DNA, 25 bp, Probe Sequence
tagatggtctattgctgtattcagt

SEQ ID NO: 116085 - DNA, 25 bp, Probe Sequence
tctattgctgtattcagtgttcact

SEQ ID NO: 116086 - DNA, 25 bp, Probe Sequence
ctattgctgtattcagtgttcactt

SEQ ID NO: 116087 - DNA, 25 bp, Probe Sequence
ctagatggtctattgctgtattcag

SEQ ID NO: 116088 - DNA, 25 bp, Probe Sequence
gtcattccctcttaactactgcttt

SEQ ID NO: 116089 - DNA, 25 bp, Probe Sequence
tcattccctcttaactactgcttta

SEQ ID NO: 116090 - DNA, 25 bp, Probe Sequence
ggctattgatttgagacctttcttg

SEQ ID NO: 116091 - DNA, 25 bp, Probe Sequence
ttattcaagtcttctggagcctttc

SEQ ID NO: 116092 - DNA, 25 bp, Probe Sequence
gctattgatttgagacctttcttgt

SEQ ID NO: 116093 - DNA, 25 bp, Probe Sequence
cattccctcttaactactgctttag

SEQ ID NO: 116094 - DNA, 25 bp, Probe Sequence
gttattcaagtcttctggagccttt

SEQ ID NO: 116095 - DNA, 25 bp, Probe Sequence
tcaaagattgtgttatgttgcgttt

SEQ ID NO: 116096 - DNA, 25 bp, Probe Sequence
ctttgtttggcttactttgagtttg

SEQ ID NO: 116097 - DNA, 25 bp, Probe Sequence
tctttgtttggcttactttgagttt

SEQ ID NO: 116098 - DNA, 25 bp, Probe Sequence
gagtgccatagccttgaatctaatt

SEQ ID NO: 116099 - DNA, 25 bp, Probe Sequence
tgaagcattctcctggttctaagta

SEQ ID NO: 116100 - DNA, 25 bp, Probe Sequence
ctcctccttcaagtacacagataac

SEQ ID NO: 116101 - DNA, 25 bp, Probe Sequence
tctcctccttcaagtacacagataa

SEQ ID NO: 116102 - DNA, 25 bp, Probe Sequence
ttctcctccttcaagtacacagata

SEQ ID NO: 116103 - DNA, 25 bp, Probe Sequence
gtgccatagccttgaatctaattac

SEQ ID NO: 116104 - DNA, 25 bp, Probe Sequence
agtgccatagccttgaatctaatta

SEQ ID NO: 116105 - DNA, 25 bp, Probe Sequence
gaagcattctcctggttctaagtac

SEQ ID NO: 116106 - DNA, 25 bp, Probe Sequence
gccatagccttgaatctaattacct

SEQ ID NO: 116107 - DNA, 25 bp, Probe Sequence
tgccatagccttgaatctaattacc

SEQ ID NO: 116108 - DNA, 25 bp, Probe Sequence
aagcattctcctggttctaagtaca

SEQ ID NO: 116109 - DNA, 25 bp, Probe Sequence
tcctccttcaagtacacagataact

SEQ ID NO: 116110 - DNA, 25 bp, Probe Sequence
cctccttcaagtacacagataacta

SEQ ID NO: 116111 - DNA, 25 bp, Probe Sequence
agtgaagcattctcctggttctaag

SEQ ID NO: 116112 - DNA, 25 bp, Probe Sequence
ggagtgccatagccttgaatctaat

SEQ ID NO: 116113 - DNA, 25 bp, Probe Sequence
ctcctggttctaagtacagttcatt

SEQ ID NO: 116114 - DNA, 25 bp, Probe Sequence
cattctcctggttctaagtacagtt

SEQ ID NO: 116115 - DNA, 25 bp, Probe Sequence
attctcctggttctaagtacagttc

SEQ ID NO: 116116 - DNA, 25 bp, Probe Sequence
tctcctggttctaagtacagttcat

SEQ ID NO: 116117 - DNA, 25 bp, Probe Sequence
ctggttctaagtacagttcattagc

SEQ ID NO: 116118 - DNA, 25 bp, Probe Sequence
ttctcctggttctaagtacagttca

SEQ ID NO: 116119 - DNA, 25 bp, Probe Sequence
tcctggttctaagtacagttcatta

SEQ ID NO: 116120 - DNA, 25 bp, Probe Sequence
gtgaagcattctcctggttctaagt

SEQ ID NO: 116121 - DNA, 25 bp, Probe Sequence
cctggttctaagtacagttcattag

SEQ ID NO: 116122 - DNA, 25 bp, Probe Sequence
tatgttccttatgtgtgatcgagag

SEQ ID NO: 116123 - DNA, 25 bp, Probe Sequence
atatgttccttatgtgtgatcgaga

SEQ ID NO: 116124 - DNA, 25 bp, Probe Sequence
atgttccttatgtgtgatcgagagc

SEQ ID NO: 116125 - DNA, 25 bp, Probe Sequence
catatgttccttatgtgtgatcgag

SEQ ID NO: 116126 - DNA, 25 bp, Probe Sequence
ttatgtgtgatcgagagccattcag

SEQ ID NO: 116127 - DNA, 25 bp, Probe Sequence
cttatgtgtgatcgagagccattca

SEQ ID NO: 116128 - DNA, 25 bp, Probe Sequence
ccttatgtgtgatcgagagccattc

SEQ ID NO: 116129 - DNA, 25 bp, Probe Sequence
tatgtgtgatcgagagccattcaga

SEQ ID NO: 116130 - DNA, 25 bp, Probe Sequence
tccttatgtgtgatcgagagccatt

SEQ ID NO: 116131 - DNA, 25 bp, Probe Sequence
ttccttatgtgtgatcgagagccat

SEQ ID NO: 116132 - DNA, 25 bp, Probe Sequence
atgtgtgatcgagagccattcagaa

SEQ ID NO: 116133 - DNA, 25 bp, Probe Sequence
gttccttatgtgtgatcgagagcca

SEQ ID NO: 116134 - DNA, 25 bp, Probe Sequence
tgttccttatgtgtgatcgagagcc

SEQ ID NO: 116135 - DNA, 25 bp, Probe Sequence
atcgagagccattcagaaaagactt

SEQ ID NO: 116136 - DNA, 25 bp, Probe Sequence
gatcgagagccattcagaaaagact

SEQ ID NO: 116137 - DNA, 25 bp, Probe Sequence
cgagagccattcagaaaagacttcc

SEQ ID NO: 116138 - DNA, 25 bp, Probe Sequence
tcgagagccattcagaaaagacttc

SEQ ID NO: 116139 - DNA, 25 bp, Probe Sequence
tgtgtgatcgagagccattcagaaa

SEQ ID NO: 116140 - DNA, 25 bp, Probe Sequence
tgatcgagagccattcagaaaagac

SEQ ID NO: 116141 - DNA, 25 bp, Probe Sequence
gtgatcgagagccattcagaaaaga

SEQ ID NO: 116142 - DNA, 25 bp, Probe Sequence
tgtgatcgagagccattcagaaaag

SEQ ID NO: 116143 - DNA, 25 bp, Probe Sequence
gtgtgatcgagagccattcagaaaa

SEQ ID NO: 116144 - DNA, 25 bp, Probe Sequence
agaggagagagacattcagacagag

SEQ ID NO: 116145 - DNA, 25 bp, Probe Sequence
gaagatagacaagaggcacacagag

SEQ ID NO: 116146 - DNA, 25 bp, Probe Sequence
cagaggagagagacattcagacaga

SEQ ID NO: 116147 - DNA, 25 bp, Probe Sequence
gaatgactgggaagatagacaagag

SEQ ID NO: 116148 - DNA, 25 bp, Probe Sequence
ctgaatgactgggaagatagacaag

SEQ ID NO: 116149 - DNA, 25 bp, Probe Sequence
aagatagacaagaggcacacagaga

SEQ ID NO: 116150 - DNA, 25 bp, Probe Sequence
tgaatgactgggaagatagacaaga

SEQ ID NO: 116151 - DNA, 25 bp, Probe Sequence
ggagagagacattcagacagaggaa

SEQ ID NO: 116152 - DNA, 25 bp, Probe Sequence
tctgaatgactgggaagatagacaa

SEQ ID NO: 116153 - DNA, 25 bp, Probe Sequence
aatgactgggaagatagacaagagg

SEQ ID NO: 116154 - DNA, 25 bp, Probe Sequence
agagagacattcagacagaggaaag

SEQ ID NO: 116155 - DNA, 25 bp, Probe Sequence
gagagagacattcagacagaggaaa

SEQ ID NO: 116156 - DNA, 25 bp, Probe Sequence
gaggagagagacattcagacagagg

SEQ ID NO: 116157 - DNA, 25 bp, Probe Sequence
gagagacattcagacagaggaaagt

SEQ ID NO: 116158 - DNA, 25 bp, Probe Sequence
agatagacaagaggcacacagagac

SEQ ID NO: 116159 - DNA, 25 bp, Probe Sequence
aggagagagacattcagacagagga

SEQ ID NO: 116160 - DNA, 25 bp, Probe Sequence
ccagaggagagagacattcagacag

SEQ ID NO: 116161 - DNA, 25 bp, Probe Sequence
atagacaagaggcacacagagacag

SEQ ID NO: 116162 - DNA, 25 bp, Probe Sequence
gatagacaagaggcacacagagaca

SEQ ID NO: 116163 - DNA, 25 bp, Probe Sequence
ggaagatagacaagaggcacacaga

SEQ ID NO: 116164 - DNA, 25 bp, Probe Sequence
tttggtctgaatgactgggaagata

SEQ ID NO: 116165 - DNA, 25 bp, Probe Sequence
agagacattcagacagaggaaagtc

SEQ ID NO: 116166 - DNA, 25 bp, Probe Sequence
ttggtctgaatgactgggaagatag

SEQ ID NO: 116167 - DNA, 25 bp, Probe Sequence
tggtctgaatgactgggaagataga

SEQ ID NO: 116168 - DNA, 25 bp, Probe Sequence
gtctgtggaggtgcttatgttcaaa

SEQ ID NO: 116169 - DNA, 25 bp, Probe Sequence
ggtctgtggaggtgcttatgttcaa

SEQ ID NO: 116170 - DNA, 25 bp, Probe Sequence
ctgtggaggtgcttatgttcaaaag

SEQ ID NO: 116171 - DNA, 25 bp, Probe Sequence
tctgtggaggtgcttatgttcaaaa

SEQ ID NO: 116172 - DNA, 25 bp, Probe Sequence
cttatgttcaaaagctgttaccggc

SEQ ID NO: 116173 - DNA, 25 bp, Probe Sequence
gtgcttatgttcaaaagctgttacc

SEQ ID NO: 116174 - DNA, 25 bp, Probe Sequence
ggtgcttatgttcaaaagctgttac

SEQ ID NO: 116175 - DNA, 25 bp, Probe Sequence
aggtgcttatgttcaaaagctgtta

SEQ ID NO: 116176 - DNA, 25 bp, Probe Sequence
ttatgttcaaaagctgttaccggct

SEQ ID NO: 116177 - DNA, 25 bp, Probe Sequence
gaggtgcttatgttcaaaagctgtt

SEQ ID NO: 116178 - DNA, 25 bp, Probe Sequence
tgcttatgttcaaaagctgttaccg

SEQ ID NO: 116179 - DNA, 25 bp, Probe Sequence
tatgttcaaaagctgttaccggctg

SEQ ID NO: 116180 - DNA, 25 bp, Probe Sequence
ggaggtgcttatgttcaaaagctgt

SEQ ID NO: 116181 - DNA, 25 bp, Probe Sequence
tggaggtgcttatgttcaaaagctg

SEQ ID NO: 116182 - DNA, 25 bp, Probe Sequence
gtggaggtgcttatgttcaaaagct

SEQ ID NO: 116183 - DNA, 25 bp, Probe Sequence
gcttatgttcaaaagctgttaccgg

SEQ ID NO: 116184 - DNA, 25 bp, Probe Sequence
tgtggaggtgcttatgttcaaaagc

SEQ ID NO: 116185 - DNA, 25 bp, Probe Sequence
acagagtcttgaggatacacaggat

SEQ ID NO: 116186 - DNA, 25 bp, Probe Sequence
cagagtcttgaggatacacaggatc

SEQ ID NO: 116187 - DNA, 25 bp, Probe Sequence
ttggacagagtcttgaggatacaca

SEQ ID NO: 116188 - DNA, 25 bp, Probe Sequence
gacagagtcttgaggatacacagga

SEQ ID NO: 116189 - DNA, 25 bp, Probe Sequence
ctagagaccacctatggagagtacc

SEQ ID NO: 116190 - DNA, 25 bp, Probe Sequence
tggacagagtcttgaggatacacag

SEQ ID NO: 116191 - DNA, 25 bp, Probe Sequence
ggacagagtcttgaggatacacagg

SEQ ID NO: 116192 - DNA, 25 bp, Probe Sequence
acctatggagagtacccactaacag

SEQ ID NO: 116193 - DNA, 25 bp, Probe Sequence
cacctatggagagtacccactaaca

SEQ ID NO: 116194 - DNA, 25 bp, Probe Sequence
ccacctatggagagtacccactaac

SEQ ID NO: 116195 - DNA, 25 bp, Probe Sequence
tagagaccacctatggagagtaccc

SEQ ID NO: 116196 - DNA, 25 bp, Probe Sequence
ctatggagagtacccactaacagcc

SEQ ID NO: 116197 - DNA, 25 bp, Probe Sequence
cctatggagagtacccactaacagc

SEQ ID NO: 116198 - DNA, 25 bp, Probe Sequence
accacctatggagagtacccactaa

SEQ ID NO: 116199 - DNA, 25 bp, Probe Sequence
gagagtacccactaacagccatgac

SEQ ID NO: 116200 - DNA, 25 bp, Probe Sequence
gaccacctatggagagtacccacta

SEQ ID NO: 116201 - DNA, 25 bp, Probe Sequence
tatggagagtacccactaacagcca

SEQ ID NO: 116202 - DNA, 25 bp, Probe Sequence
ttgaggatacacaggatccagaatc

SEQ ID NO: 116203 - DNA, 25 bp, Probe Sequence
cttgaggatacacaggatccagaat

SEQ ID NO: 116204 - DNA, 25 bp, Probe Sequence
gagaccacctatggagagtacccac

SEQ ID NO: 116205 - DNA, 25 bp, Probe Sequence
tcttgaggatacacaggatccagaa

SEQ ID NO: 116206 - DNA, 25 bp, Probe Sequence
agagtcttgaggatacacaggatcc

SEQ ID NO: 116207 - DNA, 25 bp, Probe Sequence
gtcttgaggatacacaggatccaga

SEQ ID NO: 116208 - DNA, 25 bp, Probe Sequence
agtcttgaggatacacaggatccag

SEQ ID NO: 116209 - DNA, 25 bp, Probe Sequence
gactgaatgaataagtacaagagga

SEQ ID NO: 116210 - DNA, 25 bp, Probe Sequence
actgaatgaataagtacaagaggaa

SEQ ID NO: 116211 - DNA, 25 bp, Probe Sequence
aataagtacaagaggaaatccacac

SEQ ID NO: 116212 - DNA, 25 bp, Probe Sequence
taagtacaagaggaaatccacactg

SEQ ID NO: 116213 - DNA, 25 bp, Probe Sequence
ataagtacaagaggaaatccacact

SEQ ID NO: 116214 - DNA, 25 bp, Probe Sequence
gaataagtacaagaggaaatccaca

SEQ ID NO: 116215 - DNA, 25 bp, Probe Sequence
tgaataagtacaagaggaaatccac

SEQ ID NO: 116216 - DNA, 25 bp, Probe Sequence
agtacaagaggaaatccacactgat

SEQ ID NO: 116217 - DNA, 25 bp, Probe Sequence
aagtacaagaggaaatccacactga

SEQ ID NO: 116218 - DNA, 25 bp, Probe Sequence
atgaataagtacaagaggaaatcca

SEQ ID NO: 116219 - DNA, 25 bp, Probe Sequence
gtacaagaggaaatccacactgatt

SEQ ID NO: 116220 - DNA, 25 bp, Probe Sequence
aatgaataagtacaagaggaaatcc

SEQ ID NO: 116221 - DNA, 25 bp, Probe Sequence
ctgaatgaataagtacaagaggaaa

SEQ ID NO: 116222 - DNA, 25 bp, Probe Sequence
tgaatgaataagtacaagaggaaat

SEQ ID NO: 116223 - DNA, 25 bp, Probe Sequence
gaatgaataagtacaagaggaaatc

SEQ ID NO: 116224 - DNA, 25 bp, Probe Sequence
aagaggaaatccacactgatttgta

SEQ ID NO: 116225 - DNA, 25 bp, Probe Sequence
tacaagaggaaatccacactgattt

SEQ ID NO: 116226 - DNA, 25 bp, Probe Sequence
agaggaaatccacactgatttgtac

SEQ ID NO: 116227 - DNA, 25 bp, Probe Sequence
caagaggaaatccacactgatttgt

SEQ ID NO: 116228 - DNA, 25 bp, Probe Sequence
acaagaggaaatccacactgatttg

SEQ ID NO: 116229 - DNA, 25 bp, Probe Sequence
gaggaaatccacactgatttgtacg

SEQ ID NO: 116230 - DNA, 25 bp, Probe Sequence
gtggaactcacattcaatgacatga

SEQ ID NO: 116231 - DNA, 25 bp, Probe Sequence
cataaacaattaccaggaactagca

SEQ ID NO: 116232 - DNA, 25 bp, Probe Sequence
tcataaacaattaccaggaactagc

SEQ ID NO: 116233 - DNA, 25 bp, Probe Sequence
aaactacatcaagggaacagtgaag

SEQ ID NO: 116234 - DNA, 25 bp, Probe Sequence
caaactacatcaagggaacagtgaa

SEQ ID NO: 116235 - DNA, 25 bp, Probe Sequence
taaacaattaccaggaactagcatt

SEQ ID NO: 116236 - DNA, 25 bp, Probe Sequence
caattaccaggaactagcattgtgg

SEQ ID NO: 116237 - DNA, 25 bp, Probe Sequence
ataaacaattaccaggaactagcat

SEQ ID NO: 116238 - DNA, 25 bp, Probe Sequence
atgaagtgaggagatggttatttaa

SEQ ID NO: 116239 - DNA, 25 bp, Probe Sequence
actcacattcaatgacatgaagaac

SEQ ID NO: 116240 - DNA, 25 bp, Probe Sequence
ctctgcttcctacaagttgactttc

SEQ ID NO: 116241 - DNA, 25 bp, Probe Sequence
gaactcacattcaatgacatgaaga

SEQ ID NO: 116242 - DNA, 25 bp, Probe Sequence
ggaactcacattcaatgacatgaag

SEQ ID NO: 116243 - DNA, 25 bp, Probe Sequence
ctcacattcaatgacatgaagaacg

SEQ ID NO: 116244 - DNA, 25 bp, Probe Sequence
aactcacattcaatgacatgaagaa

SEQ ID NO: 116245 - DNA, 25 bp, Probe Sequence
tggaactcacattcaatgacatgaa

SEQ ID NO: 116246 - DNA, 25 bp, Probe Sequence
cgtggaactcacattcaatgacatg

SEQ ID NO: 116247 - DNA, 25 bp, Probe Sequence
catgaagtgaggagatggttattta

SEQ ID NO: 116248 - DNA, 25 bp, Probe Sequence
aactacatcaagggaacagtgaagg

SEQ ID NO: 116249 - DNA, 25 bp, Probe Sequence
ctgcttcctacaagttgactttcac

SEQ ID NO: 116250 - DNA, 25 bp, Probe Sequence
tctgcttcctacaagttgactttca

SEQ ID NO: 116251 - DNA, 25 bp, Probe Sequence
aaacaattaccaggaactagcattg

SEQ ID NO: 116252 - DNA, 25 bp, Probe Sequence
aggaactagcattgtgggacattag

SEQ ID NO: 116253 - DNA, 25 bp, Probe Sequence
gtgaggagatggttatttaaagaga

SEQ ID NO: 116254 - DNA, 25 bp, Probe Sequence
tgaagagtgcaaggatgtgaacaag

SEQ ID NO: 116255 - DNA, 25 bp, Probe Sequence
ctgaagagtgcaaggatgtgaacaa

SEQ ID NO: 116256 - DNA, 25 bp, Probe Sequence
gaagagtgcaaggatgtgaacaagg

SEQ ID NO: 116257 - DNA, 25 bp, Probe Sequence
gagccggaagttatttattgggaac

SEQ ID NO: 116258 - DNA, 25 bp, Probe Sequence
gagacggagccggaagttatttatt

SEQ ID NO: 116259 - DNA, 25 bp, Probe Sequence
aagagtgcaaggatgtgaacaaggt

SEQ ID NO: 116260 - DNA, 25 bp, Probe Sequence
ggagccggaagttatttattgggaa

SEQ ID NO: 116261 - DNA, 25 bp, Probe Sequence
agacggagccggaagttatttattg

SEQ ID NO: 116262 - DNA, 25 bp, Probe Sequence
agccggaagttatttattgggaacc

SEQ ID NO: 116263 - DNA, 25 bp, Probe Sequence
agagtgcaaggatgtgaacaaggtc

SEQ ID NO: 116264 - DNA, 25 bp, Probe Sequence
ggaagttatttattgggaacccctg

SEQ ID NO: 116265 - DNA, 25 bp, Probe Sequence
tgagacggagccggaagttatttat

SEQ ID NO: 116266 - DNA, 25 bp, Probe Sequence
gacggagccggaagttatttattgg

SEQ ID NO: 116267 - DNA, 25 bp, Probe Sequence
gaagttatttattgggaacccctgc

SEQ ID NO: 116268 - DNA, 25 bp, Probe Sequence
cctgaagagtgcaaggatgtgaaca

SEQ ID NO: 116269 - DNA, 25 bp, Probe Sequence
ccctggtgctcaaatttcagttctg

SEQ ID NO: 116270 - DNA, 25 bp, Probe Sequence
gccggaagttatttattgggaaccc

SEQ ID NO: 116271 - DNA, 25 bp, Probe Sequence
cggaagttatttattgggaacccct

SEQ ID NO: 116272 - DNA, 25 bp, Probe Sequence
gtgagacggagccggaagttattta

SEQ ID NO: 116273 - DNA, 25 bp, Probe Sequence
cctggtgctcaaatttcagttctgc

SEQ ID NO: 116274 - DNA, 25 bp, Probe Sequence
cggagccggaagttatttattggga

SEQ ID NO: 116275 - DNA, 25 bp, Probe Sequence
aagttatttattgggaacccctgca

SEQ ID NO: 116276 - DNA, 25 bp, Probe Sequence
ctggtgctcaaatttcagttctgca

SEQ ID NO: 116277 - DNA, 25 bp, Probe Sequence
acggagccggaagttatttattggg

SEQ ID NO: 116278 - DNA, 25 bp, Probe Sequence
ccggaagttatttattgggaacccc

SEQ ID NO: 116279 - DNA, 25 bp, Probe Sequence
actaagatatttccaggctgcattt

SEQ ID NO: 116280 - DNA, 25 bp, Probe Sequence
atttgcactaagatatttccaggct

SEQ ID NO: 116281 - DNA, 25 bp, Probe Sequence
tatttgcactaagatatttccaggc

SEQ ID NO: 116282 - DNA, 25 bp, Probe Sequence
cactaagatatttccaggctgcatt

SEQ ID NO: 116283 - DNA, 25 bp, Probe Sequence
tttgcactaagatatttccaggctg

SEQ ID NO: 116284 - DNA, 25 bp, Probe Sequence
atatttgcactaagatatttccagg

SEQ ID NO: 116285 - DNA, 25 bp, Probe Sequence
gccgttacttttcatatttgcacta

SEQ ID NO: 116286 - DNA, 25 bp, Probe Sequence
tcatatttgcactaagatatttcca

SEQ ID NO: 116287 - DNA, 25 bp, Probe Sequence
ccgttacttttcatatttgcactaa

SEQ ID NO: 116288 - DNA, 25 bp, Probe Sequence
catatttgcactaagatatttccag

SEQ ID NO: 116289 - DNA, 25 bp, Probe Sequence
cgttacttttcatatttgcactaag

SEQ ID NO: 116290 - DNA, 25 bp, Probe Sequence
gcactaagatatttccaggctgcat

SEQ ID NO: 116291 - DNA, 25 bp, Probe Sequence
ttcatatttgcactaagatatttcc

SEQ ID NO: 116292 - DNA, 25 bp, Probe Sequence
ttgcactaagatatttccaggctgc

SEQ ID NO: 116293 - DNA, 25 bp, Probe Sequence
tgccgttacttttcatatttgcact

SEQ ID NO: 116294 - DNA, 25 bp, Probe Sequence
gttacttttcatatttgcactaaga

SEQ ID NO: 116295 - DNA, 25 bp, Probe Sequence
ttacttttcatatttgcactaagat

SEQ ID NO: 116296 - DNA, 25 bp, Probe Sequence
cacaggagcctttgatctcattaaa

SEQ ID NO: 116297 - DNA, 25 bp, Probe Sequence
tacacaggagcctttgatctcatta

SEQ ID NO: 116298 - DNA, 25 bp, Probe Sequence
atacacaggagcctttgatctcatt

SEQ ID NO: 116299 - DNA, 25 bp, Probe Sequence
acacaggagcctttgatctcattaa

SEQ ID NO: 116300 - DNA, 25 bp, Probe Sequence
aagacatacacaggagcctttgatc

SEQ ID NO: 116301 - DNA, 25 bp, Probe Sequence
aggagcctttgatctcattaaagag

SEQ ID NO: 116302 - DNA, 25 bp, Probe Sequence
caggagcctttgatctcattaaaga

SEQ ID NO: 116303 - DNA, 25 bp, Probe Sequence
catacacaggagcctttgatctcat

SEQ ID NO: 116304 - DNA, 25 bp, Probe Sequence
caagacatacacaggagcctttgat

SEQ ID NO: 116305 - DNA, 25 bp, Probe Sequence
acaggagcctttgatctcattaaag

SEQ ID NO: 116306 - DNA, 25 bp, Probe Sequence
ttgaaggaacaaatgtggaaggtgt

SEQ ID NO: 116307 - DNA, 25 bp, Probe Sequence
gacatacacaggagcctttgatctc

SEQ ID NO: 116308 - DNA, 25 bp, Probe Sequence
agacatacacaggagcctttgatct

SEQ ID NO: 116309 - DNA, 25 bp, Probe Sequence
tttgaaggaacaaatgtggaaggtg

SEQ ID NO: 116310 - DNA, 25 bp, Probe Sequence
tgcctacctagaatctgcctgaaag

SEQ ID NO: 116311 - DNA, 25 bp, Probe Sequence
ctgcctacctagaatctgcctgaaa

SEQ ID NO: 116312 - DNA, 25 bp, Probe Sequence
acatacacaggagcctttgatctca

SEQ ID NO: 116313 - DNA, 25 bp, Probe Sequence
tttgagagggtggatgggttacttg

SEQ ID NO: 116314 - DNA, 25 bp, Probe Sequence
ggagcctttgatctcattaaagaga

SEQ ID NO: 116315 - DNA, 25 bp, Probe Sequence
gagcctttgatctcattaaagagac

SEQ ID NO: 116316 - DNA, 25 bp, Probe Sequence
agcctttgatctcattaaagagacg

SEQ ID NO: 116317 - DNA, 25 bp, Probe Sequence
ctcattaaagagacgtgaaccagct

SEQ ID NO: 116318 - DNA, 25 bp, Probe Sequence
tagttttgagagggtggatgggtta

SEQ ID NO: 116319 - DNA, 25 bp, Probe Sequence
aaggaacaaatgtggaaggtgtttc

SEQ ID NO: 116320 - DNA, 25 bp, Probe Sequence
ttctgtcatatctcatcctgtaacg

SEQ ID NO: 116321 - DNA, 25 bp, Probe Sequence
acttctgtcatatctcatcctgtaa

SEQ ID NO: 116322 - DNA, 25 bp, Probe Sequence
aacttctgtcatatctcatcctgta

SEQ ID NO: 116323 - DNA, 25 bp, Probe Sequence
taacttctgtcatatctcatcctgt

SEQ ID NO: 116324 - DNA, 25 bp, Probe Sequence
cttctgtcatatctcatcctgtaac

SEQ ID NO: 116325 - DNA, 25 bp, Probe Sequence
ttaataatgtcacgagcaccaatga

SEQ ID NO: 116326 - DNA, 25 bp, Probe Sequence
taataatgtcacgagcaccaatgag

SEQ ID NO: 116327 - DNA, 25 bp, Probe Sequence
aattgtgtgcgtgtgtattctcatt

SEQ ID NO: 116328 - DNA, 25 bp, Probe Sequence
tctgtcatatctcatcctgtaacgc

SEQ ID NO: 116329 - DNA, 25 bp, Probe Sequence
aggactctaacaataacttctgtca

SEQ ID NO: 116330 - DNA, 25 bp, Probe Sequence
ataacttctgtcatatctcatcctg

SEQ ID NO: 116331 - DNA, 25 bp, Probe Sequence
ggactctaacaataacttctgtcat

SEQ ID NO: 116332 - DNA, 25 bp, Probe Sequence
actaggactctaacaataacttctg

SEQ ID NO: 116333 - DNA, 25 bp, Probe Sequence
gtgcgtgtgtattctcatttcttat

SEQ ID NO: 116334 - DNA, 25 bp, Probe Sequence
ctgtcatatctcatcctgtaacgcc

SEQ ID NO: 116335 - DNA, 25 bp, Probe Sequence
ttatacctattgttcatgccacgtt

SEQ ID NO: 116336 - DNA, 25 bp, Probe Sequence
tttaataatgtcacgagcaccaatg

SEQ ID NO: 116337 - DNA, 25 bp, Probe Sequence
tgtgcgtgtgtattctcatttctta

SEQ ID NO: 116338 - DNA, 25 bp, Probe Sequence
caataacttctgtcatatctcatcc

SEQ ID NO: 116339 - DNA, 25 bp, Probe Sequence
gcggaggtgagagttagaatttata

SEQ ID NO: 116340 - DNA, 25 bp, Probe Sequence
ttaaattgtgtgcgtgtgtattctc

SEQ ID NO: 116341 - DNA, 25 bp, Probe Sequence
gcgtgtgtattctcatttcttatgt

SEQ ID NO: 116342 - DNA, 25 bp, Probe Sequence
tgcgtgtgtattctcatttcttatg

SEQ ID NO: 116343 - DNA, 25 bp, Probe Sequence
aataacttctgtcatatctcatcct

SEQ ID NO: 116344 - DNA, 25 bp, Probe Sequence
gttactcctatgatgacattccaga

SEQ ID NO: 116345 - DNA, 25 bp, Probe Sequence
ggttactcctatgatgacattccag

SEQ ID NO: 116346 - DNA, 25 bp, Probe Sequence
gtggttactcctatgatgacattcc

SEQ ID NO: 116347 - DNA, 25 bp, Probe Sequence
cgtggttactcctatgatgacattc

SEQ ID NO: 116348 - DNA, 25 bp, Probe Sequence
ccgtggttactcctatgatgacatt

SEQ ID NO: 116349 - DNA, 25 bp, Probe Sequence
ctaccgtggttactcctatgatgac

SEQ ID NO: 116350 - DNA, 25 bp, Probe Sequence
tggttactcctatgatgacattcca

SEQ ID NO: 116351 - DNA, 25 bp, Probe Sequence
taccgtggttactcctatgatgaca

SEQ ID NO: 116352 - DNA, 25 bp, Probe Sequence
accgtggttactcctatgatgacat

SEQ ID NO: 116353 - DNA, 25 bp, Probe Sequence
gctaccgtggttactcctatgatga

SEQ ID NO: 116354 - DNA, 25 bp, Probe Sequence
ggctaccgtggttactcctatgatg

SEQ ID NO: 116355 - DNA, 25 bp, Probe Sequence
aggctaccgtggttactcctatgat

SEQ ID NO: 116356 - DNA, 25 bp, Probe Sequence
aaaggctaccgtggttactcctatg

SEQ ID NO: 116357 - DNA, 25 bp, Probe Sequence
caaaggctaccgtggttactcctat

SEQ ID NO: 116358 - DNA, 25 bp, Probe Sequence
aactctgctcattgttgttctctcc

SEQ ID NO: 116359 - DNA, 25 bp, Probe Sequence
ctctgctcattgttgttctctcctg

SEQ ID NO: 116360 - DNA, 25 bp, Probe Sequence
actctgctcattgttgttctctcct

SEQ ID NO: 116361 - DNA, 25 bp, Probe Sequence
tctgctcattgttgttctctcctgg

SEQ ID NO: 116362 - DNA, 25 bp, Probe Sequence
caactctgctcattgttgttctctc

SEQ ID NO: 116363 - DNA, 25 bp, Probe Sequence
ccaactctgctcattgttgttctct

SEQ ID NO: 116364 - DNA, 25 bp, Probe Sequence
cccaactctgctcattgttgttctc

SEQ ID NO: 116365 - DNA, 25 bp, Probe Sequence
gagtcatctgagtgtagagaatgtc

SEQ ID NO: 116366 - DNA, 25 bp, Probe Sequence
agagtcatctgagtgtagagaatgt

SEQ ID NO: 116367 - DNA, 25 bp, Probe Sequence
ggtagagtcatctgagtgtagagaa

SEQ ID NO: 116368 - DNA, 25 bp, Probe Sequence
tagagtcatctgagtgtagagaatg

SEQ ID NO: 116369 - DNA, 25 bp, Probe Sequence
gtagagtcatctgagtgtagagaat

SEQ ID NO: 116370 - DNA, 25 bp, Probe Sequence
ctggtagagtcatctgagtgtagag

SEQ ID NO: 116371 - DNA, 25 bp, Probe Sequence
agtcatctgagtgtagagaatgtcc

SEQ ID NO: 116372 - DNA, 25 bp, Probe Sequence
tggtagagtcatctgagtgtagaga

SEQ ID NO: 116373 - DNA, 25 bp, Probe Sequence
cctgaccttcgtacctatgattata

SEQ ID NO: 116374 - DNA, 25 bp, Probe Sequence
actggtagagtcatctgagtgtaga

SEQ ID NO: 116375 - DNA, 25 bp, Probe Sequence
ttatgtgacagaatacgactcaatt

SEQ ID NO: 116376 - DNA, 25 bp, Probe Sequence
ctgaccttcgtacctatgattatac

SEQ ID NO: 116377 - DNA, 25 bp, Probe Sequence
attatgtgacagaatacgactcaat

SEQ ID NO: 116378 - DNA, 25 bp, Probe Sequence
atgtgacagaatacgactcaattca

SEQ ID NO: 116379 - DNA, 25 bp, Probe Sequence
atacataagaaacagcctccaagaa

SEQ ID NO: 116380 - DNA, 25 bp, Probe Sequence
aacatttcaacatcacatcactcac

SEQ ID NO: 116381 - DNA, 25 bp, Probe Sequence
aaacatttcaacatcacatcactca

SEQ ID NO: 116382 - DNA, 25 bp, Probe Sequence
ataagaaacagcctccaagaacatt

SEQ ID NO: 116383 - DNA, 25 bp, Probe Sequence
catacataagaaacagcctccaaga

SEQ ID NO: 116384 - DNA, 25 bp, Probe Sequence
tactactgaaatgtatcttggctgt

SEQ ID NO: 116385 - DNA, 25 bp, Probe Sequence
tatgtgacagaatacgactcaattc

SEQ ID NO: 116386 - DNA, 25 bp, Probe Sequence
tattatgtgacagaatacgactcaa

SEQ ID NO: 116387 - DNA, 25 bp, Probe Sequence
actactgaaatgtatcttggctgtc

SEQ ID NO: 116388 - DNA, 25 bp, Probe Sequence
tacataagaaacagcctccaagaac

SEQ ID NO: 116389 - DNA, 25 bp, Probe Sequence
gttagtgatgctggagaagagaata

SEQ ID NO: 116390 - DNA, 25 bp, Probe Sequence
ttagtgatgctggagaagagaatat

SEQ ID NO: 116391 - DNA, 25 bp, Probe Sequence
tgttagtgatgctggagaagagaat

SEQ ID NO: 116392 - DNA, 25 bp, Probe Sequence
ttatatacctcattctgacacctgc

SEQ ID NO: 116393 - DNA, 25 bp, Probe Sequence
gctggagaagagaatattactggtt

SEQ ID NO: 116394 - DNA, 25 bp, Probe Sequence
atgctggagaagagaatattactgg

SEQ ID NO: 116395 - DNA, 25 bp, Probe Sequence
gtgttagtgatgctggagaagagaa

SEQ ID NO: 116396 - DNA, 25 bp, Probe Sequence
gtgatgctggagaagagaatattac

SEQ ID NO: 116397 - DNA, 25 bp, Probe Sequence
tgctggagaagagaatattactggt

SEQ ID NO: 116398 - DNA, 25 bp, Probe Sequence
tgatgctggagaagagaatattact

SEQ ID NO: 116399 - DNA, 25 bp, Probe Sequence
agtgatgctggagaagagaatatta

SEQ ID NO: 116400 - DNA, 25 bp, Probe Sequence
tagtgatgctggagaagagaatatt

SEQ ID NO: 116401 - DNA, 25 bp, Probe Sequence
gatgctggagaagagaatattactg

SEQ ID NO: 116402 - DNA, 25 bp, Probe Sequence
aagaaccattagaaagggctcatta

SEQ ID NO: 116403 - DNA, 25 bp, Probe Sequence
agcaatcaaagaaccattagaaagg

SEQ ID NO: 116404 - DNA, 25 bp, Probe Sequence
agaaccattagaaagggctcattaa

SEQ ID NO: 116405 - DNA, 25 bp, Probe Sequence
aaagaaccattagaaagggctcatt

SEQ ID NO: 116406 - DNA, 25 bp, Probe Sequence
aatcaaagaaccattagaaagggct

SEQ ID NO: 116407 - DNA, 25 bp, Probe Sequence
caatcaaagaaccattagaaagggc

SEQ ID NO: 116408 - DNA, 25 bp, Probe Sequence
gcaatcaaagaaccattagaaaggg

SEQ ID NO: 116409 - DNA, 25 bp, Probe Sequence
aactcataaagcaatcaaagaacca

SEQ ID NO: 116410 - DNA, 25 bp, Probe Sequence
gaaccattagaaagggctcattaag

SEQ ID NO: 116411 - DNA, 25 bp, Probe Sequence
actcataaagcaatcaaagaaccat

SEQ ID NO: 116412 - DNA, 25 bp, Probe Sequence
ccctaactcataaagcaatcaaaga

SEQ ID NO: 116413 - DNA, 25 bp, Probe Sequence
ctcatttcaggaaggacggtgttaa

SEQ ID NO: 116414 - DNA, 25 bp, Probe Sequence
cagaaagtctcatttcaggaaggac

SEQ ID NO: 116415 - DNA, 25 bp, Probe Sequence
tctcatttcaggaaggacggtgtta

SEQ ID NO: 116416 - DNA, 25 bp, Probe Sequence
agaaagtctcatttcaggaaggacg

SEQ ID NO: 116417 - DNA, 25 bp, Probe Sequence
ttcaggaaggacggtgttaactctt

SEQ ID NO: 116418 - DNA, 25 bp, Probe Sequence
aaagtctcatttcaggaaggacggt

SEQ ID NO: 116419 - DNA, 25 bp, Probe Sequence
atttcaggaaggacggtgttaactc

SEQ ID NO: 116420 - DNA, 25 bp, Probe Sequence
gaaagtctcatttcaggaaggacgg

SEQ ID NO: 116421 - DNA, 25 bp, Probe Sequence
catttcaggaaggacggtgttaact

SEQ ID NO: 116422 - DNA, 25 bp, Probe Sequence
tcatttcaggaaggacggtgttaac

SEQ ID NO: 116423 - DNA, 25 bp, Probe Sequence
ggaaggacggtgttaactctttctg

SEQ ID NO: 116424 - DNA, 25 bp, Probe Sequence
caggaaggacggtgttaactctttc

SEQ ID NO: 116425 - DNA, 25 bp, Probe Sequence
aggaaggacggtgttaactctttct

SEQ ID NO: 116426 - DNA, 25 bp, Probe Sequence
aagtctcatttcaggaaggacggtg

SEQ ID NO: 116427 - DNA, 25 bp, Probe Sequence
tttcaggaaggacggtgttaactct

SEQ ID NO: 116428 - DNA, 25 bp, Probe Sequence
tcaggaaggacggtgttaactcttt

SEQ ID NO: 116429 - DNA, 25 bp, Probe Sequence
gtctcatttcaggaaggacggtgtt

SEQ ID NO: 116430 - DNA, 25 bp, Probe Sequence
gaaggacggtgttaactctttctgc

SEQ ID NO: 116431 - DNA, 25 bp, Probe Sequence
acggtgttaactctttctgctcctt

SEQ ID NO: 116432 - DNA, 25 bp, Probe Sequence
aaggacggtgttaactctttctgct

SEQ ID NO: 116433 - DNA, 25 bp, Probe Sequence
gacggtgttaactctttctgctcct

SEQ ID NO: 116434 - DNA, 25 bp, Probe Sequence
aggacggtgttaactctttctgctc

SEQ ID NO: 116435 - DNA, 25 bp, Probe Sequence
ttcactaaggagtaacacagaggtc

SEQ ID NO: 116436 - DNA, 25 bp, Probe Sequence
gttcactaaggagtaacacagaggt

SEQ ID NO: 116437 - DNA, 25 bp, Probe Sequence
cactaaggagtaacacagaggtcag

SEQ ID NO: 116438 - DNA, 25 bp, Probe Sequence
tcactaaggagtaacacagaggtca

SEQ ID NO: 116439 - DNA, 25 bp, Probe Sequence
tctctctgggtttcttgttcactaa

SEQ ID NO: 116440 - DNA, 25 bp, Probe Sequence
cttatcctttgccaatctctgactc

SEQ ID NO: 116441 - DNA, 25 bp, Probe Sequence
ctctctgggtttcttgttcactaag

SEQ ID NO: 116442 - DNA, 25 bp, Probe Sequence
gggtttcttgttcactaaggagtaa

SEQ ID NO: 116443 - DNA, 25 bp, Probe Sequence
ggtttcttgttcactaaggagtaac

SEQ ID NO: 116444 - DNA, 25 bp, Probe Sequence
actaaggagtaacacagaggtcagg

SEQ ID NO: 116445 - DNA, 25 bp, Probe Sequence
ttatcctttgccaatctctgactca

SEQ ID NO: 116446 - DNA, 25 bp, Probe Sequence
tgggtttcttgttcactaaggagta

SEQ ID NO: 116447 - DNA, 25 bp, Probe Sequence
tatcctttgccaatctctgactcaa

SEQ ID NO: 116448 - DNA, 25 bp, Probe Sequence
tctgggtttcttgttcactaaggag

SEQ ID NO: 116449 - DNA, 25 bp, Probe Sequence
ctctgggtttcttgttcactaagga

SEQ ID NO: 116450 - DNA, 25 bp, Probe Sequence
tctctgggtttcttgttcactaagg

SEQ ID NO: 116451 - DNA, 25 bp, Probe Sequence
ccttatcctttgccaatctctgact

SEQ ID NO: 116452 - DNA, 25 bp, Probe Sequence
atcctttgccaatctctgactcaat

SEQ ID NO: 116453 - DNA, 25 bp, Probe Sequence
gagattggagtgagctgagatcatg

SEQ ID NO: 116454 - DNA, 25 bp, Probe Sequence
ttgttcactaaggagtaacacagag

SEQ ID NO: 116455 - DNA, 25 bp, Probe Sequence
cttgttcactaaggagtaacacaga

SEQ ID NO: 116456 - DNA, 25 bp, Probe Sequence
tcttgttcactaaggagtaacacag

SEQ ID NO: 116457 - DNA, 25 bp, Probe Sequence
ttcttgttcactaaggagtaacaca

SEQ ID NO: 116458 - DNA, 25 bp, Probe Sequence
ctgggtttcttgttcactaaggagt

SEQ ID NO: 116459 - DNA, 25 bp, Probe Sequence
aagcctagtctaacactgaactcat

SEQ ID NO: 116460 - DNA, 25 bp, Probe Sequence
agcctagtctaacactgaactcatg

SEQ ID NO: 116461 - DNA, 25 bp, Probe Sequence
atagcacccttatgttactaaagcc

SEQ ID NO: 116462 - DNA, 25 bp, Probe Sequence
acaccttgaaagtcctaacattaga

SEQ ID NO: 116463 - DNA, 25 bp, Probe Sequence
gcctagtctaacactgaactcatgt

SEQ ID NO: 116464 - DNA, 25 bp, Probe Sequence
agcacccttatgttactaaagccta

SEQ ID NO: 116465 - DNA, 25 bp, Probe Sequence
tagcacccttatgttactaaagcct

SEQ ID NO: 116466 - DNA, 25 bp, Probe Sequence
caccttgaaagtcctaacattagaa

SEQ ID NO: 116467 - DNA, 25 bp, Probe Sequence
gcacccttatgttactaaagcctag

SEQ ID NO: 116468 - DNA, 25 bp, Probe Sequence
taaagcctagtctaacactgaactc

SEQ ID NO: 116469 - DNA, 25 bp, Probe Sequence
ctaaagcctagtctaacactgaact

SEQ ID NO: 116470 - DNA, 25 bp, Probe Sequence
gaccagccttacatttgttgaaata

SEQ ID NO: 116471 - DNA, 25 bp, Probe Sequence
accagccttacatttgttgaaataa

SEQ ID NO: 116472 - DNA, 25 bp, Probe Sequence
ccagccttacatttgttgaaataac

SEQ ID NO: 116473 - DNA, 25 bp, Probe Sequence
tatagcacccttatgttactaaagc

SEQ ID NO: 116474 - DNA, 25 bp, Probe Sequence
agacaccttgaaagtcctaacatta

SEQ ID NO: 116475 - DNA, 25 bp, Probe Sequence
gacaccttgaaagtcctaacattag

SEQ ID NO: 116476 - DNA, 25 bp, Probe Sequence
cagacaccttgaaagtcctaacatt

SEQ ID NO: 116477 - DNA, 25 bp, Probe Sequence
aaagcctagtctaacactgaactca

SEQ ID NO: 116478 - DNA, 25 bp, Probe Sequence
accttgaaagtcctaacattagaat

SEQ ID NO: 116479 - DNA, 25 bp, Probe Sequence
cagccttacatttgttgaaataact

SEQ ID NO: 116480 - DNA, 25 bp, Probe Sequence
tatggaccagccttacatttgttga

SEQ ID NO: 116481 - DNA, 25 bp, Probe Sequence
gtatggaccagccttacatttgttg

SEQ ID NO: 116482 - DNA, 25 bp, Probe Sequence
agtatggaccagccttacatttgtt

SEQ ID NO: 116483 - DNA, 25 bp, Probe Sequence
ttgtattctgtgagtgataagtgtc

SEQ ID NO: 116484 - DNA, 25 bp, Probe Sequence
tgtattctgtgagtgataagtgtca

SEQ ID NO: 116485 - DNA, 25 bp, Probe Sequence
attgtattctgtgagtgataagtgt

SEQ ID NO: 116486 - DNA, 25 bp, Probe Sequence
cattgtattctgtgagtgataagtg

SEQ ID NO: 116487 - DNA, 25 bp, Probe Sequence
gtattctgtgagtgataagtgtcag

SEQ ID NO: 116488 - DNA, 25 bp, Probe Sequence
tcattgtattctgtgagtgataagt

SEQ ID NO: 116489 - DNA, 25 bp, Probe Sequence
acttcctgtttcattgtattctgtg

SEQ ID NO: 116490 - DNA, 25 bp, Probe Sequence
gattcgtttaagacaacaactggaa

SEQ ID NO: 116491 - DNA, 25 bp, Probe Sequence
aagattcgtttaagacaacaactgg

SEQ ID NO: 116492 - DNA, 25 bp, Probe Sequence
aagcaagattcgtttaagacaacaa

SEQ ID NO: 116493 - DNA, 25 bp, Probe Sequence
taaattacatctccaagtggctcaa

SEQ ID NO: 116494 - DNA, 25 bp, Probe Sequence
ttaaattacatctccaagtggctca

SEQ ID NO: 116495 - DNA, 25 bp, Probe Sequence
tcgtttaagacaacaactggaaatg

SEQ ID NO: 116496 - DNA, 25 bp, Probe Sequence
ttcgtttaagacaacaactggaaat

SEQ ID NO: 116497 - DNA, 25 bp, Probe Sequence
attcgtttaagacaacaactggaaa

SEQ ID NO: 116498 - DNA, 25 bp, Probe Sequence
agattcgtttaagacaacaactgga

SEQ ID NO: 116499 - DNA, 25 bp, Probe Sequence
gcaagattcgtttaagacaacaact

SEQ ID NO: 116500 - DNA, 25 bp, Probe Sequence
agcaagattcgtttaagacaacaac

SEQ ID NO: 116501 - DNA, 25 bp, Probe Sequence
caagattcgtttaagacaacaactg

SEQ ID NO: 116502 - DNA, 25 bp, Probe Sequence
taagcaagattcgtttaagacaaca

SEQ ID NO: 116503 - DNA, 25 bp, Probe Sequence
cctgtttcattgtattctgtgagtg

SEQ ID NO: 116504 - DNA, 25 bp, Probe Sequence
tcctgtttcattgtattctgtgagt

SEQ ID NO: 116505 - DNA, 25 bp, Probe Sequence
aaattacatctccaagtggctcaaa

SEQ ID NO: 116506 - DNA, 25 bp, Probe Sequence
ctgtttcattgtattctgtgagtga

SEQ ID NO: 116507 - DNA, 25 bp, Probe Sequence
ctctgcctatgaagtagccattctt

SEQ ID NO: 116508 - DNA, 25 bp, Probe Sequence
cctatgaagtagccattctttgttt

SEQ ID NO: 116509 - DNA, 25 bp, Probe Sequence
gcctatgaagtagccattctttgtt

SEQ ID NO: 116510 - DNA, 25 bp, Probe Sequence
ctgcctatgaagtagccattctttg

SEQ ID NO: 116511 - DNA, 25 bp, Probe Sequence
tctgcctatgaagtagccattcttt

SEQ ID NO: 116512 - DNA, 25 bp, Probe Sequence
tgcctatgaagtagccattctttgt

SEQ ID NO: 116513 - DNA, 25 bp, Probe Sequence
aagtcatatccgtggaccatttgta

SEQ ID NO: 116514 - DNA, 25 bp, Probe Sequence
agtcatatccgtggaccatttgtag

SEQ ID NO: 116515 - DNA, 25 bp, Probe Sequence
atatccgtggaccatttgtaggttt

SEQ ID NO: 116516 - DNA, 25 bp, Probe Sequence
ctcacccacattctatgactggaat

SEQ ID NO: 116517 - DNA, 25 bp, Probe Sequence
tcactgtacttgttagtatctgata

SEQ ID NO: 116518 - DNA, 25 bp, Probe Sequence
tatcactgtacttgttagtatctga

SEQ ID NO: 116519 - DNA, 25 bp, Probe Sequence
gaagtcatatccgtggaccatttgt

SEQ ID NO: 116520 - DNA, 25 bp, Probe Sequence
atcactgtacttgttagtatctgat

SEQ ID NO: 116521 - DNA, 25 bp, Probe Sequence
tatccgtggaccatttgtaggtttc

SEQ ID NO: 116522 - DNA, 25 bp, Probe Sequence
gtcatatccgtggaccatttgtagg

SEQ ID NO: 116523 - DNA, 25 bp, Probe Sequence
gtagtgctcacccacattctatgac

SEQ ID NO: 116524 - DNA, 25 bp, Probe Sequence
ctgtagtgctcacccacattctatg

SEQ ID NO: 116525 - DNA, 25 bp, Probe Sequence
catatccgtggaccatttgtaggtt

SEQ ID NO: 116526 - DNA, 25 bp, Probe Sequence
agaaggtatgtgtgattattatctt

SEQ ID NO: 116527 - DNA, 25 bp, Probe Sequence
tagtgctcacccacattctatgact

SEQ ID NO: 116528 - DNA, 25 bp, Probe Sequence
agtatctgatattaggtattcccaa

SEQ ID NO: 116529 - DNA, 25 bp, Probe Sequence
tgtagtgctcacccacattctatga

SEQ ID NO: 116530 - DNA, 25 bp, Probe Sequence
cctagaaggtatgtgtgattattat

SEQ ID NO: 116531 - DNA, 25 bp, Probe Sequence
ctacatctaagccagagagagacag

SEQ ID NO: 116532 - DNA, 25 bp, Probe Sequence
gtaagacaaacgatgatatgaaggc

SEQ ID NO: 116533 - DNA, 25 bp, Probe Sequence
tacatctaagccagagagagacagg

SEQ ID NO: 116534 - DNA, 25 bp, Probe Sequence
cctacatctaagccagagagagaca

SEQ ID NO: 116535 - DNA, 25 bp, Probe Sequence
tttcaaactcagagacaaggacttt

SEQ ID NO: 116536 - DNA, 25 bp, Probe Sequence
aaagaaactggaaaggaagatgctt

SEQ ID NO: 116537 - DNA, 25 bp, Probe Sequence
tgtaagacaaacgatgatatgaagg

SEQ ID NO: 116538 - DNA, 25 bp, Probe Sequence
aagagatcctttcccatttattctg

SEQ ID NO: 116539 - DNA, 25 bp, Probe Sequence
aactcagagacaaggactttggttt

SEQ ID NO: 116540 - DNA, 25 bp, Probe Sequence
aaactcagagacaaggactttggtt

SEQ ID NO: 116541 - DNA, 25 bp, Probe Sequence
agagatcctttcccatttattctgg

SEQ ID NO: 116542 - DNA, 25 bp, Probe Sequence
gaaactggaaaggaagatgctttag

SEQ ID NO: 116543 - DNA, 25 bp, Probe Sequence
agaaactggaaaggaagatgcttta

SEQ ID NO: 116544 - DNA, 25 bp, Probe Sequence
ggaaaggaagatgctttaggaacat

SEQ ID NO: 116545 - DNA, 25 bp, Probe Sequence
aagaaactggaaaggaagatgcttt

SEQ ID NO: 116546 - DNA, 25 bp, Probe Sequence
aaactggaaaggaagatgctttagg

SEQ ID NO: 116547 - DNA, 25 bp, Probe Sequence
gaaaggaagatgctttaggaacatg

SEQ ID NO: 116548 - DNA, 25 bp, Probe Sequence
acaaaagaaactggaaaggaagatg

SEQ ID NO: 116549 - DNA, 25 bp, Probe Sequence
gaacaaaagaaactggaaaggaaga

SEQ ID NO: 116550 - DNA, 25 bp, Probe Sequence
ggaacaaaagaaactggaaaggaag

SEQ ID NO: 116551 - DNA, 25 bp, Probe Sequence
gaaggaacaaaagaaactggaaagg

SEQ ID NO: 116552 - DNA, 25 bp, Probe Sequence
ctggaaaggaagatgctttaggaac

SEQ ID NO: 116553 - DNA, 25 bp, Probe Sequence
ccctacatctaagccagagagagac

SEQ ID NO: 116554 - DNA, 25 bp, Probe Sequence
aacaaaagaaactggaaaggaagat

SEQ ID NO: 116555 - DNA, 25 bp, Probe Sequence
cttcatctggagacagtcacatagt

SEQ ID NO: 116556 - DNA, 25 bp, Probe Sequence
ttcatctggagacagtcacatagtc

SEQ ID NO: 116557 - DNA, 25 bp, Probe Sequence
ttactatttctcctcttcctccctc

SEQ ID NO: 116558 - DNA, 25 bp, Probe Sequence
gttactatttctcctcttcctccct

SEQ ID NO: 116559 - DNA, 25 bp, Probe Sequence
cagttactatttctcctcttcctcc

SEQ ID NO: 116560 - DNA, 25 bp, Probe Sequence
ccttcatctggagacagtcacatag

SEQ ID NO: 116561 - DNA, 25 bp, Probe Sequence
agttactatttctcctcttcctccc

SEQ ID NO: 116562 - DNA, 25 bp, Probe Sequence
ttatggattgctgcatgattcttaa

SEQ ID NO: 116563 - DNA, 25 bp, Probe Sequence
tcagttactatttctcctcttcctc

SEQ ID NO: 116564 - DNA, 25 bp, Probe Sequence
ctcagttactatttctcctcttcct

SEQ ID NO: 116565 - DNA, 25 bp, Probe Sequence
tctcagttactatttctcctcttcc

SEQ ID NO: 116566 - DNA, 25 bp, Probe Sequence
tatactgcttgtgccatctgtgtac

SEQ ID NO: 116567 - DNA, 25 bp, Probe Sequence
gaaggagattcaggtaaacagtagc

SEQ ID NO: 116568 - DNA, 25 bp, Probe Sequence
cacctaatgttctttccttccttcc

SEQ ID NO: 116569 - DNA, 25 bp, Probe Sequence
ccacctaatgttctttccttccttc

SEQ ID NO: 116570 - DNA, 25 bp, Probe Sequence
catctggagacagtcacatagtcac

SEQ ID NO: 116571 - DNA, 25 bp, Probe Sequence
tcatctggagacagtcacatagtca

SEQ ID NO: 116572 - DNA, 25 bp, Probe Sequence
ggtagtattcacagtgtggtgttac

SEQ ID NO: 116573 - DNA, 25 bp, Probe Sequence
aggtagtattcacagtgtggtgtta

SEQ ID NO: 116574 - DNA, 25 bp, Probe Sequence
tgtcctttacttgtttctcagttac

SEQ ID NO: 116575 - DNA, 25 bp, Probe Sequence
aatgtcctttacttgtttctcagtt

SEQ ID NO: 116576 - DNA, 25 bp, Probe Sequence
aaatgtcctttacttgtttctcagt

SEQ ID NO: 116577 - DNA, 25 bp, Probe Sequence
tccttcatctggagacagtcacata

SEQ ID NO: 116578 - DNA, 25 bp, Probe Sequence
tagtattcacagtgtggtgttacct

SEQ ID NO: 116579 - DNA, 25 bp, Probe Sequence
tcaataaagttgttgcattcccaat

SEQ ID NO: 116580 - DNA, 25 bp, Probe Sequence
ttcaataaagttgttgcattcccaa

SEQ ID NO: 116581 - DNA, 25 bp, Probe Sequence
tttcaataaagttgttgcattccca

SEQ ID NO: 116582 - DNA, 25 bp, Probe Sequence
caataaagttgttgcattcccaatt

SEQ ID NO: 116583 - DNA, 25 bp, Probe Sequence
aataaagttgttgcattcccaattg

SEQ ID NO: 116584 - DNA, 25 bp, Probe Sequence
agagacctttgtaaccaatggaatt

SEQ ID NO: 116585 - DNA, 25 bp, Probe Sequence
cagagacctttgtaaccaatggaat

SEQ ID NO: 116586 - DNA, 25 bp, Probe Sequence
gagacctttgtaaccaatggaatta

SEQ ID NO: 116587 - DNA, 25 bp, Probe Sequence
gatagtggacagagacctttgtaac

SEQ ID NO: 116588 - DNA, 25 bp, Probe Sequence
agacctttgtaaccaatggaattat

SEQ ID NO: 116589 - DNA, 25 bp, Probe Sequence
ggatagtggacagagacctttgtaa

SEQ ID NO: 116590 - DNA, 25 bp, Probe Sequence
atagtggacagagacctttgtaacc

SEQ ID NO: 116591 - DNA, 25 bp, Probe Sequence
cctttgtaaccaatggaattattca

SEQ ID NO: 116592 - DNA, 25 bp, Probe Sequence
acctttgtaaccaatggaattattc

SEQ ID NO: 116593 - DNA, 25 bp, Probe Sequence
gacctttgtaaccaatggaattatt

SEQ ID NO: 116594 - DNA, 25 bp, Probe Sequence
acagagacctttgtaaccaatggaa

SEQ ID NO: 116595 - DNA, 25 bp, Probe Sequence
tggatagtggacagagacctttgta

SEQ ID NO: 116596 - DNA, 25 bp, Probe Sequence
gacagagacctttgtaaccaatgga

SEQ ID NO: 116597 - DNA, 25 bp, Probe Sequence
tggacagagacctttgtaaccaatg

SEQ ID NO: 116598 - DNA, 25 bp, Probe Sequence
gtggacagagacctttgtaaccaat

SEQ ID NO: 116599 - DNA, 25 bp, Probe Sequence
ggacagagacctttgtaaccaatgg

SEQ ID NO: 116600 - DNA, 25 bp, Probe Sequence
tagtggacagagacctttgtaacca

SEQ ID NO: 116601 - DNA, 25 bp, Probe Sequence
gtggatagtggacagagacctttgt

SEQ ID NO: 116602 - DNA, 25 bp, Probe Sequence
tgtggatagtggacagagacctttg

SEQ ID NO: 116603 - DNA, 25 bp, Probe Sequence
ctttgtaaccaatggaattattcat

SEQ ID NO: 116604 - DNA, 25 bp, Probe Sequence
caaacggtttctcctgtggatagtg

SEQ ID NO: 116605 - DNA, 25 bp, Probe Sequence
agtggacagagacctttgtaaccaa

SEQ ID NO: 116606 - DNA, 25 bp, Probe Sequence
aaacggtttctcctgtggatagtgg

SEQ ID NO: 116607 - DNA, 25 bp, Probe Sequence
aagcaaacggtttctcctgtggata

SEQ ID NO: 116608 - DNA, 25 bp, Probe Sequence
cggaataaatactacctggaggttt

SEQ ID NO: 116609 - DNA, 25 bp, Probe Sequence
ataaatactacctggaggtttgtcc

SEQ ID NO: 116610 - DNA, 25 bp, Probe Sequence
taaatactacctggaggtttgtcct

SEQ ID NO: 116611 - DNA, 25 bp, Probe Sequence
ggaataaatactacctggaggtttg

SEQ ID NO: 116612 - DNA, 25 bp, Probe Sequence
aataaatactacctggaggtttgtc

SEQ ID NO: 116613 - DNA, 25 bp, Probe Sequence
gaataaatactacctggaggtttgt

SEQ ID NO: 116614 - DNA, 25 bp, Probe Sequence
acatgactggaacgaagtaggagtg

SEQ ID NO: 116615 - DNA, 25 bp, Probe Sequence
cacatgactggaacgaagtaggagt

SEQ ID NO: 116616 - DNA, 25 bp, Probe Sequence
cttgcacatgactggaacgaagtag

SEQ ID NO: 116617 - DNA, 25 bp, Probe Sequence
ccggaataaatactacctggaggtt

SEQ ID NO: 116618 - DNA, 25 bp, Probe Sequence
ttgcacatgactggaacgaagtagg

SEQ ID NO: 116619 - DNA, 25 bp, Probe Sequence
gaagtaggagtgcaactcaaatgtg

SEQ ID NO: 116620 - DNA, 25 bp, Probe Sequence
gtaggagtgcaactcaaatgtgttg

SEQ ID NO: 116621 - DNA, 25 bp, Probe Sequence
taggagtgcaactcaaatgtgttga

SEQ ID NO: 116622 - DNA, 25 bp, Probe Sequence
agtaggagtgcaactcaaatgtgtt

SEQ ID NO: 116623 - DNA, 25 bp, Probe Sequence
aagtaggagtgcaactcaaatgtgt

SEQ ID NO: 116624 - DNA, 25 bp, Probe Sequence
aacgaagtaggagtgcaactcaaat

SEQ ID NO: 116625 - DNA, 25 bp, Probe Sequence
aaatactacctggaggtttgtcctc

SEQ ID NO: 116626 - DNA, 25 bp, Probe Sequence
ggagtgcaactcaaatgtgttgaag

SEQ ID NO: 116627 - DNA, 25 bp, Probe Sequence
aatactacctggaggtttgtcctct

SEQ ID NO: 116628 - DNA, 25 bp, Probe Sequence
cgaagtaggagtgcaactcaaatgt

SEQ ID NO: 116629 - DNA, 25 bp, Probe Sequence
acgaagtaggagtgcaactcaaatg

SEQ ID NO: 116630 - DNA, 25 bp, Probe Sequence
gaacgaagtaggagtgcaactcaaa

SEQ ID NO: 116631 - DNA, 25 bp, Probe Sequence
aggagtgcaactcaaatgtgttgaa

SEQ ID NO: 116632 - DNA, 25 bp, Probe Sequence
tgggaaaactatatccacagaatcg

SEQ ID NO: 116633 - DNA, 25 bp, Probe Sequence
gaatttcaagatggatcgggacctg

SEQ ID NO: 116634 - DNA, 25 bp, Probe Sequence
ggaatttcaagatggatcgggacct

SEQ ID NO: 116635 - DNA, 25 bp, Probe Sequence
aatattgatggcctaataacctgca

SEQ ID NO: 116636 - DNA, 25 bp, Probe Sequence
atattgatggcctaataacctgcaa

SEQ ID NO: 116637 - DNA, 25 bp, Probe Sequence
ttgatggcctaataacctgcaatag

SEQ ID NO: 116638 - DNA, 25 bp, Probe Sequence
gatcacagcatctcaggtcctctag

SEQ ID NO: 116639 - DNA, 25 bp, Probe Sequence
gagctgtgggagggtaaatattgat

SEQ ID NO: 116640 - DNA, 25 bp, Probe Sequence
agctgtgggagggtaaatattgatg

SEQ ID NO: 116641 - DNA, 25 bp, Probe Sequence
attgatggcctaataacctgcaata

SEQ ID NO: 116642 - DNA, 25 bp, Probe Sequence
tattgatggcctaataacctgcaat

SEQ ID NO: 116643 - DNA, 25 bp, Probe Sequence
catcatctgtcctctctatggcagg

SEQ ID NO: 116644 - DNA, 25 bp, Probe Sequence
acagcaataaagaggtgtccttgtc

SEQ ID NO: 116645 - DNA, 25 bp, Probe Sequence
aaatattgatggcctaataacctgc

SEQ ID NO: 116646 - DNA, 25 bp, Probe Sequence
ctgagctgtgggagggtaaatattg

SEQ ID NO: 116647 - DNA, 25 bp, Probe Sequence
ctgtgggagggtaaatattgatggc

SEQ ID NO: 116648 - DNA, 25 bp, Probe Sequence
gctgtgggagggtaaatattgatgg

SEQ ID NO: 116649 - DNA, 25 bp, Probe Sequence
tgagctgtgggagggtaaatattga

SEQ ID NO: 116650 - DNA, 25 bp, Probe Sequence
atttgaagggtgcaaagtgattaag

SEQ ID NO: 116651 - DNA, 25 bp, Probe Sequence
gtatttgaagggtgcaaagtgatta

SEQ ID NO: 116652 - DNA, 25 bp, Probe Sequence
gcatcatctgtcctctctatggcag

SEQ ID NO: 116653 - DNA, 25 bp, Probe Sequence
ggagggtaaatattgatggcctaat

SEQ ID NO: 116654 - DNA, 25 bp, Probe Sequence
ctgggcatcatctgtcctctctatg

SEQ ID NO: 116655 - DNA, 25 bp, Probe Sequence
cagcaataaagaggtgtccttgtcc

SEQ ID NO: 116656 - DNA, 25 bp, Probe Sequence
tatttgaagggtgcaaagtgattaa

SEQ ID NO: 116657 - DNA, 25 bp, Probe Sequence
agtatttgaagggtgcaaagtgatt

SEQ ID NO: 116658 - DNA, 25 bp, Probe Sequence
aagtatttgaagggtgcaaagtgat

SEQ ID NO: 116659 - DNA, 25 bp, Probe Sequence
agaattaagtgagtcaagccaagta

SEQ ID NO: 116660 - DNA, 25 bp, Probe Sequence
tcagatagacagtgccagaattaag

SEQ ID NO: 116661 - DNA, 25 bp, Probe Sequence
ctcagatagacagtgccagaattaa

SEQ ID NO: 116662 - DNA, 25 bp, Probe Sequence
atagacagtgccagaattaagtgag

SEQ ID NO: 116663 - DNA, 25 bp, Probe Sequence
agatagacagtgccagaattaagtg

SEQ ID NO: 116664 - DNA, 25 bp, Probe Sequence
cagatagacagtgccagaattaagt

SEQ ID NO: 116665 - DNA, 25 bp, Probe Sequence
ataattgtgcctacctcagatagac

SEQ ID NO: 116666 - DNA, 25 bp, Probe Sequence
gatagacagtgccagaattaagtga

SEQ ID NO: 116667 - DNA, 25 bp, Probe Sequence
gataattgtgcctacctcagataga

SEQ ID NO: 116668 - DNA, 25 bp, Probe Sequence
gaattaagtgagtcaagccaagtaa

SEQ ID NO: 116669 - DNA, 25 bp, Probe Sequence
cagaattaagtgagtcaagccaagt

SEQ ID NO: 116670 - DNA, 25 bp, Probe Sequence
gtgataattgtgcctacctcagata

SEQ ID NO: 116671 - DNA, 25 bp, Probe Sequence
tgataattgtgcctacctcagatag

SEQ ID NO: 116672 - DNA, 25 bp, Probe Sequence
tagacagtgccagaattaagtgagt

SEQ ID NO: 116673 - DNA, 25 bp, Probe Sequence
cctcagatagacagtgccagaatta

SEQ ID NO: 116674 - DNA, 25 bp, Probe Sequence
ccagaattaagtgagtcaagccaag

SEQ ID NO: 116675 - DNA, 25 bp, Probe Sequence
cagtgccagaattaagtgagtcaag

SEQ ID NO: 116676 - DNA, 25 bp, Probe Sequence
taattgtgcctacctcagatagaca

SEQ ID NO: 116677 - DNA, 25 bp, Probe Sequence
acagtgccagaattaagtgagtcaa

SEQ ID NO: 116678 - DNA, 25 bp, Probe Sequence
tacctcagatagacagtgccagaat

SEQ ID NO: 116679 - DNA, 25 bp, Probe Sequence
aattgtgcctacctcagatagacag

SEQ ID NO: 116680 - DNA, 25 bp, Probe Sequence
attaagtgagtcaagccaagtaaag

SEQ ID NO: 116681 - DNA, 25 bp, Probe Sequence
ctacctcagatagacagtgccagaa

SEQ ID NO: 116682 - DNA, 25 bp, Probe Sequence
aattaagtgagtcaagccaagtaaa

SEQ ID NO: 116683 - DNA, 25 bp, Probe Sequence
gattattaaactctttctctgctgc

SEQ ID NO: 116684 - DNA, 25 bp, Probe Sequence
ttattaaactctttctctgctgcaa

SEQ ID NO: 116685 - DNA, 25 bp, Probe Sequence
attattaaactctttctctgctgca

SEQ ID NO: 116686 - DNA, 25 bp, Probe Sequence
agattattaaactctttctctgctg

SEQ ID NO: 116687 - DNA, 25 bp, Probe Sequence
tggctttgagattattaaactcttt

SEQ ID NO: 116688 - DNA, 25 bp, Probe Sequence
ggctttgagattattaaactctttc

SEQ ID NO: 116689 - DNA, 25 bp, Probe Sequence
gctttgagattattaaactctttct

SEQ ID NO: 116690 - DNA, 25 bp, Probe Sequence
tgagattattaaactctttctctgc

SEQ ID NO: 116691 - DNA, 25 bp, Probe Sequence
gagattattaaactctttctctgct

SEQ ID NO: 116692 - DNA, 25 bp, Probe Sequence
ggtctaggtaggtgtaactgtcaca

SEQ ID NO: 116693 - DNA, 25 bp, Probe Sequence
gtgggtctaggtaggtgtaactgtc

SEQ ID NO: 116694 - DNA, 25 bp, Probe Sequence
tgggtctaggtaggtgtaactgtca

SEQ ID NO: 116695 - DNA, 25 bp, Probe Sequence
gggtctaggtaggtgtaactgtcac

SEQ ID NO: 116696 - DNA, 25 bp, Probe Sequence
ctaggtaggtgtaactgtcacactc

SEQ ID NO: 116697 - DNA, 25 bp, Probe Sequence
gtctaggtaggtgtaactgtcacac

SEQ ID NO: 116698 - DNA, 25 bp, Probe Sequence
tctaggtaggtgtaactgtcacact

SEQ ID NO: 116699 - DNA, 25 bp, Probe Sequence
ctggtgggtctaggtaggtgtaact

SEQ ID NO: 116700 - DNA, 25 bp, Probe Sequence
ggtgggtctaggtaggtgtaactgt

SEQ ID NO: 116701 - DNA, 25 bp, Probe Sequence
tggtgggtctaggtaggtgtaactg

SEQ ID NO: 116702 - DNA, 25 bp, Probe Sequence
taggtaggtgtaactgtcacactcc

SEQ ID NO: 116703 - DNA, 25 bp, Probe Sequence
gtaggtgtaactgtcacactccctc

SEQ ID NO: 116704 - DNA, 25 bp, Probe Sequence
taggtgtaactgtcacactccctca

SEQ ID NO: 116705 - DNA, 25 bp, Probe Sequence
gtcagaggtgccagtagtataatat

SEQ ID NO: 116706 - DNA, 25 bp, Probe Sequence
ggtcagaggtgccagtagtataata

SEQ ID NO: 116707 - DNA, 25 bp, Probe Sequence
ggtgccagtagtataatattcgtct

SEQ ID NO: 116708 - DNA, 25 bp, Probe Sequence
aggtgccagtagtataatattcgtc

SEQ ID NO: 116709 - DNA, 25 bp, Probe Sequence
gaggtgccagtagtataatattcgt

SEQ ID NO: 116710 - DNA, 25 bp, Probe Sequence
tgccagtagtataatattcgtctcc

SEQ ID NO: 116711 - DNA, 25 bp, Probe Sequence
agaggtgccagtagtataatattcg

SEQ ID NO: 116712 - DNA, 25 bp, Probe Sequence
aactcctacaactcaagcattcctc

SEQ ID NO: 116713 - DNA, 25 bp, Probe Sequence
gtgccagtagtataatattcgtctc

SEQ ID NO: 116714 - DNA, 25 bp, Probe Sequence
tcagaggtgccagtagtataatatt

SEQ ID NO: 116715 - DNA, 25 bp, Probe Sequence
gaactcctacaactcaagcattcct

SEQ ID NO: 116716 - DNA, 25 bp, Probe Sequence
cagaggtgccagtagtataatattc

SEQ ID NO: 116717 - DNA, 25 bp, Probe Sequence
gtattggtgactgttgatttgttga

SEQ ID NO: 116718 - DNA, 25 bp, Probe Sequence
tgtattggtgactgttgatttgttg

SEQ ID NO: 116719 - DNA, 25 bp, Probe Sequence
atgtattggtgactgttgatttgtt

SEQ ID NO: 116720 - DNA, 25 bp, Probe Sequence
aatgtattggtgactgttgatttgt

SEQ ID NO: 116721 - DNA, 25 bp, Probe Sequence
tattggtgactgttgatttgttgaa

SEQ ID NO: 116722 - DNA, 25 bp, Probe Sequence
tagttcagttaattcatcctgttga

SEQ ID NO: 116723 - DNA, 25 bp, Probe Sequence
attggtgactgttgatttgttgaac

SEQ ID NO: 116724 - DNA, 25 bp, Probe Sequence
tgaactcctacaactcaagcattcc

SEQ ID NO: 116725 - DNA, 25 bp, Probe Sequence
ctagttcagttaattcatcctgttg

SEQ ID NO: 116726 - DNA, 25 bp, Probe Sequence
tctagttcagttaattcatcctgtt

SEQ ID NO: 116727 - DNA, 25 bp, Probe Sequence
ttctagttcagttaattcatcctgt

SEQ ID NO: 116728 - DNA, 25 bp, Probe Sequence
agggctagggaacatcattaagaat

SEQ ID NO: 116729 - DNA, 25 bp, Probe Sequence
tagtaagttcagcacttgtctcatt

SEQ ID NO: 116730 - DNA, 25 bp, Probe Sequence
aacatagtaagttcagcacttgtct

SEQ ID NO: 116731 - DNA, 25 bp, Probe Sequence
atagtaagttcagcacttgtctcat

SEQ ID NO: 116732 - DNA, 25 bp, Probe Sequence
catagtaagttcagcacttgtctca

SEQ ID NO: 116733 - DNA, 25 bp, Probe Sequence
acatagtaagttcagcacttgtctc

SEQ ID NO: 116734 - DNA, 25 bp, Probe Sequence
taacatagtaagttcagcacttgtc

SEQ ID NO: 116735 - DNA, 25 bp, Probe Sequence
ttaacatagtaagttcagcacttgt

SEQ ID NO: 116736 - DNA, 25 bp, Probe Sequence
tagttaacatagtaagttcagcact

SEQ ID NO: 116737 - DNA, 25 bp, Probe Sequence
agtaagttcagcacttgtctcattt

SEQ ID NO: 116738 - DNA, 25 bp, Probe Sequence
atagttaacatagtaagttcagcac

SEQ ID NO: 116739 - DNA, 25 bp, Probe Sequence
catagttaacatagtaagttcagca

SEQ ID NO: 116740 - DNA, 25 bp, Probe Sequence
gttaacatagtaagttcagcacttg

SEQ ID NO: 116741 - DNA, 25 bp, Probe Sequence
agttaacatagtaagttcagcactt

SEQ ID NO: 116742 - DNA, 25 bp, Probe Sequence
tcatagttaacatagtaagttcagc

SEQ ID NO: 116743 - DNA, 25 bp, Probe Sequence
tgtctttcaaactccaaggttccct

SEQ ID NO: 116744 - DNA, 25 bp, Probe Sequence
gtaagttcagcacttgtctcatttt

SEQ ID NO: 116745 - DNA, 25 bp, Probe Sequence
gtctttcaaactccaaggttccctt

SEQ ID NO: 116746 - DNA, 25 bp, Probe Sequence
gatgtactggagcaatcagatcaca

SEQ ID NO: 116747 - DNA, 25 bp, Probe Sequence
atgtactggagcaatcagatcacac

SEQ ID NO: 116748 - DNA, 25 bp, Probe Sequence
cttgatgtactggagcaatcagatc

SEQ ID NO: 116749 - DNA, 25 bp, Probe Sequence
ttgatgtactggagcaatcagatca

SEQ ID NO: 116750 - DNA, 25 bp, Probe Sequence
ccttgatgtactggagcaatcagat

SEQ ID NO: 116751 - DNA, 25 bp, Probe Sequence
tgatgtactggagcaatcagatcac

SEQ ID NO: 116752 - DNA, 25 bp, Probe Sequence
ggtttcttgccttgatgtactggag

SEQ ID NO: 116753 - DNA, 25 bp, Probe Sequence
tgtactggagcaatcagatcacacg

SEQ ID NO: 116754 - DNA, 25 bp, Probe Sequence
gtttcttgccttgatgtactggagc

SEQ ID NO: 116755 - DNA, 25 bp, Probe Sequence
gtggtttcttgccttgatgtactgg

SEQ ID NO: 116756 - DNA, 25 bp, Probe Sequence
tggtttcttgccttgatgtactgga

SEQ ID NO: 116757 - DNA, 25 bp, Probe Sequence
agtcgtggtttcttgccttgatgta

SEQ ID NO: 116758 - DNA, 25 bp, Probe Sequence
cgtggtttcttgccttgatgtactg

SEQ ID NO: 116759 - DNA, 25 bp, Probe Sequence
gtcgtggtttcttgccttgatgtac

SEQ ID NO: 116760 - DNA, 25 bp, Probe Sequence
tcgtggtttcttgccttgatgtact

SEQ ID NO: 116761 - DNA, 25 bp, Probe Sequence
gccttgatgtactggagcaatcaga

SEQ ID NO: 116762 - DNA, 25 bp, Probe Sequence
tgccttgatgtactggagcaatcag

SEQ ID NO: 116763 - DNA, 25 bp, Probe Sequence
tttcttgccttgatgtactggagca

SEQ ID NO: 116764 - DNA, 25 bp, Probe Sequence
cttgccttgatgtactggagcaatc

SEQ ID NO: 116765 - DNA, 25 bp, Probe Sequence
tcttgccttgatgtactggagcaat

SEQ ID NO: 116766 - DNA, 25 bp, Probe Sequence
ttgccttgatgtactggagcaatca

SEQ ID NO: 116767 - DNA, 25 bp, Probe Sequence
ttcttgccttgatgtactggagcaa

SEQ ID NO: 116768 - DNA, 25 bp, Probe Sequence
aaacaaatggctgctggaaagtaca

SEQ ID NO: 116769 - DNA, 25 bp, Probe Sequence
aaaacaaatggctgctggaaagtac

SEQ ID NO: 116770 - DNA, 25 bp, Probe Sequence
aacaaatggctgctggaaagtacag

SEQ ID NO: 116771 - DNA, 25 bp, Probe Sequence
caaatggctgctggaaagtacagac

SEQ ID NO: 116772 - DNA, 25 bp, Probe Sequence
aatggctgctggaaagtacagacaa

SEQ ID NO: 116773 - DNA, 25 bp, Probe Sequence
aaatggctgctggaaagtacagaca

SEQ ID NO: 116774 - DNA, 25 bp, Probe Sequence
acaaatggctgctggaaagtacaga

SEQ ID NO: 116775 - DNA, 25 bp, Probe Sequence
tagaagttaagagtttgagatgcgt

SEQ ID NO: 116776 - DNA, 25 bp, Probe Sequence
gtagaagttaagagtttgagatgcg

SEQ ID NO: 116777 - DNA, 25 bp, Probe Sequence
tggaaaggtgtagaagttaagagtt

SEQ ID NO: 116778 - DNA, 25 bp, Probe Sequence
ttggaaaggtgtagaagttaagagt

SEQ ID NO: 116779 - DNA, 25 bp, Probe Sequence
gagttctatgttgaaatgagtgagc

SEQ ID NO: 116780 - DNA, 25 bp, Probe Sequence
ttgggagttctatgttgaaatgagt

SEQ ID NO: 116781 - DNA, 25 bp, Probe Sequence
gggagttctatgttgaaatgagtga

SEQ ID NO: 116782 - DNA, 25 bp, Probe Sequence
aggtgtagaagttaagagtttgaga

SEQ ID NO: 116783 - DNA, 25 bp, Probe Sequence
agagtcctaagtttgttgaacctac

SEQ ID NO: 116784 - DNA, 25 bp, Probe Sequence
gtagagtcctaagtttgttgaacct

SEQ ID NO: 116785 - DNA, 25 bp, Probe Sequence
ggagttctatgttgaaatgagtgag

SEQ ID NO: 116786 - DNA, 25 bp, Probe Sequence
tgagatttgggagttctatgttgaa

SEQ ID NO: 116787 - DNA, 25 bp, Probe Sequence
tgggagttctatgttgaaatgagtg

SEQ ID NO: 116788 - DNA, 25 bp, Probe Sequence
atgagatttgggagttctatgttga

SEQ ID NO: 116789 - DNA, 25 bp, Probe Sequence
ggatgagatttgggagttctatgtt

SEQ ID NO: 116790 - DNA, 25 bp, Probe Sequence
ttgttgaacctactgttgtaaactg

SEQ ID NO: 116791 - DNA, 25 bp, Probe Sequence
tgtagagtcctaagtttgttgaacc

SEQ ID NO: 116792 - DNA, 25 bp, Probe Sequence
tttgggagttctatgttgaaatgag

SEQ ID NO: 116793 - DNA, 25 bp, Probe Sequence
gatgagatttgggagttctatgttg

SEQ ID NO: 116794 - DNA, 25 bp, Probe Sequence
tgtagaagttaagagtttgagatgc

SEQ ID NO: 116795 - DNA, 25 bp, Probe Sequence
cttggaaaggtgtagaagttaagag

SEQ ID NO: 116796 - DNA, 25 bp, Probe Sequence
agttctatgttgaaatgagtgagcc

SEQ ID NO: 116797 - DNA, 25 bp, Probe Sequence
agaagttaagagtttgagatgcgtg

SEQ ID NO: 116798 - DNA, 25 bp, Probe Sequence
ggaaaggtgtagaagttaagagttt

SEQ ID NO: 116799 - DNA, 25 bp, Probe Sequence
tcagtagaacagtcagaatggaatc

SEQ ID NO: 116800 - DNA, 25 bp, Probe Sequence
ctcagtagaacagtcagaatggaat

SEQ ID NO: 116801 - DNA, 25 bp, Probe Sequence
tagaacagtcagaatggaatcacag

SEQ ID NO: 116802 - DNA, 25 bp, Probe Sequence
agtagaacagtcagaatggaatcac

SEQ ID NO: 116803 - DNA, 25 bp, Probe Sequence
cagtagaacagtcagaatggaatca

SEQ ID NO: 116804 - DNA, 25 bp, Probe Sequence
gtagaacagtcagaatggaatcaca

SEQ ID NO: 116805 - DNA, 25 bp, Probe Sequence
agaacagtcagaatggaatcacaga

SEQ ID NO: 116806 - DNA, 25 bp, Probe Sequence
cctcagtagaacagtcagaatggaa

SEQ ID NO: 116807 - DNA, 25 bp, Probe Sequence
gtcagaatggaatcacagacttgtt

SEQ ID NO: 116808 - DNA, 25 bp, Probe Sequence
gaacagtcagaatggaatcacagac

SEQ ID NO: 116809 - DNA, 25 bp, Probe Sequence
gacaatggataaatcaatggacctg

SEQ ID NO: 116810 - DNA, 25 bp, Probe Sequence
ttccataaagaggcaaacggtaata

SEQ ID NO: 116811 - DNA, 25 bp, Probe Sequence
agacaatggataaatcaatggacct

SEQ ID NO: 116812 - DNA, 25 bp, Probe Sequence
tccataaagaggcaaacggtaatat

SEQ ID NO: 116813 - DNA, 25 bp, Probe Sequence
ggtaggataacatgataagctcaga

SEQ ID NO: 116814 - DNA, 25 bp, Probe Sequence
tttccataaagaggcaaacggtaat

SEQ ID NO: 116815 - DNA, 25 bp, Probe Sequence
acaatggataaatcaatggacctgg

SEQ ID NO: 116816 - DNA, 25 bp, Probe Sequence
aatggataaatcaatggacctggtt

SEQ ID NO: 116817 - DNA, 25 bp, Probe Sequence
gcgtatgtagacaatggataaatca

SEQ ID NO: 116818 - DNA, 25 bp, Probe Sequence
atggataaatcaatggacctggttt

SEQ ID NO: 116819 - DNA, 25 bp, Probe Sequence
tagacaatggataaatcaatggacc

SEQ ID NO: 116820 - DNA, 25 bp, Probe Sequence
cttagactagggaatggcaaacttt

SEQ ID NO: 116821 - DNA, 25 bp, Probe Sequence
agcgtatgtagacaatggataaatc

SEQ ID NO: 116822 - DNA, 25 bp, Probe Sequence
caatggataaatcaatggacctggt

SEQ ID NO: 116823 - DNA, 25 bp, Probe Sequence
attcagtctgtggaggtttgacatt

SEQ ID NO: 116824 - DNA, 25 bp, Probe Sequence
gattcagtctgtggaggtttgacat

SEQ ID NO: 116825 - DNA, 25 bp, Probe Sequence
ttcagtctgtggaggtttgacattc

SEQ ID NO: 116826 - DNA, 25 bp, Probe Sequence
agattcagtctgtggaggtttgaca

SEQ ID NO: 116827 - DNA, 25 bp, Probe Sequence
tcagtctgtggaggtttgacattca

SEQ ID NO: 116828 - DNA, 25 bp, Probe Sequence
cagtctgtggaggtttgacattcac

SEQ ID NO: 116829 - DNA, 25 bp, Probe Sequence
agtctgtggaggtttgacattcacc

SEQ ID NO: 116830 - DNA, 25 bp, Probe Sequence
cagattcagtctgtggaggtttgac

SEQ ID NO: 116831 - DNA, 25 bp, Probe Sequence
gaaccagattcagtctgtggaggtt

SEQ ID NO: 116832 - DNA, 25 bp, Probe Sequence
ccagattcagtctgtggaggtttga

SEQ ID NO: 116833 - DNA, 25 bp, Probe Sequence
tgaaccagattcagtctgtggaggt

SEQ ID NO: 116834 - DNA, 25 bp, Probe Sequence
aaccagattcagtctgtggaggttt

SEQ ID NO: 116835 - DNA, 25 bp, Probe Sequence
accagattcagtctgtggaggtttg

SEQ ID NO: 116836 - DNA, 25 bp, Probe Sequence
tctgtggaggtttgacattcacctg

SEQ ID NO: 116837 - DNA, 25 bp, Probe Sequence
gtctgtggaggtttgacattcacct

SEQ ID NO: 116838 - DNA, 25 bp, Probe Sequence
cgtattgagcacattaagcattcta

SEQ ID NO: 116839 - DNA, 25 bp, Probe Sequence
ttgagcacattaagcattctaagag

SEQ ID NO: 116840 - DNA, 25 bp, Probe Sequence
attaagcattctaagagccgagata

SEQ ID NO: 116841 - DNA, 25 bp, Probe Sequence
attgagcacattaagcattctaaga

SEQ ID NO: 116842 - DNA, 25 bp, Probe Sequence
cattaagcattctaagagccgagat

SEQ ID NO: 116843 - DNA, 25 bp, Probe Sequence
tgagcacattaagcattctaagagc

SEQ ID NO: 116844 - DNA, 25 bp, Probe Sequence
cacattaagcattctaagagccgag

SEQ ID NO: 116845 - DNA, 25 bp, Probe Sequence
gagcacattaagcattctaagagcc

SEQ ID NO: 116846 - DNA, 25 bp, Probe Sequence
acattaagcattctaagagccgaga

SEQ ID NO: 116847 - DNA, 25 bp, Probe Sequence
gtattgagcacattaagcattctaa

SEQ ID NO: 116848 - DNA, 25 bp, Probe Sequence
gcgtattgagcacattaagcattct

SEQ ID NO: 116849 - DNA, 25 bp, Probe Sequence
tattgagcacattaagcattctaag

SEQ ID NO: 116850 - DNA, 25 bp, Probe Sequence
aaatgacaaacacaaagggaaagag

SEQ ID NO: 116851 - DNA, 25 bp, Probe Sequence
gatattgtagacatcaagggaacgg

SEQ ID NO: 116852 - DNA, 25 bp, Probe Sequence
aatgacaaacacaaagggaaagagg

SEQ ID NO: 116853 - DNA, 25 bp, Probe Sequence
gcacattaagcattctaagagccga

SEQ ID NO: 116854 - DNA, 25 bp, Probe Sequence
agcacattaagcattctaagagccg

SEQ ID NO: 116855 - DNA, 25 bp, Probe Sequence
atgacaaacacaaagggaaagagga

SEQ ID NO: 116856 - DNA, 25 bp, Probe Sequence
atattgtagacatcaagggaacggg

SEQ ID NO: 116857 - DNA, 25 bp, Probe Sequence
acaaacacaaagggaaagaggagag

SEQ ID NO: 116858 - DNA, 25 bp, Probe Sequence
gacaaacacaaagggaaagaggaga

SEQ ID NO: 116859 - DNA, 25 bp, Probe Sequence
tgacaaacacaaagggaaagaggag

SEQ ID NO: 116860 - DNA, 25 bp, Probe Sequence
tgcgtattgagcacattaagcattc

SEQ ID NO: 116861 - DNA, 25 bp, Probe Sequence
aaaatgacaaacacaaagggaaaga

SEQ ID NO: 116862 - DNA, 25 bp, Probe Sequence
gcagtgaccttcataaagcatataa

SEQ ID NO: 116863 - DNA, 25 bp, Probe Sequence
gtgaccttcataaagcatataaaca

SEQ ID NO: 116864 - DNA, 25 bp, Probe Sequence
agtgaccttcataaagcatataaac

SEQ ID NO: 116865 - DNA, 25 bp, Probe Sequence
cagtgaccttcataaagcatataaa

SEQ ID NO: 116866 - DNA, 25 bp, Probe Sequence
tgaccttcataaagcatataaacaa

SEQ ID NO: 116867 - DNA, 25 bp, Probe Sequence
tgcagtgaccttcataaagcatata

SEQ ID NO: 116868 - DNA, 25 bp, Probe Sequence
gaccttcataaagcatataaacaaa

SEQ ID NO: 116869 - DNA, 25 bp, Probe Sequence
gtgcagtgaccttcataaagcatat

SEQ ID NO: 116870 - DNA, 25 bp, Probe Sequence
agtgcagtgaccttcataaagcata

SEQ ID NO: 116871 - DNA, 25 bp, Probe Sequence
ccacagtgcagtgaccttcataaag

SEQ ID NO: 116872 - DNA, 25 bp, Probe Sequence
cagtgcagtgaccttcataaagcat

SEQ ID NO: 116873 - DNA, 25 bp, Probe Sequence
cacagtgcagtgaccttcataaagc

SEQ ID NO: 116874 - DNA, 25 bp, Probe Sequence
accttcataaagcatataaacaaaa

SEQ ID NO: 116875 - DNA, 25 bp, Probe Sequence
tcataaagcatataaacaaaatcca

SEQ ID NO: 116876 - DNA, 25 bp, Probe Sequence
gagctggtacagtagtgttggactg

SEQ ID NO: 116877 - DNA, 25 bp, Probe Sequence
acagtgcagtgaccttcataaagca

SEQ ID NO: 116878 - DNA, 25 bp, Probe Sequence
aaagatcccatttcattctgaaggc

SEQ ID NO: 116879 - DNA, 25 bp, Probe Sequence
atcaaaagatcccatttcattctga

SEQ ID NO: 116880 - DNA, 25 bp, Probe Sequence
ggaaacccagggaaatcaaaagatc

SEQ ID NO: 116881 - DNA, 25 bp, Probe Sequence
aatcaaaagatcccatttcattctg

SEQ ID NO: 116882 - DNA, 25 bp, Probe Sequence
gaaacccagggaaatcaaaagatcc

SEQ ID NO: 116883 - DNA, 25 bp, Probe Sequence
aaatcaaaagatcccatttcattct

SEQ ID NO: 116884 - DNA, 25 bp, Probe Sequence
aaaagatcccatttcattctgaagg

SEQ ID NO: 116885 - DNA, 25 bp, Probe Sequence
tcaaaagatcccatttcattctgaa

SEQ ID NO: 116886 - DNA, 25 bp, Probe Sequence
tggaaacccagggaaatcaaaagat

SEQ ID NO: 116887 - DNA, 25 bp, Probe Sequence
caaaagatcccatttcattctgaag

SEQ ID NO: 116888 - DNA, 25 bp, Probe Sequence
aagatcccatttcattctgaaggcc

SEQ ID NO: 116889 - DNA, 25 bp, Probe Sequence
ggaaatcaaaagatcccatttcatt

SEQ ID NO: 116890 - DNA, 25 bp, Probe Sequence
gaaatcaaaagatcccatttcattc

SEQ ID NO: 116891 - DNA, 25 bp, Probe Sequence
aactggaaacccagggaaatcaaaa

SEQ ID NO: 116892 - DNA, 25 bp, Probe Sequence
ctggaaacccagggaaatcaaaaga

SEQ ID NO: 116893 - DNA, 25 bp, Probe Sequence
actggaaacccagggaaatcaaaag

SEQ ID NO: 116894 - DNA, 25 bp, Probe Sequence
cctgtcagattcttgtctaacttca

SEQ ID NO: 116895 - DNA, 25 bp, Probe Sequence
acctgtcagattcttgtctaacttc

SEQ ID NO: 116896 - DNA, 25 bp, Probe Sequence
agtctacctgtcagattcttgtcta

SEQ ID NO: 116897 - DNA, 25 bp, Probe Sequence
ctacctgtcagattcttgtctaact

SEQ ID NO: 116898 - DNA, 25 bp, Probe Sequence
tctacctgtcagattcttgtctaac

SEQ ID NO: 116899 - DNA, 25 bp, Probe Sequence
gtctacctgtcagattcttgtctaa

SEQ ID NO: 116900 - DNA, 25 bp, Probe Sequence
tacctgtcagattcttgtctaactt

SEQ ID NO: 116901 - DNA, 25 bp, Probe Sequence
ctgtcagattcttgtctaacttcaa

SEQ ID NO: 116902 - DNA, 25 bp, Probe Sequence
tgtcagattcttgtctaacttcaat

SEQ ID NO: 116903 - DNA, 25 bp, Probe Sequence
taagcaggcatggattagagacata

SEQ ID NO: 116904 - DNA, 25 bp, Probe Sequence
cagtctacctgtcagattcttgtct

SEQ ID NO: 116905 - DNA, 25 bp, Probe Sequence
ggcatggattagagacataagctat

SEQ ID NO: 116906 - DNA, 25 bp, Probe Sequence
aggcatggattagagacataagcta

SEQ ID NO: 116907 - DNA, 25 bp, Probe Sequence
aagcaggcatggattagagacataa

SEQ ID NO: 116908 - DNA, 25 bp, Probe Sequence
tttggaatacctggaaatggagaaa

SEQ ID NO: 116909 - DNA, 25 bp, Probe Sequence
acatctccagcaaactatctaaact

SEQ ID NO: 116910 - DNA, 25 bp, Probe Sequence
tctccagcaaactatctaaacttct

SEQ ID NO: 116911 - DNA, 25 bp, Probe Sequence
ttggaatacctggaaatggagaaag

SEQ ID NO: 116912 - DNA, 25 bp, Probe Sequence
tatttattcccacatcaatgactgc

SEQ ID NO: 116913 - DNA, 25 bp, Probe Sequence
aacatctccagcaaactatctaaac

SEQ ID NO: 116914 - DNA, 25 bp, Probe Sequence
atttattcccacatcaatgactgct

SEQ ID NO: 116915 - DNA, 25 bp, Probe Sequence
agcaggcatggattagagacataag

SEQ ID NO: 116916 - DNA, 25 bp, Probe Sequence
ctccagcaaactatctaaacttctt

SEQ ID NO: 116917 - DNA, 25 bp, Probe Sequence
catctccagcaaactatctaaactt

SEQ ID NO: 116918 - DNA, 25 bp, Probe Sequence
gtagattcttacgaactccaacttg

SEQ ID NO: 116919 - DNA, 25 bp, Probe Sequence
tagattcttacgaactccaacttgc

SEQ ID NO: 116920 - DNA, 25 bp, Probe Sequence
caagtagattcttacgaactccaac

SEQ ID NO: 116921 - DNA, 25 bp, Probe Sequence
agtagattcttacgaactccaactt

SEQ ID NO: 116922 - DNA, 25 bp, Probe Sequence
aagtagattcttacgaactccaact

SEQ ID NO: 116923 - DNA, 25 bp, Probe Sequence
gcaagtagattcttacgaactccaa

SEQ ID NO: 116924 - DNA, 25 bp, Probe Sequence
cagcaagtagattcttacgaactcc

SEQ ID NO: 116925 - DNA, 25 bp, Probe Sequence
ccagcaagtagattcttacgaactc

SEQ ID NO: 116926 - DNA, 25 bp, Probe Sequence
agcaagtagattcttacgaactcca

SEQ ID NO: 116927 - DNA, 25 bp, Probe Sequence
attaccacagagacctctacaatca

SEQ ID NO: 116928 - DNA, 25 bp, Probe Sequence
tgattaccacagagacctctacaat

SEQ ID NO: 116929 - DNA, 25 bp, Probe Sequence
atgattaccacagagacctctacaa

SEQ ID NO: 116930 - DNA, 25 bp, Probe Sequence
catgattaccacagagacctctaca

SEQ ID NO: 116931 - DNA, 25 bp, Probe Sequence
ttaccacagagacctctacaatcac

SEQ ID NO: 116932 - DNA, 25 bp, Probe Sequence
gattcgtagccagagtctttgatat

SEQ ID NO: 116933 - DNA, 25 bp, Probe Sequence
gaaatggacatcgctaaacagttac

SEQ ID NO: 116934 - DNA, 25 bp, Probe Sequence
cgtagccagagtctttgatatgatt

SEQ ID NO: 116935 - DNA, 25 bp, Probe Sequence
attcgtagccagagtctttgatatg

SEQ ID NO: 116936 - DNA, 25 bp, Probe Sequence
ggtatttgaaatggacatcgctaaa

SEQ ID NO: 116937 - DNA, 25 bp, Probe Sequence
gattaccacagagacctctacaatc

SEQ ID NO: 116938 - DNA, 25 bp, Probe Sequence
tgaaatggacatcgctaaacagtta

SEQ ID NO: 116939 - DNA, 25 bp, Probe Sequence
atttgaaatggacatcgctaaacag

SEQ ID NO: 116940 - DNA, 25 bp, Probe Sequence
aggtatttgaaatggacatcgctaa

SEQ ID NO: 116941 - DNA, 25 bp, Probe Sequence
cttcagggaacagaggtcatattta

SEQ ID NO: 116942 - DNA, 25 bp, Probe Sequence
gttattgtcggtatcggagttctta

SEQ ID NO: 116943 - DNA, 25 bp, Probe Sequence
ttattgtcggtatcggagttcttat

SEQ ID NO: 116944 - DNA, 25 bp, Probe Sequence
tattgtcggtatcggagttcttata

SEQ ID NO: 116945 - DNA, 25 bp, Probe Sequence
attgtcggtatcggagttcttatac

SEQ ID NO: 116946 - DNA, 25 bp, Probe Sequence
tgtcggtatcggagttcttatacta

SEQ ID NO: 116947 - DNA, 25 bp, Probe Sequence
ttgtcggtatcggagttcttatact

SEQ ID NO: 116948 - DNA, 25 bp, Probe Sequence
ggttattgtcggtatcggagttctt

SEQ ID NO: 116949 - DNA, 25 bp, Probe Sequence
gtcggtatcggagttcttatactat

SEQ ID NO: 116950 - DNA, 25 bp, Probe Sequence
tcggtatcggagttcttatactatt

SEQ ID NO: 116951 - DNA, 25 bp, Probe Sequence
cggagttcttatactattagttcgt

SEQ ID NO: 116952 - DNA, 25 bp, Probe Sequence
tcggagttcttatactattagttcg

SEQ ID NO: 116953 - DNA, 25 bp, Probe Sequence
ctggttattgtcggtatcggagttc

SEQ ID NO: 116954 - DNA, 25 bp, Probe Sequence
gttgttgtgcttgtcctggttattg

SEQ ID NO: 116955 - DNA, 25 bp, Probe Sequence
cttgtcctggttattgtcggtatcg

SEQ ID NO: 116956 - DNA, 25 bp, Probe Sequence
tggttattgtcggtatcggagttct

SEQ ID NO: 116957 - DNA, 25 bp, Probe Sequence
ttgttgtgcttgtcctggttattgt

SEQ ID NO: 116958 - DNA, 25 bp, Probe Sequence
atactttggtgatgagcagcagata

SEQ ID NO: 116959 - DNA, 25 bp, Probe Sequence
tccagacagacaatgtttaagagaa

SEQ ID NO: 116960 - DNA, 25 bp, Probe Sequence
atccagacagacaatgtttaagaga

SEQ ID NO: 116961 - DNA, 25 bp, Probe Sequence
gcttgtcctggttattgtcggtatc

SEQ ID NO: 116962 - DNA, 25 bp, Probe Sequence
gttctttatccagacagacaatgtt

SEQ ID NO: 116963 - DNA, 25 bp, Probe Sequence
tactttggtgatgagcagcagataa

SEQ ID NO: 116964 - DNA, 25 bp, Probe Sequence
ccagacagacaatgtttaagagaaa

SEQ ID NO: 116965 - DNA, 25 bp, Probe Sequence
aattcacaccctctatcataaacat

SEQ ID NO: 116966 - DNA, 25 bp, Probe Sequence
gaacaaggaggagaagacaatcata

SEQ ID NO: 116967 - DNA, 25 bp, Probe Sequence
aacaaggaggagaagacaatcataa

SEQ ID NO: 116968 - DNA, 25 bp, Probe Sequence
aagtaaggctatggctctgattcta

SEQ ID NO: 116969 - DNA, 25 bp, Probe Sequence
agtaaggctatggctctgattctag

SEQ ID NO: 116970 - DNA, 25 bp, Probe Sequence
ctattgagattccagtggtgacttc

SEQ ID NO: 116971 - DNA, 25 bp, Probe Sequence
caagtaaggctatggctctgattct

SEQ ID NO: 116972 - DNA, 25 bp, Probe Sequence
ggaacaaggaggagaagacaatcat

SEQ ID NO: 116973 - DNA, 25 bp, Probe Sequence
tattgagattccagtggtgacttca

SEQ ID NO: 116974 - DNA, 25 bp, Probe Sequence
acaagtaaggctatggctctgattc

SEQ ID NO: 116975 - DNA, 25 bp, Probe Sequence
aatgtgctattgagattccagtggt

SEQ ID NO: 116976 - DNA, 25 bp, Probe Sequence
cacaagtaaggctatggctctgatt

SEQ ID NO: 116977 - DNA, 25 bp, Probe Sequence
caggaacaaggaggagaagacaatc

SEQ ID NO: 116978 - DNA, 25 bp, Probe Sequence
acaaggaggagaagacaatcataaa

SEQ ID NO: 116979 - DNA, 25 bp, Probe Sequence
atgtgctattgagattccagtggtg

SEQ ID NO: 116980 - DNA, 25 bp, Probe Sequence
gctattgagattccagtggtgactt

SEQ ID NO: 116981 - DNA, 25 bp, Probe Sequence
agaactagacacccttgaagatttg

SEQ ID NO: 116982 - DNA, 25 bp, Probe Sequence
cagaactagacacccttgaagattt

SEQ ID NO: 116983 - DNA, 25 bp, Probe Sequence
aggaacaaggaggagaagacaatca

SEQ ID NO: 116984 - DNA, 25 bp, Probe Sequence
aaatgtgctattgagattccagtgg

SEQ ID NO: 116985 - DNA, 25 bp, Probe Sequence
gaactagacacccttgaagatttgg

SEQ ID NO: 116986 - DNA, 25 bp, Probe Sequence
gatttagccaacatgcctttcttta

SEQ ID NO: 116987 - DNA, 25 bp, Probe Sequence
atttagccaacatgcctttctttat

SEQ ID NO: 116988 - DNA, 25 bp, Probe Sequence
tttagccaacatgcctttctttatg

SEQ ID NO: 116989 - DNA, 25 bp, Probe Sequence
tatttgatttagccaacatgccttt

SEQ ID NO: 116990 - DNA, 25 bp, Probe Sequence
tctgacccatgaattcttcaactat

SEQ ID NO: 116991 - DNA, 25 bp, Probe Sequence
ttctgacccatgaattcttcaacta

SEQ ID NO: 116992 - DNA, 25 bp, Probe Sequence
cttctgacccatgaattcttcaact

SEQ ID NO: 116993 - DNA, 25 bp, Probe Sequence
ctgacccatgaattcttcaactata

SEQ ID NO: 116994 - DNA, 25 bp, Probe Sequence
cctgcttctgacccatgaattcttc

SEQ ID NO: 116995 - DNA, 25 bp, Probe Sequence
tgacccatgaattcttcaactataa

SEQ ID NO: 116996 - DNA, 25 bp, Probe Sequence
gcttctgacccatgaattcttcaac

SEQ ID NO: 116997 - DNA, 25 bp, Probe Sequence
tgcttctgacccatgaattcttcaa

SEQ ID NO: 116998 - DNA, 25 bp, Probe Sequence
acctgcttctgacccatgaattctt

SEQ ID NO: 116999 - DNA, 25 bp, Probe Sequence
ctgcttctgacccatgaattcttca

SEQ ID NO: 117000 - DNA, 25 bp, Probe Sequence
acccatgaattcttcaactataatc

SEQ ID NO: 117001 - DNA, 25 bp, Probe Sequence
gacccatgaattcttcaactataat

SEQ ID NO: 117002 - DNA, 25 bp, Probe Sequence
cacctgcttctgacccatgaattct

SEQ ID NO: 117003 - DNA, 25 bp, Probe Sequence
acacctgcttctgacccatgaattc

SEQ ID NO: 117004 - DNA, 25 bp, Probe Sequence
gaagccatataagtgtaaggagtgt

SEQ ID NO: 117005 - DNA, 25 bp, Probe Sequence
agaagccatataagtgtaaggagtg

SEQ ID NO: 117006 - DNA, 25 bp, Probe Sequence
ggagagaagccatataagtgtaagg

SEQ ID NO: 117007 - DNA, 25 bp, Probe Sequence
aagccatataagtgtaaggagtgtg

SEQ ID NO: 117008 - DNA, 25 bp, Probe Sequence
gagaagccatataagtgtaaggagt

SEQ ID NO: 117009 - DNA, 25 bp, Probe Sequence
agagaagccatataagtgtaaggag

SEQ ID NO: 117010 - DNA, 25 bp, Probe Sequence
gagagaagccatataagtgtaagga

SEQ ID NO: 117011 - DNA, 25 bp, Probe Sequence
cggagagaagccatataagtgtaag

SEQ ID NO: 117012 - DNA, 25 bp, Probe Sequence
gagaagccttatcagtgtaacgaat

SEQ ID NO: 117013 - DNA, 25 bp, Probe Sequence
agaagccttatcagtgtaacgaatg

SEQ ID NO: 117014 - DNA, 25 bp, Probe Sequence
gaagccttatcagtgtaacgaatgt

SEQ ID NO: 117015 - DNA, 25 bp, Probe Sequence
aagccttatcagtgtaacgaatgtg

SEQ ID NO: 117016 - DNA, 25 bp, Probe Sequence
aagaattgagccacattgaacacaa

SEQ ID NO: 117017 - DNA, 25 bp, Probe Sequence
ggagaagccttatcagtgtaacgaa

SEQ ID NO: 117018 - DNA, 25 bp, Probe Sequence
cgtgtatccagtctagttaaggaag

SEQ ID NO: 117019 - DNA, 25 bp, Probe Sequence
gtgtatccagtctagttaaggaaga

SEQ ID NO: 117020 - DNA, 25 bp, Probe Sequence
gacgttatatatgtgctgaatgtgg

SEQ ID NO: 117021 - DNA, 25 bp, Probe Sequence
ccaggagagagacgttatatatgtg

SEQ ID NO: 117022 - DNA, 25 bp, Probe Sequence
gagagagacgttatatatgtgctga

SEQ ID NO: 117023 - DNA, 25 bp, Probe Sequence
ggagagagacgttatatatgtgctg

SEQ ID NO: 117024 - DNA, 25 bp, Probe Sequence
aggagagagacgttatatatgtgct

SEQ ID NO: 117025 - DNA, 25 bp, Probe Sequence
caggagagagacgttatatatgtgc

SEQ ID NO: 117026 - DNA, 25 bp, Probe Sequence
agccttatcagtgtaacgaatgtgg

SEQ ID NO: 117027 - DNA, 25 bp, Probe Sequence
tataagtgtaaggagtgtgggaaag

SEQ ID NO: 117028 - DNA, 25 bp, Probe Sequence
aactgtaatacgcaaagccagacct

SEQ ID NO: 117029 - DNA, 25 bp, Probe Sequence
actgtaatacgcaaagccagacctc

SEQ ID NO: 117030 - DNA, 25 bp, Probe Sequence
ctgtctcacaagaacttcactcaac

SEQ ID NO: 117031 - DNA, 25 bp, Probe Sequence
attaaagttcctaagacccagtgac

SEQ ID NO: 117032 - DNA, 25 bp, Probe Sequence
cattaaagttcctaagacccagtga

SEQ ID NO: 117033 - DNA, 25 bp, Probe Sequence
atgagcattaaagttcctaagaccc

SEQ ID NO: 117034 - DNA, 25 bp, Probe Sequence
gcacagggattagttatgagcatta

SEQ ID NO: 117035 - DNA, 25 bp, Probe Sequence
gatactcacacattcccacattctc

SEQ ID NO: 117036 - DNA, 25 bp, Probe Sequence
tgcatcagaggtatgaatgttgtaa

SEQ ID NO: 117037 - DNA, 25 bp, Probe Sequence
gagcattaaagttcctaagacccag

SEQ ID NO: 117038 - DNA, 25 bp, Probe Sequence
ttaaagttcctaagacccagtgaca

SEQ ID NO: 117039 - DNA, 25 bp, Probe Sequence
cacagggattagttatgagcattaa

SEQ ID NO: 117040 - DNA, 25 bp, Probe Sequence
gtgcatcagaggtatgaatgttgta

SEQ ID NO: 117041 - DNA, 25 bp, Probe Sequence
cttgaagtgcatcagaggtatgaat

SEQ ID NO: 117042 - DNA, 25 bp, Probe Sequence
cctgtctcacaagaacttcactcaa

SEQ ID NO: 117043 - DNA, 25 bp, Probe Sequence
taaagttcctaagacccagtgacag

SEQ ID NO: 117044 - DNA, 25 bp, Probe Sequence
gcatcagaggtatgaatgttgtaaa

SEQ ID NO: 117045 - DNA, 25 bp, Probe Sequence
gaagtgcatcagaggtatgaatgtt

SEQ ID NO: 117046 - DNA, 25 bp, Probe Sequence
ttgaagtgcatcagaggtatgaatg

SEQ ID NO: 117047 - DNA, 25 bp, Probe Sequence
tttaggatgtaagtttctgaggaga

SEQ ID NO: 117048 - DNA, 25 bp, Probe Sequence
gcattaaagttcctaagacccagtg

SEQ ID NO: 117049 - DNA, 25 bp, Probe Sequence
agcattaaagttcctaagacccagt

SEQ ID NO: 117050 - DNA, 25 bp, Probe Sequence
tgagcattaaagttcctaagaccca

SEQ ID NO: 117051 - DNA, 25 bp, Probe Sequence
tatgagcattaaagttcctaagacc

SEQ ID NO: 117052 - DNA, 25 bp, Probe Sequence
gcataccaccacacctttctaattt

SEQ ID NO: 117053 - DNA, 25 bp, Probe Sequence
taaggaggactcttgaggctcataa

SEQ ID NO: 117054 - DNA, 25 bp, Probe Sequence
ttactaactcttacgccaacttctt

SEQ ID NO: 117055 - DNA, 25 bp, Probe Sequence
attactaactcttacgccaacttct

SEQ ID NO: 117056 - DNA, 25 bp, Probe Sequence
accttattactaactcttacgccaa

SEQ ID NO: 117057 - DNA, 25 bp, Probe Sequence
aaccttattactaactcttacgcca

SEQ ID NO: 117058 - DNA, 25 bp, Probe Sequence
actaactcttacgccaacttcttaa

SEQ ID NO: 117059 - DNA, 25 bp, Probe Sequence
ccttattactaactcttacgccaac

SEQ ID NO: 117060 - DNA, 25 bp, Probe Sequence
tactaactcttacgccaacttctta

SEQ ID NO: 117061 - DNA, 25 bp, Probe Sequence
taactcttacgccaacttcttaatg

SEQ ID NO: 117062 - DNA, 25 bp, Probe Sequence
ctaactcttacgccaacttcttaat

SEQ ID NO: 117063 - DNA, 25 bp, Probe Sequence
tattactaactcttacgccaacttc

SEQ ID NO: 117064 - DNA, 25 bp, Probe Sequence
cttattactaactcttacgccaact

SEQ ID NO: 117065 - DNA, 25 bp, Probe Sequence
tggaacatatagcagtatcattgac

SEQ ID NO: 117066 - DNA, 25 bp, Probe Sequence
ttattactaactcttacgccaactt

SEQ ID NO: 117067 - DNA, 25 bp, Probe Sequence
ggaacatatagcagtatcattgact

SEQ ID NO: 117068 - DNA, 25 bp, Probe Sequence
atggaacatatagcagtatcattga

SEQ ID NO: 117069 - DNA, 25 bp, Probe Sequence
tacgccaacttcttaatggaacata

SEQ ID NO: 117070 - DNA, 25 bp, Probe Sequence
acttcttaatggaacatatagcagt

SEQ ID NO: 117071 - DNA, 25 bp, Probe Sequence
cgccaacttcttaatggaacatata

SEQ ID NO: 117072 - DNA, 25 bp, Probe Sequence
acgccaacttcttaatggaacatat

SEQ ID NO: 117073 - DNA, 25 bp, Probe Sequence
ttacgccaacttcttaatggaacat

SEQ ID NO: 117074 - DNA, 25 bp, Probe Sequence
ctcttacgccaacttcttaatggaa

SEQ ID NO: 117075 - DNA, 25 bp, Probe Sequence
tcttacgccaacttcttaatggaac

SEQ ID NO: 117076 - DNA, 25 bp, Probe Sequence
aactcttacgccaacttcttaatgg

SEQ ID NO: 117077 - DNA, 25 bp, Probe Sequence
caacttcttaatggaacatatagca

SEQ ID NO: 117078 - DNA, 25 bp, Probe Sequence
gagttgactgatgttgtgagtgtaa

SEQ ID NO: 117079 - DNA, 25 bp, Probe Sequence
tgagttgactgatgttgtgagtgta

SEQ ID NO: 117080 - DNA, 25 bp, Probe Sequence
tgtgtgaatatgtgtgcctgtagag

SEQ ID NO: 117081 - DNA, 25 bp, Probe Sequence
atcttatggatagctcaagtctctg

SEQ ID NO: 117082 - DNA, 25 bp, Probe Sequence
atgtgagttgactgatgttgtgagt

SEQ ID NO: 117083 - DNA, 25 bp, Probe Sequence
catttggttatttctggtatcggtg

SEQ ID NO: 117084 - DNA, 25 bp, Probe Sequence
gtgtgtgaatatgtgtgcctgtaga

SEQ ID NO: 117085 - DNA, 25 bp, Probe Sequence
catgtgagttgactgatgttgtgag

SEQ ID NO: 117086 - DNA, 25 bp, Probe Sequence
atttggttatttctggtatcggtgg

SEQ ID NO: 117087 - DNA, 25 bp, Probe Sequence
tcttatggatagctcaagtctctgc

SEQ ID NO: 117088 - DNA, 25 bp, Probe Sequence
ctcaagtctctgccatttgtaattt

SEQ ID NO: 117089 - DNA, 25 bp, Probe Sequence
ttgactgatgttgtgagtgtaaatg

SEQ ID NO: 117090 - DNA, 25 bp, Probe Sequence
gttgactgatgttgtgagtgtaaat

SEQ ID NO: 117091 - DNA, 25 bp, Probe Sequence
gcatttggttatttctggtatcggt

SEQ ID NO: 117092 - DNA, 25 bp, Probe Sequence
agttgactgatgttgtgagtgtaaa

SEQ ID NO: 117093 - DNA, 25 bp, Probe Sequence
gtgagttgactgatgttgtgagtgt

SEQ ID NO: 117094 - DNA, 25 bp, Probe Sequence
tgtgagttgactgatgttgtgagtg

SEQ ID NO: 117095 - DNA, 25 bp, Probe Sequence
tatcttatggatagctcaagtctct

SEQ ID NO: 117096 - DNA, 25 bp, Probe Sequence
cttatggatagctcaagtctctgcc

SEQ ID NO: 117097 - DNA, 25 bp, Probe Sequence
ggtgtgtgaatatgtgtgcctgtag

SEQ ID NO: 117098 - DNA, 25 bp, Probe Sequence
gctcaagtctctgccatttgtaatt

SEQ ID NO: 117099 - DNA, 25 bp, Probe Sequence
tgactgatgttgtgagtgtaaatgc

SEQ ID NO: 117100 - DNA, 25 bp, Probe Sequence
gtgtgaatatgtgtgcctgtagagg

SEQ ID NO: 117101 - DNA, 25 bp, Probe Sequence
ttatcttatggatagctcaagtctc

SEQ ID NO: 117102 - DNA, 25 bp, Probe Sequence
catttctcccaccaggctcaatatt

SEQ ID NO: 117103 - DNA, 25 bp, Probe Sequence
gcatttctcccaccaggctcaatat

SEQ ID NO: 117104 - DNA, 25 bp, Probe Sequence
atttctcccaccaggctcaatattg

SEQ ID NO: 117105 - DNA, 25 bp, Probe Sequence
aatattgtgcatgacacccgctaca

SEQ ID NO: 117106 - DNA, 25 bp, Probe Sequence
tttctcccaccaggctcaatattgt

SEQ ID NO: 117107 - DNA, 25 bp, Probe Sequence
caggctcaatattgtgcatgacacc

SEQ ID NO: 117108 - DNA, 25 bp, Probe Sequence
ccaggctcaatattgtgcatgacac

SEQ ID NO: 117109 - DNA, 25 bp, Probe Sequence
caccaggctcaatattgtgcatgac

SEQ ID NO: 117110 - DNA, 25 bp, Probe Sequence
accaggctcaatattgtgcatgaca

SEQ ID NO: 117111 - DNA, 25 bp, Probe Sequence
atattgtgcatgacacccgctacaa

SEQ ID NO: 117112 - DNA, 25 bp, Probe Sequence
caatattgtgcatgacacccgctac

SEQ ID NO: 117113 - DNA, 25 bp, Probe Sequence
tcaatattgtgcatgacacccgcta

SEQ ID NO: 117114 - DNA, 25 bp, Probe Sequence
ttctcccaccaggctcaatattgtg

SEQ ID NO: 117115 - DNA, 25 bp, Probe Sequence
taaaagccaaccttcaaagaaactt

SEQ ID NO: 117116 - DNA, 25 bp, Probe Sequence
ataaaagccaaccttcaaagaaact

SEQ ID NO: 117117 - DNA, 25 bp, Probe Sequence
aataaaagccaaccttcaaagaaac

SEQ ID NO: 117118 - DNA, 25 bp, Probe Sequence
aaaagccaaccttcaaagaaacttg

SEQ ID NO: 117119 - DNA, 25 bp, Probe Sequence
aaataaaagccaaccttcaaagaaa

SEQ ID NO: 117120 - DNA, 25 bp, Probe Sequence
aaaataaaagccaaccttcaaagaa

SEQ ID NO: 117121 - DNA, 25 bp, Probe Sequence
aaagccaaccttcaaagaaacttga

SEQ ID NO: 117122 - DNA, 25 bp, Probe Sequence
taaaataaaagccaaccttcaaaga

SEQ ID NO: 117123 - DNA, 25 bp, Probe Sequence
aaacttgaagctttgtaggtgagat

SEQ ID NO: 117124 - DNA, 25 bp, Probe Sequence
aagaaacttgaagctttgtaggtga

SEQ ID NO: 117125 - DNA, 25 bp, Probe Sequence
gaaacttgaagctttgtaggtgaga

SEQ ID NO: 117126 - DNA, 25 bp, Probe Sequence
agaaacttgaagctttgtaggtgag

SEQ ID NO: 117127 - DNA, 25 bp, Probe Sequence
ataaaataaaagccaaccttcaaag

SEQ ID NO: 117128 - DNA, 25 bp, Probe Sequence
aaagaaacttgaagctttgtaggtg

SEQ ID NO: 117129 - DNA, 25 bp, Probe Sequence
aataaaataaaagccaaccttcaaa

SEQ ID NO: 117130 - DNA, 25 bp, Probe Sequence
aaataaaataaaagccaaccttcaa

SEQ ID NO: 117131 - DNA, 25 bp, Probe Sequence
taaataaaataaaagccaaccttca

SEQ ID NO: 117132 - DNA, 25 bp, Probe Sequence
aagccaaccttcaaagaaacttgaa

SEQ ID NO: 117133 - DNA, 25 bp, Probe Sequence
tacattaagagggaagcaaagttac

SEQ ID NO: 117134 - DNA, 25 bp, Probe Sequence
agtacattaagagggaagcaaagtt

SEQ ID NO: 117135 - DNA, 25 bp, Probe Sequence
tagtacattaagagggaagcaaagt

SEQ ID NO: 117136 - DNA, 25 bp, Probe Sequence
gtacattaagagggaagcaaagtta

SEQ ID NO: 117137 - DNA, 25 bp, Probe Sequence
ttagtacattaagagggaagcaaag

SEQ ID NO: 117138 - DNA, 25 bp, Probe Sequence
attagtacattaagagggaagcaaa

SEQ ID NO: 117139 - DNA, 25 bp, Probe Sequence
ctattagtacattaagagggaagca

SEQ ID NO: 117140 - DNA, 25 bp, Probe Sequence
actattagtacattaagagggaagc

SEQ ID NO: 117141 - DNA, 25 bp, Probe Sequence
tattagtacattaagagggaagcaa

SEQ ID NO: 117142 - DNA, 25 bp, Probe Sequence
acacaactattagtacattaagagg

SEQ ID NO: 117143 - DNA, 25 bp, Probe Sequence
acaactattagtacattaagaggga

SEQ ID NO: 117144 - DNA, 25 bp, Probe Sequence
cacaactattagtacattaagaggg

SEQ ID NO: 117145 - DNA, 25 bp, Probe Sequence
agacacaactattagtacattaaga

SEQ ID NO: 117146 - DNA, 25 bp, Probe Sequence
gacacaactattagtacattaagag

SEQ ID NO: 117147 - DNA, 25 bp, Probe Sequence
caactattagtacattaagagggaa

SEQ ID NO: 117148 - DNA, 25 bp, Probe Sequence
aactattagtacattaagagggaag

SEQ ID NO: 117149 - DNA, 25 bp, Probe Sequence
tgagattaaacaatttggagttgga

SEQ ID NO: 117150 - DNA, 25 bp, Probe Sequence
gagattaaacaatttggagttggat

SEQ ID NO: 117151 - DNA, 25 bp, Probe Sequence
tagtctaccgaagtctccatctctg

SEQ ID NO: 117152 - DNA, 25 bp, Probe Sequence
caagtagtctaccgaagtctccatc

SEQ ID NO: 117153 - DNA, 25 bp, Probe Sequence
aagtagtctaccgaagtctccatct

SEQ ID NO: 117154 - DNA, 25 bp, Probe Sequence
gtagtctaccgaagtctccatctct

SEQ ID NO: 117155 - DNA, 25 bp, Probe Sequence
agtagtctaccgaagtctccatctc

SEQ ID NO: 117156 - DNA, 25 bp, Probe Sequence
tcacaagatggctttagacattctc

SEQ ID NO: 117157 - DNA, 25 bp, Probe Sequence
ctcacaagatggctttagacattct

SEQ ID NO: 117158 - DNA, 25 bp, Probe Sequence
gagaatgaagaacaggaatgcagag

SEQ ID NO: 117159 - DNA, 25 bp, Probe Sequence
gagagaatgaagaacaggaatgcag

SEQ ID NO: 117160 - DNA, 25 bp, Probe Sequence
ccagttcttacaggatatcagtaga

SEQ ID NO: 117161 - DNA, 25 bp, Probe Sequence
ccaagtagtctaccgaagtctccat

SEQ ID NO: 117162 - DNA, 25 bp, Probe Sequence
agagaatgaagaacaggaatgcaga

SEQ ID NO: 117163 - DNA, 25 bp, Probe Sequence
aattggcggagagaatgaagaacag

SEQ ID NO: 117164 - DNA, 25 bp, Probe Sequence
gaattggcggagagaatgaagaaca

SEQ ID NO: 117165 - DNA, 25 bp, Probe Sequence
cactaaattcacggctttcatgttt

SEQ ID NO: 117166 - DNA, 25 bp, Probe Sequence
tcagtagacagaatagtaataacca

SEQ ID NO: 117167 - DNA, 25 bp, Probe Sequence
acaggatatcagtagacagaatagt

SEQ ID NO: 117168 - DNA, 25 bp, Probe Sequence
agttcttacaggatatcagtagaca

SEQ ID NO: 117169 - DNA, 25 bp, Probe Sequence
cggagagaatgaagaacaggaatgc

SEQ ID NO: 117170 - DNA, 25 bp, Probe Sequence
gcggagagaatgaagaacaggaatg

SEQ ID NO: 117171 - DNA, 25 bp, Probe Sequence
cacaagatggctttagacattctcg

SEQ ID NO: 117172 - DNA, 25 bp, Probe Sequence
accaacaaatcattgatactcttga

SEQ ID NO: 117173 - DNA, 25 bp, Probe Sequence
tcttacaggatatcagtagacagaa

SEQ ID NO: 117174 - DNA, 25 bp, Probe Sequence
ttcttacaggatatcagtagacaga

SEQ ID NO: 117175 - DNA, 25 bp, Probe Sequence
tgctttcaaccaatcgtaaatgttt

SEQ ID NO: 117176 - DNA, 25 bp, Probe Sequence
gtgctttcaaccaatcgtaaatgtt

SEQ ID NO: 117177 - DNA, 25 bp, Probe Sequence
gtgtgctttcaaccaatcgtaaatg

SEQ ID NO: 117178 - DNA, 25 bp, Probe Sequence
tgtgctttcaaccaatcgtaaatgt

SEQ ID NO: 117179 - DNA, 25 bp, Probe Sequence
tgtgtgctttcaaccaatcgtaaat

SEQ ID NO: 117180 - DNA, 25 bp, Probe Sequence
ctgtgtgctttcaaccaatcgtaaa

SEQ ID NO: 117181 - DNA, 25 bp, Probe Sequence
tctgtgtgctttcaaccaatcgtaa

SEQ ID NO: 117182 - DNA, 25 bp, Probe Sequence
gctttcaaccaatcgtaaatgtttt

SEQ ID NO: 117183 - DNA, 25 bp, Probe Sequence
ctaacaagaacgcttccatctcaaa

SEQ ID NO: 117184 - DNA, 25 bp, Probe Sequence
taacaagaacgcttccatctcaaac

SEQ ID NO: 117185 - DNA, 25 bp, Probe Sequence
gctaacaagaacgcttccatctcaa

SEQ ID NO: 117186 - DNA, 25 bp, Probe Sequence
aagaacgcttccatctcaaaccttt

SEQ ID NO: 117187 - DNA, 25 bp, Probe Sequence
ctctgcctgggaaattattttatgt

SEQ ID NO: 117188 - DNA, 25 bp, Probe Sequence
tctctgcctgggaaattattttatg

SEQ ID NO: 117189 - DNA, 25 bp, Probe Sequence
tctgcctgggaaattattttatgtt

SEQ ID NO: 117190 - DNA, 25 bp, Probe Sequence
tgctaacaagaacgcttccatctca

SEQ ID NO: 117191 - DNA, 25 bp, Probe Sequence
gcctgggaaattattttatgtttgt

SEQ ID NO: 117192 - DNA, 25 bp, Probe Sequence
tgcctgggaaattattttatgtttg

SEQ ID NO: 117193 - DNA, 25 bp, Probe Sequence
ctgcctgggaaattattttatgttt

SEQ ID NO: 117194 - DNA, 25 bp, Probe Sequence
ttctctgcctgggaaattattttat

SEQ ID NO: 117195 - DNA, 25 bp, Probe Sequence
cttccatctcaaaccttttctctgc

SEQ ID NO: 117196 - DNA, 25 bp, Probe Sequence
gcttccatctcaaaccttttctctg

SEQ ID NO: 117197 - DNA, 25 bp, Probe Sequence
caagaacgcttccatctcaaacctt

SEQ ID NO: 117198 - DNA, 25 bp, Probe Sequence
aacaagaacgcttccatctcaaacc

SEQ ID NO: 117199 - DNA, 25 bp, Probe Sequence
gaacgcttccatctcaaaccttttc

SEQ ID NO: 117200 - DNA, 25 bp, Probe Sequence
cttttctctgcctgggaaattattt

SEQ ID NO: 117201 - DNA, 25 bp, Probe Sequence
ttttctctgcctgggaaattatttt

SEQ ID NO: 117202 - DNA, 25 bp, Probe Sequence
aacgcttccatctcaaaccttttct

SEQ ID NO: 117203 - DNA, 25 bp, Probe Sequence
ttccatctcaaaccttttctctgcc

SEQ ID NO: 117204 - DNA, 25 bp, Probe Sequence
cgcttccatctcaaaccttttctct

SEQ ID NO: 117205 - DNA, 25 bp, Probe Sequence
ccttttctctgcctgggaaattatt

SEQ ID NO: 117206 - DNA, 25 bp, Probe Sequence
tttctctgcctgggaaattatttta

SEQ ID NO: 117207 - DNA, 25 bp, Probe Sequence
cttcttcatcagcaactaccataac

SEQ ID NO: 117208 - DNA, 25 bp, Probe Sequence
tcttcttcatcagcaactaccataa

SEQ ID NO: 117209 - DNA, 25 bp, Probe Sequence
atcttcttcatcagcaactaccata

SEQ ID NO: 117210 - DNA, 25 bp, Probe Sequence
ttcttcatcagcaactaccataacc

SEQ ID NO: 117211 - DNA, 25 bp, Probe Sequence
tgtgtgtgttaattctctctctctc

SEQ ID NO: 117212 - DNA, 25 bp, Probe Sequence
gtgtgtgttaattctctctctctct

SEQ ID NO: 117213 - DNA, 25 bp, Probe Sequence
catcttcttcatcagcaactaccat

SEQ ID NO: 117214 - DNA, 25 bp, Probe Sequence
ttgtgtgtgttaattctctctctct

SEQ ID NO: 117215 - DNA, 25 bp, Probe Sequence
tgtgtgttaattctctctctctctc

SEQ ID NO: 117216 - DNA, 25 bp, Probe Sequence
gtgtgttaattctctctctctctct

SEQ ID NO: 117217 - DNA, 25 bp, Probe Sequence
ctcatcttcttcatcagcaactacc

SEQ ID NO: 117218 - DNA, 25 bp, Probe Sequence
cctcatcttcttcatcagcaactac

SEQ ID NO: 117219 - DNA, 25 bp, Probe Sequence
tcctcatcttcttcatcagcaacta

SEQ ID NO: 117220 - DNA, 25 bp, Probe Sequence
gtgttaattctctctctctctctca

SEQ ID NO: 117221 - DNA, 25 bp, Probe Sequence
tgtgttaattctctctctctctctc

SEQ ID NO: 117222 - DNA, 25 bp, Probe Sequence
cttcatcagcaactaccataaccag

SEQ ID NO: 117223 - DNA, 25 bp, Probe Sequence
taattctctctctctctctcagaca

SEQ ID NO: 117224 - DNA, 25 bp, Probe Sequence
tgttaattctctctctctctctcag

SEQ ID NO: 117225 - DNA, 25 bp, Probe Sequence
aattctctctctctctctcagacac

SEQ ID NO: 117226 - DNA, 25 bp, Probe Sequence
tagagtatgttggaactgtcgttaa

SEQ ID NO: 117227 - DNA, 25 bp, Probe Sequence
ttagagtatgttggaactgtcgtta

SEQ ID NO: 117228 - DNA, 25 bp, Probe Sequence
cttagagtatgttggaactgtcgtt

SEQ ID NO: 117229 - DNA, 25 bp, Probe Sequence
tcttcatcagcaactaccataacca

SEQ ID NO: 117230 - DNA, 25 bp, Probe Sequence
tcatcttcttcatcagcaactacca

SEQ ID NO: 117231 - DNA, 25 bp, Probe Sequence
aaactttacacatgcagacatcaag

SEQ ID NO: 117232 - DNA, 25 bp, Probe Sequence
aactttacacatgcagacatcaagc

SEQ ID NO: 117233 - DNA, 25 bp, Probe Sequence
ttcacaaaactttacacatgcagac

SEQ ID NO: 117234 - DNA, 25 bp, Probe Sequence
aaaactttacacatgcagacatcaa

SEQ ID NO: 117235 - DNA, 25 bp, Probe Sequence
caaaactttacacatgcagacatca

SEQ ID NO: 117236 - DNA, 25 bp, Probe Sequence
acaaaactttacacatgcagacatc

SEQ ID NO: 117237 - DNA, 25 bp, Probe Sequence
cacaaaactttacacatgcagacat

SEQ ID NO: 117238 - DNA, 25 bp, Probe Sequence
gttcacaaaactttacacatgcaga

SEQ ID NO: 117239 - DNA, 25 bp, Probe Sequence
tcacaaaactttacacatgcagaca

SEQ ID NO: 117240 - DNA, 25 bp, Probe Sequence
actttacacatgcagacatcaagcc

SEQ ID NO: 117241 - DNA, 25 bp, Probe Sequence
ttacacatgcagacatcaagcccta

SEQ ID NO: 117242 - DNA, 25 bp, Probe Sequence
ctttacacatgcagacatcaagccc

SEQ ID NO: 117243 - DNA, 25 bp, Probe Sequence
tacacatgcagacatcaagccctac

SEQ ID NO: 117244 - DNA, 25 bp, Probe Sequence
tttacacatgcagacatcaagccct

SEQ ID NO: 117245 - DNA, 25 bp, Probe Sequence
tgtggaagaacctttaatcagagaa

SEQ ID NO: 117246 - DNA, 25 bp, Probe Sequence
tggaagaacctttaatcagagaagt

SEQ ID NO: 117247 - DNA, 25 bp, Probe Sequence
atgtggaagaacctttaatcagaga

SEQ ID NO: 117248 - DNA, 25 bp, Probe Sequence
gtggaagaacctttaatcagagaag

SEQ ID NO: 117249 - DNA, 25 bp, Probe Sequence
catgtggaagaacctttaatcagag

SEQ ID NO: 117250 - DNA, 25 bp, Probe Sequence
ggaagaacctttaatcagagaagta

SEQ ID NO: 117251 - DNA, 25 bp, Probe Sequence
ccttctcacccatacagacatcaag

SEQ ID NO: 117252 - DNA, 25 bp, Probe Sequence
cttctcacccatacagacatcaagc

SEQ ID NO: 117253 - DNA, 25 bp, Probe Sequence
accttctcacccatacagacatcaa

SEQ ID NO: 117254 - DNA, 25 bp, Probe Sequence
aaactcaccttctcacccatacaga

SEQ ID NO: 117255 - DNA, 25 bp, Probe Sequence
gaagaacctttaatcagagaagtaa

SEQ ID NO: 117256 - DNA, 25 bp, Probe Sequence
taatctgaaaactcaccttctcacc

SEQ ID NO: 117257 - DNA, 25 bp, Probe Sequence
gtaatctgaaaactcaccttctcac

SEQ ID NO: 117258 - DNA, 25 bp, Probe Sequence
agtaatctgaaaactcaccttctca

SEQ ID NO: 117259 - DNA, 25 bp, Probe Sequence
tcaccttctcacccatacagacatc

SEQ ID NO: 117260 - DNA, 25 bp, Probe Sequence
ctcaccttctcacccatacagacat

SEQ ID NO: 117261 - DNA, 25 bp, Probe Sequence
agagaagtaatctgaaaactcacct

SEQ ID NO: 117262 - DNA, 25 bp, Probe Sequence
aaactttacacatgcaggaatctcc

SEQ ID NO: 117263 - DNA, 25 bp, Probe Sequence
agaacctttaatcagagaagtaatc

SEQ ID NO: 117264 - DNA, 25 bp, Probe Sequence
aagtaatctgaaaactcaccttctc

SEQ ID NO: 117265 - DNA, 25 bp, Probe Sequence
caccttctcacccatacagacatca

SEQ ID NO: 117266 - DNA, 25 bp, Probe Sequence
aactcaccttctcacccatacagac

SEQ ID NO: 117267 - DNA, 25 bp, Probe Sequence
gaacctttaatcagagaagtaatct

SEQ ID NO: 117268 - DNA, 25 bp, Probe Sequence
gagaagtaatctgaaaactcacctt

SEQ ID NO: 117269 - DNA, 25 bp, Probe Sequence
ggaataccaaagattaaagccttga

SEQ ID NO: 117270 - DNA, 25 bp, Probe Sequence
accaaagattaaagccttgacataa

SEQ ID NO: 117271 - DNA, 25 bp, Probe Sequence
aataccaaagattaaagccttgaca

SEQ ID NO: 117272 - DNA, 25 bp, Probe Sequence
ataccaaagattaaagccttgacat

SEQ ID NO: 117273 - DNA, 25 bp, Probe Sequence
gaataccaaagattaaagccttgac

SEQ ID NO: 117274 - DNA, 25 bp, Probe Sequence
ccaaagattaaagccttgacataag

SEQ ID NO: 117275 - DNA, 25 bp, Probe Sequence
taccaaagattaaagccttgacata

SEQ ID NO: 117276 - DNA, 25 bp, Probe Sequence
tggaataccaaagattaaagccttg

SEQ ID NO: 117277 - DNA, 25 bp, Probe Sequence
caaagattaaagccttgacataaga

SEQ ID NO: 117278 - DNA, 25 bp, Probe Sequence
aagattaaagccttgacataagatc

SEQ ID NO: 117279 - DNA, 25 bp, Probe Sequence
atagtcaaacttcaagaaacaatct

SEQ ID NO: 117280 - DNA, 25 bp, Probe Sequence
aaagattaaagccttgacataagat

SEQ ID NO: 117281 - DNA, 25 bp, Probe Sequence
aagccttgacataagatctcatttg

SEQ ID NO: 117282 - DNA, 25 bp, Probe Sequence
aatagtcaaacttcaagaaacaatc

SEQ ID NO: 117283 - DNA, 25 bp, Probe Sequence
aaagccttgacataagatctcattt

SEQ ID NO: 117284 - DNA, 25 bp, Probe Sequence
agccttgacataagatctcatttgc

SEQ ID NO: 117285 - DNA, 25 bp, Probe Sequence
gccttgacataagatctcatttgca

SEQ ID NO: 117286 - DNA, 25 bp, Probe Sequence
taaagccttgacataagatctcatt

SEQ ID NO: 117287 - DNA, 25 bp, Probe Sequence
ttaaagccttgacataagatctcat

SEQ ID NO: 117288 - DNA, 25 bp, Probe Sequence
attaaagccttgacataagatctca

SEQ ID NO: 117289 - DNA, 25 bp, Probe Sequence
aaatagtcaaacttcaagaaacaat

SEQ ID NO: 117290 - DNA, 25 bp, Probe Sequence
gattaaagccttgacataagatctc

SEQ ID NO: 117291 - DNA, 25 bp, Probe Sequence
ttggaataccaaagattaaagcctt

SEQ ID NO: 117292 - DNA, 25 bp, Probe Sequence
taaatagtcaaacttcaagaaacaa

SEQ ID NO: 117293 - DNA, 25 bp, Probe Sequence
gtggaccaatactaagaataacaag

SEQ ID NO: 117294 - DNA, 25 bp, Probe Sequence
tggaccaatactaagaataacaaga

SEQ ID NO: 117295 - DNA, 25 bp, Probe Sequence
accaatactaagaataacaagaagc

SEQ ID NO: 117296 - DNA, 25 bp, Probe Sequence
tgtggaccaatactaagaataacaa

SEQ ID NO: 117297 - DNA, 25 bp, Probe Sequence
ttgtggaccaatactaagaataaca

SEQ ID NO: 117298 - DNA, 25 bp, Probe Sequence
ggaccaatactaagaataacaagaa

SEQ ID NO: 117299 - DNA, 25 bp, Probe Sequence
tttgtggaccaatactaagaataac

SEQ ID NO: 117300 - DNA, 25 bp, Probe Sequence
gaccaatactaagaataacaagaag

SEQ ID NO: 117301 - DNA, 25 bp, Probe Sequence
atgtgaatataacttttgtggacca

SEQ ID NO: 117302 - DNA, 25 bp, Probe Sequence
tgtgaatataacttttgtggaccaa

SEQ ID NO: 117303 - DNA, 25 bp, Probe Sequence
aacttttgtggaccaatactaagaa

SEQ ID NO: 117304 - DNA, 25 bp, Probe Sequence
aatgtgaatataacttttgtggacc

SEQ ID NO: 117305 - DNA, 25 bp, Probe Sequence
acttttgtggaccaatactaagaat

SEQ ID NO: 117306 - DNA, 25 bp, Probe Sequence
taacttttgtggaccaatactaaga

SEQ ID NO: 117307 - DNA, 25 bp, Probe Sequence
gtgaatataacttttgtggaccaat

SEQ ID NO: 117308 - DNA, 25 bp, Probe Sequence
gaatgtgaatataacttttgtggac

SEQ ID NO: 117309 - DNA, 25 bp, Probe Sequence
agaatgtgaatataacttttgtgga

SEQ ID NO: 117310 - DNA, 25 bp, Probe Sequence
ataacttttgtggaccaatactaag

SEQ ID NO: 117311 - DNA, 25 bp, Probe Sequence
cttttgtggaccaatactaagaata

SEQ ID NO: 117312 - DNA, 25 bp, Probe Sequence
ttttgtggaccaatactaagaataa

SEQ ID NO: 117313 - DNA, 25 bp, Probe Sequence
aatataacttttgtggaccaatact

SEQ ID NO: 117314 - DNA, 25 bp, Probe Sequence
tgaatataacttttgtggaccaata

SEQ ID NO: 117315 - DNA, 25 bp, Probe Sequence
gaatataacttttgtggaccaatac

SEQ ID NO: 117316 - DNA, 25 bp, Probe Sequence
tataacttttgtggaccaatactaa

SEQ ID NO: 117317 - DNA, 25 bp, Probe Sequence
atataacttttgtggaccaatacta

SEQ ID NO: 117318 - DNA, 25 bp, Probe Sequence
gacagtcctgagaattattgatggt

SEQ ID NO: 117319 - DNA, 25 bp, Probe Sequence
tgacagtcctgagaattattgatgg

SEQ ID NO: 117320 - DNA, 25 bp, Probe Sequence
acagtcctgagaattattgatggta

SEQ ID NO: 117321 - DNA, 25 bp, Probe Sequence
ctgacagtcctgagaattattgatg

SEQ ID NO: 117322 - DNA, 25 bp, Probe Sequence
gtctgacagtcctgagaattattga

SEQ ID NO: 117323 - DNA, 25 bp, Probe Sequence
ctcagattacttcattgttcagtgg

SEQ ID NO: 117324 - DNA, 25 bp, Probe Sequence
tctgacagtcctgagaattattgat

SEQ ID NO: 117325 - DNA, 25 bp, Probe Sequence
cgtctgacagtcctgagaattattg

SEQ ID NO: 117326 - DNA, 25 bp, Probe Sequence
tctcagattacttcattgttcagtg

SEQ ID NO: 117327 - DNA, 25 bp, Probe Sequence
cagtcctgagaattattgatggtaa

SEQ ID NO: 117328 - DNA, 25 bp, Probe Sequence
tcagattacttcattgttcagtggc

SEQ ID NO: 117329 - DNA, 25 bp, Probe Sequence
tctctcagattacttcattgttcag

SEQ ID NO: 117330 - DNA, 25 bp, Probe Sequence
ctctcagattacttcattgttcagt

SEQ ID NO: 117331 - DNA, 25 bp, Probe Sequence
agtcctgagaattattgatggtaag

SEQ ID NO: 117332 - DNA, 25 bp, Probe Sequence
atgtgttcctatctgtgtatctgcc

SEQ ID NO: 117333 - DNA, 25 bp, Probe Sequence
catgtgttcctatctgtgtatctgc

SEQ ID NO: 117334 - DNA, 25 bp, Probe Sequence
gtcctgagaattattgatggtaagg

SEQ ID NO: 117335 - DNA, 25 bp, Probe Sequence
cctgagaattattgatggtaaggaa

SEQ ID NO: 117336 - DNA, 25 bp, Probe Sequence
gacaaatggcaactgacttctttag

SEQ ID NO: 117337 - DNA, 25 bp, Probe Sequence
gcgtctgacagtcctgagaattatt

SEQ ID NO: 117338 - DNA, 25 bp, Probe Sequence
acaaatggcaactgacttctttaga

SEQ ID NO: 117339 - DNA, 25 bp, Probe Sequence
tgacaaatggcaactgacttcttta

SEQ ID NO: 117340 - DNA, 25 bp, Probe Sequence
aggcttctcttatgaaacaaacatt

SEQ ID NO: 117341 - DNA, 25 bp, Probe Sequence
ggcttctcttatgaaacaaacattg

SEQ ID NO: 117342 - DNA, 25 bp, Probe Sequence
cttccttctctactcatgccagatt

SEQ ID NO: 117343 - DNA, 25 bp, Probe Sequence
catttcctcttccttctctactcat

SEQ ID NO: 117344 - DNA, 25 bp, Probe Sequence
ataaataaattgcctcccttcctcc

SEQ ID NO: 117345 - DNA, 25 bp, Probe Sequence
ccatttcctcttccttctctactca

SEQ ID NO: 117346 - DNA, 25 bp, Probe Sequence
aataaataaattgcctcccttcctc

SEQ ID NO: 117347 - DNA, 25 bp, Probe Sequence
aaataaataaattgcctcccttcct

SEQ ID NO: 117348 - DNA, 25 bp, Probe Sequence
tcttccttctctactcatgccagat

SEQ ID NO: 117349 - DNA, 25 bp, Probe Sequence
gacagggagaaataaataaattgcc

SEQ ID NO: 117350 - DNA, 25 bp, Probe Sequence
cccatttcctcttccttctctactc

SEQ ID NO: 117351 - DNA, 25 bp, Probe Sequence
atttcctcttccttctctactcatg

SEQ ID NO: 117352 - DNA, 25 bp, Probe Sequence
cttcttgctcctgtttaactcccta

SEQ ID NO: 117353 - DNA, 25 bp, Probe Sequence
gaaataaataaattgcctcccttcc

SEQ ID NO: 117354 - DNA, 25 bp, Probe Sequence
cctgtctcagattgggattaacata

SEQ ID NO: 117355 - DNA, 25 bp, Probe Sequence
ttcttgctcctgtttaactccctag

SEQ ID NO: 117356 - DNA, 25 bp, Probe Sequence
ctcttccttctctactcatgccaga

SEQ ID NO: 117357 - DNA, 25 bp, Probe Sequence
ctccctagttacccaccctaatttg

SEQ ID NO: 117358 - DNA, 25 bp, Probe Sequence
ttccttctctactcatgccagattt

SEQ ID NO: 117359 - DNA, 25 bp, Probe Sequence
ttcctcttccttctctactcatgcc

SEQ ID NO: 117360 - DNA, 25 bp, Probe Sequence
agacagggagaaataaataaattgc

SEQ ID NO: 117361 - DNA, 25 bp, Probe Sequence
tttcctcttccttctctactcatgc

SEQ ID NO: 117362 - DNA, 25 bp, Probe Sequence
acagggagaaataaataaattgcct

SEQ ID NO: 117363 - DNA, 25 bp, Probe Sequence
ctgtctcagattgggattaacataa

SEQ ID NO: 117364 - DNA, 25 bp, Probe Sequence
agaaataaataaattgcctcccttc

SEQ ID NO: 117365 - DNA, 25 bp, Probe Sequence
taaataaattgcctcccttcctccg

SEQ ID NO: 117366 - DNA, 25 bp, Probe Sequence
ggagcataatagcaactgagagaat

SEQ ID NO: 117367 - DNA, 25 bp, Probe Sequence
gagcataatagcaactgagagaatc

SEQ ID NO: 117368 - DNA, 25 bp, Probe Sequence
agcataatagcaactgagagaatca

SEQ ID NO: 117369 - DNA, 25 bp, Probe Sequence
gctgatagtgagttattgtaggaat

SEQ ID NO: 117370 - DNA, 25 bp, Probe Sequence
agttagaactgtgactggtacttaa

SEQ ID NO: 117371 - DNA, 25 bp, Probe Sequence
gttagaactgtgactggtacttaat

SEQ ID NO: 117372 - DNA, 25 bp, Probe Sequence
ggagctgatagtgagttattgtagg

SEQ ID NO: 117373 - DNA, 25 bp, Probe Sequence
ctggtaggaggcagtgtagtataag

SEQ ID NO: 117374 - DNA, 25 bp, Probe Sequence
gagctgatagtgagttattgtagga

SEQ ID NO: 117375 - DNA, 25 bp, Probe Sequence
agagaatcaggcatgagttagagaa

SEQ ID NO: 117376 - DNA, 25 bp, Probe Sequence
agctgatagtgagttattgtaggaa

SEQ ID NO: 117377 - DNA, 25 bp, Probe Sequence
gagagaatcaggcatgagttagaga

SEQ ID NO: 117378 - DNA, 25 bp, Probe Sequence
tgagagaatcaggcatgagttagag

SEQ ID NO: 117379 - DNA, 25 bp, Probe Sequence
ttattaaatgtgtgctggtaggagg

SEQ ID NO: 117380 - DNA, 25 bp, Probe Sequence
cttattaaatgtgtgctggtaggag

SEQ ID NO: 117381 - DNA, 25 bp, Probe Sequence
tgacctaaatacactgaaagactct

SEQ ID NO: 117382 - DNA, 25 bp, Probe Sequence
aagtaacaatagaagctaagcagtt

SEQ ID NO: 117383 - DNA, 25 bp, Probe Sequence
aaatgggactaataacacatagggt

SEQ ID NO: 117384 - DNA, 25 bp, Probe Sequence
aatgggactaataacacatagggtt

SEQ ID NO: 117385 - DNA, 25 bp, Probe Sequence
gcttattaaatgtgtgctggtagga

SEQ ID NO: 117386 - DNA, 25 bp, Probe Sequence
ggtaggaggcagtgtagtataagca

SEQ ID NO: 117387 - DNA, 25 bp, Probe Sequence
tggtaggaggcagtgtagtataagc

SEQ ID NO: 117388 - DNA, 25 bp, Probe Sequence
gtaggaggcagtgtagtataagcac

SEQ ID NO: 117389 - DNA, 25 bp, Probe Sequence
acaatagaagctaagcagttagaac

SEQ ID NO: 117390 - DNA, 25 bp, Probe Sequence
taactgagactccttgatatgcttc

SEQ ID NO: 117391 - DNA, 25 bp, Probe Sequence
gtaactgagactccttgatatgctt

SEQ ID NO: 117392 - DNA, 25 bp, Probe Sequence
gtatagactagcatccacatagagc

SEQ ID NO: 117393 - DNA, 25 bp, Probe Sequence
tatagactagcatccacatagagca

SEQ ID NO: 117394 - DNA, 25 bp, Probe Sequence
aggtatagactagcatccacataga

SEQ ID NO: 117395 - DNA, 25 bp, Probe Sequence
ggtatagactagcatccacatagag

SEQ ID NO: 117396 - DNA, 25 bp, Probe Sequence
gaggtatagactagcatccacatag

SEQ ID NO: 117397 - DNA, 25 bp, Probe Sequence
cgaggtatagactagcatccacata

SEQ ID NO: 117398 - DNA, 25 bp, Probe Sequence
gactccttgatatgcttcagagaat

SEQ ID NO: 117399 - DNA, 25 bp, Probe Sequence
ttgcgtaactgagactccttgatat

SEQ ID NO: 117400 - DNA, 25 bp, Probe Sequence
actccttgatatgcttcagagaatt

SEQ ID NO: 117401 - DNA, 25 bp, Probe Sequence
ctagcatctatattccacacttagc

SEQ ID NO: 117402 - DNA, 25 bp, Probe Sequence
atagactagcatccacatagagcac

SEQ ID NO: 117403 - DNA, 25 bp, Probe Sequence
agactccttgatatgcttcagagaa

SEQ ID NO: 117404 - DNA, 25 bp, Probe Sequence
cgtaactgagactccttgatatgct

SEQ ID NO: 117405 - DNA, 25 bp, Probe Sequence
aactgagactccttgatatgcttca

SEQ ID NO: 117406 - DNA, 25 bp, Probe Sequence
gagactccttgatatgcttcagaga

SEQ ID NO: 117407 - DNA, 25 bp, Probe Sequence
tgagactccttgatatgcttcagag

SEQ ID NO: 117408 - DNA, 25 bp, Probe Sequence
tgcgtaactgagactccttgatatg

SEQ ID NO: 117409 - DNA, 25 bp, Probe Sequence
atatcgaggtatagactagcatcca

SEQ ID NO: 117410 - DNA, 25 bp, Probe Sequence
tatcgaggtatagactagcatccac

SEQ ID NO: 117411 - DNA, 25 bp, Probe Sequence
tagcatccacatagagcacttgaac

SEQ ID NO: 117412 - DNA, 25 bp, Probe Sequence
tagactagcatccacatagagcact

SEQ ID NO: 117413 - DNA, 25 bp, Probe Sequence
ttccatcttgaattggtggttctaa

SEQ ID NO: 117414 - DNA, 25 bp, Probe Sequence
tctccactaacatatccaagaatct

SEQ ID NO: 117415 - DNA, 25 bp, Probe Sequence
atctccactaacatatccaagaatc

SEQ ID NO: 117416 - DNA, 25 bp, Probe Sequence
ctccactaacatatccaagaatctt

SEQ ID NO: 117417 - DNA, 25 bp, Probe Sequence
atctaattccaaggacttctccaca

SEQ ID NO: 117418 - DNA, 25 bp, Probe Sequence
gatctaattccaaggacttctccac

SEQ ID NO: 117419 - DNA, 25 bp, Probe Sequence
atgctttggacagaacagagtattt

SEQ ID NO: 117420 - DNA, 25 bp, Probe Sequence
tcagttatctccactaacatatcca

SEQ ID NO: 117421 - DNA, 25 bp, Probe Sequence
gaggcttcgtccttatagtagtcag

SEQ ID NO: 117422 - DNA, 25 bp, Probe Sequence
ctgaggcttcgtccttatagtagtc

SEQ ID NO: 117423 - DNA, 25 bp, Probe Sequence
ttatagtagtcaggagcaggcgatt

SEQ ID NO: 117424 - DNA, 25 bp, Probe Sequence
tctttctggctcctaattcctttaa

SEQ ID NO: 117425 - DNA, 25 bp, Probe Sequence
ctttctatgccagtctcccatttat

SEQ ID NO: 117426 - DNA, 25 bp, Probe Sequence
tctaattccaaggacttctccacag

SEQ ID NO: 117427 - DNA, 25 bp, Probe Sequence
gtcagttatctccactaacatatcc

SEQ ID NO: 117428 - DNA, 25 bp, Probe Sequence
gatgctttggacagaacagagtatt

SEQ ID NO: 117429 - DNA, 25 bp, Probe Sequence
atctttctggctcctaattccttta

SEQ ID NO: 117430 - DNA, 25 bp, Probe Sequence
tatctttctggctcctaattccttt

SEQ ID NO: 117431 - DNA, 25 bp, Probe Sequence
ttatctttctggctcctaattcctt

SEQ ID NO: 117432 - DNA, 25 bp, Probe Sequence
tttatctttctggctcctaattcct

SEQ ID NO: 117433 - DNA, 25 bp, Probe Sequence
gcatttatctttctggctcctaatt

SEQ ID NO: 117434 - DNA, 25 bp, Probe Sequence
cagggaactaagcattatgtgaatt

SEQ ID NO: 117435 - DNA, 25 bp, Probe Sequence
cactgaggcttcgtccttatagtag

SEQ ID NO: 117436 - DNA, 25 bp, Probe Sequence
tttctatgccagtctcccatttatg

SEQ ID NO: 117437 - DNA, 25 bp, Probe Sequence
catgacaggtgtaattagtctgctg

SEQ ID NO: 117438 - DNA, 25 bp, Probe Sequence
tacactcacccataattcaaacaat

SEQ ID NO: 117439 - DNA, 25 bp, Probe Sequence
gtacactcacccataattcaaacaa

SEQ ID NO: 117440 - DNA, 25 bp, Probe Sequence
acactcacccataattcaaacaatt

SEQ ID NO: 117441 - DNA, 25 bp, Probe Sequence
acccataattcaaacaattacacca

SEQ ID NO: 117442 - DNA, 25 bp, Probe Sequence
cacccataattcaaacaattacacc

SEQ ID NO: 117443 - DNA, 25 bp, Probe Sequence
cccataattcaaacaattacaccat

SEQ ID NO: 117444 - DNA, 25 bp, Probe Sequence
tcacccataattcaaacaattacac

SEQ ID NO: 117445 - DNA, 25 bp, Probe Sequence
ctcacccataattcaaacaattaca

SEQ ID NO: 117446 - DNA, 25 bp, Probe Sequence
actcacccataattcaaacaattac

SEQ ID NO: 117447 - DNA, 25 bp, Probe Sequence
cactcacccataattcaaacaatta

SEQ ID NO: 117448 - DNA, 25 bp, Probe Sequence
ctgtacactcacccataattcaaac

SEQ ID NO: 117449 - DNA, 25 bp, Probe Sequence
actgtacactcacccataattcaaa

SEQ ID NO: 117450 - DNA, 25 bp, Probe Sequence
tactgtacactcacccataattcaa

SEQ ID NO: 117451 - DNA, 25 bp, Probe Sequence
atactgtacactcacccataattca

SEQ ID NO: 117452 - DNA, 25 bp, Probe Sequence
tgtacactcacccataattcaaaca

SEQ ID NO: 117453 - DNA, 25 bp, Probe Sequence
tctatactgtacactcacccataat

SEQ ID NO: 117454 - DNA, 25 bp, Probe Sequence
ccataattcaaacaattacaccatg

SEQ ID NO: 117455 - DNA, 25 bp, Probe Sequence
tatactgtacactcacccataattc

SEQ ID NO: 117456 - DNA, 25 bp, Probe Sequence
ctatactgtacactcacccataatt

SEQ ID NO: 117457 - DNA, 25 bp, Probe Sequence
cataattcaaacaattacaccatgg

SEQ ID NO: 117458 - DNA, 25 bp, Probe Sequence
aacctggtagacagtataaaagcag

SEQ ID NO: 117459 - DNA, 25 bp, Probe Sequence
cctggtagacagtataaaagcagtg

SEQ ID NO: 117460 - DNA, 25 bp, Probe Sequence
taacctggtagacagtataaaagca

SEQ ID NO: 117461 - DNA, 25 bp, Probe Sequence
acctggtagacagtataaaagcagt

SEQ ID NO: 117462 - DNA, 25 bp, Probe Sequence
gtagacagtataaaagcagtgcaaa

SEQ ID NO: 117463 - DNA, 25 bp, Probe Sequence
ttaacctggtagacagtataaaagc

SEQ ID NO: 117464 - DNA, 25 bp, Probe Sequence
ctggtagacagtataaaagcagtgc

SEQ ID NO: 117465 - DNA, 25 bp, Probe Sequence
ggtagacagtataaaagcagtgcaa

SEQ ID NO: 117466 - DNA, 25 bp, Probe Sequence
agacagtataaaagcagtgcaaata

SEQ ID NO: 117467 - DNA, 25 bp, Probe Sequence
tagacagtataaaagcagtgcaaat

SEQ ID NO: 117468 - DNA, 25 bp, Probe Sequence
gacagtataaaagcagtgcaaataa

SEQ ID NO: 117469 - DNA, 25 bp, Probe Sequence
tggtagacagtataaaagcagtgca

SEQ ID NO: 117470 - DNA, 25 bp, Probe Sequence
agtataaaagcagtgcaaataaaca

SEQ ID NO: 117471 - DNA, 25 bp, Probe Sequence
acagtataaaagcagtgcaaataaa

SEQ ID NO: 117472 - DNA, 25 bp, Probe Sequence
cagtataaaagcagtgcaaataaac

SEQ ID NO: 117473 - DNA, 25 bp, Probe Sequence
tttaacctggtagacagtataaaag

SEQ ID NO: 117474 - DNA, 25 bp, Probe Sequence
ttttaacctggtagacagtataaaa

SEQ ID NO: 117475 - DNA, 25 bp, Probe Sequence
aatgttgcttgttctggaatacttc

SEQ ID NO: 117476 - DNA, 25 bp, Probe Sequence
aatctgaatagcaactgtctgactt

SEQ ID NO: 117477 - DNA, 25 bp, Probe Sequence
taatctgaatagcaactgtctgact

SEQ ID NO: 117478 - DNA, 25 bp, Probe Sequence
ttaatctgaatagcaactgtctgac

SEQ ID NO: 117479 - DNA, 25 bp, Probe Sequence
tagcaactgtctgacttgataactc

SEQ ID NO: 117480 - DNA, 25 bp, Probe Sequence
atagcaactgtctgacttgataact

SEQ ID NO: 117481 - DNA, 25 bp, Probe Sequence
tgaatagcaactgtctgacttgata

SEQ ID NO: 117482 - DNA, 25 bp, Probe Sequence
agcagaatgtcacagatgaagaata

SEQ ID NO: 117483 - DNA, 25 bp, Probe Sequence
tagcagaatgtcacagatgaagaat

SEQ ID NO: 117484 - DNA, 25 bp, Probe Sequence
atagcagaatgtcacagatgaagaa

SEQ ID NO: 117485 - DNA, 25 bp, Probe Sequence
aatagcagaatgtcacagatgaaga

SEQ ID NO: 117486 - DNA, 25 bp, Probe Sequence
cttgataactccagtgccagtatag

SEQ ID NO: 117487 - DNA, 25 bp, Probe Sequence
gaatagcagaatgtcacagatgaag

SEQ ID NO: 117488 - DNA, 25 bp, Probe Sequence
tgaatagcagaatgtcacagatgaa

SEQ ID NO: 117489 - DNA, 25 bp, Probe Sequence
ctgaatagcaactgtctgacttgat

SEQ ID NO: 117490 - DNA, 25 bp, Probe Sequence
atctgaatagcaactgtctgacttg

SEQ ID NO: 117491 - DNA, 25 bp, Probe Sequence
aatagcaactgtctgacttgataac

SEQ ID NO: 117492 - DNA, 25 bp, Probe Sequence
gcagaatgtcacagatgaagaatat

SEQ ID NO: 117493 - DNA, 25 bp, Probe Sequence
ttgataactccagtgccagtatagt

SEQ ID NO: 117494 - DNA, 25 bp, Probe Sequence
acttgataactccagtgccagtata

SEQ ID NO: 117495 - DNA, 25 bp, Probe Sequence
gaatagcaactgtctgacttgataa

SEQ ID NO: 117496 - DNA, 25 bp, Probe Sequence
atgttgcttgttctggaatacttcg

SEQ ID NO: 117497 - DNA, 25 bp, Probe Sequence
tgataactccagtgccagtatagtg

SEQ ID NO: 117498 - DNA, 25 bp, Probe Sequence
tctgaatagcaactgtctgacttga

SEQ ID NO: 117499 - DNA, 25 bp, Probe Sequence
atcctccattctgtccaactcctat

SEQ ID NO: 117500 - DNA, 25 bp, Probe Sequence
gcatttctcttcctttcttcttctc

SEQ ID NO: 117501 - DNA, 25 bp, Probe Sequence
catttctcttcctttcttcttctcg

SEQ ID NO: 117502 - DNA, 25 bp, Probe Sequence
atccctaaccctgtctaaactaatg

SEQ ID NO: 117503 - DNA, 25 bp, Probe Sequence
ctctatccctaaccctgtctaaact

SEQ ID NO: 117504 - DNA, 25 bp, Probe Sequence
tctatccctaaccctgtctaaacta

SEQ ID NO: 117505 - DNA, 25 bp, Probe Sequence
cctacttcactcccaaagatttcta

SEQ ID NO: 117506 - DNA, 25 bp, Probe Sequence
acttcactcccaaagatttctaagg

SEQ ID NO: 117507 - DNA, 25 bp, Probe Sequence
tcctccattctgtccaactcctatc

SEQ ID NO: 117508 - DNA, 25 bp, Probe Sequence
atttctcttcctttcttcttctcgc

SEQ ID NO: 117509 - DNA, 25 bp, Probe Sequence
tccctaaccctgtctaaactaatgg

SEQ ID NO: 117510 - DNA, 25 bp, Probe Sequence
ctatccctaaccctgtctaaactaa

SEQ ID NO: 117511 - DNA, 25 bp, Probe Sequence
cctctatccctaaccctgtctaaac

SEQ ID NO: 117512 - DNA, 25 bp, Probe Sequence
catcctccattctgtccaactccta

SEQ ID NO: 117513 - DNA, 25 bp, Probe Sequence
tatccctaaccctgtctaaactaat

SEQ ID NO: 117514 - DNA, 25 bp, Probe Sequence
tttctcttcctttcttcttctcgct

SEQ ID NO: 117515 - DNA, 25 bp, Probe Sequence
tacttcactcccaaagatttctaag

SEQ ID NO: 117516 - DNA, 25 bp, Probe Sequence
ctacttcactcccaaagatttctaa

SEQ ID NO: 117517 - DNA, 25 bp, Probe Sequence
ccctctatccctaaccctgtctaaa

SEQ ID NO: 117518 - DNA, 25 bp, Probe Sequence
aagcctacttcactcccaaagattt

SEQ ID NO: 117519 - DNA, 25 bp, Probe Sequence
ttcactcccaaagatttctaaggaa

SEQ ID NO: 117520 - DNA, 25 bp, Probe Sequence
cttcactcccaaagatttctaagga

SEQ ID NO: 117521 - DNA, 25 bp, Probe Sequence
ttctcttcctttcttcttctcgctg

SEQ ID NO: 117522 - DNA, 25 bp, Probe Sequence
cctccattctgtccaactcctatcc

SEQ ID NO: 117523 - DNA, 25 bp, Probe Sequence
gacttggtataaggtattcctgagg

SEQ ID NO: 117524 - DNA, 25 bp, Probe Sequence
agacttggtataaggtattcctgag

SEQ ID NO: 117525 - DNA, 25 bp, Probe Sequence
aagacttggtataaggtattcctga

SEQ ID NO: 117526 - DNA, 25 bp, Probe Sequence
acttggtataaggtattcctgaggc

SEQ ID NO: 117527 - DNA, 25 bp, Probe Sequence
aataactccaagaatctgcactgaa

SEQ ID NO: 117528 - DNA, 25 bp, Probe Sequence
gcacacacctataatctcagcactt

SEQ ID NO: 117529 - DNA, 25 bp, Probe Sequence
acacacctataatctcagcactttg

SEQ ID NO: 117530 - DNA, 25 bp, Probe Sequence
cacacacctataatctcagcacttt

SEQ ID NO: 117531 - DNA, 25 bp, Probe Sequence
caagacttggtataaggtattcctg

SEQ ID NO: 117532 - DNA, 25 bp, Probe Sequence
cacacctataatctcagcactttgg

SEQ ID NO: 117533 - DNA, 25 bp, Probe Sequence
tttaatcgtcattgagaaagagggc

SEQ ID NO: 117534 - DNA, 25 bp, Probe Sequence
atttcaggtttggataatcttgccc

SEQ ID NO: 117535 - DNA, 25 bp, Probe Sequence
cacagtgaaacctcatctctactaa

SEQ ID NO: 117536 - DNA, 25 bp, Probe Sequence
taacacagtgaaacctcatctctac

SEQ ID NO: 117537 - DNA, 25 bp, Probe Sequence
ctaacacagtgaaacctcatctcta

SEQ ID NO: 117538 - DNA, 25 bp, Probe Sequence
acagtgaaacctcatctctactaaa

SEQ ID NO: 117539 - DNA, 25 bp, Probe Sequence
acacagtgaaacctcatctctacta

SEQ ID NO: 117540 - DNA, 25 bp, Probe Sequence
tgtagacagcactcgataatctaag

SEQ ID NO: 117541 - DNA, 25 bp, Probe Sequence
gtagacagcactcgataatctaagg

SEQ ID NO: 117542 - DNA, 25 bp, Probe Sequence
ctttgaaataactccaagaatctgc

SEQ ID NO: 117543 - DNA, 25 bp, Probe Sequence
atgtagacagcactcgataatctaa

SEQ ID NO: 117544 - DNA, 25 bp, Probe Sequence
aatgtagacagcactcgataatcta

SEQ ID NO: 117545 - DNA, 25 bp, Probe Sequence
tctaagggacattatcttgttgtga

SEQ ID NO: 117546 - DNA, 25 bp, Probe Sequence
cacctataatctcagcactttggga

SEQ ID NO: 117547 - DNA, 25 bp, Probe Sequence
tgtgtttgaggatgcttaatgattc

SEQ ID NO: 117548 - DNA, 25 bp, Probe Sequence
ctttgtgtttgaggatgcttaatga

SEQ ID NO: 117549 - DNA, 25 bp, Probe Sequence
ttgtgtttgaggatgcttaatgatt

SEQ ID NO: 117550 - DNA, 25 bp, Probe Sequence
tttgtgtttgaggatgcttaatgat

SEQ ID NO: 117551 - DNA, 25 bp, Probe Sequence
cttaatgattccagcctctcactgt

SEQ ID NO: 117552 - DNA, 25 bp, Probe Sequence
ttaatgattccagcctctcactgtg

SEQ ID NO: 117553 - DNA, 25 bp, Probe Sequence
cctttgtgtttgaggatgcttaatg

SEQ ID NO: 117554 - DNA, 25 bp, Probe Sequence
gtttgaggatgcttaatgattccag

SEQ ID NO: 117555 - DNA, 25 bp, Probe Sequence
gtgtttgaggatgcttaatgattcc

SEQ ID NO: 117556 - DNA, 25 bp, Probe Sequence
tgtttgaggatgcttaatgattcca

SEQ ID NO: 117557 - DNA, 25 bp, Probe Sequence
ccctttgtgtttgaggatgcttaat

SEQ ID NO: 117558 - DNA, 25 bp, Probe Sequence
gatgcttaatgattccagcctctca

SEQ ID NO: 117559 - DNA, 25 bp, Probe Sequence
ggagatgaagactgttcagagactg

SEQ ID NO: 117560 - DNA, 25 bp, Probe Sequence
caggagatgaagactgttcagagac

SEQ ID NO: 117561 - DNA, 25 bp, Probe Sequence
cactgactttatccagaccaaagag

SEQ ID NO: 117562 - DNA, 25 bp, Probe Sequence
aggagatgaagactgttcagagact

SEQ ID NO: 117563 - DNA, 25 bp, Probe Sequence
atgcttaatgattccagcctctcac

SEQ ID NO: 117564 - DNA, 25 bp, Probe Sequence
ttgaggatgcttaatgattccagcc

SEQ ID NO: 117565 - DNA, 25 bp, Probe Sequence
cctggacatttgcactgactttatc

SEQ ID NO: 117566 - DNA, 25 bp, Probe Sequence
ggatgcttaatgattccagcctctc

SEQ ID NO: 117567 - DNA, 25 bp, Probe Sequence
tttgaggatgcttaatgattccagc

SEQ ID NO: 117568 - DNA, 25 bp, Probe Sequence
gacatttgcactgactttatccaga

SEQ ID NO: 117569 - DNA, 25 bp, Probe Sequence
acatttgcactgactttatccagac

SEQ ID NO: 117570 - DNA, 25 bp, Probe Sequence
gagatgaagactgttcagagactgc

SEQ ID NO: 117571 - DNA, 25 bp, Probe Sequence
gggaatgaggagattgagataaact

SEQ ID NO: 117572 - DNA, 25 bp, Probe Sequence
tgggaatgaggagattgagataaac

SEQ ID NO: 117573 - DNA, 25 bp, Probe Sequence
ctgggaatgaggagattgagataaa

SEQ ID NO: 117574 - DNA, 25 bp, Probe Sequence
tctgggaatgaggagattgagataa

SEQ ID NO: 117575 - DNA, 25 bp, Probe Sequence
gtctgggaatgaggagattgagata

SEQ ID NO: 117576 - DNA, 25 bp, Probe Sequence
ggaatgaggagattgagataaactt

SEQ ID NO: 117577 - DNA, 25 bp, Probe Sequence
gaagtctgggaatgaggagattgag

SEQ ID NO: 117578 - DNA, 25 bp, Probe Sequence
agtctgggaatgaggagattgagat

SEQ ID NO: 117579 - DNA, 25 bp, Probe Sequence
aagtctgggaatgaggagattgaga

SEQ ID NO: 117580 - DNA, 25 bp, Probe Sequence
gaatgaggagattgagataaacttt

SEQ ID NO: 117581 - DNA, 25 bp, Probe Sequence
ggtccatcgccttcattgtgtaaat

SEQ ID NO: 117582 - DNA, 25 bp, Probe Sequence
gtaaatgaggacacagactggcttg

SEQ ID NO: 117583 - DNA, 25 bp, Probe Sequence
ggaagtctgggaatgaggagattga

SEQ ID NO: 117584 - DNA, 25 bp, Probe Sequence
ctggaagtctgggaatgaggagatt

SEQ ID NO: 117585 - DNA, 25 bp, Probe Sequence
tggaagtctgggaatgaggagattg

SEQ ID NO: 117586 - DNA, 25 bp, Probe Sequence
tgaggagattgagataaacttttga

SEQ ID NO: 117587 - DNA, 25 bp, Probe Sequence
gtccatcgccttcattgtgtaaatg

SEQ ID NO: 117588 - DNA, 25 bp, Probe Sequence
tgtccttgagatgctcacattactg

SEQ ID NO: 117589 - DNA, 25 bp, Probe Sequence
gtgtccttgagatgctcacattact

SEQ ID NO: 117590 - DNA, 25 bp, Probe Sequence
ctatgtggtccatcgccttcattgt

SEQ ID NO: 117591 - DNA, 25 bp, Probe Sequence
actatgtggtccatcgccttcattg

SEQ ID NO: 117592 - DNA, 25 bp, Probe Sequence
tgtaaatgaggacacagactggctt

SEQ ID NO: 117593 - DNA, 25 bp, Probe Sequence
gactatgtggtccatcgccttcatt

SEQ ID NO: 117594 - DNA, 25 bp, Probe Sequence
atgaggagattgagataaacttttg

SEQ ID NO: 117595 - DNA, 25 bp, Probe Sequence
catcaggcacaatctggtgaataac

SEQ ID NO: 117596 - DNA, 25 bp, Probe Sequence
tcatcaggcacaatctggtgaataa

SEQ ID NO: 117597 - DNA, 25 bp, Probe Sequence
tggtacatcacagcaattagaaaga

SEQ ID NO: 117598 - DNA, 25 bp, Probe Sequence
ggtacatcacagcaattagaaagat

SEQ ID NO: 117599 - DNA, 25 bp, Probe Sequence
ctcatcaggcacaatctggtgaata

SEQ ID NO: 117600 - DNA, 25 bp, Probe Sequence
ttggtacatcacagcaattagaaag

SEQ ID NO: 117601 - DNA, 25 bp, Probe Sequence
ctttggtacatcacagcaattagaa

SEQ ID NO: 117602 - DNA, 25 bp, Probe Sequence
tttggtacatcacagcaattagaaa

SEQ ID NO: 117603 - DNA, 25 bp, Probe Sequence
atatttggaaagaagcacaaggcag

SEQ ID NO: 117604 - DNA, 25 bp, Probe Sequence
taatatttggaaagaagcacaaggc

SEQ ID NO: 117605 - DNA, 25 bp, Probe Sequence
aggcacaatctggtgaataacgatt

SEQ ID NO: 117606 - DNA, 25 bp, Probe Sequence
cacaatctggtgaataacgatttcc

SEQ ID NO: 117607 - DNA, 25 bp, Probe Sequence
gcacaatctggtgaataacgatttc

SEQ ID NO: 117608 - DNA, 25 bp, Probe Sequence
gtacatcacagcaattagaaagatt

SEQ ID NO: 117609 - DNA, 25 bp, Probe Sequence
caggcacaatctggtgaataacgat

SEQ ID NO: 117610 - DNA, 25 bp, Probe Sequence
atcaggcacaatctggtgaataacg

SEQ ID NO: 117611 - DNA, 25 bp, Probe Sequence
acaatctggtgaataacgatttccc

SEQ ID NO: 117612 - DNA, 25 bp, Probe Sequence
aatatttggaaagaagcacaaggca

SEQ ID NO: 117613 - DNA, 25 bp, Probe Sequence
acatcacagcaattagaaagattaa

SEQ ID NO: 117614 - DNA, 25 bp, Probe Sequence
ttaatatttggaaagaagcacaagg

SEQ ID NO: 117615 - DNA, 25 bp, Probe Sequence
gtcctactctgctttggtacatcac

SEQ ID NO: 117616 - DNA, 25 bp, Probe Sequence
acgaaaatgctacaaaagaggaaaa

SEQ ID NO: 117617 - DNA, 25 bp, Probe Sequence
ggaggaatacgaaaatgctacaaaa

SEQ ID NO: 117618 - DNA, 25 bp, Probe Sequence
ggcacaatctggtgaataacgattt

SEQ ID NO: 117619 - DNA, 25 bp, Probe Sequence
agaacccagtggacatcctcatcat

SEQ ID NO: 117620 - DNA, 25 bp, Probe Sequence
gaacccagtggacatcctcatcatg

SEQ ID NO: 117621 - DNA, 25 bp, Probe Sequence
cagacatccaatcagaacattcaag

SEQ ID NO: 117622 - DNA, 25 bp, Probe Sequence
gaggagaacttatggattgtgatgg

SEQ ID NO: 117623 - DNA, 25 bp, Probe Sequence
agacatccaatcagaacattcaagg

SEQ ID NO: 117624 - DNA, 25 bp, Probe Sequence
cgaggagaacttatggattgtgatg

SEQ ID NO: 117625 - DNA, 25 bp, Probe Sequence
ttatcttcctgtccagtctgctatt

SEQ ID NO: 117626 - DNA, 25 bp, Probe Sequence
ccagacatccaatcagaacattcaa

SEQ ID NO: 117627 - DNA, 25 bp, Probe Sequence
ctccagacatccaatcagaacattc

SEQ ID NO: 117628 - DNA, 25 bp, Probe Sequence
tatcttcctgtccagtctgctattg

SEQ ID NO: 117629 - DNA, 25 bp, Probe Sequence
tccagacatccaatcagaacattca

SEQ ID NO: 117630 - DNA, 25 bp, Probe Sequence
gatatggatgatagtcgaggagaac

SEQ ID NO: 117631 - DNA, 25 bp, Probe Sequence
cctccagacatccaatcagaacatt

SEQ ID NO: 117632 - DNA, 25 bp, Probe Sequence
tgatatggatgatagtcgaggagaa

SEQ ID NO: 117633 - DNA, 25 bp, Probe Sequence
gatggtgatatggatgatagtcgag

SEQ ID NO: 117634 - DNA, 25 bp, Probe Sequence
gtgatatggatgatagtcgaggaga

SEQ ID NO: 117635 - DNA, 25 bp, Probe Sequence
caggatgatgtgtgtttgattgaat

SEQ ID NO: 117636 - DNA, 25 bp, Probe Sequence
tcgaggagaacttatggattgtgat

SEQ ID NO: 117637 - DNA, 25 bp, Probe Sequence
atggtgatatggatgatagtcgagg

SEQ ID NO: 117638 - DNA, 25 bp, Probe Sequence
ggatggtgatatggatgatagtcga

SEQ ID NO: 117639 - DNA, 25 bp, Probe Sequence
caagggatggtgatatggatgatag

SEQ ID NO: 117640 - DNA, 25 bp, Probe Sequence
gatgatagtcgaggagaacttatgg

SEQ ID NO: 117641 - DNA, 25 bp, Probe Sequence
ggatgatagtcgaggagaacttatg

SEQ ID NO: 117642 - DNA, 25 bp, Probe Sequence
atatggatgatagtcgaggagaact

SEQ ID NO: 117643 - DNA, 25 bp, Probe Sequence
cttatacccaggatgatgtgtgttt

SEQ ID NO: 117644 - DNA, 25 bp, Probe Sequence
atagtcgaggagaacttatggattg

SEQ ID NO: 117645 - DNA, 25 bp, Probe Sequence
gctcctttaagtttcactcctaaca

SEQ ID NO: 117646 - DNA, 25 bp, Probe Sequence
ctcctttaagtttcactcctaacat

SEQ ID NO: 117647 - DNA, 25 bp, Probe Sequence
tacctgtagctcctttaagtttcac

SEQ ID NO: 117648 - DNA, 25 bp, Probe Sequence
ttacctgtagctcctttaagtttca

SEQ ID NO: 117649 - DNA, 25 bp, Probe Sequence
ggttacctgtagctcctttaagttt

SEQ ID NO: 117650 - DNA, 25 bp, Probe Sequence
aagtttcactcctaacatgatctgt

SEQ ID NO: 117651 - DNA, 25 bp, Probe Sequence
gttacctgtagctcctttaagtttc

SEQ ID NO: 117652 - DNA, 25 bp, Probe Sequence
cctttaagtttcactcctaacatga

SEQ ID NO: 117653 - DNA, 25 bp, Probe Sequence
tcctttaagtttcactcctaacatg

SEQ ID NO: 117654 - DNA, 25 bp, Probe Sequence
agtttcactcctaacatgatctgtg

SEQ ID NO: 117655 - DNA, 25 bp, Probe Sequence
gtagctcctttaagtttcactccta

SEQ ID NO: 117656 - DNA, 25 bp, Probe Sequence
agctcctttaagtttcactcctaac

SEQ ID NO: 117657 - DNA, 25 bp, Probe Sequence
taagtttcactcctaacatgatctg

SEQ ID NO: 117658 - DNA, 25 bp, Probe Sequence
tagctcctttaagtttcactcctaa

SEQ ID NO: 117659 - DNA, 25 bp, Probe Sequence
ctgtagctcctttaagtttcactcc

SEQ ID NO: 117660 - DNA, 25 bp, Probe Sequence
cctgtagctcctttaagtttcactc

SEQ ID NO: 117661 - DNA, 25 bp, Probe Sequence
tgtagctcctttaagtttcactcct

SEQ ID NO: 117662 - DNA, 25 bp, Probe Sequence
acctgtagctcctttaagtttcact

SEQ ID NO: 117663 - DNA, 25 bp, Probe Sequence
ttaagtttcactcctaacatgatct

SEQ ID NO: 117664 - DNA, 25 bp, Probe Sequence
gtttcactcctaacatgatctgtgc

SEQ ID NO: 117665 - DNA, 25 bp, Probe Sequence
aggttacctgtagctcctttaagtt

SEQ ID NO: 117666 - DNA, 25 bp, Probe Sequence
tttaagtttcactcctaacatgatc

SEQ ID NO: 117667 - DNA, 25 bp, Probe Sequence
ctttaagtttcactcctaacatgat

SEQ ID NO: 117668 - DNA, 25 bp, Probe Sequence
aaggttacctgtagctcctttaagt

SEQ ID NO: 117669 - DNA, 25 bp, Probe Sequence
ggataaactacctgatggacgattc

SEQ ID NO: 117670 - DNA, 25 bp, Probe Sequence
gataaactacctgatggacgattcg

SEQ ID NO: 117671 - DNA, 25 bp, Probe Sequence
gggataaactacctgatggacgatt

SEQ ID NO: 117672 - DNA, 25 bp, Probe Sequence
gatggacgattcgtttatgagaaga

SEQ ID NO: 117673 - DNA, 25 bp, Probe Sequence
atggacgattcgtttatgagaagac

SEQ ID NO: 117674 - DNA, 25 bp, Probe Sequence
tgatggacgattcgtttatgagaag

SEQ ID NO: 117675 - DNA, 25 bp, Probe Sequence
ctgatggacgattcgtttatgagaa

SEQ ID NO: 117676 - DNA, 25 bp, Probe Sequence
ctacctgatggacgattcgtttatg

SEQ ID NO: 117677 - DNA, 25 bp, Probe Sequence
gacgattcgtttatgagaagactgg

SEQ ID NO: 117678 - DNA, 25 bp, Probe Sequence
ggacgattcgtttatgagaagactg

SEQ ID NO: 117679 - DNA, 25 bp, Probe Sequence
tacctgatggacgattcgtttatga

SEQ ID NO: 117680 - DNA, 25 bp, Probe Sequence
actacctgatggacgattcgtttat

SEQ ID NO: 117681 - DNA, 25 bp, Probe Sequence
ataaactacctgatggacgattcgt

SEQ ID NO: 117682 - DNA, 25 bp, Probe Sequence
tggacgattcgtttatgagaagact

SEQ ID NO: 117683 - DNA, 25 bp, Probe Sequence
aactacctgatggacgattcgttta

SEQ ID NO: 117684 - DNA, 25 bp, Probe Sequence
taaactacctgatggacgattcgtt

SEQ ID NO: 117685 - DNA, 25 bp, Probe Sequence
cctgatggacgattcgtttatgaga

SEQ ID NO: 117686 - DNA, 25 bp, Probe Sequence
ggggataaactacctgatggacgat

SEQ ID NO: 117687 - DNA, 25 bp, Probe Sequence
aaactacctgatggacgattcgttt

SEQ ID NO: 117688 - DNA, 25 bp, Probe Sequence
acctgatggacgattcgtttatgag

SEQ ID NO: 117689 - DNA, 25 bp, Probe Sequence
ctggggataaactacctgatggacg

SEQ ID NO: 117690 - DNA, 25 bp, Probe Sequence
tggggataaactacctgatggacga

SEQ ID NO: 117691 - DNA, 25 bp, Probe Sequence
acatttattacacacagggtttacg

SEQ ID NO: 117692 - DNA, 25 bp, Probe Sequence
taatttcctttggtctcccttatcc

SEQ ID NO: 117693 - DNA, 25 bp, Probe Sequence
tttgaacatttattacacacagggt

SEQ ID NO: 117694 - DNA, 25 bp, Probe Sequence
ccttatccacattggcttattctgg

SEQ ID NO: 117695 - DNA, 25 bp, Probe Sequence
tgaacatttattacacacagggttt

SEQ ID NO: 117696 - DNA, 25 bp, Probe Sequence
ttgaacatttattacacacagggtt

SEQ ID NO: 117697 - DNA, 25 bp, Probe Sequence
ttcctgaaagaatatcatcctctgc

SEQ ID NO: 117698 - DNA, 25 bp, Probe Sequence
accttacaaccaacttatttgaaca

SEQ ID NO: 117699 - DNA, 25 bp, Probe Sequence
ttaatttcctttggtctcccttatc

SEQ ID NO: 117700 - DNA, 25 bp, Probe Sequence
aagaatatcatcctctgcattatcc

SEQ ID NO: 117701 - DNA, 25 bp, Probe Sequence
atgtacgtgatatgtaacactgagg

SEQ ID NO: 117702 - DNA, 25 bp, Probe Sequence
ggatgtacgtgatatgtaacactga

SEQ ID NO: 117703 - DNA, 25 bp, Probe Sequence
atttgaacatttattacacacaggg

SEQ ID NO: 117704 - DNA, 25 bp, Probe Sequence
gatgtacgtgatatgtaacactgag

SEQ ID NO: 117705 - DNA, 25 bp, Probe Sequence
aaccttacaaccaacttatttgaac

SEQ ID NO: 117706 - DNA, 25 bp, Probe Sequence
tctttaggcaacagacagaatcact

SEQ ID NO: 117707 - DNA, 25 bp, Probe Sequence
cttgtgtcagaacttctttaggcaa

SEQ ID NO: 117708 - DNA, 25 bp, Probe Sequence
ccttacaaccaacttatttgaacat

SEQ ID NO: 117709 - DNA, 25 bp, Probe Sequence
aagatctcattaccacacttgctaa

SEQ ID NO: 117710 - DNA, 25 bp, Probe Sequence
ttgtgtcagaacttctttaggcaac

SEQ ID NO: 117711 - DNA, 25 bp, Probe Sequence
aacatttattacacacagggtttac

SEQ ID NO: 117712 - DNA, 25 bp, Probe Sequence
agaacttctttaggcaacagacaga

SEQ ID NO: 117713 - DNA, 25 bp, Probe Sequence
cagaacttctttaggcaacagacag

SEQ ID NO: 117714 - DNA, 25 bp, Probe Sequence
tttcctgaaagaatatcatcctctg

SEQ ID NO: 117715 - DNA, 25 bp, Probe Sequence
ttctggtaggattgatggaatctaa

SEQ ID NO: 117716 - DNA, 25 bp, Probe Sequence
tctggtaggattgatggaatctaat

SEQ ID NO: 117717 - DNA, 25 bp, Probe Sequence
ctacacagactggattcagagaacc

SEQ ID NO: 117718 - DNA, 25 bp, Probe Sequence
taagctacacagactggattcagag

SEQ ID NO: 117719 - DNA, 25 bp, Probe Sequence
ctaagctacacagactggattcaga

SEQ ID NO: 117720 - DNA, 25 bp, Probe Sequence
gctacacagactggattcagagaac

SEQ ID NO: 117721 - DNA, 25 bp, Probe Sequence
ctggtaggattgatggaatctaata

SEQ ID NO: 117722 - DNA, 25 bp, Probe Sequence
ctttctggtaggattgatggaatct

SEQ ID NO: 117723 - DNA, 25 bp, Probe Sequence
cctttctggtaggattgatggaatc

SEQ ID NO: 117724 - DNA, 25 bp, Probe Sequence
tggtaggattgatggaatctaataa

SEQ ID NO: 117725 - DNA, 25 bp, Probe Sequence
tttctggtaggattgatggaatcta

SEQ ID NO: 117726 - DNA, 25 bp, Probe Sequence
ccctttctggtaggattgatggaat

SEQ ID NO: 117727 - DNA, 25 bp, Probe Sequence
tgctaagctacacagactggattca

SEQ ID NO: 117728 - DNA, 25 bp, Probe Sequence
agctacacagactggattcagagaa

SEQ ID NO: 117729 - DNA, 25 bp, Probe Sequence
aagctacacagactggattcagaga

SEQ ID NO: 117730 - DNA, 25 bp, Probe Sequence
gctaagctacacagactggattcag

SEQ ID NO: 117731 - DNA, 25 bp, Probe Sequence
gtgctaagctacacagactggattc

SEQ ID NO: 117732 - DNA, 25 bp, Probe Sequence
ggtaggattgatggaatctaataat

SEQ ID NO: 117733 - DNA, 25 bp, Probe Sequence
tacacagactggattcagagaaccc

SEQ ID NO: 117734 - DNA, 25 bp, Probe Sequence
atgtgtgagctgatgtaccacctag

SEQ ID NO: 117735 - DNA, 25 bp, Probe Sequence
catgtgtgagctgatgtaccaccta

SEQ ID NO: 117736 - DNA, 25 bp, Probe Sequence
ggtgctaagctacacagactggatt

SEQ ID NO: 117737 - DNA, 25 bp, Probe Sequence
cacagactggattcagagaaccctg

SEQ ID NO: 117738 - DNA, 25 bp, Probe Sequence
aggtgctaagctacacagactggat

SEQ ID NO: 117739 - DNA, 25 bp, Probe Sequence
gaagaaggagaacaggaggaatgag

SEQ ID NO: 117740 - DNA, 25 bp, Probe Sequence
aagaaggagaacaggaggaatgaga

SEQ ID NO: 117741 - DNA, 25 bp, Probe Sequence
acctttcagagagtcaaatatcaca

SEQ ID NO: 117742 - DNA, 25 bp, Probe Sequence
cctttcagagagtcaaatatcacac

SEQ ID NO: 117743 - DNA, 25 bp, Probe Sequence
cacctttcagagagtcaaatatcac

SEQ ID NO: 117744 - DNA, 25 bp, Probe Sequence
gcacctttcagagagtcaaatatca

SEQ ID NO: 117745 - DNA, 25 bp, Probe Sequence
agaaggagaacaggaggaatgagag

SEQ ID NO: 117746 - DNA, 25 bp, Probe Sequence
aatatcacactctttctttaggtcg

SEQ ID NO: 117747 - DNA, 25 bp, Probe Sequence
ggcacctttcagagagtcaaatatc

SEQ ID NO: 117748 - DNA, 25 bp, Probe Sequence
atggcacctttcagagagtcaaata

SEQ ID NO: 117749 - DNA, 25 bp, Probe Sequence
tatggcacctttcagagagtcaaat

SEQ ID NO: 117750 - DNA, 25 bp, Probe Sequence
tggcacctttcagagagtcaaatat

SEQ ID NO: 117751 - DNA, 25 bp, Probe Sequence
ggaagaaggagaacaggaggaatga

SEQ ID NO: 117752 - DNA, 25 bp, Probe Sequence
ctttcagagagtcaaatatcacact

SEQ ID NO: 117753 - DNA, 25 bp, Probe Sequence
cctatatgggattctctggaaacag

SEQ ID NO: 117754 - DNA, 25 bp, Probe Sequence
ttatggcacctttcagagagtcaaa

SEQ ID NO: 117755 - DNA, 25 bp, Probe Sequence
ctatatgggattctctggaaacagc

SEQ ID NO: 117756 - DNA, 25 bp, Probe Sequence
tatatgggattctctggaaacagca

SEQ ID NO: 117757 - DNA, 25 bp, Probe Sequence
ttcttatggcacctttcagagagtc

SEQ ID NO: 117758 - DNA, 25 bp, Probe Sequence
cttcttatggcacctttcagagagt

SEQ ID NO: 117759 - DNA, 25 bp, Probe Sequence
cttatggcacctttcagagagtcaa

SEQ ID NO: 117760 - DNA, 25 bp, Probe Sequence
gaaggagaacaggaggaatgagagg

SEQ ID NO: 117761 - DNA, 25 bp, Probe Sequence
atatcacactctttctttaggtcga

SEQ ID NO: 117762 - DNA, 25 bp, Probe Sequence
tatcacactctttctttaggtcgaa

SEQ ID NO: 117763 - DNA, 25 bp, Probe Sequence
aaagtaatttgggagcgactaggag

SEQ ID NO: 117764 - DNA, 25 bp, Probe Sequence
aacaaagtaatttgggagcgactag

SEQ ID NO: 117765 - DNA, 25 bp, Probe Sequence
caacaaagtaatttgggagcgacta

SEQ ID NO: 117766 - DNA, 25 bp, Probe Sequence
ttgccactactcctggtgcttatag

SEQ ID NO: 117767 - DNA, 25 bp, Probe Sequence
cttgccactactcctggtgcttata

SEQ ID NO: 117768 - DNA, 25 bp, Probe Sequence
ctactcctggtgcttatagctctga

SEQ ID NO: 117769 - DNA, 25 bp, Probe Sequence
tactcctggtgcttatagctctgac

SEQ ID NO: 117770 - DNA, 25 bp, Probe Sequence
actactcctggtgcttatagctctg

SEQ ID NO: 117771 - DNA, 25 bp, Probe Sequence
cactactcctggtgcttatagctct

SEQ ID NO: 117772 - DNA, 25 bp, Probe Sequence
ttctggtcccaacatttcctccttt

SEQ ID NO: 117773 - DNA, 25 bp, Probe Sequence
caaagtaatttgggagcgactagga

SEQ ID NO: 117774 - DNA, 25 bp, Probe Sequence
aactactgcaatatgtcggacacca

SEQ ID NO: 117775 - DNA, 25 bp, Probe Sequence
acaaagtaatttgggagcgactagg

SEQ ID NO: 117776 - DNA, 25 bp, Probe Sequence
gtgtcaaaactactgcaatatgtcg

SEQ ID NO: 117777 - DNA, 25 bp, Probe Sequence
aaactactgcaatatgtcggacacc

SEQ ID NO: 117778 - DNA, 25 bp, Probe Sequence
tcaaaactactgcaatatgtcggac

SEQ ID NO: 117779 - DNA, 25 bp, Probe Sequence
gtcaaaactactgcaatatgtcgga

SEQ ID NO: 117780 - DNA, 25 bp, Probe Sequence
agtgtcaaaactactgcaatatgtc

SEQ ID NO: 117781 - DNA, 25 bp, Probe Sequence
cttctggtcccaacatttcctcctt

SEQ ID NO: 117782 - DNA, 25 bp, Probe Sequence
tgtcaaaactactgcaatatgtcgg

SEQ ID NO: 117783 - DNA, 25 bp, Probe Sequence
ccactactcctggtgcttatagctc

SEQ ID NO: 117784 - DNA, 25 bp, Probe Sequence
actactgcaatatgtcggacaccag

SEQ ID NO: 117785 - DNA, 25 bp, Probe Sequence
aagtaatttgggagcgactaggagc

SEQ ID NO: 117786 - DNA, 25 bp, Probe Sequence
tctggtcccaacatttcctcctttg

SEQ ID NO: 117787 - DNA, 25 bp, Probe Sequence
tctcagcacagtatggaattggata

SEQ ID NO: 117788 - DNA, 25 bp, Probe Sequence
aacgaagtattcagtcaattcagaa

SEQ ID NO: 117789 - DNA, 25 bp, Probe Sequence
agtctctctctctcagcacagtatg

SEQ ID NO: 117790 - DNA, 25 bp, Probe Sequence
aatgtcaacatcttcatcttctagc

SEQ ID NO: 117791 - DNA, 25 bp, Probe Sequence
ctctctctcagcacagtatggaatt

SEQ ID NO: 117792 - DNA, 25 bp, Probe Sequence
gactattagataatcttgctccagc

SEQ ID NO: 117793 - DNA, 25 bp, Probe Sequence
gagtctctctctctcagcacagtat

SEQ ID NO: 117794 - DNA, 25 bp, Probe Sequence
cagtatggaattggatacaagcaag

SEQ ID NO: 117795 - DNA, 25 bp, Probe Sequence
agtatggaattggatacaagcaagt

SEQ ID NO: 117796 - DNA, 25 bp, Probe Sequence
gtatggaattggatacaagcaagtt

SEQ ID NO: 117797 - DNA, 25 bp, Probe Sequence
tctctctcagcacagtatggaattg

SEQ ID NO: 117798 - DNA, 25 bp, Probe Sequence
acagtatggaattggatacaagcaa

SEQ ID NO: 117799 - DNA, 25 bp, Probe Sequence
agcacagtatggaattggatacaag

SEQ ID NO: 117800 - DNA, 25 bp, Probe Sequence
ctctcagcacagtatggaattggat

SEQ ID NO: 117801 - DNA, 25 bp, Probe Sequence
tgtcaacatcttcatcttctagctg

SEQ ID NO: 117802 - DNA, 25 bp, Probe Sequence
cacagtatggaattggatacaagca

SEQ ID NO: 117803 - DNA, 25 bp, Probe Sequence
cagcacagtatggaattggatacaa

SEQ ID NO: 117804 - DNA, 25 bp, Probe Sequence
tctctctctcagcacagtatggaat

SEQ ID NO: 117805 - DNA, 25 bp, Probe Sequence
ctcagcacagtatggaattggatac

SEQ ID NO: 117806 - DNA, 25 bp, Probe Sequence
atgtcaacatcttcatcttctagct

SEQ ID NO: 117807 - DNA, 25 bp, Probe Sequence
gtcaacatcttcatcttctagctgg

SEQ ID NO: 117808 - DNA, 25 bp, Probe Sequence
actattagataatcttgctccagct

SEQ ID NO: 117809 - DNA, 25 bp, Probe Sequence
tcagcacagtatggaattggataca

SEQ ID NO: 117810 - DNA, 25 bp, Probe Sequence
actttacaagaagggctcacatatt

SEQ ID NO: 117811 - DNA, 25 bp, Probe Sequence
cgtcaagagagtttgtaatttcctt

SEQ ID NO: 117812 - DNA, 25 bp, Probe Sequence
cagcgtcaagagagtttgtaatttc

SEQ ID NO: 117813 - DNA, 25 bp, Probe Sequence
gatttgatccatttcctctctacca

SEQ ID NO: 117814 - DNA, 25 bp, Probe Sequence
atttgatccatttcctctctaccat

SEQ ID NO: 117815 - DNA, 25 bp, Probe Sequence
gctttgatttcattggtggatttga

SEQ ID NO: 117816 - DNA, 25 bp, Probe Sequence
atttcctctctaccatgtcaatgaa

SEQ ID NO: 117817 - DNA, 25 bp, Probe Sequence
tttgatccatttcctctctaccatg

SEQ ID NO: 117818 - DNA, 25 bp, Probe Sequence
gcgtcaagagagtttgtaatttcct

SEQ ID NO: 117819 - DNA, 25 bp, Probe Sequence
agcgtcaagagagtttgtaatttcc

SEQ ID NO: 117820 - DNA, 25 bp, Probe Sequence
ctttgatttcattggtggatttgat

SEQ ID NO: 117821 - DNA, 25 bp, Probe Sequence
tccatttcctctctaccatgtcaat

SEQ ID NO: 117822 - DNA, 25 bp, Probe Sequence
atccatttcctctctaccatgtcaa

SEQ ID NO: 117823 - DNA, 25 bp, Probe Sequence
ttgatccatttcctctctaccatgt

SEQ ID NO: 117824 - DNA, 25 bp, Probe Sequence
tttgatttcattggtggatttgatc

SEQ ID NO: 117825 - DNA, 25 bp, Probe Sequence
agctttgatttcattggtggatttg

SEQ ID NO: 117826 - DNA, 25 bp, Probe Sequence
cagctttgatttcattggtggattt

SEQ ID NO: 117827 - DNA, 25 bp, Probe Sequence
gatccatttcctctctaccatgtca

SEQ ID NO: 117828 - DNA, 25 bp, Probe Sequence
tgatccatttcctctctaccatgtc

SEQ ID NO: 117829 - DNA, 25 bp, Probe Sequence
gaagaggacagctttgatttcattg

SEQ ID NO: 117830 - DNA, 25 bp, Probe Sequence
gtcaagagagtttgtaatttccttt

SEQ ID NO: 117831 - DNA, 25 bp, Probe Sequence
gcagcgtcaagagagtttgtaattt

SEQ ID NO: 117832 - DNA, 25 bp, Probe Sequence
caagagagtttgtaatttcctttct

SEQ ID NO: 117833 - DNA, 25 bp, Probe Sequence
tcaagagagtttgtaatttcctttc

SEQ ID NO: 117834 - DNA, 25 bp, Probe Sequence
acagctttgatttcattggtggatt

SEQ ID NO: 117835 - DNA, 25 bp, Probe Sequence
aattgaagtcagtgaagatggaacc

SEQ ID NO: 117836 - DNA, 25 bp, Probe Sequence
ggaacactgtactgaggaatgaata

SEQ ID NO: 117837 - DNA, 25 bp, Probe Sequence
acactgtactgaggaatgaatagaa

SEQ ID NO: 117838 - DNA, 25 bp, Probe Sequence
aacactgtactgaggaatgaataga

SEQ ID NO: 117839 - DNA, 25 bp, Probe Sequence
gaacactgtactgaggaatgaatag

SEQ ID NO: 117840 - DNA, 25 bp, Probe Sequence
ttatggtacaacttcattgaactgc

SEQ ID NO: 117841 - DNA, 25 bp, Probe Sequence
ttcatccgacataatcctacaggtg

SEQ ID NO: 117842 - DNA, 25 bp, Probe Sequence
tggaacactgtactgaggaatgaat

SEQ ID NO: 117843 - DNA, 25 bp, Probe Sequence
tatggtacaacttcattgaactgcc

SEQ ID NO: 117844 - DNA, 25 bp, Probe Sequence
attgaagtcagtgaagatggaacca

SEQ ID NO: 117845 - DNA, 25 bp, Probe Sequence
ctggaacactgtactgaggaatgaa

SEQ ID NO: 117846 - DNA, 25 bp, Probe Sequence
ttgaagtcagtgaagatggaaccaa

SEQ ID NO: 117847 - DNA, 25 bp, Probe Sequence
tactgaggaatgaatagaaaggctt

SEQ ID NO: 117848 - DNA, 25 bp, Probe Sequence
aaattgaagtcagtgaagatggaac

SEQ ID NO: 117849 - DNA, 25 bp, Probe Sequence
aatgaatagaaaggcttccagatgt

SEQ ID NO: 117850 - DNA, 25 bp, Probe Sequence
gaatgaatagaaaggcttccagatg

SEQ ID NO: 117851 - DNA, 25 bp, Probe Sequence
actgaggaatgaatagaaaggcttc

SEQ ID NO: 117852 - DNA, 25 bp, Probe Sequence
atgaatagaaaggcttccagatgtc

SEQ ID NO: 117853 - DNA, 25 bp, Probe Sequence
gtactgaggaatgaatagaaaggct

SEQ ID NO: 117854 - DNA, 25 bp, Probe Sequence
tgtactgaggaatgaatagaaaggc

SEQ ID NO: 117855 - DNA, 25 bp, Probe Sequence
tttcatccgacataatcctacaggt

SEQ ID NO: 117856 - DNA, 25 bp, Probe Sequence
tgaaagttcttggcattactgacat

SEQ ID NO: 117857 - DNA, 25 bp, Probe Sequence
tgaatagaaaggcttccagatgtct

SEQ ID NO: 117858 - DNA, 25 bp, Probe Sequence
aagtgtttctgttctgggaggtatt

SEQ ID NO: 117859 - DNA, 25 bp, Probe Sequence
gagacggtactgaacagacaattaa

SEQ ID NO: 117860 - DNA, 25 bp, Probe Sequence
agacggtactgaacagacaattaac

SEQ ID NO: 117861 - DNA, 25 bp, Probe Sequence
gattgagaacactgctaaggacaag

SEQ ID NO: 117862 - DNA, 25 bp, Probe Sequence
tatcctggattgagaacactgctaa

SEQ ID NO: 117863 - DNA, 25 bp, Probe Sequence
tatgtatcctggattgagaacactg

SEQ ID NO: 117864 - DNA, 25 bp, Probe Sequence
attgagaacactgctaaggacaagt

SEQ ID NO: 117865 - DNA, 25 bp, Probe Sequence
gtatcctggattgagaacactgcta

SEQ ID NO: 117866 - DNA, 25 bp, Probe Sequence
atatgtatcctggattgagaacact

SEQ ID NO: 117867 - DNA, 25 bp, Probe Sequence
aatatgtatcctggattgagaacac

SEQ ID NO: 117868 - DNA, 25 bp, Probe Sequence
atcctggattgagaacactgctaag

SEQ ID NO: 117869 - DNA, 25 bp, Probe Sequence
ggattgagaacactgctaaggacaa

SEQ ID NO: 117870 - DNA, 25 bp, Probe Sequence
ctggattgagaacactgctaaggac

SEQ ID NO: 117871 - DNA, 25 bp, Probe Sequence
gacggtactgaacagacaattaacc

SEQ ID NO: 117872 - DNA, 25 bp, Probe Sequence
ggcatctacaccaatgtttacaaat

SEQ ID NO: 117873 - DNA, 25 bp, Probe Sequence
atgtatcctggattgagaacactgc

SEQ ID NO: 117874 - DNA, 25 bp, Probe Sequence
tggattgagaacactgctaaggaca

SEQ ID NO: 117875 - DNA, 25 bp, Probe Sequence
gcatctacaccaatgtttacaaata

SEQ ID NO: 117876 - DNA, 25 bp, Probe Sequence
cggcatctacaccaatgtttacaaa

SEQ ID NO: 117877 - DNA, 25 bp, Probe Sequence
tgtatcctggattgagaacactgct

SEQ ID NO: 117878 - DNA, 25 bp, Probe Sequence
ccttatgtgtgaaatttgtgaaagt

SEQ ID NO: 117879 - DNA, 25 bp, Probe Sequence
caaatatgtatcctggattgagaac

SEQ ID NO: 117880 - DNA, 25 bp, Probe Sequence
cactgtctgtctactctcaggtttg

SEQ ID NO: 117881 - DNA, 25 bp, Probe Sequence
tccttatgtgtgaaatttgtgaaag

SEQ ID NO: 117882 - DNA, 25 bp, Probe Sequence
tcggcatctacaccaatgtttacaa

SEQ ID NO: 117883 - DNA, 25 bp, Probe Sequence
cgaggatataggaccaagattacag

SEQ ID NO: 117884 - DNA, 25 bp, Probe Sequence
ccgaggatataggaccaagattaca

SEQ ID NO: 117885 - DNA, 25 bp, Probe Sequence
gaggatataggaccaagattacaga

SEQ ID NO: 117886 - DNA, 25 bp, Probe Sequence
acaattcatctccattatgcctcag

SEQ ID NO: 117887 - DNA, 25 bp, Probe Sequence
gacaattcatctccattatgcctca

SEQ ID NO: 117888 - DNA, 25 bp, Probe Sequence
aggatataggaccaagattacagaa

SEQ ID NO: 117889 - DNA, 25 bp, Probe Sequence
caattcatctccattatgcctcagg

SEQ ID NO: 117890 - DNA, 25 bp, Probe Sequence
aggaccaagattacagaatgaataa

SEQ ID NO: 117891 - DNA, 25 bp, Probe Sequence
ttctgttctcgtggaagatgaagtt

SEQ ID NO: 117892 - DNA, 25 bp, Probe Sequence
ataggaccaagattacagaatgaat

SEQ ID NO: 117893 - DNA, 25 bp, Probe Sequence
tccgaggatataggaccaagattac

SEQ ID NO: 117894 - DNA, 25 bp, Probe Sequence
tgaacttaccagatgtaacagaagc

SEQ ID NO: 117895 - DNA, 25 bp, Probe Sequence
ggatataggaccaagattacagaat

SEQ ID NO: 117896 - DNA, 25 bp, Probe Sequence
aataaagtgtggtagtgcctatgaa

SEQ ID NO: 117897 - DNA, 25 bp, Probe Sequence
atgaacttaccagatgtaacagaag

SEQ ID NO: 117898 - DNA, 25 bp, Probe Sequence
ataaagtgtggtagtgcctatgaat

SEQ ID NO: 117899 - DNA, 25 bp, Probe Sequence
atccgaggatataggaccaagatta

SEQ ID NO: 117900 - DNA, 25 bp, Probe Sequence
taaagtgtggtagtgcctatgaatg

SEQ ID NO: 117901 - DNA, 25 bp, Probe Sequence
ggacaattcatctccattatgcctc

SEQ ID NO: 117902 - DNA, 25 bp, Probe Sequence
gagttaataaagtgtggtagtgcct

SEQ ID NO: 117903 - DNA, 25 bp, Probe Sequence
taataaagtgtggtagtgcctatga

SEQ ID NO: 117904 - DNA, 25 bp, Probe Sequence
agttaataaagtgtggtagtgccta

SEQ ID NO: 117905 - DNA, 25 bp, Probe Sequence
tctgttctcgtggaagatgaagttg

SEQ ID NO: 117906 - DNA, 25 bp, Probe Sequence
ttgagttaataaagtgtggtagtgc

SEQ ID NO: 117907 - DNA, 25 bp, Probe Sequence
tggatacacagacagtaagaattga

SEQ ID NO: 117908 - DNA, 25 bp, Probe Sequence
tacacagacagtaagaattgatcgt

SEQ ID NO: 117909 - DNA, 25 bp, Probe Sequence
acacagacagtaagaattgatcgtt

SEQ ID NO: 117910 - DNA, 25 bp, Probe Sequence
ggatacacagacagtaagaattgat

SEQ ID NO: 117911 - DNA, 25 bp, Probe Sequence
atacacagacagtaagaattgatcg

SEQ ID NO: 117912 - DNA, 25 bp, Probe Sequence
gtagtggatacacagacagtaagaa

SEQ ID NO: 117913 - DNA, 25 bp, Probe Sequence
gtggatacacagacagtaagaattg

SEQ ID NO: 117914 - DNA, 25 bp, Probe Sequence
agtggatacacagacagtaagaatt

SEQ ID NO: 117915 - DNA, 25 bp, Probe Sequence
ctatgatccacttcagcgtaacttc

SEQ ID NO: 117916 - DNA, 25 bp, Probe Sequence
gtagcaagcgatccagacttctata

SEQ ID NO: 117917 - DNA, 25 bp, Probe Sequence
tagtggatacacagacagtaagaat

SEQ ID NO: 117918 - DNA, 25 bp, Probe Sequence
atgaagctagaagaaggagacagtt

SEQ ID NO: 117919 - DNA, 25 bp, Probe Sequence
agatgaagctagaagaaggagacag

SEQ ID NO: 117920 - DNA, 25 bp, Probe Sequence
actatgatccacttcagcgtaactt

SEQ ID NO: 117921 - DNA, 25 bp, Probe Sequence
gatgaagctagaagaaggagacagt

SEQ ID NO: 117922 - DNA, 25 bp, Probe Sequence
cagatgaagctagaagaaggagaca

SEQ ID NO: 117923 - DNA, 25 bp, Probe Sequence
tacaagcactggaattagcagatga

SEQ ID NO: 117924 - DNA, 25 bp, Probe Sequence
gacttctatagtgaggcaatactgg

SEQ ID NO: 117925 - DNA, 25 bp, Probe Sequence
ccagacttctatagtgaggcaatac

SEQ ID NO: 117926 - DNA, 25 bp, Probe Sequence
tccagacttctatagtgaggcaata

SEQ ID NO: 117927 - DNA, 25 bp, Probe Sequence
caagcactggaattagcagatgaag

SEQ ID NO: 117928 - DNA, 25 bp, Probe Sequence
tgtagtggatacacagacagtaaga

SEQ ID NO: 117929 - DNA, 25 bp, Probe Sequence
aaagggttctgcttatttatgatgg

SEQ ID NO: 117930 - DNA, 25 bp, Probe Sequence
agacttctatagtgaggcaatactg

SEQ ID NO: 117931 - DNA, 25 bp, Probe Sequence
aaggaaggatggaattactatgacc

SEQ ID NO: 117932 - DNA, 25 bp, Probe Sequence
ctgtcaaggaaggatggaattacta

SEQ ID NO: 117933 - DNA, 25 bp, Probe Sequence
atctgtcaaggaaggatggaattac

SEQ ID NO: 117934 - DNA, 25 bp, Probe Sequence
aatctgtcaaggaaggatggaatta

SEQ ID NO: 117935 - DNA, 25 bp, Probe Sequence
tgtcaaggaaggatggaattactat

SEQ ID NO: 117936 - DNA, 25 bp, Probe Sequence
caaggaaggatggaattactatgac

SEQ ID NO: 117937 - DNA, 25 bp, Probe Sequence
gtcaaggaaggatggaattactatg

SEQ ID NO: 117938 - DNA, 25 bp, Probe Sequence
tctgtcaaggaaggatggaattact

SEQ ID NO: 117939 - DNA, 25 bp, Probe Sequence
ctgacagtggtattgatgatgacat

SEQ ID NO: 117940 - DNA, 25 bp, Probe Sequence
caatctgtcaaggaaggatggaatt

SEQ ID NO: 117941 - DNA, 25 bp, Probe Sequence
gaatcaatctgtcaaggaaggatgg

SEQ ID NO: 117942 - DNA, 25 bp, Probe Sequence
tgattccttgttcatatccactctg

SEQ ID NO: 117943 - DNA, 25 bp, Probe Sequence
tcaatctgtcaaggaaggatggaat

SEQ ID NO: 117944 - DNA, 25 bp, Probe Sequence
atcaatctgtcaaggaaggatggaa

SEQ ID NO: 117945 - DNA, 25 bp, Probe Sequence
aatcaatctgtcaaggaaggatgga

SEQ ID NO: 117946 - DNA, 25 bp, Probe Sequence
tgaatcaatctgtcaaggaaggatg

SEQ ID NO: 117947 - DNA, 25 bp, Probe Sequence
gtgaatcaatctgtcaaggaaggat

SEQ ID NO: 117948 - DNA, 25 bp, Probe Sequence
ggattgttgtagaagtctaactgga

SEQ ID NO: 117949 - DNA, 25 bp, Probe Sequence
gcctcttcctcatgttaccttatat

SEQ ID NO: 117950 - DNA, 25 bp, Probe Sequence
ttcctcatgttaccttatattggct

SEQ ID NO: 117951 - DNA, 25 bp, Probe Sequence
agcctcttcctcatgttaccttata

SEQ ID NO: 117952 - DNA, 25 bp, Probe Sequence
tcaaggaaggatggaattactatga

SEQ ID NO: 117953 - DNA, 25 bp, Probe Sequence
ttgtgaatcaatctgtcaaggaagg

SEQ ID NO: 117954 - DNA, 25 bp, Probe Sequence
cttcctcatgttaccttatattggc

SEQ ID NO: 117955 - DNA, 25 bp, Probe Sequence
gccatgtcttcttccagttctataa

SEQ ID NO: 117956 - DNA, 25 bp, Probe Sequence
agccatgtcttcttccagttctata

SEQ ID NO: 117957 - DNA, 25 bp, Probe Sequence
tattctgctgctaatgacactggtt

SEQ ID NO: 117958 - DNA, 25 bp, Probe Sequence
aagccatgtcttcttccagttctat

SEQ ID NO: 117959 - DNA, 25 bp, Probe Sequence
gtattctgctgctaatgacactggt

SEQ ID NO: 117960 - DNA, 25 bp, Probe Sequence
tgcaatggtgacttcatggataatc

SEQ ID NO: 117961 - DNA, 25 bp, Probe Sequence
ctgcaatggtgacttcatggataat

SEQ ID NO: 117962 - DNA, 25 bp, Probe Sequence
caagccatgtcttcttccagttcta

SEQ ID NO: 117963 - DNA, 25 bp, Probe Sequence
gcaatggtgacttcatggataatcc

SEQ ID NO: 117964 - DNA, 25 bp, Probe Sequence
ccatgtcttcttccagttctataaa

SEQ ID NO: 117965 - DNA, 25 bp, Probe Sequence
attctgctgctaatgacactggttt

SEQ ID NO: 117966 - DNA, 25 bp, Probe Sequence
atggtgacttcatggataatccctt

SEQ ID NO: 117967 - DNA, 25 bp, Probe Sequence
aatggtgacttcatggataatccct

SEQ ID NO: 117968 - DNA, 25 bp, Probe Sequence
caatggtgacttcatggataatccc

SEQ ID NO: 117969 - DNA, 25 bp, Probe Sequence
tggtgacttcatggataatcccttc

SEQ ID NO: 117970 - DNA, 25 bp, Probe Sequence
gctgcaatggtgacttcatggataa

SEQ ID NO: 117971 - DNA, 25 bp, Probe Sequence
ggtgacttcatggataatcccttcc

SEQ ID NO: 117972 - DNA, 25 bp, Probe Sequence
gtgacttcatggataatcccttccg

SEQ ID NO: 117973 - DNA, 25 bp, Probe Sequence
taatgacactggttttgtggacatc

SEQ ID NO: 117974 - DNA, 25 bp, Probe Sequence
ctaatgacactggttttgtggacat

SEQ ID NO: 117975 - DNA, 25 bp, Probe Sequence
ttctgctgctaatgacactggtttt

SEQ ID NO: 117976 - DNA, 25 bp, Probe Sequence
gtggttggctacagctatgaaggag

SEQ ID NO: 117977 - DNA, 25 bp, Probe Sequence
catgtcttcttccagttctataaaa

SEQ ID NO: 117978 - DNA, 25 bp, Probe Sequence
tctgctgctaatgacactggttttg

SEQ ID NO: 117979 - DNA, 25 bp, Probe Sequence
ctggatcatgctatgctggtagttg

SEQ ID NO: 117980 - DNA, 25 bp, Probe Sequence
atcatgctatgctggtagttggcta

SEQ ID NO: 117981 - DNA, 25 bp, Probe Sequence
gtagttggctacagctatgaaggag

SEQ ID NO: 117982 - DNA, 25 bp, Probe Sequence
cctggatcatgctatgctggtagtt

SEQ ID NO: 117983 - DNA, 25 bp, Probe Sequence
ctggtagttggctacagctatgaag

SEQ ID NO: 117984 - DNA, 25 bp, Probe Sequence
tggatcatgctatgctggtagttgg

SEQ ID NO: 117985 - DNA, 25 bp, Probe Sequence
gatcatgctatgctggtagttggct

SEQ ID NO: 117986 - DNA, 25 bp, Probe Sequence
ggtagttggctacagctatgaagga

SEQ ID NO: 117987 - DNA, 25 bp, Probe Sequence
tagttggctacagctatgaaggagc

SEQ ID NO: 117988 - DNA, 25 bp, Probe Sequence
tggtagttggctacagctatgaagg

SEQ ID NO: 117989 - DNA, 25 bp, Probe Sequence
atgctatgctggtagttggctacag

SEQ ID NO: 117990 - DNA, 25 bp, Probe Sequence
tcatgctatgctggtagttggctac

SEQ ID NO: 117991 - DNA, 25 bp, Probe Sequence
catgctatgctggtagttggctaca

SEQ ID NO: 117992 - DNA, 25 bp, Probe Sequence
gccatcttcaagggactcatcatat

SEQ ID NO: 117993 - DNA, 25 bp, Probe Sequence
gactcatcatatggctgctacaatg

SEQ ID NO: 117994 - DNA, 25 bp, Probe Sequence
gttgtgatagctttaaggaatgagg

SEQ ID NO: 117995 - DNA, 25 bp, Probe Sequence
ggttgtgatagctttaaggaatgag

SEQ ID NO: 117996 - DNA, 25 bp, Probe Sequence
tgatagctttaaggaatgaggcaaa

SEQ ID NO: 117997 - DNA, 25 bp, Probe Sequence
gggttgtgatagctttaaggaatga

SEQ ID NO: 117998 - DNA, 25 bp, Probe Sequence
gtgatagctttaaggaatgaggcaa

SEQ ID NO: 117999 - DNA, 25 bp, Probe Sequence
ttgtgatagctttaaggaatgaggc

SEQ ID NO: 118000 - DNA, 25 bp, Probe Sequence
tttaaggaatgaggcaaaggacaca

SEQ ID NO: 118001 - DNA, 25 bp, Probe Sequence
gaggtggctaaggagagagaacatc

SEQ ID NO: 118002 - DNA, 25 bp, Probe Sequence
ttaaggaatgaggcaaaggacacag

SEQ ID NO: 118003 - DNA, 25 bp, Probe Sequence
ggactcatcatatggctgctacaat

SEQ ID NO: 118004 - DNA, 25 bp, Probe Sequence
aaagaactagagcagccatgtgtag

SEQ ID NO: 118005 - DNA, 25 bp, Probe Sequence
tgtgatagctttaaggaatgaggca

SEQ ID NO: 118006 - DNA, 25 bp, Probe Sequence
catcttcaagggactcatcatatgg

SEQ ID NO: 118007 - DNA, 25 bp, Probe Sequence
ccatcttcaagggactcatcatatg

SEQ ID NO: 118008 - DNA, 25 bp, Probe Sequence
ccatccagaaaaccatcataaaaga

SEQ ID NO: 118009 - DNA, 25 bp, Probe Sequence
gccatccagaaaaccatcataaaag

SEQ ID NO: 118010 - DNA, 25 bp, Probe Sequence
atttccacctgccaaacaactctac

SEQ ID NO: 118011 - DNA, 25 bp, Probe Sequence
catttccacctgccaaacaactcta

SEQ ID NO: 118012 - DNA, 25 bp, Probe Sequence
tgaggtggctaaggagagagaacat

SEQ ID NO: 118013 - DNA, 25 bp, Probe Sequence
atcatatggctgctacaatgagaag

SEQ ID NO: 118014 - DNA, 25 bp, Probe Sequence
catcatatggctgctacaatgagaa

SEQ ID NO: 118015 - DNA, 25 bp, Probe Sequence
tgccatccagaaaaccatcataaaa

SEQ ID NO: 118016 - DNA, 25 bp, Probe Sequence
ctttcaaatcttccacaccacataa

SEQ ID NO: 118017 - DNA, 25 bp, Probe Sequence
catagcatcctgaatggaatctgtg

SEQ ID NO: 118018 - DNA, 25 bp, Probe Sequence
cacatagcatcctgaatggaatctg

SEQ ID NO: 118019 - DNA, 25 bp, Probe Sequence
tcacatagcatcctgaatggaatct

SEQ ID NO: 118020 - DNA, 25 bp, Probe Sequence
gtcacatagcatcctgaatggaatc

SEQ ID NO: 118021 - DNA, 25 bp, Probe Sequence
tttcaaatcttccacaccacataag

SEQ ID NO: 118022 - DNA, 25 bp, Probe Sequence
ttcaaatcttccacaccacataagt

SEQ ID NO: 118023 - DNA, 25 bp, Probe Sequence
acatagcatcctgaatggaatctgt

SEQ ID NO: 118024 - DNA, 25 bp, Probe Sequence
ttatgtcacatagcatcctgaatgg

SEQ ID NO: 118025 - DNA, 25 bp, Probe Sequence
aggacttcattgctttcaaatcttc

SEQ ID NO: 118026 - DNA, 25 bp, Probe Sequence
gacttcattgctttcaaatcttcca

SEQ ID NO: 118027 - DNA, 25 bp, Probe Sequence
aaggacttcattgctttcaaatctt

SEQ ID NO: 118028 - DNA, 25 bp, Probe Sequence
cttcattgctttcaaatcttccaca

SEQ ID NO: 118029 - DNA, 25 bp, Probe Sequence
acttcattgctttcaaatcttccac

SEQ ID NO: 118030 - DNA, 25 bp, Probe Sequence
tgtcacatagcatcctgaatggaat

SEQ ID NO: 118031 - DNA, 25 bp, Probe Sequence
ttcattgctttcaaatcttccacac

SEQ ID NO: 118032 - DNA, 25 bp, Probe Sequence
gctttcaaatcttccacaccacata

SEQ ID NO: 118033 - DNA, 25 bp, Probe Sequence
tatgtcacatagcatcctgaatgga

SEQ ID NO: 118034 - DNA, 25 bp, Probe Sequence
ctcaggaaatggaaacagcactaag

SEQ ID NO: 118035 - DNA, 25 bp, Probe Sequence
atgtcacatagcatcctgaatggaa

SEQ ID NO: 118036 - DNA, 25 bp, Probe Sequence
atagcatcctgaatggaatctgtgg

SEQ ID NO: 118037 - DNA, 25 bp, Probe Sequence
cagatgttcttcacgatgacaccat

SEQ ID NO: 118038 - DNA, 25 bp, Probe Sequence
caaggtaacatctgtaatgatgctg

SEQ ID NO: 118039 - DNA, 25 bp, Probe Sequence
aaggtaacatctgtaatgatgctgt

SEQ ID NO: 118040 - DNA, 25 bp, Probe Sequence
aatactctgaacaagtccgtgatat

SEQ ID NO: 118041 - DNA, 25 bp, Probe Sequence
atactctgaacaagtccgtgatata

SEQ ID NO: 118042 - DNA, 25 bp, Probe Sequence
actctgaacaagtccgtgatatatt

SEQ ID NO: 118043 - DNA, 25 bp, Probe Sequence
ctgaacaagtccgtgatatattaca

SEQ ID NO: 118044 - DNA, 25 bp, Probe Sequence
tctgaacaagtccgtgatatattac

SEQ ID NO: 118045 - DNA, 25 bp, Probe Sequence
tactctgaacaagtccgtgatatat

SEQ ID NO: 118046 - DNA, 25 bp, Probe Sequence
tgaacaagtccgtgatatattacaa

SEQ ID NO: 118047 - DNA, 25 bp, Probe Sequence
caagtccgtgatatattacaactca

SEQ ID NO: 118048 - DNA, 25 bp, Probe Sequence
acaagtccgtgatatattacaactc

SEQ ID NO: 118049 - DNA, 25 bp, Probe Sequence
ctctgaacaagtccgtgatatatta

SEQ ID NO: 118050 - DNA, 25 bp, Probe Sequence
gaacaagtccgtgatatattacaac

SEQ ID NO: 118051 - DNA, 25 bp, Probe Sequence
aacaagtccgtgatatattacaact

SEQ ID NO: 118052 - DNA, 25 bp, Probe Sequence
atttgcttgactctgttattcggaa

SEQ ID NO: 118053 - DNA, 25 bp, Probe Sequence
aagtccgtgatatattacaactcaa

SEQ ID NO: 118054 - DNA, 25 bp, Probe Sequence
tttgcttgactctgttattcggaaa

SEQ ID NO: 118055 - DNA, 25 bp, Probe Sequence
gatttgcttgactctgttattcgga

SEQ ID NO: 118056 - DNA, 25 bp, Probe Sequence
tccgtgatatattacaactcaatga

SEQ ID NO: 118057 - DNA, 25 bp, Probe Sequence
gtccgtgatatattacaactcaatg

SEQ ID NO: 118058 - DNA, 25 bp, Probe Sequence
aaagaaatctcactgcttgggaaat

SEQ ID NO: 118059 - DNA, 25 bp, Probe Sequence
aaatactctgaacaagtccgtgata

SEQ ID NO: 118060 - DNA, 25 bp, Probe Sequence
tgggaagaaatactctgaacaagtc

SEQ ID NO: 118061 - DNA, 25 bp, Probe Sequence
agtccgtgatatattacaactcaat

SEQ ID NO: 118062 - DNA, 25 bp, Probe Sequence
cagaatatctttgtgggtgttatca

SEQ ID NO: 118063 - DNA, 25 bp, Probe Sequence
gtgggaagaaatactctgaacaagt

SEQ ID NO: 118064 - DNA, 25 bp, Probe Sequence
ctcctcttctgccttatgttctatc

SEQ ID NO: 118065 - DNA, 25 bp, Probe Sequence
tatcacacatattcgctctcattct

SEQ ID NO: 118066 - DNA, 25 bp, Probe Sequence
tcctcttctgccttatgttctatca

SEQ ID NO: 118067 - DNA, 25 bp, Probe Sequence
tcctcttatgcggtgtgtagtatta

SEQ ID NO: 118068 - DNA, 25 bp, Probe Sequence
cctcttatgcggtgtgtagtattac

SEQ ID NO: 118069 - DNA, 25 bp, Probe Sequence
cctcttctgccttatgttctatcat

SEQ ID NO: 118070 - DNA, 25 bp, Probe Sequence
atcacacatattcgctctcattctg

SEQ ID NO: 118071 - DNA, 25 bp, Probe Sequence
aattagtgattcctcttatgcggtg

SEQ ID NO: 118072 - DNA, 25 bp, Probe Sequence
attcctcttatgcggtgtgtagtat

SEQ ID NO: 118073 - DNA, 25 bp, Probe Sequence
cctcctcttctgccttatgttctat

SEQ ID NO: 118074 - DNA, 25 bp, Probe Sequence
atatcacacatattcgctctcattc

SEQ ID NO: 118075 - DNA, 25 bp, Probe Sequence
ttcctcttatgcggtgtgtagtatt

SEQ ID NO: 118076 - DNA, 25 bp, Probe Sequence
tcttatgcggtgtgtagtattactc

SEQ ID NO: 118077 - DNA, 25 bp, Probe Sequence
ctcttatgcggtgtgtagtattact

SEQ ID NO: 118078 - DNA, 25 bp, Probe Sequence
cttatgcggtgtgtagtattactca

SEQ ID NO: 118079 - DNA, 25 bp, Probe Sequence
attagtgattcctcttatgcggtgt

SEQ ID NO: 118080 - DNA, 25 bp, Probe Sequence
tatgcggtgtgtagtattactcatt

SEQ ID NO: 118081 - DNA, 25 bp, Probe Sequence
ttatgcggtgtgtagtattactcat

SEQ ID NO: 118082 - DNA, 25 bp, Probe Sequence
gattcctcttatgcggtgtgtagta

SEQ ID NO: 118083 - DNA, 25 bp, Probe Sequence
tcttctgccttatgttctatcatgg

SEQ ID NO: 118084 - DNA, 25 bp, Probe Sequence
taattagtgattcctcttatgcggt

SEQ ID NO: 118085 - DNA, 25 bp, Probe Sequence
ctcttctgccttatgttctatcatg

SEQ ID NO: 118086 - DNA, 25 bp, Probe Sequence
tatatcacacatattcgctctcatt

SEQ ID NO: 118087 - DNA, 25 bp, Probe Sequence
ttatatcacacatattcgctctcat

SEQ ID NO: 118088 - DNA, 25 bp, Probe Sequence
attaaggaatctggaatctgtggag

SEQ ID NO: 118089 - DNA, 25 bp, Probe Sequence
aagcacatcattcagattcacacta

SEQ ID NO: 118090 - DNA, 25 bp, Probe Sequence
aattaaggaatctggaatctgtgga

SEQ ID NO: 118091 - DNA, 25 bp, Probe Sequence
acatcattcagattcacactagcag

SEQ ID NO: 118092 - DNA, 25 bp, Probe Sequence
agcacatcattcagattcacactag

SEQ ID NO: 118093 - DNA, 25 bp, Probe Sequence
gagaagcacatcattcagattcaca

SEQ ID NO: 118094 - DNA, 25 bp, Probe Sequence
cacatcattcagattcacactagca

SEQ ID NO: 118095 - DNA, 25 bp, Probe Sequence
gaagcacatcattcagattcacact

SEQ ID NO: 118096 - DNA, 25 bp, Probe Sequence
agaagcacatcattcagattcacac

SEQ ID NO: 118097 - DNA, 25 bp, Probe Sequence
tcattcagattcacactagcaggat

SEQ ID NO: 118098 - DNA, 25 bp, Probe Sequence
atcattcagattcacactagcagga

SEQ ID NO: 118099 - DNA, 25 bp, Probe Sequence
catcattcagattcacactagcagg

SEQ ID NO: 118100 - DNA, 25 bp, Probe Sequence
tgagaagcacatcattcagattcac

SEQ ID NO: 118101 - DNA, 25 bp, Probe Sequence
cattcagattcacactagcaggatg

SEQ ID NO: 118102 - DNA, 25 bp, Probe Sequence
gcttcctctcacctattctgaatac

SEQ ID NO: 118103 - DNA, 25 bp, Probe Sequence
attcagattcacactagcaggatga

SEQ ID NO: 118104 - DNA, 25 bp, Probe Sequence
ttaaggaatctggaatctgtggagc

SEQ ID NO: 118105 - DNA, 25 bp, Probe Sequence
cttcctctcacctattctgaatact

SEQ ID NO: 118106 - DNA, 25 bp, Probe Sequence
gcacatcattcagattcacactagc

SEQ ID NO: 118107 - DNA, 25 bp, Probe Sequence
ttcagattcacactagcaggatgag

SEQ ID NO: 118108 - DNA, 25 bp, Probe Sequence
agcttcctctcacctattctgaata

SEQ ID NO: 118109 - DNA, 25 bp, Probe Sequence
ctatgaagaaatgggtatgaagcct

SEQ ID NO: 118110 - DNA, 25 bp, Probe Sequence
tatgaagaaatgggtatgaagcctc

SEQ ID NO: 118111 - DNA, 25 bp, Probe Sequence
actatgaagaaatgggtatgaagcc

SEQ ID NO: 118112 - DNA, 25 bp, Probe Sequence
tcagcaaatataaagcagaaagagc

SEQ ID NO: 118113 - DNA, 25 bp, Probe Sequence
gtaaagaaacatacatccgaagacg

SEQ ID NO: 118114 - DNA, 25 bp, Probe Sequence
agacagtaaagaaacatacatccga

SEQ ID NO: 118115 - DNA, 25 bp, Probe Sequence
gagacagtaaagaaacatacatccg

SEQ ID NO: 118116 - DNA, 25 bp, Probe Sequence
aaatataaagcagaaagagccacga

SEQ ID NO: 118117 - DNA, 25 bp, Probe Sequence
caaatataaagcagaaagagccacg

SEQ ID NO: 118118 - DNA, 25 bp, Probe Sequence
cagcaaatataaagcagaaagagcc

SEQ ID NO: 118119 - DNA, 25 bp, Probe Sequence
acagtaaagaaacatacatccgaag

SEQ ID NO: 118120 - DNA, 25 bp, Probe Sequence
gacagtaaagaaacatacatccgaa

SEQ ID NO: 118121 - DNA, 25 bp, Probe Sequence
aaatacgaacacccaggaaattaag

SEQ ID NO: 118122 - DNA, 25 bp, Probe Sequence
gcaaatataaagcagaaagagccac

SEQ ID NO: 118123 - DNA, 25 bp, Probe Sequence
agcaaatataaagcagaaagagcca

SEQ ID NO: 118124 - DNA, 25 bp, Probe Sequence
agtaaagaaacatacatccgaagac

SEQ ID NO: 118125 - DNA, 25 bp, Probe Sequence
cagtaaagaaacatacatccgaaga

SEQ ID NO: 118126 - DNA, 25 bp, Probe Sequence
aatataaagcagaaagagccacgag

SEQ ID NO: 118127 - DNA, 25 bp, Probe Sequence
tgagacagtaaagaaacatacatcc

SEQ ID NO: 118128 - DNA, 25 bp, Probe Sequence
aatacgaacacccaggaaattaagc

SEQ ID NO: 118129 - DNA, 25 bp, Probe Sequence
agttgttggcttcagcaaatataaa

SEQ ID NO: 118130 - DNA, 25 bp, Probe Sequence
cagttgttggcttcagcaaatataa

SEQ ID NO: 118131 - DNA, 25 bp, Probe Sequence
gttgttggcttcagcaaatataaag

SEQ ID NO: 118132 - DNA, 25 bp, Probe Sequence
tcagttgttggcttcagcaaatata

SEQ ID NO: 118133 - DNA, 25 bp, Probe Sequence
ttcagcaaatataaagcagaaagag

SEQ ID NO: 118134 - DNA, 25 bp, Probe Sequence
cttcagcaaatataaagcagaaaga

SEQ ID NO: 118135 - DNA, 25 bp, Probe Sequence
ttcagttgttggcttcagcaaatat

SEQ ID NO: 118136 - DNA, 25 bp, Probe Sequence
ctcatcaacacagctcgcaacttat

SEQ ID NO: 118137 - DNA, 25 bp, Probe Sequence
atggggaaagtcagaaagatagaag

SEQ ID NO: 118138 - DNA, 25 bp, Probe Sequence
gcactgatgaaggagaattttgata

SEQ ID NO: 118139 - DNA, 25 bp, Probe Sequence
tcatcaacacagctcgcaacttatg

SEQ ID NO: 118140 - DNA, 25 bp, Probe Sequence
ggcactgatgaaggagaattttgat

SEQ ID NO: 118141 - DNA, 25 bp, Probe Sequence
tggggaaagtcagaaagatagaagg

SEQ ID NO: 118142 - DNA, 25 bp, Probe Sequence
catggggaaagtcagaaagatagaa

SEQ ID NO: 118143 - DNA, 25 bp, Probe Sequence
tgcagtactcattccttctgacatg

SEQ ID NO: 118144 - DNA, 25 bp, Probe Sequence
actgatgaaggagaattttgataca

SEQ ID NO: 118145 - DNA, 25 bp, Probe Sequence
tgaaggagaattttgatacatggac

SEQ ID NO: 118146 - DNA, 25 bp, Probe Sequence
acatggggaaagtcagaaagataga

SEQ ID NO: 118147 - DNA, 25 bp, Probe Sequence
cactgatgaaggagaattttgatac

SEQ ID NO: 118148 - DNA, 25 bp, Probe Sequence
gaaggagaattttgatacatggact

SEQ ID NO: 118149 - DNA, 25 bp, Probe Sequence
gaaagtcagaaagatagaaggggca

SEQ ID NO: 118150 - DNA, 25 bp, Probe Sequence
aaagatagaaggggcactgatgaag

SEQ ID NO: 118151 - DNA, 25 bp, Probe Sequence
gaaagatagaaggggcactgatgaa

SEQ ID NO: 118152 - DNA, 25 bp, Probe Sequence
gggaaagtcagaaagatagaagggg

SEQ ID NO: 118153 - DNA, 25 bp, Probe Sequence
ggggaaagtcagaaagatagaaggg

SEQ ID NO: 118154 - DNA, 25 bp, Probe Sequence
gagaattttgatacatggactcagc

SEQ ID NO: 118155 - DNA, 25 bp, Probe Sequence
aggagaattttgatacatggactca

SEQ ID NO: 118156 - DNA, 25 bp, Probe Sequence
ggagaattttgatacatggactcag

SEQ ID NO: 118157 - DNA, 25 bp, Probe Sequence
aaagtcagaaagatagaaggggcac

SEQ ID NO: 118158 - DNA, 25 bp, Probe Sequence
agaattttgatacatggactcagcc

SEQ ID NO: 118159 - DNA, 25 bp, Probe Sequence
aaggagaattttgatacatggactc

SEQ ID NO: 118160 - DNA, 25 bp, Probe Sequence
gatcatcgtccaccccaactatgtc

SEQ ID NO: 118161 - DNA, 25 bp, Probe Sequence
ggatgaggtcctaaaggatgagaaa

SEQ ID NO: 118162 - DNA, 25 bp, Probe Sequence
tggatgaggtcctaaaggatgagaa

SEQ ID NO: 118163 - DNA, 25 bp, Probe Sequence
gtggatgaggtcctaaaggatgaga

SEQ ID NO: 118164 - DNA, 25 bp, Probe Sequence
tgtggatgaggtcctaaaggatgag

SEQ ID NO: 118165 - DNA, 25 bp, Probe Sequence
ctgtggatgaggtcctaaaggatga

SEQ ID NO: 118166 - DNA, 25 bp, Probe Sequence
gactgtggatgaggtcctaaaggat

SEQ ID NO: 118167 - DNA, 25 bp, Probe Sequence
tgaggtcctaaaggatgagaaaatg

SEQ ID NO: 118168 - DNA, 25 bp, Probe Sequence
gatgaggtcctaaaggatgagaaaa

SEQ ID NO: 118169 - DNA, 25 bp, Probe Sequence
atgaggtcctaaaggatgagaaaat

SEQ ID NO: 118170 - DNA, 25 bp, Probe Sequence
gaggtcctaaaggatgagaaaatgg

SEQ ID NO: 118171 - DNA, 25 bp, Probe Sequence
actgtggatgaggtcctaaaggatg

SEQ ID NO: 118172 - DNA, 25 bp, Probe Sequence
gtgactgtggatgaggtcctaaagg

SEQ ID NO: 118173 - DNA, 25 bp, Probe Sequence
ggtgactgtggatgaggtcctaaag

SEQ ID NO: 118174 - DNA, 25 bp, Probe Sequence
aggtcctaaaggatgagaaaatggg

SEQ ID NO: 118175 - DNA, 25 bp, Probe Sequence
tgactgtggatgaggtcctaaagga

SEQ ID NO: 118176 - DNA, 25 bp, Probe Sequence
tggtgactgtggatgaggtcctaaa

SEQ ID NO: 118177 - DNA, 25 bp, Probe Sequence
ggtcctaaaggatgagaaaatgggc

SEQ ID NO: 118178 - DNA, 25 bp, Probe Sequence
cttcgtgaggtcatgcacaagaaga

SEQ ID NO: 118179 - DNA, 25 bp, Probe Sequence
cctaaaggatgagaaaatgggcctc

SEQ ID NO: 118180 - DNA, 25 bp, Probe Sequence
gtcctaaaggatgagaaaatgggcc

SEQ ID NO: 118181 - DNA, 25 bp, Probe Sequence
tcctaaaggatgagaaaatgggcct

SEQ ID NO: 118182 - DNA, 25 bp, Probe Sequence
taaaggatgagaaaatgggcctcaa

SEQ ID NO: 118183 - DNA, 25 bp, Probe Sequence
ctaaaggatgagaaaatgggcctca

SEQ ID NO: 118184 - DNA, 25 bp, Probe Sequence
aaaggatgagaaaatgggcctcaag

SEQ ID NO: 118185 - DNA, 25 bp, Probe Sequence
gatccaagataatgtctccaacgtc

SEQ ID NO: 118186 - DNA, 25 bp, Probe Sequence
aagataatgtctccaacgtctcctt

SEQ ID NO: 118187 - DNA, 25 bp, Probe Sequence
atccaagataatgtctccaacgtct

SEQ ID NO: 118188 - DNA, 25 bp, Probe Sequence
caagataatgtctccaacgtctcct

SEQ ID NO: 118189 - DNA, 25 bp, Probe Sequence
tccaagataatgtctccaacgtctc

SEQ ID NO: 118190 - DNA, 25 bp, Probe Sequence
aacccttagaagccaccatagagaa

SEQ ID NO: 118191 - DNA, 25 bp, Probe Sequence
ccaagataatgtctccaacgtctcc

SEQ ID NO: 118192 - DNA, 25 bp, Probe Sequence
atgaacccttagaagccaccataga

SEQ ID NO: 118193 - DNA, 25 bp, Probe Sequence
aagaacacccatgaacccttagaag

SEQ ID NO: 118194 - DNA, 25 bp, Probe Sequence
gaacccttagaagccaccatagaga

SEQ ID NO: 118195 - DNA, 25 bp, Probe Sequence
agataatgtctccaacgtctccttt

SEQ ID NO: 118196 - DNA, 25 bp, Probe Sequence
caagaacacccatgaacccttagaa

SEQ ID NO: 118197 - DNA, 25 bp, Probe Sequence
gataatgtctccaacgtctcctttg

SEQ ID NO: 118198 - DNA, 25 bp, Probe Sequence
acccttagaagccaccatagagaag

SEQ ID NO: 118199 - DNA, 25 bp, Probe Sequence
ataatgtctccaacgtctcctttga

SEQ ID NO: 118200 - DNA, 25 bp, Probe Sequence
tgaacccttagaagccaccatagag

SEQ ID NO: 118201 - DNA, 25 bp, Probe Sequence
catgaacccttagaagccaccatag

SEQ ID NO: 118202 - DNA, 25 bp, Probe Sequence
cttagaagccaccatagagaagctg

SEQ ID NO: 118203 - DNA, 25 bp, Probe Sequence
taatgtctccaacgtctcctttgac

SEQ ID NO: 118204 - DNA, 25 bp, Probe Sequence
ccttagaagccaccatagagaagct

SEQ ID NO: 118205 - DNA, 25 bp, Probe Sequence
tacacacctgtgaatcccttcattt

SEQ ID NO: 118206 - DNA, 25 bp, Probe Sequence
ccatgaacccttagaagccaccata

SEQ ID NO: 118207 - DNA, 25 bp, Probe Sequence
cccttagaagccaccatagagaagc

SEQ ID NO: 118208 - DNA, 25 bp, Probe Sequence
ccaagaacacccatgaacccttaga

SEQ ID NO: 118209 - DNA, 25 bp, Probe Sequence
gagaagcactacagttgtcaagaat

SEQ ID NO: 118210 - DNA, 25 bp, Probe Sequence
agaagcactacagttgtcaagaatg

SEQ ID NO: 118211 - DNA, 25 bp, Probe Sequence
gatagttcatactggagagaagcac

SEQ ID NO: 118212 - DNA, 25 bp, Probe Sequence
atagttcatactggagagaagcact

SEQ ID NO: 118213 - DNA, 25 bp, Probe Sequence
tgatagttcatactggagagaagca

SEQ ID NO: 118214 - DNA, 25 bp, Probe Sequence
agagaagcactacagttgtcaagaa

SEQ ID NO: 118215 - DNA, 25 bp, Probe Sequence
gttcatactggagagaagcactaca

SEQ ID NO: 118216 - DNA, 25 bp, Probe Sequence
agttcatactggagagaagcactac

SEQ ID NO: 118217 - DNA, 25 bp, Probe Sequence
gagagaagcactacagttgtcaaga

SEQ ID NO: 118218 - DNA, 25 bp, Probe Sequence
ttcatactggagagaagcactacag

SEQ ID NO: 118219 - DNA, 25 bp, Probe Sequence
tagttcatactggagagaagcacta

SEQ ID NO: 118220 - DNA, 25 bp, Probe Sequence
aaatgtgaagaatgtggtaaagcct

SEQ ID NO: 118221 - DNA, 25 bp, Probe Sequence
caaatgtgaagaatgtggtaaagcc

SEQ ID NO: 118222 - DNA, 25 bp, Probe Sequence
ggagagaagcactacagttgtcaag

SEQ ID NO: 118223 - DNA, 25 bp, Probe Sequence
aatgtgaagaatgtggtaaagcctt

SEQ ID NO: 118224 - DNA, 25 bp, Probe Sequence
atgatagttcatactggagagaagc

SEQ ID NO: 118225 - DNA, 25 bp, Probe Sequence
atgtgaagaatgtggtaaagccttt

SEQ ID NO: 118226 - DNA, 25 bp, Probe Sequence
acaaatgtgaagaatgtggtaaagc

SEQ ID NO: 118227 - DNA, 25 bp, Probe Sequence
ccctacaaatgtgaagaatgtggta

SEQ ID NO: 118228 - DNA, 25 bp, Probe Sequence
cctacaaatgtgaagaatgtggtaa

SEQ ID NO: 118229 - DNA, 25 bp, Probe Sequence
tggagagaagcactacagttgtcaa

SEQ ID NO: 118230 - DNA, 25 bp, Probe Sequence
acatgatagttcatactggagagaa

SEQ ID NO: 118231 - DNA, 25 bp, Probe Sequence
aacatgatagttcatactggagaga

SEQ ID NO: 118232 - DNA, 25 bp, Probe Sequence
catgatagttcatactggagagaag

SEQ ID NO: 118233 - DNA, 25 bp, Probe Sequence
gacaagtgaatggcaatcctaaata

SEQ ID NO: 118234 - DNA, 25 bp, Probe Sequence
agacaagtgaatggcaatcctaaat

SEQ ID NO: 118235 - DNA, 25 bp, Probe Sequence
aagacaagtgaatggcaatcctaaa

SEQ ID NO: 118236 - DNA, 25 bp, Probe Sequence
aaagacaagtgaatggcaatcctaa

SEQ ID NO: 118237 - DNA, 25 bp, Probe Sequence
gaaagacaagtgaatggcaatccta

SEQ ID NO: 118238 - DNA, 25 bp, Probe Sequence
acaagtgaatggcaatcctaaatat

SEQ ID NO: 118239 - DNA, 25 bp, Probe Sequence
caagtgaatggcaatcctaaatatg

SEQ ID NO: 118240 - DNA, 25 bp, Probe Sequence
gagaaagacaagtgaatggcaatcc

SEQ ID NO: 118241 - DNA, 25 bp, Probe Sequence
agaaagacaagtgaatggcaatcct

SEQ ID NO: 118242 - DNA, 25 bp, Probe Sequence
cgagaaagacaagtgaatggcaatc

SEQ ID NO: 118243 - DNA, 25 bp, Probe Sequence
caatcctaaatatgccaagaggtgc

SEQ ID NO: 118244 - DNA, 25 bp, Probe Sequence
gaagaggcgagaaagacaagtgaat

SEQ ID NO: 118245 - DNA, 25 bp, Probe Sequence
aagaggcgagaaagacaagtgaatg

SEQ ID NO: 118246 - DNA, 25 bp, Probe Sequence
aagtgaatggcaatcctaaatatgc

SEQ ID NO: 118247 - DNA, 25 bp, Probe Sequence
gcaatcctaaatatgccaagaggtg

SEQ ID NO: 118248 - DNA, 25 bp, Probe Sequence
gcccaggagtccaattatgaaaatt

SEQ ID NO: 118249 - DNA, 25 bp, Probe Sequence
tatgaaaatttgagccagatgaacc

SEQ ID NO: 118250 - DNA, 25 bp, Probe Sequence
gcgagaaagacaagtgaatggcaat

SEQ ID NO: 118251 - DNA, 25 bp, Probe Sequence
ctaaatatgccaagaggtgcaatgt

SEQ ID NO: 118252 - DNA, 25 bp, Probe Sequence
ttatgaaaatttgagccagatgaac

SEQ ID NO: 118253 - DNA, 25 bp, Probe Sequence
taaatatgccaagaggtgcaatgtg

SEQ ID NO: 118254 - DNA, 25 bp, Probe Sequence
cccaggagtccaattatgaaaattt

SEQ ID NO: 118255 - DNA, 25 bp, Probe Sequence
agtccaattatgaaaatttgagcca

SEQ ID NO: 118256 - DNA, 25 bp, Probe Sequence
tccaattatgaaaatttgagccaga

SEQ ID NO: 118257 - DNA, 25 bp, Probe Sequence
catcctggagaacaaactctgtcac

SEQ ID NO: 118258 - DNA, 25 bp, Probe Sequence
atcctggagaacaaactctgtcact

SEQ ID NO: 118259 - DNA, 25 bp, Probe Sequence
aacatcagcatcctggagaacaaac

SEQ ID NO: 118260 - DNA, 25 bp, Probe Sequence
caacatcagcatcctggagaacaaa

SEQ ID NO: 118261 - DNA, 25 bp, Probe Sequence
catcagcatcctggagaacaaactc

SEQ ID NO: 118262 - DNA, 25 bp, Probe Sequence
cgccaatgaccacaatgatgacatc

SEQ ID NO: 118263 - DNA, 25 bp, Probe Sequence
gaacaaactctgtcactgggcatac

SEQ ID NO: 118264 - DNA, 25 bp, Probe Sequence
agaacaaactctgtcactgggcata

SEQ ID NO: 118265 - DNA, 25 bp, Probe Sequence
atcagcatcctggagaacaaactct

SEQ ID NO: 118266 - DNA, 25 bp, Probe Sequence
tcctggagaacaaactctgtcactg

SEQ ID NO: 118267 - DNA, 25 bp, Probe Sequence
acatcagcatcctggagaacaaact

SEQ ID NO: 118268 - DNA, 25 bp, Probe Sequence
cgtatgccactaccttgactggatc

SEQ ID NO: 118269 - DNA, 25 bp, Probe Sequence
ccaacatcagcatcctggagaacaa

SEQ ID NO: 118270 - DNA, 25 bp, Probe Sequence
agcatcctggagaacaaactctgtc

SEQ ID NO: 118271 - DNA, 25 bp, Probe Sequence
tcagcatcctggagaacaaactctg

SEQ ID NO: 118272 - DNA, 25 bp, Probe Sequence
gccaatgaccacaatgatgacatca

SEQ ID NO: 118273 - DNA, 25 bp, Probe Sequence
gatccaagaaatcatggagaactga

SEQ ID NO: 118274 - DNA, 25 bp, Probe Sequence
gcatcctggagaacaaactctgtca

SEQ ID NO: 118275 - DNA, 25 bp, Probe Sequence
caatgaccacaatgatgacatcatg

SEQ ID NO: 118276 - DNA, 25 bp, Probe Sequence
cagcatcctggagaacaaactctgt

SEQ ID NO: 118277 - DNA, 25 bp, Probe Sequence
aacaaactctgtcactgggcatacc

SEQ ID NO: 118278 - DNA, 25 bp, Probe Sequence
gagaacaaactctgtcactgggcat

SEQ ID NO: 118279 - DNA, 25 bp, Probe Sequence
ctggagaacaaactctgtcactggg

SEQ ID NO: 118280 - DNA, 25 bp, Probe Sequence
cctggagaacaaactctgtcactgg

SEQ ID NO: 118281 - DNA, 25 bp, Probe Sequence
gagaccatcgatttctcagaaacgc

SEQ ID NO: 118282 - DNA, 25 bp, Probe Sequence
caccacctgagaccatcgatttctc

SEQ ID NO: 118283 - DNA, 25 bp, Probe Sequence
ggcttaggctcagattattcttact

SEQ ID NO: 118284 - DNA, 25 bp, Probe Sequence
aggcttaggctcagattattcttac

SEQ ID NO: 118285 - DNA, 25 bp, Probe Sequence
caggcttaggctcagattattctta

SEQ ID NO: 118286 - DNA, 25 bp, Probe Sequence
tgaatatactgtgtggtggagagag

SEQ ID NO: 118287 - DNA, 25 bp, Probe Sequence
ctgaatatactgtgtggtggagaga

SEQ ID NO: 118288 - DNA, 25 bp, Probe Sequence
gcttaggctcagattattcttactc

SEQ ID NO: 118289 - DNA, 25 bp, Probe Sequence
tcaggcttaggctcagattattctt

SEQ ID NO: 118290 - DNA, 25 bp, Probe Sequence
gcttgatatgtatgctgttggagac

SEQ ID NO: 118291 - DNA, 25 bp, Probe Sequence
gctcagattattcttactccttacc

SEQ ID NO: 118292 - DNA, 25 bp, Probe Sequence
ggctcagattattcttactccttac

SEQ ID NO: 118293 - DNA, 25 bp, Probe Sequence
ctcaggcttaggctcagattattct

SEQ ID NO: 118294 - DNA, 25 bp, Probe Sequence
cttgatatgtatgctgttggagaca

SEQ ID NO: 118295 - DNA, 25 bp, Probe Sequence
gaatatactgtgtggtggagagagt

SEQ ID NO: 118296 - DNA, 25 bp, Probe Sequence
cttaggctcagattattcttactcc

SEQ ID NO: 118297 - DNA, 25 bp, Probe Sequence
cttcaagtaatgttcaacagacctg

SEQ ID NO: 118298 - DNA, 25 bp, Probe Sequence
actccttaccttcaagtaatgttca

SEQ ID NO: 118299 - DNA, 25 bp, Probe Sequence
ccttcaagtaatgttcaacagacct

SEQ ID NO: 118300 - DNA, 25 bp, Probe Sequence
cagtgtcatgtcatagaccatactt

SEQ ID NO: 118301 - DNA, 25 bp, Probe Sequence
taccttcaagtaatgttcaacagac

SEQ ID NO: 118302 - DNA, 25 bp, Probe Sequence
tccttaccttcaagtaatgttcaac

SEQ ID NO: 118303 - DNA, 25 bp, Probe Sequence
aatatactgtgtggtggagagagta

SEQ ID NO: 118304 - DNA, 25 bp, Probe Sequence
accttcaagtaatgttcaacagacc

SEQ ID NO: 118305 - DNA, 25 bp, Probe Sequence
aggctcagattattcttactcctta

SEQ ID NO: 118306 - DNA, 25 bp, Probe Sequence
taggctcagattattcttactcctt

SEQ ID NO: 118307 - DNA, 25 bp, Probe Sequence
agtatatgaatgatctggacagcac

SEQ ID NO: 118308 - DNA, 25 bp, Probe Sequence
tatatgaatgatctggacagcacct

SEQ ID NO: 118309 - DNA, 25 bp, Probe Sequence
gtatatgaatgatctggacagcacc

SEQ ID NO: 118310 - DNA, 25 bp, Probe Sequence
atatgaatgatctggacagcacctt

SEQ ID NO: 118311 - DNA, 25 bp, Probe Sequence
tatgacacttgactcagatcaggtt

SEQ ID NO: 118312 - DNA, 25 bp, Probe Sequence
cagtatatgaatgatctggacagca

SEQ ID NO: 118313 - DNA, 25 bp, Probe Sequence
acagtatatgaatgatctggacagc

SEQ ID NO: 118314 - DNA, 25 bp, Probe Sequence
cctcacagtatatgaatgatctgga

SEQ ID NO: 118315 - DNA, 25 bp, Probe Sequence
agtatgacacttgactcagatcagg

SEQ ID NO: 118316 - DNA, 25 bp, Probe Sequence
tcacagtatatgaatgatctggaca

SEQ ID NO: 118317 - DNA, 25 bp, Probe Sequence
cacagtatatgaatgatctggacag

SEQ ID NO: 118318 - DNA, 25 bp, Probe Sequence
gtatgacacttgactcagatcaggt

SEQ ID NO: 118319 - DNA, 25 bp, Probe Sequence
ctcacagtatatgaatgatctggac

SEQ ID NO: 118320 - DNA, 25 bp, Probe Sequence
gatgacgacaagaactttagcaaat

SEQ ID NO: 118321 - DNA, 25 bp, Probe Sequence
atgacgacaagaactttagcaaatg

SEQ ID NO: 118322 - DNA, 25 bp, Probe Sequence
aagttatcagatggacagagcttct

SEQ ID NO: 118323 - DNA, 25 bp, Probe Sequence
gagagataaaggacttcaccatcac

SEQ ID NO: 118324 - DNA, 25 bp, Probe Sequence
ctttagcaaatgtgtcataagtcct

SEQ ID NO: 118325 - DNA, 25 bp, Probe Sequence
tatgaatgatctggacagcaccttg

SEQ ID NO: 118326 - DNA, 25 bp, Probe Sequence
atggagactataacaaatgtgaagc

SEQ ID NO: 118327 - DNA, 25 bp, Probe Sequence
ccttccctcacagtatatgaatgat

SEQ ID NO: 118328 - DNA, 25 bp, Probe Sequence
caatgcgagagataaaggacttcac

SEQ ID NO: 118329 - DNA, 25 bp, Probe Sequence
agagataaaggacttcaccatcacc

SEQ ID NO: 118330 - DNA, 25 bp, Probe Sequence
ggatgacgacaagaactttagcaaa

SEQ ID NO: 118331 - DNA, 25 bp, Probe Sequence
aactttcatgaggtcctggcagatc

SEQ ID NO: 118332 - DNA, 25 bp, Probe Sequence
gaactttcatgaggtcctggcagat

SEQ ID NO: 118333 - DNA, 25 bp, Probe Sequence
atgaactttcatgaggtcctggcag

SEQ ID NO: 118334 - DNA, 25 bp, Probe Sequence
tcctgataaagagcatagtgaagac

SEQ ID NO: 118335 - DNA, 25 bp, Probe Sequence
gtcctgataaagagcatagtgaaga

SEQ ID NO: 118336 - DNA, 25 bp, Probe Sequence
agtcctgataaagagcatagtgaag

SEQ ID NO: 118337 - DNA, 25 bp, Probe Sequence
cttaacagcatgaggaggaagagaa

SEQ ID NO: 118338 - DNA, 25 bp, Probe Sequence
gagatgccagttacaaccttaacag

SEQ ID NO: 118339 - DNA, 25 bp, Probe Sequence
cagtcctgataaagagcatagtgaa

SEQ ID NO: 118340 - DNA, 25 bp, Probe Sequence
aatccagtcctgataaagagcatag

SEQ ID NO: 118341 - DNA, 25 bp, Probe Sequence
ttgtgaaatccagtcctgataaaga

SEQ ID NO: 118342 - DNA, 25 bp, Probe Sequence
tgtgaaatccagtcctgataaagag

SEQ ID NO: 118343 - DNA, 25 bp, Probe Sequence
aaatccagtcctgataaagagcata

SEQ ID NO: 118344 - DNA, 25 bp, Probe Sequence
gaaatccagtcctgataaagagcat

SEQ ID NO: 118345 - DNA, 25 bp, Probe Sequence
atccagtcctgataaagagcatagt

SEQ ID NO: 118346 - DNA, 25 bp, Probe Sequence
gaacttgtctgctttagaaatgctg

SEQ ID NO: 118347 - DNA, 25 bp, Probe Sequence
attgtgaaatccagtcctgataaag

SEQ ID NO: 118348 - DNA, 25 bp, Probe Sequence
tgataaagagcatagtgaagactgg

SEQ ID NO: 118349 - DNA, 25 bp, Probe Sequence
cctgataaagagcatagtgaagact

SEQ ID NO: 118350 - DNA, 25 bp, Probe Sequence
atggagatgccagttacaaccttaa

SEQ ID NO: 118351 - DNA, 25 bp, Probe Sequence
gttacaaccttaacagcatgaggag

SEQ ID NO: 118352 - DNA, 25 bp, Probe Sequence
atttctagtgaagggcaaagatttc

SEQ ID NO: 118353 - DNA, 25 bp, Probe Sequence
gatttctagtgaagggcaaagattt

SEQ ID NO: 118354 - DNA, 25 bp, Probe Sequence
gtgaaatccagtcctgataaagagc

SEQ ID NO: 118355 - DNA, 25 bp, Probe Sequence
ctgataaagagcatagtgaagactg

SEQ ID NO: 118356 - DNA, 25 bp, Probe Sequence
atagtgaagactggcagagacctag

SEQ ID NO: 118357 - DNA, 25 bp, Probe Sequence
ccagtcctgataaagagcatagtga

SEQ ID NO: 118358 - DNA, 25 bp, Probe Sequence
gtcaactatctgaagacttggacat

SEQ ID NO: 118359 - DNA, 25 bp, Probe Sequence
tcaactatctgaagacttggacatg

SEQ ID NO: 118360 - DNA, 25 bp, Probe Sequence
ttatgcaatcctgtgtcaagaatct

SEQ ID NO: 118361 - DNA, 25 bp, Probe Sequence
ggtcaactatctgaagacttggaca

SEQ ID NO: 118362 - DNA, 25 bp, Probe Sequence
taagtaaagtaacagtggatgagcg

SEQ ID NO: 118363 - DNA, 25 bp, Probe Sequence
cttatgcaatcctgtgtcaagaatc

SEQ ID NO: 118364 - DNA, 25 bp, Probe Sequence
tatgcaatcctgtgtcaagaatctc

SEQ ID NO: 118365 - DNA, 25 bp, Probe Sequence
ttaagtaaagtaacagtggatgagc

SEQ ID NO: 118366 - DNA, 25 bp, Probe Sequence
tcgacgtatattctaggtatgagtt

SEQ ID NO: 118367 - DNA, 25 bp, Probe Sequence
ccttatgcaatcctgtgtcaagaat

SEQ ID NO: 118368 - DNA, 25 bp, Probe Sequence
caatcctgtgtcaagaatctcgtga

SEQ ID NO: 118369 - DNA, 25 bp, Probe Sequence
gtaacagtggatgagcgaacaagaa

SEQ ID NO: 118370 - DNA, 25 bp, Probe Sequence
aagtaacagtggatgagcgaacaag

SEQ ID NO: 118371 - DNA, 25 bp, Probe Sequence
atcgacgtatattctaggtatgagt

SEQ ID NO: 118372 - DNA, 25 bp, Probe Sequence
cgtatattctaggtatgagtttgcc

SEQ ID NO: 118373 - DNA, 25 bp, Probe Sequence
ctcggtcaactatctgaagacttgg

SEQ ID NO: 118374 - DNA, 25 bp, Probe Sequence
cctcggtcaactatctgaagacttg

SEQ ID NO: 118375 - DNA, 25 bp, Probe Sequence
gtaaagtaacagtggatgagcgaac

SEQ ID NO: 118376 - DNA, 25 bp, Probe Sequence
agtaaagtaacagtggatgagcgaa

SEQ ID NO: 118377 - DNA, 25 bp, Probe Sequence
aagtaaagtaacagtggatgagcga

SEQ ID NO: 118378 - DNA, 25 bp, Probe Sequence
taaagtaacagtggatgagcgaaca

SEQ ID NO: 118379 - DNA, 25 bp, Probe Sequence
cggtcaactatctgaagacttggac

SEQ ID NO: 118380 - DNA, 25 bp, Probe Sequence
tcggtcaactatctgaagacttgga

SEQ ID NO: 118381 - DNA, 25 bp, Probe Sequence
acagtttaagtaaagtaacagtgga

SEQ ID NO: 118382 - DNA, 25 bp, Probe Sequence
ttgaccagattctactacaacactt

SEQ ID NO: 118383 - DNA, 25 bp, Probe Sequence
atactgcaactatcctctgaagaag

SEQ ID NO: 118384 - DNA, 25 bp, Probe Sequence
gaatactgcaactatcctctgaaga

SEQ ID NO: 118385 - DNA, 25 bp, Probe Sequence
aatactgcaactatcctctgaagaa

SEQ ID NO: 118386 - DNA, 25 bp, Probe Sequence
gctaacccttcagatatttcagtca

SEQ ID NO: 118387 - DNA, 25 bp, Probe Sequence
tgaccagattctactacaacacttt

SEQ ID NO: 118388 - DNA, 25 bp, Probe Sequence
aagtggacatcttggagaatactgc

SEQ ID NO: 118389 - DNA, 25 bp, Probe Sequence
agaatactgcaactatcctctgaag

SEQ ID NO: 118390 - DNA, 25 bp, Probe Sequence
aacatatttcctccacaactcagaa

SEQ ID NO: 118391 - DNA, 25 bp, Probe Sequence
aacccttcagatatttcagtcaagt

SEQ ID NO: 118392 - DNA, 25 bp, Probe Sequence
acccttcagatatttcagtcaagtc

SEQ ID NO: 118393 - DNA, 25 bp, Probe Sequence
gaacatatttcctccacaactcaga

SEQ ID NO: 118394 - DNA, 25 bp, Probe Sequence
acatcttggagaatactgcaactat

SEQ ID NO: 118395 - DNA, 25 bp, Probe Sequence
gacatcttggagaatactgcaacta

SEQ ID NO: 118396 - DNA, 25 bp, Probe Sequence
tgaaagtggacatcttggagaatac

SEQ ID NO: 118397 - DNA, 25 bp, Probe Sequence
gtgaaagtggacatcttggagaata

SEQ ID NO: 118398 - DNA, 25 bp, Probe Sequence
catcttggagaatactgcaactatc

SEQ ID NO: 118399 - DNA, 25 bp, Probe Sequence
cccttcagatatttcagtcaagtcc

SEQ ID NO: 118400 - DNA, 25 bp, Probe Sequence
accagattctactacaacactttga

SEQ ID NO: 118401 - DNA, 25 bp, Probe Sequence
tttgaccagattctactacaacact

SEQ ID NO: 118402 - DNA, 25 bp, Probe Sequence
ccagattctactacaacactttgac

SEQ ID NO: 118403 - DNA, 25 bp, Probe Sequence
gaccagattctactacaacactttg

SEQ ID NO: 118404 - DNA, 25 bp, Probe Sequence
gagaatactgcaactatcctctgaa

SEQ ID NO: 118405 - DNA, 25 bp, Probe Sequence
gaaagtggacatcttggagaatact

SEQ ID NO: 118406 - DNA, 25 bp, Probe Sequence
ttaagagatcagaatggagagaagc

SEQ ID NO: 118407 - DNA, 25 bp, Probe Sequence
cagttacagtggaagtgacagtagt

SEQ ID NO: 118408 - DNA, 25 bp, Probe Sequence
ctcatagagagagtgaaggactgtg

SEQ ID NO: 118409 - DNA, 25 bp, Probe Sequence
taagagatcagaatggagagaagct

SEQ ID NO: 118410 - DNA, 25 bp, Probe Sequence
ctggtggagaaggacattactctag

SEQ ID NO: 118411 - DNA, 25 bp, Probe Sequence
tctggtggagaaggacattactcta

SEQ ID NO: 118412 - DNA, 25 bp, Probe Sequence
aattgacagaagacagcttagaagt

SEQ ID NO: 118413 - DNA, 25 bp, Probe Sequence
ctagaggacttcatcaccatcaagg

SEQ ID NO: 118414 - DNA, 25 bp, Probe Sequence
agttacagtggaagtgacagtagtc

SEQ ID NO: 118415 - DNA, 25 bp, Probe Sequence
aggtagagaaattgacagaagacag

SEQ ID NO: 118416 - DNA, 25 bp, Probe Sequence
gaggtagagaaattgacagaagaca

SEQ ID NO: 118417 - DNA, 25 bp, Probe Sequence
agaggtagagaaattgacagaagac

SEQ ID NO: 118418 - DNA, 25 bp, Probe Sequence
ggagaggtagagaaattgacagaag

SEQ ID NO: 118419 - DNA, 25 bp, Probe Sequence
gagaggtagagaaattgacagaaga

SEQ ID NO: 118420 - DNA, 25 bp, Probe Sequence
gcagttacagtggaagtgacagtag

SEQ ID NO: 118421 - DNA, 25 bp, Probe Sequence
attgacagaagacagcttagaagtc

SEQ ID NO: 118422 - DNA, 25 bp, Probe Sequence
ggtagagaaattgacagaagacagc

SEQ ID NO: 118423 - DNA, 25 bp, Probe Sequence
gggagaggtagagaaattgacagaa

SEQ ID NO: 118424 - DNA, 25 bp, Probe Sequence
cctcatagagagagtgaaggactgt

SEQ ID NO: 118425 - DNA, 25 bp, Probe Sequence
gagtgggagaggtagagaaattgac

SEQ ID NO: 118426 - DNA, 25 bp, Probe Sequence
tcatagagagagtgaaggactgtgc

SEQ ID NO: 118427 - DNA, 25 bp, Probe Sequence
tagaggacttcatcaccatcaaggt

SEQ ID NO: 118428 - DNA, 25 bp, Probe Sequence
gtgggagaggtagagaaattgacag

SEQ ID NO: 118429 - DNA, 25 bp, Probe Sequence
gtgagtgggagaggtagagaaattg

SEQ ID NO: 118430 - DNA, 25 bp, Probe Sequence
caagaaggagagagaagaggatgaa

SEQ ID NO: 118431 - DNA, 25 bp, Probe Sequence
aatgaagaactggaagaaggacttg

SEQ ID NO: 118432 - DNA, 25 bp, Probe Sequence
agaagcggctgaatataagtatgaa

SEQ ID NO: 118433 - DNA, 25 bp, Probe Sequence
aagaagcggctgaatataagtatga

SEQ ID NO: 118434 - DNA, 25 bp, Probe Sequence
atgaagaactggaagaaggacttga

SEQ ID NO: 118435 - DNA, 25 bp, Probe Sequence
tgaagaactggaagaaggacttgaa

SEQ ID NO: 118436 - DNA, 25 bp, Probe Sequence
taccagtaggaacattctcagctat

SEQ ID NO: 118437 - DNA, 25 bp, Probe Sequence
acttaccagtaggaacattctcagc

SEQ ID NO: 118438 - DNA, 25 bp, Probe Sequence
ttaccagtaggaacattctcagcta

SEQ ID NO: 118439 - DNA, 25 bp, Probe Sequence
cagtaggaacattctcagctattct

SEQ ID NO: 118440 - DNA, 25 bp, Probe Sequence
ccagtaggaacattctcagctattc

SEQ ID NO: 118441 - DNA, 25 bp, Probe Sequence
agtaggaacattctcagctattctt

SEQ ID NO: 118442 - DNA, 25 bp, Probe Sequence
accagtaggaacattctcagctatt

SEQ ID NO: 118443 - DNA, 25 bp, Probe Sequence
tacttaccagtaggaacattctcag

SEQ ID NO: 118444 - DNA, 25 bp, Probe Sequence
tccaggtattcatgtatagtcttga

SEQ ID NO: 118445 - DNA, 25 bp, Probe Sequence
ccaggtattcatgtatagtcttgag

SEQ ID NO: 118446 - DNA, 25 bp, Probe Sequence
gctactgaggataaactggaatacc

SEQ ID NO: 118447 - DNA, 25 bp, Probe Sequence
ggctactgaggataaactggaatac

SEQ ID NO: 118448 - DNA, 25 bp, Probe Sequence
aagaaggagagagaagaggatgaaa

SEQ ID NO: 118449 - DNA, 25 bp, Probe Sequence
gtacttaccagtaggaacattctca

SEQ ID NO: 118450 - DNA, 25 bp, Probe Sequence
tgtacttaccagtaggaacattctc

SEQ ID NO: 118451 - DNA, 25 bp, Probe Sequence
atatgcacaagtagaagctcaagtc

SEQ ID NO: 118452 - DNA, 25 bp, Probe Sequence
atccaggtattcatgtatagtcttg

SEQ ID NO: 118453 - DNA, 25 bp, Probe Sequence
aaatgaagaactggaagaaggactt

SEQ ID NO: 118454 - DNA, 25 bp, Probe Sequence
agaagaatgtaggaatgagtgttgg

SEQ ID NO: 118455 - DNA, 25 bp, Probe Sequence
tagaagaatgtaggaatgagtgttg

SEQ ID NO: 118456 - DNA, 25 bp, Probe Sequence
tagattgactgagcatgttaccaag

SEQ ID NO: 118457 - DNA, 25 bp, Probe Sequence
gtagattgactgagcatgttaccaa

SEQ ID NO: 118458 - DNA, 25 bp, Probe Sequence
ttagaagaatgtaggaatgagtgtt

SEQ ID NO: 118459 - DNA, 25 bp, Probe Sequence
attagaagaatgtaggaatgagtgt

SEQ ID NO: 118460 - DNA, 25 bp, Probe Sequence
agtagattgactgagcatgttacca

SEQ ID NO: 118461 - DNA, 25 bp, Probe Sequence
gaagaatgtaggaatgagtgttggg

SEQ ID NO: 118462 - DNA, 25 bp, Probe Sequence
gattcagatcaggtcggctatcaag

SEQ ID NO: 118463 - DNA, 25 bp, Probe Sequence
agattgactgagcatgttaccaagg

SEQ ID NO: 118464 - DNA, 25 bp, Probe Sequence
ctacgtgtgacacttgattcagatc

SEQ ID NO: 118465 - DNA, 25 bp, Probe Sequence
tggagactataacaaatgtgaagat

SEQ ID NO: 118466 - DNA, 25 bp, Probe Sequence
atggagactataacaaatgtgaaga

SEQ ID NO: 118467 - DNA, 25 bp, Probe Sequence
tctatggatcagaatgtaaagcaaa

SEQ ID NO: 118468 - DNA, 25 bp, Probe Sequence
atgtgaagatattctatggatcaga

SEQ ID NO: 118469 - DNA, 25 bp, Probe Sequence
actacgtgtgacacttgattcagat

SEQ ID NO: 118470 - DNA, 25 bp, Probe Sequence
tatggatcagaatgtaaagcaaatg

SEQ ID NO: 118471 - DNA, 25 bp, Probe Sequence
cattagaagaatgtaggaatgagtg

SEQ ID NO: 118472 - DNA, 25 bp, Probe Sequence
tcatgcaggaaagtacattagaaga

SEQ ID NO: 118473 - DNA, 25 bp, Probe Sequence
ctcatgcaggaaagtacattagaag

SEQ ID NO: 118474 - DNA, 25 bp, Probe Sequence
aagaatgtaggaatgagtgttgggc

SEQ ID NO: 118475 - DNA, 25 bp, Probe Sequence
catgcaggaaagtacattagaagaa

SEQ ID NO: 118476 - DNA, 25 bp, Probe Sequence
ctatggatcagaatgtaaagcaaat

SEQ ID NO: 118477 - DNA, 25 bp, Probe Sequence
gctcatgcaggaaagtacattagaa

SEQ ID NO: 118478 - DNA, 25 bp, Probe Sequence
acagaaagagagaaagaatggagtc

SEQ ID NO: 118479 - DNA, 25 bp, Probe Sequence
cacagaaagagagaaagaatggagt

SEQ ID NO: 118480 - DNA, 25 bp, Probe Sequence
cagaaagagagaaagaatggagtcc

SEQ ID NO: 118481 - DNA, 25 bp, Probe Sequence
aagcccacagaaagagagaaagaat

SEQ ID NO: 118482 - DNA, 25 bp, Probe Sequence
aaagagagaaagaatggagtccgag

SEQ ID NO: 118483 - DNA, 25 bp, Probe Sequence
gaaagagagaaagaatggagtccga

SEQ ID NO: 118484 - DNA, 25 bp, Probe Sequence
agaaagagagaaagaatggagtccg

SEQ ID NO: 118485 - DNA, 25 bp, Probe Sequence
aaagcccacagaaagagagaaagaa

SEQ ID NO: 118486 - DNA, 25 bp, Probe Sequence
agcccacagaaagagagaaagaatg

SEQ ID NO: 118487 - DNA, 25 bp, Probe Sequence
ccacagaaagagagaaagaatggag

SEQ ID NO: 118488 - DNA, 25 bp, Probe Sequence
caaagcccacagaaagagagaaaga

SEQ ID NO: 118489 - DNA, 25 bp, Probe Sequence
cttcatgatctactgcgacaacatc

SEQ ID NO: 118490 - DNA, 25 bp, Probe Sequence
cccacagaaagagagaaagaatgga

SEQ ID NO: 118491 - DNA, 25 bp, Probe Sequence
aagagagaaagaatggagtccgagg

SEQ ID NO: 118492 - DNA, 25 bp, Probe Sequence
acttcatgatctactgcgacaacat

SEQ ID NO: 118493 - DNA, 25 bp, Probe Sequence
ccaaagcccacagaaagagagaaag

SEQ ID NO: 118494 - DNA, 25 bp, Probe Sequence
ctacgacgacttcatgatctactgc

SEQ ID NO: 118495 - DNA, 25 bp, Probe Sequence
gctacgacgacttcatgatctactg

SEQ ID NO: 118496 - DNA, 25 bp, Probe Sequence
gacttcatgatctactgcgacaaca

SEQ ID NO: 118497 - DNA, 25 bp, Probe Sequence
tccaaagcccacagaaagagagaaa

SEQ ID NO: 118498 - DNA, 25 bp, Probe Sequence
gagaaagaatggagtccgaggagag

SEQ ID NO: 118499 - DNA, 25 bp, Probe Sequence
gagagaaagaatggagtccgaggag

SEQ ID NO: 118500 - DNA, 25 bp, Probe Sequence
caagaagccgatcatcctggtctac

SEQ ID NO: 118501 - DNA, 25 bp, Probe Sequence
tcaagaagccgatcatcctggtcta

SEQ ID NO: 118502 - DNA, 25 bp, Probe Sequence
cattcttgctagaccttctactctc

SEQ ID NO: 118503 - DNA, 25 bp, Probe Sequence
attcttgctagaccttctactctcc

SEQ ID NO: 118504 - DNA, 25 bp, Probe Sequence
ttcttgctagaccttctactctcct

SEQ ID NO: 118505 - DNA, 25 bp, Probe Sequence
ctagaccttctactctcctggaact

SEQ ID NO: 118506 - DNA, 25 bp, Probe Sequence
tagaccttctactctcctggaactg

SEQ ID NO: 118507 - DNA, 25 bp, Probe Sequence
tagtattagagggacagcacttctc

SEQ ID NO: 118508 - DNA, 25 bp, Probe Sequence
ctagtattagagggacagcacttct

SEQ ID NO: 118509 - DNA, 25 bp, Probe Sequence
tcttgctagaccttctactctcctg

SEQ ID NO: 118510 - DNA, 25 bp, Probe Sequence
tctagtattagagggacagcacttc

SEQ ID NO: 118511 - DNA, 25 bp, Probe Sequence
gcattcttgctagaccttctactct

SEQ ID NO: 118512 - DNA, 25 bp, Probe Sequence
gaagtaaacttgggtcacctgatct

SEQ ID NO: 118513 - DNA, 25 bp, Probe Sequence
ctccagtgacaatcgtgtgattagg

SEQ ID NO: 118514 - DNA, 25 bp, Probe Sequence
aagtaaacttgggtcacctgatctg

SEQ ID NO: 118515 - DNA, 25 bp, Probe Sequence
gctagaccttctactctcctggaac

SEQ ID NO: 118516 - DNA, 25 bp, Probe Sequence
cttgctagaccttctactctcctgg

SEQ ID NO: 118517 - DNA, 25 bp, Probe Sequence
gtcacctgatctgctgttagtctca

SEQ ID NO: 118518 - DNA, 25 bp, Probe Sequence
tgctagaccttctactctcctggaa

SEQ ID NO: 118519 - DNA, 25 bp, Probe Sequence
ttgctagaccttctactctcctgga

SEQ ID NO: 118520 - DNA, 25 bp, Probe Sequence
cagacatcctgacattgtgacaagg

SEQ ID NO: 118521 - DNA, 25 bp, Probe Sequence
cattcagggtttgcttgacgatttc

SEQ ID NO: 118522 - DNA, 25 bp, Probe Sequence
ggcattcttgctagaccttctactc

SEQ ID NO: 118523 - DNA, 25 bp, Probe Sequence
ggaagtaaacttgggtcacctgatc

SEQ ID NO: 118524 - DNA, 25 bp, Probe Sequence
acggaaatatattgggatggaagaa

SEQ ID NO: 118525 - DNA, 25 bp, Probe Sequence
gacggaaatatattgggatggaaga

SEQ ID NO: 118526 - DNA, 25 bp, Probe Sequence
gctccattatatcctcatccaacag

SEQ ID NO: 118527 - DNA, 25 bp, Probe Sequence
atgctccattatatcctcatccaac

SEQ ID NO: 118528 - DNA, 25 bp, Probe Sequence
ctctccaacagaatatgctccatta

SEQ ID NO: 118529 - DNA, 25 bp, Probe Sequence
ataagtcctctccaacagaatatgc

SEQ ID NO: 118530 - DNA, 25 bp, Probe Sequence
gcataagtcctctccaacagaatat

SEQ ID NO: 118531 - DNA, 25 bp, Probe Sequence
tctccaacagaatatgctccattat

SEQ ID NO: 118532 - DNA, 25 bp, Probe Sequence
tgctccattatatcctcatccaaca

SEQ ID NO: 118533 - DNA, 25 bp, Probe Sequence
tatgctccattatatcctcatccaa

SEQ ID NO: 118534 - DNA, 25 bp, Probe Sequence
taagtcctctccaacagaatatgct

SEQ ID NO: 118535 - DNA, 25 bp, Probe Sequence
agcataagtcctctccaacagaata

SEQ ID NO: 118536 - DNA, 25 bp, Probe Sequence
atatgctccattatatcctcatcca

SEQ ID NO: 118537 - DNA, 25 bp, Probe Sequence
ttagatgagcataagtcctctccaa

SEQ ID NO: 118538 - DNA, 25 bp, Probe Sequence
ctccaacagaatatgctccattata

SEQ ID NO: 118539 - DNA, 25 bp, Probe Sequence
tagatgagcataagtcctctccaac

SEQ ID NO: 118540 - DNA, 25 bp, Probe Sequence
ctccattatatcctcatccaacagg

SEQ ID NO: 118541 - DNA, 25 bp, Probe Sequence
cattatatcctcatccaacaggctt

SEQ ID NO: 118542 - DNA, 25 bp, Probe Sequence
cttagatgagcataagtcctctcca

SEQ ID NO: 118543 - DNA, 25 bp, Probe Sequence
aatatgctccattatatcctcatcc

SEQ ID NO: 118544 - DNA, 25 bp, Probe Sequence
cagaatatgctccattatatcctca

SEQ ID NO: 118545 - DNA, 25 bp, Probe Sequence
acagaatatgctccattatatcctc

SEQ ID NO: 118546 - DNA, 25 bp, Probe Sequence
aagtcctctccaacagaatatgctc

SEQ ID NO: 118547 - DNA, 25 bp, Probe Sequence
cataagtcctctccaacagaatatg

SEQ ID NO: 118548 - DNA, 25 bp, Probe Sequence
cctctccaacagaatatgctccatt

SEQ ID NO: 118549 - DNA, 25 bp, Probe Sequence
tccaacagaatatgctccattatat

SEQ ID NO: 118550 - DNA, 25 bp, Probe Sequence
atctaataggattgctgaggtggat

SEQ ID NO: 118551 - DNA, 25 bp, Probe Sequence
acaacaggagacttaacttcttcaa

SEQ ID NO: 118552 - DNA, 25 bp, Probe Sequence
aacaggagacttaacttcttcaact

SEQ ID NO: 118553 - DNA, 25 bp, Probe Sequence
caacaggagacttaacttcttcaac

SEQ ID NO: 118554 - DNA, 25 bp, Probe Sequence
ggagacttaacttcttcaactggtt

SEQ ID NO: 118555 - DNA, 25 bp, Probe Sequence
cacaacaggagacttaacttcttca

SEQ ID NO: 118556 - DNA, 25 bp, Probe Sequence
ccacaacaggagacttaacttcttc

SEQ ID NO: 118557 - DNA, 25 bp, Probe Sequence
aggagacttaacttcttcaactggt

SEQ ID NO: 118558 - DNA, 25 bp, Probe Sequence
accacaacaggagacttaacttctt

SEQ ID NO: 118559 - DNA, 25 bp, Probe Sequence
acaggagacttaacttcttcaactg

SEQ ID NO: 118560 - DNA, 25 bp, Probe Sequence
tctaataggattgctgaggtggatc

SEQ ID NO: 118561 - DNA, 25 bp, Probe Sequence
gatctaataggattgctgaggtgga

SEQ ID NO: 118562 - DNA, 25 bp, Probe Sequence
aggatctaataggattgctgaggtg

SEQ ID NO: 118563 - DNA, 25 bp, Probe Sequence
caggagacttaacttcttcaactgg

SEQ ID NO: 118564 - DNA, 25 bp, Probe Sequence
caccacaacaggagacttaacttct

SEQ ID NO: 118565 - DNA, 25 bp, Probe Sequence
acaccacaacaggagacttaacttc

SEQ ID NO: 118566 - DNA, 25 bp, Probe Sequence
gacaccacaacaggagacttaactt

SEQ ID NO: 118567 - DNA, 25 bp, Probe Sequence
ggatctaataggattgctgaggtgg

SEQ ID NO: 118568 - DNA, 25 bp, Probe Sequence
caggatctaataggattgctgaggt

SEQ ID NO: 118569 - DNA, 25 bp, Probe Sequence
aaagtagaacaagccaagaaaccat

SEQ ID NO: 118570 - DNA, 25 bp, Probe Sequence
aagtagaacaagccaagaaaccatc

SEQ ID NO: 118571 - DNA, 25 bp, Probe Sequence
gagacttaacttcttcaactggttt

SEQ ID NO: 118572 - DNA, 25 bp, Probe Sequence
aagatgaagacatgctgagctacat

SEQ ID NO: 118573 - DNA, 25 bp, Probe Sequence
agacaccacaacaggagacttaact

SEQ ID NO: 118574 - DNA, 25 bp, Probe Sequence
cctgtggcttgaggcatttacaaag

SEQ ID NO: 118575 - DNA, 25 bp, Probe Sequence
ctgtggcttgaggcatttacaaagc

SEQ ID NO: 118576 - DNA, 25 bp, Probe Sequence
acctggacgacttgataatgactaa

SEQ ID NO: 118577 - DNA, 25 bp, Probe Sequence
aacctggacgacttgataatgacta

SEQ ID NO: 118578 - DNA, 25 bp, Probe Sequence
aattctggtggtgagatagcaattc

SEQ ID NO: 118579 - DNA, 25 bp, Probe Sequence
gagatagcaattcagcgaacaatgt

SEQ ID NO: 118580 - DNA, 25 bp, Probe Sequence
tgagatagcaattcagcgaacaatg

SEQ ID NO: 118581 - DNA, 25 bp, Probe Sequence
gtgagatagcaattcagcgaacaat

SEQ ID NO: 118582 - DNA, 25 bp, Probe Sequence
attctggtggtgagatagcaattca

SEQ ID NO: 118583 - DNA, 25 bp, Probe Sequence
agatagcaattcagcgaacaatgtt

SEQ ID NO: 118584 - DNA, 25 bp, Probe Sequence
gatagcaattcagcgaacaatgttg

SEQ ID NO: 118585 - DNA, 25 bp, Probe Sequence
taccaactagagtggagaagaagaa

SEQ ID NO: 118586 - DNA, 25 bp, Probe Sequence
atgtaaacctggacgacttgataat

SEQ ID NO: 118587 - DNA, 25 bp, Probe Sequence
cctggacgacttgataatgactaaa

SEQ ID NO: 118588 - DNA, 25 bp, Probe Sequence
tattatgaagagacgggtgtaaagc

SEQ ID NO: 118589 - DNA, 25 bp, Probe Sequence
ttaagagagccacagaatgaagaaa

SEQ ID NO: 118590 - DNA, 25 bp, Probe Sequence
taaacctggacgacttgataatgac

SEQ ID NO: 118591 - DNA, 25 bp, Probe Sequence
gtaaacctggacgacttgataatga

SEQ ID NO: 118592 - DNA, 25 bp, Probe Sequence
gatgtaaacctggacgacttgataa

SEQ ID NO: 118593 - DNA, 25 bp, Probe Sequence
tgtaaacctggacgacttgataatg

SEQ ID NO: 118594 - DNA, 25 bp, Probe Sequence
aaggaaattaaggaatctgtgaagc

SEQ ID NO: 118595 - DNA, 25 bp, Probe Sequence
tggacgacttgataatgactaaaga

SEQ ID NO: 118596 - DNA, 25 bp, Probe Sequence
gtaccaactagagtggagaagaaga

SEQ ID NO: 118597 - DNA, 25 bp, Probe Sequence
ctggacgacttgataatgactaaag

SEQ ID NO: 118598 - DNA, 25 bp, Probe Sequence
tgtaccaactagagtggagaagaag

SEQ ID NO: 118599 - DNA, 25 bp, Probe Sequence
ctgtaccaactagagtggagaagaa

SEQ ID NO: 118600 - DNA, 25 bp, Probe Sequence
tcgtagtatggtacaggatagagtg

SEQ ID NO: 118601 - DNA, 25 bp, Probe Sequence
atcgtagtatggtacaggatagagt

SEQ ID NO: 118602 - DNA, 25 bp, Probe Sequence
aagaagcctatcgtagtatggtaca

SEQ ID NO: 118603 - DNA, 25 bp, Probe Sequence
tagtatggtacaggatagagtgcta

SEQ ID NO: 118604 - DNA, 25 bp, Probe Sequence
gtagtatggtacaggatagagtgct

SEQ ID NO: 118605 - DNA, 25 bp, Probe Sequence
agaagcctatcgtagtatggtacag

SEQ ID NO: 118606 - DNA, 25 bp, Probe Sequence
tatggtacaggatagagtgctatgt

SEQ ID NO: 118607 - DNA, 25 bp, Probe Sequence
gtatggtacaggatagagtgctatg

SEQ ID NO: 118608 - DNA, 25 bp, Probe Sequence
agtatggtacaggatagagtgctat

SEQ ID NO: 118609 - DNA, 25 bp, Probe Sequence
gaggatgagagagaggtaggtaagg

SEQ ID NO: 118610 - DNA, 25 bp, Probe Sequence
ggaggatgagagagaggtaggtaag

SEQ ID NO: 118611 - DNA, 25 bp, Probe Sequence
cgtagtatggtacaggatagagtgc

SEQ ID NO: 118612 - DNA, 25 bp, Probe Sequence
gcctatcgtagtatggtacaggata

SEQ ID NO: 118613 - DNA, 25 bp, Probe Sequence
atggtacaggatagagtgctatgtg

SEQ ID NO: 118614 - DNA, 25 bp, Probe Sequence
atggaggatgagagagaggtaggta

SEQ ID NO: 118615 - DNA, 25 bp, Probe Sequence
ctaaagaagcctatcgtagtatggt

SEQ ID NO: 118616 - DNA, 25 bp, Probe Sequence
tggaggatgagagagaggtaggtaa

SEQ ID NO: 118617 - DNA, 25 bp, Probe Sequence
tatcgtagtatggtacaggatagag

SEQ ID NO: 118618 - DNA, 25 bp, Probe Sequence
aatgaatgtggtgcaatcaatagtc

SEQ ID NO: 118619 - DNA, 25 bp, Probe Sequence
gaatgaatgtggtgcaatcaatagt

SEQ ID NO: 118620 - DNA, 25 bp, Probe Sequence
gaaatggaggatgagagagaggtag

SEQ ID NO: 118621 - DNA, 25 bp, Probe Sequence
gtagaaatggaggatgagagagagg

SEQ ID NO: 118622 - DNA, 25 bp, Probe Sequence
ggtagaaatggaggatgagagagag

SEQ ID NO: 118623 - DNA, 25 bp, Probe Sequence
gaagcctatcgtagtatggtacagg

SEQ ID NO: 118624 - DNA, 25 bp, Probe Sequence
atctggcatcttgttggaatagtaa

SEQ ID NO: 118625 - DNA, 25 bp, Probe Sequence
atatctggcatcttgttggaatagt

SEQ ID NO: 118626 - DNA, 25 bp, Probe Sequence
tatctggcatcttgttggaatagta

SEQ ID NO: 118627 - DNA, 25 bp, Probe Sequence
tctggcatcttgttggaatagtaag

SEQ ID NO: 118628 - DNA, 25 bp, Probe Sequence
aatatctggcatcttgttggaatag

SEQ ID NO: 118629 - DNA, 25 bp, Probe Sequence
aagaataagccaggtgtctatactc

SEQ ID NO: 118630 - DNA, 25 bp, Probe Sequence
agaataagccaggtgtctatactcg

SEQ ID NO: 118631 - DNA, 25 bp, Probe Sequence
actgatacaatgttatgtgctggat

SEQ ID NO: 118632 - DNA, 25 bp, Probe Sequence
gtgactgatacaatgttatgtgctg

SEQ ID NO: 118633 - DNA, 25 bp, Probe Sequence
tgtgactgatacaatgttatgtgct

SEQ ID NO: 118634 - DNA, 25 bp, Probe Sequence
ctgatacaatgttatgtgctggatt

SEQ ID NO: 118635 - DNA, 25 bp, Probe Sequence
gactgatacaatgttatgtgctgga

SEQ ID NO: 118636 - DNA, 25 bp, Probe Sequence
ctggcatcttgttggaatagtaagc

SEQ ID NO: 118637 - DNA, 25 bp, Probe Sequence
tgactgatacaatgttatgtgctgg

SEQ ID NO: 118638 - DNA, 25 bp, Probe Sequence
ttccagtgatacttcaagaagactt

SEQ ID NO: 118639 - DNA, 25 bp, Probe Sequence
atgacaatgttgtagttacaggttg

SEQ ID NO: 118640 - DNA, 25 bp, Probe Sequence
aatgacaatgttgtagttacaggtt

SEQ ID NO: 118641 - DNA, 25 bp, Probe Sequence
tgacaatgttgtagttacaggttgg

SEQ ID NO: 118642 - DNA, 25 bp, Probe Sequence
gaaatatctggcatcttgttggaat

SEQ ID NO: 118643 - DNA, 25 bp, Probe Sequence
gaataagccaggtgtctatactcga

SEQ ID NO: 118644 - DNA, 25 bp, Probe Sequence
aatgttatgtgctggatttatgtca

SEQ ID NO: 118645 - DNA, 25 bp, Probe Sequence
agaaatatctggcatcttgttggaa

SEQ ID NO: 118646 - DNA, 25 bp, Probe Sequence
caatgttatgtgctggatttatgtc

SEQ ID NO: 118647 - DNA, 25 bp, Probe Sequence
catactctggctttgtgactgatac

SEQ ID NO: 118648 - DNA, 25 bp, Probe Sequence
attaccagcatcctcttctactcaa

SEQ ID NO: 118649 - DNA, 25 bp, Probe Sequence
cattaccagcatcctcttctactca

SEQ ID NO: 118650 - DNA, 25 bp, Probe Sequence
ccattaccagcatcctcttctactc

SEQ ID NO: 118651 - DNA, 25 bp, Probe Sequence
tgtggaataaggatgacatcttcaa

SEQ ID NO: 118652 - DNA, 25 bp, Probe Sequence
ctgtggaataaggatgacatcttca

SEQ ID NO: 118653 - DNA, 25 bp, Probe Sequence
gctgtggaataaggatgacatcttc

SEQ ID NO: 118654 - DNA, 25 bp, Probe Sequence
aacaaaccatcatttagactcacac

SEQ ID NO: 118655 - DNA, 25 bp, Probe Sequence
aaacaaaccatcatttagactcaca

SEQ ID NO: 118656 - DNA, 25 bp, Probe Sequence
attgtagatgatggtgagcagtttc

SEQ ID NO: 118657 - DNA, 25 bp, Probe Sequence
ttaccagcatcctcttctactcaaa

SEQ ID NO: 118658 - DNA, 25 bp, Probe Sequence
ctcatctataaagttgccacctaaa

SEQ ID NO: 118659 - DNA, 25 bp, Probe Sequence
gactcatctataaagttgccaccta

SEQ ID NO: 118660 - DNA, 25 bp, Probe Sequence
cctcccagactcatctataaagttg

SEQ ID NO: 118661 - DNA, 25 bp, Probe Sequence
acaaaccatcatttagactcacacg

SEQ ID NO: 118662 - DNA, 25 bp, Probe Sequence
cattgtagatgatggtgagcagttt

SEQ ID NO: 118663 - DNA, 25 bp, Probe Sequence
tctactcaaagaattgtccaaggaa

SEQ ID NO: 118664 - DNA, 25 bp, Probe Sequence
actcatctataaagttgccacctaa

SEQ ID NO: 118665 - DNA, 25 bp, Probe Sequence
ctcccagactcatctataaagttgc

SEQ ID NO: 118666 - DNA, 25 bp, Probe Sequence
tttgcctcccagactcatctataaa

SEQ ID NO: 118667 - DNA, 25 bp, Probe Sequence
ctactcaaagaattgtccaaggaag

SEQ ID NO: 118668 - DNA, 25 bp, Probe Sequence
aaatatagtccagagagtttgcctc

SEQ ID NO: 118669 - DNA, 25 bp, Probe Sequence
tactcaaagaattgtccaaggaagg

SEQ ID NO: 118670 - DNA, 25 bp, Probe Sequence
taccagcatcctcttctactcaaag

SEQ ID NO: 118671 - DNA, 25 bp, Probe Sequence
agactcatctataaagttgccacct

SEQ ID NO: 118672 - DNA, 25 bp, Probe Sequence
aatgatatgtgctggattcttgtca

SEQ ID NO: 118673 - DNA, 25 bp, Probe Sequence
agttcatgtgtatgtatcatcagga

SEQ ID NO: 118674 - DNA, 25 bp, Probe Sequence
ggaagttgaggtagagatcataagt

SEQ ID NO: 118675 - DNA, 25 bp, Probe Sequence
atgatatgtgctggattcttgtcag

SEQ ID NO: 118676 - DNA, 25 bp, Probe Sequence
gttcatgtgtatgtatcatcaggaa

SEQ ID NO: 118677 - DNA, 25 bp, Probe Sequence
aagttcatgtgtatgtatcatcagg

SEQ ID NO: 118678 - DNA, 25 bp, Probe Sequence
tcatgtgtatgtatcatcaggaatg

SEQ ID NO: 118679 - DNA, 25 bp, Probe Sequence
gaatgatatgtgctggattcttgtc

SEQ ID NO: 118680 - DNA, 25 bp, Probe Sequence
aggaatgatatgtgctggattcttg

SEQ ID NO: 118681 - DNA, 25 bp, Probe Sequence
caggaatgatatgtgctggattctt

SEQ ID NO: 118682 - DNA, 25 bp, Probe Sequence
tcaagttcatgtgtatgtatcatca

SEQ ID NO: 118683 - DNA, 25 bp, Probe Sequence
gtaccttgttggaatagtaagctgg

SEQ ID NO: 118684 - DNA, 25 bp, Probe Sequence
ggaatgatatgtgctggattcttgt

SEQ ID NO: 118685 - DNA, 25 bp, Probe Sequence
atatgtgctggattcttgtcaggaa

SEQ ID NO: 118686 - DNA, 25 bp, Probe Sequence
ttgcctaagagtaaagtgtttgtca

SEQ ID NO: 118687 - DNA, 25 bp, Probe Sequence
caagttcatgtgtatgtatcatcag

SEQ ID NO: 118688 - DNA, 25 bp, Probe Sequence
gcacttaaattagatggtccctttc

SEQ ID NO: 118689 - DNA, 25 bp, Probe Sequence
agcacttaaattagatggtcccttt

SEQ ID NO: 118690 - DNA, 25 bp, Probe Sequence
acttaaattagatggtccctttccc

SEQ ID NO: 118691 - DNA, 25 bp, Probe Sequence
cttgcctaagagtaaagtgtttgtc

SEQ ID NO: 118692 - DNA, 25 bp, Probe Sequence
gagcacttaaattagatggtccctt

SEQ ID NO: 118693 - DNA, 25 bp, Probe Sequence
ttcatgtgtatgtatcatcaggaat

SEQ ID NO: 118694 - DNA, 25 bp, Probe Sequence
cacttaaattagatggtccctttcc

SEQ ID NO: 118695 - DNA, 25 bp, Probe Sequence
tcaggaatgatatgtgctggattct

SEQ ID NO: 118696 - DNA, 25 bp, Probe Sequence
gtggtatctcattggaattgtaagc

SEQ ID NO: 118697 - DNA, 25 bp, Probe Sequence
cgtggtatctcattggaattgtaag

SEQ ID NO: 118698 - DNA, 25 bp, Probe Sequence
ttattatccatgagaagtaccgctc

SEQ ID NO: 118699 - DNA, 25 bp, Probe Sequence
tggtatctcattggaattgtaagct

SEQ ID NO: 118700 - DNA, 25 bp, Probe Sequence
gtatctcattggaattgtaagctgg

SEQ ID NO: 118701 - DNA, 25 bp, Probe Sequence
ggtatctcattggaattgtaagctg

SEQ ID NO: 118702 - DNA, 25 bp, Probe Sequence
tattatccatgagaagtaccgctct

SEQ ID NO: 118703 - DNA, 25 bp, Probe Sequence
tacacacaagtgacttattaccgaa

SEQ ID NO: 118704 - DNA, 25 bp, Probe Sequence
ctacacacaagtgacttattaccga

SEQ ID NO: 118705 - DNA, 25 bp, Probe Sequence
tctacacacaagtgacttattaccg

SEQ ID NO: 118706 - DNA, 25 bp, Probe Sequence
gtctacacacaagtgacttattacc

SEQ ID NO: 118707 - DNA, 25 bp, Probe Sequence
ccacaggtgtatggcaatgatataa

SEQ ID NO: 118708 - DNA, 25 bp, Probe Sequence
acgtggtatctcattggaattgtaa

SEQ ID NO: 118709 - DNA, 25 bp, Probe Sequence
gtgacttattaccgaaactggattg

SEQ ID NO: 118710 - DNA, 25 bp, Probe Sequence
tacgtggtatctcattggaattgta

SEQ ID NO: 118711 - DNA, 25 bp, Probe Sequence
acttattaccgaaactggattgctt

SEQ ID NO: 118712 - DNA, 25 bp, Probe Sequence
acaggatttggagcactttactatg

SEQ ID NO: 118713 - DNA, 25 bp, Probe Sequence
cacaggatttggagcactttactat

SEQ ID NO: 118714 - DNA, 25 bp, Probe Sequence
cttattaccgaaactggattgcttc

SEQ ID NO: 118715 - DNA, 25 bp, Probe Sequence
gacttattaccgaaactggattgct

SEQ ID NO: 118716 - DNA, 25 bp, Probe Sequence
accacaggtgtatggcaatgatata

SEQ ID NO: 118717 - DNA, 25 bp, Probe Sequence
ttattaccgaaactggattgcttca

SEQ ID NO: 118718 - DNA, 25 bp, Probe Sequence
cacaggtgtatggcaatgatataaa

SEQ ID NO: 118719 - DNA, 25 bp, Probe Sequence
attatccatgagaagtaccgctctg

SEQ ID NO: 118720 - DNA, 25 bp, Probe Sequence
aatgttggaattggaactgttgaac

SEQ ID NO: 118721 - DNA, 25 bp, Probe Sequence
atgttggaattggaactgttgaacc

SEQ ID NO: 118722 - DNA, 25 bp, Probe Sequence
gagagagaaattcagcaaacaatgt

SEQ ID NO: 118723 - DNA, 25 bp, Probe Sequence
atgtttactgatgaaattgaagcca

SEQ ID NO: 118724 - DNA, 25 bp, Probe Sequence
caatgttggaattggaactgttgaa

SEQ ID NO: 118725 - DNA, 25 bp, Probe Sequence
tgtttactgatgaaattgaagccat

SEQ ID NO: 118726 - DNA, 25 bp, Probe Sequence
agagaacatagaatgaaagcaacaa

SEQ ID NO: 118727 - DNA, 25 bp, Probe Sequence
aagagaacatagaatgaaagcaaca

SEQ ID NO: 118728 - DNA, 25 bp, Probe Sequence
ttactgatgaaattgaagccattgg

SEQ ID NO: 118729 - DNA, 25 bp, Probe Sequence
tgagagagaaattcagcaaacaatg

SEQ ID NO: 118730 - DNA, 25 bp, Probe Sequence
gtgagagagaaattcagcaaacaat

SEQ ID NO: 118731 - DNA, 25 bp, Probe Sequence
ggatttgattctagggaagatgtga

SEQ ID NO: 118732 - DNA, 25 bp, Probe Sequence
tggatttgattctagggaagatgtg

SEQ ID NO: 118733 - DNA, 25 bp, Probe Sequence
gtggatttgattctagggaagatgt

SEQ ID NO: 118734 - DNA, 25 bp, Probe Sequence
tgattctagggaagatgtgaaagtt

SEQ ID NO: 118735 - DNA, 25 bp, Probe Sequence
ttgattctagggaagatgtgaaagt

SEQ ID NO: 118736 - DNA, 25 bp, Probe Sequence
cattgacaagaagatcgagttccac

SEQ ID NO: 118737 - DNA, 25 bp, Probe Sequence
ggtggatttgattctagggaagatg

SEQ ID NO: 118738 - DNA, 25 bp, Probe Sequence
acaatgttggaattggaactgttga

SEQ ID NO: 118739 - DNA, 25 bp, Probe Sequence
tttactgatgaaattgaagccattg

SEQ ID NO: 118740 - DNA, 25 bp, Probe Sequence
gtttactgatgaaattgaagccatt

SEQ ID NO: 118741 - DNA, 25 bp, Probe Sequence
gagaacatagaatgaaagcaacaaa

SEQ ID NO: 118742 - DNA, 25 bp, Probe Sequence
tttgattctagggaagatgtgaaag

SEQ ID NO: 118743 - DNA, 25 bp, Probe Sequence
aattgggtggatttgattctaggga

SEQ ID NO: 118744 - DNA, 25 bp, Probe Sequence
cttcttgattccttctggtcctata

SEQ ID NO: 118745 - DNA, 25 bp, Probe Sequence
acttcttgattccttctggtcctat

SEQ ID NO: 118746 - DNA, 25 bp, Probe Sequence
ttcttgattccttctggtcctataa

SEQ ID NO: 118747 - DNA, 25 bp, Probe Sequence
gattccattcactcctcacaacaac

SEQ ID NO: 118748 - DNA, 25 bp, Probe Sequence
ttatggacttcttgattccttctgg

SEQ ID NO: 118749 - DNA, 25 bp, Probe Sequence
gacttcttgattccttctggtccta

SEQ ID NO: 118750 - DNA, 25 bp, Probe Sequence
agtattctgctactaatgacactgg

SEQ ID NO: 118751 - DNA, 25 bp, Probe Sequence
tatggacttcttgattccttctggt

SEQ ID NO: 118752 - DNA, 25 bp, Probe Sequence
cagacacttcatgtaagagacacag

SEQ ID NO: 118753 - DNA, 25 bp, Probe Sequence
ccaagtattctgctactaatgacac

SEQ ID NO: 118754 - DNA, 25 bp, Probe Sequence
tgattccattcactcctcacaacaa

SEQ ID NO: 118755 - DNA, 25 bp, Probe Sequence
ttgattccattcactcctcacaaca

SEQ ID NO: 118756 - DNA, 25 bp, Probe Sequence
gctgttgtttatggacttcttgatt

SEQ ID NO: 118757 - DNA, 25 bp, Probe Sequence
agtcactatttacaatcagagccaa

SEQ ID NO: 118758 - DNA, 25 bp, Probe Sequence
gtcactatttacaatcagagccaaa

SEQ ID NO: 118759 - DNA, 25 bp, Probe Sequence
gtattctgctactaatgacactggg

SEQ ID NO: 118760 - DNA, 25 bp, Probe Sequence
tgctgttgtttatggacttcttgat

SEQ ID NO: 118761 - DNA, 25 bp, Probe Sequence
atctctgctgttgtttatggacttc

SEQ ID NO: 118762 - DNA, 25 bp, Probe Sequence
tattctgctactaatgacactgggt

SEQ ID NO: 118763 - DNA, 25 bp, Probe Sequence
attctgctactaatgacactgggta

SEQ ID NO: 118764 - DNA, 25 bp, Probe Sequence
tcttgattccttctggtcctataaa

SEQ ID NO: 118765 - DNA, 25 bp, Probe Sequence
ctctgctgttgtttatggacttctt

SEQ ID NO: 118766 - DNA, 25 bp, Probe Sequence
taggcagacacttcatgtaagagac

SEQ ID NO: 118767 - DNA, 25 bp, Probe Sequence
gtaggcagacacttcatgtaagaga

SEQ ID NO: 118768 - DNA, 25 bp, Probe Sequence
ccatgtcaatatagctgtccaagtg

SEQ ID NO: 118769 - DNA, 25 bp, Probe Sequence
accatgtcaatatagctgtccaagt

SEQ ID NO: 118770 - DNA, 25 bp, Probe Sequence
catgtcaatatagctgtccaagtgc

SEQ ID NO: 118771 - DNA, 25 bp, Probe Sequence
gtaggctttcagttcttggatctaa

SEQ ID NO: 118772 - DNA, 25 bp, Probe Sequence
taggctttcagttcttggatctaaa

SEQ ID NO: 118773 - DNA, 25 bp, Probe Sequence
gaccatgtcaatatagctgtccaag

SEQ ID NO: 118774 - DNA, 25 bp, Probe Sequence
agtaggctttcagttcttggatcta

SEQ ID NO: 118775 - DNA, 25 bp, Probe Sequence
gagtaggctttcagttcttggatct

SEQ ID NO: 118776 - DNA, 25 bp, Probe Sequence
atgtcaatatagctgtccaagtgcg

SEQ ID NO: 118777 - DNA, 25 bp, Probe Sequence
tttggagtaggctttcagttcttgg

SEQ ID NO: 118778 - DNA, 25 bp, Probe Sequence
cagtgacggttctagatctgagtaa

SEQ ID NO: 118779 - DNA, 25 bp, Probe Sequence
gtcaatatagctgtccaagtgcgag

SEQ ID NO: 118780 - DNA, 25 bp, Probe Sequence
ggagtaggctttcagttcttggatc

SEQ ID NO: 118781 - DNA, 25 bp, Probe Sequence
gatctgagtaaatacaggagcttcc

SEQ ID NO: 118782 - DNA, 25 bp, Probe Sequence
tattttggagtaggctttcagttct

SEQ ID NO: 118783 - DNA, 25 bp, Probe Sequence
attttggagtaggctttcagttctt

SEQ ID NO: 118784 - DNA, 25 bp, Probe Sequence
gagtaaatacaggagcttccacttc

SEQ ID NO: 118785 - DNA, 25 bp, Probe Sequence
atctgagtaaatacaggagcttcca

SEQ ID NO: 118786 - DNA, 25 bp, Probe Sequence
tggagtaggctttcagttcttggat

SEQ ID NO: 118787 - DNA, 25 bp, Probe Sequence
atattttggagtaggctttcagttc

SEQ ID NO: 118788 - DNA, 25 bp, Probe Sequence
ttggagtaggctttcagttcttgga

SEQ ID NO: 118789 - DNA, 25 bp, Probe Sequence
tgagtaaatacaggagcttccactt

SEQ ID NO: 118790 - DNA, 25 bp, Probe Sequence
gtgacggttctagatctgagtaaat

SEQ ID NO: 118791 - DNA, 25 bp, Probe Sequence
ttttggagtaggctttcagttcttg

SEQ ID NO: 118792 - DNA, 25 bp, Probe Sequence
gtcacctacttcatcaactggattg

SEQ ID NO: 118793 - DNA, 25 bp, Probe Sequence
gcctatgaacttcacttcctacatt

SEQ ID NO: 118794 - DNA, 25 bp, Probe Sequence
atgaacttcacttcctacattgtcc

SEQ ID NO: 118795 - DNA, 25 bp, Probe Sequence
cctatgaacttcacttcctacattg

SEQ ID NO: 118796 - DNA, 25 bp, Probe Sequence
tatgaacttcacttcctacattgtc

SEQ ID NO: 118797 - DNA, 25 bp, Probe Sequence
ctatgaacttcacttcctacattgt

SEQ ID NO: 118798 - DNA, 25 bp, Probe Sequence
tgcctatgaacttcacttcctacat

SEQ ID NO: 118799 - DNA, 25 bp, Probe Sequence
ggtcacctacttcatcaactggatt

SEQ ID NO: 118800 - DNA, 25 bp, Probe Sequence
ctgcctatgaacttcacttcctaca

SEQ ID NO: 118801 - DNA, 25 bp, Probe Sequence
cctgcctatgaacttcacttcctac

SEQ ID NO: 118802 - DNA, 25 bp, Probe Sequence
aaacatccaactgtatcatcaaacc

SEQ ID NO: 118803 - DNA, 25 bp, Probe Sequence
acctgcctatgaacttcacttccta

SEQ ID NO: 118804 - DNA, 25 bp, Probe Sequence
aacatccaactgtatcatcaaaccc

SEQ ID NO: 118805 - DNA, 25 bp, Probe Sequence
gaaacatccaactgtatcatcaaac

SEQ ID NO: 118806 - DNA, 25 bp, Probe Sequence
cctacttcatcaactggattgacaa

SEQ ID NO: 118807 - DNA, 25 bp, Probe Sequence
ggaaacatccaactgtatcatcaaa

SEQ ID NO: 118808 - DNA, 25 bp, Probe Sequence
gaacttcacttcctacattgtccct

SEQ ID NO: 118809 - DNA, 25 bp, Probe Sequence
aacttcacttcctacattgtccctg

SEQ ID NO: 118810 - DNA, 25 bp, Probe Sequence
cacctacttcatcaactggattgac

SEQ ID NO: 118811 - DNA, 25 bp, Probe Sequence
tcacctacttcatcaactggattga

SEQ ID NO: 118812 - DNA, 25 bp, Probe Sequence
catccaactgtatcatcaaacccag

SEQ ID NO: 118813 - DNA, 25 bp, Probe Sequence
gggaaacatccaactgtatcatcaa

SEQ ID NO: 118814 - DNA, 25 bp, Probe Sequence
acctacttcatcaactggattgaca

SEQ ID NO: 118815 - DNA, 25 bp, Probe Sequence
acatccaactgtatcatcaaaccca

SEQ ID NO: 118816 - DNA, 25 bp, Probe Sequence
ggactatgatgaggatgatgatgat

SEQ ID NO: 118817 - DNA, 25 bp, Probe Sequence
ctggaatatgatgacgagagttact

SEQ ID NO: 118818 - DNA, 25 bp, Probe Sequence
tatgatgaggatgatgatgatgaca

SEQ ID NO: 118819 - DNA, 25 bp, Probe Sequence
atgatgaggatgatgatgatgacat

SEQ ID NO: 118820 - DNA, 25 bp, Probe Sequence
actatgatgaggatgatgatgatga

SEQ ID NO: 118821 - DNA, 25 bp, Probe Sequence
gctggaatatgatgacgagagttac

SEQ ID NO: 118822 - DNA, 25 bp, Probe Sequence
ctatgatgaggatgatgatgatgac

SEQ ID NO: 118823 - DNA, 25 bp, Probe Sequence
gactatgatgaggatgatgatgatg

SEQ ID NO: 118824 - DNA, 25 bp, Probe Sequence
ccaacaagtcttactcctcctataa

SEQ ID NO: 118825 - DNA, 25 bp, Probe Sequence
ttgaagaggatcaggtgattgagta

SEQ ID NO: 118826 - DNA, 25 bp, Probe Sequence
atagatgagctggaatatgatgacg

SEQ ID NO: 118827 - DNA, 25 bp, Probe Sequence
cgatgacatagatgagctggaatat

SEQ ID NO: 118828 - DNA, 25 bp, Probe Sequence
atgatgacgagagttactcctacta

SEQ ID NO: 118829 - DNA, 25 bp, Probe Sequence
tatgatgacgagagttactcctact

SEQ ID NO: 118830 - DNA, 25 bp, Probe Sequence
tggaatatgatgacgagagttactc

SEQ ID NO: 118831 - DNA, 25 bp, Probe Sequence
gaatatgatgacgagagttactcct

SEQ ID NO: 118832 - DNA, 25 bp, Probe Sequence
tgatgacgagagttactcctactac

SEQ ID NO: 118833 - DNA, 25 bp, Probe Sequence
aagaggatcaggtgattgagtacag

SEQ ID NO: 118834 - DNA, 25 bp, Probe Sequence
gaagaggatcaggtgattgagtaca

SEQ ID NO: 118835 - DNA, 25 bp, Probe Sequence
tgaagaggatcaggtgattgagtac

SEQ ID NO: 118836 - DNA, 25 bp, Probe Sequence
tagatgagctggaatatgatgacga

SEQ ID NO: 118837 - DNA, 25 bp, Probe Sequence
atatgatgacgagagttactcctac

SEQ ID NO: 118838 - DNA, 25 bp, Probe Sequence
agctggaatatgatgacgagagtta

SEQ ID NO: 118839 - DNA, 25 bp, Probe Sequence
acgatgacatagatgagctggaata

SEQ ID NO: 118840 - DNA, 25 bp, Probe Sequence
gacagagccgagaagattattcaat

SEQ ID NO: 118841 - DNA, 25 bp, Probe Sequence
agacagagccgagaagattattcaa

SEQ ID NO: 118842 - DNA, 25 bp, Probe Sequence
cagagacagagccgagaagattatt

SEQ ID NO: 118843 - DNA, 25 bp, Probe Sequence
agagacagagccgagaagattattc

SEQ ID NO: 118844 - DNA, 25 bp, Probe Sequence
gagacagagccgagaagattattca

SEQ ID NO: 118845 - DNA, 25 bp, Probe Sequence
tcagagacagagccgagaagattat

SEQ ID NO: 118846 - DNA, 25 bp, Probe Sequence
acagagccgagaagattattcaatc

SEQ ID NO: 118847 - DNA, 25 bp, Probe Sequence
gccgagaagattattcaatccagat

SEQ ID NO: 118848 - DNA, 25 bp, Probe Sequence
ttcagagacagagccgagaagatta

SEQ ID NO: 118849 - DNA, 25 bp, Probe Sequence
ccgagaagattattcaatccagatt

SEQ ID NO: 118850 - DNA, 25 bp, Probe Sequence
gagccgagaagattattcaatccag

SEQ ID NO: 118851 - DNA, 25 bp, Probe Sequence
cagagccgagaagattattcaatcc

SEQ ID NO: 118852 - DNA, 25 bp, Probe Sequence
agccgagaagattattcaatccaga

SEQ ID NO: 118853 - DNA, 25 bp, Probe Sequence
agagccgagaagattattcaatcca

SEQ ID NO: 118854 - DNA, 25 bp, Probe Sequence
ctatttcagagacagagccgagaag

SEQ ID NO: 118855 - DNA, 25 bp, Probe Sequence
catttgatttcgaggcaagaatttg

SEQ ID NO: 118856 - DNA, 25 bp, Probe Sequence
tcatttgatttcgaggcaagaattt

SEQ ID NO: 118857 - DNA, 25 bp, Probe Sequence
ttcatttgatttcgaggcaagaatt

SEQ ID NO: 118858 - DNA, 25 bp, Probe Sequence
tgatttcgaggcaagaatttgttaa

SEQ ID NO: 118859 - DNA, 25 bp, Probe Sequence
ttgatttcgaggcaagaatttgtta

SEQ ID NO: 118860 - DNA, 25 bp, Probe Sequence
atttgatttcgaggcaagaatttgt

SEQ ID NO: 118861 - DNA, 25 bp, Probe Sequence
tttgatttcgaggcaagaatttgtt

SEQ ID NO: 118862 - DNA, 25 bp, Probe Sequence
cttcatttgatttcgaggcaagaat

SEQ ID NO: 118863 - DNA, 25 bp, Probe Sequence
tatttcagagacagagccgagaaga

SEQ ID NO: 118864 - DNA, 25 bp, Probe Sequence
gttcagtgaggatcttatcatggag

SEQ ID NO: 118865 - DNA, 25 bp, Probe Sequence
ctgttcagtgaggatcttatcatgg

SEQ ID NO: 118866 - DNA, 25 bp, Probe Sequence
actgttcagtgaggatcttatcatg

SEQ ID NO: 118867 - DNA, 25 bp, Probe Sequence
tgttcagtgaggatcttatcatgga

SEQ ID NO: 118868 - DNA, 25 bp, Probe Sequence
aagttagagtgtggacaaggtgaag

SEQ ID NO: 118869 - DNA, 25 bp, Probe Sequence
gaagttagagtgtggacaaggtgaa

SEQ ID NO: 118870 - DNA, 25 bp, Probe Sequence
ttcagtgaggatcttatcatggagg

SEQ ID NO: 118871 - DNA, 25 bp, Probe Sequence
taggctttcttcaatacaaacagga

SEQ ID NO: 118872 - DNA, 25 bp, Probe Sequence
gtaggctttcttcaatacaaacagg

SEQ ID NO: 118873 - DNA, 25 bp, Probe Sequence
aggctttcttcaatacaaacaggat

SEQ ID NO: 118874 - DNA, 25 bp, Probe Sequence
agtaggctttcttcaatacaaacag

SEQ ID NO: 118875 - DNA, 25 bp, Probe Sequence
caagacccagactatgaagaatgtg

SEQ ID NO: 118876 - DNA, 25 bp, Probe Sequence
tatgaagaatgtgtcccttgtgaag

SEQ ID NO: 118877 - DNA, 25 bp, Probe Sequence
ctatgaagaatgtgtcccttgtgaa

SEQ ID NO: 118878 - DNA, 25 bp, Probe Sequence
agaagttagagtgtggacaaggtga

SEQ ID NO: 118879 - DNA, 25 bp, Probe Sequence
cagaagttagagtgtggacaaggtg

SEQ ID NO: 118880 - DNA, 25 bp, Probe Sequence
aagacccagactatgaagaatgtgt

SEQ ID NO: 118881 - DNA, 25 bp, Probe Sequence
aagtaggctttcttcaatacaaaca

SEQ ID NO: 118882 - DNA, 25 bp, Probe Sequence
cagtgaggatcttatcatggaggtg

SEQ ID NO: 118883 - DNA, 25 bp, Probe Sequence
tcagtgaggatcttatcatggaggt

SEQ ID NO: 118884 - DNA, 25 bp, Probe Sequence
gctttcttcaatacaaacaggatca

SEQ ID NO: 118885 - DNA, 25 bp, Probe Sequence
ggctttcttcaatacaaacaggatc

SEQ ID NO: 118886 - DNA, 25 bp, Probe Sequence
tccaagacccagactatgaagaatg

SEQ ID NO: 118887 - DNA, 25 bp, Probe Sequence
agttagagtgtggacaaggtgaagt

SEQ ID NO: 118888 - DNA, 25 bp, Probe Sequence
ttactgttcctcaagccttactaag

SEQ ID NO: 118889 - DNA, 25 bp, Probe Sequence
gttcctcaagccttactaagcatat

SEQ ID NO: 118890 - DNA, 25 bp, Probe Sequence
tgttcctcaagccttactaagcata

SEQ ID NO: 118891 - DNA, 25 bp, Probe Sequence
cctacagatatgaagaatgtggcaa

SEQ ID NO: 118892 - DNA, 25 bp, Probe Sequence
tactgttcctcaagccttactaagc

SEQ ID NO: 118893 - DNA, 25 bp, Probe Sequence
aataactcatagtggagaggaatcc

SEQ ID NO: 118894 - DNA, 25 bp, Probe Sequence
tggtcctctgagcttactatacatc

SEQ ID NO: 118895 - DNA, 25 bp, Probe Sequence
gtggtcctctgagcttactatacat

SEQ ID NO: 118896 - DNA, 25 bp, Probe Sequence
ctgttcctcaagccttactaagcat

SEQ ID NO: 118897 - DNA, 25 bp, Probe Sequence
aaatcatactggagagaaaccctac

SEQ ID NO: 118898 - DNA, 25 bp, Probe Sequence
agagaaatcatactggagagaaacc

SEQ ID NO: 118899 - DNA, 25 bp, Probe Sequence
atgctgaagagaaacactacaaatg

SEQ ID NO: 118900 - DNA, 25 bp, Probe Sequence
ggagagaaaccctacagatatgaag

SEQ ID NO: 118901 - DNA, 25 bp, Probe Sequence
atagtggagagaaaccctacagata

SEQ ID NO: 118902 - DNA, 25 bp, Probe Sequence
tagtggagagaaaccctacagatat

SEQ ID NO: 118903 - DNA, 25 bp, Probe Sequence
gaaatcatactggagagaaacccta

SEQ ID NO: 118904 - DNA, 25 bp, Probe Sequence
tggagagaaaccctacagatatgaa

SEQ ID NO: 118905 - DNA, 25 bp, Probe Sequence
atcatactggagagaaaccctacaa

SEQ ID NO: 118906 - DNA, 25 bp, Probe Sequence
aatcatactggagagaaaccctaca

SEQ ID NO: 118907 - DNA, 25 bp, Probe Sequence
gagaaatcatactggagagaaaccc

SEQ ID NO: 118908 - DNA, 25 bp, Probe Sequence
tttactgttcctcaagccttactaa

SEQ ID NO: 118909 - DNA, 25 bp, Probe Sequence
ggtcctctgagcttactatacatca

SEQ ID NO: 118910 - DNA, 25 bp, Probe Sequence
agaaatcatactggagagaaaccct

SEQ ID NO: 118911 - DNA, 25 bp, Probe Sequence
gagagaaaccctacagatatgaaga

SEQ ID NO: 118912 - DNA, 25 bp, Probe Sequence
taaagaaaggactgatagcaactgg

SEQ ID NO: 118913 - DNA, 25 bp, Probe Sequence
ataaagaaaggactgatagcaactg

SEQ ID NO: 118914 - DNA, 25 bp, Probe Sequence
aagttggtcctgatgtcttctttct

SEQ ID NO: 118915 - DNA, 25 bp, Probe Sequence
agttggtcctgatgtcttctttctg

SEQ ID NO: 118916 - DNA, 25 bp, Probe Sequence
tataaagaaaggactgatagcaact

SEQ ID NO: 118917 - DNA, 25 bp, Probe Sequence
cttgtctcctgtaagaaccctgaag

SEQ ID NO: 118918 - DNA, 25 bp, Probe Sequence
gtctcctgtaagaaccctgaagttg

SEQ ID NO: 118919 - DNA, 25 bp, Probe Sequence
gttggtcctgatgtcttctttctgg

SEQ ID NO: 118920 - DNA, 25 bp, Probe Sequence
aaagaaaggactgatagcaactggc

SEQ ID NO: 118921 - DNA, 25 bp, Probe Sequence
tgtctcctgtaagaaccctgaagtt

SEQ ID NO: 118922 - DNA, 25 bp, Probe Sequence
ttgtctcctgtaagaaccctgaagt

SEQ ID NO: 118923 - DNA, 25 bp, Probe Sequence
gatcttaactcctcagggaagtcag

SEQ ID NO: 118924 - DNA, 25 bp, Probe Sequence
ctgatgtcttctttctggactctgg

SEQ ID NO: 118925 - DNA, 25 bp, Probe Sequence
cctgatgtcttctttctggactctg

SEQ ID NO: 118926 - DNA, 25 bp, Probe Sequence
atataaagaaaggactgatagcaac

SEQ ID NO: 118927 - DNA, 25 bp, Probe Sequence
tagagcagaaaatgatgaaaagtcg

SEQ ID NO: 118928 - DNA, 25 bp, Probe Sequence
ctgaagttggtcctgatgtcttctt

SEQ ID NO: 118929 - DNA, 25 bp, Probe Sequence
aaaatgatgaaaagtcgtgttctgt

SEQ ID NO: 118930 - DNA, 25 bp, Probe Sequence
aaatgatgaaaagtcgtgttctgtg

SEQ ID NO: 118931 - DNA, 25 bp, Probe Sequence
gaaaatgatgaaaagtcgtgttctg

SEQ ID NO: 118932 - DNA, 25 bp, Probe Sequence
cagaaaatgatgaaaagtcgtgttc

SEQ ID NO: 118933 - DNA, 25 bp, Probe Sequence
gcagaaaatgatgaaaagtcgtgtt

SEQ ID NO: 118934 - DNA, 25 bp, Probe Sequence
gagcagaaaatgatgaaaagtcgtg

SEQ ID NO: 118935 - DNA, 25 bp, Probe Sequence
agagcagaaaatgatgaaaagtcgt

SEQ ID NO: 118936 - DNA, 25 bp, Probe Sequence
cagaatgtcaatgtcaaggtaatca

SEQ ID NO: 118937 - DNA, 25 bp, Probe Sequence
tcagaatgtcaatgtcaaggtaatc

SEQ ID NO: 118938 - DNA, 25 bp, Probe Sequence
ctctaccacaggctccaactattat

SEQ ID NO: 118939 - DNA, 25 bp, Probe Sequence
atcagaatgtcaatgtcaaggtaat

SEQ ID NO: 118940 - DNA, 25 bp, Probe Sequence
tctaccacaggctccaactattatg

SEQ ID NO: 118941 - DNA, 25 bp, Probe Sequence
agaatgtcaatgtcaaggtaatcat

SEQ ID NO: 118942 - DNA, 25 bp, Probe Sequence
gatcagaatgtcaatgtcaaggtaa

SEQ ID NO: 118943 - DNA, 25 bp, Probe Sequence
ctatcactagcaagatgaacctctc

SEQ ID NO: 118944 - DNA, 25 bp, Probe Sequence
tatcactagcaagatgaacctctct

SEQ ID NO: 118945 - DNA, 25 bp, Probe Sequence
catacaagactgtcatcaagaagga

SEQ ID NO: 118946 - DNA, 25 bp, Probe Sequence
aagcatacaagactgtcatcaagaa

SEQ ID NO: 118947 - DNA, 25 bp, Probe Sequence
actatcactagcaagatgaacctct

SEQ ID NO: 118948 - DNA, 25 bp, Probe Sequence
cactatcactagcaagatgaacctc

SEQ ID NO: 118949 - DNA, 25 bp, Probe Sequence
ctccactatcactagcaagatgaac

SEQ ID NO: 118950 - DNA, 25 bp, Probe Sequence
tctccactatcactagcaagatgaa

SEQ ID NO: 118951 - DNA, 25 bp, Probe Sequence
ttctccactatcactagcaagatga

SEQ ID NO: 118952 - DNA, 25 bp, Probe Sequence
aatgtcaatgtcaaggtaatcatgg

SEQ ID NO: 118953 - DNA, 25 bp, Probe Sequence
atacaagactgtcatcaagaaggac

SEQ ID NO: 118954 - DNA, 25 bp, Probe Sequence
agcatacaagactgtcatcaagaag

SEQ ID NO: 118955 - DNA, 25 bp, Probe Sequence
tcttcatagacgagattgatgccat

SEQ ID NO: 118956 - DNA, 25 bp, Probe Sequence
gaggaggttgacttggaagactatg

SEQ ID NO: 118957 - DNA, 25 bp, Probe Sequence
gaatgtcaatgtcaaggtaatcatg

SEQ ID NO: 118958 - DNA, 25 bp, Probe Sequence
gcatacaagactgtcatcaagaagg

SEQ ID NO: 118959 - DNA, 25 bp, Probe Sequence
cttcatagacgagattgatgccatc

SEQ ID NO: 118960 - DNA, 25 bp, Probe Sequence
aatgtcagtaggaatcttggaagag

SEQ ID NO: 118961 - DNA, 25 bp, Probe Sequence
caatgtcagtaggaatcttggaaga

SEQ ID NO: 118962 - DNA, 25 bp, Probe Sequence
atgtcagtaggaatcttggaagaga

SEQ ID NO: 118963 - DNA, 25 bp, Probe Sequence
tcttggaagagatcattgatgacaa

SEQ ID NO: 118964 - DNA, 25 bp, Probe Sequence
acactacatcagcattctttcattt

SEQ ID NO: 118965 - DNA, 25 bp, Probe Sequence
aacactacatcagcattctttcatt

SEQ ID NO: 118966 - DNA, 25 bp, Probe Sequence
tgatgaagattcgggaaattaagga

SEQ ID NO: 118967 - DNA, 25 bp, Probe Sequence
gtgatgaagattcgggaaattaagg

SEQ ID NO: 118968 - DNA, 25 bp, Probe Sequence
acagtgatgaagattcgggaaatta

SEQ ID NO: 118969 - DNA, 25 bp, Probe Sequence
cagtgatgaagattcgggaaattaa

SEQ ID NO: 118970 - DNA, 25 bp, Probe Sequence
cactacatcagcattctttcatttg

SEQ ID NO: 118971 - DNA, 25 bp, Probe Sequence
gaacactacatcagcattctttcat

SEQ ID NO: 118972 - DNA, 25 bp, Probe Sequence
agtgatgaagattcgggaaattaag

SEQ ID NO: 118973 - DNA, 25 bp, Probe Sequence
gtcagtaggaatcttggaagagatc

SEQ ID NO: 118974 - DNA, 25 bp, Probe Sequence
atcttggaagagatcattgatgaca

SEQ ID NO: 118975 - DNA, 25 bp, Probe Sequence
cagtaggaatcttggaagagatcat

SEQ ID NO: 118976 - DNA, 25 bp, Probe Sequence
tcagtaggaatcttggaagagatca

SEQ ID NO: 118977 - DNA, 25 bp, Probe Sequence
ggaatcttggaagagatcattgatg

SEQ ID NO: 118978 - DNA, 25 bp, Probe Sequence
aggaatcttggaagagatcattgat

SEQ ID NO: 118979 - DNA, 25 bp, Probe Sequence
gatgaagattcgggaaattaaggaa

SEQ ID NO: 118980 - DNA, 25 bp, Probe Sequence
gtaggaatcttggaagagatcattg

SEQ ID NO: 118981 - DNA, 25 bp, Probe Sequence
ctcagaacactacatcagcattctt

SEQ ID NO: 118982 - DNA, 25 bp, Probe Sequence
aatcttggaagagatcattgatgac

SEQ ID NO: 118983 - DNA, 25 bp, Probe Sequence
taggaatcttggaagagatcattga

SEQ ID NO: 118984 - DNA, 25 bp, Probe Sequence
atgctgattatgaagagtcactgag

SEQ ID NO: 118985 - DNA, 25 bp, Probe Sequence
tgctgattatgaagagtcactgagt

SEQ ID NO: 118986 - DNA, 25 bp, Probe Sequence
atccagtaatgaggcagaatattgt

SEQ ID NO: 118987 - DNA, 25 bp, Probe Sequence
tccagtaatgaggcagaatattgtc

SEQ ID NO: 118988 - DNA, 25 bp, Probe Sequence
catgctgattatgaagagtcactga

SEQ ID NO: 118989 - DNA, 25 bp, Probe Sequence
aatccagtaatgaggcagaatattg

SEQ ID NO: 118990 - DNA, 25 bp, Probe Sequence
ttgtcttaccaggctgatcttgaat

SEQ ID NO: 118991 - DNA, 25 bp, Probe Sequence
attgtcttaccaggctgatcttgaa

SEQ ID NO: 118992 - DNA, 25 bp, Probe Sequence
aattgtcttaccaggctgatcttga

SEQ ID NO: 118993 - DNA, 25 bp, Probe Sequence
ccagtaatgaggcagaatattgtcc

SEQ ID NO: 118994 - DNA, 25 bp, Probe Sequence
gtcttaccaggctgatcttgaatct

SEQ ID NO: 118995 - DNA, 25 bp, Probe Sequence
gtctaaagattgtggttcagtttcc

SEQ ID NO: 118996 - DNA, 25 bp, Probe Sequence
tgtcttaccaggctgatcttgaatc

SEQ ID NO: 118997 - DNA, 25 bp, Probe Sequence
tgtctaaagattgtggttcagtttc

SEQ ID NO: 118998 - DNA, 25 bp, Probe Sequence
agtaatgaggcagaatattgtcctg

SEQ ID NO: 118999 - DNA, 25 bp, Probe Sequence
cagtaatgaggcagaatattgtcct

SEQ ID NO: 119000 - DNA, 25 bp, Probe Sequence
ctgattatgaagagtcactgagtgg

SEQ ID NO: 119001 - DNA, 25 bp, Probe Sequence
attgtgcctgttgaacttgaaccta

SEQ ID NO: 119002 - DNA, 25 bp, Probe Sequence
gtttccacagtagatgagtttccag

SEQ ID NO: 119003 - DNA, 25 bp, Probe Sequence
cagtttccacagtagatgagtttcc

SEQ ID NO: 119004 - DNA, 25 bp, Probe Sequence
gctgattatgaagagtcactgagtg

SEQ ID NO: 119005 - DNA, 25 bp, Probe Sequence
ttcagtttccacagtagatgagttt

SEQ ID NO: 119006 - DNA, 25 bp, Probe Sequence
ttgtgcctgttgaacttgaacctaa

SEQ ID NO: 119007 - DNA, 25 bp, Probe Sequence
tcagtttccacagtagatgagtttc

SEQ ID NO: 119008 - DNA, 25 bp, Probe Sequence
aatatcacagccatcttcatccttc

SEQ ID NO: 119009 - DNA, 25 bp, Probe Sequence
cctgaagaagactctctcctacata

SEQ ID NO: 119010 - DNA, 25 bp, Probe Sequence
ctgaagaagactctctcctacatag

SEQ ID NO: 119011 - DNA, 25 bp, Probe Sequence
acctgaagaagactctctcctacat

SEQ ID NO: 119012 - DNA, 25 bp, Probe Sequence
atatcacagccatcttcatccttcc

SEQ ID NO: 119013 - DNA, 25 bp, Probe Sequence
gaagaagactctctcctacataggt

SEQ ID NO: 119014 - DNA, 25 bp, Probe Sequence
tgaagaagactctctcctacatagg

SEQ ID NO: 119015 - DNA, 25 bp, Probe Sequence
aagaagactctctcctacataggtg

SEQ ID NO: 119016 - DNA, 25 bp, Probe Sequence
gacctgaagaagactctctcctaca

SEQ ID NO: 119017 - DNA, 25 bp, Probe Sequence
gaagactctctcctacataggtgtc

SEQ ID NO: 119018 - DNA, 25 bp, Probe Sequence
agaagactctctcctacataggtgt

SEQ ID NO: 119019 - DNA, 25 bp, Probe Sequence
tatcacagccatcttcatccttcct

SEQ ID NO: 119020 - DNA, 25 bp, Probe Sequence
aaatctttgaggaacatggtgatct

SEQ ID NO: 119021 - DNA, 25 bp, Probe Sequence
caaaccctatctgctgctgatttac

SEQ ID NO: 119022 - DNA, 25 bp, Probe Sequence
ctctctcctacataggtgtctccaa

SEQ ID NO: 119023 - DNA, 25 bp, Probe Sequence
cgacctgaagaagactctctcctac

SEQ ID NO: 119024 - DNA, 25 bp, Probe Sequence
aaaccctatctgctgctgatttaca

SEQ ID NO: 119025 - DNA, 25 bp, Probe Sequence
acaaaccctatctgctgctgattta

SEQ ID NO: 119026 - DNA, 25 bp, Probe Sequence
gactctctcctacataggtgtctcc

SEQ ID NO: 119027 - DNA, 25 bp, Probe Sequence
aatctttgaggaacatggtgatctc

SEQ ID NO: 119028 - DNA, 25 bp, Probe Sequence
actctctcctacataggtgtctcca

SEQ ID NO: 119029 - DNA, 25 bp, Probe Sequence
cgtcgtcaagatagacaaaccctat

SEQ ID NO: 119030 - DNA, 25 bp, Probe Sequence
tctctcctacataggtgtctccaaa

SEQ ID NO: 119031 - DNA, 25 bp, Probe Sequence
aaccctatctgctgctgatttacag

SEQ ID NO: 119032 - DNA, 25 bp, Probe Sequence
aaccgaacaagaagttgagataagt

SEQ ID NO: 119033 - DNA, 25 bp, Probe Sequence
accgaacaagaagttgagataagtc

SEQ ID NO: 119034 - DNA, 25 bp, Probe Sequence
gaagttgagataagtcgaagagtga

SEQ ID NO: 119035 - DNA, 25 bp, Probe Sequence
agaagttgagataagtcgaagagtg

SEQ ID NO: 119036 - DNA, 25 bp, Probe Sequence
acaagaagttgagataagtcgaaga

SEQ ID NO: 119037 - DNA, 25 bp, Probe Sequence
caagaagttgagataagtcgaagag

SEQ ID NO: 119038 - DNA, 25 bp, Probe Sequence
aacaagaagttgagataagtcgaag

SEQ ID NO: 119039 - DNA, 25 bp, Probe Sequence
gaacaagaagttgagataagtcgaa

SEQ ID NO: 119040 - DNA, 25 bp, Probe Sequence
aggagtataaagttgtcacccatca

SEQ ID NO: 119041 - DNA, 25 bp, Probe Sequence
aagttgagataagtcgaagagtgac

SEQ ID NO: 119042 - DNA, 25 bp, Probe Sequence
ggagtataaagttgtcacccatcaa

SEQ ID NO: 119043 - DNA, 25 bp, Probe Sequence
aaaccgaacaagaagttgagataag

SEQ ID NO: 119044 - DNA, 25 bp, Probe Sequence
gagtataaagttgtcacccatcaat

SEQ ID NO: 119045 - DNA, 25 bp, Probe Sequence
ccgaacaagaagttgagataagtcg

SEQ ID NO: 119046 - DNA, 25 bp, Probe Sequence
agtataaagttgtcacccatcaata

SEQ ID NO: 119047 - DNA, 25 bp, Probe Sequence
cgaacaagaagttgagataagtcga

SEQ ID NO: 119048 - DNA, 25 bp, Probe Sequence
gtataaagttgtcacccatcaataa

SEQ ID NO: 119049 - DNA, 25 bp, Probe Sequence
aaaaccgaacaagaagttgagataa

SEQ ID NO: 119050 - DNA, 25 bp, Probe Sequence
agttgagataagtcgaagagtgact

SEQ ID NO: 119051 - DNA, 25 bp, Probe Sequence
tataaagttgtcacccatcaataaa

SEQ ID NO: 119052 - DNA, 25 bp, Probe Sequence
aaatgggctagaatgaaaaggggat

SEQ ID NO: 119053 - DNA, 25 bp, Probe Sequence
aaaatgggctagaatgaaaagggga

SEQ ID NO: 119054 - DNA, 25 bp, Probe Sequence
aatgggctagaatgaaaaggggatg

SEQ ID NO: 119055 - DNA, 25 bp, Probe Sequence
ataaagttgtcacccatcaataaaa

SEQ ID NO: 119056 - DNA, 25 bp, Probe Sequence
caaggactggtgatgagtagagacg

SEQ ID NO: 119057 - DNA, 25 bp, Probe Sequence
gcaaggactggtgatgagtagagac

SEQ ID NO: 119058 - DNA, 25 bp, Probe Sequence
tatggcaatgactcttaaaagttcg

SEQ ID NO: 119059 - DNA, 25 bp, Probe Sequence
cctatggcaatgactcttaaaagtt

SEQ ID NO: 119060 - DNA, 25 bp, Probe Sequence
ccctatggcaatgactcttaaaagt

SEQ ID NO: 119061 - DNA, 25 bp, Probe Sequence
ctatggcaatgactcttaaaagttc

SEQ ID NO: 119062 - DNA, 25 bp, Probe Sequence
aaggactggtgatgagtagagacgg

SEQ ID NO: 119063 - DNA, 25 bp, Probe Sequence
atggcaatgactcttaaaagttcga

SEQ ID NO: 119064 - DNA, 25 bp, Probe Sequence
gttatcaacgcaaggactggtgatg

SEQ ID NO: 119065 - DNA, 25 bp, Probe Sequence
aatgactcttaaaagttcgaggctc

SEQ ID NO: 119066 - DNA, 25 bp, Probe Sequence
ttatcaacgcaaggactggtgatga

SEQ ID NO: 119067 - DNA, 25 bp, Probe Sequence
caatgactcttaaaagttcgaggct

SEQ ID NO: 119068 - DNA, 25 bp, Probe Sequence
tggcaatgactcttaaaagttcgag

SEQ ID NO: 119069 - DNA, 25 bp, Probe Sequence
atgactcttaaaagttcgaggctca

SEQ ID NO: 119070 - DNA, 25 bp, Probe Sequence
tatcaacgcaaggactggtgatgag

SEQ ID NO: 119071 - DNA, 25 bp, Probe Sequence
ggcaatgactcttaaaagttcgagg

SEQ ID NO: 119072 - DNA, 25 bp, Probe Sequence
tgactcttaaaagttcgaggctcag

SEQ ID NO: 119073 - DNA, 25 bp, Probe Sequence
gcaatgactcttaaaagttcgaggc

SEQ ID NO: 119074 - DNA, 25 bp, Probe Sequence
cagccctatggcaatgactcttaaa

SEQ ID NO: 119075 - DNA, 25 bp, Probe Sequence
gactcttaaaagttcgaggctcagg

SEQ ID NO: 119076 - DNA, 25 bp, Probe Sequence
atgtttcatcaaggcaccacatcct

SEQ ID NO: 119077 - DNA, 25 bp, Probe Sequence
catgtttcatcaaggcaccacatcc

SEQ ID NO: 119078 - DNA, 25 bp, Probe Sequence
ccatgtttcatcaaggcaccacatc

SEQ ID NO: 119079 - DNA, 25 bp, Probe Sequence
gccctatggcaatgactcttaaaag

SEQ ID NO: 119080 - DNA, 25 bp, Probe Sequence
atgagatgtttatgactgctggaaa

SEQ ID NO: 119081 - DNA, 25 bp, Probe Sequence
gatgagatgtttatgactgctggaa

SEQ ID NO: 119082 - DNA, 25 bp, Probe Sequence
tgagatgtttatgactgctggaaag

SEQ ID NO: 119083 - DNA, 25 bp, Probe Sequence
tactaaagagcagaacttcctacag

SEQ ID NO: 119084 - DNA, 25 bp, Probe Sequence
caggcaataaatactaaagagcaga

SEQ ID NO: 119085 - DNA, 25 bp, Probe Sequence
tcaggcaataaatactaaagagcag

SEQ ID NO: 119086 - DNA, 25 bp, Probe Sequence
gattataagaacagagagctgcttg

SEQ ID NO: 119087 - DNA, 25 bp, Probe Sequence
ggattataagaacagagagctgctt

SEQ ID NO: 119088 - DNA, 25 bp, Probe Sequence
atactaaagagcagaacttcctaca

SEQ ID NO: 119089 - DNA, 25 bp, Probe Sequence
agatgtttatgactgctggaaagta

SEQ ID NO: 119090 - DNA, 25 bp, Probe Sequence
ttcaggcaataaatactaaagagca

SEQ ID NO: 119091 - DNA, 25 bp, Probe Sequence
gtttatgactgctggaaagtatgtg

SEQ ID NO: 119092 - DNA, 25 bp, Probe Sequence
tttatgactgctggaaagtatgtgt

SEQ ID NO: 119093 - DNA, 25 bp, Probe Sequence
tgtttatgactgctggaaagtatgt

SEQ ID NO: 119094 - DNA, 25 bp, Probe Sequence
atgtttatgactgctggaaagtatg

SEQ ID NO: 119095 - DNA, 25 bp, Probe Sequence
cgtctttagtcctggataaatacct

SEQ ID NO: 119096 - DNA, 25 bp, Probe Sequence
atttgtacttggtatcactaggagg

SEQ ID NO: 119097 - DNA, 25 bp, Probe Sequence
attataagaacagagagctgcttgc

SEQ ID NO: 119098 - DNA, 25 bp, Probe Sequence
ggcaataaatactaaagagcagaac

SEQ ID NO: 119099 - DNA, 25 bp, Probe Sequence
gatgtttatgactgctggaaagtat

SEQ ID NO: 119100 - DNA, 25 bp, Probe Sequence
agtcctggataaataccttacatca

SEQ ID NO: 119101 - DNA, 25 bp, Probe Sequence
gagatgtttatgactgctggaaagt

SEQ ID NO: 119102 - DNA, 25 bp, Probe Sequence
aggcaataaatactaaagagcagaa

SEQ ID NO: 119103 - DNA, 25 bp, Probe Sequence
aatactaaagagcagaacttcctac

SEQ ID NO: 119104 - DNA, 25 bp, Probe Sequence
cagagaatcggctatgtcttcatta

SEQ ID NO: 119105 - DNA, 25 bp, Probe Sequence
gagaatcggctatgtcttcattatg

SEQ ID NO: 119106 - DNA, 25 bp, Probe Sequence
agagaatcggctatgtcttcattat

SEQ ID NO: 119107 - DNA, 25 bp, Probe Sequence
atcggctatgtcttcattatgagag

SEQ ID NO: 119108 - DNA, 25 bp, Probe Sequence
tatgtcttcattatgagagcaggag

SEQ ID NO: 119109 - DNA, 25 bp, Probe Sequence
ctatgtcttcattatgagagcagga

SEQ ID NO: 119110 - DNA, 25 bp, Probe Sequence
aatcggctatgtcttcattatgaga

SEQ ID NO: 119111 - DNA, 25 bp, Probe Sequence
agaatcggctatgtcttcattatga

SEQ ID NO: 119112 - DNA, 25 bp, Probe Sequence
gaatcggctatgtcttcattatgag

SEQ ID NO: 119113 - DNA, 25 bp, Probe Sequence
atgtcttcattatgagagcaggaga

SEQ ID NO: 119114 - DNA, 25 bp, Probe Sequence
tcttcattatgagagcaggagagac

SEQ ID NO: 119115 - DNA, 25 bp, Probe Sequence
gtcttcattatgagagcaggagaga

SEQ ID NO: 119116 - DNA, 25 bp, Probe Sequence
cagagatatgttgctaggtgaatat

SEQ ID NO: 119117 - DNA, 25 bp, Probe Sequence
tgtcttcattatgagagcaggagag

SEQ ID NO: 119118 - DNA, 25 bp, Probe Sequence
tactcctcactcagaaacaagaaca

SEQ ID NO: 119119 - DNA, 25 bp, Probe Sequence
cttcattatgagagcaggagagacg

SEQ ID NO: 119120 - DNA, 25 bp, Probe Sequence
gcagagaatcggctatgtcttcatt

SEQ ID NO: 119121 - DNA, 25 bp, Probe Sequence
gtactcctcactcagaaacaagaac

SEQ ID NO: 119122 - DNA, 25 bp, Probe Sequence
ggaggacagacacaggagaaataaa

SEQ ID NO: 119123 - DNA, 25 bp, Probe Sequence
gctatgtcttcattatgagagcagg

SEQ ID NO: 119124 - DNA, 25 bp, Probe Sequence
ggctatgtcttcattatgagagcag

SEQ ID NO: 119125 - DNA, 25 bp, Probe Sequence
gcagagatatgttgctaggtgaata

SEQ ID NO: 119126 - DNA, 25 bp, Probe Sequence
agagatatgttgctaggtgaatata

SEQ ID NO: 119127 - DNA, 25 bp, Probe Sequence
actcctcactcagaaacaagaacag

SEQ ID NO: 119128 - DNA, 25 bp, Probe Sequence
ccaaccgtgataacctatactgata

SEQ ID NO: 119129 - DNA, 25 bp, Probe Sequence
accaaccgtgataacctatactgat

SEQ ID NO: 119130 - DNA, 25 bp, Probe Sequence
aaccgtgataacctatactgatagc

SEQ ID NO: 119131 - DNA, 25 bp, Probe Sequence
cgtgataacctatactgatagcctt

SEQ ID NO: 119132 - DNA, 25 bp, Probe Sequence
ccgtgataacctatactgatagcct

SEQ ID NO: 119133 - DNA, 25 bp, Probe Sequence
accgtgataacctatactgatagcc

SEQ ID NO: 119134 - DNA, 25 bp, Probe Sequence
aaggctggttattaatgactctaca

SEQ ID NO: 119135 - DNA, 25 bp, Probe Sequence
gcttatcctcatactgaatcatctt

SEQ ID NO: 119136 - DNA, 25 bp, Probe Sequence
gaaggctggttattaatgactctac

SEQ ID NO: 119137 - DNA, 25 bp, Probe Sequence
caaccgtgataacctatactgatag

SEQ ID NO: 119138 - DNA, 25 bp, Probe Sequence
ctagaaggctggttattaatgactc

SEQ ID NO: 119139 - DNA, 25 bp, Probe Sequence
agaaggctggttattaatgactcta

SEQ ID NO: 119140 - DNA, 25 bp, Probe Sequence
tagaaggctggttattaatgactct

SEQ ID NO: 119141 - DNA, 25 bp, Probe Sequence
gctggttattaatgactctacaggt

SEQ ID NO: 119142 - DNA, 25 bp, Probe Sequence
aggctggttattaatgactctacag

SEQ ID NO: 119143 - DNA, 25 bp, Probe Sequence
tatgcctccagtttaacagattgaa

SEQ ID NO: 119144 - DNA, 25 bp, Probe Sequence
caccaaccgtgataacctatactga

SEQ ID NO: 119145 - DNA, 25 bp, Probe Sequence
ggctggttattaatgactctacagg

SEQ ID NO: 119146 - DNA, 25 bp, Probe Sequence
gcctccagtttaacagattgaaata

SEQ ID NO: 119147 - DNA, 25 bp, Probe Sequence
gtatgcctccagtttaacagattga

SEQ ID NO: 119148 - DNA, 25 bp, Probe Sequence
gttcaaacttacagaaatgctcctt

SEQ ID NO: 119149 - DNA, 25 bp, Probe Sequence
cctagaaggctggttattaatgact

SEQ ID NO: 119150 - DNA, 25 bp, Probe Sequence
ggatatgtttaggtcattgtatgcc

SEQ ID NO: 119151 - DNA, 25 bp, Probe Sequence
gggatatgtttaggtcattgtatgc

SEQ ID NO: 119152 - DNA, 25 bp, Probe Sequence
ggaatgtcttcatctgggagtatta

SEQ ID NO: 119153 - DNA, 25 bp, Probe Sequence
gaatgtcttcatctgggagtattac

SEQ ID NO: 119154 - DNA, 25 bp, Probe Sequence
cacacacacgcacatagatgagatg

SEQ ID NO: 119155 - DNA, 25 bp, Probe Sequence
aatgtcttcatctgggagtattaca

SEQ ID NO: 119156 - DNA, 25 bp, Probe Sequence
gggaatgtcttcatctgggagtatt

SEQ ID NO: 119157 - DNA, 25 bp, Probe Sequence
atctgggagtattacagtgtctttg

SEQ ID NO: 119158 - DNA, 25 bp, Probe Sequence
catctgggagtattacagtgtcttt

SEQ ID NO: 119159 - DNA, 25 bp, Probe Sequence
cttcatctgggagtattacagtgtc

SEQ ID NO: 119160 - DNA, 25 bp, Probe Sequence
gtcttcatctgggagtattacagtg

SEQ ID NO: 119161 - DNA, 25 bp, Probe Sequence
atgtcttcatctgggagtattacag

SEQ ID NO: 119162 - DNA, 25 bp, Probe Sequence
tcatctgggagtattacagtgtctt

SEQ ID NO: 119163 - DNA, 25 bp, Probe Sequence
ttcatctgggagtattacagtgtct

SEQ ID NO: 119164 - DNA, 25 bp, Probe Sequence
tcttcatctgggagtattacagtgt

SEQ ID NO: 119165 - DNA, 25 bp, Probe Sequence
tgtcttcatctgggagtattacagt

SEQ ID NO: 119166 - DNA, 25 bp, Probe Sequence
ctgggagtattacagtgtctttgac

SEQ ID NO: 119167 - DNA, 25 bp, Probe Sequence
tctgggagtattacagtgtctttga

SEQ ID NO: 119168 - DNA, 25 bp, Probe Sequence
acacacacacgcacatagatgagat

SEQ ID NO: 119169 - DNA, 25 bp, Probe Sequence
gatacccatgactgcaagaatactg

SEQ ID NO: 119170 - DNA, 25 bp, Probe Sequence
gttcccaataaacaccgcatttctg

SEQ ID NO: 119171 - DNA, 25 bp, Probe Sequence
catagatgagatgtgcaggcagatg

SEQ ID NO: 119172 - DNA, 25 bp, Probe Sequence
aacacacacacgcacatagatgaga

SEQ ID NO: 119173 - DNA, 25 bp, Probe Sequence
ggatacccatgactgcaagaatact

SEQ ID NO: 119174 - DNA, 25 bp, Probe Sequence
aagaatactggcagttcactgtgga

SEQ ID NO: 119175 - DNA, 25 bp, Probe Sequence
caagaatactggcagttcactgtgg

SEQ ID NO: 119176 - DNA, 25 bp, Probe Sequence
aggagtataaagttgtcacccatcg

SEQ ID NO: 119177 - DNA, 25 bp, Probe Sequence
ggagtataaagttgtcacccatcga

SEQ ID NO: 119178 - DNA, 25 bp, Probe Sequence
gagtataaagttgtcacccatcgat

SEQ ID NO: 119179 - DNA, 25 bp, Probe Sequence
agtataaagttgtcacccatcgata

SEQ ID NO: 119180 - DNA, 25 bp, Probe Sequence
gtataaagttgtcacccatcgataa

SEQ ID NO: 119181 - DNA, 25 bp, Probe Sequence
tataaagttgtcacccatcgataaa

SEQ ID NO: 119182 - DNA, 25 bp, Probe Sequence
ataaagttgtcacccatcgataaaa

SEQ ID NO: 119183 - DNA, 25 bp, Probe Sequence
tgtgaaaatgaattttatcttcctt

SEQ ID NO: 119184 - DNA, 25 bp, Probe Sequence
ttgtgaaaatgaattttatcttcct

SEQ ID NO: 119185 - DNA, 25 bp, Probe Sequence
tttgtgaaaatgaattttatcttcc

SEQ ID NO: 119186 - DNA, 25 bp, Probe Sequence
tgtgccttatgccaataattcaatt

SEQ ID NO: 119187 - DNA, 25 bp, Probe Sequence
ttgtgccttatgccaataattcaat

SEQ ID NO: 119188 - DNA, 25 bp, Probe Sequence
cttatcaactcttgctcttctctcc

SEQ ID NO: 119189 - DNA, 25 bp, Probe Sequence
gcttatcaactcttgctcttctctc

SEQ ID NO: 119190 - DNA, 25 bp, Probe Sequence
ctgcttatcaactcttgctcttctc

SEQ ID NO: 119191 - DNA, 25 bp, Probe Sequence
tgcttatcaactcttgctcttctct

SEQ ID NO: 119192 - DNA, 25 bp, Probe Sequence
tctgcttatcaactcttgctcttct

SEQ ID NO: 119193 - DNA, 25 bp, Probe Sequence
gtctgcttatcaactcttgctcttc

SEQ ID NO: 119194 - DNA, 25 bp, Probe Sequence
agtctgcttatcaactcttgctctt

SEQ ID NO: 119195 - DNA, 25 bp, Probe Sequence
cagtctgcttatcaactcttgctct

SEQ ID NO: 119196 - DNA, 25 bp, Probe Sequence
attgtgccttatgccaataattcaa

SEQ ID NO: 119197 - DNA, 25 bp, Probe Sequence
cattgtgccttatgccaataattca

SEQ ID NO: 119198 - DNA, 25 bp, Probe Sequence
ccattgtgccttatgccaataattc

SEQ ID NO: 119199 - DNA, 25 bp, Probe Sequence
tttctttctgtcatttgctttgaag

SEQ ID NO: 119200 - DNA, 25 bp, Probe Sequence
ttatcaactcttgctcttctctccc

SEQ ID NO: 119201 - DNA, 25 bp, Probe Sequence
atatcaccaagctaaggttcctgaa

SEQ ID NO: 119202 - DNA, 25 bp, Probe Sequence
ccagtctgcttatcaactcttgctc

SEQ ID NO: 119203 - DNA, 25 bp, Probe Sequence
catgggtaagggctactatctcaag

SEQ ID NO: 119204 - DNA, 25 bp, Probe Sequence
catatcaccaagctaaggttcctga

SEQ ID NO: 119205 - DNA, 25 bp, Probe Sequence
atgggtaagggctactatctcaagg

SEQ ID NO: 119206 - DNA, 25 bp, Probe Sequence
caatggtgctgaaatgaagatcctg

SEQ ID NO: 119207 - DNA, 25 bp, Probe Sequence
taacctcctaaatattggtgggaag

SEQ ID NO: 119208 - DNA, 25 bp, Probe Sequence
gcaaacaccaataaagattgattca

SEQ ID NO: 119209 - DNA, 25 bp, Probe Sequence
ttaacctcctaaatattggtgggaa

SEQ ID NO: 119210 - DNA, 25 bp, Probe Sequence
atatacttcacacattgactcagca

SEQ ID NO: 119211 - DNA, 25 bp, Probe Sequence
tatacttcacacattgactcagcac

SEQ ID NO: 119212 - DNA, 25 bp, Probe Sequence
aatatacttcacacattgactcagc

SEQ ID NO: 119213 - DNA, 25 bp, Probe Sequence
attgaatctctaggactgcgtagta

SEQ ID NO: 119214 - DNA, 25 bp, Probe Sequence
ttgaatctctaggactgcgtagtaa

SEQ ID NO: 119215 - DNA, 25 bp, Probe Sequence
gtcagtggataagtctgtcatagta

SEQ ID NO: 119216 - DNA, 25 bp, Probe Sequence
aattgaatctctaggactgcgtagt

SEQ ID NO: 119217 - DNA, 25 bp, Probe Sequence
aagcacatgatcttggaattacctg

SEQ ID NO: 119218 - DNA, 25 bp, Probe Sequence
ggtcagtggataagtctgtcatagt

SEQ ID NO: 119219 - DNA, 25 bp, Probe Sequence
tacttgctactggttcaatggacaa

SEQ ID NO: 119220 - DNA, 25 bp, Probe Sequence
ttacttgctactggttcaatggaca

SEQ ID NO: 119221 - DNA, 25 bp, Probe Sequence
cacatgatcttggaattacctgctg

SEQ ID NO: 119222 - DNA, 25 bp, Probe Sequence
tcagtggataagtctgtcatagtat

SEQ ID NO: 119223 - DNA, 25 bp, Probe Sequence
agaatatacttcacacattgactca

SEQ ID NO: 119224 - DNA, 25 bp, Probe Sequence
tgagaatatacttcacacattgact

SEQ ID NO: 119225 - DNA, 25 bp, Probe Sequence
actgagaatatacttcacacattga

SEQ ID NO: 119226 - DNA, 25 bp, Probe Sequence
acttacaccaaataggactctgaaa

SEQ ID NO: 119227 - DNA, 25 bp, Probe Sequence
atacttcacacattgactcagcaca

SEQ ID NO: 119228 - DNA, 25 bp, Probe Sequence
gaatatacttcacacattgactcag

SEQ ID NO: 119229 - DNA, 25 bp, Probe Sequence
ctgagaatatacttcacacattgac

SEQ ID NO: 119230 - DNA, 25 bp, Probe Sequence
tagatgtggtagtgttaaagatggc

SEQ ID NO: 119231 - DNA, 25 bp, Probe Sequence
cttgttcttccttcagcggtactta

SEQ ID NO: 119232 - DNA, 25 bp, Probe Sequence
ggtgatttaacagtgtgggatgata

SEQ ID NO: 119233 - DNA, 25 bp, Probe Sequence
tacttacaccaaataggactctgaa

SEQ ID NO: 119234 - DNA, 25 bp, Probe Sequence
cgatgctgagtaatcatgtggtgtg

SEQ ID NO: 119235 - DNA, 25 bp, Probe Sequence
gatgctgagtaatcatgtggtgtgc

SEQ ID NO: 119236 - DNA, 25 bp, Probe Sequence
gtgtgtgtggtgtttgctcactaag

SEQ ID NO: 119237 - DNA, 25 bp, Probe Sequence
cagccaacgtttccagtttgagttc

SEQ ID NO: 119238 - DNA, 25 bp, Probe Sequence
accagagtaactacacttgcttatt

SEQ ID NO: 119239 - DNA, 25 bp, Probe Sequence
ccagagtaactacacttgcttattc

SEQ ID NO: 119240 - DNA, 25 bp, Probe Sequence
taccagagtaactacacttgcttat

SEQ ID NO: 119241 - DNA, 25 bp, Probe Sequence
gtaccagagtaactacacttgctta

SEQ ID NO: 119242 - DNA, 25 bp, Probe Sequence
cagagtaactacacttgcttattct

SEQ ID NO: 119243 - DNA, 25 bp, Probe Sequence
agagtaactacacttgcttattctt

SEQ ID NO: 119244 - DNA, 25 bp, Probe Sequence
ctgagaagaaaggttagagaagact

SEQ ID NO: 119245 - DNA, 25 bp, Probe Sequence
ctcttctcaaggctagttgtgacat

SEQ ID NO: 119246 - DNA, 25 bp, Probe Sequence
tcttctcaaggctagttgtgacatc

SEQ ID NO: 119247 - DNA, 25 bp, Probe Sequence
ggagagattaaagcctgtgaaatag

SEQ ID NO: 119248 - DNA, 25 bp, Probe Sequence
gagaaattaggaggcttggatattg

SEQ ID NO: 119249 - DNA, 25 bp, Probe Sequence
gtagagaaattaggaggcttggata

SEQ ID NO: 119250 - DNA, 25 bp, Probe Sequence
agtagagaaattaggaggcttggat

SEQ ID NO: 119251 - DNA, 25 bp, Probe Sequence
agagaaattaggaggcttggatatt

SEQ ID NO: 119252 - DNA, 25 bp, Probe Sequence
tctgagaagaaaggttagagaagac

SEQ ID NO: 119253 - DNA, 25 bp, Probe Sequence
agaaattaggaggcttggatattgc

SEQ ID NO: 119254 - DNA, 25 bp, Probe Sequence
aaaggttagagaagactagaaaggc

SEQ ID NO: 119255 - DNA, 25 bp, Probe Sequence
taagtagagaaattaggaggcttgg

SEQ ID NO: 119256 - DNA, 25 bp, Probe Sequence
aaggttagagaagactagaaaggct

SEQ ID NO: 119257 - DNA, 25 bp, Probe Sequence
aatgatctggaatgtgctatgcgat

SEQ ID NO: 119258 - DNA, 25 bp, Probe Sequence
aagtagagaaattaggaggcttgga

SEQ ID NO: 119259 - DNA, 25 bp, Probe Sequence
ggaatcaaactgacaagaaccaaat

SEQ ID NO: 119260 - DNA, 25 bp, Probe Sequence
atgaaggaatcaaactgacaagaac

SEQ ID NO: 119261 - DNA, 25 bp, Probe Sequence
tttcctggtatgctctactttgaca

SEQ ID NO: 119262 - DNA, 25 bp, Probe Sequence
gtgttggatatggaggaggatggag

SEQ ID NO: 119263 - DNA, 25 bp, Probe Sequence
acttgtcattgtgtttctcccagga

SEQ ID NO: 119264 - DNA, 25 bp, Probe Sequence
ggtgttggatatggaggaggatgga

SEQ ID NO: 119265 - DNA, 25 bp, Probe Sequence
cttgtcattgtgtttctcccaggac

SEQ ID NO: 119266 - DNA, 25 bp, Probe Sequence
cacttgtcattgtgtttctcccagg

SEQ ID NO: 119267 - DNA, 25 bp, Probe Sequence
gttgcacttgtcattgtgtttctcc

SEQ ID NO: 119268 - DNA, 25 bp, Probe Sequence
cgttgcacttgtcattgtgtttctc

SEQ ID NO: 119269 - DNA, 25 bp, Probe Sequence
gcacttgtcattgtgtttctcccag

SEQ ID NO: 119270 - DNA, 25 bp, Probe Sequence
ctctcacgttgctccaccaataaac

SEQ ID NO: 119271 - DNA, 25 bp, Probe Sequence
ttgtcattgtgtttctcccaggacc

SEQ ID NO: 119272 - DNA, 25 bp, Probe Sequence
ttgcacttgtcattgtgtttctccc

SEQ ID NO: 119273 - DNA, 25 bp, Probe Sequence
tgcacttgtcattgtgtttctccca

SEQ ID NO: 119274 - DNA, 25 bp, Probe Sequence
aaaagaaaagctctcacgttgctcc

SEQ ID NO: 119275 - DNA, 25 bp, Probe Sequence
tttagagtcttctccaatgtccaaa

SEQ ID NO: 119276 - DNA, 25 bp, Probe Sequence
ctttagagtcttctccaatgtccaa

SEQ ID NO: 119277 - DNA, 25 bp, Probe Sequence
tactttagagtcttctccaatgtcc

SEQ ID NO: 119278 - DNA, 25 bp, Probe Sequence
aaccttctacagagaatgtgacatg

SEQ ID NO: 119279 - DNA, 25 bp, Probe Sequence
actttagagtcttctccaatgtcca

SEQ ID NO: 119280 - DNA, 25 bp, Probe Sequence
ctactttagagtcttctccaatgtc

SEQ ID NO: 119281 - DNA, 25 bp, Probe Sequence
tctactttagagtcttctccaatgt

SEQ ID NO: 119282 - DNA, 25 bp, Probe Sequence
ggtatctactttagagtcttctcca

SEQ ID NO: 119283 - DNA, 25 bp, Probe Sequence
aggtatctactttagagtcttctcc

SEQ ID NO: 119284 - DNA, 25 bp, Probe Sequence
cttctacagagaatgtgacatgcag

SEQ ID NO: 119285 - DNA, 25 bp, Probe Sequence
accttctacagagaatgtgacatgc

SEQ ID NO: 119286 - DNA, 25 bp, Probe Sequence
ctgaaaccttctacagagaatgtga

SEQ ID NO: 119287 - DNA, 25 bp, Probe Sequence
gaaaccttctacagagaatgtgaca

SEQ ID NO: 119288 - DNA, 25 bp, Probe Sequence
tgaaaccttctacagagaatgtgac

SEQ ID NO: 119289 - DNA, 25 bp, Probe Sequence
ctcctgaaaccttctacagagaatg

SEQ ID NO: 119290 - DNA, 25 bp, Probe Sequence
aaaccttctacagagaatgtgacat

SEQ ID NO: 119291 - DNA, 25 bp, Probe Sequence
cctgaaaccttctacagagaatgtg

SEQ ID NO: 119292 - DNA, 25 bp, Probe Sequence
tcctgaaaccttctacagagaatgt

SEQ ID NO: 119293 - DNA, 25 bp, Probe Sequence
atctactttagagtcttctccaatg

SEQ ID NO: 119294 - DNA, 25 bp, Probe Sequence
cttgctcctgaaaccttctacagag

SEQ ID NO: 119295 - DNA, 25 bp, Probe Sequence
gaacctgagggtcattgaacatttg

SEQ ID NO: 119296 - DNA, 25 bp, Probe Sequence
tagagtcttctccaatgtccaaaag

SEQ ID NO: 119297 - DNA, 25 bp, Probe Sequence
ttagagtcttctccaatgtccaaaa

SEQ ID NO: 119298 - DNA, 25 bp, Probe Sequence
ttgctcctgaaaccttctacagaga

SEQ ID NO: 119299 - DNA, 25 bp, Probe Sequence
aagaagatactgaagaacatcactt

SEQ ID NO: 119300 - DNA, 25 bp, Probe Sequence
ggtggcattaaagaagatactgaag

SEQ ID NO: 119301 - DNA, 25 bp, Probe Sequence
tggtggcattaaagaagatactgaa

SEQ ID NO: 119302 - DNA, 25 bp, Probe Sequence
ttggtggcattaaagaagatactga

SEQ ID NO: 119303 - DNA, 25 bp, Probe Sequence
gttggtggcattaaagaagatactg

SEQ ID NO: 119304 - DNA, 25 bp, Probe Sequence
ttgttggtggcattaaagaagatac

SEQ ID NO: 119305 - DNA, 25 bp, Probe Sequence
tgttggtggcattaaagaagatact

SEQ ID NO: 119306 - DNA, 25 bp, Probe Sequence
atttgttggtggcattaaagaagat

SEQ ID NO: 119307 - DNA, 25 bp, Probe Sequence
gcttgtcattcagaaataccatact

SEQ ID NO: 119308 - DNA, 25 bp, Probe Sequence
tttgttggtggcattaaagaagata

SEQ ID NO: 119309 - DNA, 25 bp, Probe Sequence
acaactgtgaggttagaagtggttc

SEQ ID NO: 119310 - DNA, 25 bp, Probe Sequence
gtggcattaaagaagatactgaaga

SEQ ID NO: 119311 - DNA, 25 bp, Probe Sequence
agaagatactgaagaacatcactta

SEQ ID NO: 119312 - DNA, 25 bp, Probe Sequence
tgtctaagtcaaagtctcctaaaga

SEQ ID NO: 119313 - DNA, 25 bp, Probe Sequence
tctaagtcaaagtctcctaaagagc

SEQ ID NO: 119314 - DNA, 25 bp, Probe Sequence
ctaagtcaaagtctcctaaagagcc

SEQ ID NO: 119315 - DNA, 25 bp, Probe Sequence
taagtcaaagtctcctaaagagcct

SEQ ID NO: 119316 - DNA, 25 bp, Probe Sequence
tggcattaaagaagatactgaagaa

SEQ ID NO: 119317 - DNA, 25 bp, Probe Sequence
gtcatgtctaagtcaaagtctccta

SEQ ID NO: 119318 - DNA, 25 bp, Probe Sequence
atgtctaagtcaaagtctcctaaag

SEQ ID NO: 119319 - DNA, 25 bp, Probe Sequence
taatgagagatccaaacttcaagca

SEQ ID NO: 119320 - DNA, 25 bp, Probe Sequence
gtaatgagagatccaaacttcaagc

SEQ ID NO: 119321 - DNA, 25 bp, Probe Sequence
ggcattaaagaagatactgaagaac

SEQ ID NO: 119322 - DNA, 25 bp, Probe Sequence
tcatgtctaagtcaaagtctcctaa

SEQ ID NO: 119323 - DNA, 25 bp, Probe Sequence
ggactaagagggaagttgggagatg

SEQ ID NO: 119324 - DNA, 25 bp, Probe Sequence
aggactaagagggaagttgggagat

SEQ ID NO: 119325 - DNA, 25 bp, Probe Sequence
catcaggactaagagggaagttggg

SEQ ID NO: 119326 - DNA, 25 bp, Probe Sequence
atcaggactaagagggaagttggga

SEQ ID NO: 119327 - DNA, 25 bp, Probe Sequence
gactaagagggaagttgggagatgc

SEQ ID NO: 119328 - DNA, 25 bp, Probe Sequence
ccatcaggactaagagggaagttgg

SEQ ID NO: 119329 - DNA, 25 bp, Probe Sequence
caggactaagagggaagttgggaga

SEQ ID NO: 119330 - DNA, 25 bp, Probe Sequence
tcaggactaagagggaagttgggag

SEQ ID NO: 119331 - DNA, 25 bp, Probe Sequence
cccatcaggactaagagggaagttg

SEQ ID NO: 119332 - DNA, 25 bp, Probe Sequence
ccatttcactgacagcctcagagag

SEQ ID NO: 119333 - DNA, 25 bp, Probe Sequence
ctgatgaaaagactaggaagcacat

SEQ ID NO: 119334 - DNA, 25 bp, Probe Sequence
cctgatgaaaagactaggaagcaca

SEQ ID NO: 119335 - DNA, 25 bp, Probe Sequence
tcctgatgaaaagactaggaagcac

SEQ ID NO: 119336 - DNA, 25 bp, Probe Sequence
ccccttcctgatgaaaagactagga

SEQ ID NO: 119337 - DNA, 25 bp, Probe Sequence
tttcaataccagaagcacaggaacg

SEQ ID NO: 119338 - DNA, 25 bp, Probe Sequence
ttttcaataccagaagcacaggaac

SEQ ID NO: 119339 - DNA, 25 bp, Probe Sequence
ttcaataccagaagcacaggaacgg

SEQ ID NO: 119340 - DNA, 25 bp, Probe Sequence
atgaacacctttggagacatgacca

SEQ ID NO: 119341 - DNA, 25 bp, Probe Sequence
acctttggagacatgaccactgaag

SEQ ID NO: 119342 - DNA, 25 bp, Probe Sequence
cacctttggagacatgaccactgaa

SEQ ID NO: 119343 - DNA, 25 bp, Probe Sequence
gaacacctttggagacatgaccact

SEQ ID NO: 119344 - DNA, 25 bp, Probe Sequence
catgaacacctttggagacatgacc

SEQ ID NO: 119345 - DNA, 25 bp, Probe Sequence
ccatgaacacctttggagacatgac

SEQ ID NO: 119346 - DNA, 25 bp, Probe Sequence
aacacctttggagacatgaccactg

SEQ ID NO: 119347 - DNA, 25 bp, Probe Sequence
tgaacacctttggagacatgaccac

SEQ ID NO: 119348 - DNA, 25 bp, Probe Sequence
cacctatattatgagagcaagcaac

SEQ ID NO: 119349 - DNA, 25 bp, Probe Sequence
ccacctatattatgagagcaagcaa

SEQ ID NO: 119350 - DNA, 25 bp, Probe Sequence
ctatattatgagagcaagcaacggt

SEQ ID NO: 119351 - DNA, 25 bp, Probe Sequence
acctatattatgagagcaagcaacg

SEQ ID NO: 119352 - DNA, 25 bp, Probe Sequence
tatattatgagagcaagcaacggtg

SEQ ID NO: 119353 - DNA, 25 bp, Probe Sequence
tccacctatattatgagagcaagca

SEQ ID NO: 119354 - DNA, 25 bp, Probe Sequence
cctatattatgagagcaagcaacgg

SEQ ID NO: 119355 - DNA, 25 bp, Probe Sequence
tgaagaaggtctcatacagagtcta

SEQ ID NO: 119356 - DNA, 25 bp, Probe Sequence
cctccacctatattatgagagcaag

SEQ ID NO: 119357 - DNA, 25 bp, Probe Sequence
ttgaagaaggtctcatacagagtct

SEQ ID NO: 119358 - DNA, 25 bp, Probe Sequence
ctccacctatattatgagagcaagc

SEQ ID NO: 119359 - DNA, 25 bp, Probe Sequence
gaagaaggtctcatacagagtctaa

SEQ ID NO: 119360 - DNA, 25 bp, Probe Sequence
acatcacctaattaagagtctggaa

SEQ ID NO: 119361 - DNA, 25 bp, Probe Sequence
aacatcacctaattaagagtctgga

SEQ ID NO: 119362 - DNA, 25 bp, Probe Sequence
aagcctccacctatattatgagagc

SEQ ID NO: 119363 - DNA, 25 bp, Probe Sequence
gcctccacctatattatgagagcaa

SEQ ID NO: 119364 - DNA, 25 bp, Probe Sequence
atattatgagagcaagcaacggtgt

SEQ ID NO: 119365 - DNA, 25 bp, Probe Sequence
cattgattcaggttgcagttactta

SEQ ID NO: 119366 - DNA, 25 bp, Probe Sequence
atgttgagtcttgtcaccacagtta

SEQ ID NO: 119367 - DNA, 25 bp, Probe Sequence
agcctccacctatattatgagagca

SEQ ID NO: 119368 - DNA, 25 bp, Probe Sequence
tagatgttgagtcttgtcaccacag

SEQ ID NO: 119369 - DNA, 25 bp, Probe Sequence
ttgattcaggttgcagttacttaac

SEQ ID NO: 119370 - DNA, 25 bp, Probe Sequence
attgattcaggttgcagttacttaa

SEQ ID NO: 119371 - DNA, 25 bp, Probe Sequence
gcgatgtagaaaggaagaaggaaat

SEQ ID NO: 119372 - DNA, 25 bp, Probe Sequence
gtgtggatgtagaagagaatctgac

SEQ ID NO: 119373 - DNA, 25 bp, Probe Sequence
agtgtggatgtagaagagaatctga

SEQ ID NO: 119374 - DNA, 25 bp, Probe Sequence
ctccatcttcatcacacaactcatc

SEQ ID NO: 119375 - DNA, 25 bp, Probe Sequence
agagaagaccagtatgactcaagtt

SEQ ID NO: 119376 - DNA, 25 bp, Probe Sequence
aagagaagaccagtatgactcaagt

SEQ ID NO: 119377 - DNA, 25 bp, Probe Sequence
gtggatgtagaagagaatctgacag

SEQ ID NO: 119378 - DNA, 25 bp, Probe Sequence
tgtggatgtagaagagaatctgaca

SEQ ID NO: 119379 - DNA, 25 bp, Probe Sequence
acagtgtggatgtagaagagaatct

SEQ ID NO: 119380 - DNA, 25 bp, Probe Sequence
cagtgtggatgtagaagagaatctg

SEQ ID NO: 119381 - DNA, 25 bp, Probe Sequence
tggatgtagaagagaatctgacagc

SEQ ID NO: 119382 - DNA, 25 bp, Probe Sequence
tagtatataacgtgtccaggagaga

SEQ ID NO: 119383 - DNA, 25 bp, Probe Sequence
atcttcatcacacaactcatcgcat

SEQ ID NO: 119384 - DNA, 25 bp, Probe Sequence
tccatcttcatcacacaactcatcg

SEQ ID NO: 119385 - DNA, 25 bp, Probe Sequence
tttggaggagaagggacatagtata

SEQ ID NO: 119386 - DNA, 25 bp, Probe Sequence
agacaaacaagaaggaatgagaaga

SEQ ID NO: 119387 - DNA, 25 bp, Probe Sequence
ttggaggagaagggacatagtatat

SEQ ID NO: 119388 - DNA, 25 bp, Probe Sequence
gagacaaccttggagagacatgaat

SEQ ID NO: 119389 - DNA, 25 bp, Probe Sequence
gacaaacaagaaggaatgagaagat

SEQ ID NO: 119390 - DNA, 25 bp, Probe Sequence
catagtatataacgtgtccaggaga

SEQ ID NO: 119391 - DNA, 25 bp, Probe Sequence
gttacagtgtggatgtagaagagaa

SEQ ID NO: 119392 - DNA, 25 bp, Probe Sequence
atagtatataacgtgtccaggagag

SEQ ID NO: 119393 - DNA, 25 bp, Probe Sequence
tacagtgtggatgtagaagagaatc

SEQ ID NO: 119394 - DNA, 25 bp, Probe Sequence
ggatgtagaagagaatctgacagcc

SEQ ID NO: 119395 - DNA, 25 bp, Probe Sequence
gtttggaggagaagggacatagtat

SEQ ID NO: 119396 - DNA, 25 bp, Probe Sequence
ttgactatctgactccaaggaatgg

SEQ ID NO: 119397 - DNA, 25 bp, Probe Sequence
aaagtttgactatctgactccaagg

SEQ ID NO: 119398 - DNA, 25 bp, Probe Sequence
tttgactatctgactccaaggaatg

SEQ ID NO: 119399 - DNA, 25 bp, Probe Sequence
gtttgactatctgactccaaggaat

SEQ ID NO: 119400 - DNA, 25 bp, Probe Sequence
acaaagtttgactatctgactccaa

SEQ ID NO: 119401 - DNA, 25 bp, Probe Sequence
agtttgactatctgactccaaggaa

SEQ ID NO: 119402 - DNA, 25 bp, Probe Sequence
aagtttgactatctgactccaagga

SEQ ID NO: 119403 - DNA, 25 bp, Probe Sequence
gcaaatacctggctctcattataag

SEQ ID NO: 119404 - DNA, 25 bp, Probe Sequence
caaagtttgactatctgactccaag

SEQ ID NO: 119405 - DNA, 25 bp, Probe Sequence
aatacctggctctcattataagcaa

SEQ ID NO: 119406 - DNA, 25 bp, Probe Sequence
tacaaagtttgactatctgactcca

SEQ ID NO: 119407 - DNA, 25 bp, Probe Sequence
cctggctctcattataagcaataca

SEQ ID NO: 119408 - DNA, 25 bp, Probe Sequence
acctggctctcattataagcaatac

SEQ ID NO: 119409 - DNA, 25 bp, Probe Sequence
atacctggctctcattataagcaat

SEQ ID NO: 119410 - DNA, 25 bp, Probe Sequence
tacctggctctcattataagcaata

SEQ ID NO: 119411 - DNA, 25 bp, Probe Sequence
cccatacttgatattagatgtgtga

SEQ ID NO: 119412 - DNA, 25 bp, Probe Sequence
ctggctctcattataagcaatacaa

SEQ ID NO: 119413 - DNA, 25 bp, Probe Sequence
gcaatacaaagtttgactatctgac

SEQ ID NO: 119414 - DNA, 25 bp, Probe Sequence
agcaatacaaagtttgactatctga

SEQ ID NO: 119415 - DNA, 25 bp, Probe Sequence
ccatacttgatattagatgtgtgat

SEQ ID NO: 119416 - DNA, 25 bp, Probe Sequence
atacaaagtttgactatctgactcc

SEQ ID NO: 119417 - DNA, 25 bp, Probe Sequence
tgcaaatacctggctctcattataa

SEQ ID NO: 119418 - DNA, 25 bp, Probe Sequence
ctgcaaatacctggctctcattata

SEQ ID NO: 119419 - DNA, 25 bp, Probe Sequence
aagcaatacaaagtttgactatctg

SEQ ID NO: 119420 - DNA, 25 bp, Probe Sequence
aaatcagcagtatggtctctttcag

SEQ ID NO: 119421 - DNA, 25 bp, Probe Sequence
gaaatgactacagagttggaggtat

SEQ ID NO: 119422 - DNA, 25 bp, Probe Sequence
atgagggttaatcacatagtccaaa

SEQ ID NO: 119423 - DNA, 25 bp, Probe Sequence
cgtttctatctcttcccagtacatt

SEQ ID NO: 119424 - DNA, 25 bp, Probe Sequence
aatgactacagagttggaggtattt

SEQ ID NO: 119425 - DNA, 25 bp, Probe Sequence
aaatgactacagagttggaggtatt

SEQ ID NO: 119426 - DNA, 25 bp, Probe Sequence
catttgtgggaagaaatactctgag

SEQ ID NO: 119427 - DNA, 25 bp, Probe Sequence
cagtatggtctctttcaggaaatga

SEQ ID NO: 119428 - DNA, 25 bp, Probe Sequence
ctttcaggaaatgactacagagttg

SEQ ID NO: 119429 - DNA, 25 bp, Probe Sequence
tctttcaggaaatgactacagagtt

SEQ ID NO: 119430 - DNA, 25 bp, Probe Sequence
ttcaggaaatgactacagagttgga

SEQ ID NO: 119431 - DNA, 25 bp, Probe Sequence
tttcaggaaatgactacagagttgg

SEQ ID NO: 119432 - DNA, 25 bp, Probe Sequence
gcagtatggtctctttcaggaaatg

SEQ ID NO: 119433 - DNA, 25 bp, Probe Sequence
atttgtgggaagaaatactctgagc

SEQ ID NO: 119434 - DNA, 25 bp, Probe Sequence
ggaaatgactacagagttggaggta

SEQ ID NO: 119435 - DNA, 25 bp, Probe Sequence
caagtcccagatgtattacaactca

SEQ ID NO: 119436 - DNA, 25 bp, Probe Sequence
aagtcccagatgtattacaactcaa

SEQ ID NO: 119437 - DNA, 25 bp, Probe Sequence
agcagtatggtctctttcaggaaat

SEQ ID NO: 119438 - DNA, 25 bp, Probe Sequence
gtcccagatgtattacaactcaatg

SEQ ID NO: 119439 - DNA, 25 bp, Probe Sequence
tcccagatgtattacaactcaatga

SEQ ID NO: 119440 - DNA, 25 bp, Probe Sequence
agtcccagatgtattacaactcaat

SEQ ID NO: 119441 - DNA, 25 bp, Probe Sequence
tcaggaaatgactacagagttggag

SEQ ID NO: 119442 - DNA, 25 bp, Probe Sequence
gtctctttcaggaaatgactacaga

SEQ ID NO: 119443 - DNA, 25 bp, Probe Sequence
atggtctctttcaggaaatgactac

SEQ ID NO: 119444 - DNA, 25 bp, Probe Sequence
tcagagtttcaaagaccacgttaag

SEQ ID NO: 119445 - DNA, 25 bp, Probe Sequence
ctcagagtttcaaagaccacgttaa

SEQ ID NO: 119446 - DNA, 25 bp, Probe Sequence
aaacaaatcaaaggagctggagaac

SEQ ID NO: 119447 - DNA, 25 bp, Probe Sequence
tccaaaacattctgaaaagccaaat

SEQ ID NO: 119448 - DNA, 25 bp, Probe Sequence
gacttctgattccaaaacattctga

SEQ ID NO: 119449 - DNA, 25 bp, Probe Sequence
attccaaaacattctgaaaagccaa

SEQ ID NO: 119450 - DNA, 25 bp, Probe Sequence
ctgattccaaaacattctgaaaagc

SEQ ID NO: 119451 - DNA, 25 bp, Probe Sequence
gtaaaggtctttgttgctgttgctg

SEQ ID NO: 119452 - DNA, 25 bp, Probe Sequence
ctgtaaaggtctttgttgctgttgc

SEQ ID NO: 119453 - DNA, 25 bp, Probe Sequence
gctgtaaaggtctttgttgctgttg

SEQ ID NO: 119454 - DNA, 25 bp, Probe Sequence
ttccaaaacattctgaaaagccaaa

SEQ ID NO: 119455 - DNA, 25 bp, Probe Sequence
gattccaaaacattctgaaaagcca

SEQ ID NO: 119456 - DNA, 25 bp, Probe Sequence
tgattccaaaacattctgaaaagcc

SEQ ID NO: 119457 - DNA, 25 bp, Probe Sequence
tatcaccagccctatgcttcattaa

SEQ ID NO: 119458 - DNA, 25 bp, Probe Sequence
agacttctgattccaaaacattctg

SEQ ID NO: 119459 - DNA, 25 bp, Probe Sequence
acttctgattccaaaacattctgaa

SEQ ID NO: 119460 - DNA, 25 bp, Probe Sequence
aacaaatcaaaggagctggagaaca

SEQ ID NO: 119461 - DNA, 25 bp, Probe Sequence
cagagtttcaaagaccacgttaagc

SEQ ID NO: 119462 - DNA, 25 bp, Probe Sequence
gagctggagaacagacttctgattc

SEQ ID NO: 119463 - DNA, 25 bp, Probe Sequence
tgtaaaggtctttgttgctgttgct

SEQ ID NO: 119464 - DNA, 25 bp, Probe Sequence
cagcagatgcaaagagaatgaacag

SEQ ID NO: 119465 - DNA, 25 bp, Probe Sequence
gacagcagatgcaaagagaatgaac

SEQ ID NO: 119466 - DNA, 25 bp, Probe Sequence
gtatcaccagccctatgcttcatta

SEQ ID NO: 119467 - DNA, 25 bp, Probe Sequence
ttgttgctgttgctgccatgttaat

SEQ ID NO: 119468 - DNA, 25 bp, Probe Sequence
actggattatagaggaagactggaa

SEQ ID NO: 119469 - DNA, 25 bp, Probe Sequence
tactggattatagaggaagactgga

SEQ ID NO: 119470 - DNA, 25 bp, Probe Sequence
ggattatagaggaagactggaatgt

SEQ ID NO: 119471 - DNA, 25 bp, Probe Sequence
tggattatagaggaagactggaatg

SEQ ID NO: 119472 - DNA, 25 bp, Probe Sequence
ctactggattatagaggaagactgg

SEQ ID NO: 119473 - DNA, 25 bp, Probe Sequence
ctggattatagaggaagactggaat

SEQ ID NO: 119474 - DNA, 25 bp, Probe Sequence
tgtgtgtcaagactcagttctaatt

SEQ ID NO: 119475 - DNA, 25 bp, Probe Sequence
ttatagaggaagactggaatgttct

SEQ ID NO: 119476 - DNA, 25 bp, Probe Sequence
gattatagaggaagactggaatgtt

SEQ ID NO: 119477 - DNA, 25 bp, Probe Sequence
ctgtgtgtcaagactcagttctaat

SEQ ID NO: 119478 - DNA, 25 bp, Probe Sequence
attatagaggaagactggaatgttc

SEQ ID NO: 119479 - DNA, 25 bp, Probe Sequence
acggtatctactggattatagagga

SEQ ID NO: 119480 - DNA, 25 bp, Probe Sequence
cacggtatctactggattatagagg

SEQ ID NO: 119481 - DNA, 25 bp, Probe Sequence
caccacggtatctactggattatag

SEQ ID NO: 119482 - DNA, 25 bp, Probe Sequence
accacggtatctactggattataga

SEQ ID NO: 119483 - DNA, 25 bp, Probe Sequence
acaccacggtatctactggattata

SEQ ID NO: 119484 - DNA, 25 bp, Probe Sequence
ccacggtatctactggattatagag

SEQ ID NO: 119485 - DNA, 25 bp, Probe Sequence
gtgtgtcaagactcagttctaatta

SEQ ID NO: 119486 - DNA, 25 bp, Probe Sequence
agaaagacacagtaagagaaagacg

SEQ ID NO: 119487 - DNA, 25 bp, Probe Sequence
cggtatctactggattatagaggaa

SEQ ID NO: 119488 - DNA, 25 bp, Probe Sequence
ttgtgaggatgttcttctgaccaag

SEQ ID NO: 119489 - DNA, 25 bp, Probe Sequence
cttgtgaggatgttcttctgaccaa

SEQ ID NO: 119490 - DNA, 25 bp, Probe Sequence
tctactggattatagaggaagactg

SEQ ID NO: 119491 - DNA, 25 bp, Probe Sequence
tatcttgatatccagtgctgcttac

SEQ ID NO: 119492 - DNA, 25 bp, Probe Sequence
gcaggaggtattctagttccaatat

SEQ ID NO: 119493 - DNA, 25 bp, Probe Sequence
tatcttcttatctcatgttgcagga

SEQ ID NO: 119494 - DNA, 25 bp, Probe Sequence
tggaaacaatggaataacttacctg

SEQ ID NO: 119495 - DNA, 25 bp, Probe Sequence
gtggaaacaatggaataacttacct

SEQ ID NO: 119496 - DNA, 25 bp, Probe Sequence
aacagtgcatctcttatctcaagtt

SEQ ID NO: 119497 - DNA, 25 bp, Probe Sequence
caacagtgcatctcttatctcaagt

SEQ ID NO: 119498 - DNA, 25 bp, Probe Sequence
catgttgcaggaggtattctagttc

SEQ ID NO: 119499 - DNA, 25 bp, Probe Sequence
tcatgttgcaggaggtattctagtt

SEQ ID NO: 119500 - DNA, 25 bp, Probe Sequence
atatcttcttatctcatgttgcagg

SEQ ID NO: 119501 - DNA, 25 bp, Probe Sequence
ttatctcatgttgcaggaggtattc

SEQ ID NO: 119502 - DNA, 25 bp, Probe Sequence
cttatctcatgttgcaggaggtatt

SEQ ID NO: 119503 - DNA, 25 bp, Probe Sequence
atcttcttatctcatgttgcaggag

SEQ ID NO: 119504 - DNA, 25 bp, Probe Sequence
atctcatgttgcaggaggtattcta

SEQ ID NO: 119505 - DNA, 25 bp, Probe Sequence
tatctcatgttgcaggaggtattct

SEQ ID NO: 119506 - DNA, 25 bp, Probe Sequence
tcttatctcatgttgcaggaggtat

SEQ ID NO: 119507 - DNA, 25 bp, Probe Sequence
ttcttatctcatgttgcaggaggta

SEQ ID NO: 119508 - DNA, 25 bp, Probe Sequence
ggcttgtaggatatataattccaca

SEQ ID NO: 119509 - DNA, 25 bp, Probe Sequence
tgtggaaacaatggaataacttacc

SEQ ID NO: 119510 - DNA, 25 bp, Probe Sequence
aaccttgacctatgatggaaatagt

SEQ ID NO: 119511 - DNA, 25 bp, Probe Sequence
ggaaacaatggaataacttacctgt

SEQ ID NO: 119512 - DNA, 25 bp, Probe Sequence
accttgacctatgatggaaatagtc

SEQ ID NO: 119513 - DNA, 25 bp, Probe Sequence
tcaaattgtctttagttggacttgc

SEQ ID NO: 119514 - DNA, 25 bp, Probe Sequence
tctcatgttgcaggaggtattctag

SEQ ID NO: 119515 - DNA, 25 bp, Probe Sequence
tgcaggaggtattctagttccaata

SEQ ID NO: 119516 - DNA, 25 bp, Probe Sequence
ctcctggaatgtctgatggaaattc

SEQ ID NO: 119517 - DNA, 25 bp, Probe Sequence
aatgtctgatggaaattcctcctaa

SEQ ID NO: 119518 - DNA, 25 bp, Probe Sequence
gaatgtctgatggaaattcctccta

SEQ ID NO: 119519 - DNA, 25 bp, Probe Sequence
cctcctggaatgtctgatggaaatt

SEQ ID NO: 119520 - DNA, 25 bp, Probe Sequence
ccctcctggaatgtctgatggaaat

SEQ ID NO: 119521 - DNA, 25 bp, Probe Sequence
tcaccaacatactcaacttagaagc

SEQ ID NO: 119522 - DNA, 25 bp, Probe Sequence
ctcaccaacatactcaacttagaag

SEQ ID NO: 119523 - DNA, 25 bp, Probe Sequence
caggatgctctgtaatggagatatg

SEQ ID NO: 119524 - DNA, 25 bp, Probe Sequence
accaacatactcaacttagaagctg

SEQ ID NO: 119525 - DNA, 25 bp, Probe Sequence
caccaacatactcaacttagaagct

SEQ ID NO: 119526 - DNA, 25 bp, Probe Sequence
aggatgctctgtaatggagatatgc

SEQ ID NO: 119527 - DNA, 25 bp, Probe Sequence
acatactcaacttagaagctgactt

SEQ ID NO: 119528 - DNA, 25 bp, Probe Sequence
aacatactcaacttagaagctgact

SEQ ID NO: 119529 - DNA, 25 bp, Probe Sequence
caacatactcaacttagaagctgac

SEQ ID NO: 119530 - DNA, 25 bp, Probe Sequence
ccaacatactcaacttagaagctga

SEQ ID NO: 119531 - DNA, 25 bp, Probe Sequence
gagataactccttcagtcatctgtg

SEQ ID NO: 119532 - DNA, 25 bp, Probe Sequence
agataactccttcagtcatctgtga

SEQ ID NO: 119533 - DNA, 25 bp, Probe Sequence
tatgccaaatgaaattgaagaggag

SEQ ID NO: 119534 - DNA, 25 bp, Probe Sequence
atgctctgtaatggagatatgccaa

SEQ ID NO: 119535 - DNA, 25 bp, Probe Sequence
aagaagtttatcagggaacactctc

SEQ ID NO: 119536 - DNA, 25 bp, Probe Sequence
caagaagtttatcagggaacactct

SEQ ID NO: 119537 - DNA, 25 bp, Probe Sequence
ggatgctctgtaatggagatatgcc

SEQ ID NO: 119538 - DNA, 25 bp, Probe Sequence
gaagtttatcagggaacactctcag

SEQ ID NO: 119539 - DNA, 25 bp, Probe Sequence
ttcagtagcttgtagttcaggttcc

SEQ ID NO: 119540 - DNA, 25 bp, Probe Sequence
atatgccaaatgaaattgaagagga

SEQ ID NO: 119541 - DNA, 25 bp, Probe Sequence
agaagtttatcagggaacactctca

SEQ ID NO: 119542 - DNA, 25 bp, Probe Sequence
gatatgccaaatgaaattgaagagg

SEQ ID NO: 119543 - DNA, 25 bp, Probe Sequence
ggagatatgccaaatgaaattgaag

SEQ ID NO: 119544 - DNA, 25 bp, Probe Sequence
tttatcagggaacactctcaggaac

SEQ ID NO: 119545 - DNA, 25 bp, Probe Sequence
ttctgtcacctacaatgcgtacatc

SEQ ID NO: 119546 - DNA, 25 bp, Probe Sequence
cttctgtcacctacaatgcgtacat

SEQ ID NO: 119547 - DNA, 25 bp, Probe Sequence
cacaggtcaccatcttaaacaacac

SEQ ID NO: 119548 - DNA, 25 bp, Probe Sequence
ctagccgtagtatgatctgggattc

SEQ ID NO: 119549 - DNA, 25 bp, Probe Sequence
tctagccgtagtatgatctgggatt

SEQ ID NO: 119550 - DNA, 25 bp, Probe Sequence
ctcttctgtcacctacaatgcgtac

SEQ ID NO: 119551 - DNA, 25 bp, Probe Sequence
atggactgtggtatcaggttggaat

SEQ ID NO: 119552 - DNA, 25 bp, Probe Sequence
gtagtatgatctgggattccatgtt

SEQ ID NO: 119553 - DNA, 25 bp, Probe Sequence
ctctagccgtagtatgatctgggat

SEQ ID NO: 119554 - DNA, 25 bp, Probe Sequence
tagtatgatctgggattccatgttt

SEQ ID NO: 119555 - DNA, 25 bp, Probe Sequence
aagcacaggtcaccatcttaaacaa

SEQ ID NO: 119556 - DNA, 25 bp, Probe Sequence
tgacaaggatggactgtggtatcag

SEQ ID NO: 119557 - DNA, 25 bp, Probe Sequence
catcgagtcttccaccttcaacttc

SEQ ID NO: 119558 - DNA, 25 bp, Probe Sequence
tcttctgtcacctacaatgcgtaca

SEQ ID NO: 119559 - DNA, 25 bp, Probe Sequence
aaggatggactgtggtatcaggttg

SEQ ID NO: 119560 - DNA, 25 bp, Probe Sequence
caaggatggactgtggtatcaggtt

SEQ ID NO: 119561 - DNA, 25 bp, Probe Sequence
gtgacaaggatggactgtggtatca

SEQ ID NO: 119562 - DNA, 25 bp, Probe Sequence
tgtgacaaggatggactgtggtatc

SEQ ID NO: 119563 - DNA, 25 bp, Probe Sequence
ctgtgacaaggatggactgtggtat

SEQ ID NO: 119564 - DNA, 25 bp, Probe Sequence
cgtagtatgatctgggattccatgt

SEQ ID NO: 119565 - DNA, 25 bp, Probe Sequence
cctcttctgtcacctacaatgcgta

SEQ ID NO: 119566 - DNA, 25 bp, Probe Sequence
tagccgtagtatgatctgggattcc

SEQ ID NO: 119567 - DNA, 25 bp, Probe Sequence
gaagcacaggtcaccatcttaaaca

SEQ ID NO: 119568 - DNA, 25 bp, Probe Sequence
caccaacatcagtgtgtacttccac

SEQ ID NO: 119569 - DNA, 25 bp, Probe Sequence
ctcagagtacagcaagtggaagttc

SEQ ID NO: 119570 - DNA, 25 bp, Probe Sequence
caaagaatgaaccaggaatggaaac

SEQ ID NO: 119571 - DNA, 25 bp, Probe Sequence
tcagagtacagcaagtggaagttca

SEQ ID NO: 119572 - DNA, 25 bp, Probe Sequence
ctgagacccaatgagaatcaacact

SEQ ID NO: 119573 - DNA, 25 bp, Probe Sequence
aaagaatgaaccaggaatggaaacc

SEQ ID NO: 119574 - DNA, 25 bp, Probe Sequence
ccaaagaatgaaccaggaatggaaa

SEQ ID NO: 119575 - DNA, 25 bp, Probe Sequence
tgagacccaatgagaatcaacactg

SEQ ID NO: 119576 - DNA, 25 bp, Probe Sequence
cagagtacagcaagtggaagttcac

SEQ ID NO: 119577 - DNA, 25 bp, Probe Sequence
cctcagagtacagcaagtggaagtt

SEQ ID NO: 119578 - DNA, 25 bp, Probe Sequence
aagaatgaaccaggaatggaaacca

SEQ ID NO: 119579 - DNA, 25 bp, Probe Sequence
cctgagacccaatgagaatcaacac

SEQ ID NO: 119580 - DNA, 25 bp, Probe Sequence
cacctgagacccaatgagaatcaac

SEQ ID NO: 119581 - DNA, 25 bp, Probe Sequence
gaagtcctcagagtacagcaagtgg

SEQ ID NO: 119582 - DNA, 25 bp, Probe Sequence
ggaagtcctcagagtacagcaagtg

SEQ ID NO: 119583 - DNA, 25 bp, Probe Sequence
acctgagacccaatgagaatcaaca

SEQ ID NO: 119584 - DNA, 25 bp, Probe Sequence
gagacccaatgagaatcaacactgc

SEQ ID NO: 119585 - DNA, 25 bp, Probe Sequence
gtacagcaagtggaagttcaccaac

SEQ ID NO: 119586 - DNA, 25 bp, Probe Sequence
agtacagcaagtggaagttcaccaa

SEQ ID NO: 119587 - DNA, 25 bp, Probe Sequence
agagtacagcaagtggaagttcacc

SEQ ID NO: 119588 - DNA, 25 bp, Probe Sequence
ccctccaaagaatgaaccaggaatg

SEQ ID NO: 119589 - DNA, 25 bp, Probe Sequence
cctccaaagaatgaaccaggaatgg

SEQ ID NO: 119590 - DNA, 25 bp, Probe Sequence
tacagcaagtggaagttcaccaaca

SEQ ID NO: 119591 - DNA, 25 bp, Probe Sequence
gtcctcagagtacagcaagtggaag

SEQ ID NO: 119592 - DNA, 25 bp, Probe Sequence
accctccaaagaatgaaccaggaat

SEQ ID NO: 119593 - DNA, 25 bp, Probe Sequence
taggacaacttatgactcagctctt

SEQ ID NO: 119594 - DNA, 25 bp, Probe Sequence
ttaggacaacttatgactcagctct

SEQ ID NO: 119595 - DNA, 25 bp, Probe Sequence
cttattcagaagtacctagttgctg

SEQ ID NO: 119596 - DNA, 25 bp, Probe Sequence
gggctatttaggacaacttatgact

SEQ ID NO: 119597 - DNA, 25 bp, Probe Sequence
agggctatttaggacaacttatgac

SEQ ID NO: 119598 - DNA, 25 bp, Probe Sequence
gagggctatttaggacaacttatga

SEQ ID NO: 119599 - DNA, 25 bp, Probe Sequence
tgagggctatttaggacaacttatg

SEQ ID NO: 119600 - DNA, 25 bp, Probe Sequence
ctgagggctatttaggacaacttat

SEQ ID NO: 119601 - DNA, 25 bp, Probe Sequence
ctgatgaaaggactaagaagcgtat

SEQ ID NO: 119602 - DNA, 25 bp, Probe Sequence
tgatgaaaggactaagaagcgtatc

SEQ ID NO: 119603 - DNA, 25 bp, Probe Sequence
ggctatttaggacaacttatgactc

SEQ ID NO: 119604 - DNA, 25 bp, Probe Sequence
gtatctttcagaatcacacaagcag

SEQ ID NO: 119605 - DNA, 25 bp, Probe Sequence
gatgaaaggactaagaagcgtatct

SEQ ID NO: 119606 - DNA, 25 bp, Probe Sequence
tttactgatgaaattggagccattg

SEQ ID NO: 119607 - DNA, 25 bp, Probe Sequence
gtttactgatgaaattggagccatt

SEQ ID NO: 119608 - DNA, 25 bp, Probe Sequence
tatctttcagaatcacacaagcagg

SEQ ID NO: 119609 - DNA, 25 bp, Probe Sequence
aagcgtatctttcagaatcacacaa

SEQ ID NO: 119610 - DNA, 25 bp, Probe Sequence
atgtttactgatgaaattggagcca

SEQ ID NO: 119611 - DNA, 25 bp, Probe Sequence
agaagcgtatctttcagaatcacac

SEQ ID NO: 119612 - DNA, 25 bp, Probe Sequence
aagatatgactcaaattctggtggc

SEQ ID NO: 119613 - DNA, 25 bp, Probe Sequence
tgtttactgatgaaattggagccat

SEQ ID NO: 119614 - DNA, 25 bp, Probe Sequence
tatttaggacaacttatgactcagc

SEQ ID NO: 119615 - DNA, 25 bp, Probe Sequence
gctatttaggacaacttatgactca

SEQ ID NO: 119616 - DNA, 25 bp, Probe Sequence
agcgtatctttcagaatcacacaag

SEQ ID NO: 119617 - DNA, 25 bp, Probe Sequence
ataacacagcggacattgaatatct

SEQ ID NO: 119618 - DNA, 25 bp, Probe Sequence
ttatcagactctcatccaacacaag

SEQ ID NO: 119619 - DNA, 25 bp, Probe Sequence
taacacagcggacattgaatatctt

SEQ ID NO: 119620 - DNA, 25 bp, Probe Sequence
tataacacagcggacattgaatatc

SEQ ID NO: 119621 - DNA, 25 bp, Probe Sequence
ctataacacagcggacattgaatat

SEQ ID NO: 119622 - DNA, 25 bp, Probe Sequence
gttatcagactctcatccaacacaa

SEQ ID NO: 119623 - DNA, 25 bp, Probe Sequence
acagcggacattgaatatcttgaag

SEQ ID NO: 119624 - DNA, 25 bp, Probe Sequence
cacagcggacattgaatatcttgaa

SEQ ID NO: 119625 - DNA, 25 bp, Probe Sequence
aacacagcggacattgaatatcttg

SEQ ID NO: 119626 - DNA, 25 bp, Probe Sequence
cagcggacattgaatatcttgaaga

SEQ ID NO: 119627 - DNA, 25 bp, Probe Sequence
ggttatcagactctcatccaacaca

SEQ ID NO: 119628 - DNA, 25 bp, Probe Sequence
tatcagactctcatccaacacaagc

SEQ ID NO: 119629 - DNA, 25 bp, Probe Sequence
gatattagtcatcatcacgccgttg

SEQ ID NO: 119630 - DNA, 25 bp, Probe Sequence
acacagcggacattgaatatcttga

SEQ ID NO: 119631 - DNA, 25 bp, Probe Sequence
ctcggttatcagactctcatccaac

SEQ ID NO: 119632 - DNA, 25 bp, Probe Sequence
cggttatcagactctcatccaacac

SEQ ID NO: 119633 - DNA, 25 bp, Probe Sequence
tcggttatcagactctcatccaaca

SEQ ID NO: 119634 - DNA, 25 bp, Probe Sequence
ggatattagtcatcatcacgccgtt

SEQ ID NO: 119635 - DNA, 25 bp, Probe Sequence
aagaaagtaggtatgtccagagcag

SEQ ID NO: 119636 - DNA, 25 bp, Probe Sequence
gctataacacagcggacattgaata

SEQ ID NO: 119637 - DNA, 25 bp, Probe Sequence
caagaaagtaggtatgtccagagca

SEQ ID NO: 119638 - DNA, 25 bp, Probe Sequence
gcggacattgaatatcttgaagatg

SEQ ID NO: 119639 - DNA, 25 bp, Probe Sequence
agcggacattgaatatcttgaagat

SEQ ID NO: 119640 - DNA, 25 bp, Probe Sequence
cggacattgaatatcttgaagatga

SEQ ID NO: 119641 - DNA, 25 bp, Probe Sequence
atcagaactagcacgagacactatc

SEQ ID NO: 119642 - DNA, 25 bp, Probe Sequence
agaactagcacgagacactatcaag

SEQ ID NO: 119643 - DNA, 25 bp, Probe Sequence
gatcagaactagcacgagacactat

SEQ ID NO: 119644 - DNA, 25 bp, Probe Sequence
cagaactagcacgagacactatcaa

SEQ ID NO: 119645 - DNA, 25 bp, Probe Sequence
caagaaggcagaaggagagatcatt

SEQ ID NO: 119646 - DNA, 25 bp, Probe Sequence
gtgtttggagatggagaaatgttta

SEQ ID NO: 119647 - DNA, 25 bp, Probe Sequence
ctagcacgagacactatcaaggatc

SEQ ID NO: 119648 - DNA, 25 bp, Probe Sequence
aactttgaaactggtgaatatcctg

SEQ ID NO: 119649 - DNA, 25 bp, Probe Sequence
caactttgaaactggtgaatatcct

SEQ ID NO: 119650 - DNA, 25 bp, Probe Sequence
agattatgatgcagcacattgtact

SEQ ID NO: 119651 - DNA, 25 bp, Probe Sequence
cagattatgatgcagcacattgtac

SEQ ID NO: 119652 - DNA, 25 bp, Probe Sequence
attcaatgtaaccaaagcaagaagg

SEQ ID NO: 119653 - DNA, 25 bp, Probe Sequence
ctttgaaactggtgaatatcctggt

SEQ ID NO: 119654 - DNA, 25 bp, Probe Sequence
actttgaaactggtgaatatcctgg

SEQ ID NO: 119655 - DNA, 25 bp, Probe Sequence
gaactagcacgagacactatcaagg

SEQ ID NO: 119656 - DNA, 25 bp, Probe Sequence
tttgaaactggtgaatatcctggtt

SEQ ID NO: 119657 - DNA, 25 bp, Probe Sequence
tcagaactagcacgagacactatca

SEQ ID NO: 119658 - DNA, 25 bp, Probe Sequence
actagcacgagacactatcaaggat

SEQ ID NO: 119659 - DNA, 25 bp, Probe Sequence
tgtttggagatggagaaatgtttat

SEQ ID NO: 119660 - DNA, 25 bp, Probe Sequence
tagcacgagacactatcaaggatct

SEQ ID NO: 119661 - DNA, 25 bp, Probe Sequence
ccagattatgatgcagcacattgta

SEQ ID NO: 119662 - DNA, 25 bp, Probe Sequence
gcagaaggagagatcatttgtcata

SEQ ID NO: 119663 - DNA, 25 bp, Probe Sequence
ttgaaactggtgaatatcctggttg

SEQ ID NO: 119664 - DNA, 25 bp, Probe Sequence
aactagcacgagacactatcaagga

SEQ ID NO: 119665 - DNA, 25 bp, Probe Sequence
ctctgttctgtgaatggactctgtg

SEQ ID NO: 119666 - DNA, 25 bp, Probe Sequence
tctgttctgtgaatggactctgtgt

SEQ ID NO: 119667 - DNA, 25 bp, Probe Sequence
ctgttctgtgaatggactctgtgtc

SEQ ID NO: 119668 - DNA, 25 bp, Probe Sequence
gttcctctgttctgtgaatggactc

SEQ ID NO: 119669 - DNA, 25 bp, Probe Sequence
gagttcctctgttctgtgaatggac

SEQ ID NO: 119670 - DNA, 25 bp, Probe Sequence
ttcctctgttctgtgaatggactct

SEQ ID NO: 119671 - DNA, 25 bp, Probe Sequence
cctctgttctgtgaatggactctgt

SEQ ID NO: 119672 - DNA, 25 bp, Probe Sequence
agttcctctgttctgtgaatggact

SEQ ID NO: 119673 - DNA, 25 bp, Probe Sequence
tcctctgttctgtgaatggactctg

SEQ ID NO: 119674 - DNA, 25 bp, Probe Sequence
gagagttcctctgttctgtgaatgg

SEQ ID NO: 119675 - DNA, 25 bp, Probe Sequence
ggagagttcctctgttctgtgaatg

SEQ ID NO: 119676 - DNA, 25 bp, Probe Sequence
agagttcctctgttctgtgaatgga

SEQ ID NO: 119677 - DNA, 25 bp, Probe Sequence
tggagagttcctctgttctgtgaat

SEQ ID NO: 119678 - DNA, 25 bp, Probe Sequence
ctggagagttcctctgttctgtgaa

SEQ ID NO: 119679 - DNA, 25 bp, Probe Sequence
gacattcaccttccagtgtgaggac

SEQ ID NO: 119680 - DNA, 25 bp, Probe Sequence
tgttctgtgaatggactctgtgtcc

SEQ ID NO: 119681 - DNA, 25 bp, Probe Sequence
gttctgtgaatggactctgtgtccc

SEQ ID NO: 119682 - DNA, 25 bp, Probe Sequence
ttctgtgaatggactctgtgtccct

SEQ ID NO: 119683 - DNA, 25 bp, Probe Sequence
cattgaggacttactctacagtgaa

SEQ ID NO: 119684 - DNA, 25 bp, Probe Sequence
taccattgaggacttactctacagt

SEQ ID NO: 119685 - DNA, 25 bp, Probe Sequence
ctaccattgaggacttactctacag

SEQ ID NO: 119686 - DNA, 25 bp, Probe Sequence
attgaggacttactctacagtgaag

SEQ ID NO: 119687 - DNA, 25 bp, Probe Sequence
ttgaggacttactctacagtgaagg

SEQ ID NO: 119688 - DNA, 25 bp, Probe Sequence
ccattgaggacttactctacagtga

SEQ ID NO: 119689 - DNA, 25 bp, Probe Sequence
gctaccattgaggacttactctaca

SEQ ID NO: 119690 - DNA, 25 bp, Probe Sequence
accattgaggacttactctacagtg

SEQ ID NO: 119691 - DNA, 25 bp, Probe Sequence
ggctaccattgaggacttactctac

SEQ ID NO: 119692 - DNA, 25 bp, Probe Sequence
aggctaccattgaggacttactcta

SEQ ID NO: 119693 - DNA, 25 bp, Probe Sequence
aatacctttatctcctttcccttgg

SEQ ID NO: 119694 - DNA, 25 bp, Probe Sequence
ctaaagagagcagaatgaaagaagg

SEQ ID NO: 119695 - DNA, 25 bp, Probe Sequence
tgtgtgcccaatgagaataagtatt

SEQ ID NO: 119696 - DNA, 25 bp, Probe Sequence
taaagagagcagaatgaaagaaggc

SEQ ID NO: 119697 - DNA, 25 bp, Probe Sequence
actaaagagagcagaatgaaagaag

SEQ ID NO: 119698 - DNA, 25 bp, Probe Sequence
aaggctaccattgaggacttactct

SEQ ID NO: 119699 - DNA, 25 bp, Probe Sequence
caaggctaccattgaggacttactc

SEQ ID NO: 119700 - DNA, 25 bp, Probe Sequence
ttgtgtgcccaatgagaataagtat

SEQ ID NO: 119701 - DNA, 25 bp, Probe Sequence
gacttactctacagtgaagggtatt

SEQ ID NO: 119702 - DNA, 25 bp, Probe Sequence
ggacttactctacagtgaagggtat

SEQ ID NO: 119703 - DNA, 25 bp, Probe Sequence
ctactaaagagagcagaatgaaaga

SEQ ID NO: 119704 - DNA, 25 bp, Probe Sequence
acttactctacagtgaagggtattt

SEQ ID NO: 119705 - DNA, 25 bp, Probe Sequence
aggacttactctacagtgaagggta

SEQ ID NO: 119706 - DNA, 25 bp, Probe Sequence
caaacagaggcgaaagattaatacc

SEQ ID NO: 119707 - DNA, 25 bp, Probe Sequence
tcttgtcagtgaatccagtatagtt

SEQ ID NO: 119708 - DNA, 25 bp, Probe Sequence
ctcttcttgtcagtgaatccagtat

SEQ ID NO: 119709 - DNA, 25 bp, Probe Sequence
ttgtcagtgaatccagtatagttct

SEQ ID NO: 119710 - DNA, 25 bp, Probe Sequence
ttcttgtcagtgaatccagtatagt

SEQ ID NO: 119711 - DNA, 25 bp, Probe Sequence
cttgtcagtgaatccagtatagttc

SEQ ID NO: 119712 - DNA, 25 bp, Probe Sequence
tcttcttgtcagtgaatccagtata

SEQ ID NO: 119713 - DNA, 25 bp, Probe Sequence
cttcttgtcagtgaatccagtatag

SEQ ID NO: 119714 - DNA, 25 bp, Probe Sequence
actcttcttgtcagtgaatccagta

SEQ ID NO: 119715 - DNA, 25 bp, Probe Sequence
gtcagtgaatccagtatagttctgt

SEQ ID NO: 119716 - DNA, 25 bp, Probe Sequence
tgtcagtgaatccagtatagttctg

SEQ ID NO: 119717 - DNA, 25 bp, Probe Sequence
aactcttcttgtcagtgaatccagt

SEQ ID NO: 119718 - DNA, 25 bp, Probe Sequence
tcagtgaatccagtatagttctgta

SEQ ID NO: 119719 - DNA, 25 bp, Probe Sequence
gtgaatccagtatagttctgtatca

SEQ ID NO: 119720 - DNA, 25 bp, Probe Sequence
cagtgaatccagtatagttctgtat

SEQ ID NO: 119721 - DNA, 25 bp, Probe Sequence
atgctgctaattcaaactcttcttg

SEQ ID NO: 119722 - DNA, 25 bp, Probe Sequence
tgctaattcaaactcttcttgtcag

SEQ ID NO: 119723 - DNA, 25 bp, Probe Sequence
ctgctaattcaaactcttcttgtca

SEQ ID NO: 119724 - DNA, 25 bp, Probe Sequence
gctgctaattcaaactcttcttgtc

SEQ ID NO: 119725 - DNA, 25 bp, Probe Sequence
gctaattcaaactcttcttgtcagt

SEQ ID NO: 119726 - DNA, 25 bp, Probe Sequence
aaactcttcttgtcagtgaatccag

SEQ ID NO: 119727 - DNA, 25 bp, Probe Sequence
tcaaactcttcttgtcagtgaatcc

SEQ ID NO: 119728 - DNA, 25 bp, Probe Sequence
agtgaatccagtatagttctgtatc

SEQ ID NO: 119729 - DNA, 25 bp, Probe Sequence
tgctgctaattcaaactcttcttgt

SEQ ID NO: 119730 - DNA, 25 bp, Probe Sequence
catgctgctaattcaaactcttctt

SEQ ID NO: 119731 - DNA, 25 bp, Probe Sequence
aagagaaaccagcattaaacaagac

SEQ ID NO: 119732 - DNA, 25 bp, Probe Sequence
tgaagagaaaccagcattaaacaag

SEQ ID NO: 119733 - DNA, 25 bp, Probe Sequence
aaaccagcattaaacaagacagaag

SEQ ID NO: 119734 - DNA, 25 bp, Probe Sequence
gaaaccagcattaaacaagacagaa

SEQ ID NO: 119735 - DNA, 25 bp, Probe Sequence
gaagagaaaccagcattaaacaaga

SEQ ID NO: 119736 - DNA, 25 bp, Probe Sequence
tttgaagagaaaccagcattaaaca

SEQ ID NO: 119737 - DNA, 25 bp, Probe Sequence
accagcattaaacaagacagaagat

SEQ ID NO: 119738 - DNA, 25 bp, Probe Sequence
gagaaaccagcattaaacaagacag

SEQ ID NO: 119739 - DNA, 25 bp, Probe Sequence
tcctaagacaatttcagatggtagc

SEQ ID NO: 119740 - DNA, 25 bp, Probe Sequence
aaccagcattaaacaagacagaaga

SEQ ID NO: 119741 - DNA, 25 bp, Probe Sequence
agaaaccagcattaaacaagacaga

SEQ ID NO: 119742 - DNA, 25 bp, Probe Sequence
agagaaaccagcattaaacaagaca

SEQ ID NO: 119743 - DNA, 25 bp, Probe Sequence
ccagcattaaacaagacagaagata

SEQ ID NO: 119744 - DNA, 25 bp, Probe Sequence
taaacaagacagaagataggaaagc

SEQ ID NO: 119745 - DNA, 25 bp, Probe Sequence
gcattaaacaagacagaagatagga

SEQ ID NO: 119746 - DNA, 25 bp, Probe Sequence
aaacaagacagaagataggaaagcg

SEQ ID NO: 119747 - DNA, 25 bp, Probe Sequence
agcattaaacaagacagaagatagg

SEQ ID NO: 119748 - DNA, 25 bp, Probe Sequence
ttgaagagaaaccagcattaaacaa

SEQ ID NO: 119749 - DNA, 25 bp, Probe Sequence
cctaagacaatttcagatggtagcc

SEQ ID NO: 119750 - DNA, 25 bp, Probe Sequence
acaagacagaagataggaaagcgta

SEQ ID NO: 119751 - DNA, 25 bp, Probe Sequence
ctcctaagacaatttcagatggtag

SEQ ID NO: 119752 - DNA, 25 bp, Probe Sequence
atttgaagagaaaccagcattaaac

SEQ ID NO: 119753 - DNA, 25 bp, Probe Sequence
acagaagataggaaagcgtacaata

SEQ ID NO: 119754 - DNA, 25 bp, Probe Sequence
tctcctaagacaatttcagatggta

SEQ ID NO: 119755 - DNA, 25 bp, Probe Sequence
tgctgatgtgaacattttaaataag

SEQ ID NO: 119756 - DNA, 25 bp, Probe Sequence
gctgatgtgaacattttaaataaga

SEQ ID NO: 119757 - DNA, 25 bp, Probe Sequence
atgctgatgtgaacattttaaataa

SEQ ID NO: 119758 - DNA, 25 bp, Probe Sequence
aatgctgatgtgaacattttaaata

SEQ ID NO: 119759 - DNA, 25 bp, Probe Sequence
aaatgctgatgtgaacattttaaat

SEQ ID NO: 119760 - DNA, 25 bp, Probe Sequence
caagtggaagttcttatagagatgc

SEQ ID NO: 119761 - DNA, 25 bp, Probe Sequence
tatggcaagaagcaatagttggatg

SEQ ID NO: 119762 - DNA, 25 bp, Probe Sequence
ccaagtggaagttcttatagagatg

SEQ ID NO: 119763 - DNA, 25 bp, Probe Sequence
ctatggcaagaagcaatagttggat

SEQ ID NO: 119764 - DNA, 25 bp, Probe Sequence
ttgatctcaacacgagttcttctag

SEQ ID NO: 119765 - DNA, 25 bp, Probe Sequence
cttgatctcaacacgagttcttcta

SEQ ID NO: 119766 - DNA, 25 bp, Probe Sequence
aagaggaagtagtggaggaacaaga

SEQ ID NO: 119767 - DNA, 25 bp, Probe Sequence
caagaggaagtagtggaggaacaag

SEQ ID NO: 119768 - DNA, 25 bp, Probe Sequence
cgtggaagagagaattatggaggtc

SEQ ID NO: 119769 - DNA, 25 bp, Probe Sequence
ctcttgatctcaacacgagttcttc

SEQ ID NO: 119770 - DNA, 25 bp, Probe Sequence
gaggatatagagatcattctgaacg

SEQ ID NO: 119771 - DNA, 25 bp, Probe Sequence
tcttgatctcaacacgagttcttct

SEQ ID NO: 119772 - DNA, 25 bp, Probe Sequence
aagtagaacaagcaaagaaaccatc

SEQ ID NO: 119773 - DNA, 25 bp, Probe Sequence
tgatctcaacacgagttcttctagg

SEQ ID NO: 119774 - DNA, 25 bp, Probe Sequence
aaagtagaacaagcaaagaaaccat

SEQ ID NO: 119775 - DNA, 25 bp, Probe Sequence
gagatgatggttatgcaattaagga

SEQ ID NO: 119776 - DNA, 25 bp, Probe Sequence
agagatgatggttatgcaattaagg

SEQ ID NO: 119777 - DNA, 25 bp, Probe Sequence
aagtggaagttcttatagagatgca

SEQ ID NO: 119778 - DNA, 25 bp, Probe Sequence
atagagatcattctgaacgtccaag

SEQ ID NO: 119779 - DNA, 25 bp, Probe Sequence
agtagaacaagcaaagaaaccatct

SEQ ID NO: 119780 - DNA, 25 bp, Probe Sequence
agaggaagtagtggaggaacaagac

SEQ ID NO: 119781 - DNA, 25 bp, Probe Sequence
agatgatggttatgcaattaaggaa

SEQ ID NO: 119782 - DNA, 25 bp, Probe Sequence
gtccaagtggaagttcttatagaga

SEQ ID NO: 119783 - DNA, 25 bp, Probe Sequence
tatagagatcattctgaacgtccaa

SEQ ID NO: 119784 - DNA, 25 bp, Probe Sequence
aatgctgacaatccagagttaataa

SEQ ID NO: 119785 - DNA, 25 bp, Probe Sequence
gtcataagacatcttcaagacatct

SEQ ID NO: 119786 - DNA, 25 bp, Probe Sequence
tgacaatccagagttaataaagaca

SEQ ID NO: 119787 - DNA, 25 bp, Probe Sequence
tgctgacaatccagagttaataaag

SEQ ID NO: 119788 - DNA, 25 bp, Probe Sequence
gacatcttcaagacatctttgttca

SEQ ID NO: 119789 - DNA, 25 bp, Probe Sequence
agacatcttcaagacatctttgttc

SEQ ID NO: 119790 - DNA, 25 bp, Probe Sequence
gctgacaatccagagttaataaaga

SEQ ID NO: 119791 - DNA, 25 bp, Probe Sequence
acatcttcaagacatctttgttcat

SEQ ID NO: 119792 - DNA, 25 bp, Probe Sequence
acaatccagagttaataaagacaga

SEQ ID NO: 119793 - DNA, 25 bp, Probe Sequence
atgctgacaatccagagttaataaa

SEQ ID NO: 119794 - DNA, 25 bp, Probe Sequence
aaatgctgacaatccagagttaata

SEQ ID NO: 119795 - DNA, 25 bp, Probe Sequence
gacaatccagagttaataaagacag

SEQ ID NO: 119796 - DNA, 25 bp, Probe Sequence
tcataagacatcttcaagacatctt

SEQ ID NO: 119797 - DNA, 25 bp, Probe Sequence
tccagagttaataaagacagaagat

SEQ ID NO: 119798 - DNA, 25 bp, Probe Sequence
atccagagttaataaagacagaaga

SEQ ID NO: 119799 - DNA, 25 bp, Probe Sequence
atcttcaagacatctttgttcattg

SEQ ID NO: 119800 - DNA, 25 bp, Probe Sequence
catcttcaagacatctttgttcatt

SEQ ID NO: 119801 - DNA, 25 bp, Probe Sequence
ctgacaatccagagttaataaagac

SEQ ID NO: 119802 - DNA, 25 bp, Probe Sequence
caatccagagttaataaagacagaa

SEQ ID NO: 119803 - DNA, 25 bp, Probe Sequence
aagacatcttcaagacatctttgtt

SEQ ID NO: 119804 - DNA, 25 bp, Probe Sequence
aatccagagttaataaagacagaag

SEQ ID NO: 119805 - DNA, 25 bp, Probe Sequence
taagacatcttcaagacatctttgt

SEQ ID NO: 119806 - DNA, 25 bp, Probe Sequence
tcttcaagacatctttgttcattga

SEQ ID NO: 119807 - DNA, 25 bp, Probe Sequence
tgtgtcataagacatcttcaagaca

SEQ ID NO: 119808 - DNA, 25 bp, Probe Sequence
gaagacacgaagcagataataaagg

SEQ ID NO: 119809 - DNA, 25 bp, Probe Sequence
cgaagacacgaagcagataataaag

SEQ ID NO: 119810 - DNA, 25 bp, Probe Sequence
aagacacgaagcagataataaaggc

SEQ ID NO: 119811 - DNA, 25 bp, Probe Sequence
ggcgaagacacgaagcagataataa

SEQ ID NO: 119812 - DNA, 25 bp, Probe Sequence
aaactttgttccctggattcataaa

SEQ ID NO: 119813 - DNA, 25 bp, Probe Sequence
gcgaagacacgaagcagataataaa

SEQ ID NO: 119814 - DNA, 25 bp, Probe Sequence
aactttgttccctggattcataaat

SEQ ID NO: 119815 - DNA, 25 bp, Probe Sequence
caaactttgttccctggattcataa

SEQ ID NO: 119816 - DNA, 25 bp, Probe Sequence
tcaaactttgttccctggattcata

SEQ ID NO: 119817 - DNA, 25 bp, Probe Sequence
tgttccctggattcataaatatgtc

SEQ ID NO: 119818 - DNA, 25 bp, Probe Sequence
aggcataatgtcaggcaagagagat

SEQ ID NO: 119819 - DNA, 25 bp, Probe Sequence
actttgttccctggattcataaata

SEQ ID NO: 119820 - DNA, 25 bp, Probe Sequence
ttgttccctggattcataaatatgt

SEQ ID NO: 119821 - DNA, 25 bp, Probe Sequence
ggcataatgtcaggcaagagagatg

SEQ ID NO: 119822 - DNA, 25 bp, Probe Sequence
ccctggattcataaatatgtccctt

SEQ ID NO: 119823 - DNA, 25 bp, Probe Sequence
ttccctggattcataaatatgtccc

SEQ ID NO: 119824 - DNA, 25 bp, Probe Sequence
tgattatgatattgctttgctacag

SEQ ID NO: 119825 - DNA, 25 bp, Probe Sequence
tccctggattcataaatatgtccct

SEQ ID NO: 119826 - DNA, 25 bp, Probe Sequence
gttccctggattcataaatatgtcc

SEQ ID NO: 119827 - DNA, 25 bp, Probe Sequence
gtcaaactttgttccctggattcat

SEQ ID NO: 119828 - DNA, 25 bp, Probe Sequence
cctggattcataaatatgtcccttc

SEQ ID NO: 119829 - DNA, 25 bp, Probe Sequence
cacgagtactataacagtcagactt

SEQ ID NO: 119830 - DNA, 25 bp, Probe Sequence
ccacgagtactataacagtcagact

SEQ ID NO: 119831 - DNA, 25 bp, Probe Sequence
tccacgagtactataacagtcagac

SEQ ID NO: 119832 - DNA, 25 bp, Probe Sequence
ctaacactatacacagagtaggcac

SEQ ID NO: 119833 - DNA, 25 bp, Probe Sequence
tggacctaacactatacacagagta

SEQ ID NO: 119834 - DNA, 25 bp, Probe Sequence
taacactatacacagagtaggcact

SEQ ID NO: 119835 - DNA, 25 bp, Probe Sequence
ggacctaacactatacacagagtag

SEQ ID NO: 119836 - DNA, 25 bp, Probe Sequence
ttggacctaacactatacacagagt

SEQ ID NO: 119837 - DNA, 25 bp, Probe Sequence
ctagacttctctgacttcttgttcc

SEQ ID NO: 119838 - DNA, 25 bp, Probe Sequence
tattgtcctactctctctggctctc

SEQ ID NO: 119839 - DNA, 25 bp, Probe Sequence
ctattgtcctactctctctggctct

SEQ ID NO: 119840 - DNA, 25 bp, Probe Sequence
aacactatacacagagtaggcactg

SEQ ID NO: 119841 - DNA, 25 bp, Probe Sequence
ttctctgacttcttgttccctattg

SEQ ID NO: 119842 - DNA, 25 bp, Probe Sequence
cttctctgacttcttgttccctatt

SEQ ID NO: 119843 - DNA, 25 bp, Probe Sequence
tttggacctaacactatacacagag

SEQ ID NO: 119844 - DNA, 25 bp, Probe Sequence
ctttggacctaacactatacacaga

SEQ ID NO: 119845 - DNA, 25 bp, Probe Sequence
cttcttgttccctattgtcctactc

SEQ ID NO: 119846 - DNA, 25 bp, Probe Sequence
cctttggacctaacactatacacag

SEQ ID NO: 119847 - DNA, 25 bp, Probe Sequence
ttcttgttccctattgtcctactct

SEQ ID NO: 119848 - DNA, 25 bp, Probe Sequence
acttcttgttccctattgtcctact

SEQ ID NO: 119849 - DNA, 25 bp, Probe Sequence
acttctctgacttcttgttccctat

SEQ ID NO: 119850 - DNA, 25 bp, Probe Sequence
tctacaatcccatcggtatcttctt

SEQ ID NO: 119851 - DNA, 25 bp, Probe Sequence
ttgttccctattgtcctactctctc

SEQ ID NO: 119852 - DNA, 25 bp, Probe Sequence
cttgttccctattgtcctactctct

SEQ ID NO: 119853 - DNA, 25 bp, Probe Sequence
tcttgttccctattgtcctactctc

SEQ ID NO: 119854 - DNA, 25 bp, Probe Sequence
tctctgacttcttgttccctattgt

SEQ ID NO: 119855 - DNA, 25 bp, Probe Sequence
ttaatgccactatttcaagagccaa

SEQ ID NO: 119856 - DNA, 25 bp, Probe Sequence
ctacctgaagaagaatacaacctcc

SEQ ID NO: 119857 - DNA, 25 bp, Probe Sequence
tacctgaagaagaatacaacctcct

SEQ ID NO: 119858 - DNA, 25 bp, Probe Sequence
catctgaagtctacctgaagaagaa

SEQ ID NO: 119859 - DNA, 25 bp, Probe Sequence
gtctacctgaagaagaatacaacct

SEQ ID NO: 119860 - DNA, 25 bp, Probe Sequence
agtctacctgaagaagaatacaacc

SEQ ID NO: 119861 - DNA, 25 bp, Probe Sequence
tctacctgaagaagaatacaacctc

SEQ ID NO: 119862 - DNA, 25 bp, Probe Sequence
ctcatctgaagtctacctgaagaag

SEQ ID NO: 119863 - DNA, 25 bp, Probe Sequence
tcatctgaagtctacctgaagaaga

SEQ ID NO: 119864 - DNA, 25 bp, Probe Sequence
tgaagtctacctgaagaagaataca

SEQ ID NO: 119865 - DNA, 25 bp, Probe Sequence
atctgaagtctacctgaagaagaat

SEQ ID NO: 119866 - DNA, 25 bp, Probe Sequence
atcaagcgttcttatacactgaagg

SEQ ID NO: 119867 - DNA, 25 bp, Probe Sequence
caagcgttcttatacactgaaggag

SEQ ID NO: 119868 - DNA, 25 bp, Probe Sequence
acctgaagaagaatacaacctcctg

SEQ ID NO: 119869 - DNA, 25 bp, Probe Sequence
tatcaagcgttcttatacactgaag

SEQ ID NO: 119870 - DNA, 25 bp, Probe Sequence
cctcatctgaagtctacctgaagaa

SEQ ID NO: 119871 - DNA, 25 bp, Probe Sequence
ctgaagtctacctgaagaagaatac

SEQ ID NO: 119872 - DNA, 25 bp, Probe Sequence
tctgaagtctacctgaagaagaata

SEQ ID NO: 119873 - DNA, 25 bp, Probe Sequence
aagtctacctgaagaagaatacaac

SEQ ID NO: 119874 - DNA, 25 bp, Probe Sequence
ctacaagtcttggattgagaagtct

SEQ ID NO: 119875 - DNA, 25 bp, Probe Sequence
tctacaagtcttggattgagaagtc

SEQ ID NO: 119876 - DNA, 25 bp, Probe Sequence
ctgaagaagaatacaacctcctgct

SEQ ID NO: 119877 - DNA, 25 bp, Probe Sequence
tcaagcgttcttatacactgaagga

SEQ ID NO: 119878 - DNA, 25 bp, Probe Sequence
gaagtctacctgaagaagaatacaa

SEQ ID NO: 119879 - DNA, 25 bp, Probe Sequence
atatcaagcgttcttatacactgaa

SEQ ID NO: 119880 - DNA, 25 bp, Probe Sequence
tctacaccagagtaactaagtatcg

SEQ ID NO: 119881 - DNA, 25 bp, Probe Sequence
ggagtctacaccagagtaactaagt

SEQ ID NO: 119882 - DNA, 25 bp, Probe Sequence
gagtctacaccagagtaactaagta

SEQ ID NO: 119883 - DNA, 25 bp, Probe Sequence
agaagaactcaatcactggactgaa

SEQ ID NO: 119884 - DNA, 25 bp, Probe Sequence
aatgttatgtgctggattcatggaa

SEQ ID NO: 119885 - DNA, 25 bp, Probe Sequence
ataagcactgatgtgtgtaacagaa

SEQ ID NO: 119886 - DNA, 25 bp, Probe Sequence
atgttatgtgctggattcatggaag

SEQ ID NO: 119887 - DNA, 25 bp, Probe Sequence
catgacatctggtacattgtaggta

SEQ ID NO: 119888 - DNA, 25 bp, Probe Sequence
cataagcactgatgtgtgtaacaga

SEQ ID NO: 119889 - DNA, 25 bp, Probe Sequence
acaccagagtaactaagtatcgaga

SEQ ID NO: 119890 - DNA, 25 bp, Probe Sequence
gtctacaccagagtaactaagtatc

SEQ ID NO: 119891 - DNA, 25 bp, Probe Sequence
atgacatctggtacattgtaggtat

SEQ ID NO: 119892 - DNA, 25 bp, Probe Sequence
agtctacaccagagtaactaagtat

SEQ ID NO: 119893 - DNA, 25 bp, Probe Sequence
gagaagaactcaatcactggactga

SEQ ID NO: 119894 - DNA, 25 bp, Probe Sequence
caccagagtaactaagtatcgagat

SEQ ID NO: 119895 - DNA, 25 bp, Probe Sequence
aactaagtatcgagattggattgcc

SEQ ID NO: 119896 - DNA, 25 bp, Probe Sequence
aaccataagcactgatgtgtgtaac

SEQ ID NO: 119897 - DNA, 25 bp, Probe Sequence
tggagtctacaccagagtaactaag

SEQ ID NO: 119898 - DNA, 25 bp, Probe Sequence
tacaccagagtaactaagtatcgag

SEQ ID NO: 119899 - DNA, 25 bp, Probe Sequence
ctacaccagagtaactaagtatcga

SEQ ID NO: 119900 - DNA, 25 bp, Probe Sequence
acatctggtacattgtaggtatagt

SEQ ID NO: 119901 - DNA, 25 bp, Probe Sequence
tgacatctggtacattgtaggtata

SEQ ID NO: 119902 - DNA, 25 bp, Probe Sequence
gagaagaaagatgataggctggatt

SEQ ID NO: 119903 - DNA, 25 bp, Probe Sequence
agaagaaagatgataggctggattt

SEQ ID NO: 119904 - DNA, 25 bp, Probe Sequence
attacactgtccttactgcttatgc

SEQ ID NO: 119905 - DNA, 25 bp, Probe Sequence
aattacactgtccttactgcttatg

SEQ ID NO: 119906 - DNA, 25 bp, Probe Sequence
aacaggagtgcctagtagtatcaag

SEQ ID NO: 119907 - DNA, 25 bp, Probe Sequence
caacaggagtgcctagtagtatcaa

SEQ ID NO: 119908 - DNA, 25 bp, Probe Sequence
ggaaacccgaaggactataaagata

SEQ ID NO: 119909 - DNA, 25 bp, Probe Sequence
taaagataataccagcaaaggcaag

SEQ ID NO: 119910 - DNA, 25 bp, Probe Sequence
gctgggaagagagattatggttaaa

SEQ ID NO: 119911 - DNA, 25 bp, Probe Sequence
actactacaatttaagcatcaccca

SEQ ID NO: 119912 - DNA, 25 bp, Probe Sequence
taagggcactactacaatttaagca

SEQ ID NO: 119913 - DNA, 25 bp, Probe Sequence
cactactacaatttaagcatcaccc

SEQ ID NO: 119914 - DNA, 25 bp, Probe Sequence
gcactactacaatttaagcatcacc

SEQ ID NO: 119915 - DNA, 25 bp, Probe Sequence
ggcactactacaatttaagcatcac

SEQ ID NO: 119916 - DNA, 25 bp, Probe Sequence
aaagataataccagcaaaggcaagt

SEQ ID NO: 119917 - DNA, 25 bp, Probe Sequence
ttaacctgctggcattgtatactag

SEQ ID NO: 119918 - DNA, 25 bp, Probe Sequence
ctactacaatttaagcatcacccag

SEQ ID NO: 119919 - DNA, 25 bp, Probe Sequence
aagggcactactacaatttaagcat

SEQ ID NO: 119920 - DNA, 25 bp, Probe Sequence
ataaagataataccagcaaaggcaa

SEQ ID NO: 119921 - DNA, 25 bp, Probe Sequence
agggcactactacaatttaagcatc

SEQ ID NO: 119922 - DNA, 25 bp, Probe Sequence
aagataataccagcaaaggcaagtc

SEQ ID NO: 119923 - DNA, 25 bp, Probe Sequence
taacctgctggcattgtatactaga

SEQ ID NO: 119924 - DNA, 25 bp, Probe Sequence
atttgagaaacgaatcttccaacag

SEQ ID NO: 119925 - DNA, 25 bp, Probe Sequence
caaattacactgtccttactgctta

SEQ ID NO: 119926 - DNA, 25 bp, Probe Sequence
tgctgggaagagagattatggttaa

SEQ ID NO: 119927 - DNA, 25 bp, Probe Sequence
gggcactactacaatttaagcatca

SEQ ID NO: 119928 - DNA, 25 bp, Probe Sequence
aattgattcttgcttcgctctcttc

SEQ ID NO: 119929 - DNA, 25 bp, Probe Sequence
attgattcttgcttcgctctcttct

SEQ ID NO: 119930 - DNA, 25 bp, Probe Sequence
aggtgaactgttccagatacattaa

SEQ ID NO: 119931 - DNA, 25 bp, Probe Sequence
aaggtgaactgttccagatacatta

SEQ ID NO: 119932 - DNA, 25 bp, Probe Sequence
ttgattcttgcttcgctctcttctg

SEQ ID NO: 119933 - DNA, 25 bp, Probe Sequence
caatttgttctttctccaactgctc

SEQ ID NO: 119934 - DNA, 25 bp, Probe Sequence
accaggaagtgttatactcaatttg

SEQ ID NO: 119935 - DNA, 25 bp, Probe Sequence
actgttccagatacattaaaggctt

SEQ ID NO: 119936 - DNA, 25 bp, Probe Sequence
aactgttccagatacattaaaggct

SEQ ID NO: 119937 - DNA, 25 bp, Probe Sequence
gatacattaaaggcttaaagactgc

SEQ ID NO: 119938 - DNA, 25 bp, Probe Sequence
aaccaggaagtgttatactcaattt

SEQ ID NO: 119939 - DNA, 25 bp, Probe Sequence
aaaccaggaagtgttatactcaatt

SEQ ID NO: 119940 - DNA, 25 bp, Probe Sequence
ccaggaagtgttatactcaatttga

SEQ ID NO: 119941 - DNA, 25 bp, Probe Sequence
aatttgttctttctccaactgctcc

SEQ ID NO: 119942 - DNA, 25 bp, Probe Sequence
caagagactggagaccaatatgtgg

SEQ ID NO: 119943 - DNA, 25 bp, Probe Sequence
ccaagagactggagaccaatatgtg

SEQ ID NO: 119944 - DNA, 25 bp, Probe Sequence
tttctccaactgctcctcttcaatt

SEQ ID NO: 119945 - DNA, 25 bp, Probe Sequence
ctgttccagatacattaaaggctta

SEQ ID NO: 119946 - DNA, 25 bp, Probe Sequence
tgttccagatacattaaaggcttaa

SEQ ID NO: 119947 - DNA, 25 bp, Probe Sequence
gaactgttccagatacattaaaggc

SEQ ID NO: 119948 - DNA, 25 bp, Probe Sequence
aaaggtgaactgttccagatacatt

SEQ ID NO: 119949 - DNA, 25 bp, Probe Sequence
ccagatacattaaaggcttaaagac

SEQ ID NO: 119950 - DNA, 25 bp, Probe Sequence
tccagatacattaaaggcttaaaga

SEQ ID NO: 119951 - DNA, 25 bp, Probe Sequence
ctttctccaactgctcctcttcaat

SEQ ID NO: 119952 - DNA, 25 bp, Probe Sequence
gcaatgattgaggtcagtgataatg

SEQ ID NO: 119953 - DNA, 25 bp, Probe Sequence
agcaatgattgaggtcagtgataat

SEQ ID NO: 119954 - DNA, 25 bp, Probe Sequence
aagcaatgattgaggtcagtgataa

SEQ ID NO: 119955 - DNA, 25 bp, Probe Sequence
caatgattgaggtcagtgataatga

SEQ ID NO: 119956 - DNA, 25 bp, Probe Sequence
tattgaagaactcctcacttgctga

SEQ ID NO: 119957 - DNA, 25 bp, Probe Sequence
gtattgaagaactcctcacttgctg

SEQ ID NO: 119958 - DNA, 25 bp, Probe Sequence
agtattgaagaactcctcacttgct

SEQ ID NO: 119959 - DNA, 25 bp, Probe Sequence
agaacctctctcagatcatggaatt

SEQ ID NO: 119960 - DNA, 25 bp, Probe Sequence
aatgattgaggtcagtgataatgaa

SEQ ID NO: 119961 - DNA, 25 bp, Probe Sequence
ttgttcagaacctctctcagatcat

SEQ ID NO: 119962 - DNA, 25 bp, Probe Sequence
atgttagataatgaagctgatggca

SEQ ID NO: 119963 - DNA, 25 bp, Probe Sequence
gttagataatgaagctgatggcaat

SEQ ID NO: 119964 - DNA, 25 bp, Probe Sequence
tgttagataatgaagctgatggcaa

SEQ ID NO: 119965 - DNA, 25 bp, Probe Sequence
aatgttagataatgaagctgatggc

SEQ ID NO: 119966 - DNA, 25 bp, Probe Sequence
cagttatgtgtaacagagcaggatt

SEQ ID NO: 119967 - DNA, 25 bp, Probe Sequence
cagaacctctctcagatcatggaat

SEQ ID NO: 119968 - DNA, 25 bp, Probe Sequence
gcaatgttagataatgaagctgatg

SEQ ID NO: 119969 - DNA, 25 bp, Probe Sequence
tgttcagaacctctctcagatcatg

SEQ ID NO: 119970 - DNA, 25 bp, Probe Sequence
agtgaccttacccaagtttgataaa

SEQ ID NO: 119971 - DNA, 25 bp, Probe Sequence
gtgaccttacccaagtttgataaag

SEQ ID NO: 119972 - DNA, 25 bp, Probe Sequence
gtaacagagcaggatttattcaaga

SEQ ID NO: 119973 - DNA, 25 bp, Probe Sequence
gtgtaacagagcaggatttattcaa

SEQ ID NO: 119974 - DNA, 25 bp, Probe Sequence
gagtgaccttacccaagtttgataa

SEQ ID NO: 119975 - DNA, 25 bp, Probe Sequence
tgtaacagagcaggatttattcaag

SEQ ID NO: 119976 - DNA, 25 bp, Probe Sequence
cttggactatgactatgctcttctg

SEQ ID NO: 119977 - DNA, 25 bp, Probe Sequence
taccttggactatgactatgctctt

SEQ ID NO: 119978 - DNA, 25 bp, Probe Sequence
ctaccttggactatgactatgctct

SEQ ID NO: 119979 - DNA, 25 bp, Probe Sequence
ccttggactatgactatgctcttct

SEQ ID NO: 119980 - DNA, 25 bp, Probe Sequence
ttggactatgactatgctcttctgg

SEQ ID NO: 119981 - DNA, 25 bp, Probe Sequence
accttggactatgactatgctcttc

SEQ ID NO: 119982 - DNA, 25 bp, Probe Sequence
tggactatgactatgctcttctgga

SEQ ID NO: 119983 - DNA, 25 bp, Probe Sequence
gctaccttggactatgactatgctc

SEQ ID NO: 119984 - DNA, 25 bp, Probe Sequence
gacgctaccttggactatgactatg

SEQ ID NO: 119985 - DNA, 25 bp, Probe Sequence
ggactatgactatgctcttctggag

SEQ ID NO: 119986 - DNA, 25 bp, Probe Sequence
aggatttgataacgatagggctgat

SEQ ID NO: 119987 - DNA, 25 bp, Probe Sequence
ttctcaggatttgataacgataggg

SEQ ID NO: 119988 - DNA, 25 bp, Probe Sequence
ggacgctaccttggactatgactat

SEQ ID NO: 119989 - DNA, 25 bp, Probe Sequence
caatgatctcctttaccaatactgc

SEQ ID NO: 119990 - DNA, 25 bp, Probe Sequence
ccacttctcaggatttgataacgat

SEQ ID NO: 119991 - DNA, 25 bp, Probe Sequence
ccaatgatctcctttaccaatactg

SEQ ID NO: 119992 - DNA, 25 bp, Probe Sequence
tccaatgatctcctttaccaatact

SEQ ID NO: 119993 - DNA, 25 bp, Probe Sequence
aatgatctcctttaccaatactgcg

SEQ ID NO: 119994 - DNA, 25 bp, Probe Sequence
cttctcaggatttgataacgatagg

SEQ ID NO: 119995 - DNA, 25 bp, Probe Sequence
cgaatccaatgatctcctttaccaa

SEQ ID NO: 119996 - DNA, 25 bp, Probe Sequence
gaaatacatggaacttggaatcagc

SEQ ID NO: 119997 - DNA, 25 bp, Probe Sequence
ggatttgataacgatagggctgatc

SEQ ID NO: 119998 - DNA, 25 bp, Probe Sequence
gaatccaatgatctcctttaccaat

SEQ ID NO: 119999 - DNA, 25 bp, Probe Sequence
gacgaatccaatgatctcctttacc

SEQ ID NO: 120000 - DNA, 25 bp, Probe Sequence
caccatgaatctacttctgatcctt

SEQ ID NO: 120001 - DNA, 25 bp, Probe Sequence
tgaatctacttctgatccttacctt

SEQ ID NO: 120002 - DNA, 25 bp, Probe Sequence
atgaatctacttctgatccttacct

SEQ ID NO: 120003 - DNA, 25 bp, Probe Sequence
accatgaatctacttctgatcctta

SEQ ID NO: 120004 - DNA, 25 bp, Probe Sequence
catgaatctacttctgatccttacc

SEQ ID NO: 120005 - DNA, 25 bp, Probe Sequence
ccatgaatctacttctgatccttac

SEQ ID NO: 120006 - DNA, 25 bp, Probe Sequence
tacttctgatccttacctttgttgc

SEQ ID NO: 120007 - DNA, 25 bp, Probe Sequence
ctacttctgatccttacctttgttg

SEQ ID NO: 120008 - DNA, 25 bp, Probe Sequence
tctacttctgatccttacctttgtt

SEQ ID NO: 120009 - DNA, 25 bp, Probe Sequence
atctacttctgatccttacctttgt

SEQ ID NO: 120010 - DNA, 25 bp, Probe Sequence
aatctacttctgatccttacctttg

SEQ ID NO: 120011 - DNA, 25 bp, Probe Sequence
gaatctacttctgatccttaccttt

SEQ ID NO: 120012 - DNA, 25 bp, Probe Sequence
acttctgatccttacctttgttgca

SEQ ID NO: 120013 - DNA, 25 bp, Probe Sequence
cttctgatccttacctttgttgcag

SEQ ID NO: 120014 - DNA, 25 bp, Probe Sequence
ttctgatccttacctttgttgcagc

SEQ ID NO: 120015 - DNA, 25 bp, Probe Sequence
tctgatccttacctttgttgcagct

SEQ ID NO: 120016 - DNA, 25 bp, Probe Sequence
ccagaagttgtcagcataatagaga

SEQ ID NO: 120017 - DNA, 25 bp, Probe Sequence
cagaagttgtcagcataatagagat

SEQ ID NO: 120018 - DNA, 25 bp, Probe Sequence
agaagttgtcagcataatagagatt

SEQ ID NO: 120019 - DNA, 25 bp, Probe Sequence
ttacagagagcttgattcaccagta

SEQ ID NO: 120020 - DNA, 25 bp, Probe Sequence
agcataatagagatttggaacgact

SEQ ID NO: 120021 - DNA, 25 bp, Probe Sequence
cagcataatagagatttggaacgac

SEQ ID NO: 120022 - DNA, 25 bp, Probe Sequence
tcagcataatagagatttggaacga

SEQ ID NO: 120023 - DNA, 25 bp, Probe Sequence
gtcagcataatagagatttggaacg

SEQ ID NO: 120024 - DNA, 25 bp, Probe Sequence
ctggttggatgtgagaaatagaaag

SEQ ID NO: 120025 - DNA, 25 bp, Probe Sequence
tggttggatgtgagaaatagaaagg

SEQ ID NO: 120026 - DNA, 25 bp, Probe Sequence
cttggagtcaactacatgaggatga

SEQ ID NO: 120027 - DNA, 25 bp, Probe Sequence
gcataatagagatttggaacgactt

SEQ ID NO: 120028 - DNA, 25 bp, Probe Sequence
cccagaagttgtcagcataatagag

SEQ ID NO: 120029 - DNA, 25 bp, Probe Sequence
tgtcagcataatagagatttggaac

SEQ ID NO: 120030 - DNA, 25 bp, Probe Sequence
gttgtcagcataatagagatttgga

SEQ ID NO: 120031 - DNA, 25 bp, Probe Sequence
agttgtcagcataatagagatttgg

SEQ ID NO: 120032 - DNA, 25 bp, Probe Sequence
aatagagatttggaacgacttgttg

SEQ ID NO: 120033 - DNA, 25 bp, Probe Sequence
tacagagagcttgattcaccagtac

SEQ ID NO: 120034 - DNA, 25 bp, Probe Sequence
gctggttggatgtgagaaatagaaa

SEQ ID NO: 120035 - DNA, 25 bp, Probe Sequence
acccagaagttgtcagcataataga

SEQ ID NO: 120036 - DNA, 25 bp, Probe Sequence
cacccagaagttgtcagcataatag

SEQ ID NO: 120037 - DNA, 25 bp, Probe Sequence
atagagatttggaacgacttgttgg

SEQ ID NO: 120038 - DNA, 25 bp, Probe Sequence
ttgtcagcataatagagatttggaa

SEQ ID NO: 120039 - DNA, 25 bp, Probe Sequence
cttacagagagcttgattcaccagt

SEQ ID NO: 120040 - DNA, 25 bp, Probe Sequence
ccaagatgagaataaccttcctgat

SEQ ID NO: 120041 - DNA, 25 bp, Probe Sequence
gatgagaataaccttcctgatctgg

SEQ ID NO: 120042 - DNA, 25 bp, Probe Sequence
caagatgagaataaccttcctgatc

SEQ ID NO: 120043 - DNA, 25 bp, Probe Sequence
atgagaataaccttcctgatctggt

SEQ ID NO: 120044 - DNA, 25 bp, Probe Sequence
agatgagaataaccttcctgatctg

SEQ ID NO: 120045 - DNA, 25 bp, Probe Sequence
aagatgagaataaccttcctgatct

SEQ ID NO: 120046 - DNA, 25 bp, Probe Sequence
accattcacctccagtaccagatag

SEQ ID NO: 120047 - DNA, 25 bp, Probe Sequence
gaccattcacctccagtaccagata

SEQ ID NO: 120048 - DNA, 25 bp, Probe Sequence
cccaagatgagaataaccttcctga

SEQ ID NO: 120049 - DNA, 25 bp, Probe Sequence
tttggaacatatcccacgaacattc

SEQ ID NO: 120050 - DNA, 25 bp, Probe Sequence
ctttggaacatatcccacgaacatt

SEQ ID NO: 120051 - DNA, 25 bp, Probe Sequence
ccattcacctccagtaccagatagg

SEQ ID NO: 120052 - DNA, 25 bp, Probe Sequence
aaatggaaatccagaaacccagatg

SEQ ID NO: 120053 - DNA, 25 bp, Probe Sequence
caaatggaaatccagaaacccagat

SEQ ID NO: 120054 - DNA, 25 bp, Probe Sequence
tttcaaccctggatgctttcaactg

SEQ ID NO: 120055 - DNA, 25 bp, Probe Sequence
ctcaaatggaaatccagaaacccag

SEQ ID NO: 120056 - DNA, 25 bp, Probe Sequence
ctgtgctcaaatggaaatccagaaa

SEQ ID NO: 120057 - DNA, 25 bp, Probe Sequence
gagatcagacctgaccattcacctc

SEQ ID NO: 120058 - DNA, 25 bp, Probe Sequence
tgagaataaccttcctgatctggtt

SEQ ID NO: 120059 - DNA, 25 bp, Probe Sequence
tgtgctcaaatggaaatccagaaac

SEQ ID NO: 120060 - DNA, 25 bp, Probe Sequence
gtccgtcagtcctttggaacatatc

SEQ ID NO: 120061 - DNA, 25 bp, Probe Sequence
gtttcaaccctggatgctttcaact

SEQ ID NO: 120062 - DNA, 25 bp, Probe Sequence
atggaaatccagaaacccagatgtt

SEQ ID NO: 120063 - DNA, 25 bp, Probe Sequence
aatggaaatccagaaacccagatgt

SEQ ID NO: 120064 - DNA, 25 bp, Probe Sequence
gcctctacaactactatgacaatga

SEQ ID NO: 120065 - DNA, 25 bp, Probe Sequence
acaactactatgacaatgagaagga

SEQ ID NO: 120066 - DNA, 25 bp, Probe Sequence
caactactatgacaatgagaaggaa

SEQ ID NO: 120067 - DNA, 25 bp, Probe Sequence
tacaactactatgacaatgagaagg

SEQ ID NO: 120068 - DNA, 25 bp, Probe Sequence
cctctacaactactatgacaatgag

SEQ ID NO: 120069 - DNA, 25 bp, Probe Sequence
ctctacaactactatgacaatgaga

SEQ ID NO: 120070 - DNA, 25 bp, Probe Sequence
ctacaactactatgacaatgagaag

SEQ ID NO: 120071 - DNA, 25 bp, Probe Sequence
tctacaactactatgacaatgagaa

SEQ ID NO: 120072 - DNA, 25 bp, Probe Sequence
ggcctctacaactactatgacaatg

SEQ ID NO: 120073 - DNA, 25 bp, Probe Sequence
aactactatgacaatgagaaggaaa

SEQ ID NO: 120074 - DNA, 25 bp, Probe Sequence
gcttcatggtgactcggttctatac

SEQ ID NO: 120075 - DNA, 25 bp, Probe Sequence
cttcatggtgactcggttctatacc

SEQ ID NO: 120076 - DNA, 25 bp, Probe Sequence
gaatgagaaattccaccacaagatg

SEQ ID NO: 120077 - DNA, 25 bp, Probe Sequence
ccattgacaagaacaaggcaaactt

SEQ ID NO: 120078 - DNA, 25 bp, Probe Sequence
aatgagaaattccaccacaagatgg

SEQ ID NO: 120079 - DNA, 25 bp, Probe Sequence
taaggttgacaagatgcaagacgag

SEQ ID NO: 120080 - DNA, 25 bp, Probe Sequence
ctaaggttgacaagatgcaagacga

SEQ ID NO: 120081 - DNA, 25 bp, Probe Sequence
ggcttcatggtgactcggttctata

SEQ ID NO: 120082 - DNA, 25 bp, Probe Sequence
tactatgacaatgagaaggaaaagc

SEQ ID NO: 120083 - DNA, 25 bp, Probe Sequence
atgttcttcaagccacactggaatg

SEQ ID NO: 120084 - DNA, 25 bp, Probe Sequence
caagccacactggaatgagaaattc

SEQ ID NO: 120085 - DNA, 25 bp, Probe Sequence
tcaagccacactggaatgagaaatt

SEQ ID NO: 120086 - DNA, 25 bp, Probe Sequence
ttcaagccacactggaatgagaaat

SEQ ID NO: 120087 - DNA, 25 bp, Probe Sequence
catgttcttcaagccacactggaat

SEQ ID NO: 120088 - DNA, 25 bp, Probe Sequence
cacagcgataatcttcttagagttg

SEQ ID NO: 120089 - DNA, 25 bp, Probe Sequence
ccacagcgataatcttcttagagtt

SEQ ID NO: 120090 - DNA, 25 bp, Probe Sequence
caatgtgttctccttattctgttgg

SEQ ID NO: 120091 - DNA, 25 bp, Probe Sequence
gaccacagcgataatcttcttagag

SEQ ID NO: 120092 - DNA, 25 bp, Probe Sequence
acagcgataatcttcttagagttgc

SEQ ID NO: 120093 - DNA, 25 bp, Probe Sequence
aatgtgttctccttattctgttggc

SEQ ID NO: 120094 - DNA, 25 bp, Probe Sequence
accacagcgataatcttcttagagt

SEQ ID NO: 120095 - DNA, 25 bp, Probe Sequence
ccttctacaatatgtgtgatggaca

SEQ ID NO: 120096 - DNA, 25 bp, Probe Sequence
tgtccttctacaatatgtgtgatgg

SEQ ID NO: 120097 - DNA, 25 bp, Probe Sequence
aagtgtccttctacaatatgtgtga

SEQ ID NO: 120098 - DNA, 25 bp, Probe Sequence
caagtgtccttctacaatatgtgtg

SEQ ID NO: 120099 - DNA, 25 bp, Probe Sequence
gtgtccttctacaatatgtgtgatg

SEQ ID NO: 120100 - DNA, 25 bp, Probe Sequence
agtgtccttctacaatatgtgtgat

SEQ ID NO: 120101 - DNA, 25 bp, Probe Sequence
aggaccacagcgataatcttcttag

SEQ ID NO: 120102 - DNA, 25 bp, Probe Sequence
acaatgtgttctccttattctgttg

SEQ ID NO: 120103 - DNA, 25 bp, Probe Sequence
caggaccacagcgataatcttctta

SEQ ID NO: 120104 - DNA, 25 bp, Probe Sequence
cttctacaatatgtgtgatggacaa

SEQ ID NO: 120105 - DNA, 25 bp, Probe Sequence
gcaagtgtccttctacaatatgtgt

SEQ ID NO: 120106 - DNA, 25 bp, Probe Sequence
gatggctaattatgtcaacatgctt

SEQ ID NO: 120107 - DNA, 25 bp, Probe Sequence
ggaccacagcgataatcttcttaga

SEQ ID NO: 120108 - DNA, 25 bp, Probe Sequence
gagatggctaattatgtcaacatgc

SEQ ID NO: 120109 - DNA, 25 bp, Probe Sequence
aggtacaatgagaatcaagatgaga

SEQ ID NO: 120110 - DNA, 25 bp, Probe Sequence
agatggctaattatgtcaacatgct

SEQ ID NO: 120111 - DNA, 25 bp, Probe Sequence
ctacaatgtgttctccttattctgt

SEQ ID NO: 120112 - DNA, 25 bp, Probe Sequence
agtatatgtgaaccagaggaatgtg

SEQ ID NO: 120113 - DNA, 25 bp, Probe Sequence
ggaagtatatgtgaaccagaggaat

SEQ ID NO: 120114 - DNA, 25 bp, Probe Sequence
aagtatatgtgaaccagaggaatgt

SEQ ID NO: 120115 - DNA, 25 bp, Probe Sequence
gaagtatatgtgaaccagaggaatg

SEQ ID NO: 120116 - DNA, 25 bp, Probe Sequence
gtatatgtgaaccagaggaatgtgg

SEQ ID NO: 120117 - DNA, 25 bp, Probe Sequence
tggaagtatatgtgaaccagaggaa

SEQ ID NO: 120118 - DNA, 25 bp, Probe Sequence
gcttccaatcaagtttgtatgagtg

SEQ ID NO: 120119 - DNA, 25 bp, Probe Sequence
ttaagatacaaatggcggaggattg

SEQ ID NO: 120120 - DNA, 25 bp, Probe Sequence
tatatgtgaaccagaggaatgtggc

SEQ ID NO: 120121 - DNA, 25 bp, Probe Sequence
ggcttccaatcaagtttgtatgagt

SEQ ID NO: 120122 - DNA, 25 bp, Probe Sequence
aatcaagtttgtatgagtggaccct

SEQ ID NO: 120123 - DNA, 25 bp, Probe Sequence
caatcaagtttgtatgagtggaccc

SEQ ID NO: 120124 - DNA, 25 bp, Probe Sequence
tacatgctggaagtatatgtgaacc

SEQ ID NO: 120125 - DNA, 25 bp, Probe Sequence
actacatgctggaagtatatgtgaa

SEQ ID NO: 120126 - DNA, 25 bp, Probe Sequence
ctacatgctggaagtatatgtgaac

SEQ ID NO: 120127 - DNA, 25 bp, Probe Sequence
cttccaatcaagtttgtatgagtgg

SEQ ID NO: 120128 - DNA, 25 bp, Probe Sequence
tactacatgctggaagtatatgtga

SEQ ID NO: 120129 - DNA, 25 bp, Probe Sequence
atgtggcttccaatcaagtttgtat

SEQ ID NO: 120130 - DNA, 25 bp, Probe Sequence
atcaagtttgtatgagtggaccctg

SEQ ID NO: 120131 - DNA, 25 bp, Probe Sequence
ttactacatgctggaagtatatgtg

SEQ ID NO: 120132 - DNA, 25 bp, Probe Sequence
ccgtttactacatgctggaagtata

SEQ ID NO: 120133 - DNA, 25 bp, Probe Sequence
tggcttccaatcaagtttgtatgag

SEQ ID NO: 120134 - DNA, 25 bp, Probe Sequence
acatgctggaagtatatgtgaacca

SEQ ID NO: 120135 - DNA, 25 bp, Probe Sequence
gtggcttccaatcaagtttgtatga

SEQ ID NO: 120136 - DNA, 25 bp, Probe Sequence
ttagagacaacacagagcagtgatg

SEQ ID NO: 120137 - DNA, 25 bp, Probe Sequence
tttagagacaacacagagcagtgat

SEQ ID NO: 120138 - DNA, 25 bp, Probe Sequence
atggactggattttagagacaacac

SEQ ID NO: 120139 - DNA, 25 bp, Probe Sequence
gattttagagacaacacagagcagt

SEQ ID NO: 120140 - DNA, 25 bp, Probe Sequence
tagagacaacacagagcagtgatgg

SEQ ID NO: 120141 - DNA, 25 bp, Probe Sequence
ggattttagagacaacacagagcag

SEQ ID NO: 120142 - DNA, 25 bp, Probe Sequence
tggactggattttagagacaacaca

SEQ ID NO: 120143 - DNA, 25 bp, Probe Sequence
gtacatggactggattttagagaca

SEQ ID NO: 120144 - DNA, 25 bp, Probe Sequence
tacatggactggattttagagacaa

SEQ ID NO: 120145 - DNA, 25 bp, Probe Sequence
catggactggattttagagacaaca

SEQ ID NO: 120146 - DNA, 25 bp, Probe Sequence
acatggactggattttagagacaac

SEQ ID NO: 120147 - DNA, 25 bp, Probe Sequence
tggattttagagacaacacagagca

SEQ ID NO: 120148 - DNA, 25 bp, Probe Sequence
actggattttagagacaacacagag

SEQ ID NO: 120149 - DNA, 25 bp, Probe Sequence
gactggattttagagacaacacaga

SEQ ID NO: 120150 - DNA, 25 bp, Probe Sequence
agtacatggactggattttagagac

SEQ ID NO: 120151 - DNA, 25 bp, Probe Sequence
ggactggattttagagacaacacag

SEQ ID NO: 120152 - DNA, 25 bp, Probe Sequence
attttagagacaacacagagcagtg

SEQ ID NO: 120153 - DNA, 25 bp, Probe Sequence
ctggattttagagacaacacagagc

SEQ ID NO: 120154 - DNA, 25 bp, Probe Sequence
gagacaacacagagcagtgatggaa

SEQ ID NO: 120155 - DNA, 25 bp, Probe Sequence
ttttagagacaacacagagcagtga

SEQ ID NO: 120156 - DNA, 25 bp, Probe Sequence
agacaacacagagcagtgatggaaa

SEQ ID NO: 120157 - DNA, 25 bp, Probe Sequence
acaacacagagcagtgatggaaaag

SEQ ID NO: 120158 - DNA, 25 bp, Probe Sequence
gacaacacagagcagtgatggaaaa

SEQ ID NO: 120159 - DNA, 25 bp, Probe Sequence
caacacagagcagtgatggaaaagc

SEQ ID NO: 120160 - DNA, 25 bp, Probe Sequence
tctataccaataaagtgaccttgct

SEQ ID NO: 120161 - DNA, 25 bp, Probe Sequence
ctctataccaataaagtgaccttgc

SEQ ID NO: 120162 - DNA, 25 bp, Probe Sequence
atacaacagttggactctggacaat

SEQ ID NO: 120163 - DNA, 25 bp, Probe Sequence
aatacaacagttggactctggacaa

SEQ ID NO: 120164 - DNA, 25 bp, Probe Sequence
tacaacagttggactctggacaatg

SEQ ID NO: 120165 - DNA, 25 bp, Probe Sequence
tctctataccaataaagtgaccttg

SEQ ID NO: 120166 - DNA, 25 bp, Probe Sequence
agtctctataccaataaagtgacct

SEQ ID NO: 120167 - DNA, 25 bp, Probe Sequence
cagttggactctggacaatgacatc

SEQ ID NO: 120168 - DNA, 25 bp, Probe Sequence
gtctctataccaataaagtgacctt

SEQ ID NO: 120169 - DNA, 25 bp, Probe Sequence
acactctaccaccatgaatccactc

SEQ ID NO: 120170 - DNA, 25 bp, Probe Sequence
caaatacaacagttggactctggac

SEQ ID NO: 120171 - DNA, 25 bp, Probe Sequence
acagttggactctggacaatgacat

SEQ ID NO: 120172 - DNA, 25 bp, Probe Sequence
aaatacaacagttggactctggaca

SEQ ID NO: 120173 - DNA, 25 bp, Probe Sequence
aacagttggactctggacaatgaca

SEQ ID NO: 120174 - DNA, 25 bp, Probe Sequence
caacagttggactctggacaatgac

SEQ ID NO: 120175 - DNA, 25 bp, Probe Sequence
acaacagttggactctggacaatga

SEQ ID NO: 120176 - DNA, 25 bp, Probe Sequence
ttggactctggacaatgacatcctg

SEQ ID NO: 120177 - DNA, 25 bp, Probe Sequence
gttggactctggacaatgacatcct

SEQ ID NO: 120178 - DNA, 25 bp, Probe Sequence
agttggactctggacaatgacatcc

SEQ ID NO: 120179 - DNA, 25 bp, Probe Sequence
caccaagttcctcatctctggctag

SEQ ID NO: 120180 - DNA, 25 bp, Probe Sequence
ccaaatacaacagttggactctgga

SEQ ID NO: 120181 - DNA, 25 bp, Probe Sequence
cccaaatacaacagttggactctgg

SEQ ID NO: 120182 - DNA, 25 bp, Probe Sequence
ccccaaatacaacagttggactctg

SEQ ID NO: 120183 - DNA, 25 bp, Probe Sequence
caccccaaatacaacagttggactc

SEQ ID NO: 120184 - DNA, 25 bp, Probe Sequence
gatcaaaggctacaaggacatcttc

SEQ ID NO: 120185 - DNA, 25 bp, Probe Sequence
ctacaaggacatcttcgtcactgtg

SEQ ID NO: 120186 - DNA, 25 bp, Probe Sequence
atcaaaggctacaaggacatcttcg

SEQ ID NO: 120187 - DNA, 25 bp, Probe Sequence
ggagatcaaaggctacaaggacatc

SEQ ID NO: 120188 - DNA, 25 bp, Probe Sequence
agatcaaaggctacaaggacatctt

SEQ ID NO: 120189 - DNA, 25 bp, Probe Sequence
gagatcaaaggctacaaggacatct

SEQ ID NO: 120190 - DNA, 25 bp, Probe Sequence
tacaaggacatcttcgtcactgtgg

SEQ ID NO: 120191 - DNA, 25 bp, Probe Sequence
tcaaaggctacaaggacatcttcgt

SEQ ID NO: 120192 - DNA, 25 bp, Probe Sequence
gctacaaggacatcttcgtcactgt

SEQ ID NO: 120193 - DNA, 25 bp, Probe Sequence
aaggctacaaggacatcttcgtcac

SEQ ID NO: 120194 - DNA, 25 bp, Probe Sequence
caaaggctacaaggacatcttcgtc

SEQ ID NO: 120195 - DNA, 25 bp, Probe Sequence
aaaggctacaaggacatcttcgtca

SEQ ID NO: 120196 - DNA, 25 bp, Probe Sequence
ggtagatattgggctcatcaaactc

SEQ ID NO: 120197 - DNA, 25 bp, Probe Sequence
aggtagatattgggctcatcaaact

SEQ ID NO: 120198 - DNA, 25 bp, Probe Sequence
caggtagatattgggctcatcaaac

SEQ ID NO: 120199 - DNA, 25 bp, Probe Sequence
ctcatcaaactcaaacagaagtgtc

SEQ ID NO: 120200 - DNA, 25 bp, Probe Sequence
tcatcaaactcaaacagaagtgtct

SEQ ID NO: 120201 - DNA, 25 bp, Probe Sequence
gctcatcaaactcaaacagaagtgt

SEQ ID NO: 120202 - DNA, 25 bp, Probe Sequence
ggctcatcaaactcaaacagaagtg

SEQ ID NO: 120203 - DNA, 25 bp, Probe Sequence
ccctaactactcccaggtagatatt

SEQ ID NO: 120204 - DNA, 25 bp, Probe Sequence
ctaactactcccaggtagatattgg

SEQ ID NO: 120205 - DNA, 25 bp, Probe Sequence
cctaactactcccaggtagatattg

SEQ ID NO: 120206 - DNA, 25 bp, Probe Sequence
tgttctacaccctaactactcccag

SEQ ID NO: 120207 - DNA, 25 bp, Probe Sequence
accctaactactcccaggtagatat

SEQ ID NO: 120208 - DNA, 25 bp, Probe Sequence
ccaggtagatattgggctcatcaaa

SEQ ID NO: 120209 - DNA, 25 bp, Probe Sequence
caccctaactactcccaggtagata

SEQ ID NO: 120210 - DNA, 25 bp, Probe Sequence
gggctcatcaaactcaaacagaagt

SEQ ID NO: 120211 - DNA, 25 bp, Probe Sequence
tctacaccctaactactcccaggta

SEQ ID NO: 120212 - DNA, 25 bp, Probe Sequence
gttctacaccctaactactcccagg

SEQ ID NO: 120213 - DNA, 25 bp, Probe Sequence
ctacaccctaactactcccaggtag

SEQ ID NO: 120214 - DNA, 25 bp, Probe Sequence
tacaccctaactactcccaggtaga

SEQ ID NO: 120215 - DNA, 25 bp, Probe Sequence
catcaaactcaaacagaagtgtctg

SEQ ID NO: 120216 - DNA, 25 bp, Probe Sequence
ttctacaccctaactactcccaggt

SEQ ID NO: 120217 - DNA, 25 bp, Probe Sequence
atcaaactcaaacagaagtgtctgg

SEQ ID NO: 120218 - DNA, 25 bp, Probe Sequence
acaccctaactactcccaggtagat

SEQ ID NO: 120219 - DNA, 25 bp, Probe Sequence
tatgtgaaggtgacttccatccagc

SEQ ID NO: 120220 - DNA, 25 bp, Probe Sequence
caataaatatctgccgtgaacagtg

SEQ ID NO: 120221 - DNA, 25 bp, Probe Sequence
gatgacaagggctcagactttatcc

SEQ ID NO: 120222 - DNA, 25 bp, Probe Sequence
cgatgacaagggctcagactttatc

SEQ ID NO: 120223 - DNA, 25 bp, Probe Sequence
atgacaagggctcagactttatcca

SEQ ID NO: 120224 - DNA, 25 bp, Probe Sequence
gacaagggctcagactttatccaga

SEQ ID NO: 120225 - DNA, 25 bp, Probe Sequence
gcaataaatatctgccgtgaacagt

SEQ ID NO: 120226 - DNA, 25 bp, Probe Sequence
aagggctcagactttatccagacac

SEQ ID NO: 120227 - DNA, 25 bp, Probe Sequence
caagggctcagactttatccagaca

SEQ ID NO: 120228 - DNA, 25 bp, Probe Sequence
acaagggctcagactttatccagac

SEQ ID NO: 120229 - DNA, 25 bp, Probe Sequence
tgacaagggctcagactttatccag

SEQ ID NO: 120230 - DNA, 25 bp, Probe Sequence
tgcaataaatatctgccgtgaacag

SEQ ID NO: 120231 - DNA, 25 bp, Probe Sequence
agggctcagactttatccagacact

SEQ ID NO: 120232 - DNA, 25 bp, Probe Sequence
gtgcaataaatatctgccgtgaaca

SEQ ID NO: 120233 - DNA, 25 bp, Probe Sequence
gggctcagactttatccagacactg

SEQ ID NO: 120234 - DNA, 25 bp, Probe Sequence
aaagtcttcctgctgctctcaagtg

SEQ ID NO: 120235 - DNA, 25 bp, Probe Sequence
caaagtcttcctgctgctctcaagt

SEQ ID NO: 120236 - DNA, 25 bp, Probe Sequence
gcgatgacaagggctcagactttat

SEQ ID NO: 120237 - DNA, 25 bp, Probe Sequence
cgtgcaataaatatctgccgtgaac

SEQ ID NO: 120238 - DNA, 25 bp, Probe Sequence
ccgtgcaataaatatctgccgtgaa

SEQ ID NO: 120239 - DNA, 25 bp, Probe Sequence
ctcagactttatccagacactggtg

SEQ ID NO: 120240 - DNA, 25 bp, Probe Sequence
agactttatccagacactggtggag

SEQ ID NO: 120241 - DNA, 25 bp, Probe Sequence
cagactttatccagacactggtgga

SEQ ID NO: 120242 - DNA, 25 bp, Probe Sequence
tcagactttatccagacactggtgg

SEQ ID NO: 120243 - DNA, 25 bp, Probe Sequence
gctcagactttatccagacactggt

SEQ ID NO: 120244 - DNA, 25 bp, Probe Sequence
aaagatggtggcgatgatagtattt

SEQ ID NO: 120245 - DNA, 25 bp, Probe Sequence
aagatggtggcgatgatagtatttc

SEQ ID NO: 120246 - DNA, 25 bp, Probe Sequence
gaaagatggtggcgatgatagtatt

SEQ ID NO: 120247 - DNA, 25 bp, Probe Sequence
gatgatagtatttccacagaagccc

SEQ ID NO: 120248 - DNA, 25 bp, Probe Sequence
atgatagtatttccacagaagccct

SEQ ID NO: 120249 - DNA, 25 bp, Probe Sequence
cgatgatagtatttccacagaagcc

SEQ ID NO: 120250 - DNA, 25 bp, Probe Sequence
ggcgatgatagtatttccacagaag

SEQ ID NO: 120251 - DNA, 25 bp, Probe Sequence
gcgatgatagtatttccacagaagc

SEQ ID NO: 120252 - DNA, 25 bp, Probe Sequence
agatggtggcgatgatagtatttcc

SEQ ID NO: 120253 - DNA, 25 bp, Probe Sequence
gtttgaaagatggtggcgatgatag

SEQ ID NO: 120254 - DNA, 25 bp, Probe Sequence
tttggatggaagttctagtgtggag

SEQ ID NO: 120255 - DNA, 25 bp, Probe Sequence
ctttggatggaagttctagtgtgga

SEQ ID NO: 120256 - DNA, 25 bp, Probe Sequence
ttggatggaagttctagtgtggagg

SEQ ID NO: 120257 - DNA, 25 bp, Probe Sequence
tgtttgaaagatggtggcgatgata

SEQ ID NO: 120258 - DNA, 25 bp, Probe Sequence
tgatagtatttccacagaagccctg

SEQ ID NO: 120259 - DNA, 25 bp, Probe Sequence
tggcgatgatagtatttccacagaa

SEQ ID NO: 120260 - DNA, 25 bp, Probe Sequence
gatggtggcgatgatagtatttcca

SEQ ID NO: 120261 - DNA, 25 bp, Probe Sequence
gatagtatttccacagaagccctgg

SEQ ID NO: 120262 - DNA, 25 bp, Probe Sequence
ctcgctttggatggaagttctagtg

SEQ ID NO: 120263 - DNA, 25 bp, Probe Sequence
ctgtttgaaagatggtggcgatgat

SEQ ID NO: 120264 - DNA, 25 bp, Probe Sequence
gctttggatggaagttctagtgtgg

SEQ ID NO: 120265 - DNA, 25 bp, Probe Sequence
cgctttggatggaagttctagtgtg

SEQ ID NO: 120266 - DNA, 25 bp, Probe Sequence
tcgctttggatggaagttctagtgt

SEQ ID NO: 120267 - DNA, 25 bp, Probe Sequence
cctcgctttggatggaagttctagt

SEQ ID NO: 120268 - DNA, 25 bp, Probe Sequence
ctatatgctgtcatcaaccactatg

SEQ ID NO: 120269 - DNA, 25 bp, Probe Sequence
tctatatgctgtcatcaaccactat

SEQ ID NO: 120270 - DNA, 25 bp, Probe Sequence
atctatatgctgtcatcaaccacta

SEQ ID NO: 120271 - DNA, 25 bp, Probe Sequence
gttatgcctatgtactcttctaccg

SEQ ID NO: 120272 - DNA, 25 bp, Probe Sequence
cgttatgcctatgtactcttctacc

SEQ ID NO: 120273 - DNA, 25 bp, Probe Sequence
tacgatctatatgctgtcatcaacc

SEQ ID NO: 120274 - DNA, 25 bp, Probe Sequence
gatctatatgctgtcatcaaccact

SEQ ID NO: 120275 - DNA, 25 bp, Probe Sequence
gctacgatctatatgctgtcatcaa

SEQ ID NO: 120276 - DNA, 25 bp, Probe Sequence
gcgttatgcctatgtactcttctac

SEQ ID NO: 120277 - DNA, 25 bp, Probe Sequence
ctacgatctatatgctgtcatcaac

SEQ ID NO: 120278 - DNA, 25 bp, Probe Sequence
cgatctatatgctgtcatcaaccac

SEQ ID NO: 120279 - DNA, 25 bp, Probe Sequence
ttatgcctatgtactcttctaccgc

SEQ ID NO: 120280 - DNA, 25 bp, Probe Sequence
acgatctatatgctgtcatcaacca

SEQ ID NO: 120281 - DNA, 25 bp, Probe Sequence
tatatgctgtcatcaaccactatgg

SEQ ID NO: 120282 - DNA, 25 bp, Probe Sequence
atatgctgtcatcaaccactatgga

SEQ ID NO: 120283 - DNA, 25 bp, Probe Sequence
tcaacgtgttctatcctctggtatc

SEQ ID NO: 120284 - DNA, 25 bp, Probe Sequence
ctcaacgtgttctatcctctggtat

SEQ ID NO: 120285 - DNA, 25 bp, Probe Sequence
agctacgatctatatgctgtcatca

SEQ ID NO: 120286 - DNA, 25 bp, Probe Sequence
tatgctgtcatcaaccactatggag

SEQ ID NO: 120287 - DNA, 25 bp, Probe Sequence
aagatcaatgacttggtggagttcc

SEQ ID NO: 120288 - DNA, 25 bp, Probe Sequence
tatgcctatgtactcttctaccgcc

SEQ ID NO: 120289 - DNA, 25 bp, Probe Sequence
aattgattcatccaaccgagagcag

SEQ ID NO: 120290 - DNA, 25 bp, Probe Sequence
caacgtgttctatcctctggtatcc

SEQ ID NO: 120291 - DNA, 25 bp, Probe Sequence
ttatctggcgtgacaagatcaatga

SEQ ID NO: 120292 - DNA, 25 bp, Probe Sequence
aaataaagtttacaagcacacggtt

SEQ ID NO: 120293 - DNA, 25 bp, Probe Sequence
aataaagtttacaagcacacggttc

SEQ ID NO: 120294 - DNA, 25 bp, Probe Sequence
ataaagtttacaagcacacggttct

SEQ ID NO: 120295 - DNA, 25 bp, Probe Sequence
actgtatgtttctctactgtatgga

SEQ ID NO: 120296 - DNA, 25 bp, Probe Sequence
tgttgcttgtactgtatgtttctct

SEQ ID NO: 120297 - DNA, 25 bp, Probe Sequence
gtgttgcttgtactgtatgtttctc

SEQ ID NO: 120298 - DNA, 25 bp, Probe Sequence
tgcttgtactgtatgtttctctact

SEQ ID NO: 120299 - DNA, 25 bp, Probe Sequence
cagagttccaagacaagcagatcaa

SEQ ID NO: 120300 - DNA, 25 bp, Probe Sequence
taaagtttacaagcacacggttctc

SEQ ID NO: 120301 - DNA, 25 bp, Probe Sequence
gcttgtactgtatgtttctctactg

SEQ ID NO: 120302 - DNA, 25 bp, Probe Sequence
gttgcttgtactgtatgtttctcta

SEQ ID NO: 120303 - DNA, 25 bp, Probe Sequence
ttgcttgtactgtatgtttctctac

SEQ ID NO: 120304 - DNA, 25 bp, Probe Sequence
agtgttgcttgtactgtatgtttct

SEQ ID NO: 120305 - DNA, 25 bp, Probe Sequence
ctgtatgtttctctactgtatggaa

SEQ ID NO: 120306 - DNA, 25 bp, Probe Sequence
gttcctcacagagttccaagacaag

SEQ ID NO: 120307 - DNA, 25 bp, Probe Sequence
tacagatgatcctgaaagtcacttc

SEQ ID NO: 120308 - DNA, 25 bp, Probe Sequence
gtacagatgatcctgaaagtcactt

SEQ ID NO: 120309 - DNA, 25 bp, Probe Sequence
cttgtactgtatgtttctctactgt

SEQ ID NO: 120310 - DNA, 25 bp, Probe Sequence
gatgatcctgaaagtcacttccaag

SEQ ID NO: 120311 - DNA, 25 bp, Probe Sequence
gatcctgaaagtcacttccaagttc

SEQ ID NO: 120312 - DNA, 25 bp, Probe Sequence
tcacagagttccaagacaagcagat

SEQ ID NO: 120313 - DNA, 25 bp, Probe Sequence
tactgtatgtttctctactgtatgg

SEQ ID NO: 120314 - DNA, 25 bp, Probe Sequence
agatgatcctgaaagtcacttccaa

SEQ ID NO: 120315 - DNA, 25 bp, Probe Sequence
gagttccaagacaagcagatcaaag

SEQ ID NO: 120316 - DNA, 25 bp, Probe Sequence
tgtcagaggtcattgtaataacttc

SEQ ID NO: 120317 - DNA, 25 bp, Probe Sequence
agaggtcattgtaataacttcttgg

SEQ ID NO: 120318 - DNA, 25 bp, Probe Sequence
gtcagaggtcattgtaataacttct

SEQ ID NO: 120319 - DNA, 25 bp, Probe Sequence
atgtcagaggtcattgtaataactt

SEQ ID NO: 120320 - DNA, 25 bp, Probe Sequence
cagaggtcattgtaataacttcttg

SEQ ID NO: 120321 - DNA, 25 bp, Probe Sequence
tcagaggtcattgtaataacttctt

SEQ ID NO: 120322 - DNA, 25 bp, Probe Sequence
aggtcattgtaataacttcttggga

SEQ ID NO: 120323 - DNA, 25 bp, Probe Sequence
gaggtcattgtaataacttcttggg

SEQ ID NO: 120324 - DNA, 25 bp, Probe Sequence
ataacttcttgggaaattaggcaga

SEQ ID NO: 120325 - DNA, 25 bp, Probe Sequence
aataacttcttgggaaattaggcag

SEQ ID NO: 120326 - DNA, 25 bp, Probe Sequence
ggtcattgtaataacttcttgggaa

SEQ ID NO: 120327 - DNA, 25 bp, Probe Sequence
ttctatgtgcagattgacttcagtc

SEQ ID NO: 120328 - DNA, 25 bp, Probe Sequence
taataacttcttgggaaattaggca

SEQ ID NO: 120329 - DNA, 25 bp, Probe Sequence
aatgtcagaggtcattgtaataact

SEQ ID NO: 120330 - DNA, 25 bp, Probe Sequence
gtaataacttcttgggaaattaggc

SEQ ID NO: 120331 - DNA, 25 bp, Probe Sequence
gcagattgacttcagtcgtccatat

SEQ ID NO: 120332 - DNA, 25 bp, Probe Sequence
ttgggaaattaggcagaaagggaaa

SEQ ID NO: 120333 - DNA, 25 bp, Probe Sequence
gtcattgtaataacttcttgggaaa

SEQ ID NO: 120334 - DNA, 25 bp, Probe Sequence
gattgacttcagtcgtccatatgac

SEQ ID NO: 120335 - DNA, 25 bp, Probe Sequence
agattgacttcagtcgtccatatga

SEQ ID NO: 120336 - DNA, 25 bp, Probe Sequence
cagattgacttcagtcgtccatatg

SEQ ID NO: 120337 - DNA, 25 bp, Probe Sequence
ctttctatgtgcagattgacttcag

SEQ ID NO: 120338 - DNA, 25 bp, Probe Sequence
tctttctatgtgcagattgacttca

SEQ ID NO: 120339 - DNA, 25 bp, Probe Sequence
tttctatgtgcagattgacttcagt

SEQ ID NO: 120340 - DNA, 25 bp, Probe Sequence
gaagaactcggtattccagaatcac

SEQ ID NO: 120341 - DNA, 25 bp, Probe Sequence
aagaactcggtattccagaatcaca

SEQ ID NO: 120342 - DNA, 25 bp, Probe Sequence
cggatacaagaatgagagctatgat

SEQ ID NO: 120343 - DNA, 25 bp, Probe Sequence
atacaagaatgagagctatgatgcc

SEQ ID NO: 120344 - DNA, 25 bp, Probe Sequence
gatacaagaatgagagctatgatgc

SEQ ID NO: 120345 - DNA, 25 bp, Probe Sequence
agaactcggtattccagaatcacag

SEQ ID NO: 120346 - DNA, 25 bp, Probe Sequence
ggatacaagaatgagagctatgatg

SEQ ID NO: 120347 - DNA, 25 bp, Probe Sequence
tacaagaatgagagctatgatgcct

SEQ ID NO: 120348 - DNA, 25 bp, Probe Sequence
ttcacaaagactttaagagagccaa

SEQ ID NO: 120349 - DNA, 25 bp, Probe Sequence
acaaagactttaagagagccaacat

SEQ ID NO: 120350 - DNA, 25 bp, Probe Sequence
gaactcggtattccagaatcacagg

SEQ ID NO: 120351 - DNA, 25 bp, Probe Sequence
tcacaaagactttaagagagccaac

SEQ ID NO: 120352 - DNA, 25 bp, Probe Sequence
cttcacaaagactttaagagagcca

SEQ ID NO: 120353 - DNA, 25 bp, Probe Sequence
caaagactttaagagagccaacatg

SEQ ID NO: 120354 - DNA, 25 bp, Probe Sequence
cacaaagactttaagagagccaaca

SEQ ID NO: 120355 - DNA, 25 bp, Probe Sequence
acaagaatgagagctatgatgcctg

SEQ ID NO: 120356 - DNA, 25 bp, Probe Sequence
caggtgagtattcaggcaagaagtg

SEQ ID NO: 120357 - DNA, 25 bp, Probe Sequence
ttaagagagccaacatggacaatga

SEQ ID NO: 120358 - DNA, 25 bp, Probe Sequence
aggtgagtattcaggcaagaagtga

SEQ ID NO: 120359 - DNA, 25 bp, Probe Sequence
aggagtgttcaaagatgtttccaaa

SEQ ID NO: 120360 - DNA, 25 bp, Probe Sequence
ccggatacaagaatgagagctatga

SEQ ID NO: 120361 - DNA, 25 bp, Probe Sequence
gaggagtgttcaaagatgtttccaa

SEQ ID NO: 120362 - DNA, 25 bp, Probe Sequence
gtgagtattcaggcaagaagtgaac

SEQ ID NO: 120363 - DNA, 25 bp, Probe Sequence
cagtgaatgtggtgacagatctatt

SEQ ID NO: 120364 - DNA, 25 bp, Probe Sequence
ctgaacaatgagaacacatgaacat

SEQ ID NO: 120365 - DNA, 25 bp, Probe Sequence
aacaatgagaacacatgaacatagg

SEQ ID NO: 120366 - DNA, 25 bp, Probe Sequence
tgaacaatgagaacacatgaacata

SEQ ID NO: 120367 - DNA, 25 bp, Probe Sequence
gaacaatgagaacacatgaacatag

SEQ ID NO: 120368 - DNA, 25 bp, Probe Sequence
aaaccattatcctcagcaaactaac

SEQ ID NO: 120369 - DNA, 25 bp, Probe Sequence
gaaaccattatcctcagcaaactaa

SEQ ID NO: 120370 - DNA, 25 bp, Probe Sequence
acatttacctatgaaacaaacctgc

SEQ ID NO: 120371 - DNA, 25 bp, Probe Sequence
aatgacagactggataaagcaaatg

SEQ ID NO: 120372 - DNA, 25 bp, Probe Sequence
caatgacagactggataaagcaaat

SEQ ID NO: 120373 - DNA, 25 bp, Probe Sequence
ggcacacatttacctatgaaacaaa

SEQ ID NO: 120374 - DNA, 25 bp, Probe Sequence
gctgaacaatgagaacacatgaaca

SEQ ID NO: 120375 - DNA, 25 bp, Probe Sequence
gcacacatttacctatgaaacaaac

SEQ ID NO: 120376 - DNA, 25 bp, Probe Sequence
tcaatgacagactggataaagcaaa

SEQ ID NO: 120377 - DNA, 25 bp, Probe Sequence
atcaatgacagactggataaagcaa

SEQ ID NO: 120378 - DNA, 25 bp, Probe Sequence
atggcacacatttacctatgaaaca

SEQ ID NO: 120379 - DNA, 25 bp, Probe Sequence
aaccattatcctcagcaaactaacg

SEQ ID NO: 120380 - DNA, 25 bp, Probe Sequence
cagactggataaagcaaatgtggta

SEQ ID NO: 120381 - DNA, 25 bp, Probe Sequence
gagctgaacaatgagaacacatgaa

SEQ ID NO: 120382 - DNA, 25 bp, Probe Sequence
cacacatttacctatgaaacaaacc

SEQ ID NO: 120383 - DNA, 25 bp, Probe Sequence
tggcacacatttacctatgaaacaa

SEQ ID NO: 120384 - DNA, 25 bp, Probe Sequence
acacatttacctatgaaacaaacct

SEQ ID NO: 120385 - DNA, 25 bp, Probe Sequence
catcaatgacagactggataaagca

SEQ ID NO: 120386 - DNA, 25 bp, Probe Sequence
agctgaacaatgagaacacatgaac

SEQ ID NO: 120387 - DNA, 25 bp, Probe Sequence
cacatttacctatgaaacaaacctg

SEQ ID NO: 120388 - DNA, 25 bp, Probe Sequence
tgtatgctgatgaataactgagtga

SEQ ID NO: 120389 - DNA, 25 bp, Probe Sequence
atgctgatgaataactgagtgaatg

SEQ ID NO: 120390 - DNA, 25 bp, Probe Sequence
atgtatgctgatgaataactgagtg

SEQ ID NO: 120391 - DNA, 25 bp, Probe Sequence
gtatgctgatgaataactgagtgaa

SEQ ID NO: 120392 - DNA, 25 bp, Probe Sequence
gctgatgaataactgagtgaatgct

SEQ ID NO: 120393 - DNA, 25 bp, Probe Sequence
ctgatgaataactgagtgaatgctc

SEQ ID NO: 120394 - DNA, 25 bp, Probe Sequence
tgctgatgaataactgagtgaatgc

SEQ ID NO: 120395 - DNA, 25 bp, Probe Sequence
tatgctgatgaataactgagtgaat

SEQ ID NO: 120396 - DNA, 25 bp, Probe Sequence
tgatgaataactgagtgaatgctcg

SEQ ID NO: 120397 - DNA, 25 bp, Probe Sequence
gctgatctagtaacttgcgagtatt

SEQ ID NO: 120398 - DNA, 25 bp, Probe Sequence
aactattaactgagtagccacaatt

SEQ ID NO: 120399 - DNA, 25 bp, Probe Sequence
ctaactattaactgagtagccacaa

SEQ ID NO: 120400 - DNA, 25 bp, Probe Sequence
tatgtatgctgatgaataactgagt

SEQ ID NO: 120401 - DNA, 25 bp, Probe Sequence
tgctgatctagtaacttgcgagtat

SEQ ID NO: 120402 - DNA, 25 bp, Probe Sequence
ttgctgatctagtaacttgcgagta

SEQ ID NO: 120403 - DNA, 25 bp, Probe Sequence
ttaactgagtagccacaattagtaa

SEQ ID NO: 120404 - DNA, 25 bp, Probe Sequence
gatgaataactgagtgaatgctcgc

SEQ ID NO: 120405 - DNA, 25 bp, Probe Sequence
taactattaactgagtagccacaat

SEQ ID NO: 120406 - DNA, 25 bp, Probe Sequence
gcagtttagttaatatgtgttggga

SEQ ID NO: 120407 - DNA, 25 bp, Probe Sequence
attaactgagtagccacaattagta

SEQ ID NO: 120408 - DNA, 25 bp, Probe Sequence
tattaactgagtagccacaattagt

SEQ ID NO: 120409 - DNA, 25 bp, Probe Sequence
actattaactgagtagccacaatta

SEQ ID NO: 120410 - DNA, 25 bp, Probe Sequence
ctattaactgagtagccacaattag

SEQ ID NO: 120411 - DNA, 25 bp, Probe Sequence
aataactgagtgaatgctcgcatag

SEQ ID NO: 120412 - DNA, 25 bp, Probe Sequence
ttgctgctgaatacagtcactacta

SEQ ID NO: 120413 - DNA, 25 bp, Probe Sequence
tgctgctgaatacagtcactactag

SEQ ID NO: 120414 - DNA, 25 bp, Probe Sequence
ttgcactggattaagtaacacgtac

SEQ ID NO: 120415 - DNA, 25 bp, Probe Sequence
taacacgtactattaagattggcct

SEQ ID NO: 120416 - DNA, 25 bp, Probe Sequence
cttcctttctctgtctccttggttt

SEQ ID NO: 120417 - DNA, 25 bp, Probe Sequence
gtaacacgtactattaagattggcc

SEQ ID NO: 120418 - DNA, 25 bp, Probe Sequence
gcactggattaagtaacacgtacta

SEQ ID NO: 120419 - DNA, 25 bp, Probe Sequence
tagacatttgctgctgaatacagtc

SEQ ID NO: 120420 - DNA, 25 bp, Probe Sequence
attcagaatgactgtgtaaagcctc

SEQ ID NO: 120421 - DNA, 25 bp, Probe Sequence
aacacgtactattaagattggcctt

SEQ ID NO: 120422 - DNA, 25 bp, Probe Sequence
gtcactactagtcatgtacagctct

SEQ ID NO: 120423 - DNA, 25 bp, Probe Sequence
agtcactactagtcatgtacagctc

SEQ ID NO: 120424 - DNA, 25 bp, Probe Sequence
atttgctgctgaatacagtcactac

SEQ ID NO: 120425 - DNA, 25 bp, Probe Sequence
catttgctgctgaatacagtcacta

SEQ ID NO: 120426 - DNA, 25 bp, Probe Sequence
ctagacatttgctgctgaatacagt

SEQ ID NO: 120427 - DNA, 25 bp, Probe Sequence
cagtcactactagtcatgtacagct

SEQ ID NO: 120428 - DNA, 25 bp, Probe Sequence
aatacacaccacatgcagaagactt

SEQ ID NO: 120429 - DNA, 25 bp, Probe Sequence
agtaacacgtactattaagattggc

SEQ ID NO: 120430 - DNA, 25 bp, Probe Sequence
taagtatgaaatacacaccacatgc

SEQ ID NO: 120431 - DNA, 25 bp, Probe Sequence
tcagaatgactgtgtaaagcctctt

SEQ ID NO: 120432 - DNA, 25 bp, Probe Sequence
ttcagaatgactgtgtaaagcctct

SEQ ID NO: 120433 - DNA, 25 bp, Probe Sequence
acagtcactactagtcatgtacagc

SEQ ID NO: 120434 - DNA, 25 bp, Probe Sequence
cactggattaagtaacacgtactat

SEQ ID NO: 120435 - DNA, 25 bp, Probe Sequence
gctgaatacagtcactactagtcat

SEQ ID NO: 120436 - DNA, 25 bp, Probe Sequence
atgatgaaaagactaggaagcacat

SEQ ID NO: 120437 - DNA, 25 bp, Probe Sequence
catgatgaaaagactaggaagcaca

SEQ ID NO: 120438 - DNA, 25 bp, Probe Sequence
tcatgatgaaaagactaggaagcac

SEQ ID NO: 120439 - DNA, 25 bp, Probe Sequence
ttcatgatgaaaagactaggaagca

SEQ ID NO: 120440 - DNA, 25 bp, Probe Sequence
cccttcatgatgaaaagactaggaa

SEQ ID NO: 120441 - DNA, 25 bp, Probe Sequence
cttcatgatgaaaagactaggaagc

SEQ ID NO: 120442 - DNA, 25 bp, Probe Sequence
ccttcatgatgaaaagactaggaag

SEQ ID NO: 120443 - DNA, 25 bp, Probe Sequence
ccccttcatgatgaaaagactagga

SEQ ID NO: 120444 - DNA, 25 bp, Probe Sequence
acctaagttcagcatcctcctctaa

SEQ ID NO: 120445 - DNA, 25 bp, Probe Sequence
aacctaagttcagcatcctcctcta

SEQ ID NO: 120446 - DNA, 25 bp, Probe Sequence
agaccatcaacctaagttcagcatc

SEQ ID NO: 120447 - DNA, 25 bp, Probe Sequence
gagaccatcaacctaagttcagcat

SEQ ID NO: 120448 - DNA, 25 bp, Probe Sequence
aaatctggactagcaaatagggaag

SEQ ID NO: 120449 - DNA, 25 bp, Probe Sequence
catcaacctaagttcagcatcctcc

SEQ ID NO: 120450 - DNA, 25 bp, Probe Sequence
ccatcaacctaagttcagcatcctc

SEQ ID NO: 120451 - DNA, 25 bp, Probe Sequence
atcaacctaagttcagcatcctcct

SEQ ID NO: 120452 - DNA, 25 bp, Probe Sequence
gaccatcaacctaagttcagcatcc

SEQ ID NO: 120453 - DNA, 25 bp, Probe Sequence
aatctggactagcaaatagggaagg

SEQ ID NO: 120454 - DNA, 25 bp, Probe Sequence
accatcaacctaagttcagcatcct

SEQ ID NO: 120455 - DNA, 25 bp, Probe Sequence
actaggaatgagactgagacctgtg

SEQ ID NO: 120456 - DNA, 25 bp, Probe Sequence
cactaggaatgagactgagacctgt

SEQ ID NO: 120457 - DNA, 25 bp, Probe Sequence
caacctaagttcagcatcctcctct

SEQ ID NO: 120458 - DNA, 25 bp, Probe Sequence
tcaacctaagttcagcatcctcctc

SEQ ID NO: 120459 - DNA, 25 bp, Probe Sequence
ctaggaatgagactgagacctgtgg

SEQ ID NO: 120460 - DNA, 25 bp, Probe Sequence
ccactaggaatgagactgagacctg

SEQ ID NO: 120461 - DNA, 25 bp, Probe Sequence
ggagaccatcaacctaagttcagca

SEQ ID NO: 120462 - DNA, 25 bp, Probe Sequence
atctggactagcaaatagggaaggg

SEQ ID NO: 120463 - DNA, 25 bp, Probe Sequence
aaaatctggactagcaaatagggaa

SEQ ID NO: 120464 - DNA, 25 bp, Probe Sequence
gaaaatctggactagcaaataggga

SEQ ID NO: 120465 - DNA, 25 bp, Probe Sequence
gatgaatggagaccatcaacctaag

SEQ ID NO: 120466 - DNA, 25 bp, Probe Sequence
gaatggagaccatcaacctaagttc

SEQ ID NO: 120467 - DNA, 25 bp, Probe Sequence
agatgaatggagaccatcaacctaa

SEQ ID NO: 120468 - DNA, 25 bp, Probe Sequence
ttgccagtagaagaggagattcaca

SEQ ID NO: 120469 - DNA, 25 bp, Probe Sequence
ctttgccagtagaagaggagattca

SEQ ID NO: 120470 - DNA, 25 bp, Probe Sequence
tgccagtagaagaggagattcacag

SEQ ID NO: 120471 - DNA, 25 bp, Probe Sequence
tttgccagtagaagaggagattcac

SEQ ID NO: 120472 - DNA, 25 bp, Probe Sequence
ctatttaaggaccctgagttcccag

SEQ ID NO: 120473 - DNA, 25 bp, Probe Sequence
cctttgccagtagaagaggagattc

SEQ ID NO: 120474 - DNA, 25 bp, Probe Sequence
ccagtagaagaggagattcacagcg

SEQ ID NO: 120475 - DNA, 25 bp, Probe Sequence
gccagtagaagaggagattcacagc

SEQ ID NO: 120476 - DNA, 25 bp, Probe Sequence
cctatttaaggaccctgagttccca

SEQ ID NO: 120477 - DNA, 25 bp, Probe Sequence
caaactcaaggcatcatctggaagc

SEQ ID NO: 120478 - DNA, 25 bp, Probe Sequence
gcaaactcaaggcatcatctggaag

SEQ ID NO: 120479 - DNA, 25 bp, Probe Sequence
tatttaaggaccctgagttcccagc

SEQ ID NO: 120480 - DNA, 25 bp, Probe Sequence
gcctttgccagtagaagaggagatt

SEQ ID NO: 120481 - DNA, 25 bp, Probe Sequence
ttttaatgaacagagcggaaagggg

SEQ ID NO: 120482 - DNA, 25 bp, Probe Sequence
gacatttgtcagggtggtctagaac

SEQ ID NO: 120483 - DNA, 25 bp, Probe Sequence
acatcactcaggaaacttcagcgac

SEQ ID NO: 120484 - DNA, 25 bp, Probe Sequence
cacatcactcaggaaacttcagcga

SEQ ID NO: 120485 - DNA, 25 bp, Probe Sequence
acatttgtcagggtggtctagaaca

SEQ ID NO: 120486 - DNA, 25 bp, Probe Sequence
gatttcaagaccctgaggcaacagt

SEQ ID NO: 120487 - DNA, 25 bp, Probe Sequence
agcctttgccagtagaagaggagat

SEQ ID NO: 120488 - DNA, 25 bp, Probe Sequence
atcagctttgggctacaaggatctt

SEQ ID NO: 120489 - DNA, 25 bp, Probe Sequence
tcctatttaaggaccctgagttccc

SEQ ID NO: 120490 - DNA, 25 bp, Probe Sequence
catttgtcagggtggtctagaacaa

SEQ ID NO: 120491 - DNA, 25 bp, Probe Sequence
ctccaaccaaaacgctttgaagtac

SEQ ID NO: 120492 - DNA, 25 bp, Probe Sequence
tgtgtaattctgagaggagttatgg

SEQ ID NO: 120493 - DNA, 25 bp, Probe Sequence
caagcactcaaggcatacttactat

SEQ ID NO: 120494 - DNA, 25 bp, Probe Sequence
agcactcaaggcatacttactataa

SEQ ID NO: 120495 - DNA, 25 bp, Probe Sequence
aagcactcaaggcatacttactata

SEQ ID NO: 120496 - DNA, 25 bp, Probe Sequence
gagatgtgtaattctgagaggagtt

SEQ ID NO: 120497 - DNA, 25 bp, Probe Sequence
gagagatgtgtaattctgagaggag

SEQ ID NO: 120498 - DNA, 25 bp, Probe Sequence
agagatgtgtaattctgagaggagt

SEQ ID NO: 120499 - DNA, 25 bp, Probe Sequence
agatgtgtaattctgagaggagtta

SEQ ID NO: 120500 - DNA, 25 bp, Probe Sequence
cgagagatgtgtaattctgagagga

SEQ ID NO: 120501 - DNA, 25 bp, Probe Sequence
atgtgtaattctgagaggagttatg

SEQ ID NO: 120502 - DNA, 25 bp, Probe Sequence
gatgtgtaattctgagaggagttat

SEQ ID NO: 120503 - DNA, 25 bp, Probe Sequence
tgtcatcttactagcaacaacataa

SEQ ID NO: 120504 - DNA, 25 bp, Probe Sequence
atattcagcctatttgcctaccttt

SEQ ID NO: 120505 - DNA, 25 bp, Probe Sequence
actatattcagcctatttgcctacc

SEQ ID NO: 120506 - DNA, 25 bp, Probe Sequence
ctatattcagcctatttgcctacct

SEQ ID NO: 120507 - DNA, 25 bp, Probe Sequence
tatattcagcctatttgcctacctt

SEQ ID NO: 120508 - DNA, 25 bp, Probe Sequence
tgaggtataatgactatattcagcc

SEQ ID NO: 120509 - DNA, 25 bp, Probe Sequence
gcaagcactcaaggcatacttacta

SEQ ID NO: 120510 - DNA, 25 bp, Probe Sequence
gtgtaattctgagaggagttatggg

SEQ ID NO: 120511 - DNA, 25 bp, Probe Sequence
gactatattcagcctatttgcctac

SEQ ID NO: 120512 - DNA, 25 bp, Probe Sequence
tcgagagatgtgtaattctgagagg

SEQ ID NO: 120513 - DNA, 25 bp, Probe Sequence
aaagaagaaggtaacgctacaaata

SEQ ID NO: 120514 - DNA, 25 bp, Probe Sequence
atgactatattcagcctatttgcct

SEQ ID NO: 120515 - DNA, 25 bp, Probe Sequence
gcactcaaggcatacttactataaa

SEQ ID NO: 120516 - DNA, 25 bp, Probe Sequence
gaaagatgacctggcaaacatcaac

SEQ ID NO: 120517 - DNA, 25 bp, Probe Sequence
agaaagatgacctggcaaacatcaa

SEQ ID NO: 120518 - DNA, 25 bp, Probe Sequence
cagaaagatgacctggcaaacatca

SEQ ID NO: 120519 - DNA, 25 bp, Probe Sequence
aaagatgacctggcaaacatcaacc

SEQ ID NO: 120520 - DNA, 25 bp, Probe Sequence
gcagaaagatgacctggcaaacatc

SEQ ID NO: 120521 - DNA, 25 bp, Probe Sequence
ggatgaagataaggtcactggatac

SEQ ID NO: 120522 - DNA, 25 bp, Probe Sequence
gatgaagataaggtcactggataca

SEQ ID NO: 120523 - DNA, 25 bp, Probe Sequence
atgaagataaggtcactggatacag

SEQ ID NO: 120524 - DNA, 25 bp, Probe Sequence
aagataaggtcactggatacaggtt

SEQ ID NO: 120525 - DNA, 25 bp, Probe Sequence
gaagataaggtcactggatacaggt

SEQ ID NO: 120526 - DNA, 25 bp, Probe Sequence
tgaagataaggtcactggatacagg

SEQ ID NO: 120527 - DNA, 25 bp, Probe Sequence
agataaggtcactggatacaggttg

SEQ ID NO: 120528 - DNA, 25 bp, Probe Sequence
gataaggtcactggatacaggttgt

SEQ ID NO: 120529 - DNA, 25 bp, Probe Sequence
ttctcctttcatctcctatcctaca

SEQ ID NO: 120530 - DNA, 25 bp, Probe Sequence
tctcctttcatctcctatcctacat

SEQ ID NO: 120531 - DNA, 25 bp, Probe Sequence
acttctcctttcatctcctatccta

SEQ ID NO: 120532 - DNA, 25 bp, Probe Sequence
aacttctcctttcatctcctatcct

SEQ ID NO: 120533 - DNA, 25 bp, Probe Sequence
cttctcctttcatctcctatcctac

SEQ ID NO: 120534 - DNA, 25 bp, Probe Sequence
gaacttctcctttcatctcctatcc

SEQ ID NO: 120535 - DNA, 25 bp, Probe Sequence
ataaggtcactggatacaggttgta

SEQ ID NO: 120536 - DNA, 25 bp, Probe Sequence
tttccagaacttctcctttcatctc

SEQ ID NO: 120537 - DNA, 25 bp, Probe Sequence
cagaacttctcctttcatctcctat

SEQ ID NO: 120538 - DNA, 25 bp, Probe Sequence
gggatgaagataaggtcactggata

SEQ ID NO: 120539 - DNA, 25 bp, Probe Sequence
agaacttctcctttcatctcctatc

SEQ ID NO: 120540 - DNA, 25 bp, Probe Sequence
taaggtcactggatacaggttgtac

SEQ ID NO: 120541 - DNA, 25 bp, Probe Sequence
ctcctttcatctcctatcctacatg

SEQ ID NO: 120542 - DNA, 25 bp, Probe Sequence
ccagaacttctcctttcatctccta

SEQ ID NO: 120543 - DNA, 25 bp, Probe Sequence
ttccagaacttctcctttcatctcc

SEQ ID NO: 120544 - DNA, 25 bp, Probe Sequence
gtcactggatacaggttgtaccatt

SEQ ID NO: 120545 - DNA, 25 bp, Probe Sequence
tcttagtagagtgctcagaaccatc

SEQ ID NO: 120546 - DNA, 25 bp, Probe Sequence
cttagtagagtgctcagaaccatcc

SEQ ID NO: 120547 - DNA, 25 bp, Probe Sequence
ccttcagacgcttcttagtagagtg

SEQ ID NO: 120548 - DNA, 25 bp, Probe Sequence
cttcagacgcttcttagtagagtgc

SEQ ID NO: 120549 - DNA, 25 bp, Probe Sequence
ttcttagtagagtgctcagaaccat

SEQ ID NO: 120550 - DNA, 25 bp, Probe Sequence
ttcagacgcttcttagtagagtgct

SEQ ID NO: 120551 - DNA, 25 bp, Probe Sequence
cttcttagtagagtgctcagaacca

SEQ ID NO: 120552 - DNA, 25 bp, Probe Sequence
gacgcttcttagtagagtgctcaga

SEQ ID NO: 120553 - DNA, 25 bp, Probe Sequence
agacgcttcttagtagagtgctcag

SEQ ID NO: 120554 - DNA, 25 bp, Probe Sequence
tcagacgcttcttagtagagtgctc

SEQ ID NO: 120555 - DNA, 25 bp, Probe Sequence
gccttcagacgcttcttagtagagt

SEQ ID NO: 120556 - DNA, 25 bp, Probe Sequence
cagacgcttcttagtagagtgctca

SEQ ID NO: 120557 - DNA, 25 bp, Probe Sequence
gcttcttagtagagtgctcagaacc

SEQ ID NO: 120558 - DNA, 25 bp, Probe Sequence
cgcttcttagtagagtgctcagaac

SEQ ID NO: 120559 - DNA, 25 bp, Probe Sequence
ttagtagagtgctcagaaccatccc

SEQ ID NO: 120560 - DNA, 25 bp, Probe Sequence
acgcttcttagtagagtgctcagaa

SEQ ID NO: 120561 - DNA, 25 bp, Probe Sequence
ggccttcagacgcttcttagtagag

SEQ ID NO: 120562 - DNA, 25 bp, Probe Sequence
tagtagagtgctcagaaccatcccc

SEQ ID NO: 120563 - DNA, 25 bp, Probe Sequence
cttatgcctctactgtggttatcct

SEQ ID NO: 120564 - DNA, 25 bp, Probe Sequence
ctctactgtggttatcctggtcatt

SEQ ID NO: 120565 - DNA, 25 bp, Probe Sequence
ttatgcctctactgtggttatcctg

SEQ ID NO: 120566 - DNA, 25 bp, Probe Sequence
gcttatgcctctactgtggttatcc

SEQ ID NO: 120567 - DNA, 25 bp, Probe Sequence
cacgataccctctgattattggaat

SEQ ID NO: 120568 - DNA, 25 bp, Probe Sequence
ggtggaatagaagaaatcgtgatga

SEQ ID NO: 120569 - DNA, 25 bp, Probe Sequence
aggtggaatagaagaaatcgtgatg

SEQ ID NO: 120570 - DNA, 25 bp, Probe Sequence
caggtggaatagaagaaatcgtgat

SEQ ID NO: 120571 - DNA, 25 bp, Probe Sequence
gtggaatagaagaaatcgtgatgaa

SEQ ID NO: 120572 - DNA, 25 bp, Probe Sequence
gacccataactaaggaaacatcacc

SEQ ID NO: 120573 - DNA, 25 bp, Probe Sequence
ggacccataactaaggaaacatcac

SEQ ID NO: 120574 - DNA, 25 bp, Probe Sequence
tctactgtggttatcctggtcattt

SEQ ID NO: 120575 - DNA, 25 bp, Probe Sequence
cctctactgtggttatcctggtcat

SEQ ID NO: 120576 - DNA, 25 bp, Probe Sequence
cgcttatgcctctactgtggttatc

SEQ ID NO: 120577 - DNA, 25 bp, Probe Sequence
tatgcctctactgtggttatcctgg

SEQ ID NO: 120578 - DNA, 25 bp, Probe Sequence
gatcatactgtggttcttcgagaga

SEQ ID NO: 120579 - DNA, 25 bp, Probe Sequence
tggaatagaagaaatcgtgatgaaa

SEQ ID NO: 120580 - DNA, 25 bp, Probe Sequence
agtaatatcttccctctgatgctgg

SEQ ID NO: 120581 - DNA, 25 bp, Probe Sequence
ttgacattattcatgcaccacgata

SEQ ID NO: 120582 - DNA, 25 bp, Probe Sequence
gattattggaatccattggcttgag

SEQ ID NO: 120583 - DNA, 25 bp, Probe Sequence
acaggtggaatagaagaaatcgtga

SEQ ID NO: 120584 - DNA, 25 bp, Probe Sequence
attattggaatccattggcttgaga

SEQ ID NO: 120585 - DNA, 25 bp, Probe Sequence
ctgattattggaatccattggcttg

SEQ ID NO: 120586 - DNA, 25 bp, Probe Sequence
tctgattattggaatccattggctt

SEQ ID NO: 120587 - DNA, 25 bp, Probe Sequence
aaggagactatgctgtggaagataa

SEQ ID NO: 120588 - DNA, 25 bp, Probe Sequence
ttcctctattctctggcagtataac

SEQ ID NO: 120589 - DNA, 25 bp, Probe Sequence
gatattcctctattctctggcagta

SEQ ID NO: 120590 - DNA, 25 bp, Probe Sequence
tcctctattctctggcagtataact

SEQ ID NO: 120591 - DNA, 25 bp, Probe Sequence
cctctattctctggcagtataactc

SEQ ID NO: 120592 - DNA, 25 bp, Probe Sequence
caatgagccttattcctgaagatgg

SEQ ID NO: 120593 - DNA, 25 bp, Probe Sequence
cttcctcctattctcatctccactg

SEQ ID NO: 120594 - DNA, 25 bp, Probe Sequence
cctattctcatctccactggtgtaa

SEQ ID NO: 120595 - DNA, 25 bp, Probe Sequence
attcctctattctctggcagtataa

SEQ ID NO: 120596 - DNA, 25 bp, Probe Sequence
ctctattctctggcagtataactca

SEQ ID NO: 120597 - DNA, 25 bp, Probe Sequence
ctagtaactaccagtcctctaccag

SEQ ID NO: 120598 - DNA, 25 bp, Probe Sequence
atattcctctattctctggcagtat

SEQ ID NO: 120599 - DNA, 25 bp, Probe Sequence
ctattctctggcagtataactcagg

SEQ ID NO: 120600 - DNA, 25 bp, Probe Sequence
tattctctggcagtataactcaggt

SEQ ID NO: 120601 - DNA, 25 bp, Probe Sequence
gcaatgagccttattcctgaagatg

SEQ ID NO: 120602 - DNA, 25 bp, Probe Sequence
tctattctctggcagtataactcag

SEQ ID NO: 120603 - DNA, 25 bp, Probe Sequence
tcctattctcatctccactggtgta

SEQ ID NO: 120604 - DNA, 25 bp, Probe Sequence
tattcctctattctctggcagtata

SEQ ID NO: 120605 - DNA, 25 bp, Probe Sequence
gatggatattcctctattctctggc

SEQ ID NO: 120606 - DNA, 25 bp, Probe Sequence
cagtataactcaggtcagaagtcct

SEQ ID NO: 120607 - DNA, 25 bp, Probe Sequence
ccttcctcctattctcatctccact

SEQ ID NO: 120608 - DNA, 25 bp, Probe Sequence
atggatattcctctattctctggca

SEQ ID NO: 120609 - DNA, 25 bp, Probe Sequence
attctctggcagtataactcaggtc

SEQ ID NO: 120610 - DNA, 25 bp, Probe Sequence
ggatattcctctattctctggcagt

SEQ ID NO: 120611 - DNA, 25 bp, Probe Sequence
gcaagaaggatgacaaggacaataa

SEQ ID NO: 120612 - DNA, 25 bp, Probe Sequence
atacctcacattcaatgccagttaa

SEQ ID NO: 120613 - DNA, 25 bp, Probe Sequence
gatacctcacattcaatgccagtta

SEQ ID NO: 120614 - DNA, 25 bp, Probe Sequence
aagactctattctcatggaggaaga

SEQ ID NO: 120615 - DNA, 25 bp, Probe Sequence
ggcaagaaggatgacaaggacaata

SEQ ID NO: 120616 - DNA, 25 bp, Probe Sequence
gaagaagccattagaaatcaggaac

SEQ ID NO: 120617 - DNA, 25 bp, Probe Sequence
aagaagccattagaaatcaggaaca

SEQ ID NO: 120618 - DNA, 25 bp, Probe Sequence
aagccattagaaatcaggaacagat

SEQ ID NO: 120619 - DNA, 25 bp, Probe Sequence
agccattagaaatcaggaacagata

SEQ ID NO: 120620 - DNA, 25 bp, Probe Sequence
gaagccattagaaatcaggaacaga

SEQ ID NO: 120621 - DNA, 25 bp, Probe Sequence
agaagccattagaaatcaggaacag

SEQ ID NO: 120622 - DNA, 25 bp, Probe Sequence
ggaagaagccattagaaatcaggaa

SEQ ID NO: 120623 - DNA, 25 bp, Probe Sequence
caagaaggatgacaaggacaataaa

SEQ ID NO: 120624 - DNA, 25 bp, Probe Sequence
gaggaagaagccattagaaatcagg

SEQ ID NO: 120625 - DNA, 25 bp, Probe Sequence
ggaggaagaagccattagaaatcag

SEQ ID NO: 120626 - DNA, 25 bp, Probe Sequence
gccattagaaatcaggaacagataa

SEQ ID NO: 120627 - DNA, 25 bp, Probe Sequence
tgatacctcacattcaatgccagtt

SEQ ID NO: 120628 - DNA, 25 bp, Probe Sequence
aggaagaagccattagaaatcagga

SEQ ID NO: 120629 - DNA, 25 bp, Probe Sequence
atgaacctcttgtaccaattatagg

SEQ ID NO: 120630 - DNA, 25 bp, Probe Sequence
tacctcacattcaatgccagttaaa

SEQ ID NO: 120631 - DNA, 25 bp, Probe Sequence
gactctattctcatggaggaagaag

SEQ ID NO: 120632 - DNA, 25 bp, Probe Sequence
agactctattctcatggaggaagaa

SEQ ID NO: 120633 - DNA, 25 bp, Probe Sequence
tgaaagactctattctcatggagga

SEQ ID NO: 120634 - DNA, 25 bp, Probe Sequence
aaagactctattctcatggaggaag

SEQ ID NO: 120635 - DNA, 25 bp, Probe Sequence
ggaagaattaccacaactgaagact

SEQ ID NO: 120636 - DNA, 25 bp, Probe Sequence
gaagaattaccacaactgaagactt

SEQ ID NO: 120637 - DNA, 25 bp, Probe Sequence
ctgactcacggtgttatgaataagg

SEQ ID NO: 120638 - DNA, 25 bp, Probe Sequence
gactcacggtgttatgaataaggag

SEQ ID NO: 120639 - DNA, 25 bp, Probe Sequence
tgactcacggtgttatgaataagga

SEQ ID NO: 120640 - DNA, 25 bp, Probe Sequence
gctgactcacggtgttatgaataag

SEQ ID NO: 120641 - DNA, 25 bp, Probe Sequence
tgctcaagaacaagaatatatccaa

SEQ ID NO: 120642 - DNA, 25 bp, Probe Sequence
ggtgttatgaataaggagctgaagt

SEQ ID NO: 120643 - DNA, 25 bp, Probe Sequence
atgctcaagaacaagaatatatcca

SEQ ID NO: 120644 - DNA, 25 bp, Probe Sequence
gctcaagaacaagaatatatccaag

SEQ ID NO: 120645 - DNA, 25 bp, Probe Sequence
cggtgttatgaataaggagctgaag

SEQ ID NO: 120646 - DNA, 25 bp, Probe Sequence
tgttatgaataaggagctgaagtac

SEQ ID NO: 120647 - DNA, 25 bp, Probe Sequence
gtgttatgaataaggagctgaagta

SEQ ID NO: 120648 - DNA, 25 bp, Probe Sequence
gatgctcaagaacaagaatatatcc

SEQ ID NO: 120649 - DNA, 25 bp, Probe Sequence
aaacccaaagaggacactgaattag

SEQ ID NO: 120650 - DNA, 25 bp, Probe Sequence
caaacccaaagaggacactgaatta

SEQ ID NO: 120651 - DNA, 25 bp, Probe Sequence
acggtgttatgaataaggagctgaa

SEQ ID NO: 120652 - DNA, 25 bp, Probe Sequence
acattaagaagtacatgcagaagtt

SEQ ID NO: 120653 - DNA, 25 bp, Probe Sequence
actcacggtgttatgaataaggagc

SEQ ID NO: 120654 - DNA, 25 bp, Probe Sequence
aagaattaccacaactgaagacttt

SEQ ID NO: 120655 - DNA, 25 bp, Probe Sequence
aacccaaagaggacactgaattaga

SEQ ID NO: 120656 - DNA, 25 bp, Probe Sequence
gggaagaattaccacaactgaagac

SEQ ID NO: 120657 - DNA, 25 bp, Probe Sequence
agctgactcacggtgttatgaataa

SEQ ID NO: 120658 - DNA, 25 bp, Probe Sequence
aagctgactcacggtgttatgaata

SEQ ID NO: 120659 - DNA, 25 bp, Probe Sequence
agatgaggttatgaagaagtatggc

SEQ ID NO: 120660 - DNA, 25 bp, Probe Sequence
atgaggttatgaagaagtatggcag

SEQ ID NO: 120661 - DNA, 25 bp, Probe Sequence
gatgaggttatgaagaagtatggca

SEQ ID NO: 120662 - DNA, 25 bp, Probe Sequence
gaggttatgaagaagtatggcagtt

SEQ ID NO: 120663 - DNA, 25 bp, Probe Sequence
gttccaacttaaccaacatagaagg

SEQ ID NO: 120664 - DNA, 25 bp, Probe Sequence
tgaggttatgaagaagtatggcagt

SEQ ID NO: 120665 - DNA, 25 bp, Probe Sequence
cattcttagttctgagttgctggac

SEQ ID NO: 120666 - DNA, 25 bp, Probe Sequence
gtcaccttgaacaaccataagagaa

SEQ ID NO: 120667 - DNA, 25 bp, Probe Sequence
agtcatcctgttcttctcctaagtg

SEQ ID NO: 120668 - DNA, 25 bp, Probe Sequence
ccaacttaaccaacatagaaggata

SEQ ID NO: 120669 - DNA, 25 bp, Probe Sequence
agatacatctgtgagtagcgtagat

SEQ ID NO: 120670 - DNA, 25 bp, Probe Sequence
agttccaacttaaccaacatagaag

SEQ ID NO: 120671 - DNA, 25 bp, Probe Sequence
tctggattcctagatgaggttatga

SEQ ID NO: 120672 - DNA, 25 bp, Probe Sequence
tctcaagcagagcattcttagttct

SEQ ID NO: 120673 - DNA, 25 bp, Probe Sequence
ttccaacttaaccaacatagaagga

SEQ ID NO: 120674 - DNA, 25 bp, Probe Sequence
tggattcctagatgaggttatgaag

SEQ ID NO: 120675 - DNA, 25 bp, Probe Sequence
ctggattcctagatgaggttatgaa

SEQ ID NO: 120676 - DNA, 25 bp, Probe Sequence
ttctggattcctagatgaggttatg

SEQ ID NO: 120677 - DNA, 25 bp, Probe Sequence
tccaacttaaccaacatagaaggat

SEQ ID NO: 120678 - DNA, 25 bp, Probe Sequence
gtcatcctgttcttctcctaagtgg

SEQ ID NO: 120679 - DNA, 25 bp, Probe Sequence
attcttagttctgagttgctggacc

SEQ ID NO: 120680 - DNA, 25 bp, Probe Sequence
ggattcctagatgaggttatgaaga

SEQ ID NO: 120681 - DNA, 25 bp, Probe Sequence
cagtcatcctgttcttctcctaagt

SEQ ID NO: 120682 - DNA, 25 bp, Probe Sequence
tagatgaggttatgaagaagtatgg

SEQ ID NO: 120683 - DNA, 25 bp, Probe Sequence
gatgaatggactgttgaagcaataa

SEQ ID NO: 120684 - DNA, 25 bp, Probe Sequence
ggatgaatggactgttgaagcaata

SEQ ID NO: 120685 - DNA, 25 bp, Probe Sequence
catgtgattctgatggaagatggaa

SEQ ID NO: 120686 - DNA, 25 bp, Probe Sequence
gattgagtggatgaatggactgttg

SEQ ID NO: 120687 - DNA, 25 bp, Probe Sequence
tgttgtagaagtgaagatgctggag

SEQ ID NO: 120688 - DNA, 25 bp, Probe Sequence
ctgttgtagaagtgaagatgctgga

SEQ ID NO: 120689 - DNA, 25 bp, Probe Sequence
attgagtggatgaatggactgttga

SEQ ID NO: 120690 - DNA, 25 bp, Probe Sequence
tgattgagtggatgaatggactgtt

SEQ ID NO: 120691 - DNA, 25 bp, Probe Sequence
tgattctgatggaagatggaatgaa

SEQ ID NO: 120692 - DNA, 25 bp, Probe Sequence
atgtgattctgatggaagatggaat

SEQ ID NO: 120693 - DNA, 25 bp, Probe Sequence
gattctgatggaagatggaatgaag

SEQ ID NO: 120694 - DNA, 25 bp, Probe Sequence
gtgattctgatggaagatggaatga

SEQ ID NO: 120695 - DNA, 25 bp, Probe Sequence
tgtgattctgatggaagatggaatg

SEQ ID NO: 120696 - DNA, 25 bp, Probe Sequence
ttgagtggatgaatggactgttgaa

SEQ ID NO: 120697 - DNA, 25 bp, Probe Sequence
attctgatggaagatggaatgaagc

SEQ ID NO: 120698 - DNA, 25 bp, Probe Sequence
ctgattgagtggatgaatggactgt

SEQ ID NO: 120699 - DNA, 25 bp, Probe Sequence
ttctgatggaagatggaatgaagcc

SEQ ID NO: 120700 - DNA, 25 bp, Probe Sequence
tgagtggatgaatggactgttgaag

SEQ ID NO: 120701 - DNA, 25 bp, Probe Sequence
tggatgaatggactgttgaagcaat

SEQ ID NO: 120702 - DNA, 25 bp, Probe Sequence
cctgttgtagaagtgaagatgctgg

SEQ ID NO: 120703 - DNA, 25 bp, Probe Sequence
tggtctactgtgtctccactgatat

SEQ ID NO: 120704 - DNA, 25 bp, Probe Sequence
cacatactttgagaaacactgattt

SEQ ID NO: 120705 - DNA, 25 bp, Probe Sequence
tcacatactttgagaaacactgatt

SEQ ID NO: 120706 - DNA, 25 bp, Probe Sequence
ttcacatactttgagaaacactgat

SEQ ID NO: 120707 - DNA, 25 bp, Probe Sequence
atccacatcagtatcatcaaaggtt

SEQ ID NO: 120708 - DNA, 25 bp, Probe Sequence
tccacatcagtatcatcaaaggtta

SEQ ID NO: 120709 - DNA, 25 bp, Probe Sequence
ccacatcagtatcatcaaaggttac

SEQ ID NO: 120710 - DNA, 25 bp, Probe Sequence
tatccacatcagtatcatcaaaggt

SEQ ID NO: 120711 - DNA, 25 bp, Probe Sequence
catcaaaggttactcttccaatctg

SEQ ID NO: 120712 - DNA, 25 bp, Probe Sequence
tcatcaaaggttactcttccaatct

SEQ ID NO: 120713 - DNA, 25 bp, Probe Sequence
atcatcaaaggttactcttccaatc

SEQ ID NO: 120714 - DNA, 25 bp, Probe Sequence
ttatccacatcagtatcatcaaagg

SEQ ID NO: 120715 - DNA, 25 bp, Probe Sequence
gtatcatcaaaggttactcttccaa

SEQ ID NO: 120716 - DNA, 25 bp, Probe Sequence
aacagaagacacatgataccagcag

SEQ ID NO: 120717 - DNA, 25 bp, Probe Sequence
cagaagacacatgataccagcagag

SEQ ID NO: 120718 - DNA, 25 bp, Probe Sequence
cttggaaacagaagacacatgatac

SEQ ID NO: 120719 - DNA, 25 bp, Probe Sequence
ttggaaacagaagacacatgatacc

SEQ ID NO: 120720 - DNA, 25 bp, Probe Sequence
ggaaacagaagacacatgataccag

SEQ ID NO: 120721 - DNA, 25 bp, Probe Sequence
tatcatcaaaggttactcttccaat

SEQ ID NO: 120722 - DNA, 25 bp, Probe Sequence
gaaacagaagacacatgataccagc

SEQ ID NO: 120723 - DNA, 25 bp, Probe Sequence
atcaaaggttactcttccaatctgg

SEQ ID NO: 120724 - DNA, 25 bp, Probe Sequence
acagaagacacatgataccagcaga

SEQ ID NO: 120725 - DNA, 25 bp, Probe Sequence
agtatcatcaaaggttactcttcca

SEQ ID NO: 120726 - DNA, 25 bp, Probe Sequence
cagtatcatcaaaggttactcttcc

SEQ ID NO: 120727 - DNA, 25 bp, Probe Sequence
cacatcagtatcatcaaaggttact

SEQ ID NO: 120728 - DNA, 25 bp, Probe Sequence
aaacagaagacacatgataccagca

SEQ ID NO: 120729 - DNA, 25 bp, Probe Sequence
acatcagtatcatcaaaggttactc

SEQ ID NO: 120730 - DNA, 25 bp, Probe Sequence
tttatccacatcagtatcatcaaag

SEQ ID NO: 120731 - DNA, 25 bp, Probe Sequence
aagataagttgatattgccagcctt

SEQ ID NO: 120732 - DNA, 25 bp, Probe Sequence
gcacattcctatagcagagaacata

SEQ ID NO: 120733 - DNA, 25 bp, Probe Sequence
gaaagataagttgatattgccagcc

SEQ ID NO: 120734 - DNA, 25 bp, Probe Sequence
ggaaagataagttgatattgccagc

SEQ ID NO: 120735 - DNA, 25 bp, Probe Sequence
tttactatgcccaaacagaaatcct

SEQ ID NO: 120736 - DNA, 25 bp, Probe Sequence
aaagataagttgatattgccagcct

SEQ ID NO: 120737 - DNA, 25 bp, Probe Sequence
agagatttaacttgtttgccatcag

SEQ ID NO: 120738 - DNA, 25 bp, Probe Sequence
ttcaaattctatcatcctcagtggg

SEQ ID NO: 120739 - DNA, 25 bp, Probe Sequence
gataagttgatattgccagcctttc

SEQ ID NO: 120740 - DNA, 25 bp, Probe Sequence
agataagttgatattgccagccttt

SEQ ID NO: 120741 - DNA, 25 bp, Probe Sequence
cttcaaattctatcatcctcagtgg

SEQ ID NO: 120742 - DNA, 25 bp, Probe Sequence
aggaaagataagttgatattgccag

SEQ ID NO: 120743 - DNA, 25 bp, Probe Sequence
aagagatttaacttgtttgccatca

SEQ ID NO: 120744 - DNA, 25 bp, Probe Sequence
gagatttaacttgtttgccatcagt

SEQ ID NO: 120745 - DNA, 25 bp, Probe Sequence
aaggaaagataagttgatattgcca

SEQ ID NO: 120746 - DNA, 25 bp, Probe Sequence
taagttgatattgccagcctttcat

SEQ ID NO: 120747 - DNA, 25 bp, Probe Sequence
ataagttgatattgccagcctttca

SEQ ID NO: 120748 - DNA, 25 bp, Probe Sequence
cctctctcttcaaattctatcatcc

SEQ ID NO: 120749 - DNA, 25 bp, Probe Sequence
gataccaatttcctctctcttcaaa

SEQ ID NO: 120750 - DNA, 25 bp, Probe Sequence
tcttcaaattctatcatcctcagtg

SEQ ID NO: 120751 - DNA, 25 bp, Probe Sequence
ccaccaaggaaagataagttgatat

SEQ ID NO: 120752 - DNA, 25 bp, Probe Sequence
acattcctatagcagagaacataga

SEQ ID NO: 120753 - DNA, 25 bp, Probe Sequence
cacattcctatagcagagaacatag

SEQ ID NO: 120754 - DNA, 25 bp, Probe Sequence
aattctatcatcctcagtgggcaaa

SEQ ID NO: 120755 - DNA, 25 bp, Probe Sequence
ctatggaattgaatctgaagtggtg

SEQ ID NO: 120756 - DNA, 25 bp, Probe Sequence
tatggaattgaatctgaagtggtgg

SEQ ID NO: 120757 - DNA, 25 bp, Probe Sequence
actatggaattgaatctgaagtggt

SEQ ID NO: 120758 - DNA, 25 bp, Probe Sequence
aggacaagatcactatggaattgaa

SEQ ID NO: 120759 - DNA, 25 bp, Probe Sequence
taggacaagatcactatggaattga

SEQ ID NO: 120760 - DNA, 25 bp, Probe Sequence
ctggaataggacaagatcactatgg

SEQ ID NO: 120761 - DNA, 25 bp, Probe Sequence
ggacaagatcactatggaattgaat

SEQ ID NO: 120762 - DNA, 25 bp, Probe Sequence
ggaataggacaagatcactatggaa

SEQ ID NO: 120763 - DNA, 25 bp, Probe Sequence
tggaataggacaagatcactatgga

SEQ ID NO: 120764 - DNA, 25 bp, Probe Sequence
atcactatggaattgaatctgaagt

SEQ ID NO: 120765 - DNA, 25 bp, Probe Sequence
cctggaataggacaagatcactatg

SEQ ID NO: 120766 - DNA, 25 bp, Probe Sequence
aattgaatctgaagtggtggctgaa

SEQ ID NO: 120767 - DNA, 25 bp, Probe Sequence
ataggacaagatcactatggaattg

SEQ ID NO: 120768 - DNA, 25 bp, Probe Sequence
gacaagatcactatggaattgaatc

SEQ ID NO: 120769 - DNA, 25 bp, Probe Sequence
gaataggacaagatcactatggaat

SEQ ID NO: 120770 - DNA, 25 bp, Probe Sequence
gatcactatggaattgaatctgaag

SEQ ID NO: 120771 - DNA, 25 bp, Probe Sequence
cttctctgtgtatttggacttcctg

SEQ ID NO: 120772 - DNA, 25 bp, Probe Sequence
gaattgaatctgaagtggtggctga

SEQ ID NO: 120773 - DNA, 25 bp, Probe Sequence
aataggacaagatcactatggaatt

SEQ ID NO: 120774 - DNA, 25 bp, Probe Sequence
ccttctctgtgtatttggacttcct

SEQ ID NO: 120775 - DNA, 25 bp, Probe Sequence
atggaattgaatctgaagtggtggc

SEQ ID NO: 120776 - DNA, 25 bp, Probe Sequence
aagccttctctgtgtatttggactt

SEQ ID NO: 120777 - DNA, 25 bp, Probe Sequence
acaagatcactatggaattgaatct

SEQ ID NO: 120778 - DNA, 25 bp, Probe Sequence
agccttctctgtgtatttggacttc

SEQ ID NO: 120779 - DNA, 25 bp, Probe Sequence
atcgttcagtcgtcgtattagtcat

SEQ ID NO: 120780 - DNA, 25 bp, Probe Sequence
aatcgttcagtcgtcgtattagtca

SEQ ID NO: 120781 - DNA, 25 bp, Probe Sequence
ggatttatagaagatgacaaagcgg

SEQ ID NO: 120782 - DNA, 25 bp, Probe Sequence
tttatagaagatgacaaagcggatg

SEQ ID NO: 120783 - DNA, 25 bp, Probe Sequence
gatttatagaagatgacaaagcgga

SEQ ID NO: 120784 - DNA, 25 bp, Probe Sequence
aggatttatagaagatgacaaagcg

SEQ ID NO: 120785 - DNA, 25 bp, Probe Sequence
aaatcgttcagtcgtcgtattagtc

SEQ ID NO: 120786 - DNA, 25 bp, Probe Sequence
ttatagaagatgacaaagcggatgc

SEQ ID NO: 120787 - DNA, 25 bp, Probe Sequence
tcagagagcgatttgttacataaac

SEQ ID NO: 120788 - DNA, 25 bp, Probe Sequence
atttatagaagatgacaaagcggat

SEQ ID NO: 120789 - DNA, 25 bp, Probe Sequence
tgtgttggcttgaagaatcagagag

SEQ ID NO: 120790 - DNA, 25 bp, Probe Sequence
atcagagagcgatttgttacataaa

SEQ ID NO: 120791 - DNA, 25 bp, Probe Sequence
ctgtgttggcttgaagaatcagaga

SEQ ID NO: 120792 - DNA, 25 bp, Probe Sequence
gaagaatcagagagcgatttgttac

SEQ ID NO: 120793 - DNA, 25 bp, Probe Sequence
agaatcagagagcgatttgttacat

SEQ ID NO: 120794 - DNA, 25 bp, Probe Sequence
tgaagaatcagagagcgatttgtta

SEQ ID NO: 120795 - DNA, 25 bp, Probe Sequence
aagaatcagagagcgatttgttaca

SEQ ID NO: 120796 - DNA, 25 bp, Probe Sequence
gtaggattctttctccagagcaatg

SEQ ID NO: 120797 - DNA, 25 bp, Probe Sequence
gaatcagagagcgatttgttacata

SEQ ID NO: 120798 - DNA, 25 bp, Probe Sequence
ttgaagaatcagagagcgatttgtt

SEQ ID NO: 120799 - DNA, 25 bp, Probe Sequence
tgtaggattctttctccagagcaat

SEQ ID NO: 120800 - DNA, 25 bp, Probe Sequence
aaggatttatagaagatgacaaagc

SEQ ID NO: 120801 - DNA, 25 bp, Probe Sequence
gttacataaacagcctgctacagac

SEQ ID NO: 120802 - DNA, 25 bp, Probe Sequence
agtgaagtgactgatcctgagaaag

SEQ ID NO: 120803 - DNA, 25 bp, Probe Sequence
tgaaagtaacaaatgaagactacat

SEQ ID NO: 120804 - DNA, 25 bp, Probe Sequence
atgaaagtaacaaatgaagactaca

SEQ ID NO: 120805 - DNA, 25 bp, Probe Sequence
aacaaatgaagactacattgacttt

SEQ ID NO: 120806 - DNA, 25 bp, Probe Sequence
gtaacaaatgaagactacattgact

SEQ ID NO: 120807 - DNA, 25 bp, Probe Sequence
agtaacaaatgaagactacattgac

SEQ ID NO: 120808 - DNA, 25 bp, Probe Sequence
taacaaatgaagactacattgactt

SEQ ID NO: 120809 - DNA, 25 bp, Probe Sequence
aagtaacaaatgaagactacattga

SEQ ID NO: 120810 - DNA, 25 bp, Probe Sequence
aatgaaagtaacaaatgaagactac

SEQ ID NO: 120811 - DNA, 25 bp, Probe Sequence
gaatgaaagtaacaaatgaagacta

SEQ ID NO: 120812 - DNA, 25 bp, Probe Sequence
tctaaaatagaaatcagggaaggtt

SEQ ID NO: 120813 - DNA, 25 bp, Probe Sequence
aaagtaacaaatgaagactacattg

SEQ ID NO: 120814 - DNA, 25 bp, Probe Sequence
ctaaaatagaaatcagggaaggtta

SEQ ID NO: 120815 - DNA, 25 bp, Probe Sequence
tgaagactacattgacttttctaaa

SEQ ID NO: 120816 - DNA, 25 bp, Probe Sequence
gaaagtaacaaatgaagactacatt

SEQ ID NO: 120817 - DNA, 25 bp, Probe Sequence
atgaagactacattgacttttctaa

SEQ ID NO: 120818 - DNA, 25 bp, Probe Sequence
acaaatgaagactacattgactttt

SEQ ID NO: 120819 - DNA, 25 bp, Probe Sequence
gctgcacagaaatcagaacattttc

SEQ ID NO: 120820 - DNA, 25 bp, Probe Sequence
caaatgaagactacattgacttttc

SEQ ID NO: 120821 - DNA, 25 bp, Probe Sequence
taaaatagaaatcagggaaggttaa

SEQ ID NO: 120822 - DNA, 25 bp, Probe Sequence
ggctgcacagaaatcagaacatttt

SEQ ID NO: 120823 - DNA, 25 bp, Probe Sequence
aaatgaagactacattgacttttct

SEQ ID NO: 120824 - DNA, 25 bp, Probe Sequence
tttgaagaagcgcatctttcagatt

SEQ ID NO: 120825 - DNA, 25 bp, Probe Sequence
cggctgcacagaaatcagaacattt

SEQ ID NO: 120826 - DNA, 25 bp, Probe Sequence
gaagactacattgacttttctaaaa

SEQ ID NO: 120827 - DNA, 25 bp, Probe Sequence
ctactcaggaagatagcagattgtt

SEQ ID NO: 120828 - DNA, 25 bp, Probe Sequence
tctactcaggaagatagcagattgt

SEQ ID NO: 120829 - DNA, 25 bp, Probe Sequence
aaccaccacctctctcatattctag

SEQ ID NO: 120830 - DNA, 25 bp, Probe Sequence
tactcaggaagatagcagattgttt

SEQ ID NO: 120831 - DNA, 25 bp, Probe Sequence
aaaccaccacctctctcatattcta

SEQ ID NO: 120832 - DNA, 25 bp, Probe Sequence
agaacaactgacaagggcattattt

SEQ ID NO: 120833 - DNA, 25 bp, Probe Sequence
aagaacaactgacaagggcattatt

SEQ ID NO: 120834 - DNA, 25 bp, Probe Sequence
atctactcaggaagatagcagattg

SEQ ID NO: 120835 - DNA, 25 bp, Probe Sequence
tgatctactcaggaagatagcagat

SEQ ID NO: 120836 - DNA, 25 bp, Probe Sequence
atgatctactcaggaagatagcaga

SEQ ID NO: 120837 - DNA, 25 bp, Probe Sequence
gcaataccgttgtaatcctttctaa

SEQ ID NO: 120838 - DNA, 25 bp, Probe Sequence
aatgatctactcaggaagatagcag

SEQ ID NO: 120839 - DNA, 25 bp, Probe Sequence
gatctactcaggaagatagcagatt

SEQ ID NO: 120840 - DNA, 25 bp, Probe Sequence
caagaacaactgacaagggcattat

SEQ ID NO: 120841 - DNA, 25 bp, Probe Sequence
cactgtggatctgatggaaatgtat

SEQ ID NO: 120842 - DNA, 25 bp, Probe Sequence
actgtggatctgatggaaatgtata

SEQ ID NO: 120843 - DNA, 25 bp, Probe Sequence
atgtatattccaacagatgtacctt

SEQ ID NO: 120844 - DNA, 25 bp, Probe Sequence
aatgtatattccaacagatgtacct

SEQ ID NO: 120845 - DNA, 25 bp, Probe Sequence
ggaacaaatgatctactcaggaaga

SEQ ID NO: 120846 - DNA, 25 bp, Probe Sequence
gggaacaaatgatctactcaggaag

SEQ ID NO: 120847 - DNA, 25 bp, Probe Sequence
ctgtggatctgatggaaatgtatat

SEQ ID NO: 120848 - DNA, 25 bp, Probe Sequence
tcactgtggatctgatggaaatgta

SEQ ID NO: 120849 - DNA, 25 bp, Probe Sequence
caataacagaatcagagtcttatca

SEQ ID NO: 120850 - DNA, 25 bp, Probe Sequence
aatatttcttgtaagtatggagccc

SEQ ID NO: 120851 - DNA, 25 bp, Probe Sequence
ctttgttccactctctcatcttccc

SEQ ID NO: 120852 - DNA, 25 bp, Probe Sequence
ccactctctcatcttcccaaacaag

SEQ ID NO: 120853 - DNA, 25 bp, Probe Sequence
gttccactctctcatcttcccaaac

SEQ ID NO: 120854 - DNA, 25 bp, Probe Sequence
tccactctctcatcttcccaaacaa

SEQ ID NO: 120855 - DNA, 25 bp, Probe Sequence
ttccactctctcatcttcccaaaca

SEQ ID NO: 120856 - DNA, 25 bp, Probe Sequence
tgttccactctctcatcttcccaaa

SEQ ID NO: 120857 - DNA, 25 bp, Probe Sequence
tttgttccactctctcatcttccca

SEQ ID NO: 120858 - DNA, 25 bp, Probe Sequence
gctttgttccactctctcatcttcc

SEQ ID NO: 120859 - DNA, 25 bp, Probe Sequence
atcttcccaaacaagctgcattatc

SEQ ID NO: 120860 - DNA, 25 bp, Probe Sequence
agctttgttccactctctcatcttc

SEQ ID NO: 120861 - DNA, 25 bp, Probe Sequence
catcttcccaaacaagctgcattat

SEQ ID NO: 120862 - DNA, 25 bp, Probe Sequence
ttgttccactctctcatcttcccaa

SEQ ID NO: 120863 - DNA, 25 bp, Probe Sequence
cactctctcatcttcccaaacaagc

SEQ ID NO: 120864 - DNA, 25 bp, Probe Sequence
cagctttgttccactctctcatctt

SEQ ID NO: 120865 - DNA, 25 bp, Probe Sequence
tcttcccaaacaagctgcattatca

SEQ ID NO: 120866 - DNA, 25 bp, Probe Sequence
tcatcttcccaaacaagctgcatta

SEQ ID NO: 120867 - DNA, 25 bp, Probe Sequence
ctctctcatcttcccaaacaagctg

SEQ ID NO: 120868 - DNA, 25 bp, Probe Sequence
cttcccaaacaagctgcattatcag

SEQ ID NO: 120869 - DNA, 25 bp, Probe Sequence
actctctcatcttcccaaacaagct

SEQ ID NO: 120870 - DNA, 25 bp, Probe Sequence
ccagctttgttccactctctcatct

SEQ ID NO: 120871 - DNA, 25 bp, Probe Sequence
tccagctttgttccactctctcatc

SEQ ID NO: 120872 - DNA, 25 bp, Probe Sequence
ctcatcttcccaaacaagctgcatt

SEQ ID NO: 120873 - DNA, 25 bp, Probe Sequence
gtccagctttgttccactctctcat

SEQ ID NO: 120874 - DNA, 25 bp, Probe Sequence
tctcatcttcccaaacaagctgcat

SEQ ID NO: 120875 - DNA, 25 bp, Probe Sequence
tctctcatcttcccaaacaagctgc

SEQ ID NO: 120876 - DNA, 25 bp, Probe Sequence
aaggattcttcacaggtgttcatag

SEQ ID NO: 120877 - DNA, 25 bp, Probe Sequence
ttacatggtctatcttcagtccttc

SEQ ID NO: 120878 - DNA, 25 bp, Probe Sequence
ttccttacatggtctatcttcagtc

SEQ ID NO: 120879 - DNA, 25 bp, Probe Sequence
cttacatggtctatcttcagtcctt

SEQ ID NO: 120880 - DNA, 25 bp, Probe Sequence
tacatggtctatcttcagtccttcc

SEQ ID NO: 120881 - DNA, 25 bp, Probe Sequence
ccttacatggtctatcttcagtcct

SEQ ID NO: 120882 - DNA, 25 bp, Probe Sequence
tccttacatggtctatcttcagtcc

SEQ ID NO: 120883 - DNA, 25 bp, Probe Sequence
attccttacatggtctatcttcagt

SEQ ID NO: 120884 - DNA, 25 bp, Probe Sequence
aggattcttcacaggtgttcatagc

SEQ ID NO: 120885 - DNA, 25 bp, Probe Sequence
gctctggctaaagactctaaagata

SEQ ID NO: 120886 - DNA, 25 bp, Probe Sequence
gtggttcgtagggaaattgattatt

SEQ ID NO: 120887 - DNA, 25 bp, Probe Sequence
ggtggttcgtagggaaattgattat

SEQ ID NO: 120888 - DNA, 25 bp, Probe Sequence
tattccttacatggtctatcttcag

SEQ ID NO: 120889 - DNA, 25 bp, Probe Sequence
ctattccttacatggtctatcttca

SEQ ID NO: 120890 - DNA, 25 bp, Probe Sequence
actattccttacatggtctatcttc

SEQ ID NO: 120891 - DNA, 25 bp, Probe Sequence
ttggactaaagattgggacagttta

SEQ ID NO: 120892 - DNA, 25 bp, Probe Sequence
ggactaaagattgggacagtttaca

SEQ ID NO: 120893 - DNA, 25 bp, Probe Sequence
tggactaaagattgggacagtttac

SEQ ID NO: 120894 - DNA, 25 bp, Probe Sequence
gactaaagattgggacagtttacag

SEQ ID NO: 120895 - DNA, 25 bp, Probe Sequence
tgctctggctaaagactctaaagat

SEQ ID NO: 120896 - DNA, 25 bp, Probe Sequence
cttggactaaagattgggacagttt

SEQ ID NO: 120897 - DNA, 25 bp, Probe Sequence
actaaagattgggacagtttacagc

SEQ ID NO: 120898 - DNA, 25 bp, Probe Sequence
tgacataatcagttgttatctccct

SEQ ID NO: 120899 - DNA, 25 bp, Probe Sequence
ataatcagttgttatctccctggtc

SEQ ID NO: 120900 - DNA, 25 bp, Probe Sequence
gcttcctctcactcatcctgaatat

SEQ ID NO: 120901 - DNA, 25 bp, Probe Sequence
cttcctctcactcatcctgaatatt

SEQ ID NO: 120902 - DNA, 25 bp, Probe Sequence
gacttgatcgtgactagagatgacc

SEQ ID NO: 120903 - DNA, 25 bp, Probe Sequence
ttcagattcacacaatcaggatgac

SEQ ID NO: 120904 - DNA, 25 bp, Probe Sequence
cctcaagagaatgtagaatgcaagt

SEQ ID NO: 120905 - DNA, 25 bp, Probe Sequence
cttgatcgtgactagagatgacctc

SEQ ID NO: 120906 - DNA, 25 bp, Probe Sequence
ttcctctcactcatcctgaatatta

SEQ ID NO: 120907 - DNA, 25 bp, Probe Sequence
acttgatcgtgactagagatgacct

SEQ ID NO: 120908 - DNA, 25 bp, Probe Sequence
cctctcactcatcctgaatattatg

SEQ ID NO: 120909 - DNA, 25 bp, Probe Sequence
tcctctcactcatcctgaatattat

SEQ ID NO: 120910 - DNA, 25 bp, Probe Sequence
ctcaagagaatgtagaatgcaagta

SEQ ID NO: 120911 - DNA, 25 bp, Probe Sequence
tcaagagaatgtagaatgcaagtaa

SEQ ID NO: 120912 - DNA, 25 bp, Probe Sequence
gcctcaagagaatgtagaatgcaag

SEQ ID NO: 120913 - DNA, 25 bp, Probe Sequence
cagtcagatggatttgattctaggg

SEQ ID NO: 120914 - DNA, 25 bp, Probe Sequence
atgtttattgatgaaattgacgcaa

SEQ ID NO: 120915 - DNA, 25 bp, Probe Sequence
catgtttattgatgaaattgacgca

SEQ ID NO: 120916 - DNA, 25 bp, Probe Sequence
aatgatgtaaacctggacgacttga

SEQ ID NO: 120917 - DNA, 25 bp, Probe Sequence
cagaatatgcactgtccatcatgtt

SEQ ID NO: 120918 - DNA, 25 bp, Probe Sequence
gtagtgagagagaaattcagcgatc

SEQ ID NO: 120919 - DNA, 25 bp, Probe Sequence
tagtgagagagaaattcagcgatca

SEQ ID NO: 120920 - DNA, 25 bp, Probe Sequence
gatatgactcaaattctggtagtga

SEQ ID NO: 120921 - DNA, 25 bp, Probe Sequence
agatatgactcaaattctggtagtg

SEQ ID NO: 120922 - DNA, 25 bp, Probe Sequence
agcttcctctcactcatcctgaata

SEQ ID NO: 120923 - DNA, 25 bp, Probe Sequence
caatgatgtaaacctggacgacttg

SEQ ID NO: 120924 - DNA, 25 bp, Probe Sequence
ttattcacaaagattacaaaccgcc

SEQ ID NO: 120925 - DNA, 25 bp, Probe Sequence
gaaagaatgtgccaagaggataaac

SEQ ID NO: 120926 - DNA, 25 bp, Probe Sequence
cctctggtttgtgctatttatggaa

SEQ ID NO: 120927 - DNA, 25 bp, Probe Sequence
gcagaaggtcattattcacaaagat

SEQ ID NO: 120928 - DNA, 25 bp, Probe Sequence
ctctggtttgtgctatttatggaac

SEQ ID NO: 120929 - DNA, 25 bp, Probe Sequence
taccgttgataaacctaactgctaa

SEQ ID NO: 120930 - DNA, 25 bp, Probe Sequence
ttaccgttgataaacctaactgcta

SEQ ID NO: 120931 - DNA, 25 bp, Probe Sequence
ggaaagaatgtgccaagaggataaa

SEQ ID NO: 120932 - DNA, 25 bp, Probe Sequence
attattcacaaagattacaaaccgc

SEQ ID NO: 120933 - DNA, 25 bp, Probe Sequence
tttaccgttgataaacctaactgct

SEQ ID NO: 120934 - DNA, 25 bp, Probe Sequence
aaagaatgtgccaagaggataaacc

SEQ ID NO: 120935 - DNA, 25 bp, Probe Sequence
tattcacaaagattacaaaccgccc

SEQ ID NO: 120936 - DNA, 25 bp, Probe Sequence
aagcaagtgcagaaggtcattattc

SEQ ID NO: 120937 - DNA, 25 bp, Probe Sequence
aagtgcagaaggtcattattcacaa

SEQ ID NO: 120938 - DNA, 25 bp, Probe Sequence
agtgacctctctctgcttctacttg

SEQ ID NO: 120939 - DNA, 25 bp, Probe Sequence
attcgttctttagattagacatggc

SEQ ID NO: 120940 - DNA, 25 bp, Probe Sequence
aatggtatcttcaagggagacagtg

SEQ ID NO: 120941 - DNA, 25 bp, Probe Sequence
caatggtatcttcaagggagacagt

SEQ ID NO: 120942 - DNA, 25 bp, Probe Sequence
aagaatgtgccaagaggataaacca

SEQ ID NO: 120943 - DNA, 25 bp, Probe Sequence
caagtgcagaaggtcattattcaca

SEQ ID NO: 120944 - DNA, 25 bp, Probe Sequence
gaccaatatgatgacttaaacatgc

SEQ ID NO: 120945 - DNA, 25 bp, Probe Sequence
cagtgacctctctctgcttctactt

SEQ ID NO: 120946 - DNA, 25 bp, Probe Sequence
cagaaggtcattattcacaaagatt

SEQ ID NO: 120947 - DNA, 25 bp, Probe Sequence
cattattcacaaagattacaaaccg

SEQ ID NO: 120948 - DNA, 25 bp, Probe Sequence
tagagtcttgtctccaatgtcagtg

SEQ ID NO: 120949 - DNA, 25 bp, Probe Sequence
ctagagtcttgtctccaatgtcagt

SEQ ID NO: 120950 - DNA, 25 bp, Probe Sequence
gtataagtatgagccagactctgtt

SEQ ID NO: 120951 - DNA, 25 bp, Probe Sequence
gtacaccgagttgtccaattatctg

SEQ ID NO: 120952 - DNA, 25 bp, Probe Sequence
tataagtatgagccagactctgttc

SEQ ID NO: 120953 - DNA, 25 bp, Probe Sequence
gaagccgtataagtatgagccagac

SEQ ID NO: 120954 - DNA, 25 bp, Probe Sequence
ataagtatgagccagactctgttca

SEQ ID NO: 120955 - DNA, 25 bp, Probe Sequence
taagtatgagccagactctgttcaa

SEQ ID NO: 120956 - DNA, 25 bp, Probe Sequence
cgtataagtatgagccagactctgt

SEQ ID NO: 120957 - DNA, 25 bp, Probe Sequence
cagaagagttggacacatcgttagg

SEQ ID NO: 120958 - DNA, 25 bp, Probe Sequence
cagaggaaagaaagcagaagagttg

SEQ ID NO: 120959 - DNA, 25 bp, Probe Sequence
tcagaggaaagaaagcagaagagtt

SEQ ID NO: 120960 - DNA, 25 bp, Probe Sequence
tacaccgagttgtccaattatctgc

SEQ ID NO: 120961 - DNA, 25 bp, Probe Sequence
ccgtataagtatgagccagactctg

SEQ ID NO: 120962 - DNA, 25 bp, Probe Sequence
caccgagttgtccaattatctgctt

SEQ ID NO: 120963 - DNA, 25 bp, Probe Sequence
aagccgtataagtatgagccagact

SEQ ID NO: 120964 - DNA, 25 bp, Probe Sequence
gaaagaaagcagaagagttggacac

SEQ ID NO: 120965 - DNA, 25 bp, Probe Sequence
gcagaagagttggacacatcgttag

SEQ ID NO: 120966 - DNA, 25 bp, Probe Sequence
ggaagccgtataagtatgagccaga

SEQ ID NO: 120967 - DNA, 25 bp, Probe Sequence
gatctagagtcttgtctccaatgtc

SEQ ID NO: 120968 - DNA, 25 bp, Probe Sequence
atctagagtcttgtctccaatgtca

SEQ ID NO: 120969 - DNA, 25 bp, Probe Sequence
aagaaagcagaagagttggacacat

SEQ ID NO: 120970 - DNA, 25 bp, Probe Sequence
gaggaaagaaagcagaagagttgga

SEQ ID NO: 120971 - DNA, 25 bp, Probe Sequence
agaggaaagaaagcagaagagttgg

SEQ ID NO: 120972 - DNA, 25 bp, Probe Sequence
cctcactgtaaagcttcatcaggat

SEQ ID NO: 120973 - DNA, 25 bp, Probe Sequence
actgtaaagcttcatcaggatcgtc

SEQ ID NO: 120974 - DNA, 25 bp, Probe Sequence
tcactgtaaagcttcatcaggatcg

SEQ ID NO: 120975 - DNA, 25 bp, Probe Sequence
cactgtaaagcttcatcaggatcgt

SEQ ID NO: 120976 - DNA, 25 bp, Probe Sequence
gtcctcactgtaaagcttcatcagg

SEQ ID NO: 120977 - DNA, 25 bp, Probe Sequence
ctgtaaagcttcatcaggatcgtcc

SEQ ID NO: 120978 - DNA, 25 bp, Probe Sequence
cgtcctcactgtaaagcttcatcag

SEQ ID NO: 120979 - DNA, 25 bp, Probe Sequence
gtaaagcttcatcaggatcgtccac

SEQ ID NO: 120980 - DNA, 25 bp, Probe Sequence
tgtaaagcttcatcaggatcgtcca

SEQ ID NO: 120981 - DNA, 25 bp, Probe Sequence
ccgtcctcactgtaaagcttcatca

SEQ ID NO: 120982 - DNA, 25 bp, Probe Sequence
taaagcttcatcaggatcgtccacc

SEQ ID NO: 120983 - DNA, 25 bp, Probe Sequence
tcctcactgtaaagcttcatcagga

SEQ ID NO: 120984 - DNA, 25 bp, Probe Sequence
gaacctggctccttcctgtattatg

SEQ ID NO: 120985 - DNA, 25 bp, Probe Sequence
gtcctatgcccactttagatgtatc

SEQ ID NO: 120986 - DNA, 25 bp, Probe Sequence
tcctatgcccactttagatgtatct

SEQ ID NO: 120987 - DNA, 25 bp, Probe Sequence
cgtcctatgcccactttagatgtat

SEQ ID NO: 120988 - DNA, 25 bp, Probe Sequence
ctccttcctgtattatgctcccttc

SEQ ID NO: 120989 - DNA, 25 bp, Probe Sequence
cctatgcccactttagatgtatcta

SEQ ID NO: 120990 - DNA, 25 bp, Probe Sequence
cttcctgtattatgctcccttcgat

SEQ ID NO: 120991 - DNA, 25 bp, Probe Sequence
aacctggctccttcctgtattatgc

SEQ ID NO: 120992 - DNA, 25 bp, Probe Sequence
ttcctgtattatgctcccttcgatg

SEQ ID NO: 120993 - DNA, 25 bp, Probe Sequence
ctggctccttcctgtattatgctcc

SEQ ID NO: 120994 - DNA, 25 bp, Probe Sequence
cctggctccttcctgtattatgctc

SEQ ID NO: 120995 - DNA, 25 bp, Probe Sequence
ctgaggattcttccacctaccagtc

SEQ ID NO: 120996 - DNA, 25 bp, Probe Sequence
ccgtcctatgcccactttagatgta

SEQ ID NO: 120997 - DNA, 25 bp, Probe Sequence
tccttcctgtattatgctcccttcg

SEQ ID NO: 120998 - DNA, 25 bp, Probe Sequence
gctccttcctgtattatgctccctt

SEQ ID NO: 120999 - DNA, 25 bp, Probe Sequence
acctggctccttcctgtattatgct

SEQ ID NO: 121000 - DNA, 25 bp, Probe Sequence
ccttcctgtattatgctcccttcga

SEQ ID NO: 121001 - DNA, 25 bp, Probe Sequence
ctccgtcctatgcccactttagatg

SEQ ID NO: 121002 - DNA, 25 bp, Probe Sequence
tcctgtattatgctcccttcgatgg

SEQ ID NO: 121003 - DNA, 25 bp, Probe Sequence
catcaccatgaacggagagaccatc

SEQ ID NO: 121004 - DNA, 25 bp, Probe Sequence
gctctctgagtgcatcatgtacaag

SEQ ID NO: 121005 - DNA, 25 bp, Probe Sequence
gaggattcttccacctaccagtcca

SEQ ID NO: 121006 - DNA, 25 bp, Probe Sequence
tgaggattcttccacctaccagtcc

SEQ ID NO: 121007 - DNA, 25 bp, Probe Sequence
cctgaggattcttccacctaccagt

SEQ ID NO: 121008 - DNA, 25 bp, Probe Sequence
actctctgagtgcatcatgtacaag

SEQ ID NO: 121009 - DNA, 25 bp, Probe Sequence
aaacataacccactgaaacaggttt

SEQ ID NO: 121010 - DNA, 25 bp, Probe Sequence
aacataacccactgaaacaggtttt

SEQ ID NO: 121011 - DNA, 25 bp, Probe Sequence
aaaacataacccactgaaacaggtt

SEQ ID NO: 121012 - DNA, 25 bp, Probe Sequence
ataacccactgaaacaggttttgtg

SEQ ID NO: 121013 - DNA, 25 bp, Probe Sequence
cataacccactgaaacaggttttgt

SEQ ID NO: 121014 - DNA, 25 bp, Probe Sequence
acataacccactgaaacaggttttg

SEQ ID NO: 121015 - DNA, 25 bp, Probe Sequence
agataacaataaatattggctgggt

SEQ ID NO: 121016 - DNA, 25 bp, Probe Sequence
cagataacaataaatattggctggg

SEQ ID NO: 121017 - DNA, 25 bp, Probe Sequence
gataacaataaatattggctgggta

SEQ ID NO: 121018 - DNA, 25 bp, Probe Sequence
ctggttggctacagctatgaaggag

SEQ ID NO: 121019 - DNA, 25 bp, Probe Sequence
taacaataaatattggctgggtaaa

SEQ ID NO: 121020 - DNA, 25 bp, Probe Sequence
ataacaataaatattggctgggtaa

SEQ ID NO: 121021 - DNA, 25 bp, Probe Sequence
aacaataaatattggctgggtaaaa

SEQ ID NO: 121022 - DNA, 25 bp, Probe Sequence
ctttgtggacatcccttcacaggag

SEQ ID NO: 121023 - DNA, 25 bp, Probe Sequence
ttatcatatcatcagcagcaacttg

SEQ ID NO: 121024 - DNA, 25 bp, Probe Sequence
tatcatatcatcagcagcaacttgg

SEQ ID NO: 121025 - DNA, 25 bp, Probe Sequence
tggcttaacaagattgaagatggaa

SEQ ID NO: 121026 - DNA, 25 bp, Probe Sequence
ttctggcttaacaagattgaagatg

SEQ ID NO: 121027 - DNA, 25 bp, Probe Sequence
agacttctggcttaacaagattgaa

SEQ ID NO: 121028 - DNA, 25 bp, Probe Sequence
ctggcttaacaagattgaagatgga

SEQ ID NO: 121029 - DNA, 25 bp, Probe Sequence
tctggcttaacaagattgaagatgg

SEQ ID NO: 121030 - DNA, 25 bp, Probe Sequence
tgaagagaagccatctatgtactga

SEQ ID NO: 121031 - DNA, 25 bp, Probe Sequence
gtgaagagaagccatctatgtactg

SEQ ID NO: 121032 - DNA, 25 bp, Probe Sequence
atatcatcagcagcaacttggagaa

SEQ ID NO: 121033 - DNA, 25 bp, Probe Sequence
atcatatcatcagcagcaacttgga

SEQ ID NO: 121034 - DNA, 25 bp, Probe Sequence
ggtgaagagaagccatctatgtact

SEQ ID NO: 121035 - DNA, 25 bp, Probe Sequence
ccagacaaccatttccaagtatttc

SEQ ID NO: 121036 - DNA, 25 bp, Probe Sequence
acaaccatttccaagtatttctcag

SEQ ID NO: 121037 - DNA, 25 bp, Probe Sequence
gacaaccatttccaagtatttctca

SEQ ID NO: 121038 - DNA, 25 bp, Probe Sequence
cagacttctggcttaacaagattga

SEQ ID NO: 121039 - DNA, 25 bp, Probe Sequence
tccagacaaccatttccaagtattt

SEQ ID NO: 121040 - DNA, 25 bp, Probe Sequence
ttccagacaaccatttccaagtatt

SEQ ID NO: 121041 - DNA, 25 bp, Probe Sequence
tttccagacaaccatttccaagtat

SEQ ID NO: 121042 - DNA, 25 bp, Probe Sequence
aaggagactcatgtaatggattacc

SEQ ID NO: 121043 - DNA, 25 bp, Probe Sequence
ctttatcatatcatcagcagcaact

SEQ ID NO: 121044 - DNA, 25 bp, Probe Sequence
caaccatttccaagtatttctcaga

SEQ ID NO: 121045 - DNA, 25 bp, Probe Sequence
catatcatcagcagcaacttggaga

SEQ ID NO: 121046 - DNA, 25 bp, Probe Sequence
tcatatcatcagcagcaacttggag

SEQ ID NO: 121047 - DNA, 25 bp, Probe Sequence
ataagtaccgattccacatcattcc

SEQ ID NO: 121048 - DNA, 25 bp, Probe Sequence
aataagtaccgattccacatcattc

SEQ ID NO: 121049 - DNA, 25 bp, Probe Sequence
gtaacggacactatgatgctgtatt

SEQ ID NO: 121050 - DNA, 25 bp, Probe Sequence
taagtaccgattccacatcattcca

SEQ ID NO: 121051 - DNA, 25 bp, Probe Sequence
agtaacggacactatgatgctgtat

SEQ ID NO: 121052 - DNA, 25 bp, Probe Sequence
gcagatgctgaatgtgaatatccat

SEQ ID NO: 121053 - DNA, 25 bp, Probe Sequence
acggtgtctaccatgattcattatt

SEQ ID NO: 121054 - DNA, 25 bp, Probe Sequence
gaataagtaccgattccacatcatt

SEQ ID NO: 121055 - DNA, 25 bp, Probe Sequence
cagtaacggacactatgatgctgta

SEQ ID NO: 121056 - DNA, 25 bp, Probe Sequence
cagatgctgaatgtgaatatccatt

SEQ ID NO: 121057 - DNA, 25 bp, Probe Sequence
cacggtgtctaccatgattcattat

SEQ ID NO: 121058 - DNA, 25 bp, Probe Sequence
aagtaccgattccacatcattccag

SEQ ID NO: 121059 - DNA, 25 bp, Probe Sequence
taacggacactatgatgctgtattt

SEQ ID NO: 121060 - DNA, 25 bp, Probe Sequence
cggacactatgatgctgtatttgat

SEQ ID NO: 121061 - DNA, 25 bp, Probe Sequence
gtaccgattccacatcattccagac

SEQ ID NO: 121062 - DNA, 25 bp, Probe Sequence
ggacactatgatgctgtatttgatc

SEQ ID NO: 121063 - DNA, 25 bp, Probe Sequence
aacggacactatgatgctgtatttg

SEQ ID NO: 121064 - DNA, 25 bp, Probe Sequence
ctcagtaacggacactatgatgctg

SEQ ID NO: 121065 - DNA, 25 bp, Probe Sequence
agtaccgattccacatcattccaga

SEQ ID NO: 121066 - DNA, 25 bp, Probe Sequence
ctatcctaacccagagtacgacaac

SEQ ID NO: 121067 - DNA, 25 bp, Probe Sequence
ttggctcagtaacggacactatgat

SEQ ID NO: 121068 - DNA, 25 bp, Probe Sequence
ccacggtgtctaccatgattcatta

SEQ ID NO: 121069 - DNA, 25 bp, Probe Sequence
cgacgaagaacttgccaaatctatg

SEQ ID NO: 121070 - DNA, 25 bp, Probe Sequence
acggacactatgatgctgtatttga

SEQ ID NO: 121071 - DNA, 25 bp, Probe Sequence
gttgatggacagagacagaagagta

SEQ ID NO: 121072 - DNA, 25 bp, Probe Sequence
aagagaatgagtgaattagtgctcg

SEQ ID NO: 121073 - DNA, 25 bp, Probe Sequence
ttgatggacagagacagaagagtac

SEQ ID NO: 121074 - DNA, 25 bp, Probe Sequence
gaatcagtaacaccattgagaccac

SEQ ID NO: 121075 - DNA, 25 bp, Probe Sequence
atcagtaacaccattgagaccactt

SEQ ID NO: 121076 - DNA, 25 bp, Probe Sequence
aatcagtaacaccattgagaccact

SEQ ID NO: 121077 - DNA, 25 bp, Probe Sequence
gtactacatctacattcagcttgga

SEQ ID NO: 121078 - DNA, 25 bp, Probe Sequence
tactacatctacattcagcttggaa

SEQ ID NO: 121079 - DNA, 25 bp, Probe Sequence
ccacgatattggattcttattggaa

SEQ ID NO: 121080 - DNA, 25 bp, Probe Sequence
caccacaaagatgctataaatcagg

SEQ ID NO: 121081 - DNA, 25 bp, Probe Sequence
ggaatcagtaacaccattgagacca

SEQ ID NO: 121082 - DNA, 25 bp, Probe Sequence
acaccacaaagatgctataaatcag

SEQ ID NO: 121083 - DNA, 25 bp, Probe Sequence
gcatctttgaaacggatattctctc

SEQ ID NO: 121084 - DNA, 25 bp, Probe Sequence
agagaatgagtgaattagtgctcgg

SEQ ID NO: 121085 - DNA, 25 bp, Probe Sequence
ccacaaagatgctataaatcagggt

SEQ ID NO: 121086 - DNA, 25 bp, Probe Sequence
accacaaagatgctataaatcaggg

SEQ ID NO: 121087 - DNA, 25 bp, Probe Sequence
tccttacaccacaaagatgctataa

SEQ ID NO: 121088 - DNA, 25 bp, Probe Sequence
gtccttacaccacaaagatgctata

SEQ ID NO: 121089 - DNA, 25 bp, Probe Sequence
gaactcatcaacagctcctacaatg

SEQ ID NO: 121090 - DNA, 25 bp, Probe Sequence
ccttacaccacaaagatgctataaa

SEQ ID NO: 121091 - DNA, 25 bp, Probe Sequence
acaaagatgctataaatcagggtgc

SEQ ID NO: 121092 - DNA, 25 bp, Probe Sequence
actcatcaacagctcctacaatgta

SEQ ID NO: 121093 - DNA, 25 bp, Probe Sequence
tacaccacaaagatgctataaatca

SEQ ID NO: 121094 - DNA, 25 bp, Probe Sequence
gtgttgatggacagagacagaagag

SEQ ID NO: 121095 - DNA, 25 bp, Probe Sequence
ctaccaacccgaaaccatcaagaat

SEQ ID NO: 121096 - DNA, 25 bp, Probe Sequence
gaaaccatcaagaatgacatgctgt

SEQ ID NO: 121097 - DNA, 25 bp, Probe Sequence
aacccgaaaccatcaagaatgacat

SEQ ID NO: 121098 - DNA, 25 bp, Probe Sequence
taccaacccgaaaccatcaagaatg

SEQ ID NO: 121099 - DNA, 25 bp, Probe Sequence
cgaaaccatcaagaatgacatgctg

SEQ ID NO: 121100 - DNA, 25 bp, Probe Sequence
caacccgaaaccatcaagaatgaca

SEQ ID NO: 121101 - DNA, 25 bp, Probe Sequence
acccgaaaccatcaagaatgacatg

SEQ ID NO: 121102 - DNA, 25 bp, Probe Sequence
ccgaaaccatcaagaatgacatgct

SEQ ID NO: 121103 - DNA, 25 bp, Probe Sequence
ccaacccgaaaccatcaagaatgac

SEQ ID NO: 121104 - DNA, 25 bp, Probe Sequence
accaacccgaaaccatcaagaatga

SEQ ID NO: 121105 - DNA, 25 bp, Probe Sequence
cccgaaaccatcaagaatgacatgc

SEQ ID NO: 121106 - DNA, 25 bp, Probe Sequence
caggatacagtcaagattcacaaga

SEQ ID NO: 121107 - DNA, 25 bp, Probe Sequence
aggatacagtcaagattcacaagaa

SEQ ID NO: 121108 - DNA, 25 bp, Probe Sequence
gcaggatacagtcaagattcacaag

SEQ ID NO: 121109 - DNA, 25 bp, Probe Sequence
ggctctatgagtctattattgttgc

SEQ ID NO: 121110 - DNA, 25 bp, Probe Sequence
gcggctctatgagtctattattgtt

SEQ ID NO: 121111 - DNA, 25 bp, Probe Sequence
cggctctatgagtctattattgttg

SEQ ID NO: 121112 - DNA, 25 bp, Probe Sequence
atcttgccttgtcacagtatgttat

SEQ ID NO: 121113 - DNA, 25 bp, Probe Sequence
cttgccttgtcacagtatgttattg

SEQ ID NO: 121114 - DNA, 25 bp, Probe Sequence
tcttgccttgtcacagtatgttatt

SEQ ID NO: 121115 - DNA, 25 bp, Probe Sequence
aatcttgccttgtcacagtatgtta

SEQ ID NO: 121116 - DNA, 25 bp, Probe Sequence
aagcggctctatgagtctattattg

SEQ ID NO: 121117 - DNA, 25 bp, Probe Sequence
caagcggctctatgagtctattatt

SEQ ID NO: 121118 - DNA, 25 bp, Probe Sequence
ccttgtcacagtatgttattggtcc

SEQ ID NO: 121119 - DNA, 25 bp, Probe Sequence
agcggctctatgagtctattattgt

SEQ ID NO: 121120 - DNA, 25 bp, Probe Sequence
acaagcggctctatgagtctattat

SEQ ID NO: 121121 - DNA, 25 bp, Probe Sequence
ttgccttgtcacagtatgttattgg

SEQ ID NO: 121122 - DNA, 25 bp, Probe Sequence
gccttgtcacagtatgttattggtc

SEQ ID NO: 121123 - DNA, 25 bp, Probe Sequence
cacaagcggctctatgagtctatta

SEQ ID NO: 121124 - DNA, 25 bp, Probe Sequence
ggatacagtcaagattcacaagaat

SEQ ID NO: 121125 - DNA, 25 bp, Probe Sequence
tgccttgtcacagtatgttattggt

SEQ ID NO: 121126 - DNA, 25 bp, Probe Sequence
gctctatgagtctattattgttgca

SEQ ID NO: 121127 - DNA, 25 bp, Probe Sequence
cttaaagtcaccattgggaagatca

SEQ ID NO: 121128 - DNA, 25 bp, Probe Sequence
ttaaagtcaccattgggaagatcaa

SEQ ID NO: 121129 - DNA, 25 bp, Probe Sequence
tgcaggatacagtcaagattcacaa

SEQ ID NO: 121130 - DNA, 25 bp, Probe Sequence
catgctgaacattatgaagagatgg

SEQ ID NO: 121131 - DNA, 25 bp, Probe Sequence
ccatgctgaacattatgaagagatg

SEQ ID NO: 121132 - DNA, 25 bp, Probe Sequence
cgtagaatgaaagcaacaaatgaag

SEQ ID NO: 121133 - DNA, 25 bp, Probe Sequence
gctgaacattatgaagagatgggta

SEQ ID NO: 121134 - DNA, 25 bp, Probe Sequence
atgctgaacattatgaagagatggg

SEQ ID NO: 121135 - DNA, 25 bp, Probe Sequence
caatactgggaggttggataatcaa

SEQ ID NO: 121136 - DNA, 25 bp, Probe Sequence
aatactgggaggttggataatcaaa

SEQ ID NO: 121137 - DNA, 25 bp, Probe Sequence
atactgggaggttggataatcaaat

SEQ ID NO: 121138 - DNA, 25 bp, Probe Sequence
tactgggaggttggataatcaaatt

SEQ ID NO: 121139 - DNA, 25 bp, Probe Sequence
ggaggttggataatcaaattcagga

SEQ ID NO: 121140 - DNA, 25 bp, Probe Sequence
gatatgactcaaattctggtgaagc

SEQ ID NO: 121141 - DNA, 25 bp, Probe Sequence
tgggaggttggataatcaaattcag

SEQ ID NO: 121142 - DNA, 25 bp, Probe Sequence
ctgggaggttggataatcaaattca

SEQ ID NO: 121143 - DNA, 25 bp, Probe Sequence
actgggaggttggataatcaaattc

SEQ ID NO: 121144 - DNA, 25 bp, Probe Sequence
gtagaatgaaagcaacaaatgaaga

SEQ ID NO: 121145 - DNA, 25 bp, Probe Sequence
gaggttggataatcaaattcaggaa

SEQ ID NO: 121146 - DNA, 25 bp, Probe Sequence
gaattgtttcaagttgctggagaac

SEQ ID NO: 121147 - DNA, 25 bp, Probe Sequence
aggttggataatcaaattcaggaaa

SEQ ID NO: 121148 - DNA, 25 bp, Probe Sequence
gggaggttggataatcaaattcagg

SEQ ID NO: 121149 - DNA, 25 bp, Probe Sequence
agatatgactcaaattctggtgaag

SEQ ID NO: 121150 - DNA, 25 bp, Probe Sequence
ctgaacattatgaagagatgggtat

SEQ ID NO: 121151 - DNA, 25 bp, Probe Sequence
tgctgaacattatgaagagatgggt

SEQ ID NO: 121152 - DNA, 25 bp, Probe Sequence
cccatgctgaacattatgaagagat

SEQ ID NO: 121153 - DNA, 25 bp, Probe Sequence
tttactgatgaaactgacgccattg

SEQ ID NO: 121154 - DNA, 25 bp, Probe Sequence
atatccaggttacagaatgagagtc

SEQ ID NO: 121155 - DNA, 25 bp, Probe Sequence
tatccaggttacagaatgagagtct

SEQ ID NO: 121156 - DNA, 25 bp, Probe Sequence
ggatgtcaactaggaagaatatgcc

SEQ ID NO: 121157 - DNA, 25 bp, Probe Sequence
gatatccaggttacagaatgagagt

SEQ ID NO: 121158 - DNA, 25 bp, Probe Sequence
tgggatgtcaactaggaagaatatg

SEQ ID NO: 121159 - DNA, 25 bp, Probe Sequence
ctgggatgtcaactaggaagaatat

SEQ ID NO: 121160 - DNA, 25 bp, Probe Sequence
cctctccaaactctataccttgatt

SEQ ID NO: 121161 - DNA, 25 bp, Probe Sequence
tttctttgaagttgaggaatgactg

SEQ ID NO: 121162 - DNA, 25 bp, Probe Sequence
gatgtcaactaggaagaatatgccc

SEQ ID NO: 121163 - DNA, 25 bp, Probe Sequence
gggatgtcaactaggaagaatatgc

SEQ ID NO: 121164 - DNA, 25 bp, Probe Sequence
ccctctccaaactctataccttgat

SEQ ID NO: 121165 - DNA, 25 bp, Probe Sequence
tctgggatgtcaactaggaagaata

SEQ ID NO: 121166 - DNA, 25 bp, Probe Sequence
ttctttgaagttgaggaatgactgg

SEQ ID NO: 121167 - DNA, 25 bp, Probe Sequence
aaatagagaccagaaacactgatgt

SEQ ID NO: 121168 - DNA, 25 bp, Probe Sequence
aatagagaccagaaacactgatgtc

SEQ ID NO: 121169 - DNA, 25 bp, Probe Sequence
ggaaatagagaccagaaacactgat

SEQ ID NO: 121170 - DNA, 25 bp, Probe Sequence
gaaatagagaccagaaacactgatg

SEQ ID NO: 121171 - DNA, 25 bp, Probe Sequence
tccaaactctataccttgatttctg

SEQ ID NO: 121172 - DNA, 25 bp, Probe Sequence
ctccaaactctataccttgatttct

SEQ ID NO: 121173 - DNA, 25 bp, Probe Sequence
tctccaaactctataccttgatttc

SEQ ID NO: 121174 - DNA, 25 bp, Probe Sequence
ctctccaaactctataccttgattt

SEQ ID NO: 121175 - DNA, 25 bp, Probe Sequence
ctttgaagttgaggaatgactggtg

SEQ ID NO: 121176 - DNA, 25 bp, Probe Sequence
tctttgaagttgaggaatgactggt

SEQ ID NO: 121177 - DNA, 25 bp, Probe Sequence
ggcaaagagttatggcttagagtct

SEQ ID NO: 121178 - DNA, 25 bp, Probe Sequence
agttatcatatccacaagccgaata

SEQ ID NO: 121179 - DNA, 25 bp, Probe Sequence
aagttatcatatccacaagccgaat

SEQ ID NO: 121180 - DNA, 25 bp, Probe Sequence
tatcatatccacaagccgaatagaa

SEQ ID NO: 121181 - DNA, 25 bp, Probe Sequence
ttatcatatccacaagccgaataga

SEQ ID NO: 121182 - DNA, 25 bp, Probe Sequence
gttatcatatccacaagccgaatag

SEQ ID NO: 121183 - DNA, 25 bp, Probe Sequence
atcatatccacaagccgaatagaaa

SEQ ID NO: 121184 - DNA, 25 bp, Probe Sequence
aaagttatcatatccacaagccgaa

SEQ ID NO: 121185 - DNA, 25 bp, Probe Sequence
atatccacaagccgaatagaaactt

SEQ ID NO: 121186 - DNA, 25 bp, Probe Sequence
catatccacaagccgaatagaaact

SEQ ID NO: 121187 - DNA, 25 bp, Probe Sequence
tcatatccacaagccgaatagaaac

SEQ ID NO: 121188 - DNA, 25 bp, Probe Sequence
gaaagttatcatatccacaagccga

SEQ ID NO: 121189 - DNA, 25 bp, Probe Sequence
tatccacaagccgaatagaaacttt

SEQ ID NO: 121190 - DNA, 25 bp, Probe Sequence
caaataatgctggaaatgttgaacc

SEQ ID NO: 121191 - DNA, 25 bp, Probe Sequence
tatgggaattgtttctagttgctga

SEQ ID NO: 121192 - DNA, 25 bp, Probe Sequence
tgatagtgagagagaaattcagcaa

SEQ ID NO: 121193 - DNA, 25 bp, Probe Sequence
ttggatctagcacttatcagaccag

SEQ ID NO: 121194 - DNA, 25 bp, Probe Sequence
atatgggaattgtttctagttgctg

SEQ ID NO: 121195 - DNA, 25 bp, Probe Sequence
atgggaattgtttctagttgctgaa

SEQ ID NO: 121196 - DNA, 25 bp, Probe Sequence
cagccaaattcaggaaattaaggaa

SEQ ID NO: 121197 - DNA, 25 bp, Probe Sequence
actttggatctagcacttatcagac

SEQ ID NO: 121198 - DNA, 25 bp, Probe Sequence
tgatgaaattgatgctattaggaca

SEQ ID NO: 121199 - DNA, 25 bp, Probe Sequence
tgaaagttatcatatccacaagccg

SEQ ID NO: 121200 - DNA, 25 bp, Probe Sequence
gatagtgagagagaaattcagcaaa

SEQ ID NO: 121201 - DNA, 25 bp, Probe Sequence
aactttggatctagcacttatcaga

SEQ ID NO: 121202 - DNA, 25 bp, Probe Sequence
cagagaccaggatgaagatgataag

SEQ ID NO: 121203 - DNA, 25 bp, Probe Sequence
agagaccaggatgaagatgataagg

SEQ ID NO: 121204 - DNA, 25 bp, Probe Sequence
ccagagaccaggatgaagatgataa

SEQ ID NO: 121205 - DNA, 25 bp, Probe Sequence
gaagaactcagtgaatctactccag

SEQ ID NO: 121206 - DNA, 25 bp, Probe Sequence
aagaactcagtgaatctactccaga

SEQ ID NO: 121207 - DNA, 25 bp, Probe Sequence
agaactcagtgaatctactccagag

SEQ ID NO: 121208 - DNA, 25 bp, Probe Sequence
accagagaccaggatgaagatgata

SEQ ID NO: 121209 - DNA, 25 bp, Probe Sequence
gaccaggatgaagatgataaggctc

SEQ ID NO: 121210 - DNA, 25 bp, Probe Sequence
gagaccaggatgaagatgataaggc

SEQ ID NO: 121211 - DNA, 25 bp, Probe Sequence
agaccaggatgaagatgataaggct

SEQ ID NO: 121212 - DNA, 25 bp, Probe Sequence
accagtttgatgatttctttaccct

SEQ ID NO: 121213 - DNA, 25 bp, Probe Sequence
ggtgaatatgtggttcgatggtatt

SEQ ID NO: 121214 - DNA, 25 bp, Probe Sequence
ggaagaactcagtgaatctactcca

SEQ ID NO: 121215 - DNA, 25 bp, Probe Sequence
atatgtggttcgatggtattatgac

SEQ ID NO: 121216 - DNA, 25 bp, Probe Sequence
aatgaatctaattgctactgaccca

SEQ ID NO: 121217 - DNA, 25 bp, Probe Sequence
gaactcagtgaatctactccagagc

SEQ ID NO: 121218 - DNA, 25 bp, Probe Sequence
gtgaatatgtggttcgatggtatta

SEQ ID NO: 121219 - DNA, 25 bp, Probe Sequence
tgtaatggctcaggaaatagattca

SEQ ID NO: 121220 - DNA, 25 bp, Probe Sequence
aatggctcaggaaatagattcaaca

SEQ ID NO: 121221 - DNA, 25 bp, Probe Sequence
taccagtttgatgatttctttaccc

SEQ ID NO: 121222 - DNA, 25 bp, Probe Sequence
atgtggttcgatggtattatgacaa

SEQ ID NO: 121223 - DNA, 25 bp, Probe Sequence
tatgtggttcgatggtattatgaca

SEQ ID NO: 121224 - DNA, 25 bp, Probe Sequence
atggctcaggaaatagattcaacag

SEQ ID NO: 121225 - DNA, 25 bp, Probe Sequence
aaatgaatctaattgctactgaccc

SEQ ID NO: 121226 - DNA, 25 bp, Probe Sequence
gcaggttcatggattacttctctat

SEQ ID NO: 121227 - DNA, 25 bp, Probe Sequence
cagcaccctataaatcaacacctta

SEQ ID NO: 121228 - DNA, 25 bp, Probe Sequence
agcaccctataaatcaacaccttaa

SEQ ID NO: 121229 - DNA, 25 bp, Probe Sequence
tgcaggttcatggattacttctcta

SEQ ID NO: 121230 - DNA, 25 bp, Probe Sequence
gcaccctataaatcaacaccttaat

SEQ ID NO: 121231 - DNA, 25 bp, Probe Sequence
caggttcatggattacttctctata

SEQ ID NO: 121232 - DNA, 25 bp, Probe Sequence
aatttgtaaagttggttggataagc

SEQ ID NO: 121233 - DNA, 25 bp, Probe Sequence
atctcttccttgacctgcattgtaa

SEQ ID NO: 121234 - DNA, 25 bp, Probe Sequence
ttgcaggttcatggattacttctct

SEQ ID NO: 121235 - DNA, 25 bp, Probe Sequence
gttgcaggttcatggattacttctc

SEQ ID NO: 121236 - DNA, 25 bp, Probe Sequence
gtgttgcaggttcatggattacttc

SEQ ID NO: 121237 - DNA, 25 bp, Probe Sequence
tgttgcaggttcatggattacttct

SEQ ID NO: 121238 - DNA, 25 bp, Probe Sequence
catctcttccttgacctgcattgta

SEQ ID NO: 121239 - DNA, 25 bp, Probe Sequence
aggttcatggattacttctctataa

SEQ ID NO: 121240 - DNA, 25 bp, Probe Sequence
atttgtaaagttggttggataagct

SEQ ID NO: 121241 - DNA, 25 bp, Probe Sequence
cttccttgacctgcattgtaaatag

SEQ ID NO: 121242 - DNA, 25 bp, Probe Sequence
tcttccttgacctgcattgtaaata

SEQ ID NO: 121243 - DNA, 25 bp, Probe Sequence
tttgtaaagttggttggataagcta

SEQ ID NO: 121244 - DNA, 25 bp, Probe Sequence
ttgtaaagttggttggataagctat

SEQ ID NO: 121245 - DNA, 25 bp, Probe Sequence
ctcttccttgacctgcattgtaaat

SEQ ID NO: 121246 - DNA, 25 bp, Probe Sequence
ctgcattgtaaataggttcttcttg

SEQ ID NO: 121247 - DNA, 25 bp, Probe Sequence
tgtaaagttggttggataagctatc

SEQ ID NO: 121248 - DNA, 25 bp, Probe Sequence
gcagcaccctataaatcaacacctt

SEQ ID NO: 121249 - DNA, 25 bp, Probe Sequence
tctcttccttgacctgcattgtaaa

SEQ ID NO: 121250 - DNA, 25 bp, Probe Sequence
tatccagtcaataccatcatcatcc

SEQ ID NO: 121251 - DNA, 25 bp, Probe Sequence
tccagtcaataccatcatcatccat

SEQ ID NO: 121252 - DNA, 25 bp, Probe Sequence
atccagtcaataccatcatcatcca

SEQ ID NO: 121253 - DNA, 25 bp, Probe Sequence
ccttctctattcttccaccagttgt

SEQ ID NO: 121254 - DNA, 25 bp, Probe Sequence
gagtatccagtcaataccatcatca

SEQ ID NO: 121255 - DNA, 25 bp, Probe Sequence
cagagtatccagtcaataccatcat

SEQ ID NO: 121256 - DNA, 25 bp, Probe Sequence
cacagagtatccagtcaataccatc

SEQ ID NO: 121257 - DNA, 25 bp, Probe Sequence
ctcacacagagtatccagtcaatac

SEQ ID NO: 121258 - DNA, 25 bp, Probe Sequence
agagtatccagtcaataccatcatc

SEQ ID NO: 121259 - DNA, 25 bp, Probe Sequence
acagagtatccagtcaataccatca

SEQ ID NO: 121260 - DNA, 25 bp, Probe Sequence
ccagtcaataccatcatcatccatg

SEQ ID NO: 121261 - DNA, 25 bp, Probe Sequence
agtatccagtcaataccatcatcat

SEQ ID NO: 121262 - DNA, 25 bp, Probe Sequence
acacagagtatccagtcaataccat

SEQ ID NO: 121263 - DNA, 25 bp, Probe Sequence
gctcacacagagtatccagtcaata

SEQ ID NO: 121264 - DNA, 25 bp, Probe Sequence
taacaactccatgagcaacaacata

SEQ ID NO: 121265 - DNA, 25 bp, Probe Sequence
gtatccagtcaataccatcatcatc

SEQ ID NO: 121266 - DNA, 25 bp, Probe Sequence
cttctctattcttccaccagttgtg

SEQ ID NO: 121267 - DNA, 25 bp, Probe Sequence
ttgataacaactccatgagcaacaa

SEQ ID NO: 121268 - DNA, 25 bp, Probe Sequence
ataacaactccatgagcaacaacat

SEQ ID NO: 121269 - DNA, 25 bp, Probe Sequence
tcacacagagtatccagtcaatacc

SEQ ID NO: 121270 - DNA, 25 bp, Probe Sequence
cctatacaaactccagaagacagaa

SEQ ID NO: 121271 - DNA, 25 bp, Probe Sequence
aagattgctcacacagagtatccag

SEQ ID NO: 121272 - DNA, 25 bp, Probe Sequence
aacaggaaggacattgtcgttatag

SEQ ID NO: 121273 - DNA, 25 bp, Probe Sequence
gaacaggaaggacattgtcgttata

SEQ ID NO: 121274 - DNA, 25 bp, Probe Sequence
gaatgatacagagaagtccacaaca

SEQ ID NO: 121275 - DNA, 25 bp, Probe Sequence
tgaatgatacagagaagtccacaac

SEQ ID NO: 121276 - DNA, 25 bp, Probe Sequence
aatgatacagagaagtccacaacac

SEQ ID NO: 121277 - DNA, 25 bp, Probe Sequence
aatcggaggtgaagatggagatatt

SEQ ID NO: 121278 - DNA, 25 bp, Probe Sequence
ctgaatatgtgcttagaactgccaa

SEQ ID NO: 121279 - DNA, 25 bp, Probe Sequence
tgaatatgtgcttagaactgccaac

SEQ ID NO: 121280 - DNA, 25 bp, Probe Sequence
atcggaggtgaagatggagatattc

SEQ ID NO: 121281 - DNA, 25 bp, Probe Sequence
gcaattaacagaactgacactgaat

SEQ ID NO: 121282 - DNA, 25 bp, Probe Sequence
actgaatatgtgcttagaactgcca

SEQ ID NO: 121283 - DNA, 25 bp, Probe Sequence
tgacactgaatatgtgcttagaact

SEQ ID NO: 121284 - DNA, 25 bp, Probe Sequence
actgacactgaatatgtgcttagaa

SEQ ID NO: 121285 - DNA, 25 bp, Probe Sequence
aactgacactgaatatgtgcttaga

SEQ ID NO: 121286 - DNA, 25 bp, Probe Sequence
agaactgacactgaatatgtgctta

SEQ ID NO: 121287 - DNA, 25 bp, Probe Sequence
gacactgaatatgtgcttagaactg

SEQ ID NO: 121288 - DNA, 25 bp, Probe Sequence
ctgacactgaatatgtgcttagaac

SEQ ID NO: 121289 - DNA, 25 bp, Probe Sequence
gaactgacactgaatatgtgcttag

SEQ ID NO: 121290 - DNA, 25 bp, Probe Sequence
gtgaatgatacagagaagtccacaa

SEQ ID NO: 121291 - DNA, 25 bp, Probe Sequence
ttgtgaatgatacagagaagtccac

SEQ ID NO: 121292 - DNA, 25 bp, Probe Sequence
gaatatgtgcttagaactgccaacg

SEQ ID NO: 121293 - DNA, 25 bp, Probe Sequence
taacagaactgacactgaatatgtg

SEQ ID NO: 121294 - DNA, 25 bp, Probe Sequence
cagaactgacactgaatatgtgctt

SEQ ID NO: 121295 - DNA, 25 bp, Probe Sequence
atgatacagagaagtccacaacacg

SEQ ID NO: 121296 - DNA, 25 bp, Probe Sequence
acactgaatatgtgcttagaactgc

SEQ ID NO: 121297 - DNA, 25 bp, Probe Sequence
aacagaactgacactgaatatgtgc

SEQ ID NO: 121298 - DNA, 25 bp, Probe Sequence
gttatagccacaacattctcttgaa

SEQ ID NO: 121299 - DNA, 25 bp, Probe Sequence
gaacactgtggttatgacttgtatt

SEQ ID NO: 121300 - DNA, 25 bp, Probe Sequence
ggaacactgtggttatgacttgtat

SEQ ID NO: 121301 - DNA, 25 bp, Probe Sequence
attaataagctgcctattgagtggt

SEQ ID NO: 121302 - DNA, 25 bp, Probe Sequence
taacaataatggcatgtgatagcaa

SEQ ID NO: 121303 - DNA, 25 bp, Probe Sequence
ttaacaataatggcatgtgatagca

SEQ ID NO: 121304 - DNA, 25 bp, Probe Sequence
aacactgtggttatgacttgtatta

SEQ ID NO: 121305 - DNA, 25 bp, Probe Sequence
ttaataagctgcctattgagtggta

SEQ ID NO: 121306 - DNA, 25 bp, Probe Sequence
aataagctgcctattgagtggtata

SEQ ID NO: 121307 - DNA, 25 bp, Probe Sequence
taataagctgcctattgagtggtat

SEQ ID NO: 121308 - DNA, 25 bp, Probe Sequence
aattaataagctgcctattgagtgg

SEQ ID NO: 121309 - DNA, 25 bp, Probe Sequence
acactgtggttatgacttgtattat

SEQ ID NO: 121310 - DNA, 25 bp, Probe Sequence
aatactgtggatgctatgactgttt

SEQ ID NO: 121311 - DNA, 25 bp, Probe Sequence
aaatactgtggatgctatgactgtt

SEQ ID NO: 121312 - DNA, 25 bp, Probe Sequence
atgaaatactgtggatgctatgact

SEQ ID NO: 121313 - DNA, 25 bp, Probe Sequence
ggtttggctgtttgaataatggtta

SEQ ID NO: 121314 - DNA, 25 bp, Probe Sequence
accaataaatcatcaaacaaaccgt

SEQ ID NO: 121315 - DNA, 25 bp, Probe Sequence
caccaataaatcatcaaacaaaccg

SEQ ID NO: 121316 - DNA, 25 bp, Probe Sequence
catcccatacatataggcaaactca

SEQ ID NO: 121317 - DNA, 25 bp, Probe Sequence
acatcccatacatataggcaaactc

SEQ ID NO: 121318 - DNA, 25 bp, Probe Sequence
gaaatactgtggatgctatgactgt

SEQ ID NO: 121319 - DNA, 25 bp, Probe Sequence
tgaaatactgtggatgctatgactg

SEQ ID NO: 121320 - DNA, 25 bp, Probe Sequence
tcccatacatataggcaaactcatt

SEQ ID NO: 121321 - DNA, 25 bp, Probe Sequence
ccaccaataaatcatcaaacaaacc

SEQ ID NO: 121322 - DNA, 25 bp, Probe Sequence
ttatcggctctggctatgatgctta

SEQ ID NO: 121323 - DNA, 25 bp, Probe Sequence
gaattaccgaggagcctcatcttac

SEQ ID NO: 121324 - DNA, 25 bp, Probe Sequence
agaattaccgaggagcctcatctta

SEQ ID NO: 121325 - DNA, 25 bp, Probe Sequence
tagaattaccgaggagcctcatctt

SEQ ID NO: 121326 - DNA, 25 bp, Probe Sequence
ggaaacaaagtcttacgctctctga

SEQ ID NO: 121327 - DNA, 25 bp, Probe Sequence
ctagaattaccgaggagcctcatct

SEQ ID NO: 121328 - DNA, 25 bp, Probe Sequence
tatcggctctggctatgatgcttac

SEQ ID NO: 121329 - DNA, 25 bp, Probe Sequence
gggaaacaaagtcttacgctctctg

SEQ ID NO: 121330 - DNA, 25 bp, Probe Sequence
ctgggaaacaaagtcttacgctctc

SEQ ID NO: 121331 - DNA, 25 bp, Probe Sequence
cttatcggctctggctatgatgctt

SEQ ID NO: 121332 - DNA, 25 bp, Probe Sequence
atgcttatcggctctggctatgatg

SEQ ID NO: 121333 - DNA, 25 bp, Probe Sequence
tgggaaacaaagtcttacgctctct

SEQ ID NO: 121334 - DNA, 25 bp, Probe Sequence
aattaccgaggagcctcatcttacg

SEQ ID NO: 121335 - DNA, 25 bp, Probe Sequence
catgcttatcggctctggctatgat

SEQ ID NO: 121336 - DNA, 25 bp, Probe Sequence
catttcctacaaaaccaacacaccc

SEQ ID NO: 121337 - DNA, 25 bp, Probe Sequence
ccatttcctacaaaaccaacacacc

SEQ ID NO: 121338 - DNA, 25 bp, Probe Sequence
cccatttcctacaaaaccaacacac

SEQ ID NO: 121339 - DNA, 25 bp, Probe Sequence
actgggaaacaaagtcttacgctct

SEQ ID NO: 121340 - DNA, 25 bp, Probe Sequence
aaagaactgtctgtggactgggaaa

SEQ ID NO: 121341 - DNA, 25 bp, Probe Sequence
atttcctacaaaaccaacacaccca

SEQ ID NO: 121342 - DNA, 25 bp, Probe Sequence
gaaagcaggcgaatactccctctat

SEQ ID NO: 121343 - DNA, 25 bp, Probe Sequence
tttcctacaaaaccaacacacccaa

SEQ ID NO: 121344 - DNA, 25 bp, Probe Sequence
attaccgaggagcctcatcttacga

SEQ ID NO: 121345 - DNA, 25 bp, Probe Sequence
aaagcaggcgaatactccctctatg

SEQ ID NO: 121346 - DNA, 25 bp, Probe Sequence
ttctattacagcagtccatcttcag

SEQ ID NO: 121347 - DNA, 25 bp, Probe Sequence
cttctattacagcagtccatcttca

SEQ ID NO: 121348 - DNA, 25 bp, Probe Sequence
ctattacagcagtccatcttcagtc

SEQ ID NO: 121349 - DNA, 25 bp, Probe Sequence
tctattacagcagtccatcttcagt

SEQ ID NO: 121350 - DNA, 25 bp, Probe Sequence
acttctattacagcagtccatcttc

SEQ ID NO: 121351 - DNA, 25 bp, Probe Sequence
tacttctattacagcagtccatctt

SEQ ID NO: 121352 - DNA, 25 bp, Probe Sequence
ttacttctattacagcagtccatct

SEQ ID NO: 121353 - DNA, 25 bp, Probe Sequence
tattacagcagtccatcttcagtcc

SEQ ID NO: 121354 - DNA, 25 bp, Probe Sequence
caagttcttccaatgaggaggtatt

SEQ ID NO: 121355 - DNA, 25 bp, Probe Sequence
tcaagttcttccaatgaggaggtat

SEQ ID NO: 121356 - DNA, 25 bp, Probe Sequence
ttcaagttcttccaatgaggaggta

SEQ ID NO: 121357 - DNA, 25 bp, Probe Sequence
aagttcttccaatgaggaggtattg

SEQ ID NO: 121358 - DNA, 25 bp, Probe Sequence
gttcttccaatgaggaggtattgtt

SEQ ID NO: 121359 - DNA, 25 bp, Probe Sequence
cacaattctgctttgatgcctttaa

SEQ ID NO: 121360 - DNA, 25 bp, Probe Sequence
agttcttccaatgaggaggtattgt

SEQ ID NO: 121361 - DNA, 25 bp, Probe Sequence
ttacagcagtccatcttcagtccat

SEQ ID NO: 121362 - DNA, 25 bp, Probe Sequence
attacagcagtccatcttcagtcca

SEQ ID NO: 121363 - DNA, 25 bp, Probe Sequence
cttcaagttcttccaatgaggaggt

SEQ ID NO: 121364 - DNA, 25 bp, Probe Sequence
tttacttctattacagcagtccatc

SEQ ID NO: 121365 - DNA, 25 bp, Probe Sequence
gtgctccacttggatgaattaacaa

SEQ ID NO: 121366 - DNA, 25 bp, Probe Sequence
acttcaagttcttccaatgaggagg

SEQ ID NO: 121367 - DNA, 25 bp, Probe Sequence
agcaaccacttgagaaggcattaag

SEQ ID NO: 121368 - DNA, 25 bp, Probe Sequence
gagcaaccacttgagaaggcattaa

SEQ ID NO: 121369 - DNA, 25 bp, Probe Sequence
acaacacactttcagtcatgtctag

SEQ ID NO: 121370 - DNA, 25 bp, Probe Sequence
tattagacaactcttcaggttccac

SEQ ID NO: 121371 - DNA, 25 bp, Probe Sequence
tatgtgattggttgttctaacttgc

SEQ ID NO: 121372 - DNA, 25 bp, Probe Sequence
atattagacaactcttcaggttcca

SEQ ID NO: 121373 - DNA, 25 bp, Probe Sequence
catattagacaactcttcaggttcc

SEQ ID NO: 121374 - DNA, 25 bp, Probe Sequence
cttcaggttccacatggtatagtta

SEQ ID NO: 121375 - DNA, 25 bp, Probe Sequence
ttcaggttccacatggtatagttac

SEQ ID NO: 121376 - DNA, 25 bp, Probe Sequence
gttccacatggtatagttactgagt

SEQ ID NO: 121377 - DNA, 25 bp, Probe Sequence
ccgattcatattagacaactcttca

SEQ ID NO: 121378 - DNA, 25 bp, Probe Sequence
ttccacatggtatagttactgagtc

SEQ ID NO: 121379 - DNA, 25 bp, Probe Sequence
ggttccacatggtatagttactgag

SEQ ID NO: 121380 - DNA, 25 bp, Probe Sequence
ttagacaactcttcaggttccacat

SEQ ID NO: 121381 - DNA, 25 bp, Probe Sequence
attagacaactcttcaggttccaca

SEQ ID NO: 121382 - DNA, 25 bp, Probe Sequence
aggttccacatggtatagttactga

SEQ ID NO: 121383 - DNA, 25 bp, Probe Sequence
tcaggttccacatggtatagttact

SEQ ID NO: 121384 - DNA, 25 bp, Probe Sequence
tcttcaggttccacatggtatagtt

SEQ ID NO: 121385 - DNA, 25 bp, Probe Sequence
tccacatggtatagttactgagtcc

SEQ ID NO: 121386 - DNA, 25 bp, Probe Sequence
tcatattagacaactcttcaggttc

SEQ ID NO: 121387 - DNA, 25 bp, Probe Sequence
ctacctattatgtgaggacagttgt

SEQ ID NO: 121388 - DNA, 25 bp, Probe Sequence
actacctattatgtgaggacagttg

SEQ ID NO: 121389 - DNA, 25 bp, Probe Sequence
caactacctattatgtgaggacagt

SEQ ID NO: 121390 - DNA, 25 bp, Probe Sequence
acaactacctattatgtgaggacag

SEQ ID NO: 121391 - DNA, 25 bp, Probe Sequence
atgtgattggttgttctaacttgcc

SEQ ID NO: 121392 - DNA, 25 bp, Probe Sequence
aactcttcaggttccacatggtata

SEQ ID NO: 121393 - DNA, 25 bp, Probe Sequence
ctcttcaggttccacatggtatagt

SEQ ID NO: 121394 - DNA, 25 bp, Probe Sequence
cggaacaataagcagcatatctatc

SEQ ID NO: 121395 - DNA, 25 bp, Probe Sequence
aagcagcatatctatctcagaagac

SEQ ID NO: 121396 - DNA, 25 bp, Probe Sequence
catatctatctcagaagacagcagc

SEQ ID NO: 121397 - DNA, 25 bp, Probe Sequence
gcatatctatctcagaagacagcag

SEQ ID NO: 121398 - DNA, 25 bp, Probe Sequence
cagcatatctatctcagaagacagc

SEQ ID NO: 121399 - DNA, 25 bp, Probe Sequence
gcagcatatctatctcagaagacag

SEQ ID NO: 121400 - DNA, 25 bp, Probe Sequence
atatctatctcagaagacagcagca

SEQ ID NO: 121401 - DNA, 25 bp, Probe Sequence
agcatatctatctcagaagacagca

SEQ ID NO: 121402 - DNA, 25 bp, Probe Sequence
agcagcatatctatctcagaagaca

SEQ ID NO: 121403 - DNA, 25 bp, Probe Sequence
gcggaacaataagcagcatatctat

SEQ ID NO: 121404 - DNA, 25 bp, Probe Sequence
ggaacaataagcagcatatctatct

SEQ ID NO: 121405 - DNA, 25 bp, Probe Sequence
caggttatgtagattccaaggatgc

SEQ ID NO: 121406 - DNA, 25 bp, Probe Sequence
taagcagcatatctatctcagaaga

SEQ ID NO: 121407 - DNA, 25 bp, Probe Sequence
acaataagcagcatatctatctcag

SEQ ID NO: 121408 - DNA, 25 bp, Probe Sequence
tatctatctcagaagacagcagcag

SEQ ID NO: 121409 - DNA, 25 bp, Probe Sequence
tcaacacaggttatgtagattccaa

SEQ ID NO: 121410 - DNA, 25 bp, Probe Sequence
gaacaacaacgagtcacagagttaa

SEQ ID NO: 121411 - DNA, 25 bp, Probe Sequence
caacacaggttatgtagattccaag

SEQ ID NO: 121412 - DNA, 25 bp, Probe Sequence
aacacaggttatgtagattccaagg

SEQ ID NO: 121413 - DNA, 25 bp, Probe Sequence
gtcaacacaggttatgtagattcca

SEQ ID NO: 121414 - DNA, 25 bp, Probe Sequence
tggtcaacacaggttatgtagattc

SEQ ID NO: 121415 - DNA, 25 bp, Probe Sequence
acaggttatgtagattccaaggatg

SEQ ID NO: 121416 - DNA, 25 bp, Probe Sequence
cacaggttatgtagattccaaggat

SEQ ID NO: 121417 - DNA, 25 bp, Probe Sequence
aacaataagcagcatatctatctca

SEQ ID NO: 121418 - DNA, 1969 bp, Control Sequence
  misc_feature (57)..(61): n is a, c, g, or t
ccgtccgtccgtcgtcctcctcgcttgcggggcgccgggcccgtcctcgagcccccnnnnnccgtccggccgcgtcggggcctcgccgcgctctacctacctacctggttgatcctgccagtagcatatgcttgtctcaaagattaagccatgcatgtctaagtacgcacggccggtacagtgaaactgcgaatggctcattaaatcagttatggttcctttggtcgctcgctcctctcctacttggataactgtggtaattctagagctaatacatgccgacgggcgctgacccccttcgcgggggggatgcgtgcatttatcagatcaaaaccaacccggtcagcccctctccggccccggccggggggcgggccgcggcggctttggtgactctagataacctcgggccgatcgcacgccccccgtggcggcgacgacccattcgaacgtctgccctatcaactttcgatggtagtcgccgtgcctaccatggtgaccacgggtgacggggaatcagggttcgattccggagagggagcctgagaaacggctaccacatccaaggaaggcagcaggcgcgcaaattacccactcccgacccggggaggtagtgacgaaaaataacaatacaggactctttcgaggccctgtaattggaatgagtccactttaaatcctttaacgaggatccattggagggcaagtctggtgccagcagccgcggtaattccagctccaatagcgtatattaaagttgctgcagttaaaaagctcgtagttggatcttgggagcgggcgggcggtccgccgcgaggcgagccaccgcccgtccccgccccttgcctctcggcgccccctcgatgctcttagctgagtgtcccgcggggcccgaagcgtttactttgaaaaaattagagtgttcaaagcaggcccgagccgcctggataccgcagctaggaataatggaataggaccgcggttctattttgttggttttcggaactgaggccatgattaagagggacggccgggggcattcgtattgcgccgctagaggtgaaattcttggaccggcgcaagacggaccagagcgaaagcatttgccaagaatgttttcattaatcaagaacgaaagtcggaggttcgaagacgatcagataccgtcgtagttccgaccataaacgatgccgaccggcgatgcggcggcgttattcccatgacccgccgggcagcttccgggaaaccaaagtctttgggttccggggggagtatggttgcaaagctgaaacttaaaggaattgacggaagggcaccaccaggagtggagcctgcggcttaatttgactcaacacgggaaacctcacccggcccggacacggacaggattgacagattgatagctctttctcgattccgtgggtggtggtgcatggccgttcttagttggtggagcgatttgtctggttaattccgataacgaacgagactctggcatgctaactagttacgcgacccccgagcggtcggcgtcccccaacttcttagagggacaagtggcgttcagccacccgagattgagcaataacaggtctgtgatgcccttagatgtccggggctgcacgcgcgctacactgactggctcagcgtgtgcctaccctacgccggcaggcgcgggtaacccgttgaaccccattcgtgatggggatcggggattgcaattattccccatgaacgaggaattcccagtaagtgcgggtcataagcttgcgttgattaagtccctgccctttgtacacaccgcccgtcgctactaccgattggatggtttagtgaggccctcggatcggccccgccggggtcggcccacggcctggcggagcgctgagaagacggtcgaacttgactatctagaggaagtaaaagtcgtaacaaggtttccgtaggtgaacctgcggaaggatcatta

SEQ ID NO: 121419 - DNA, 1969 bp, Control Sequence; identical to SEQ ID NO: 121418
  misc_feature (57)..(61): n is a, c, g, or t

SEQ ID NO: 121420 - DNA, 1969 bp, Control Sequence; identical to SEQ ID NO: 121418
  misc_feature (57)..(61): n is a, c, g, or t

SEQ ID NO: 121421 - DNA, 1049 bp, Control Sequence
atggctcaccgcccacgctggacattgtcgcaagtcacagaattatttgaaaaaccgttgctggatctgctgtttgaagcgcagcaggtgcatcgccagcatttcgatcctcgtcaggtgcaggtcagcacgttgctgtcgattaagaccggagcttgtccggaagattgcaaatactgcccgcaaacgtcgcgctacaaaaccgggctggaagccgagcggttgatggaagttgaacaggtgctggagtcggcgcgcaaagcgaaagcggcaggatcgacgcgcttctgtatgggcgcggcgtggaagaatccccacgaacgcgatatgccgtacctggaacaaatggtgcagggggtaaaagcgatggggctggaggcgtgtatgacgctgggcacgttgagtgaatctcaggcgcagcgcctcgcgaacgccgggctggattactacaaccacaacctggacacctcgccggagttttacggcaatatcatcaccacacgcacttatcaggaacgcctcgatacgctggaaaaagtgcgcgatgccgggatcaaagtctgttctggcggcattgtgggcttaggcgaaacggtaaaagatcgcgccggattattgctgcaactggcaaacctgccgacgccgccggaaagcgtgccaatcaacatgctggtgaaggtgaaaggcacgccgcttgccgataacgatgatgtcgatgcctttgattttattcgcaccattgcggtcgcgcggatcatgatgccaacctcttacgtgcgcctttctgccggacgcgagcagatgaacgaacagactcaggcgatgtgctttatggcaggcgcaaactcgattttctacggttgcaaactgctgaccacgccgaatccggaagaagataaagacctgcaactgttccgcaaactggggctaaatccgcagcaaactgccgtgctggcaggggataacgaacaacagcaacgtcttgaacaggcgctgatgaccccggacaccgacgaatattacaacgcggcagcattatgagctggcag

SEQ ID NO: 121422 - DNA, 1049 bp, Control Sequence; identical to SEQ ID NO: 121421

SEQ ID NO: 121423 - DNA, 1049 bp, Control Sequence; identical to SEQ ID NO: 121421

SEQ ID NO: 121424 - DNA, 748 bp, Control Sequence
atggcaacggttaataaacaagccattgcagcggcatttggtcgggcagccgcacactatgagcaacatgcagatctacagcgccagagtgctgacgccttactggcaatgcttccacagcgtaaatacacccacgtactggacgcgggttgtggacctggctggatgagccgccactggcgggaacgtcacgcgcaggtgacggccttagatctctcgccgccaatgcttgttcaggcacgccagaaggatgccgcagaccattatctggcgggagatatcgaatccctgccgttagcgactgcgacgttcgatcttgcatggagcaatctcgcagtgcagtggtgcggtaatttatccacggcactccgcgagctgtatcgggtggtgcgccccaaaggcgtggtcgcgtttaccacgctggtgcagggatcgttacccgaacgtcatcaggcgtggcaggcggtggacgagcgtccgcatgctaatcgctttttaccgccagatgaaatcgaacagtcgctgaacggcgtgcattatcaacatcatattcagcccatcacgctgtggtttgatgatgcgctcagtgccatgcgttcgctgaaaggcatcggtgccacgcatcttcatgaagggcgcgacccgcgaatattaacgcgttcgcagttgcagcgattgcaactggcctggccgcaacagcaggggcgatatcctctgacgtatcatctttttttgggagtgattgctc

SEQ ID NO: 121425 - DNA, 748 bp, Control Sequence; identical to SEQ ID NO: 121424

SEQ ID NO: 121426 - DNA, 652 bp, Control Sequence
aaacgttattttgtcaccggaacggataccgaagtggggaaaactgtcgccagttgtgcacttttacaagccgcaaaggcagcaggctaccggacggcaggttataaaccggtcgcctctggcagcgaaaagaccccggaaggtttacgcaatagcgacgcgctggcgttacagcgcaacagcagcctgcagctggattacgcaacagtaaatccttacaccttcgcagaacccacttcgccgcacatcatcagcgcgcaagagggcagaccgatagaatcattggtaatgagcgccggattacgcgcgcttgaacaacaggctgactgggtgttagtggaaggtgctggcggctggtttacgccgctttctgacactttcacttttgcagattgggtaacacaggaacaactgccggtgatactggtagttggtgtgaaactcggctgtattaatcacgcgatgttgactgcacaggtaatacaacacgccggactgactctggcgggttgggtggcgaacgatgttacgcctccgggaaaacgtcacgctgaatatatgaccacgctcacccgcatgattcccgcgccgctgctgggagagatcccctggcttgcagaaaatccagaaaatgcggcaaccggaaagtaca

SEQ ID NO: 121427 - DNA, 652 bp, Control Sequence; identical to SEQ ID NO: 121426

SEQ ID NO: 121428 - DNA, 1032 bp, Control Sequence
atgtccaatttactgaccgtacaccaaaatttgcctgcattaccggtcgatgcaacgagtgatgaggttcgcaagaacctgatggacatgttcagggatcgccaggcgttttctgagcatacctggaaaatgcttctgtccgtttgccggtcgtgggcggcatggtgcaagttgaataaccggaaatggtttcccgcagaacctgaagatgttcgcgattatcttctatatcttcaggcgcgcggtctggcagtaaaaactatccagcaacatttgggccagctaaacatgcttcatcgtcggtccgggctgccacgaccaagtgacagcaatgctgtttcactggttatgcggcggatccgaaaagaaaacgttgatgccggtgaacgtgcaaaacaggctctagcgttcgaacgcactgatttcgaccaggttcgttcactcatggaaaatagcgatcgctgccaggatatacgtaatctggcatttctggggattgcttataacaccctgttacgtatagccgaaattgccaggatcagggttaaagatatctcacgtactgacggtgggagaatgttaatccatattggcagaacgaaaacgctggttagcaccgcaggtgtagagaaggcacttagcctgggggtaactaaactggtcgagcgatggatttccgtctctggtgtagctgatgatccgaataactacctgttttgccgggtcagaaaaaatggtgttgccgcgccatctgccaccagccagctatcaactcgcgccctggaagggatttttgaagcaactcatcgattgatttacggcgctaaggatgactctggtcagagatacctggcctggtctggacacagtgcccgtgtcggagccgcgcgagatatggcccgcgctggagtttcaataccggagatcatgcaagctggtggctggaccaatgtaaatattgtcatgaactatatccgtaacctggatagtgaaacaggggcaatggtgcgcctgctggaagatggcgattag

SEQ ID NO: 121429 - DNA, 1032 bp, Control Sequence; identical to SEQ ID NO: 121428

SEQ ID NO: 121430 - DNA, 6540 bp, Control Sequence
gggactaccctaaataaggatgaggggcggcggtcagccgccttttttctattacatgtcagcgcggaagcggatttttattttcatcaagcgtaaatccttctccgagcacatcgtgaacatcgcttaccgctacaaaggcatggggatcaatggagttaatcacgcttttcagcatcaccaattcatttttcggcaccacacaataaagtacatctatatcctcttttgtgtaggaaccttgtcctttcaaaatggtgacgccccgttccatttcttcaagaatctttttctgaatcaggtcgtttttcgaagagatgatcgtagcgcctttagcagcgtatccgccttcctgaataaaatcgattaatcttgccgctacaaatacagctaccagcgtatacatcgcttctttataggagagataagtaagcaaagacaaaatgatgacgcaggcatcgaaagcaaacatcgttctgcccatcggaatcccaaaatacttattcactaaacgtgcgatgatatcaacaccgcctgtcgtaccgccgaacttaaaaataatacccagtccggctccgatgaatacgccggcaaataaagcggcgagcgctaagtcgtgctgaaggggcatatggatttcatatcgctgaaagatgctgaggaacaaagacaaggctacagtgccgacaagggtataaacaaacattgtcctgccgagcatgtggaaaagggcataaagcaaaagtgtaatacctgtaaaaccgccctcagccagattgttctgcatattgaaatgaaccaagccaaatgaaaaaattgccgctccgattaaaataaaaaatatgttttttaatctaatttctccaagcatcacacaaaaccccttttccttccattagatagcgtttatattatagtggatgaaaaagaaaacagcaaacgtgcttaaacatttgtcaaacgtatctgaattagctaacatgtaagaggatgataggaggtttcgttcagtgagtgataaaacaatgaaagacatacaggctgaagtagaccgttacataggccaatttaaagaaggatattttagcccgctggccatgatggcgaggctgactgaagaactgggcgagcttgccagagaagtgaatcaccgttatggagaaaaaccaaaaaaagcgactgaagatgataaaagcatggaagaggaaataggcgatgtgctatttgtattggtttgtttagccaactctcttgatatctctttagaggaagctcacgaccgagtcatgcataaatttaatacaagagataaagatcgctggaccagaaaagaagaaggaaagtagaggagatcaagatgtcaaacgaaacaattaaattagtcattgcgggaccgcgtggaagaatggggcaggaagctgttaaattggcagaacgaacaccacattttgaccttgtaggggccatagaccatacatacgatcagcaaaaattatctgatgtgatgcctgttgagtcagatgctttcatttacacagatatccatgcctgttttacagaaacacaaccggatgtcttgattgatttaacaacgcccgaaatcggaaaagtacatacaaaaattgcattagagcacggagtccgtccagttgtcggaacaaccggtttctcagaagctgatttaaaagagctcacatctttaacagaagaaaaagggatcggagccatcatcgcgccaaattttgcgctcggtgcgatactgatgatgaaattttcaaaaatggctgccaactattttgaggatgttgagattattgagcttcatcatgaccagaagcttgacgcaccaagcggaactgcgcttaaaacagcggaaatgatttcagaagtccgtaaagaaaagcagcaaggacatccggatgaaaaagaaattctcccaggagcaagaggagcggagcaaaacggtattcgcttgcacaggcttcagatacgccatgattcttataaccgtgcttctttcatgtcaggcgttaaactgtcagtcgaacaagtcatgaagattgatcagcttgtgtatggtttagaaaatatcattgattagacggggggataaacaatgaaaattgctttgatcgcgcatgacaagaaaaaacaggatatggttcaatttacgactgcctatcgggatattttaaagaatcatgatctatacgcaaccggaaccacagggttgaaaattcatgaggcgacaggtcttcaaattgaacgttttcaatccggccctttagggggagaccagcaaatcggtgcactgatcgctgccaatgcactcgatcttgtcatttttttgcgcgacccgctgaccgcgcagccgcatgaaccggatgtctcggcattaatccgtttatgtgatgtgtattccattccgctcgccacaaatatgggtactgcggaaattcttgtgcgcacacttgatgaaggtgttttcgaattccgtgaccttcttcggggagaagagccgaatgtataatgctgacgttcttgcttttggcgcccacagtgatgatgtcgagatcggaatgggcggcacaatagcgaagtttgtcaaacaggaaaaaaaagtaatgatatgcgatttgacagaagcggaactctcttctaacggtacggtcagtttgcgtaaagaagaagcagctgaagcagcccgcatattaggcgcagataaaagaattcagctaacgcttccagaccgcggcctaataatgagtgatcaggcaattcggtcaattgtcactgtcatcagaatctgtcggccaaaagcggtttttatgccgtataaaaaggatcgccatccggatcacggcaatgcggctgcactggtggaagaagcgatcttttccgccggaatccataaatataaagacgaaaaaagccttccggcgcataaagtcagcaaggtttactattatatgataaatggttttcatcagccggattttgttattgatatctcggatacaatagaggcaaagaaacaaagcctcaacgcctacaaaagccagtttatcccgtcaaaggattccgtttctactcctctgacgaatgggtatattgaaatcgttgaagcgagagaaaagctttacggtaaagaagcgggcgtggagtatgccgaagtttcttttccaaacggatgctgatgcttgatcatgatgtgcttgggggcgaacaatgagaaaactagggaagcagcttgctgaaaagggacatgaaatccatttcatcacatcaagcattccgtttagactgaatacatatcatcccaatattcattttcatgaagttgaggttaatcaatatgctgtttttaagtatcctccgtatgatttgacattggcaagcaaaatcgctgaggtggcggaacgggagaatttagacattatccatgctcactatgctctcccgcatgccgtttgcgcctatcttgcaaaacaaatgctgaaacgcaatatcggcattgttaccactttgcatggcacggatatcacggtgttaggttatgatccgtctctaaaagatctgatccgttttgctattgagtcatcagacagggtgacggccgtctcctcagcgcttgcggctgaaacatacgatttaattaaaccggagaaaaaaattgaaacgatttataactttatagacgagcgcgtgtatctgaagaaaaacacagcggcaattaaagagaaacatggaattttaccagatgaaaaagtcgtcatccatgtgtccaacttcagaaaagttaaacgcgtgcaggatgtcatccgtgtgttccgcaatatcgctggcaaaacgaaagcgaagctgcttttagtcggagacggtccggagaaatcgacagcctgcgagcttatcagaaaatatggcttggaagaccaagtcttaatgcttggaaatcaagaccgtgttgaagatctttattctattagcgatttgaagctgctgctatctgaaaaagaaagctttggccttgtcctgcttgaagcgatggcttgcggagtgccttgtattggaacaaacattggcggtatccctgaggttataaaaaacaatgtgagcggatttttggtggatgtcggtgatgttacggccgcaacagcccgcgcgatgagcattttagaagatgaacagctaagcaatcgttttacaaaggcggcaatagagatgcttgaaaatgaattttcttctaaaaaaattgtcagccagtatgaacagatttatgccgatttagcagaaccggagtgatcacatggaaaaagtttttatcaaagcacttcccgtgctccgcatcttaatcgaagcgggccatcaggcttattttgtcgggggcgcagttcgtgacagctatatgaaacgaacgatcggagatgtcgatatcgcgacagatgcggcacctgatcaagtagaacggctgtttcagcggactgttgatgtaggcaaagatgaatctgattatgttgatttcagaagaccgtcagaagtgcaatttatctcatcattagaagaggatctaaaacgcagagatttaacgatcaatgcgatggccatgacagcggacgggaaggtgcttgattattttggcggcaagaaagatattgatcagaaagtgattcgaaccgttggaaagcctgaggatagatttcaagaggatgcgcttcgtatgctgagagccgtacgctttatgagccagcttggctttacgctttcaccggaaacagaagaagccattgcgaaagaaaaatcactcctctcccatgtttcagtcgaacgaaaaactatagagtttgagaaattgctgcagggaagagcttctcgccaggcgcttcaaacactcattcaaacgagattgtatgaagagcttcctggtttttatcataaacgagaaaacctgatttcaacgagtgagtttccattcttctctttaacatcccgtgaggagctttgggctgctcttttaattaaccttggcatagttttgaaagacgcgccccttttcctgaaagcctggaagctcccgggaaaagtgatcaaggaagccattcacattgccgatacgtttggccagagccttgacgcaatgacaatgtacagagctgggaaaaaagcactgctctcagcggccaaaatatcgcagcttcggcaaaacgaaaaactggatgaaaagaaactgaaggacattcagtacgcttatcaaaacctgccgatcaaaagccttaaggatcttgatatcacgggtaaggacttgcttgcgcttcgaaaccggccggccggaaaatgggtgtcagaagaattacagtggatcgagcaggctgttgtgacagggaagctctccaatcaaaagaaacacatagaggagtggctgaagacatgcggtcaacattaagaaaagaccttattgaattattttctcaggccggcaatgaatttatttccggccaaaaaatcagtgatgctctcggctgttcaagaactgctgtgtggaagcatattgaagagcttcggaaagagggttatgaagtagaagccgttagaagaaaaggatatcggctcatcaaaaaacccggaaaactcagtgaaagcgaaattcgttttggattaaaaacggaagtgatgggccagcatcttatttaccatgacgttctttcaagcacgcaaaaaacggctcatgagctcgcgaataataacgcaccggaaggcacccttgaaggaaacggtgtttggatgagcctgattttgcggcctgacattccgctccaaaaaacaccgcagctgactctgcttgctgcagtagctgttgtgcagggaatagaagaggcagcaggcatccaaacggatattaaatggccaaatgatattttgattaacggaaaaaaaacagtcggtatcctaacggaaatgcaggctgaagaagaccgcgtacgttcagtgatcattgggatcggcattaacgttaaccagcagcctaatgattttccagatgaattgaaggacatcgcgacaagcctcagccaagctgctggggaaaaaattgatcgggccggcgtcatccagcatattttactatgctttgagaaacggtaccgggattatatgacgcacggatttacgccgattaagcttttatgggaaagctatgcgctcggtattggcactaatatgagagccagaacgttaaacggaaccttttacggtaaggcgttaggtatagatgatgaaggcgttctgcttttagaaacgaacgaaggcattaaaaaaatctattctgccgatatcgaattgggctaatgtgttggtacaagcccgttgattttggtatacttccattgggcagtatcgcctgcgaactgcacctattattaaaatagatagacattgcagcagtctgccttgatccaaaaaaggactgggacagagggatgaaactcgccgaactttagaaagtgaagaatccttctcgttgtaacggaaggttttttggcttgc

SEQ ID NO: 121431 - DNA, 6540 bp, Control Sequence; identical to SEQ ID NO: 121430

SEQ ID NO: 121432 - DNA, 6540 bp, Control Sequence; identical to SEQ ID NO: 121430

SEQ ID NO: 121433 - DNA, 1761 bp, Control Sequence
ttgccgatccgccgcccgtccacacccgccgccagctcaccatggatgatgatatcgccgcgctcgtcgtcgacaacggctccggcatgtgcaaggccggcttcgcgggcgacgatgccccccgggccgtcttcccctccatcgtggggcgccccaggcaccagggcgtgatggtgggcatgggtcagaaggattcctatgtgggcgacgaggcccagagcaagagaggcatcctcaccctgaagtaccccatcgagcacggcatcgtcaccaactgggacgacatggagaaaatctggcaccacaccttctacaatgagctgcgtgtggctcccgaggagcaccccgtgctgctgaccgaggcccccctgaaccccaaggccaaccgcgagaagatgacccagatcatgtttgagaccttcaacaccccagccatgtacgttgctatccaggctgtgctatccctgtacgcctctggccgtaccactggcatcgtgatggactccggtgacggggtcacccacactgtgcccatctacgaggggtatgccctcccccatgccatcctgcgtctggacctggctggccgggacctgactgactacctcatgaagatcctcaccgagcgcggctacagcttcaccaccacggccgagcgggaaatcgtgcgtgacattaaggagaagctgtgctacgtcgccctggacttcgagcaagagatggccacggctgcttccagctcctccctggagaagagctacgagctgcctgacggccaggtcatcaccattggcaatgagcggttccgctgccctgaggcactcttccagccttccttcctgggcatggagtcctgtggcatccacgaaactaccttcaactccatcatgaagtgtgacgtggacatccgcaaagacctgtacgccaacacagtgctgtctggcggcaccaccatgtaccctggcattgccgacaggatgcagaaggagatcactgccctggcacccagcacaatgaagatcaagatcattgctcctcctgagcgcaagtactccgtgtggatcggcggctccatcctggcctcgctgtccaccttccagcagatgtggatcagcaagcaggagtatgacgagtccggcccctccatcgtccaccgcaaatgcttctaggcggactatgacttagttgcgttacaccctttcttgacaaaacctaacttgcgcagaaaacaagatgagattggcatggctttatttgttttttttgttttgttttggttttttttttttttttggcttgactcaggatttaaaaactggaacggtgaaggtgacagcagtcggttggagcgagcatcccccaaagttcacaatgtggccgaggactttgattgcacattgttgtttttttaatagtcattccaaatatgagatgcattgttacaggaagtcccttgccatcctaaaagccaccccacttctctctaaggagaatggcccagtcctctcccaagtccacacaggggaggtgatagcattgctttcgtgtaaattatgtaatgcaaaatttttttaatcttcgccttaatacttttttattttgttttattttgaatgatgagccttcgtgcccccccttccccctttttgtcccccaacttgagatgtatgaaggcttttggtctccctgggagtgggtggaggcagccagggcttacctgtacactgacttgagaccagttgaataaaagtgcacacctta

SEQ ID NO: 121434 - DNA, 1761 bp, Control Sequence; identical to SEQ ID NO: 121433

SEQ ID NO: 121435 - DNA, 1761 bp, Control Sequence; identical to SEQ ID NO: 121433

SEQ ID NO: 121436 - DNA, 285 bp, Control Sequence
ggctgggcgtggtggctcacgcctgtaatcccagcactttgggaggccgaggtgggtggatcacctgaggtcaggagttcaagaccagcctggccaacatggtgaaaccccgtctctactaaaaatacaaaaattagccgggcgtggtggcgcgcgcctgtaatcccagctactcgggaggctgaggcaggagaatcgcttgaacccgggaggtggaggttgcagtgagccgagatcgcgccactgcactccagcctgggcgacagagcgagactccgtctcaga

SEQ ID NO: 121437 - DNA, 1268 bp, Control Sequence
gttcgacagtcagccgcatcttcttttgcgtcgccagccgagccacatcgctcagacaccatggggaaggtgaaggtcggagtcaacggatttggtcgtattgggcgcctggtcaccagggctgcttttaactctggtaaagtggatattgttgccatcaatgaccccttcattgacctcaactacatggtttacatgttccaatatgattccacccatggcaaattccatggcaccgtcaaggctgagaacgggaagcttgtcatcaatggaaatcccatcaccatcttccaggagcgagatccctccaaaatcaagtggggcgatgctggcgctgagtacgtcgtggagtccactggcgtcttcaccaccatggagaaggctggggctcatttgcaggggggagccaaaagggtcatcatctctgccccctctgctgatgcccccatgttcgtcatgggtgtgaaccatgagaagtatgacaacagcctcaagatcatcagcaatgcctcctgcaccaccaactgcttagcacccctggccaaggtcatccatgacaactttggtatcgtggaaggactcatgaccacagtccatgccatcactgccacccagaagactgtggatggcccctccgggaaactgtggcgtgatggccgcggggctctccagaacatcatccctgcctctactggcgctgccaaggctgtgggcaaggtcatccctgagctgaacgggaagctcactggcatggccttccgtgtccccactgccaacgtgtcagtggtggacctgacctgccgtctagaaaaacctgccaaatatgatgacatcaagaaggtggtgaagcaggcgtcggagggccccctcaagggcatcctgggctacactgagcaccaggtggtctcctctgacttcaacagcgacacccactcctccacctttgacgctggggctggcattgccctcaacgaccactttgtcaagctcatttcctggtatgacaacgaatttggctacagcaacagggtggtggacctcatggcccacatggcctccaaggagtaagacccctggaccaccagccccagcaagagcacaagaggaagagagagaccctcactgctggggagtccctgccacactcagtcccccaccacactgaatctcccctcctcacagttgccatgtagaccccttgaagaggggaggggcctagggagccgcaccttgtcatgtaccatcaataaagtaccctgtgctcaacc

SEQ ID NO: 121438 - DNA, 1268 bp, Control Sequence; identical to SEQ ID NO: 121437

SEQ ID NO: 121439 - DNA, 1268 bp, Control Sequence; identical to SEQ ID NO: 121437

SEQ ID NO: 121440 - DNA, 3970 bp, Control Sequence
attaaacctctcgccgagcccctccgcagactctgcgccggaaagtttcatttgctgtatgccatcctcgagagctgtctaggttaacgttcgcactctgtgtatataacctcgacagtcttggcacctaacgtgctgtgcgtagctgctcctttggttgaatccccaggcccttgttggggcacaaggtggcaggatgtctcagtggtacgaacttcagcagcttgactcaaaattcctggagcaggttcaccagctttatgatgacagttttcccatggaaatcagacagtacctggcacagtggttagaaaagcaagactgggagcacgctgccaatgatgtttcatttgccaccatccgttttcatgacctcctgtcacagctggatgatcaatatagtcgcttttctttggagaataacttcttgctacagcataacataaggaaaagcaagcgtaatcttcaggataattttcaggaagacccaatccagatgtctatgatcatttacagctgtctgaaggaagaaaggaaaattctggaaaacgcccagagatttaatcaggctcagtcggggaatattcagagcacagtgatgttagacaaacagaaagagcttgacagtaaagtcagaaatgtgaaggacaaggttatgtgtatagagcatgaaatcaagagcctggaagatttacaagatgaatatgacttcaaatgcaaaaccttgcagaacagagaacacgagaccaatggtgtggcaaagagtgatcagaaacaagaacagctgttactcaagaagatgtatttaatgcttgacaataagagaaaggaagtagttcacaaaataatagagttgctgaatgtcactgaacttacccagaatgccctgattaatgatgaactagtggagtggaagcggagacagcagagcgcctgtattggggggccgcccaatgcttgcttggatcagctgcagcaagttcggcagcagcttaaaaagttggaggaattggaacagaaatacacctacgaacatgaccctatcacaaaaaacaaacaagtgttatgggaccgcaccttcagtcttttccagcagctcattcagagctcgtttgtggtggaaagacagccctgcatgccaacgcaccctcagaggccgctggtcttgaagacaggggtccagttcactgtgaagttgagactgttggtgaaattgcaagagctgaattataatttgaaagtcaaagtcttatttgataaagatgtgaatgagagaaatacagtaaaaggatttaggaagttcaacattttgggcacgcacacaaaagtgatgaacatggaggagtccaccaatggcagtctggcggctgaatttcggcacctgcaattgaaagaacagaaaaatgctggcaccagaacgaatgagggtcctctcatcgttactgaagagcttcactcccttagttttgaaacccaattgtgccagcctggtttggtaattgacctcgagacgacctctctgcccgttgtggtgatctccaacgtcagccagctcccgagcggttgggcctccatcctttggtacaacatgctggtggcggaacccaggaatctgtccttcttcctgactccaccatgtgcacgatgggctcagctttcagaagtgctgagttggcagttttcttctgtcaccaaaagaggtctcaatgtggaccagctgaacatgttgggagagaagcttcttggtcctaacgccagccccgatggtctcattccgtggacgaggttttgtaaggaaaatataaatgataaaaattttcccttctggctttggattgaaagcatcctagaactcattaaaaaacacctgctccctctctggaatgatgggtgcatcatgggcttcatcagcaaggagcgagagcgtgccctgttgaaggaccagcagccggggaccttcctgctgcggttcagtgagagctcccgggaaggggccatcacattcacatgggtggagcggtcccagaacggaggcgaacctgacttccatgcggttgaaccctacacgaagaaagaactttctgctgttactttccctgacatcattcgcaattacaaagtcatggctgctgagaatattcctgagaatcccctgaagtatctgtatccaaatattgacaaagaccatgcctttggaaagtattactccaggccaaaggaagcaccagagccaatggaacttgatggccctaaaggaactggatatatcaagactgagttgatttctgtgtctgaagttcacccttctagacttcagaccacagacaacctgctccccatgtctcctgaggagtttgacgaggtgtctcggatagtgggctctgtagaattcgacagtatgatgaacacagtatagagcatgaatttttttcatcttctctggcgacagttttccttctcatctgtgattccctcctgctactctgttccttcacatcctgtgtttctagggaaatgaaagaaaggccagcaaattcgctgcaacctgttgatagcaagtgaatttttctctaactcagaaacatcagttactctgaagggcatcatgcatcttactgaaggtaaaattgaaaggcattctctgaagagtgggtttcacaagtgaaaaacatccagatacacccaaagtatcaggacgagaatgagggtcctttgggaaaggagaagttaagcaacatctagcaaatgttatgcataaagtcagtgcccaactgttataggttgttggataaatcagtggttatttagggaactgcttgacgtaggaacggtaaatttctgtgggagaattcttacatgttttctttgctttaagtgtaactggcagttttccattggtttacctgtgaaatagttcaaagccaagtttatatacaattatatcagtcctctttcaaaggtagccatcatggatctggtagggggaaaatgtgtattttattacatctttcacattggctatttaaagacaaagacaaattctgtttcttgagaagagaatattagctttactgtttgttatggcttaatgacactagctaatatcaatagaaggatgtacatttccaaattcacaagttgtgtttgatatccaaagctgaatacattctgctttcatcttggtcacatacaattatttttacagttctcccaagggagttaggctattcacaaccactcattcaaaagttgaaattaaccatagatgtagataaactcagaaatttaattcatgtttcttaaatgggctactttgtcctttttgttattagggtggtatttagtctattagccacaaaattgggaaaggagtagaaaaagcagtaactgacaacttgaataatacaccagagataatatgagaatcagatcatttcaaaactcatttcctatgtaactgcattgagaactgcatatgtttcgctgatatatgtgtttttcacatttgcgaatggttccattctctctcctgtactttttccagacacttttttgagtggatgatgtttcgtgaagtatactgtatttttacctttttccttccttatcactgacacaaaaagtagattaagagatgggtttgacaaggttcttcccttttacatactgctgtctatgtggctgtatcttgtttttccactactgctaccacaactatattatcatgcaaatgctgtattcttctttggtggagataaagatttcttgagttttgttttaaaattaaagctaaagtatctgtattgcattaaatataatatcgacacagtgctttccgtggcactgcatacaatctgaggcctcctctctcagtttttatatagatggcgagaacctaagtttcagttgattttacaattgaaatgactaaaaaacaaagaagacaacattaaaaacaatattgtttcta

SEQ ID NO: 121441 - DNA, 3970 bp, Control Sequence; identical to SEQ ID NO: 121440

SEQ ID NO: 121442 - DNA, 3970 bp, Control Sequence; identical to SEQ ID NO: 121440

SEQ ID NO: 121443 - DNA, 3970 bp, Control Sequence; identical to SEQ ID NO: 121440

SEQ ID NO: 121444 - DNA, 1969 bp, Control Sequence; identical to SEQ ID NO: 121418
  misc_feature (57)..(61): n is a, c, g, or t

SEQ ID NO: 121445 - DNA, 1969 bp, Control Sequence; identical to SEQ ID NO: 121418
  misc_feature (57)..(61): n is a, c, g, or t

SEQ ID NO: 121446 - DNA, 1969 bp, Control Sequence; identical to SEQ ID NO: 121418
  misc_feature (57)..(61): n is a, c, g, or t

SEQ ID NO: 121447 - DNA, 1612 bp, Control Sequence
aagcttggcaacaaatgagccgtcttgtcctcatgatactcgttgctttatttcatataaaagggctcgtcatcggatttacagtgctaattatgccatggcaagcatcaaatcccttcagacaccgtacttatggccgctgattccctttaacggaaaggcgctgtggcaggtgcttgtcccgacagcgaaacctggcgcaaaagtaagacccagcatcgttcaccccaaaaatcgcttaaggcagcctaccaattcataatcgcattgaaactgactgaagagtatgataatgtatgtcttaattatgaagggacagtccataaaactgtcctttcatccataagcggagaaagagggaatgacattgttcttacacggcacaagcagacaaaatcaacatggtcatttagaaatcggaggtgtggatgctctctatttagcggagaaatatggtacacctctttacgtatatgatgtggctttaatacgtgagcgtgctaaaagctttaagcaggcgtttatttctgcagggctgaaagcacaggtggcatatgcgagcaaagcattctcatcagtcgcaatgattcagctcgctgaggaagagggactttctttagatgtcgtatccggaggagagctatatacggctgttgcagcaggctttccggcagaacgcatccactttcatggaaacaataagagcagggaagaactgcggatggcgcttgagcaccgcatcggctgcattgtggtggataatttctatgaaatcgcgcttcttgaagacctatgtaaagaaacgggtcactccatcgatgttcttcttcggatcacgcccggagtagaagcgcatacgcatgactacattacaacgggccaggaagattcaaagtttggtttcgatcttcataacggacaaactgaacgggccattgaacaagtattacaatcggaacacattcagctgctgggtgtccattgccatatcggctcgcaaatctttgatacggccggttttgtgttagcagcggaaaaaatcttcaaaaaactagacgaatggagagattcatattcatttgtatccaaggtgctgaatcttggaggaggtttcggtattcgttatacggaagatgatgaaccgcttcatgccactgaatacgttgaaaaaattatcgaagctgtgaaagaaaatgcttcccgttacggttttgacattccggaaatttggatcgaaccgggccgttctctcgtgggagacgcaggcacaactctttatacggttggctctcaaaaagaagtggataagctgtacaatcgtttcatcattcggcgtgcgaattaagaaaggtctcattgcgcctgtaaagcttacgcgtatttctgctccttcaagcacctttagtgcatccagcatatattttggactaaaagagatatttaattcctcaccttcaatttgatccgcaacaattgcttccacaactttaccgatttctggcgaattggaagaaatttcaatggattcagccggttttgcggacagttttacaacgttgttgcgtccctctctagctaaaagagatgcacgatcaatggcctgaaggaattc

SEQ ID NO: 121448 - DNA, 1612 bp, Control Sequence; identical to SEQ ID NO: 121447

SEQ ID NO: 121449 - DNA, 1612 bp, Control Sequence; identical to SEQ ID NO: 121447

SEQ ID NO: 121450 - DNA, 1955 bp, Control Sequence
gaattcaccaagcgttggattgttcacccactaatagggaacgtgagctgggtttagaccgtcgtgagacaggttagttttaccctactgatgatgtgttgttgccatggtaatcctgctcagtacgagaggaaccgcaggttcagacatttggtgtatgtgcttggctgaggagccaatggggcgaacgtaccatctgtgggattatgactgaacgcctctaagtcagaatcccgcccaggcgaacgatacggcagcgccgcggagcctcggttggcctcggatagccggtcccccgcctgtccccgccggcgggccgcccccccctccagcgccccgcgcgcgcgggagggcgcgtgccccgccgcgcgccgggaccggggtccggtgcggagtgcccttcgtcctgggaaacggggcgcggccggaaaggcggccgccccctcgcccgtcacgcaccgcacgttcgtggggaacctggcgctaaaccattcgtagacgacctgcttctgggtcggggtttcgtacgtagcagagcagctccctcgctgcgatctattgaaagtcagccctcgacacaagggtttgtccgcgcgcgcggcggcgtgcgtgcggggggcccggcggggcgtgcgcgtccggcgccgtccgtccttccgttcgtcttcctccctcccggcctctccgccgaccgcgggcgtggtgggggggtgggggggggacgcgcgaccccggtcggcgcgccccgcttcttcggttcccgcctcctccccgttcaccgcggggcggctcgtccgctccgggccgggacggggtccggggagcgtggtttgggagccgcggaggcggccgcgccgagccgggcccgtgcgcggtccccgtcccgggggttggccgcgcgggccccggtggggccacccggggtcccggccctcgcgcgtccttcctctcgctcctccgcacgggtcgaccagcagaccgcgggtggtgggcggcgggcggcgaggccgcacgggcgtccccgcacccggccgacctccgctcgtgacctctcctcggtcgggctccggggtcgaccgcctgccccgcgggcgtgagactcagccgctgtctcgccgtgtcccgggtcgaccggcgggcttctccaccgagcggcgtgtaggagtgcccgtcgggacgaaccgcaaccggagcgtccccgtctcggtcggcacctccggggtcgaccagctgccgcccgcgagctccggacttagccggcgcctgcacgtgtcccgggtcgaccagcaggcggccgcgacgtgcggcgcaccgacgagagggcgtgcattcccgttcgcgcgcccggaccctccaccggcctgggcccgacggtggagctgggaccacgcggaactccctctcctacatttttttcagccccaccgcgagtttgcgtccgcgggattttaagagggagtcactgctgccgtcagccagtaatgcttcctccttttttgcttttaggttttgctcttgcctttttttttttttttttctttctttctttctttctttctttctttctttctttctttctttctttctcgctctcgcctctcgctctctccctcgctcgttttctttctctttctctttctctctctctctctctctctctctctctgtctctcgctctcgccctctctctctctctcttctctctgtctctctctgtctctctctctctctctctctctctctctctctctctctctctctctctctccctccccctccctccctctctccccttccttggtgccttctcggctcttgacacttagccgctgtctcgccgtgtcccgggtcgaccggcgggccttctccaccgagcggcgtgtaagagtgcccgtcgggacgagccggacccgccgcgtccccgtctcggtcggcactccggggtcgaccagctg

SEQ ID NO: 121451 - DNA, 1955 bp, Control Sequence; identical to SEQ ID NO: 121450

SEQ ID NO: 121452 - DNA, 1955 bp, Control Sequence; identical to SEQ ID NO: 121450

SEQ ID NO: 121453 - DNA, 3360 bp, Control Sequence
  misc_feature (2982)..(2982): n is a, c, g, or t
ataatacacacttatacagactcctaaataagaaattaaatgattgggagtgcgaaaatgaaggatgtttcaaaaaatcaagaagaaaatataagcgacacggcattaacaaacgaactgattcatctgcttggccattcccggcatgattggatgaataagctgcagctgattaaaggaaacttaagcttacagaagtatgaccgtgtctttgaaatgattgaagaaatggttatagacgcaaagcacgaatcaaagctctcaaacctgaaaacaccgcatttggcgtttgattttcttacgtttaattggaaaacccattatatgacgcttgaatatgaagttctcggagaaattaaggatttgtcggcttatgatcaaaagctggcgaaactgatgagaaagctgtttcatctgtttgatcaagcagtcagcagagagagtgaaaatcatttaacggtttcgcttcaaacggatcatcctgacagacagctgattctgtaccttgattttcacggcgcctttgccgatccatctgcttttgatgatattcggcagaatggatatgaggacgttgatatcatgcgttttgaaatcacgagtcacgaatgtctgattgaaattgggttggactagcggagtttttaacggtttagaacggaggacattatgtttgtagatcaggtcaaagtatatgtaaaaggcggcgacggcggcaacggtatggttgcgtttcgccgtgaaaaatatgtgccgaaaggcggccctgccggcggtgacggaggaaagggaggagacgtcgtttttgaagtagatgaaggtctccgcaccctgatggattttagatacaaaaaacactttaaagcgattcgcggcgagcatggcatgtccaaaaaccagcacgggcgaaatgctgatgatatggtcattaaagttccgccgggcaccgttgtgacagacgatgatacaaaacaggtcatcgctgatttaacagagcacggacagcgggctgtcattgcaagaggcggaagaggcggaagaggaaatagccgctttgctacaccggctaatcccgcgcctcagctttcagaaaacggcgagccgggaaaagaacgctacattgttcttgaattaaaagtgcttgcagatgtcggacttgtcgggttcccgagtgtgggaaaatctactttgctgtctgttgtctcatctgcaaaaccgaaaattgcggactatcactttacaacgcttgtcccgaatctcggcatggttgaaacggatgacggacgcagctttgtcatggctgatttgccagggctgattgaaggcgcacaccaaggcgtcggactgggccaccagtttttgcgccatattgaacggacgagggttattgttcatgtcattgacatgtcaggcttagaaggccgtgatccatatgatgattatcttacgattaaccaggagctgagcgagtacaatctgcgtctcactgagcgtccgcaaattatcgttgcaaataaaatggacatgccggaggctgcggaaaatctcgaagcctttaaagaaaagctgacggatgattatccggtattcccgatcagtgcggtgacaagagaaggtctgcgtgagcttctgtttgaggttgccaatcagcttgagaacacaccggaattcccgctgtatgacgaggaagagcttacacaaaaccgtgtcatgtacacgatggaaaatgaagaagtgccatttaacattacacgcgatccagacggtgtatttgtgctttcaggagacagccttgagcggttattcaagatgactgatttctcacgtgatgaatcggttaaacggtttgcaagacagatgcgcggaatgggtgttgatgaagcactcagagaacgcggagccaaggatggagatataatcaggcttctggaatttgaatttgaatttattgattaatcaatgttggctgaaaagagagcctggtgccaggctctctattttaaaggggggatgcaaatgaaagaggagacattttatcttgtccgtgaagatgtattgcccgatgcaatgagaaaaacattagaagtcaaaaagctgcttgatcgacaaaaagcagattcagtagcagatgccgttcaaaaggtcgatttaagtagaagtgcgttttataaatacagggatgctgtttttccattctacaccatggtaaaagaacaaattatcacacttttctttcatttggaggataggtcaggtgcgttatctcagcttcttcaggcggtagctgattctggaagcaacgttctttccattcaccagaccattccgcttcaaggcagagcaaatgtgacactgtctatcagtacgtcggcaatggaagaagacattcatacattaatgaataagctcaggaagtttgattttgtagaaaaggttgaaatattaggttcaggtgcataagggagagaaaatcgtcatgaaagtcggttatttaggtccagcagctacatttacacatctagcagtcagttcttgttttcaaaacggcgccgaacatgttgcttaccgcaccattccggagtgtatagatgcagccgttgcaggcgaagttgattttgcttttgttcctttggaaaatgctttagaaggatctgttaatctaacaatagactatttaatacatgaacagcctttgccaatcgtgggtgaaatgacgttgccgattcaccagcacttgctcgtccatccctcaagagagaatgcatggaaagagctcgacaaaatttactcacattcacacgcgattgcgcaatgccataaatttcttcatcgacattttccttccgttccatatgaatacgccaattctaccggggcggcagcaaagtttgtcagtgaccatcccgagctgaatatcggggtcattgccaatgatatggcagcttctacatacgaattaaaaatcgtgaaacgggatatacnggattatagggacaatcatacaagatttattatcctgtctcccgatgaaaacatatcttttgaagtgaattcaaaattgagctctaggcccaaaacgaccttaatggtcatgctgccgcaggatgatcagtccggggcgctgcatagagtgctgtctgcattttcttggagaaatttaaacctgtcaaaaattgagtcacgtccgactaaaaccggattaggccattatttctttattattgatattgagaaagcgtttgatgatgtattgattccaggggccatgcaggagcttgaagcactcggctgcaaagtgaggcttctgggtgcataccagtcttaccaattataaaaaaagcccactagagggcttttttt

SEQ ID NO: 121454 - DNA, 3360 bp, Control Sequence; identical to SEQ ID NO: 121453
  misc_feature (2982)..(2982): n is a, c, g, or t

SEQ ID NO: 121455 - DNA, 3360 bp, Control Sequence; identical to SEQ ID NO: 121453
  misc_feature (2982)..(2982): n is a, c, g, or t

SEQ ID NO: 121456 - DNA, 6540 bp, Control Sequence; identical to SEQ ID NO: 121430

SEQ ID NO: 121457 - DNA, 6540 bp, Control Sequence; identical to SEQ ID NO: 121430

SEQ ID NO: 121458 - DNA, 6540 bp, Control Sequence; identical to SEQ ID NO: 121430

SEQ ID NO: 121459 - DNA, 1612 bp, Control Sequence; identical to SEQ ID NO: 121447

SEQ ID NO: 121460 - DNA, 1612 bp, Control Sequence; identical to SEQ ID NO: 121447

SEQ ID NO: 121461 - DNA, 1612 bp, Control Sequence; identical to SEQ ID NO: 121447

SEQ ID NO: 121462 - DNA, 3360 bp, Control Sequence; identical to SEQ ID NO: 121453
  misc_feature (2982)..(2982): n is a, c, g, or t

SEQ ID NO: 121463 - DNA, 3360 bp, Control Sequence; identical to SEQ ID NO: 121453
  misc_feature (2982)..(2982): n is a, c, g, or t

SEQ ID NO: 121464 - DNA, 3360 bp, Control Sequence; identical to SEQ ID NO: 121453
  misc_feature (2982)..(2982): n is a, c, g, or t

SEQ ID NO: 121465 - DNA, 2400 bp, Control Sequence
gaattcatgtaaaagatgaggttggttcattctcgaaaattacatctgtgttctcagagcggggcgtgacgtttgaaaaaatccttcagctgccaattaaaggccatgatgagttagctgaaatcgtaattgtcacacatcatacatcagaagctgatttcagtgatatcctgcaaaacctaaatgatttggaagtcgttcaagaagtcaaaagcacatatcgtgtagaagggaacggttggagctaatgtggaaaggacttatccatcaatataaagaatttttacctgtaacagatcaaacaccggcgctaactttacatgaaggaaacacacctcttattcacctgccgaagctgtctgagcagctcggaattgagcttcatgtcaaaacggaaggcgtcaatcctacgggatcatttaaagatcgcggaatggttatggctgtggcaaaggcaaaagaagaaggcaatgacacgattatgtgcgcgtcaacaggtaacacttccgctgctgcggcagcatatgcagcccgtgctaacatgaaatgcattgtcatcatcccgaacggaaaaattgcatttggaaaactcgctcaagctgtcatgtacggagccgagattatcgcaattgacggaaactttgacgatgcgcttaaaattgtccgttccatctgtgagaaatcaccgattgcccttgtcaactcagtcaacccttaccgcattgaaggccaaaaaactgctgccttcgaagtgtgcgaacagctgggggaagcgcctgatgttttagcgatcccggtcggaaatgctggaaacatcactgcgtactggaagggcttcaaggaatatcatgagaaaaacggcacaggccttccgaaaatgcgcggctttgaagctgagggtgcggcggcaatcgtgcgcaatgaagtgattgaaaatccggaaacaatagcgacagccattcgtatcggaaacccggcaagctgggacaaagctgtaaaggcagccgaggaatccaatgggaaaattgacgaagtcactgatgatgaaatccttcacgcatatcagctgatcgcccgtgtagaaggcgtgtttgcagaaccaggttcttgcgcgtctatcgcaggagtgctgaaacaggtgaaatccggagaaattccgaaaggcagcaaggtcgtagctgtgttaacaggaaacggactgaaagatccgaacacagcggtcgacatttcagaaatcaagcctgtcacattgccgactgatgaagacagcatccttgaatatgtaaaaggagcggcccgtgtatgaacgaagccgacatgctgttctctgtcactgttcccggaagcacagctaacctaggccccggctttgattcagtcggaatggcgctcagcagatatttgaagctgaccgtctttgaaagcgacaaatggtcttttgaggctgaaacagaaacagtcgccggaattcgcggtacagataacctgatctaccaagtggctaaacggaccgcagatttgtacggaaaagaaatgcctcctgtccatgtgaaggtgtggagcgacatcccgcttgcacgcggccttggcagcagcgccgcagcgattgtagcggccattgaactggctgatgaattatgcggcttaaagctgtctgaagcggacaagctgcatttagcgagtctagaagaaggacacccggacaatgctggcgcttctctcgtcggcggacttgtgatcggcctgcatgaggatgacgagacccaaatgatccgcgtcccgaatgctgacattgacgtagtcgttgtcattcctttttatgaagtgctgacaagagacgcgagagacgtgcttccgaaggagtttccatatgccgatgccgtaaaagcaagtgctgtcagcaatatcctcattgctgcgatcatgtccaaggattggccgcttgtcgggaaaatcatgaagaaggatatgttccatcagccgtaccgggcgatgcttgtgcctgagctgtcaaaagtagagcacgtcgccgagatgaagggcgcatatggaacggctctcagcggagcaggcccaacgattctcgtcatgaccgaaaaaggaaagggagaagagctaaaagaacagctcgcgcttcatttccctcattgtgaagtagacgctttgaccgttccgaaagagggaagtataatagagcgaaatcctttatatcaagtaaaaagtgtatagatcatgccaagcgttcctcagcgtcagcggagggcgcctttttttgctggagataaaggagttttattagaaacgaatacatgtaaaggaggagatgaatatgaaaagctgataaccgcagacgacatcacagcgattgtctctgtgaccagtcctcaatacgccccagac

SEQ ID NO: 121466 - DNA, 2400 bp, Control Sequence; identical to SEQ ID NO: 121465

SEQ ID NO: 121467 - DNA, 2400 bp, Control Sequence; identical to SEQ ID NO: 121465

SEQ ID NO: 121468 - DNA, 1049 bp, Control Sequence; identical to SEQ ID NO: 121421

SEQ ID NO: 121469 - DNA, 1049 bp, Control Sequence; identical to SEQ ID NO: 121421

SEQ ID NO: 121470 - DNA, 1049 bp, Control Sequence; identical to SEQ ID NO: 121421

SEQ ID NO: 121471 - DNA, 748 bp, Control Sequence; identical to SEQ ID NO: 121424

SEQ ID NO: 121472 - DNA, 748 bp, Control Sequence; identical to SEQ ID NO: 121424

SEQ ID NO: 121473 - DNA, 652 bp, Control Sequence; identical to SEQ ID NO: 121426

SEQ ID NO: 121474 - DNA, 652 bp, Control Sequence; identical to SEQ ID NO: 121426

SEQ ID NO: 121475 - DNA, 1032 bp, Control Sequence; identical to SEQ ID NO: 121428

SEQ ID NO: 121476 - DNA, 1032 bp, Control Sequence; identical to SEQ ID NO: 121428

SEQ ID NO: 121477 - DNA, 2403 bp, Control Sequence
gaattcatgtaaaagatgaggttggttcattctcgaaaattacatctgtgttctcagagcggggcgtgacgtttgaaaaaatccttcagctgccaattaaaggccatgatgagttagctgaaatcgtaattgtcacacatcatacatcagaagctgatttcagtgatatcctgcaaaacctaaatgatttggaagtcgttcaagaagtcaaaagcacatatcgtgtagaagggaacggttggagctaatgtggaaaggacttatccatcaatataaagaatttttacctgtaacagatcaaacaccggcgctaactttacatgaaggaaacacacctcttattcacctgccgaagctgtctgagcagctcggaattgagcttcatgtcaaaacggaaggcgtcaatcctacgggatcatttaaagatcgcggaatggttatggctgtggcaaaggcaaaagaagaaggcaatgacacgattatgtgcgcgtcaacaggtaacacttccgctgctgcggcagcatatgcagcccgtgctaacatgaaatgcattgtcatcatcccgaacggaaaaattgcatttggaaaactcgctcaagctgtcatgtacggagccgagattatcgcaattgacggaaactttgacgatgcgcttaaaattgtccgttccatctgtgagaaatcaccgattgcccttgtcaactcagtcaacccttaccgcattgaaggccaaaaaactgctgccttcgaagtgtgcgaacagctgggggaagcgcctgatgttttagcgatcccggtcggaaatgctggaaacatcactgcgtactggaagggcttcaaggaatatcatgagaaaaacggcacaggccttccgaaaatgcgcggctttgaagctgagggtgcggcggcaatcgtgcgcaatgaagtgattgaaaatccggaaacaatagcgacagccattcgtatcggaaacccggcaagctgggacaaagctgtaaaggcagccgaggaatccaatgggaaaattgacgaagtcactgatgatgaaatccttcacgcatatcagctgatcgcccgtgtagaaggcgtgtttgcagaaccaggttcttgcgcgtctatcgcaggagtgctgaaacaggtgaaatccggagaaattccgaaaggcagcaaggtcgtagctgtgttaacaggaaacggactgaaagatccgaacacagcggtcgacatttcagaaatcaagcctgtcacattgccgactgatgaagacagcatccttgaatatgtaaaaggagcggcccgtgtatgaacgaagccgacatgctgttctctgtcactgttcccggaagcacagctaacctaggccccggctttgattcagtcggaatggcgctcagcagatatttgaagctgaccgtctttgaaagcgacaaatggtcttttgaggctgaaacagaaacagtcgccggaattccgggcggtacagataacctgatctaccaagtggctaaacggaccgcagatttgtacggaaaagaaatgcctcctgtccatgtgaaggtgtggagcgacatcccgcttgcacgcggccttggcagcagcgccgcagcgattgtagcggccattgaactggctgatgaattatgcggcttaaagctgtctgaagcggacaagctgcatttagcgagtctagaagaaggacacccggacaatgctggcgcttctctcgtcggcggacttgtgatcggcctgcatgaggatgacgagacccaaatgatccgcgtcccgaatgctgacattgacgtagtcgttgtcattcctttttatgaagtgctgacaagagacgcgagagacgtgcttccgaaggagtttccatatgccgatgccgtaaaagcaagtgctgtcagcaatatcctcattgctgcgatcatgtccaaggattggccgcttgtcgggaaaatcatgaagaaggatatgttccatcagccgtaccgggcgatgcttgtgcctgagctgtcaaaagtagagcacgtcgccgagatgaagggcgcatatggaacggctctcagcggagcaggcccaacgattctcgtcatgaccgaaaaaggaaagggagaagagctaaaagaacagctcgcgcttcatttccctcattgtgaagtagacgctttgaccgttccgaaagagggaagtataatagagcgaaatcctttatatcaagtaaaaagtgtatagatcatgccaagcgttcctcagcgtcagcggagggcgcctttttttgctggagataaaggagttttattagaaacgaatacatgtaaaggaggagatgaatatgaaaagctgataaccgcagacgacatcacagcgattgtctctgtgaccagtcctcaatacgccccagac

SEQ ID NO: 121478 - DNA, 2403 bp, Control Sequence; identical to SEQ ID NO: 121477

SEQ ID NO: 121479 - DNA, 2403 bp, Control Sequence; identical to SEQ ID NO: 121477

SEQ ID NO: 121480 - DNA, 2525 bp, Control Sequence
ctcgagccaacaccgagagagacatacggcgggtgtattgcctacattgggtttgacgggaatatcgactcttgtattacgattcgcacgatgagtgtaaagaacggtgttgcatcgatacaggcaggtgctggcattgttgctgattctgttccggaagccgaatacgaagaaagctgtaataaagccggtgcgctgctgaaaacgattcatattgcagaagacatgtttcatagcaaggaggataaagctgatgaacagatttctacaattgtgcgttgacggaaaaacccttactgccggtgaggctgaaacgctgatgaatatgatgatggcagcggaaatgactccttctgaaatgggggggatattgtcaattcttgctcatcggggggagacgccagaagagcttgcgggttttgtgaaggcaatgcgggcacacgctcttacagtcgatggacttcctgatattgttgatacatgcggaacagggggagacggtatttccacttttaatatctcaacggcctcggcaattgttgcctcggcagctggtgcgaaaatcgctaagcatggcaatcgctctgtctcttctaaaagcggaagcgctgatgttttagaggagctagaggtttctattcaaaccactcccgaaaaggtcaaaagcagcattgaaacaaacaacatgggatttctttttgcgccgctttaccattcgtctatgaaacatgtagcaggtactagaaaagagctaggtttcagaacggtatttaatctgcttgggccgctcagcaatcctttacaggcgaagcgtcaggtgattggggtctattctgttgaaaaagctggactgatggcaagcgcactggagacgtttcagccgaagcacgtcatgtttgtatcaagccgtgacggtttagatgagctttcaattacagcaccgaccgacgtgattgaattaaaggacggagagcgccgggaatataccgtttcacccgaagatttcggtttcacaaatggcagacttgaagatttacaggtgcagtcaccgaaagagagcgcctatctcattcagaatatttttgaaaataaaagcagcagttccgctttatctattacggcttttaatgcgggagctgcgatttacacggcgggaattaccgcctcactgaaggaaggaacggagctggcgttagagacgattacaagcggaggcgctgccgcgcagcttgaacgactaaagcagaaagaggaagagatctatgcttgaaaaaatcatcaaacaaaagaaagaagaagtgaaaacactggttttgccggtagagcagcctttcgagaaacgttcatttaaggaggcgctggcaagcccgaatcggtttatcgggttgattgccgaagtgaagaaagcatcgccgtcaaaagggcttattaaagaggattttgtgcctgtgcagattgcaatagactatgaggctgcgaaggcagatgcgatttccgttttaacagacaccccgttttttcaaggggaaaacagttatttatcagacgtaaagcgtgctgtttcgattcctgtacttagaaaagattttattcttgattctcttcaagtagaggaatcaagaagaatcggagcggatgccatattgttaatcggcgaggtgcttgatcccttacaccttcatgaattatatcttgaagcaggtgaaaaggggatggacgtgttagtggaggttcatgatgcatcaacgctagaacaaatattgaaagtgttcacacccgacattctcggcgtaaataatcgaaacctaaaaacgtttgaaacatctgtaaagcagacagaacaaatcgcatctctcgttccgaaagaatccttgcttgtcagcgaaagcggaatcggttctttagaacatttaacatttgtcaatgaacatggggcgcgagctgtacttatcggtgaatcattgatgagacaaacttctcagcgtaaagcaatccatgctttgtttagggagtgaggttgtgaagaaaccggcattaaaatattgcggtattcggtcactaaaggatttgcagcttgcggcggaatcacaggctgattacctaggatttatttttgctaaaagcaaacgaaaagtatctccggaagatgtgaaaaaatggctgaaccaagttcgtgtcgaaaaacaggttgcaggtgtttttgttaatgaatcaatagagacgatgtcacgtattgccaagagcttgaagctcgacgtcattcagcttcacggtgatgaaaaaccggcggatgctgctgctcttcgcaagctgacaggctgtgaaatatggaaggcgcttcaccatcaagataacacaactcaagaaatagcccgctttaaagataatgttgacggctttgtgattgattcatctgtaaaagggtctagaggcggaactggtgttgcattttcttgggaatgtgtgccggaatatcagcaggcggctattggtaaacgctgttttatcgcaggcggcgtggatcc

SEQ ID NO: 121481 - DNA, 2525 bp, Control Sequence; identical to SEQ ID NO: 121480

SEQ ID NO: 121482 - DNA, 2525 bp, Control Sequence; identical to SEQ ID NO: 121480

SEQ ID NO: 121483 - DNA, 1761 bp, Control Sequence; identical to SEQ ID NO: 121433

SEQ ID NO: 121484 - DNA, 1761 bp, Control Sequence; identical to SEQ ID NO: 121433

SEQ ID NO: 121485 - DNA, 1761 bp, Control Sequence; identical to SEQ ID NO: 121433

SEQ ID NO: 121486 - DNA, 1049 bp, Control Sequence
atggctcaccgcccacgctggacattgtcgcaagtcacagaattatttgaaaaaccgttgctggatctgctgtttgaagcgcagcaggtgcatcgccagcatttcgatcctcgtcaggtgcaggtcagcacgttgctgtcgattaagaccggagcttgtccggaagattgcaaatactgcccgcaaagctcgcgctacaaaaccgggctggaagccgagcggttgatggaagttgaacaggtgctggagtcggcgcgcaaagcgaaagcggcaggatcgacgcgcttctgtatgggcgcggcgtggaagaatccccacgaacgcgatatgccgtacctggaacaaatggtgcagggggtaaaagcgatggggctggaggcgtgtatgacgctgggcacgttgagtgaatctcaggcgcagcgcctcgcgaacgccgggctggattactacaaccacaacctggacacctcgccggagttttacggcaatatcatcaccacacgcacttatcaggaacgcctcgatacgctggaaaaagtgcgcgatgccgggatcaaagtctgttctggcggcattgtgggcttaggcgaaacggtaaaagatcgcgccggattattgctgcaactggcaaacctgccgacgccgccggaaagcgtgccaatcaacatgctggtgaaggtgaaaggcacgccgcttgccgataacgatgatgtcgatgcctttgattttattcgcaccattgcggtcgcgcggatcatgatgccaacctcttacgtgcgcctttctgccggacgcgagcagatgaacgaacagactcaggcgatgtgctttatggcaggcgcaaactcgattttctacggttgcaaactgctgaccacgccgaatccggaagaagataaagacctgcaactgttccgcaaactggggctaaatccgcagcaaactgccgtgctggcaggggataacgaacaacagcaacgtcttgaacaggcgctgatgaccccggacaccgacgaatattacaacgcggcagcattatgagctggcag

SEQ ID NO: 121487 - DNA, 1049 bp, Control Sequence; identical to SEQ ID NO: 121486

SEQ ID NO: 121488 - DNA, 1049 bp, Control Sequence; identical to SEQ ID NO: 121486

SEQ ID NO: 121489 - DNA, 751 bp, Control Sequence
atggcaacggttaataaacaagccattgcagcggcatttggtcgggcagccgcacactatgagcaacatgcagatctacagcgccagagtgctgacgccttactggcaatgcttccacagcgtaaatacacccacgtactggacgcgggttgtggacctggctggatgagccgccactggcgggaacgtcacgcgcaggtgacggccttagatctctcgccgccaatgcttgttcaggcacgccagaaggatgccgcagaccattatctggcgggagatatcgaatccctgccgttagcgactgcgacgttcgatcttgcatggagcaatctcgcagtgcagtggtgcggtaatttatccacggcactccgcgagctgtatcgggtggtgcgccccaaaggcgtggtcgcgtttaccacgctggtgcagggatcgttacccgaactgcatcaggcgtggcaggcggtggacgagcgtccgcatgctaatcgctttttaccgccagatgaaatcgaacagtcgctgaacggcgtgcattatcaacatcatattcagcccatcacgctgtggtttgatgatgcgctcagtgccatgcgttcgctgaaaggcatcggtgccacgcatcttcatgaagggcgcgacccgcgaatattaacgcgttcgcagttgcagcgattgcaactggcctggccgcaacagcaggggcgatatcctctgacgtatcatctttttttgggagtgattgctcgtg

SEQ ID NO: 121490 - DNA, 751 bp, Control Sequence; identical to SEQ ID NO: 121489

SEQ ID NO: 121491 - DNA, 661 bp, Control Sequence
gtgagtaaacgttattttgtcaccggaacggataccgaagtggggaaaactgtcgccagttgtgcacttttacaagccgcaaaggcagcaggctaccggacggcaggttataaaccggtcgcctctggcagcgaaaagaccccggaaggtttacgcaatagcgacgcgctggcgttacagcgcaacagcagcctgcagctggattacgcaacagtaaatccttacaccttcgcagaacccacttcgccgcacatcatcagcgcgcaagagggcagaccgatagaatcattggtaatgagcgccggattacgcgcgcttgaacaacaggctgactgggtgttagtggaaggtgctggcggctggtttacgccgctttctgacactttcacttttgcagattgggtaacacaggaacaactgccggtgatactggtagttggtgtgaaactcggctgtattaatcacgcgatgttgactgcacaggtaatacaacacgccggactgactctggcgggttgggtggcgaacgatgttacgcctccgggaaaacgtcacgctgaatatatgaccacgctcacccgcatgattcccgcgccgctgctgggagagatcccctggcttgcagaaaatccagaaaatgcggcaaccggaaagtacataa

SEQ ID NO: 121492 - DNA, 661 bp, Control Sequence; identical to SEQ ID NO: 121491

SEQ ID NO: 121493 - DNA, 1032 bp, Control Sequence
atgtccaatttactgaccgtacaccaaaatttgcctgcattaccggtcgatgcaacgagtgatgaggttcgcaagaacctgatggacatgttcagggatcgccaggcgttttctgagcatacctggaaaatgcttctgtccgtttgccggtcgtgggcggcatggtgcaagttgaataaccggaaatggtttcccgcagaacctgaagatgttcgcgattatcttctatatcttcaggcgcgcggtctggcagtaaaaactatccagcaacatttgggccagctaaacatgcttcatcgtcggtccgggctgccacgaccaagtgacagcaatgctgtttcactggttatgcggcggatccgaaaagaaaacgttgatgccggtgaacgtgcaaaacaggctctagcgttcgaacgcactgatttcgaccaggttcgttcactcatggaaaatagcgatcgctgccaggatatacgtaatctggcatttctggggattgcttataacaccctgttacgtatagccgaaattgccaggatcagggttaaagatatctcacgtactgacggtgggagaatgttaatccatattggcagaacgaaaacgctggttagcaccgcaggtgtagagaaggcacttagcctgggggtaactaaactggtcgagcgatggatttccgtctctggtgtagctgatgatccgaataactacctgttttgccgggtcagaaaaaatggtgttgccgcgccatctgccaccagccagctatcaactcgcgccctggaagggatttttgaagcaactcatcgattgatttacggcgctaaggatgactctggtcagagatacctggcctggtctggacacagtgcccgtgtcggagccgcgcgagatatggcccgcgctggagtttcaataccggagatcatgcaagctggtggctggaccaatgtaaatattgtcatgaactatatccgtaacctggatagtgaaacaggggcaatggtgcgcctgctggaagatgccgattag

SEQ ID NO: 121494 - DNA, 1032 bp, Control Sequence; identical to SEQ ID NO: 121493

SEQ ID NO: 121495 - DNA, 1840 bp, Control Sequence
atgtcaaacgaaacaattaaattagtcattgcgggaccgcgtggaagaatggggcaggaagctgttaaattggcagaacgaacaccacattttgaccttgtaggggccatagaccatacatacgatcagcaaaaattatctgatgtgatgcctgttgagtcagatgctttcatttacacagatatccatgcctgttttacagaaacacaaccggatgtcttgattgatttaacaacgcccgaaatcggaaaagtacatacaaaaattgcattagagcacggagtccgtccagttgtcggaacaaccggtttctcagaagctgatttaaaagagctcacatctttaacagaagaaaaagggatcggagccatcatcgcgccaaattttgcgctcggtgcgatactgatgatgaaattttcaaaaatggctgccaactattttgaggatgttgagattattgagcttcatcatgaccagaagcttgacgcaccaagcggaactgcgcttaaaacagcggaaatgatttcagaagtccgtaaagaaaagcagcaaggacatccggatgaaaaagaaattctcccaggagcaagaggagcggagcaaaacggtattcgcttgcacaggcttcagatacgccatgattcttataaccgtgcttctttcatgtcaggcgttaaactgtcagtcgaacaagtcatgaagattgatcagcttgtgtatggtttagaaaatatcattgattagacggggggataaacaatgaaaattgctttgatcgcgcatgacaagaaaaaacaggatatggttcaatttacgactgcctatcgggatattttaaagaatcatgatctatacgcaaccggaaccacagggttgaaaattcatgaggcgacaggtcttcaaattgaacgttttcaatccggccctttagggggagaccagcaaatcggtgcactgatcgctgccaatgcactcgatcttgtcatttttttgcgcgacccgctgaccgcgcagccgcatgaaccggatgtctcggcattaatccgtttatgtgatgtgtattccattccgctcgccacaaatatgggtactgcggaaattcttgtgcgcacacttgatgaaggtgttttcgaattccgtgaccttcttcggggagaagagccgaatgtataatgctgacgttcttgcttttggcgcccacagtgatgatgtcgagatcggaatgggcggcacaatagcgaagtttgtcaaacaggaaaaaaaagtaatgatatgcgatttgacagaagcggaactctcttctaacggtacggtcagtttgcgtaaagaagaagcagctgaagcagcccgcatattaggcgcagataaaagaattcagctaacgcttccagaccgcggcctaataatgagtgatcaggcaattcggtcaattgtcactgtcatcagaatctgtcggccaaaagcggtttttatgccgtataaaaaggatcgccatccggatcacggcaatgcggctgcactggtggaagaagcgatcttttccgccggaatccataaatataaagacgaaaaaagccttccggcgcataaagtcagcaaggtttactattatatgataaatggttttcatcagccggattttgttattgatatctcggatacaatagaggcaaagaaacaaagcctcaacgcctacaaaagccagtttatcccgtcaaaggattccgtttctactcctctgacgaatgggtatattgaaatcgttgaagcgagagaaaagctttacggtaaagaagcgggcgtggagtatgccgaagtttcttttccaaacggatgctga

SEQ ID NO: 121496 - DNA, 1840 bp, Control Sequence; identical to SEQ ID NO: 121495

SEQ ID NO: 121497 - DNA, 1840 bp, Control Sequence; identical to SEQ ID NO: 121495

SEQ ID NO: 121498 - DNA, 1268 bp, Control Sequence; identical to SEQ ID NO: 121437

SEQ ID NO: 121499 - DNA, 1268 bp, Control Sequence; identical to SEQ ID NO: 121437

SEQ ID NO: 121500 - DNA, 1268 bp, Control Sequence; identical to SEQ ID NO: 121437

SEQ ID NO: 121501 - DNA, 984 bp, Control Sequence
atgacattgttcttacacggcacaagcagacaaaatcaacatggtcatttagaaatcggaggtgtggatgctctctatttagcggagaaatatggtacacctctttacgtatatgatgtggctttaatacgtgagcgtgctaaaagctttaagcaggcgtttatttctgcagggctgaaagcacaggtggcatatgcgagcaaagcattctcatcagtcgcaatgattcagctcgctgaggaagagggactttctttagatgtcgtatccggagagagctatatacggctgttgcagcaggctttccggcagaacgcatccactttcatggaaacaataagagcagggaagaactgcggatggcgcttgagcaccgcatcggctgcattgtggtggataatttctatgaaatcgtcgcttcttgaagacctatgtaaagaaacgggtcactccatcgatgttcttcttcggatcacgcccggagtagaagcgcatacgcatgactacattacaacgggccaggaagattcaaagtttggtttcgatcttcataacggacaaactgaacgggccattgaacaagtattacaatcggaacacattcagctgctgggtgtccattgccatatcggctcgcaaatctttgatacggccggttttgtgttagcagcggaaaaaatcttcaaaaaactagacgaatggagagattcatattcatttgtatccaaggtgctgaatcttggaggaggtttcggcattcgttatacggaagatgatgaaccgcttcatgccactgaatacgttgaaaaaattatcgaagctgtgaaagaaaatgcttcccgttacggttttgacattccggaaatttggatcgaaccgggccgttctctcgtgggagacgcaggcacaactctttatacggttggctctcaaaaagaagtggataagctgtacaatcgtttcatcattcggcgtgcgaattaa

SEQ ID NO: 121502 - DNA, 984 bp, Control Sequence; identical to SEQ ID NO: 121501

SEQ ID NO: 121503 - DNA, 984 bp, Control Sequence; identical to SEQ ID NO: 121501

SEQ ID NO: 121504 - DNA, 1318 bp, Control Sequence
atgaaagaggagacattttatcttgtccgtgaagatgtattgcccgatgcaatgagaaaaacattagaagtcaaaaagctgcttgatcgaaaaaaagcagattcagtagcagatgccgttcaaaaggtcgatttaagtagaagtgcgttttataaatacagggatgctgtttttccattctacaccatggtaaaagaacaaattatcacacttttctttcatttggaggataggtcaggtgcgttatctcagcttcttcaggcggtagctgattctggaagcaacgttctttccattcaccagaccattccgcttcaaggcagagcaaatgtgacactgtctatcagtacgtcggcaatggaagaagacattcatacattaatgaataagctcaggaagtttgattttgtagaaaaggttgaaatattaggttcaggtgcataagggagagaaaatcgtcatgaaagtcggttatttaggtccagcagctacatttacacatctagcagtcagttcttgttttcaaaacggcgccgaacatgttgcttaccgcaccattccggagtgtatagatgcagccgttgcaggcgaagttgattttgcttttgttcctttggaaaatgctttagaaggatctgttaatctaacaatagactatttaatacatgaacagcctttgccaatcgtgggtgaaatgacgttgccgattcaccagcacttgctcgtccatccctcaagagagaatgcatggaaagagctcgacaaaatttactcacattcacacgcgattgcgcaatgccataaatttcttcatcgacattttccttccgttccatatgaatacgccaattctaccggggcggcagcaaagtttgtcagtgaccatcccgagctgaatatcggggtcattgccaatgatatggcagcttctacatacgaattaaaaatcgtgaaacgggatatacaggattatagggacaatcatacaagatttgttatcctgtctcccgatgaaaacatatcttttgaagtgaattcaaaattgagctctaggcccaaaacgaccttaatggtcatgctgccgcaggatgatcagtccggggcgctgcatagagtgctgtctgcattttcttggagaaatttaaacctgtcaaaaattgagtcacgtccgactaaaaccggattaggccattatttctttattattgatattgagaaagcgtttgatgatgtattgattccaggggccatgcaggagcttgaagcactcggctgcaaagtgaggcttctgggtgcataccagtcttaccaattataa

SEQ ID NO: 121505 - DNA, 1318 bp, Control Sequence; identical to SEQ ID NO: 121504

SEQ ID NO: 121506 - DNA, 1318 bp, Control Sequence; identical to SEQ ID NO: 121504

SEQ ID NO: 121507 - DNA, 3953 bp, Control Sequence
gggttcttacccatttaaagtttgaccaaacactaaggatgctgaagttccgaacagtccatgggggcctgaggctcctgggaatccgccgaacctccaccgcccccgctgcctccccaaatgtccggcgcctggagtataagcccatcaagaaagtcatggtggccaacagaggtgagattgccatccgtgtgttccgggcctgcacggagctgggcatccgcaccgtagccatctactctgagcaggacacgggccagatgcaccggcagaaagcagatgaagcctatctcatcggccgcggcctggcccccgtgcaggcctacctgcacatcccagacatcatcaaggtggccaaggagaacaacgtagatgcagtgcaccctggctacgggttcctctctgagcgagcggacttcgcccaggcctgccaggatgcaggggtccggtttattgggccaagcccagaagtggtccgcaagatgggagacaaggtggaggcccgggccatcgccattgctgcgggtgttcccgttgtccctggcacagatgcccccatcacgtccctgcatgaggcccacgagttctccaacacctacggcttccccatcatcttcaaggcggcctatgggggtggagggcgtggcatgagggtggtgcacagctacgaggagctggaggagaattacacccgggcctactcagaggctctggccgcctttgggaatggggcgctgtttgtggagaagttcatcgagaagccacggcacatcgaggtgcagatcttgggggaccagtatgggaacatcctgcacctgtacgagcgagactgctccatccagcggcggcaccagaaggtggtcgagattgcccccgccgcccacctggacccgcagcttcggactcggctcaccagcgactctgtgaaactcgctaaacaggtgggctacgagaacgcaggcaccgtggagttcctggtggacaggcacggcaagcactacttcatcgaggtcaactcccgcctgcaggtggagcacacggtcacagaggagatcaccgacgtagacctggtccatgctcagatccacgtggctgagggcaggagcctacccgacctgggcctgcggcaggagaacatccgcatcaacgggtgtgccatccagtgccgggtcaccaccgaggaccccgcgcgcagcttccagccggacaccggccgcattgaggtgttccggagcggagagggcatgggcatccgcctggataatgcttccgccttccaaggagccgtcatctcgccccactacgactccctgctggtcaaagtcattgcccacggcaaagaccaccccacggccgccaccaagatgagcagggcccttgcggagttccgcgtccgaggtgtgaagaccaacatcgccttcctgcagaatgtgctcaacaaccagcagttcctggcaggcactgtggacacccagttcatcgacgagaacccagagctgttccagctgcggcctgcacagaaccgggcccaaaagctgttgcactacctcggccatgtcatggtaaacggtccaaccaccccgattcccgtcaaggccagccccagccccacggaccccgttgtccctgcagtgcccataggcccgcccccggctggtttcagagacatcctgctgcgagaggggcctgagggctttgctcgagctgtgcggaaccacccggggctgctgctgatggacacgaccttcagggacgcccaccagtcactgctggccactcgtgtgcgcacccacgatctcaaaaagatcgccccctatgttgcccacaacttcagcaagctcttcagcatggagaactggggaggagccacgtttgacgtcgccatgcgcttcctgtatgagtgcccctggcggcggctgcaggagctccgggagctcatccccaacatccctttccagatgctgctgcggggggccaatgctgtgggctacaccaactacccagacaacgtggtcttcaagttctgtgaagtggccaaagagaatggcatggatgtcttccgtgtgtttgactccctcaactacttgcccaacatgctgctgggcatggaggcggcaggaagtgccggaggcgtggtggaggctgccatctcatacacgggcgacgtggccgaccccagccgcaccaagtactcactgcagtactacatgggcttggccgaagagctggtgcgagctggcacccacatcctgtgcatcaaggacatggccgggctgctgaagcccacggcctgcaccatgctggtcagctccctccgggaccgcttccccgacctcccactgcacatccacacccacgacacgtcaggggcaggcgtggcagccatgctggcctgtgcccaggctggagctgatgtggtggatgtggcagctgattccatgtctgggatgacttcacagcccagcatgggggccctggtggcctgtaccagagggactcccctggacacagaggtgcccatggagcgcgtgtttgactacagtgagtactgggagggggctcggggactgtacgcggccttcgactgcacggccaccatgaagtctggcaactcggacgtgtatgaaaatgagatcccagggggccagtacaccaacctgcacttccaggcccacagcatggggcttggctccaagttcaaggaggtcaagaaggcctatgtggaggccaaccagatgctgggcgatctcatcaaggtgacgccctcctccaagatcgtgggggacctggcccagtttatggtgcagaatggattgagccgggcagaggccgaagctcaggcggaagagctgtcctttccccgctccgtggtggagttcctgcagggctacatcggtgtcccccatggggggttccccgaaccctttcgctctaaggtactgaaggacctgccaagggtggaggggcggcctggagcctccctccctcccctggatctgcaggcactggagaaggagctggtagaccggcatggggaggaggtgacgccggaagatgtgctctcagcagctatgtaccccgatgtgtttgcccacttcaaggacttcactgccacctttggccccctggatagcctgaatactcgcctcttcctgcagggacccaagatcgcagaggagtttgaggtggagctggagcggggcaagacgctgcacatcaaagccctggccgtgagcgacctgaaccgggccggccagaggcaggtcttctttgagctcaatgggcagctgcggtccatcttggtcaaggacacccaggccatgaaggagatgcacttccaccccaaggccctaaaggacgtgaagggccagatcggggcgcccatgcctgggaaggtgatagacatcaaagtggtggcaggggccaaggtggccaagggccagcccctgtgtgtgctcagtgccatgaagatggagactgtggtgacctcacccatggagggtactgtccgcaaggttcatgtgaccaaggacatgacactggaaggtgacgacctcatcctggagatcgagtgatcttgccccagaccggcagcctggccatccccaagccttcaacagaagctgtgctgccacggcaggcccaggccagccagtgcccgaggccaggaaggccgggccgtggaggtcctgtgtccacagctggacaggagagacaccgcctgcggtggttcattcctttcagccatcgtcctttcctccggcggacagctgcttacatgttcatctcttgccaaataagggtcccctcctcactggagactacaagtggtgggtcaggtggtcctaggacccaggggaggtttaggggtcctatctcctgggggaaggggagatcaagatgtcccaggtcctgggaagtttactcaataaagctggctttcccctgccctc

SEQ ID NO: 121508 - DNA, 3953 bp, Control Sequence; identical to SEQ ID NO: 121507

SEQ ID NO: 121509 - DNA, 3953 bp, Control Sequence; identical to SEQ ID NO: 121507

SEQ ID NO: 121510 - DNA, 3953 bp, Control Sequence; identical to SEQ ID NO: 121507

SEQ ID NO: 121511 - DNA, 1982 bp, Control Sequence
atgtggaaaggacttatccatcaatataaagaatttttacctgtaacagatcaaacaccggcgctaactttacatgaaggaaacacacctcttattcacctgccgaagctgtctgagcagctcggaattgagcttcatgtcaaaacggaaggcgtcaatcctacgggatcatttaaagatcgcggaatggttatggctgtggcaaaggcaaaagaagaaggcaatgacacgattatgtgcgcgtcaacaggtaacacttccgctgctgcggcagcatatgcagcccgtgctaacatgaaatgcattgtcatcatcccgaacggaaaaattgcatttggaaaactcgctcaagctgtcatgtacggagccgagattatcgcaattgacggaaactttgacgatgcgcttaaaattgtccgttccatctgtgagaaatcaccgattgcccttgtcaactcagtcaacccttaccgcattgaaggccaaaaaactgctgccttcgaagtgtgcgaacagctgggggaagcgcctgatgttttagcgatcccggtcggaaatgctggaaacatcactgcgtactggaagggcttcaaggaatatcatgagaaaaacggcacaggccttccgaaaatgcgcggctttgaagctgagggtgcggcggcaatcgtgcgcaatgaagtgattgaaaatccggaaacaatagcgacagccattcgtatcggaaacccggcaagctgggacaaagctgtaaaggcagccgaggaatccaatgggaaaattgacgaagtcactgatgatgaaatccttcacgcatatcagctgatcgcccgtgtagaaggcgtgtttgcagaaccaggttcttgcgcgtctatcgcaggagtgctgaaacaggtgaaatccggagaaattccgaaaggcagcaaggtcgtagctgtgttaacaggaaacggactgaaagatccgaacacagcggtcgacatttcagaaatcaagcctgtcacattgccgactgatgaagacagcatccttgaatatgtaaaaggagcggcccgtgtatgaacgaagccgacatgctgttctctgtcactgttcccggaagcacagctaacctaggccccggctttgattcagtcggaatggcgctcagcagatatttgaagctgaccgtctttgaaagcgacaaatggtcttttgaggctgaaacagaaacagtcgccggaattcgcggtacagataacctgatctaccaagtggctaaacggaccgcagatttgtacggaaaagaaatgcctcctgtccatgtgaaggtgtggagcgacatcccgcttgcacgcggccttggcagcagcgccgcagcgattgtagcggccattgaactggctgatgaattatgcggcttaaagctgtctgaagcggacaagctgcatttagcgagtctagaagaaggacacccggacaatgctggcgcttctctcgtcggcggacttgtgatcggcctgcatgaggatgacgagacccaaatgatccgcgtcccgaatgctgacattgacgtagtcgttgtcattcctttttatgaagtgctgacaagagacgcgagagacgtgcttccgaaggagtttccatatgccgatgccgtaaaagcaagtgctgtcagcaatatcctcattgctgcgatcatgtccaaggattggccgcttgtcgggaaaatcatgaagaaggatatgttccatcagccgtaccgggcgatgcttgtgcctgagctgtcaaaagtagagcacgtcgccgagatgaagggcgcatatggaacggctctcagcggagcaggcccaacgattctcgtcatgaccgaaaaaggaaagggagaagagctaaaagaacagctcgcgcttcatttccctcattgtgaagtagacgctttgaccgttccgaaagagggaagtataatagagcgaaatcctttatatcaagtaaaaagtgtatag

SEQ ID NO: 121512 - DNA, 1982 bp, Control Sequence; identical to SEQ ID NO: 121511

SEQ ID NO: 121513 - DNA, 1982 bp, Control Sequence; identical to SEQ ID NO: 121511

SEQ ID NO: 121514 - DNA, 2826 bp, Control Sequence
ccggttaggggccgccatcccctcagagcgtcgggatatcgggtggcggctcgggacggaggacgcgctagtgttcttctgtgtggcagttcagaatgatggatcaagctagatcagcattctctaacttgtttggtggagaaccattgtcatatacccggttcagcctggctcggcaagtagatggcgataacagtcatgtggagatgaaacttgctgtagatgaagaagaaaatgctgacaataacacaaaggccaatgtcacaaaaccaaaaaggtgtagtggaagtatctgctatgggactattgctgtgatcgtctttttcttgattggatttatgattggctacttgggctattgtaaaggggtagaaccaaaaactgagtgtgagagactggcaggaaccgagtctccagtgagggaggagccaggagaggacttccctgcagcacgtcgcttatattgggatgacctgaagagaaagttgtcggagaaactggacagcacagacttcaccagcaccatcaagctgctgaatgaaaattcatatgtccctcgtgaggctggatctcaaaaagatgaaaatcttgcgttgtatgttgaaaatcaatttcgtgaatttaaactcagcaaagtctggcgtgatcaacattttgttaagattcaggtcaaagacagcgctcaaaactcggtgatcatagttgataagaacggtagacttgtttacctggtggagaatcctgggggttatgtggcgtatagtaaggctgcaacagttactggtaaactggtccatgctaattttggtactaaaaaagattttgaggatttatacactcctgtgaatggatctatagtgattgtcagagcagggaaaatcacgtttgcagaaaaggttgcaaatgctgaaagcttaaatgcaattggtgtgttgatatacatggaccagactaaatttcccattgttaacgcagaactttcattctttggacatgctcatctggggacaggtgacccttacacacctggattcccttccttcaatcacactcagtttccaccatctcggtcatcaggattgcctaatatacctgtccagacaatctccagagctgctgcagaaaagctgtttgggaatatggaaggagactgtccctctgactggaaaacagactctacatgtaggatggtaacctcagaaagcaagaatgtgaagctcactgtgagcaatgtgctgaaagagataaaaattcttaacatctttggagttattaaaggctttgtagaaccagatcactatgttgtagttggggcccagagagatgcatggggccctggagctgcaaaatccggtgtaggcacagctctcctattgaaacttgcccagatgttctcagatatggtcttaaaagatgggtttcagcccagcagaagcattatctttgccagttggagtgctggagactttggatcggttggtgccactgaatggctagagggatacctttcgtccctgcatttaaaggctttcacttatattaatctggataaagcggttcttggtaccagcaacttcaaggtttctgccagcccactgttgtatacgcttattgagaaaacaatgcaaaatgtgaagcatccggttactgggcaatttctatatcaggacagcaactgggccagcaaagttgagaaactcactttagacaatgctgctttccctttccttgcatattctggaatcccagcagtttctttctgtttttgcgaggacacagattatccttatttgggtaccaccatggacacctataaggaactgattgagaggattcctgagttgaacaaagtggcacgagcagctgcagaggtcgctggtcagttcgtgattaaactaacccatgatgttgaattgaacctggactatgagaggtacaacagccaactgctttcatttgtgagggatctgaaccaatacagagcagacataaaggaaatgggcctgagtttacagtggctgtattctgctcgtggagacttcttccgtgctacttccagactaacaacagatttcgggaatgctgagaaaacagacagatttgtcatgaagaaactcaatgatcgtgtcatgagagtggagtatcacttcctctctccctacgtatctccaaaagagtctcctttccgacatgtcttctggggctccggctctcacacgctgccagctttactggagaacttgaaactgcgtaaacaaaataacggtgcttttaatgaaacgctgttcagaaaccagttggctctagctacttggactattcagggagctgcaaatgccctctctggtgacgtttgggacattgacaatgagttttaaatgtgatacccatagcttccatgagaacagcagggtagtctggtttctagacttgtgctgatcgtgctaaattttcagtaggcctacaaaacctgatgttaaaattccatcccatcatcttggtactactagatgtctttaggcagcagcttttaatacagggtagataacctgtacttcaagttaaagtgaataaccacttaaaaaatgtccatgatggaatattcccctatctctagaattttaagtgctttgtaatgggaactgcctctttcctgttgttgttaatgaaaatgtcagaaaccagttatgtgaatgatctctctgaatcctaagggctggtctctgctgaaggttgtaagtggtcgcttactttgagtgatcctccaacttcatttgatgctaaataggagataccaggttgaaagaccttctccaaatgagatct

SEQ ID NO: 121515 - DNA, 2826 bp, Control Sequence; identical to SEQ ID NO: 121514

SEQ ID NO: 121516 - DNA, 2826 bp, Control Sequence; identical to SEQ ID NO: 121514

SEQ ID NO: 121517 - DNA, 2525 bp, Control Sequence; identical to SEQ ID NO: 121480

SEQ ID NO: 121518 - DNA, 2525 bp, Control Sequence; identical to SEQ ID NO: 121480

SEQ ID NO: 121519 - DNA, 2524 bp, Control Sequence
ctcgagccaacaccgagagagacatacggcgggtgtattgcctacattgggtttgacgggaatatcgactcttgtattacgattcgcacgatgagtgtaaagaacggtgttgcatcgatacaggcaggtgctggcattgttgctgattctgttccggaagccgaatacgaagaaagctgtaataaagccggtgcgctgctgaaaacgattcatattgcagaagacatgtttcatagcaaggaggataaagctgatgaacagatttctacaattgtgcgttgacggaaaaacccttactgccggtgaggctgaaacgctgatgaatatgatgatggcagcggaaatgactccttctgaaatgggggggatattgtcaattcttgctcatcggggggagacgccagaagagcttgcgggttttgtgaaggcaatgcgggcacacgctcttacagtcgatggacttcctgatattgttgatacatgcggaacagggggagacggtatttccacttttaatatctcaacggcctcggcaattgttgcctcggcagctggtgcgaaaatcgctaagcatggcaatcgctctgtctcttctaaaagcggaagcgctgatgttttagaggagctagaggtttctattcaaaccactcccgaaaaggtcaaaagcagcattgaaacaaacaacatgggatttctttttgcgccgctttaccattcgtctatgaaacatgtagcaggtactagaaaagagctaggtttcagaacggtatttaatctgcttgggccgctcagcaatcctttacaggcgaagcgtcaggtgattggggtctattctgttgaaaaagctggactgatggcaagcgcactggagacgtttcagccgaagcacgtcatgtttgtatcaagccgtgacggtttagatgagctttcaattacagcaccgaccgacgtgattgaattaaaggacggagagcgccgggaatataccgtttcacccgaagatttcggtttcacaaatggcagacttgaagatttacaggtgcagtcaccgaaagagagcgcctatctcattcagaatatttttgaaaataaaagcagcagttccgctttatctattacggcttttaatgcgggagctgcgatttacacggcgggaattaccgcctcactgaaggaaggaacggagctggcgttagagacgattacaagcggaggcgctgccgcgcagcttgaacgactaaagcagaaagaggaagagatctatgcttgaaaaaatcatcaaacaaaagaaagaagaagtgaaaacactggttttgccggtagagcagcctttcgagaaacgttcatttaaggaggcgctggcaagcccgaatcggtttatcgggttgattgccgaagtgaagaaagcatcgccgtcaaaagggcttattaaagaggattttgtgcctgtgcagattgcaatagactatgaggctgcgaaggcagatgcgatttccgttttaacagacaccccgttttttcaaggggaaaacagttatttatcagacgtaaagcgtgctgtttcgattcctgtacttagaaaagattttattcttgattctcttcaagtagaggaatcaagaagaatcggagcggatgccatattgttaatcggcgaggtgcttgatcccttacaccttcatgaattatatcttgaagcaggtgaaaaggggatggacgtgttagtggaggttcatgatgcatcaacgctagaacaaatattgaaagtgttcacacccgacattctcggcgtaaataatcgaaacctaaaaacgtttgaaacatctgtaaagcagacagaacaaatcgcatctctcgttccgaaagaatccttgcttgtcagcgaaagcggaatcggttctttagaacatttaacatttgtcaatgaacatggggcgcgagctgtacttatcggtgaatcattgatgagacaaacttctcagcgtaaagcaatccatgctttgtttagggagtgaggttgtgaagaaaccggcattaaaatattgcggtattcggtcactaaaggatttgcagcttgcggcggaatcacaggctgattacctaggatttatttttgctaaaagcaaacgaaaagtatctccggaagatgtgaaaaaatggctgaaccaagttcgtgtcgaaaaacaggttgcaggtgtttttgttaatgaatcaatagagacgatgtcacgtattgccaagagcttgaagctcgacgtcattcagcttcacggtgatgaaaaaccggcggatgctgctgctcttcgcaagctgacaggctgtgaaatatggaaggcgcttcaccatcaagataacacaactcaagaaatagcccgctttaaagataatgttgacggctttgtgattgattcatctgtaaaagggtctagaggcggaactggtgttgcattttcttgggaatgtgtgccggaatatcagcaggcggctattggtaaacgctgttttatcgcaggcggcgtggatc

SEQ ID NO: 121520 - DNA, 25 bp, Probe Sequence
ggcccctaggtagacagacttgggt

SEQ ID NO: 121521 - DNA, 25 bp, Probe Sequence
aatcgtttttaatcctttgcctatg

SEQ ID NO: 121522 - DNA, 25 bp, Probe Sequence
tatccgtttaaagacccttgccaat

SEQ ID NO: 121523 - DNA, 25 bp, Probe Sequence
accgttcgtcgagaactcagtctgc

SEQ ID NO: 121524 - DNA, 25 bp, Probe Sequence
accagtccccgagagaattttcctg

SEQ ID NO: 121525 - DNA, 25 bp, Probe Sequence
accggaccctaatcaaacgaatgct

SEQ ID NO: 121526 - DNA, 25 bp, Probe Sequence
acacgaacttccagaaaattaacat

SEQ ID NO: 121527 - DNA, 25 bp, Probe Sequence
aaaaccgattaacacttctaatgag

SEQ ID NO: 121528 - DNA, 25 bp, Probe Sequence
gttcccgccaaagccagtagtaaca

SEQ ID NO: 121529 - DNA, 25 bp, Probe Sequence
cttttggccctatacaaaggcaaga

SEQ ID NO: 121530 - DNA, 25 bp, Probe Sequence
aggttttactaagcagatggtcggg

SEQ ID NO: 121531 - DNA, 25 bp, Probe Sequence
gggtacgtggctgaacagttcgggt

SEQ ID NO: 121532 - DNA, 25 bp, Probe Sequence
tagacttggggtcaggggaaggtag

SEQ ID NO: 121533 - DNA, 25 bp, Probe Sequence
gcgacgtcgtaaaccaggacgacct

SEQ ID NO: 121534 - DNA, 25 bp, Probe Sequence
cggggccacgaagcgtgttactttg

SEQ ID NO: 121535 - DNA, 25 bp, Probe Sequence
acggacctccaatgaggttaccgtg

SEQ ID NO: 121536 - DNA, 25 bp, Probe Sequence
accttacccaggtgtttatactgtg

SEQ ID NO: 121537 - DNA, 25 bp, Probe Sequence
tctactaaggcctcttactttgggg

SEQ ID NO: 121538 - DNA, 25 bp, Probe Sequence
ttactggtcccagcttttaggttct

SEQ ID NO: 121539 - DNA, 25 bp, Probe Sequence
agaccttttcttctagtaagtgtca

SEQ ID NO: 121540 - DNA, 25 bp, Probe Sequence
ctgacgttttttgtaagaagtagca

SEQ ID NO: 121541 - DNA, 25 bp, Probe Sequence
cttacgttggtggccaagtaacttg

SEQ ID NO: 121542 - DNA, 25 bp, Probe Sequence
cttcaggttggggagtctttggttg

SEQ ID NO: 121543 - DNA, 25 bp, Probe Sequence
tcgtagtcgacggtagtggtttgga

SEQ ID NO: 121544 - DNA, 25 bp, Probe Sequence
agattggtactgcaaggttttgggc

SEQ ID NO: 121545 - DNA, 25 bp, Probe Sequence
atgaatggctttcaaaaccgtaagc

SEQ ID NO: 121546 - DNA, 25 bp, Probe Sequence
agactggtgttctcaaacccggtat

SEQ ID NO: 121547 - DNA, 25 bp, Probe Sequence
acccagtttaggagcaccttggaag

SEQ ID NO: 121548 - DNA, 25 bp, Probe Sequence
aagccagcgaagtggggttgggccg

SEQ ID NO: 121549 - DNA, 25 bp, Probe Sequence
ttgagttcccgagagggccgggcca

SEQ ID NO: 121550 - DNA, 25 bp, Probe Sequence
tcttctaccaacgccaggacgtggc

SEQ ID NO: 121551 - DNA, 25 bp, Probe Sequence
ctaatatccattgaatcggtagtcc

SEQ ID NO: 121552 - DNA, 25 bp, Probe Sequence
ctaccctttaaagattaccagcaag

SEQ ID NO: 121553 - DNA, 25 bp, Probe Sequence
gctggtcccttataaactaatccgg

SEQ ID NO: 121554 - DNA, 25 bp, Probe Sequence
gggttaattaaagatggtagcctgg

SEQ ID NO: 121555 - DNA, 25 bp, Probe Sequence
agaaatctaactcaaacgtcccact

SEQ ID NO: 121556 - DNA, 25 bp, Probe Sequence
aggtttaaattatggtctagctatc

SEQ ID NO: 121557 - DNA, 25 bp, Probe Sequence
aacttcgggtaatggctgttctact

SEQ ID NO: 121558 - DNA, 25 bp, Probe Sequence
acgttcagggtatcggggtgcgagg

SEQ ID NO: 121559 - DNA, 25 bp, Probe Sequence
acagtttaattatccattcgtccgt

SEQ ID NO: 121560 - DNA, 25 bp, Probe Sequence
atgcaggtcgtacataacttccggt

SEQ ID NO: 121561 - DNA, 25 bp, Probe Sequence
ccaggtcgtccttccaatatttagt

SEQ ID NO: 121562 - DNA, 25 bp, Probe Sequence
ataacttaccaagcagttccaagtg

SEQ ID NO: 121563 - DNA, 25 bp, Probe Sequence
aaattccacccagcaaatgccggtt

SEQ ID NO: 121564 - DNA, 25 bp, Probe Sequence
acaggttccccgagaactcggcatg

SEQ ID NO: 121565 - DNA, 25 bp, Probe Sequence
gacctttaccggagaatccctatca

SEQ ID NO: 121566 - DNA, 25 bp, Probe Sequence
aggctcggggggagaacggcattca

SEQ ID NO: 121567 - DNA, 25 bp, Probe Sequence
cccttcgggaggcaaactcctggat

SEQ ID NO: 121568 - DNA, 25 bp, Probe Sequence
ccggggattaggaggtcctcgtgct

SEQ ID NO: 121569 - DNA, 25 bp, Probe Sequence
cggggttggggcacaattgtggact

SEQ ID NO: 121570 - DNA, 25 bp, Probe Sequence
cggttattcggtgagcggtggtggt

SEQ ID NO: 121571 - DNA, 25 bp, Probe Sequence
ctttgtctacgagaagggggctcgg

SEQ ID NO: 121572 - DNA, 25 bp, Probe Sequence
gtgggttaccacaggttggggactg

SEQ ID NO: 121573 - DNA, 25 bp, Probe Sequence
cggccttaatcctggttaccgtgtg

SEQ ID NO: 121574 - DNA, 25 bp, Probe Sequence
atgggcgtacggcgttgtacggtgg

SEQ ID NO: 121575 - DNA, 25 bp, Probe Sequence
aggccgaaccggtgcagttcaagga

SEQ ID NO: 121576 - DNA, 25 bp, Probe Sequence
ggttcgtacgggagcaataaaggag

SEQ ID NO: 121577 - DNA, 25 bp, Probe Sequence
cggtaggtttcgagcagaaagaggg

SEQ ID NO: 121578 - DNA, 25 bp, Probe Sequence
gctggaaaggactccggaaaggcca

SEQ ID NO: 121579 - DNA, 25 bp, Probe Sequence
atcacgaggggtcccaagtctagcc

SEQ ID NO: 121580 - DNA, 25 bp, Probe Sequence
atgacggggaggaagcttttgagga

SEQ ID NO: 121581 - DNA, 25 bp, Probe Sequence
aaccgtggcgaaagtcttgttaatg

SEQ ID NO: 121582 - DNA, 25 bp, Probe Sequence
atacctttaggaaggcgtccattca

SEQ ID NO: 121583 - DNA, 25 bp, Probe Sequence
agaccttcacagagggcgttttctt

SEQ ID NO: 121584 - DNA, 25 bp, Probe Sequence
agaagagaacagaggccccgtcctt

SEQ ID NO: 121585 - DNA, 25 bp, Probe Sequence
cgtaggaaggaagcgtagccggatt

SEQ ID NO: 121586 - DNA, 25 bp, Probe Sequence
agacggaactttgtgctgacggctg

SEQ ID NO: 121587 - DNA, 25 bp, Probe Sequence
ttacagtaaattgttaacgtctatt

SEQ ID NO: 121588 - DNA, 25 bp, Probe Sequence
gcccagtaaaggaggtgcccttttg

SEQ ID NO: 121589 - DNA, 25 bp, Probe Sequence
acacaggttaggagacgtcgctttg

SEQ ID NO: 121590 - DNA, 25 bp, Probe Sequence
cggccatttaggagactaagttcag

SEQ ID NO: 121591 - DNA, 25 bp, Probe Sequence
agttaaaacgtcacaaaggtgctgc

SEQ ID NO: 121592 - DNA, 25 bp, Probe Sequence
cgggaacaccgtgaaactgaactgc

SEQ ID NO: 121593 - DNA, 25 bp, Probe Sequence
tcagggaaccagcacttcccaaacc

SEQ ID NO: 121594 - DNA, 25 bp, Probe Sequence
agaactacacggctcccgaaagtat

SEQ ID NO: 121595 - DNA, 25 bp, Probe Sequence
gtgaacggaaaagctgggaaccttg

SEQ ID NO: 121596 - DNA, 25 bp, Probe Sequence
gtgaacggaaaagctgggaaccttg

SEQ ID NO: 121597 - DNA, 25 bp, Probe Sequence
aattaggaacttattggaactggag

SEQ ID NO: 121598 - DNA, 25 bp, Probe Sequence
gaatctaccaactgtttagggccct

SEQ ID NO: 121599 - DNA, 25 bp, Probe Sequence
aacgtaaaggtcattgcttcccact

SEQ ID NO: 121600 - DNA, 25 bp, Probe Sequence
tggccgtaagcgatttttccggcct

SEQ ID NO: 121601 - DNA, 25 bp, Probe Sequence
gttagaaaagtgcttaacctggcct

SEQ ID NO: 121602 - DNA, 25 bp, Probe Sequence
attcagctaacgcttccagaccgcg

SEQ ID NO: 121603 - DNA, 25 bp, Probe Sequence
agtagtagactggatacaccccgac

SEQ ID NO: 121604 - DNA, 25 bp, Probe Sequence
gctttggcagacagtaacgtcagtt

SEQ ID NO: 121605 - DNA, 25 bp, Probe Sequence
tctcaaaccctgtttacggtacttg

SEQ ID NO: 121606 - DNA, 25 bp, Probe Sequence
ataggtacaagcaatcccgggacat

SEQ ID NO: 121607 - DNA, 25 bp, Probe Sequence
aaaggcaccgaacagcgttgaatta

SEQ ID NO: 121608 - DNA, 25 bp, Probe Sequence
agctagagaccctgaaacgtaatgt

SEQ ID NO: 121609 - DNA, 25 bp, Probe Sequence
tacttacctagtgaaacttttctag

SEQ ID NO: 121610 - DNA, 25 bp, Probe Sequence
ttttccttccgtcaagttgtcttat

SEQ ID NO: 121611 - DNA, 25 bp, Probe Sequence
gttctccttccgcaaggaacgtctt

SEQ ID NO: 121612 - DNA, 25 bp, Probe Sequence
caattccttccgctacaacggactg

SEQ ID NO: 121613 - DNA, 25 bp, Probe Sequence
agttggatttatctacgggtacgtg

SEQ ID NO: 121614 - DNA, 25 bp, Probe Sequence
agtgtgcagtaattggtaggtaaac

SEQ ID NO: 121615 - DNA, 25 bp, Probe Sequence
acgccgtagacaacacagggttagc

SEQ ID NO: 121616 - DNA, 25 bp, Probe Sequence
accccctgaacgagtgtgaagtgcc

SEQ ID NO: 121617 - DNA, 25 bp, Probe Sequence
accccaagtacagaggattcttcca

SEQ ID NO: 121618 - DNA, 25 bp, Probe Sequence
agggcataaaccacactttttacat

SEQ ID NO: 121619 - DNA, 25 bp, Probe Sequence
aggacaagtacataagactttaaag

SEQ ID NO: 121620 - DNA, 25 bp, Probe Sequence
aggttttgaccagaccattaatttg

SEQ ID NO: 121621 - DNA, 25 bp, Probe Sequence
aagtttgtacttgtcctgtactctt

SEQ ID NO: 121622 - DNA, 25 bp, Probe Sequence
aagtcggtactataggccaagtcaa

SEQ ID NO: 121623 - DNA, 25 bp, Probe Sequence
aaagattaaggtcatgtgccggtaa

SEQ ID NO: 121624 - DNA, 25 bp, Probe Sequence
ggaaggtacgtctggtcctaaccag

SEQ ID NO: 121625 - DNA, 25 bp, Probe Sequence
gggagacccgttatgacctaatcca

SEQ ID NO: 121626 - DNA, 25 bp, Probe Sequence
gggtacccttttcagggattcatag

SEQ ID NO: 121627 - DNA, 25 bp, Probe Sequence
aggtgtgcctgtcttaaattccaaa

SEQ ID NO: 121628 - DNA, 25 bp, Probe Sequence
aagtaacttgggaaaaggccgcatg

SEQ ID NO: 121629 - DNA, 25 bp, Probe Sequence
aagattaatgttctagggccgggca

SEQ ID NO: 121630 - DNA, 25 bp, Probe Sequence
cgggctcaaattcttcgaaagtggt

SEQ ID NO: 121631 - DNA, 25 bp, Probe Sequence
cggggcgccagtgaattaataaggc

SEQ ID NO: 121632 - DNA, 25 bp, Probe Sequence
cggtgggaggttctataataagcca

SEQ ID NO: 121633 - DNA, 25 bp, Probe Sequence
cgaggttgtggtgtctgggaaactc

SEQ ID NO: 121634 - DNA, 25 bp, Probe Sequence
gcccagttcaagagacgggaatacc

SEQ ID NO: 121635 - DNA, 25 bp, Probe Sequence
accgtattagtatcgcctattacca

SEQ ID NO: 121636 - DNA, 25 bp, Probe Sequence
actcggaaactataagtaattctca

SEQ ID NO: 121637 - DNA, 25 bp, Probe Sequence
tctctagggaccagaaccaaaccca

SEQ ID NO: 121638 - DNA, 25 bp, Probe Sequence
ctccccaacaacataaaaacagccg

SEQ ID NO: 121639 - DNA, 25 bp, Probe Sequence
ataccccaccaagaccagaagtaag

SEQ ID NO: 121640 - DNA, 25 bp, Probe Sequence
acccccaaaaaatgacaagtatatg

SEQ ID NO: 121641 - DNA, 25 bp, Probe Sequence
aaggacgggaaagatacaattcaat

SEQ ID NO: 121642 - DNA, 25 bp, Probe Sequence
aggaacagtcagcagggtaaaccga

SEQ ID NO: 121643 - DNA, 25 bp, Probe Sequence
aggtaaccctatgtagaacccgcag

SEQ ID NO: 121644 - DNA, 25 bp, Probe Sequence
aacctacctattcttaagcgggcag

SEQ ID NO: 121645 - DNA, 25 bp, Probe Sequence
aaagttcggaccaggtgagggagca

SEQ ID NO: 121646 - DNA, 25 bp, Probe Sequence
agaagggggccgagaaagaggagct

SEQ ID NO: 121647 - DNA, 25 bp, Probe Sequence
ttaaggggtcggctaagtgggacat

SEQ ID NO: 121648 - DNA, 25 bp, Probe Sequence
cttcggtcgacccgaacgattcgag

SEQ ID NO: 121649 - DNA, 25 bp, Probe Sequence
gggcggacagaccctaaaactcacg

SEQ ID NO: 121650 - DNA, 25 bp, Probe Sequence
aggcctgtagcctggcaaaaacggc

SEQ ID NO: 121651 - DNA, 25 bp, Probe Sequence
aggcctgtagcctggcaaaaacggc

SEQ ID NO: 121652 - DNA, 25 bp, Probe Sequence
attgcttgtaccaggtaatttttgc

SEQ ID NO: 121653 - DNA, 25 bp, Probe Sequence
aggtgttcccgctggaggtaattgg

SEQ ID NO: 121654 - DNA, 25 bp, Probe Sequence
agtgtgttaaggggtcggctaagtg

SEQ ID NO: 121655 - DNA, 25 bp, Probe Sequence
cgcccttgacgtcaagccgtaaggc

SEQ ID NO: 121656 - DNA, 25 bp, Probe Sequence
caccaagggcgtcaagggggacgag

SEQ ID NO: 121657 - DNA, 25 bp, Probe Sequence
gcttttggggtacaagggtgactag

SEQ ID NO: 121658 - DNA, 25 bp, Probe Sequence
gttacatttggagaacccgtactct

SEQ ID NO: 121659 - DNA, 25 bp, Probe Sequence
tgttaattcgggtggacccttggag

SEQ ID NO: 121660 - DNA, 25 bp, Probe Sequence
gttcaaaccggcacggtctgatccg

SEQ ID NO: 121661 - DNA, 25 bp, Probe Sequence
caaccaaccgtcactagtattacta

SEQ ID NO: 121662 - DNA, 25 bp, Probe Sequence
agaaaaccaactctagtaatatgac

SEQ ID NO: 121663 - DNA, 25 bp, Probe Sequence
agaagggtaccctggcttattcagg

SEQ ID NO: 121664 - DNA, 25 bp, Probe Sequence
aaagggctgctatacggttgacaac

SEQ ID NO: 121665 - DNA, 25 bp, Probe Sequence
aaagggtttgaccggcttagcactg

SEQ ID NO: 121666 - DNA, 25 bp, Probe Sequence
aaagggtttgggcgttgctaggctg

SEQ ID NO: 121667 - DNA, 25 bp, Probe Sequence
accagtggttgatgcgggttttggc

SEQ ID NO: 121668 - DNA, 25 bp, Probe Sequence
agccttttaaagcttgaggtgggat

SEQ ID NO: 121669 - DNA, 25 bp, Probe Sequence
ccgcctaaccaatgtggccgtggta

SEQ ID NO: 121670 - DNA, 25 bp, Probe Sequence
cccctaaagctcagttttgaagtga

SEQ ID NO: 121671 - DNA, 25 bp, Probe Sequence
ctccggttacacaccctatgggtgg

SEQ ID NO: 121672 - DNA, 25 bp, Probe Sequence
cttccctagctttagaccctgggtg

SEQ ID NO: 121673 - DNA, 25 bp, Probe Sequence
cattagcccagacaggactaagggg

SEQ ID NO: 121674 - DNA, 25 bp, Probe Sequence
attagcccagacaggactaagggga

SEQ ID NO: 121675 - DNA, 25 bp, Probe Sequence
aatgagggagcctcccgaaggatta

SEQ ID NO: 121676 - DNA, 25 bp, Probe Sequence
acgggactgggagacgacaggaata

SEQ ID NO: 121677 - DNA, 25 bp, Probe Sequence
actaagtccggctcgttcaagaaca

SEQ ID NO: 121678 - DNA, 25 bp, Probe Sequence
acaaaaccccctcttcaagaggcag

SEQ ID NO: 121679 - DNA, 25 bp, Probe Sequence
acccaaggggaagcttcggagcctg

SEQ ID NO: 121680 - DNA, 25 bp, Probe Sequence
ggttaagggaaagcgccgagatgac

SEQ ID NO: 121681 - DNA, 25 bp, Probe Sequence
ggctaaaggtacagttcctttcaag

SEQ ID NO: 121682 - DNA, 25 bp, Probe Sequence
gtcttcccgtttcttaagttgtcat

SEQ ID NO: 121683 - DNA, 25 bp, Probe Sequence
aaggacccatttcttgaagaaactg

SEQ ID NO: 121684 - DNA, 25 bp, Probe Sequence
attcgaacctttattactagtgact

SEQ ID NO: 121685 - DNA, 25 bp, Probe Sequence
atccagaccctagtacctaatacgg

SEQ ID NO: 121686 - DNA, 25 bp, Probe Sequence
ataagcaggagtttatccgtttggg

SEQ ID NO: 121687 - DNA, 25 bp, Probe Sequence
tttcaagggcaataccgtgttggtt

SEQ ID NO: 121688 - DNA, 25 bp, Probe Sequence
tggttctaacacaaaccgtttagtg

SEQ ID NO: 121689 - DNA, 25 bp, Probe Sequence
gcgtttaaagaactacctgttaatg

SEQ ID NO: 121690 - DNA, 25 bp, Probe Sequence
ggtccccacgtacagacattttatt

SEQ ID NO: 121691 - DNA, 25 bp, Probe Sequence
ggaccctggttacaactctgaacct

SEQ ID NO: 121692 - DNA, 25 bp, Probe Sequence
caaccacgtggagaaaatcaaaccg

SEQ ID NO: 121693 - DNA, 25 bp, Probe Sequence
aaccagggaagagccaacaaaacag

SEQ ID NO: 121694 - DNA, 25 bp, Probe Sequence
cggctacgaaaatccaacctacaag

SEQ ID NO: 121695 - DNA, 25 bp, Probe Sequence
cggcggggaggatactgtccccagg

SEQ ID NO: 121696 - DNA, 25 bp, Probe Sequence
ccgtggacgaccactttgccaaagc

SEQ ID NO: 121697 - DNA, 25 bp, Probe Sequence
caaatacacccctcattagttaagg

SEQ ID NO: 121698 - DNA, 25 bp, Probe Sequence
aattaaccccctgtggcacataagg

SEQ ID NO: 121699 - DNA, 25 bp, Probe Sequence
caaaaaacccttcagtcagcacgtg

SEQ ID NO: 121700 - DNA, 25 bp, Probe Sequence
aaaatagtccccataatacaagtat

SEQ ID NO: 121701 - DNA, 25 bp, Probe Sequence
aaatttaccccacaggaatggtgat

SEQ ID NO: 121702 - DNA, 25 bp, Probe Sequence
gaactcgaacccggacgaggtggtg

SEQ ID NO: 121703 - DNA, 25 bp, Probe Sequence
attcggaaaggggcacgggcatgtg

SEQ ID NO: 121704 - DNA, 25 bp, Probe Sequence
atatcgccaacgtggagcgggtgcc

SEQ ID NO: 121705 - DNA, 25 bp, Probe Sequence
agatcccaaaagcttggtaagccca

SEQ ID NO: 121706 - DNA, 25 bp, Probe Sequence
aacgaaaaggcctgcatgaaactta

SEQ ID NO: 121707 - DNA, 25 bp, Probe Sequence
aactacacggctcccgaaagtatgc

SEQ ID NO: 121708 - DNA, 25 bp, Probe Sequence
atagtacaacctcagggagtttggt

SEQ ID NO: 121709 - DNA, 25 bp, Probe Sequence
ctcgaagtaccaaaaagttgacagt

SEQ ID NO: 121710 - DNA, 25 bp, Probe Sequence
tttggaaatagtccccgttccagat

SEQ ID NO: 121711 - DNA, 25 bp, Probe Sequence
aggggaagattggcaaagtgcccgt

SEQ ID NO: 121712 - DNA, 25 bp, Probe Sequence
agcacgggagtacaaaggccaatgc

SEQ ID NO: 121713 - DNA, 25 bp, Probe Sequence
aggtgcgagttacaccaaccaggac

SEQ ID NO: 121714 - DNA, 25 bp, Probe Sequence
tggagggagtttcttaacccgtgag

SEQ ID NO: 121715 - DNA, 25 bp, Probe Sequence
ctcatggggccgtgggaacccaagg

SEQ ID NO: 121716 - DNA, 25 bp, Probe Sequence
cttagggcctggtggctaggtcggt

SEQ ID NO: 121717 - DNA, 25 bp, Probe Sequence
ataagcggcccgtgtttcaaagtct

SEQ ID NO: 121718 - DNA, 25 bp, Probe Sequence
aggacgtcccggctgggatgaagtc

SEQ ID NO: 121719 - DNA, 25 bp, Probe Sequence
agctacgagtcctcggcggaaatcc

SEQ ID NO: 121720 - DNA, 25 bp, Probe Sequence
attccgactgggagccggaggaacg

SEQ ID NO: 121721 - DNA, 25 bp, Probe Sequence
ttacccaaggtcacaaggccgaaca

SEQ ID NO: 121722 - DNA, 25 bp, Probe Sequence
ttactttagttcgctgtaggcccac

SEQ ID NO: 121723 - DNA, 25 bp, Probe Sequence
ggccatttaattcagggcccccaat

SEQ ID NO: 121724 - DNA, 25 bp, Probe Sequence
agcctttaaacgagacggcgcccag

SEQ ID NO: 121725 - DNA, 25 bp, Probe Sequence
ctttttttaggtgcagggcgcctcg

SEQ ID NO: 121726 - DNA, 25 bp, Probe Sequence
ctggaaacaatctcttggttcccta

SEQ ID NO: 121727 - DNA, 25 bp, Probe Sequence
aaggaggaatcctggttatccccag

SEQ ID NO: 121728 - DNA, 25 bp, Probe Sequence
atttttagacgatcttgtaccctca

SEQ ID NO: 121729 - DNA, 25 bp, Probe Sequence
attttaaatgccaccgaacctatcg

SEQ ID NO: 121730 - DNA, 25 bp, Probe Sequence
aaataaacgctcactccgaattagc

SEQ ID NO: 121731 - DNA, 25 bp, Probe Sequence
ccagtcaaaaacgcccggatctcag

SEQ ID NO: 121732 - DNA, 25 bp, Probe Sequence
gtagaagaaccctccataaacctgg

SEQ ID NO: 121733 - DNA, 25 bp, Probe Sequence
gtaaagaaacccacttgttcacagc

SEQ ID NO: 121734 - DNA, 25 bp, Probe Sequence
cttcccaaaaccactctgttacatt

SEQ ID NO: 121735 - DNA, 25 bp, Probe Sequence
ctgaccccaaaccttactggaatca

SEQ ID NO: 121736 - DNA, 25 bp, Probe Sequence
cgtaactactactaatcaacgccca

SEQ ID NO: 121737 - DNA, 25 bp, Probe Sequence
cttcccaacccttcaaattgctaag

SEQ ID NO: 121738 - DNA, 25 bp, Probe Sequence
ctaccgtaaccttagagcaaaaatg

SEQ ID NO: 121739 - DNA, 25 bp, Probe Sequence
ccccgtacagctgtctaagggttag

SEQ ID NO: 121740 - DNA, 25 bp, Probe Sequence
ccccggccctggctaagaagttgct

SEQ ID NO: 121741 - DNA, 25 bp, Probe Sequence
caagttcccgttgtatccagagttc

SEQ ID NO: 121742 - DNA, 25 bp, Probe Sequence
accttccaagttgttccatgggctc

SEQ ID NO: 121743 - DNA, 25 bp, Probe Sequence
accttccaagttgttccatgggctc

SEQ ID NO: 121744 - DNA, 25 bp, Probe Sequence
accaaccaaagtgtgtcaaccctgt

SEQ ID NO: 121745 - DNA, 25 bp, Probe Sequence
ccccccagggtcatggaggacccag

SEQ ID NO: 121746 - DNA, 25 bp, Probe Sequence
ccccgttaatggagcggggcgccag

SEQ ID NO: 121747 - DNA, 25 bp, Probe Sequence
agcatccgttgatggcaaccggtcc

SEQ ID NO: 121748 - DNA, 25 bp, Probe Sequence
atcgaccctgacgtaaccggttatg

SEQ ID NO: 121749 - DNA, 25 bp, Probe Sequence
acgacgaccggctcaacaaggttat

SEQ ID NO: 121750 - DNA, 25 bp, Probe Sequence
acgacgaccggctcaacaaggttat

SEQ ID NO: 121751 - DNA, 25 bp, Probe Sequence
aggttgacccacacaaactacatct

SEQ ID NO: 121752 - DNA, 25 bp, Probe Sequence
acggtgaccgagataacgtcctcct

SEQ ID NO: 121753 - DNA, 25 bp, Probe Sequence
aaaggagaaattcaccgccttctgc

SEQ ID NO: 121754 - DNA, 25 bp, Probe Sequence
ctaaagtcctacacaaggcctttgt

SEQ ID NO: 121755 - DNA, 25 bp, Probe Sequence
ttttccctatccacaggggtgtttg

SEQ ID NO: 121756 - DNA, 25 bp, Probe Sequence
ctttccctaccgtgtttgataaatg

SEQ ID NO: 121757 - DNA, 25 bp, Probe Sequence
ctttccctaccgtgtttgataaatg

SEQ ID NO: 121758 - DNA, 25 bp, Probe Sequence
ctaagtcaccacgcggttctggaaa

SEQ ID NO: 121759 - DNA, 25 bp, Probe Sequence
tagccttaggccgcgggacggataa

SEQ ID NO: 121760 - DNA, 25 bp, Probe Sequence
cctttgaccgagcgtccacggtaga

SEQ ID NO: 121761 - DNA, 25 bp, Probe Sequence
ccggaaccgacgagtcctgaggaga

SEQ ID NO: 121762 - DNA, 25 bp, Probe Sequence
cggaaaccaaccaaaccgtgcgctg

SEQ ID NO: 121763 - DNA, 25 bp, Probe Sequence
cggaatttcccgggattcgagtgtg

SEQ ID NO: 121764 - DNA, 25 bp, Probe Sequence
cgcggggattccaggagtcgtggtt

SEQ ID NO: 121765 - DNA, 25 bp, Probe Sequence
ctcggcgtactggttgtaggcgtag

SEQ ID NO: 121766 - DNA, 25 bp, Probe Sequence
aggcctacctcatcatgatcagtgc

SEQ ID NO: 121767 - DNA, 25 bp, Probe Sequence
aggcctacctcatcatgatcagtgc

SEQ ID NO: 121768 - DNA, 25 bp, Probe Sequence
ttagaaaccgaatatcagttccgaa

SEQ ID NO: 121769 - DNA, 25 bp, Probe Sequence
atacgagaacgccatgattgctgct

SEQ ID NO: 121770 - DNA, 25 bp, Probe Sequence
aacagggctggtattcctacccagg

SEQ ID NO: 121771 - DNA, 25 bp, Probe Sequence
aaaggggaactcatttagctcacga

SEQ ID NO: 121772 - DNA, 25 bp, Probe Sequence
taccggggaaccatggtccctagtg

SEQ ID NO: 121773 - DNA, 25 bp, Probe Sequence
atgcccggaatatctggggtccaag

SEQ ID NO: 121774 - DNA, 25 bp, Probe Sequence
accctggaaaacagacgggtctgag

SEQ ID NO: 121775 - DNA, 25 bp, Probe Sequence
accgggagagggtgaagggtctatg

SEQ ID NO: 121776 - DNA, 25 bp, Probe Sequence
aagggacaaaggtgaactgttccag

SEQ ID NO: 121777 - DNA, 25 bp, Probe Sequence
agaggggccactgaaaacttcccag

SEQ ID NO: 121778 - DNA, 25 bp, Probe Sequence
agaggggccactgaaaacttcccag

SEQ ID NO: 121779 - DNA, 25 bp, Probe Sequence
acacggtgaccgagataacgtcctc

SEQ ID NO: 121780 - DNA, 25 bp, Probe Sequence
atgacggaaactgactcaatatgtc

SEQ ID NO: 121781 - DNA, 25 bp, Probe Sequence
atactaccaaacagccatacatgtc

SEQ ID NO: 121782 - DNA, 25 bp, Probe Sequence
agctaaccctaagctagaggtcaaa

SEQ ID NO: 121783 - DNA, 25 bp, Probe Sequence
accaaattccctgctaaggctaaag

SEQ ID NO: 121784 - DNA, 25 bp, Probe Sequence
acctcccccagagctaacctgggag

SEQ ID NO: 121785 - DNA, 25 bp, Probe Sequence
cggtcgcctccatggtttggaagga

SEQ ID NO: 121786 - DNA, 25 bp, Probe Sequence
aggtccgtcctgagtattcggcaac

SEQ ID NO: 121787 - DNA, 25 bp, Probe Sequence
aggtccgtcctgagtattcggcaac

SEQ ID NO: 121788 - DNA, 25 bp, Probe Sequence
aggtttccagtcacttctcagtgaa

SEQ ID NO: 121789 - DNA, 25 bp, Probe Sequence
agggctcattaagccttttggacac

SEQ ID NO: 121790 - DNA, 25 bp, Probe Sequence
agggcttctgaagaccttaagactc

SEQ ID NO: 121791 - DNA, 25 bp, Probe Sequence
gagggtttggtctcattttaaacat

SEQ ID NO: 121792 - DNA, 25 bp, Probe Sequence
agttgtttggtatatttcctctagg

SEQ ID NO: 121793 - DNA, 25 bp, Probe Sequence
agtcacgttcgtcaagtccgttatc

SEQ ID NO: 121794 - DNA, 25 bp, Probe Sequence
atgtcaagttggtggaggccctttg

SEQ ID NO: 121795 - DNA, 25 bp, Probe Sequence
agtgcggatagttacggtgtcgttc

SEQ ID NO: 121796 - DNA, 25 bp, Probe Sequence
tcgtcgtatcggtgggtagtgttct

SEQ ID NO: 121797 - DNA, 25 bp, Probe Sequence
gttggtatgaaatgggaagtttctg

SEQ ID NO: 121798 - DNA, 25 bp, Probe Sequence
cttggccgactcagggacctaagcc

SEQ ID NO: 121799 - DNA, 25 bp, Probe Sequence
actttgggtactgcgacctcaacta

SEQ ID NO: 121800 - DNA, 25 bp, Probe Sequence
atttacttttttgaccacgagccat

SEQ ID NO: 121801 - DNA, 25 bp, Probe Sequence
attctggtttatataattcctggat

SEQ ID NO: 121802 - DNA, 25 bp, Probe Sequence
attggctgggtaaaaactggggcat

SEQ ID NO: 121803 - DNA, 25 bp, Probe Sequence
atttcagtttttgtgtcggggagag

SEQ ID NO: 121804 - DNA, 25 bp, Probe Sequence
acttaggtaattgtagggcgaggat

SEQ ID NO: 121805 - DNA, 25 bp, Probe Sequence
acttcgtggaacactaccgggagat

SEQ ID NO: 121806 - DNA, 25 bp, Probe Sequence
accgaggggaagttacaggcctgag

SEQ ID NO: 121807 - DNA, 25 bp, Probe Sequence
caggtactttaacccaagcggtgag

SEQ ID NO: 121808 - DNA, 25 bp, Probe Sequence
ccggattttaaatagcgtattgtat

SEQ ID NO: 121809 - DNA, 25 bp, Probe Sequence
ccgtccgttaacacctaatagtgat

SEQ ID NO: 121810 - DNA, 25 bp, Probe Sequence
cccaccttggtctcccaaaatgttg

SEQ ID NO: 121811 - DNA, 25 bp, Probe Sequence
acccctcgggaagcctgaaatgtct

SEQ ID NO: 121812 - DNA, 25 bp, Probe Sequence
acccctcggtgatctttgagacggg

SEQ ID NO: 121813 - DNA, 25 bp, Probe Sequence
accagcctaaggtgttcaggaaggc

SEQ ID NO: 121814 - DNA, 25 bp, Probe Sequence
ccgggccattggttgggttcaattg

SEQ ID NO: 121815 - DNA, 25 bp, Probe Sequence
ctccagtggaatgggtcttttcggt

SEQ ID NO: 121816 - DNA, 25 bp, Probe Sequence
cttcgtatcctgggtaccttcgaat

SEQ ID NO: 121817 - DNA, 25 bp, Probe Sequence
cttccatttttatgacctttcaact

SEQ ID NO: 121818 - DNA, 25 bp, Probe Sequence
tccaaaggtttctgcaggttttact

SEQ ID NO: 121819 - DNA, 25 bp, Probe Sequence
aaaaggccgtttcagtcttcaatct

SEQ ID NO: 121820 - DNA, 25 bp, Probe Sequence
aaacaggcccagattcaacttttct

SEQ ID NO: 121821 - DNA, 25 bp, Probe Sequence
aaggcaacccagggatccatttttg

SEQ ID NO: 121822 - DNA, 25 bp, Probe Sequence
agggggtcaagtagatgtttttctg

SEQ ID NO: 121823 - DNA, 25 bp, Probe Sequence
gtttgggcccgaagatgggttacag

SEQ ID NO: 121824 - DNA, 25 bp, Probe Sequence
ctttggcccctgcttaggattaggt

SEQ ID NO: 121825 - DNA, 25 bp, Probe Sequence
acctgttccccgatacgttgatggg

SEQ ID NO: 121826 - DNA, 25 bp, Probe Sequence
cacctttcccttctagttttgagag

SEQ ID NO: 121827 - DNA, 25 bp, Probe Sequence
ccacccctaaagctcagttttgaag

SEQ ID NO: 121828 - DNA, 25 bp, Probe Sequence
cttcccgtaaatctcaggcttctgg

SEQ ID NO: 121829 - DNA, 25 bp, Probe Sequence
ggtcgtggtacttttcaacgtggca

SEQ ID NO: 121830 - DNA, 25 bp, Probe Sequence
aggctgggtccttttaagcactggt

SEQ ID NO: 121831 - DNA, 25 bp, Probe Sequence
aggctttcgacgtgtaccttgacat

SEQ ID NO: 121832 - DNA, 25 bp, Probe Sequence
aggatttcgttatctcaccttgacc

SEQ ID NO: 121833 - DNA, 25 bp, Probe Sequence
aggtttggtttgatacctctgcctc

SEQ ID NO: 121834 - DNA, 25 bp, Probe Sequence
atggtttgggggcagactcttaagt

SEQ ID NO: 121835 - DNA, 25 bp, Probe Sequence
ctagacttgaggggctaccctggga

SEQ ID NO: 121836 - DNA, 25 bp, Probe Sequence
atcaacttaagggaagccggcatgt

SEQ ID NO: 121837 - DNA, 25 bp, Probe Sequence
gtcccattacgtgcgacggagtttc

SEQ ID NO: 121838 - DNA, 25 bp, Probe Sequence
accccgtaggcagacagagaccttt

SEQ ID NO: 121839 - DNA, 25 bp, Probe Sequence
acgacttggggagattaatgttatt

SEQ ID NO: 121840 - DNA, 25 bp, Probe Sequence
agagacctgtttgtaataatttctg

SEQ ID NO: 121841 - DNA, 25 bp, Probe Sequence
aagtgcctttttcttcaaattgctc

SEQ ID NO: 121842 - DNA, 25 bp, Probe Sequence
gggaggtttaggtttcataatcctg

SEQ ID NO: 121843 - DNA, 25 bp, Probe Sequence
aggagggttcctcttaggtcagatg

SEQ ID NO: 121844 - DNA, 25 bp, Probe Sequence
agaaaggggcgtctaagttctggct

SEQ ID NO: 121845 - DNA, 25 bp, Probe Sequence
atacctggagggcaacaatttcgtg

SEQ ID NO: 121846 - DNA, 25 bp, Probe Sequence
ttacgttggtggccaagtaacttgg

SEQ ID NO: 121847 - DNA, 25 bp, Probe Sequence
aaccccttggccaagtaagcttgtg

SEQ ID NO: 121848 - DNA, 25 bp, Probe Sequence
ataaatgcccgacaagtaagtaata

SEQ ID NO: 121849 - DNA, 25 bp, Probe Sequence
atataacccgcctgcagtggaaagt

SEQ ID NO: 121850 - DNA, 25 bp, Probe Sequence
ataaccccagtggaccttggcaaga

SEQ ID NO: 121851 - DNA, 25 bp, Probe Sequence
agaaagcaacttgagccttgggcta

SEQ ID NO: 121852 - DNA, 25 bp, Probe Sequence
gtaactactagtgtccttaggtcaa

SEQ ID NO: 121853 - DNA, 25 bp, Probe Sequence
atccaaattaaatccttagcagtca

SEQ ID NO: 121854 - DNA, 25 bp, Probe Sequence
attccagttaactcagcttgggttc

SEQ ID NO: 121855 - DNA, 25 bp, Probe Sequence
attgtgaaaacctcctttggcttat

SEQ ID NO: 121856 - DNA, 25 bp, Probe Sequence
cattctttaacctgttactcggtgt

SEQ ID NO: 121857 - DNA, 25 bp, Probe Sequence
attcttttaccctgtagtaatctga

SEQ ID NO: 121858 - DNA, 25 bp, Probe Sequence
actgtacttactgaaggagccccga

SEQ ID NO: 121859 - DNA, 25 bp, Probe Sequence
atttcaccaccataaaacccttgag

SEQ ID NO: 121860 - DNA, 25 bp, Probe Sequence
attccgcctgcacagataaaacccc

SEQ ID NO: 121861 - DNA, 25 bp, Probe Sequence
ataggtgcttggtgtacaaaacttt

SEQ ID NO: 121862 - DNA, 25 bp, Probe Sequence
agatggcccggtgtaggcgaacttc

SEQ ID NO: 121863 - DNA, 25 bp, Probe Sequence
agatggcccggtgtaggcgaacttc

SEQ ID NO: 121864 - DNA, 25 bp, Probe Sequence
agtcaccgggatgaacctatccttc

SEQ ID NO: 121865 - DNA, 25 bp, Probe Sequence
gtaccgccaagagaacctttgtcac

SEQ ID NO: 121866 - DNA, 25 bp, Probe Sequence
ccacacccgtggataacttagccgc

SEQ ID NO: 121867 - DNA, 25 bp, Probe Sequence
acccgggcaagaatgagacctacca

SEQ ID NO: 121868 - DNA, 25 bp, Probe Sequence
ataaccccaggaagtaccttcgcag

SEQ ID NO: 121869 - DNA, 25 bp, Probe Sequence
atagctaaaagacagtggccttcag

SEQ ID NO: 121870 - DNA, 25 bp, Probe Sequence
ttttagtagagacagggtttcacca

SEQ ID NO: 121871 - DNA, 25 bp, Probe Sequence
ttttagtagagacagggtttcacca

SEQ ID NO: 121872 - DNA, 25 bp, Probe Sequence
tttacctaggcgcgggacgaaacat

SEQ ID NO: 121873 - DNA, 25 bp, Probe Sequence
gcttttaagggcaggggcgtctaat

SEQ ID NO: 121874 - DNA, 25 bp, Probe Sequence
tttagtattaccaccccgtgtagca

SEQ ID NO: 121875 - DNA, 25 bp, Probe Sequence
ttgggttggaccaacccttggctcg

SEQ ID NO: 121876 - DNA, 25 bp, Probe Sequence
aggcctaggagcaaacttggggtcg

SEQ ID NO: 121877 - DNA, 25 bp, Probe Sequence
ttgggataggggtgttaaagctcga

SEQ ID NO: 121878 - DNA, 25 bp, Probe Sequence
tccggtttgctccagggtaaactag

SEQ ID NO: 121879 - DNA, 25 bp, Probe Sequence
cttcgaaggctctggggaggcccga

SEQ ID NO: 121880 - DNA, 25 bp, Probe Sequence
actcagtaggtctgaaggcctccat

SEQ ID NO: 121881 - DNA, 25 bp, Probe Sequence
accagaactgggcaaggccatactt

SEQ ID NO: 121882 - DNA, 25 bp, Probe Sequence
acaaagctctggataaggcccggtt

SEQ ID NO: 121883 - DNA, 25 bp, Probe Sequence
gtaaacacaagacagaccccaggtt

SEQ ID NO: 121884 - DNA, 25 bp, Probe Sequence
agattaacggtgctaaccccgtctg

SEQ ID NO: 121885 - DNA, 25 bp, Probe Sequence
agattaacggtgctaaccccgtctg

SEQ ID NO: 121886 - DNA, 25 bp, Probe Sequence
gcgttaacgaagttaccagagccct

SEQ ID NO: 121887 - DNA, 25 bp, Probe Sequence
cttttaaggttttcttgagagcctg

SEQ ID NO: 121888 - DNA, 25 bp, Probe Sequence
cgattcttggttcttcctaaacttg

SEQ ID NO: 121889 - DNA, 25 bp, Probe Sequence
catggaacgtttcactttaaccctg

SEQ ID NO: 121890 - DNA, 25 bp, Probe Sequence
atctaacgaaatcacaacgtaactc

SEQ ID NO: 121891 - DNA, 25 bp, Probe Sequence
gcgtgaacggggagccggtgaacgg

SEQ ID NO: 121892 - DNA, 25 bp, Probe Sequence
ccttccggggagtgcatcggtactt

SEQ ID NO: 121893 - DNA, 25 bp, Probe Sequence
ccccggtttggcagtgaaggaactg

SEQ ID NO: 121894 - DNA, 25 bp, Probe Sequence
acctccggtttgtggacaggcaaca

SEQ ID NO: 121895 - DNA, 25 bp, Probe Sequence
aacccagtttggattccccaatgca

SEQ ID NO: 121896 - DNA, 25 bp, Probe Sequence
aaccggcacggtctgatccggaaat

SEQ ID NO: 121897 - DNA, 25 bp, Probe Sequence
ataccgggaagacctgatggcggga

SEQ ID NO: 121898 - DNA, 25 bp, Probe Sequence
agtcggttgatcacctgagttggga

SEQ ID NO: 121899 - DNA, 25 bp, Probe Sequence
attccaaagccttcctattgggcga

SEQ ID NO: 121900 - DNA, 25 bp, Probe Sequence
atatccaaaactccccatggggaca

SEQ ID NO: 121901 - DNA, 25 bp, Probe Sequence
ataggttaaccggcctgtggtgtca

SEQ ID NO: 121902 - DNA, 25 bp, Probe Sequence
acagacttttccagggtggtccttg

SEQ ID NO: 121903 - DNA, 25 bp, Probe Sequence
acgttctgtcccacggaatctattt

SEQ ID NO: 121904 - DNA, 25 bp, Probe Sequence
cgggatcttaacatcaggaattctc

SEQ ID NO: 121905 - DNA, 25 bp, Probe Sequence
ttgggccttgaagagtaattgactg

SEQ ID NO: 121906 - DNA, 25 bp, Probe Sequence
tctgtaaccgaccgtgtaagggtgg

SEQ ID NO: 121907 - DNA, 25 bp, Probe Sequence
cgtaaccaaactcttcggactgtga

SEQ ID NO: 121908 - DNA, 25 bp, Probe Sequence
agtagaaaaccatatggggactata

SEQ ID NO: 121909 - DNA, 25 bp, Probe Sequence
cagggaagggaagagtgggttagag

SEQ ID NO: 121910 - DNA, 25 bp, Probe Sequence
cagggccggaaagaccgacggcacg

SEQ ID NO: 121911 - DNA, 25 bp, Probe Sequence
cttggacggaaacaggtgaaccctg

SEQ ID NO: 121912 - DNA, 25 bp, Probe Sequence
atggtagggggagagggacctgccg

SEQ ID NO: 121913 - DNA, 25 bp, Probe Sequence
acgtagtagaaagcggtatcctgat

SEQ ID NO: 121914 - DNA, 25 bp, Probe Sequence
acgctggggaaagcgggaagcgctc

SEQ ID NO: 121915 - DNA, 25 bp, Probe Sequence
atcctgccgaaatccggaccaactg

SEQ ID NO: 121916 - DNA, 25 bp, Probe Sequence
agtactccaaatcaaggaccaactt

SEQ ID NO: 121917 - DNA, 25 bp, Probe Sequence
aggatctctaaagcagtagccaaac

SEQ ID NO: 121918 - DNA, 25 bp, Probe Sequence
aggtttggcgacgtttccatcaacg

SEQ ID NO: 121919 - DNA, 25 bp, Probe Sequence
agggaggggaacattccatccccag

SEQ ID NO: 121920 - DNA, 25 bp, Probe Sequence
agttaggggtcacaggcctgacctg

SEQ ID NO: 121921 - DNA, 25 bp, Probe Sequence
ctttaggggctacagagtcgaggga

SEQ ID NO: 121922 - DNA, 25 bp, Probe Sequence
ctatggggtaccccaagtcggacag

SEQ ID NO: 121923 - DNA, 25 bp, Probe Sequence
cttgggaaagactggcttagctgaa

SEQ ID NO: 121924 - DNA, 25 bp, Probe Sequence
cgggccaaggtcagccttattgaaa

SEQ ID NO: 121925 - DNA, 25 bp, Probe Sequence
ctcggcccaggtctgagttttaaca

SEQ ID NO: 121926 - DNA, 25 bp, Probe Sequence
ctcaactcccctgtagtttaggaca

SEQ ID NO: 121927 - DNA, 25 bp, Probe Sequence
ataagccttcccgcaatgtttggac

SEQ ID NO: 121928 - DNA, 25 bp, Probe Sequence
ctatgacccctagcccattagggac

SEQ ID NO: 121929 - DNA, 25 bp, Probe Sequence
cttaccccaactatgaccgggacat

SEQ ID NO: 121930 - DNA, 25 bp, Probe Sequence
cgtagtccccagctaactagggaag

SEQ ID NO: 121931 - DNA, 25 bp, Probe Sequence
ctttgttacaagctcccaggggagg

SEQ ID NO: 121932 - DNA, 25 bp, Probe Sequence
cttgatggaaagcttaccgggaaag

SEQ ID NO: 121933 - DNA, 25 bp, Probe Sequence
atcctgcccactgtgtaccagggca

SEQ ID NO: 121934 - DNA, 25 bp, Probe Sequence
cttttctattccacaaaaccgccat

SEQ ID NO: 121935 - DNA, 25 bp, Probe Sequence
cgcttagtgtctctaaaaaccgaat

SEQ ID NO: 121936 - DNA, 25 bp, Probe Sequence
agtgtactttttcaacaagcacgac

SEQ ID NO: 121937 - DNA, 25 bp, Probe Sequence
aggtacttttgcagtgaggaagggc

SEQ ID NO: 121938 - DNA, 25 bp, Probe Sequence
aggatccttcctctgaacgaagtaa

SEQ ID NO: 121939 - DNA, 25 bp, Probe Sequence
aggacaggtccaataaacgccctct

SEQ ID NO: 121940 - DNA, 25 bp, Probe Sequence
aggacaggtccaataaacgccctct

SEQ ID NO: 121941 - DNA, 25 bp, Probe Sequence
aggacaggtccaataaacgccctct

SEQ ID NO: 121942 - DNA, 25 bp, Probe Sequence
gttacgttcaatcagaatccccgaa

SEQ ID NO: 121943 - DNA, 25 bp, Probe Sequence
cttacaccttcgcagaacccacttc

SEQ ID NO: 121944 - DNA, 25 bp, Probe Sequence
cctggaagtttcagaacccactttg

SEQ ID NO: 121945 - DNA, 25 bp, Probe Sequence
ctaggcaactagaaggaagccatgc

SEQ ID NO: 121946 - DNA, 25 bp, Probe Sequence
gtaggaaggaagcgtagccggatta

SEQ ID NO: 121947 - DNA, 25 bp, Probe Sequence
gttcgaaggtaccaataaacttgct

SEQ ID NO: 121948 - DNA, 25 bp, Probe Sequence
atcttagggtcagaattgccctttt

SEQ ID NO: 121949 - DNA, 25 bp, Probe Sequence
atcgaacggactgtgaatccgctct

SEQ ID NO: 121950 - DNA, 25 bp, Probe Sequence
aggttactgaagagcaatagccact

SEQ ID NO: 121951 - DNA, 25 bp, Probe Sequence
ataactaagacacaaataacctttg

SEQ ID NO: 121952 - DNA, 25 bp, Probe Sequence
ataactaagacacaaataacctttg

SEQ ID NO: 121953 - DNA, 25 bp, Probe Sequence
atgaacgtggagattggaaacccca

SEQ ID NO: 121954 - DNA, 25 bp, Probe Sequence
atgggggacgtcagagaaacggcgt

SEQ ID NO: 121955 - DNA, 25 bp, Probe Sequence
aaatggaaaaggaagcacaacggct

SEQ ID NO: 121956 - DNA, 25 bp, Probe Sequence
aggaggaaaagtctggcctcggcgc

SEQ ID NO: 121957 - DNA, 25 bp, Probe Sequence
aatagaaggggtctggcccgggcat

SEQ ID NO: 121958 - DNA, 25 bp, Probe Sequence
aaaggaggtagtcaggccgtccaga

SEQ ID NO: 121959 - DNA, 25 bp, Probe Sequence
ataaggtgggaggttggccgggcag

SEQ ID NO: 121960 - DNA, 25 bp, Probe Sequence
ataaggtggagggcttccccaccat

SEQ ID NO: 121961 - DNA, 25 bp, Probe Sequence
ataaggtggagggcttccccaccat

SEQ ID NO: 121962 - DNA, 25 bp, Probe Sequence
ataaaaagcacgctacccaaccttg

SEQ ID NO: 121963 - DNA, 25 bp, Probe Sequence
actaacaaacggagtactgagtctt

SEQ ID NO: 121964 - DNA, 25 bp, Probe Sequence
attaaaacaaggagcttttgtccag

SEQ ID NO: 121965 - DNA, 25 bp, Probe Sequence
attaatcaacgggttgttcctctct

SEQ ID NO: 121966 - DNA, 25 bp, Probe Sequence
ataggaacaggtagactttcaacta

SEQ ID NO: 121967 - DNA, 25 bp, Probe Sequence
atcaggataaggtgtcaaaaagtgg

SEQ ID NO: 121968 - DNA, 25 bp, Probe Sequence
ctcggcccaggtttaaataaggcag

SEQ ID NO: 121969 - DNA, 25 bp, Probe Sequence
agcggaccggtggttcaaaagtgca

SEQ ID NO: 121970 - DNA, 25 bp, Probe Sequence
atccgtacagagagttccagtaaaa

SEQ ID NO: 121971 - DNA, 25 bp, Probe Sequence
accctagggatgattctttacccag

SEQ ID NO: 121972 - DNA, 25 bp, Probe Sequence
atacccaagtacattctaattacca

SEQ ID NO: 121973 - DNA, 25 bp, Probe Sequence
atcaaaagttatcttccgttcccat

SEQ ID NO: 121974 - DNA, 25 bp, Probe Sequence
acaggaaggtgtgcgtaggttacgt

SEQ ID NO: 121975 - DNA, 25 bp, Probe Sequence
atcagggacgtcgtttacttccagg

SEQ ID NO: 121976 - DNA, 25 bp, Probe Sequence
tacgactacgggagctactccggga

SEQ ID NO: 121977 - DNA, 25 bp, Probe Sequence
tacgactacgggagctactccggga

SEQ ID NO: 121978 - DNA, 25 bp, Probe Sequence
atggttactcggtgaccgacgcggt

SEQ ID NO: 121979 - DNA, 25 bp, Probe Sequence
caatgcattttgggacccctacagc

SEQ ID NO: 121980 - DNA, 25 bp, Probe Sequence
atatgtgttacagacctcggttctc

SEQ ID NO: 121981 - DNA, 25 bp, Probe Sequence
attggagcctaattgttaggtagcc

SEQ ID NO: 121982 - DNA, 25 bp, Probe Sequence
attgtcgcctggtggcattggtgtg

SEQ ID NO: 121983 - DNA, 25 bp, Probe Sequence
atcgaccggaagcgcacgggggatg

SEQ ID NO: 121984 - DNA, 25 bp, Probe Sequence
atgtaccgggagcgcgggggtgagc

SEQ ID NO: 121985 - DNA, 25 bp, Probe Sequence
cttacccgttgttaggggcgcagcg

SEQ ID NO: 121986 - DNA, 25 bp, Probe Sequence
gttacttgctttgagttggaatcgg

SEQ ID NO: 121987 - DNA, 25 bp, Probe Sequence
cttaccgtcctctaggtaactcaag

SEQ ID NO: 121988 - DNA, 25 bp, Probe Sequence
ctttgccgtcggcgagtacaacaaa

SEQ ID NO: 121989 - DNA, 25 bp, Probe Sequence
ctgttttgccgggtcagaaaaaatg

SEQ ID NO: 121990 - DNA, 25 bp, Probe Sequence
attctttgcagctaattaagccgaa

SEQ ID NO: 121991 - DNA, 25 bp, Probe Sequence
aggccttgccagaactaccactggc

SEQ ID NO: 121992 - DNA, 25 bp, Probe Sequence
actcctagtttagacaactggtaag

SEQ ID NO: 121993 - DNA, 25 bp, Probe Sequence
aggcccagttaatataagtggaatc

SEQ ID NO: 121994 - DNA, 25 bp, Probe Sequence
agcccctggtaaccattattctact

SEQ ID NO: 121995 - DNA, 25 bp, Probe Sequence
aggcctccgtaagatgcttgacaat

SEQ ID NO: 121996 - DNA, 25 bp, Probe Sequence
atagttccgggagaattggccattg

SEQ ID NO: 121997 - DNA, 25 bp, Probe Sequence
cacgttggagggacccttggccagt

SEQ ID NO: 121998 - DNA, 25 bp, Probe Sequence
atctgtggaaagctaggcttcccag

SEQ ID NO: 121999 - DNA, 25 bp, Probe Sequence
attgacgaacacgtgacgcggtcgg

SEQ ID NO: 122000 - DNA, 25 bp, Probe Sequence
attgtagtcaacggtcagcttgttg

SEQ ID NO: 122001 - DNA, 25 bp, Probe Sequence
attgccctcaacgaccactttgtca

SEQ ID NO: 122002 - DNA, 25 bp, Probe Sequence
accctcgtagatgccctttgtagga

SEQ ID NO: 122003 - DNA, 25 bp, Probe Sequence
agcccttcaggagctccttagtaaa

SEQ ID NO: 122004 - DNA, 25 bp, Probe Sequence
gccctttagggcacaactagttatc

SEQ ID NO: 122005 - DNA, 25 bp, Probe Sequence
gccctttagggcacaactagttatc

SEQ ID NO: 122006 - DNA, 25 bp, Probe Sequence
ccccaatttcccagactagatttca

SEQ ID NO: 122007 - DNA, 25 bp, Probe Sequence
ccaaaactggaacacctagctaaca

SEQ ID NO: 122008 - DNA, 25 bp, Probe Sequence
caagaagtcggatcgttcggtaaat

SEQ ID NO: 122009 - DNA, 25 bp, Probe Sequence
aggcacagggggtggtctttaccat

SEQ ID NO: 122010 - DNA, 25 bp, Probe Sequence
ggccaaggggtatgttaaaacactg

SEQ ID NO: 122011 - DNA, 25 bp, Probe Sequence
gactaagcccggtagttaaagatcg

SEQ ID NO: 122012 - DNA, 25 bp, Probe Sequence
attcatagcccaacaaggtaattat

SEQ ID NO: 122013 - DNA, 25 bp, Probe Sequence
agtcagaggacccaaggtcaccctg

SEQ ID NO: 122014 - DNA, 25 bp, Probe Sequence
aatcgataaaccccgatcaacctca

SEQ ID NO: 122015 - DNA, 25 bp, Probe Sequence
agcccatatagatcgttacaaccga

SEQ ID NO: 122016 - DNA, 25 bp, Probe Sequence
attccaagagctgcgttaaattcca

SEQ ID NO: 122017 - DNA, 25 bp, Probe Sequence
attgctgtacattgcgtttttaacc

SEQ ID NO: 122018 - DNA, 25 bp, Probe Sequence
atcagctttgcctttaattaaacca

SEQ ID NO: 122019 - DNA, 25 bp, Probe Sequence
attaccccattacataaataccatt

SEQ ID NO: 122020 - DNA, 25 bp, Probe Sequence
attactttctctgaaggaagcccat

SEQ ID NO: 122021 - DNA, 25 bp, Probe Sequence
atacactgttctccaaaggtacctt

SEQ ID NO: 122022 - DNA, 25 bp, Probe Sequence
aggctatgaatcccaaaggccacat

SEQ ID NO: 122023 - DNA, 25 bp, Probe Sequence
agagctacagacacaaagaccaata

SEQ ID NO: 122024 - DNA, 25 bp, Probe Sequence
agagctacagacacaaagaccaata

SEQ ID NO: 122025 - DNA, 25 bp, Probe Sequence
agtctaagagtccatgccagaccct

SEQ ID NO: 122026 - DNA, 25 bp, Probe Sequence
aggaaacatttcccaacgtgtatga

SEQ ID NO: 122027 - DNA, 25 bp, Probe Sequence
ataaaaaactcacaggtgtttgagg

SEQ ID NO: 122028 - DNA, 25 bp, Probe Sequence
attcaatagaaatcaaggtgttcaa

SEQ ID NO: 122029 - DNA, 25 bp, Probe Sequence
gttaactaagaatgggcgtccaaat

SEQ ID NO: 122030 - DNA, 25 bp, Probe Sequence
gtctaagtacgcacggccggtacag

SEQ ID NO: 122031 - DNA, 25 bp, Probe Sequence
tgttaagtcaaatccaacggcccgg

SEQ ID NO: 122032 - DNA, 25 bp, Probe Sequence
gttgtccctaaagatggggcccaga

SEQ ID NO: 122033 - DNA, 25 bp, Probe Sequence
gttaccctaaggtggagcctaagag

SEQ ID NO: 122034 - DNA, 25 bp, Probe Sequence
gtttcggttcggaggtgccataaag

SEQ ID NO: 122035 - DNA, 25 bp, Probe Sequence
atttgggtaggttaagctgccatac

SEQ ID NO: 122036 - DNA, 25 bp, Probe Sequence
attcattgtctacctgctaagtcaa

SEQ ID NO: 122037 - DNA, 25 bp, Probe Sequence
attcattgtctacctgctaagtcaa

SEQ ID NO: 122038 - DNA, 25 bp, Probe Sequence
atttgtttagactgaaggaagacgt

SEQ ID NO: 122039 - DNA, 25 bp, Probe Sequence
tttttcggggcaccaagtaagacag

SEQ ID NO: 122040 - DNA, 25 bp, Probe Sequence
tatttaagtggagcccctacgtaga

SEQ ID NO: 122041 - DNA, 25 bp, Probe Sequence
atagcaaaggcatggaaccaacgta

SEQ ID NO: 122042 - DNA, 25 bp, Probe Sequence
atagcaaagcggatggttaccaaat

SEQ ID NO: 122043 - DNA, 25 bp, Probe Sequence
agctggaccgtgaggccaacctcac

SEQ ID NO: 122044 - DNA, 25 bp, Probe Sequence
agcgcgaccctgatgaactaagatt

SEQ ID NO: 122045 - DNA, 25 bp, Probe Sequence
accagacgtctcctaagacagagtt

SEQ ID NO: 122046 - DNA, 25 bp, Probe Sequence
acccaagtctttcaacggatccttg

SEQ ID NO: 122047 - DNA, 25 bp, Probe Sequence
agctaaacttttcaactgcaatttt

SEQ ID NO: 122048 - DNA, 25 bp, Probe Sequence
agctaagactgggtcctttggagtt

SEQ ID NO: 122049 - DNA, 25 bp, Probe Sequence
ccgtaactggaatcttcataggtca

SEQ ID NO: 122050 - DNA, 25 bp, Probe Sequence
cttgttactcaggaacctcaccttg

SEQ ID NO: 122051 - DNA, 25 bp, Probe Sequence
cttattactaactcttacgccaact

SEQ ID NO: 122052 - DNA, 25 bp, Probe Sequence
cttcctaaataagatccacccacac

SEQ ID NO: 122053 - DNA, 25 bp, Probe Sequence
attcatatcgaagaggacccctaga

SEQ ID NO: 122054 - DNA, 25 bp, Probe Sequence
attatgtcaaccaggtccagatgtg

SEQ ID NO: 122055 - DNA, 25 bp, Probe Sequence
attttctcaatatgttaacttggaa

SEQ ID NO: 122056 - DNA, 25 bp, Probe Sequence
attgtactaacatcttaattttgtt

SEQ ID NO: 122057 - DNA, 25 bp, Probe Sequence
attttcttacctctcagttgttgaa

SEQ ID NO: 122058 - DNA, 25 bp, Probe Sequence
ttttacagttccagggattgtgaaa

SEQ ID NO: 122059 - DNA, 25 bp, Probe Sequence
agtgttccttagactccgttatgga

SEQ ID NO: 122060 - DNA, 25 bp, Probe Sequence
attattccatggtactccagttaca

SEQ ID NO: 122061 - DNA, 25 bp, Probe Sequence
attacaccacggattccttaagtga

SEQ ID NO: 122062 - DNA, 25 bp, Probe Sequence
gttaaggaccgaagtgtttcaagtg

SEQ ID NO: 122063 - DNA, 25 bp, Probe Sequence
cctaaggatcccacgacaccaaggg

SEQ ID NO: 122064 - DNA, 25 bp, Probe Sequence
gcctataggtttctccatacgtagt

SEQ ID NO: 122065 - DNA, 25 bp, Probe Sequence
acatacggttctgttataccccata

SEQ ID NO: 122066 - DNA, 25 bp, Probe Sequence
accagtttttggcttactcctgaga

SEQ ID NO: 122067 - DNA, 25 bp, Probe Sequence
actaggtttgggattaacagagcaa

SEQ ID NO: 122068 - DNA, 25 bp, Probe Sequence
cactagaagcccagactttacgact

SEQ ID NO: 122069 - DNA, 25 bp, Probe Sequence
atctacaccacccaaagttaggcct

SEQ ID NO: 122070 - DNA, 25 bp, Probe Sequence
attaaaacggactcatctctggccc

SEQ ID NO: 122071 - DNA, 25 bp, Probe Sequence
aggaaagtggaagtcgacctcccag

SEQ ID NO: 122072 - DNA, 25 bp, Probe Sequence
aggtacaaggaagcacaacgcccca

SEQ ID NO: 122073 - DNA, 25 bp, Probe Sequence
atttacaggcgtgagccaactgcgc

SEQ ID NO: 122074 - DNA, 25 bp, Probe Sequence
ataccaatgcggaaaccaaggccca

SEQ ID NO: 122075 - DNA, 25 bp, Probe Sequence
atagaccacggggaactgaggctca

SEQ ID NO: 122076 - DNA, 25 bp, Probe Sequence
attgaccttggggacccggatgcag

SEQ ID NO: 122077 - DNA, 25 bp, Probe Sequence
atgtgaccgatatgttcccggacct

SEQ ID NO: 122078 - DNA, 25 bp, Probe Sequence
atccttaagtggaccccacagactc

SEQ ID NO: 122079 - DNA, 25 bp, Probe Sequence
attattggggaatcacttgcacctc

SEQ ID NO: 122080 - DNA, 25 bp, Probe Sequence
atctttggggtacccatgtcaccac

SEQ ID NO: 122081 - DNA, 25 bp, Probe Sequence
attggaaggccttcggcctaccatc

SEQ ID NO: 122082 - DNA, 25 bp, Probe Sequence
gttagacttgccacgttgggtcagt

SEQ ID NO: 122083 - DNA, 25 bp, Probe Sequence
cttaaatctttctgagttggtagta

SEQ ID NO: 122084 - DNA, 25 bp, Probe Sequence
cttgaagtggttgtgttgtagggtt

SEQ ID NO: 122085 - DNA, 25 bp, Probe Sequence
tctaaaccttacatgtgtaaaggtt

SEQ ID NO: 122086 - DNA, 25 bp, Probe Sequence
caagtcccgttctgttagtaggtct

SEQ ID NO: 122087 - DNA, 25 bp, Probe Sequence
ataggccataggacttttggtaggt

SEQ ID NO: 122088 - DNA, 25 bp, Probe Sequence
atagtgcaacctatttgggtaaaga

SEQ ID NO: 122089 - DNA, 25 bp, Probe Sequence
cagtaaggctctctaaggggtaagt

SEQ ID NO: 122090 - DNA, 25 bp, Probe Sequence
ctgctacggtaccttgggcggtaag

SEQ ID NO: 122091 - DNA, 25 bp, Probe Sequence
ccgaaggttcctgagagctatgtag

SEQ ID NO: 122092 - DNA, 25 bp, Probe Sequence
attaggaggtcctcgtgctcgtaga

SEQ ID NO: 122093 - DNA, 25 bp, Probe Sequence
atctacgacaatgttctggtcccaa

SEQ ID NO: 122094 - DNA, 25 bp, Probe Sequence
gccaaccagactctggctctacgac

SEQ ID NO: 122095 - DNA, 25 bp, Probe Sequence
ccaagaagtttgcgccctcataagc

SEQ ID NO: 122096 - DNA, 25 bp, Probe Sequence
attagtcgtattctgctactcgaac

SEQ ID NO: 122097 - DNA, 25 bp, Probe Sequence
atgggacgaaagcttggctccaaag

SEQ ID NO: 122098 - DNA, 25 bp, Probe Sequence
agggtgacttaccttgtcaccaagg

SEQ ID NO: 122099 - DNA, 25 bp, Probe Sequence
atcggtacttgagcaatgcctacgc

SEQ ID NO: 122100 - DNA, 25 bp, Probe Sequence
atcgtaacctggtgccttaccaagt

SEQ ID NO: 122101 - DNA, 25 bp, Probe Sequence
attggaacttggtgccaacccatga

SEQ ID NO: 122102 - DNA, 25 bp, Probe Sequence
tattggttggggtgttacccaggct

SEQ ID NO: 122103 - DNA, 25 bp, Probe Sequence
actgggtggggtgaggaccactcct

SEQ ID NO: 122104 - DNA, 25 bp, Probe Sequence
attgggaatgggtgggtgccctcca

SEQ ID NO: 122105 - DNA, 25 bp, Probe Sequence
attgggaatgggtgggtgccctcca

SEQ ID NO: 122106 - DNA, 25 bp, Probe Sequence
atagggaagtgcacgtgggccctcg

SEQ ID NO: 122107 - DNA, 25 bp, Probe Sequence
atagggggagactgggcgatctgga

SEQ ID NO: 122108 - DNA, 25 bp, Probe Sequence
agtaccggagacaggtgcagtccct

SEQ ID NO: 122109 - DNA, 25 bp, Probe Sequence
attaggggagagaggtaacagcagc

SEQ ID NO: 122110 - DNA, 25 bp, Probe Sequence
attgtcgggaacacctaatagaaag

SEQ ID NO: 122111 - DNA, 25 bp, Probe Sequence
atttctgggacaggtcctagtccgg

SEQ ID NO: 122112 - DNA, 25 bp, Probe Sequence
atttactatacagacccagacttgg

SEQ ID NO: 122113 - DNA, 25 bp, Probe Sequence
agctaaaagagcacacccgtctatg

SEQ ID NO: 122114 - DNA, 25 bp, Probe Sequence
gattacaaaggagacgcaaccgtgt

SEQ ID NO: 122115 - DNA, 25 bp, Probe Sequence
attcccaagtcagtacgtccaaatg

SEQ ID NO: 122116 - DNA, 25 bp, Probe Sequence
atcctcaaaatcctagccaagtacg

SEQ ID NO: 122117 - DNA, 25 bp, Probe Sequence
agttccaggtggtcaagcacgtacg

SEQ ID NO: 122118 - DNA, 25 bp, Probe Sequence
atttacatttaatagacttacaggg

SEQ ID NO: 122119 - DNA, 25 bp, Probe Sequence
attaatttcggttatagcttactga

SEQ ID NO: 122120 - DNA, 25 bp, Probe Sequence
atttacttccggtttcttcatattg

SEQ ID NO: 122121 - DNA, 25 bp, Probe Sequence
atttgggtgggcttttacatcttgc

SEQ ID NO: 122122 - DNA, 25 bp, Probe Sequence
attgtgggattgctagctttccctc

SEQ ID NO: 122123 - DNA, 25 bp, Probe Sequence
ataggggcttgatagctgtggtccc

SEQ ID NO: 122124 - DNA, 25 bp, Probe Sequence
atagggaacaggtgctgatgggccc

SEQ ID NO: 122125 - DNA, 25 bp, Probe Sequence
atagcgataatctgaaccatgcggt

SEQ ID NO: 122126 - DNA, 25 bp, Probe Sequence
ataggagccatgtaagcacgcagtg

SEQ ID NO: 122127 - DNA, 25 bp, Probe Sequence
attggaccagtattcagagcggaag

SEQ ID NO: 122128 - DNA, 25 bp, Probe Sequence
cttcgacctttataccagaggggct

SEQ ID NO: 122129 - DNA, 25 bp, Probe Sequence
cctaaccctgaatattgggaaggca

SEQ ID NO: 122130 - DNA, 25 bp, Probe Sequence
gcctaaacttcctcttagataccca

SEQ ID NO: 122131 - DNA, 25 bp, Probe Sequence
ctcttaccgtcctctaggtaactca

SEQ ID NO: 122132 - DNA, 25 bp, Probe Sequence
gtttaagacttagctaggtttccat

SEQ ID NO: 122133 - DNA, 25 bp, Probe Sequence
ttttaagcccactctagtttttgtg

SEQ ID NO: 122134 - DNA, 25 bp, Probe Sequence
tttggggtccaatctttttggattg

SEQ ID NO: 122135 - DNA, 25 bp, Probe Sequence
atgggacacccaacactttttccat

SEQ ID NO: 122136 - DNA, 25 bp, Probe Sequence
atgggaaccttatctgaatgttttt

SEQ ID NO: 122137 - DNA, 25 bp, Probe Sequence
aggggaggttagtgcaccttcgtat

SEQ ID NO: 122138 - DNA, 25 bp, Probe Sequence
attgtggggtatatcccctatcttc

SEQ ID NO: 122139 - DNA, 25 bp, Probe Sequence
cttgtaggggccatagaccatacat

SEQ ID NO: 122140 - DNA, 25 bp, Probe Sequence
atgctggatcaggtaaagggcccct

SEQ ID NO: 122141 - DNA, 25 bp, Probe Sequence
attggtacttactgtagctacacat

SEQ ID NO: 122142 - DNA, 25 bp, Probe Sequence
attggggctaagtggactattgacc

SEQ ID NO: 122143 - DNA, 25 bp, Probe Sequence
attgcgggccttcaagttattgggc

SEQ ID NO: 122144 - DNA, 25 bp, Probe Sequence
agcacccgccaacagaattcatacg

SEQ ID NO: 122145 - DNA, 25 bp, Probe Sequence
agcccaatcctatatgtttatgggc

SEQ ID NO: 122146 - DNA, 25 bp, Probe Sequence
cggccaatccacgctggtttgtgga

SEQ ID NO: 122147 - DNA, 25 bp, Probe Sequence
cgcctaaccaatgtggccgtggtac

SEQ ID NO: 122148 - DNA, 25 bp, Probe Sequence
cgttaaccatagtccgtcggtatat

SEQ ID NO: 122149 - DNA, 25 bp, Probe Sequence
agttaagcttactgcccaggtgact

SEQ ID NO: 122150 - DNA, 25 bp, Probe Sequence
aggtaaggaaccggtgaggtgcgat

SEQ ID NO: 122151 - DNA, 25 bp, Probe Sequence
atcggaatcggtcgggtcagtgtcg

SEQ ID NO: 122152 - DNA, 25 bp, Probe Sequence
atgttgaattggggtggatgggggg

SEQ ID NO: 122153 - DNA, 25 bp, Probe Sequence
gttgggtgtggtgagggaggggaca

SEQ ID NO: 122154 - DNA, 25 bp, Probe Sequence
attgggggagtcatggtcaggggtg

SEQ ID NO: 122155 - DNA, 25 bp, Probe Sequence
atcggggactacaatggccacgtcg

SEQ ID NO: 122156 - DNA, 25 bp, Probe Sequence
atcggggactacaatggccacgtcg

SEQ ID NO: 122157 - DNA, 25 bp, Probe Sequence
gttggggtctacacggaggttgtgt

SEQ ID NO: 122158 - DNA, 25 bp, Probe Sequence
attagggtgccagccaggttgggtt

SEQ ID NO: 122159 - DNA, 25 bp, Probe Sequence
attgaggggcaactccagaagtgga

SEQ ID NO: 122160 - DNA, 25 bp, Probe Sequence
attgggtagggcgggaagatggaag

SEQ ID NO: 122161 - DNA, 25 bp, Probe Sequence
attgcaggaaaggccgagggggacg

SEQ ID NO: 122162 - DNA, 25 bp, Probe Sequence
attgcaggaaaggccgagggggacg

SEQ ID NO: 122163 - DNA, 25 bp, Probe Sequence
attgagatggggggcgggaggtgac

SEQ ID NO: 122164 - DNA, 25 bp, Probe Sequence
atagtgtggagtgaggcgggggagc

SEQ ID NO: 122165 - DNA, 25 bp, Probe Sequence
atagttggatttatctacgggtacg

SEQ ID NO: 122166 - DNA, 25 bp, Probe Sequence
aggttagattctcattcacgggact

SEQ ID NO: 122167 - DNA, 25 bp, Probe Sequence
attctatcagttgaattccctggat

SEQ ID NO: 122168 - DNA, 25 bp, Probe Sequence
attctatcagttgaattccctggat

SEQ ID NO: 122169 - DNA, 25 bp, Probe Sequence
attcatactggtgaacaacccgtaa

SEQ ID NO: 122170 - DNA, 25 bp, Probe Sequence
atacaagggcccacaaccaggccca

SEQ ID NO: 122171 - DNA, 25 bp, Probe Sequence
gtaggaacctccagtacatgggccc

SEQ ID NO: 122172 - DNA, 25 bp, Probe Sequence
cataagtaccggagcctaggcgacc

SEQ ID NO: 122173 - DNA, 25 bp, Probe Sequence
ataagtactgggctgttcagggaca

SEQ ID NO: 122174 - DNA, 25 bp, Probe Sequence
aaagcattcatggacggccggtaac

SEQ ID NO: 122175 - DNA, 25 bp, Probe Sequence
atagaatttgagccccctagtagtc

SEQ ID NO: 122176 - DNA, 25 bp, Probe Sequence
attaacttatgtggactgtaaatgt

SEQ ID NO: 122177 - DNA, 25 bp, Probe Sequence
attaaagttgcccctgtaatacata

SEQ ID NO: 122178 - DNA, 25 bp, Probe Sequence
atcctaaggctgtccacgtacttaa

SEQ ID NO: 122179 - DNA, 25 bp, Probe Sequence
atcctaaaataagcttcatctccgg

SEQ ID NO: 122180 - DNA, 25 bp, Probe Sequence
attggtaaacattggcttgcctccc

SEQ ID NO: 122181 - DNA, 25 bp, Probe Sequence
attggctaaccagccaagatccccg

SEQ ID NO: 122182 - DNA, 25 bp, Probe Sequence
attgttacaaaccataaatcccaca

SEQ ID NO: 122183 - DNA, 25 bp, Probe Sequence
attgtgtagaatttctagatccccc

SEQ ID NO: 122184 - DNA, 25 bp, Probe Sequence
attgacattaatacctaatcggcga

SEQ ID NO: 122185 - DNA, 25 bp, Probe Sequence
attacgatgcctggagcttacggaa

SEQ ID NO: 122186 - DNA, 25 bp, Probe Sequence
attactggtccgactggtacgacag

SEQ ID NO: 122187 - DNA, 25 bp, Probe Sequence
attgtagggacgccggtatccacgg

SEQ ID NO: 122188 - DNA, 25 bp, Probe Sequence
atcagtggtggaagaccggtctcag

SEQ ID NO: 122189 - DNA, 25 bp, Probe Sequence
atcagtggttgtctccataagtcat

SEQ ID NO: 122190 - DNA, 25 bp, Probe Sequence
atagggcctctgcctctaaaatggt

SEQ ID NO: 122191 - DNA, 25 bp, Probe Sequence
ctcggccatgtcatggtaaacggtc

SEQ ID NO: 122192 - DNA, 25 bp, Probe Sequence
atcggccggttggaagtgacgacct

SEQ ID NO: 122193 - DNA, 25 bp, Probe Sequence
ataggcggtcctgagagcgaacctc

SEQ ID NO: 122194 - DNA, 25 bp, Probe Sequence
atggggggctggaacacgtaccatc

SEQ ID NO: 122195 - DNA, 25 bp, Probe Sequence
aggtattgattgctaccctgaccac

SEQ ID NO: 122196 - DNA, 25 bp, Probe Sequence
aaatattgaagtctcccaaccgtct

SEQ ID NO: 122197 - DNA, 25 bp, Probe Sequence
caactaaggggcaccaaaccctctg

SEQ ID NO: 122198 - DNA, 25 bp, Probe Sequence
ctcgtaaggaacactctgacccact

SEQ ID NO: 122199 - DNA, 25 bp, Probe Sequence
ccctaagggttacgccatgcccttg

SEQ ID NO: 122200 - DNA, 25 bp, Probe Sequence
ctccgaagggaatgaactcctcgtc

SEQ ID NO: 122201 - DNA, 25 bp, Probe Sequence
ctcccaagggagagctatggtttac

SEQ ID NO: 122202 - DNA, 25 bp, Probe Sequence
atcccaaatcggtgtaccttgggcg

SEQ ID NO: 122203 - DNA, 25 bp, Probe Sequence
atcttcaagacgatggtacccagac

SEQ ID NO: 122204 - DNA, 25 bp, Probe Sequence
atcttcatgaagggcgcgacccgcg

SEQ ID NO: 122205 - DNA, 25 bp, Probe Sequence
attgtcatatacccggttcagcctg

SEQ ID NO: 122206 - DNA, 25 bp, Probe Sequence
gcttttggactatggtttcggttcg

SEQ ID NO: 122207 - DNA, 25 bp, Probe Sequence
gtttttacattctgtccggagtttg

SEQ ID NO: 122208 - DNA, 25 bp, Probe Sequence
aactgtaagtcctgtttggttgttg

SEQ ID NO: 122209 - DNA, 25 bp, Probe Sequence
acttccacggcctgaggtggtttct

SEQ ID NO: 122210 - DNA, 25 bp, Probe Sequence
atttccacttggtgtttggttcctg

SEQ ID NO: 122211 - DNA, 25 bp, Probe Sequence
attgaccaaatacagttcggttact

SEQ ID NO: 122212 - DNA, 25 bp, Probe Sequence
attgtccggtttgtcttggatatat

SEQ ID NO: 122213 - DNA, 25 bp, Probe Sequence
attccaagccttattttgagtaaat

SEQ ID NO: 122214 - DNA, 25 bp, Probe Sequence
agcaactaccttgcttttggaaaat

SEQ ID NO: 122215 - DNA, 25 bp, Probe Sequence
aggacaggagttctttaggaaagtg

SEQ ID NO: 122216 - DNA, 25 bp, Probe Sequence
tttaaggagcttgtttacccaccag

SEQ ID NO: 122217 - DNA, 25 bp, Probe Sequence
tttctagggcttgtattaaaccact

SEQ ID NO: 122218 - DNA, 25 bp, Probe Sequence
attctaagacttgttctttacccat

SEQ ID NO: 122219 - DNA, 25 bp, Probe Sequence
atttggaagtctattcttgccaccc

SEQ ID NO: 122220 - DNA, 25 bp, Probe Sequence
attctggaagacgactccatgcagc

SEQ ID NO: 122221 - DNA, 25 bp, Probe Sequence
attgtgcagttgtgcactgctcgac

SEQ ID NO: 122222 - DNA, 25 bp, Probe Sequence
attggcgattgattcagtgcccaca

SEQ ID NO: 122223 - DNA, 25 bp, Probe Sequence
attggagttcatactgatgccctga

SEQ ID NO: 122224 - DNA, 25 bp, Probe Sequence
attgggatcacttttccctgtctaa

SEQ ID NO: 122225 - DNA, 25 bp, Probe Sequence
atagagagccggattcaccgtttgg

SEQ ID NO: 122226 - DNA, 25 bp, Probe Sequence
ataggaattggtttcacgcctcagg

SEQ ID NO: 122227 - DNA, 25 bp, Probe Sequence
atagtttttgaagaccatctaggtt

SEQ ID NO: 122228 - DNA, 25 bp, Probe Sequence
atatttgtctaagaaccggaatgtt

SEQ ID NO: 122229 - DNA, 25 bp, Probe Sequence
ctggttcctaccagaccggagaggg

SEQ ID NO: 122230 - DNA, 25 bp, Probe Sequence
aggattactcctggaacctggaggc

SEQ ID NO: 122231 - DNA, 25 bp, Probe Sequence
aggtttccccatgaagcagggtgtc

SEQ ID NO: 122232 - DNA, 25 bp, Probe Sequence
atttcgttccaagtaccacggctat

SEQ ID NO: 122233 - DNA, 25 bp, Probe Sequence
attctggttctatctacctcaacaa

SEQ ID NO: 122234 - DNA, 25 bp, Probe Sequence
attgaggttcactctttgtgctaca

SEQ ID NO: 122235 - DNA, 25 bp, Probe Sequence
attgcggtcgcgcggatcatgatgc

SEQ ID NO: 122236 - DNA, 25 bp, Probe Sequence
attggactacgaatgctacgatgga

SEQ ID NO: 122237 - DNA, 25 bp, Probe Sequence
attgggctcagtgctgtaggtctgc

SEQ ID NO: 122238 - DNA, 25 bp, Probe Sequence
attgagccatgctttttcggtttgt

SEQ ID NO: 122239 - DNA, 25 bp, Probe Sequence
attcctacttgtacggactttgaag

SEQ ID NO: 122240 - DNA, 25 bp, Probe Sequence
aggcctattttaggtgacactatag

SEQ ID NO: 122241 - DNA, 25 bp, Probe Sequence
aggcttattttataccagtacagag

SEQ ID NO: 122242 - DNA, 25 bp, Probe Sequence
acgtttctcctacaacagatactgg

SEQ ID NO: 122243 - DNA, 25 bp, Probe Sequence
atcacctttgccaagtaagagtggt

SEQ ID NO: 122244 - DNA, 25 bp, Probe Sequence
ataagcttcccatttcacaaagggg

SEQ ID NO: 122245 - DNA, 25 bp, Probe Sequence
atagggacctaaggcccactggagg

SEQ ID NO: 122246 - DNA, 25 bp, Probe Sequence
aggtcgacctatgtcctaagttagg

SEQ ID NO: 122247 - DNA, 25 bp, Probe Sequence
aggctggagctttggttaaagaatt

SEQ ID NO: 122248 - DNA, 25 bp, Probe Sequence
aggcttcttgtgtgttaaacttgat

SEQ ID NO: 122249 - DNA, 25 bp, Probe Sequence
aggtcttcagttttttcgactggca

SEQ ID NO: 122250 - DNA, 25 bp, Probe Sequence
agtgttgtacttaatgttacgggct

SEQ ID NO: 122251 - DNA, 25 bp, Probe Sequence
attcttggctttattgtactgggta

SEQ ID NO: 122252 - DNA, 25 bp, Probe Sequence
atcttcgactttctaaaaaagctca

SEQ ID NO: 122253 - DNA, 25 bp, Probe Sequence
atttcgatatttgtctaagaaccgg

SEQ ID NO: 122254 - DNA, 25 bp, Probe Sequence
atttggaagaatgtgccgaagacgc

SEQ ID NO: 122255 - DNA, 25 bp, Probe Sequence
atttgcggaggtgacctttgacctt

SEQ ID NO: 122256 - DNA, 25 bp, Probe Sequence
actggagggagtgaaggtccccttg

SEQ ID NO: 122257 - DNA, 25 bp, Probe Sequence
atctggaaggaagagcccatcccct

SEQ ID NO: 122258 - DNA, 25 bp, Probe Sequence
attggaaagcgactgagcacaccct

SEQ ID NO: 122259 - DNA, 25 bp, Probe Sequence
atgcatagaattgttaccaacctcc

SEQ ID NO: 122260 - DNA, 25 bp, Probe Sequence
agaacaacgtttatgaacctgccgt

SEQ ID NO: 122261 - DNA, 25 bp, Probe Sequence
agtaccccttctgtgaacactgaaa

SEQ ID NO: 122262 - DNA, 25 bp, Probe Sequence
agtaccccttctgtgaacactgaaa

SEQ ID NO: 122263 - DNA, 25 bp, Probe Sequence
agtaccccttctgtgaacactgaaa

SEQ ID NO: 122264 - DNA, 25 bp, Probe Sequence
atgggccacctctgtggaaaccaaa

SEQ ID NO: 122265 - DNA, 25 bp, Probe Sequence
attggctctacagcgttgcagaaca

SEQ ID NO: 122266 - DNA, 25 bp, Probe Sequence
attgggcgaattccctcaaactcta

SEQ ID NO: 122267 - DNA, 25 bp, Probe Sequence
attgggagaattgttgcaaagtagt

SEQ ID NO: 122268 - DNA, 25 bp, Probe Sequence
attggggagttcagtggaagttctg

SEQ ID NO: 122269 - DNA, 25 bp, Probe Sequence
gttatgggagggagtagaactttga

SEQ ID NO: 122270 - DNA, 25 bp, Probe Sequence
attgtgtaactgatattaaacctaa

SEQ ID NO: 122271 - DNA, 25 bp, Probe Sequence
attcgataggcgtatggataaacca

SEQ ID NO: 122272 - DNA, 25 bp, Probe Sequence
attggttcctttgatagccattcag

SEQ ID NO: 122273 - DNA, 25 bp, Probe Sequence
atttttaagttgatactctacaggt

SEQ ID NO: 122274 - DNA, 25 bp, Probe Sequence
cttggttaagtgagtttttactatg

SEQ ID NO: 122275 - DNA, 25 bp, Probe Sequence
cttgaattaagtcttccttccctat

SEQ ID NO: 122276 - DNA, 25 bp, Probe Sequence
cctactactggtggattcttttcct

SEQ ID NO: 122277 - DNA, 25 bp, Probe Sequence
attacccatggtgattcgggttttg

SEQ ID NO: 122278 - DNA, 25 bp, Probe Sequence
attcaccttcgtgtgtcttcagtgt

SEQ ID NO: 122279 - DNA, 25 bp, Probe Sequence
attcaccttcgtgtgtcttcagtgt

SEQ ID NO: 122280 - DNA, 25 bp, Probe Sequence
attgaccgccaggcttgtgaacagc

SEQ ID NO: 122281 - DNA, 25 bp, Probe Sequence
attgatcaccgggattgcaaatcta

SEQ ID NO: 122282 - DNA, 25 bp, Probe Sequence
attcatgccaccgcttactataaag

SEQ ID NO: 122283 - DNA, 25 bp, Probe Sequence
agggtaggtcctaaatctaatgact

SEQ ID NO: 122284 - DNA, 25 bp, Probe Sequence
agtcctccgtcagaaattattactc

SEQ ID NO: 122285 - DNA, 25 bp, Probe Sequence
actacccgggactcagtattagcct

SEQ ID NO: 122286 - DNA, 25 bp, Probe Sequence
accttaccggagtccagcttttgat

SEQ ID NO: 122287 - DNA, 25 bp, Probe Sequence
accggaactgggatgcaggttttgg

SEQ ID NO: 122288 - DNA, 25 bp, Probe Sequence
ccggaccccgagatcgtgagttgtg

SEQ ID NO: 122289 - DNA, 25 bp, Probe Sequence
cccttcgcctgggttcgtagtattg

SEQ ID NO: 122290 - DNA, 25 bp, Probe Sequence
caccggcccaagttcggccaaattg

SEQ ID NO: 122291 - DNA, 25 bp, Probe Sequence
atccggcccaagttcctaagtagag

SEQ ID NO: 122292 - DNA, 25 bp, Probe Sequence
atgggagcccacggaactaagtagg

SEQ ID NO: 122293 - DNA, 25 bp, Probe Sequence
atcggatgaccctggtcttcaatgg

SEQ ID NO: 122294 - DNA, 25 bp, Probe Sequence
attgtgggcacctggttctgaaggg

SEQ ID NO: 122295 - DNA, 25 bp, Probe Sequence
attgtcgtgggctacgctttgagga

SEQ ID NO: 122296 - DNA, 25 bp, Probe Sequence
attgcatgggggtaccccaatctga

SEQ ID NO: 122297 - DNA, 25 bp, Probe Sequence
attcatggacgacacgagccgatcc

SEQ ID NO: 122298 - DNA, 25 bp, Probe Sequence
attaggattgcccaggagtccaacg

SEQ ID NO: 122299 - DNA, 25 bp, Probe Sequence
attaaaatggtcagtgtgccaaaga

SEQ ID NO: 122300 - DNA, 25 bp, Probe Sequence
attcaaagtgttctgggacaagctg

SEQ ID NO: 122301 - DNA, 25 bp, Probe Sequence
attaaatctgttctacacacgtgta

SEQ ID NO: 122302 - DNA, 25 bp, Probe Sequence
attaggttgttatacattctttatg

SEQ ID NO: 122303 - DNA, 25 bp, Probe Sequence
attggggatgttaaacagttgcagt

SEQ ID NO: 122304 - DNA, 25 bp, Probe Sequence
agctgtcttggtgaaacgataagtc

SEQ ID NO: 122305 - DNA, 25 bp, Probe Sequence
attccttgagctgtacgggaagtct

SEQ ID NO: 122306 - DNA, 25 bp, Probe Sequence
attgccaaacgacacaggaaatttg

SEQ ID NO: 122307 - DNA, 25 bp, Probe Sequence
attctaacccagggcatggggttgg

SEQ ID NO: 122308 - DNA, 25 bp, Probe Sequence
attcggccactcaggcatgaaggtt

SEQ ID NO: 122309 - DNA, 25 bp, Probe Sequence
cttccagacaacagcagaaagggtt

SEQ ID NO: 122310 - DNA, 25 bp, Probe Sequence
attgccatgacagtgcctcgaaagt

SEQ ID NO: 122311 - DNA, 25 bp, Probe Sequence
attggctgtgtgtctctggacaggt

SEQ ID NO: 122312 - DNA, 25 bp, Probe Sequence
attgatgttgatgttccaccagaaa

SEQ ID NO: 122313 - DNA, 25 bp, Probe Sequence
attgcttggatgacagtcaccgaca

SEQ ID NO: 122314 - DNA, 25 bp, Probe Sequence
atagcatcgagaaaatcaacggaac

SEQ ID NO: 122315 - DNA, 25 bp, Probe Sequence
atagtcctggaagacacgtggcgcc

SEQ ID NO: 122316 - DNA, 25 bp, Probe Sequence
atagtcctggaagacacgtggcgcc

SEQ ID NO: 122317 - DNA, 25 bp, Probe Sequence
atagtcctggaagacacgtggcgcc

SEQ ID NO: 122318 - DNA, 25 bp, Probe Sequence
atagcccggtaatgactgggtccag

SEQ ID NO: 122319 - DNA, 25 bp, Probe Sequence
attcccagggtattactggacctat

SEQ ID NO: 122320 - DNA, 25 bp, Probe Sequence
attgcaacttgggaatactggtctg

SEQ ID NO: 122321 - DNA, 25 bp, Probe Sequence
atacgagttcccataggggctgctc

SEQ ID NO: 122322 - DNA, 25 bp, Probe Sequence
ataggaggacccatgtagattcgca

SEQ ID NO: 122323 - DNA, 25 bp, Probe Sequence
atctgcaaaatcccggaaggagcca

SEQ ID NO: 122324 - DNA, 25 bp, Probe Sequence
attaaaatttcatgccgggcgcagt

SEQ ID NO: 122325 - DNA, 25 bp, Probe Sequence
atttaaaatgtgtacgtgggccagc

SEQ ID NO: 122326 - DNA, 25 bp, Probe Sequence
attaaaaagtgctggtcatggccgg

SEQ ID NO: 122327 - DNA, 25 bp, Probe Sequence
attataagtagtgctcagaaggttc

SEQ ID NO: 122328 - DNA, 25 bp, Probe Sequence
atttcaaatcggataggagtgtcag

SEQ ID NO: 122329 - DNA, 25 bp, Probe Sequence
atttggatatccctagaacgttgag

SEQ ID NO: 122330 - DNA, 25 bp, Probe Sequence
attgtgcaatttgtagaactttaat

SEQ ID NO: 122331 - DNA, 25 bp, Probe Sequence
attggtgcagttctaatccctaaat

SEQ ID NO: 122332 - DNA, 25 bp, Probe Sequence
attggtgcctaagaatttgcatttt

SEQ ID NO: 122333 - DNA, 25 bp, Probe Sequence
attgggccttgggcctatgccattt

SEQ ID NO: 122334 - DNA, 25 bp, Probe Sequence
atagtgggcttggccactgggttct

SEQ ID NO: 122335 - DNA, 25 bp, Probe Sequence
ataggtggtctgaacgtggtgtctc

SEQ ID NO: 122336 - DNA, 25 bp, Probe Sequence
attcaaggtctcaagggcggttcct

SEQ ID NO: 122337 - DNA, 25 bp, Probe Sequence
atatacagggtcagggctggaactg

SEQ ID NO: 122338 - DNA, 25 bp, Probe Sequence
cttctcggttcctggggaattggat

SEQ ID NO: 122339 - DNA, 25 bp, Probe Sequence
ctgaacgtttactccgggattcaag

SEQ ID NO: 122340 - DNA, 25 bp, Probe Sequence
gtaggttgggacaccagggaagaag

SEQ ID NO: 122341 - DNA, 25 bp, Probe Sequence
atcctcttcggacccaagggagtga

SEQ ID NO: 122342 - DNA, 25 bp, Probe Sequence
attcatccttgaagtccggggtatt

SEQ ID NO: 122343 - DNA, 25 bp, Probe Sequence
attgcttttgagggcccggaattat

SEQ ID NO: 122344 - DNA, 25 bp, Probe Sequence
attgctgttaattcgggtggaccct

SEQ ID NO: 122345 - DNA, 25 bp, Probe Sequence
atcttttcctgatcgtcaggaccct

SEQ ID NO: 122346 - DNA, 25 bp, Probe Sequence
attgaatcggtagtcccagttcttg

SEQ ID NO: 122347 - DNA, 25 bp, Probe Sequence
attgaaggtctggatccctttctct

SEQ ID NO: 122348 - DNA, 25 bp, Probe Sequence
attgttggaatggaacccttgctat

SEQ ID NO: 122349 - DNA, 25 bp, Probe Sequence
attgttgaatgtgaatcctttcctt

SEQ ID NO: 122350 - DNA, 25 bp, Probe Sequence
attgtagataatgttcccaaccatc

SEQ ID NO: 122351 - DNA, 25 bp, Probe Sequence
attgtaaaattcagtctaacatagc

SEQ ID NO: 122352 - DNA, 25 bp, Probe Sequence
attgccaataagcgggctacaaagt

SEQ ID NO: 122353 - DNA, 25 bp, Probe Sequence
attggactagtgcagaggctttaag

SEQ ID NO: 122354 - DNA, 25 bp, Probe Sequence
attggtactgggcaggattggcaac

SEQ ID NO: 122355 - DNA, 25 bp, Probe Sequence
attggaaccagtgcagtttgaagat

SEQ ID NO: 122356 - DNA, 25 bp, Probe Sequence
attggacccgatggcagagttaccg

SEQ ID NO: 122357 - DNA, 25 bp, Probe Sequence
atgctggtccccaggaagatgtccg

SEQ ID NO: 122358 - DNA, 25 bp, Probe Sequence
attaggtccacctggatattccaga

SEQ ID NO: 122359 - DNA, 25 bp, Probe Sequence
atacaggttccccgagaactcggca

SEQ ID NO: 122360 - DNA, 25 bp, Probe Sequence
atacacgggacccagaatccacggg

SEQ ID NO: 122361 - DNA, 25 bp, Probe Sequence
acagacgggaagcgtacgaagcggg

SEQ ID NO: 122362 - DNA, 25 bp, Probe Sequence
acttccggtaggcttccgagaggag

SEQ ID NO: 122363 - DNA, 25 bp, Probe Sequence
agcttccccggtctggggtgaggag

SEQ ID NO: 122364 - DNA, 25 bp, Probe Sequence
gacttcccccgcattgaaggggtgc

SEQ ID NO: 122365 - DNA, 25 bp, Probe Sequence
atccccgcccggatgaagagggctg

SEQ ID NO: 122366 - DNA, 25 bp, Probe Sequence
attcctcctccggaatcagtgggtc

SEQ ID NO: 122367 - DNA, 25 bp, Probe Sequence
attcctcctccggaatcagtgggtc

SEQ ID NO: 122368 - DNA, 25 bp, Probe Sequence
attcctcctccggaatcagtgggtc

SEQ ID NO: 122369 - DNA, 25 bp, Probe Sequence
attgcctgagccgggagacgaaggt

SEQ ID NO: 122370 - DNA, 25 bp, Probe Sequence
attgtctacctgctaagtcaagggt

SEQ ID NO: 122371 - DNA, 25 bp, Probe Sequence
attgggagcctcatctgcaatgtag

SEQ ID NO: 122372 - DNA, 25 bp, Probe Sequence
attgggaccatgttctaaaaccttg

SEQ ID NO: 122373 - DNA, 25 bp, Probe Sequence
atagggatccatttggaaatccttt

SEQ ID NO: 122374 - DNA, 25 bp, Probe Sequence
atcagttgcccatttggctatccgc

SEQ ID NO: 122375 - DNA, 25 bp, Probe Sequence
attgttgccgatgtctatatccaca

SEQ ID NO: 122376 - DNA, 25 bp, Probe Sequence
attgtggacgagttgctggaggcag

SEQ ID NO: 122377 - DNA, 25 bp, Probe Sequence
attgtttcaagttgctggagaacat

SEQ ID NO: 122378 - DNA, 25 bp, Probe Sequence
attgacttctatgtcggtataatgg

SEQ ID NO: 122379 - DNA, 25 bp, Probe Sequence
atcaattccctggtgcggtaccagt

SEQ ID NO: 122380 - DNA, 25 bp, Probe Sequence
ataaggccctgagcagccttcgagt

SEQ ID NO: 122381 - DNA, 25 bp, Probe Sequence
atggaggcccgaaagccgtaggata

SEQ ID NO: 122382 - DNA, 25 bp, Probe Sequence
agaagggggaaatcactgtggttgt

SEQ ID NO: 122383 - DNA, 25 bp, Probe Sequence
aggaaggggaccagccttggactgg

SEQ ID NO: 122384 - DNA, 25 bp, Probe Sequence
atggacggaaacctcgacttggagg

SEQ ID NO: 122385 - DNA, 25 bp, Probe Sequence
attggagtgcaatccttacttgaga

SEQ ID NO: 122386 - DNA, 25 bp, Probe Sequence
attgtcaaatagtcagtgctacttg

SEQ ID NO: 122387 - DNA, 25 bp, Probe Sequence
attgtgtcaacagatggatcactgg

SEQ ID NO: 122388 - DNA, 25 bp, Probe Sequence
attgttaccaaagtgtgcaactgct

SEQ ID NO: 122389 - DNA, 25 bp, Probe Sequence
attgtggcacaaaatctgttcaggt

SEQ ID NO: 122390 - DNA, 25 bp, Probe Sequence
ataggccagcagagacttagggatt

SEQ ID NO: 122391 - DNA, 25 bp, Probe Sequence
atatggatggcgagctcctaggcct

SEQ ID NO: 122392 - DNA, 25 bp, Probe Sequence
attgggagcagcagcagcagcagca

SEQ ID NO: 122393 - DNA, 25 bp, Probe Sequence
gatcgtcgacacagactacgacacg

SEQ ID NO: 122394 - DNA, 25 bp, Probe Sequence
attgatctacacacactcatctgac

SEQ ID NO: 122395 - DNA, 25 bp, Probe Sequence
attgtctcaacggcagcgacgaaga

SEQ ID NO: 122396 - DNA, 25 bp, Probe Sequence
attgtccataaggaattcgatgatg

SEQ ID NO: 122397 - DNA, 25 bp, Probe Sequence
attgggaacagccaaatcagcgaag

SEQ ID NO: 122398 - DNA, 25 bp, Probe Sequence
atcgggaagccctaatccagttcct

SEQ ID NO: 122399 - DNA, 25 bp, Probe Sequence
actggggacccagaaatgtgtcctg

SEQ ID NO: 122400 - DNA, 25 bp, Probe Sequence
atatgagggaccaggaagctttcct

SEQ ID NO: 122401 - DNA, 25 bp, Probe Sequence
attggtggcaacaggaatacagtct

SEQ ID NO: 122402 - DNA, 25 bp, Probe Sequence
attggtcctccttggcagaaattta

SEQ ID NO: 122403 - DNA, 25 bp, Probe Sequence
attggtcctccttggcagaaattta

SEQ ID NO: 122404 - DNA, 25 bp, Probe Sequence
attgtgtcctggggcagcgacacct

SEQ ID NO: 122405 - DNA, 25 bp, Probe Sequence
attggattccagcacagtgactccc

SEQ ID NO: 122406 - DNA, 25 bp, Probe Sequence
attgtttcagagtcacagttccctt

SEQ ID NO: 122407 - DNA, 25 bp, Probe Sequence
attgatttgccataagtcttccctt

SEQ ID NO: 122408 - DNA, 25 bp, Probe Sequence
attggttgaaactgttatcacttat

SEQ ID NO: 122409 - DNA, 25 bp, Probe Sequence
attggctgaaaatcacttaaatgga

SEQ ID NO: 122410 - DNA, 25 bp, Probe Sequence
atacctaagaagcaccttaagatta

SEQ ID NO: 122411 - DNA, 25 bp, Probe Sequence
atatccttgaacctaccttaaaatg

SEQ ID NO: 122412 - DNA, 25 bp, Probe Sequence
attcctttttattcctgtcaactgg

SEQ ID NO: 122413 - DNA, 25 bp, Probe Sequence
attcctttttattcctgtcaactgg

SEQ ID NO: 122414 - DNA, 25 bp, Probe Sequence
attcctgtttgtaatccttggttcg

SEQ ID NO: 122415 - DNA, 25 bp, Probe Sequence
attccattattgagaccttaaggca

SEQ ID NO: 122416 - DNA, 25 bp, Probe Sequence
agtcgtattttgccaccgtaaacat

SEQ ID NO: 122417 - DNA, 25 bp, Probe Sequence
attggtaatttccacgtttatacat

SEQ ID NO: 122418 - DNA, 25 bp, Probe Sequence
attggttatcaatatcttgttaact

SEQ ID NO: 122419 - DNA, 25 bp, Probe Sequence
attggtactgaacacgtacagacct

SEQ ID NO: 122420 - DNA, 25 bp, Probe Sequence
attggctgtttacaagtgccagtcc

SEQ ID NO: 122421 - DNA, 25 bp, Probe Sequence
attgtctgcctttaaaatccttcct

SEQ ID NO: 122422 - DNA, 25 bp, Probe Sequence
attggctccaggtctaatttttcac

SEQ ID NO: 122423 - DNA, 25 bp, Probe Sequence
attggattcagtcttgtctcttgtc

SEQ ID NO: 122424 - DNA, 25 bp, Probe Sequence
attggtcactgcatcttgtatcgat

SEQ ID NO: 122425 - DNA, 25 bp, Probe Sequence
attgtacctgacattgctacgtttc

SEQ ID NO: 122426 - DNA, 25 bp, Probe Sequence
attgtacttgggtgtaggactctag

SEQ ID NO: 122427 - DNA, 25 bp, Probe Sequence
attgaacttttgtgtatggggtatg

SEQ ID NO: 122428 - DNA, 25 bp, Probe Sequence
attaccatttccagatttgagtttg

SEQ ID NO: 122429 - DNA, 25 bp, Probe Sequence
attccactataaacttttaggcctg

SEQ ID NO: 122430 - DNA, 25 bp, Probe Sequence
aggccacaacgaggtttaatggact

SEQ ID NO: 122431 - DNA, 25 bp, Probe Sequence
attgcccaagggatgaaaaggagct

SEQ ID NO: 122432 - DNA, 25 bp, Probe Sequence
attcccaaggagcttaccaagaggc

SEQ ID NO: 122433 - DNA, 25 bp, Probe Sequence
attcctatagggcagttccgagtcc

SEQ ID NO: 122434 - DNA, 25 bp, Probe Sequence
acgtctttgtggagttctatgcccc

SEQ ID NO: 122435 - DNA, 25 bp, Probe Sequence
acgtctttgtggagttctatgcccc

SEQ ID NO: 122436 - DNA, 25 bp, Probe Sequence
atcgtcttcgccattgtttttatca

SEQ ID NO: 122437 - DNA, 25 bp, Probe Sequence
attgttttttatcttttctacagca

SEQ ID NO: 122438 - DNA, 25 bp, Probe Sequence
attgtttttttacactgtggtacat

SEQ ID NO: 122439 - DNA, 25 bp, Probe Sequence
attgttagggtcagccatttttaat

SEQ ID NO: 122440 - DNA, 25 bp, Probe Sequence
atttcctgggtgtgtccttgttaag

SEQ ID NO: 122441 - DNA, 25 bp, Probe Sequence
atagtctggggtttgttcttgtttg

SEQ ID NO: 122442 - DNA, 25 bp, Probe Sequence
attgtgggtggttttttgtcttctg

SEQ ID NO: 122443 - DNA, 25 bp, Probe Sequence
attgtgggtggttttttgtcttctg

SEQ ID NO: 122444 - DNA, 25 bp, Probe Sequence
atagggccatttgttagttatttga

SEQ ID NO: 122445 - DNA, 25 bp, Probe Sequence
ctaatttactgtattgaggttttat

SEQ ID NO: 122446 - DNA, 25 bp, Probe Sequence
attgttttagatattgggtattgta

SEQ ID NO: 122447 - DNA, 25 bp, Probe Sequence
attgcttttgcactcttaaaatttt

SEQ ID NO: 122448 - DNA, 25 bp, Probe Sequence
attgctttagcttctggtcagcact

SEQ ID NO: 122449 - DNA, 25 bp, Probe Sequence
attgtgcagtgctcctgttgcaact

SEQ ID NO: 122450 - DNA, 25 bp, Probe Sequence
attggcaggatcctggtatccgcta

SEQ ID NO: 122451 - DNA, 25 bp, Probe Sequence
attggtggggcaagttgtcctgaga

SEQ ID NO: 122452 - DNA, 25 bp, Probe Sequence
attggtggcttaagctttgaaacca

SEQ ID NO: 122453 - DNA, 25 bp, Probe Sequence
attgggaggttagagataacacaca

SEQ ID NO: 122454 - DNA, 25 bp, Probe Sequence
attgggggctttgaggcttacacag

SEQ ID NO: 122455 - DNA, 25 bp, Probe Sequence
attggtggtcttttcaccattggca

SEQ ID NO: 122456 - DNA, 25 bp, Probe Sequence
attggttggttttatccatgtctct

SEQ ID NO: 122457 - DNA, 25 bp, Probe Sequence
attgtattgtctttaactcgttctt

SEQ ID NO: 122458 - DNA, 25 bp, Probe Sequence
attggagctattcttcactggtcct

SEQ ID NO: 122459 - DNA, 25 bp, Probe Sequence
attggaacatttaaactggcctttg

SEQ ID NO: 122460 - DNA, 25 bp, Probe Sequence
attggtatattcacagactgtagac

SEQ ID NO: 122461 - DNA, 25 bp, Probe Sequence
attgtttcttacggtcggagcatct

SEQ ID NO: 122462 - DNA, 25 bp, Probe Sequence
attgatagttcatctggattaccaa

SEQ ID NO: 122463 - DNA, 25 bp, Probe Sequence
attgatcgatattagtaattcccca

SEQ ID NO: 122464 - DNA, 25 bp, Probe Sequence
attgacgagaacttcaaggccctct

SEQ ID NO: 122465 - DNA, 25 bp, Probe Sequence
attgaatgaatgtcctaaatgcctt

SEQ ID NO: 122466 - DNA, 25 bp, Probe Sequence
attgttgaattataactgcgactga

SEQ ID NO: 122467 - DNA, 25 bp, Probe Sequence
attgcttcctttctacaggacgaat

SEQ ID NO: 122468 - DNA, 25 bp, Probe Sequence
attaatgccctttctcaagggtgag

SEQ ID NO: 122469 - DNA, 25 bp, Probe Sequence
atgtaagggcttttaggactatata

SEQ ID NO: 122470 - DNA, 25 bp, Probe Sequence
attgaaggtgtttacgcccgagatg

SEQ ID NO: 122471 - DNA, 25 bp, Probe Sequence
attgaaggagttcatgccgccagga

SEQ ID NO: 122472 - DNA, 25 bp, Probe Sequence
gaattgcgggttctacccagtcaga

SEQ ID NO: 122473 - DNA, 25 bp, Probe Sequence
attccggtttgggccacctgaagat

SEQ ID NO: 122474 - DNA, 25 bp, Probe Sequence
attcctgaaaaacccaagcttagat

SEQ ID NO: 122475 - DNA, 25 bp, Probe Sequence
attacccaaacaccgcgtgattgga

SEQ ID NO: 122476 - DNA, 25 bp, Probe Sequence
attatttgaaattcttcggcaggga

SEQ ID NO: 122477 - DNA, 25 bp, Probe Sequence
attagtttaaatttgccagcaggga

SEQ ID NO: 122478 - DNA, 25 bp, Probe Sequence
attgatctttgaacaacgaagggcg

SEQ ID NO: 122479 - DNA, 25 bp, Probe Sequence
atttcaaaatcatacgaatcggggt

SEQ ID NO: 122480 - DNA, 25 bp, Probe Sequence
attgccgaggactatgacgatgatc

SEQ ID NO: 122481 - DNA, 25 bp, Probe Sequence
atagccgtgcaagatgaatgcagat

SEQ ID NO: 122482 - DNA, 25 bp, Probe Sequence
attgcatcgatgaaattgagaccat

SEQ ID NO: 122483 - DNA, 25 bp, Probe Sequence
attggcagagccttaagacctcaaa

SEQ ID NO: 122484 - DNA, 25 bp, Probe Sequence
attacaaccattcaatgccccgaag

SEQ ID NO: 122485 - DNA, 25 bp, Probe Sequence
attcaaagccagctaacccctggcc

SEQ ID NO: 122486 - DNA, 25 bp, Probe Sequence
atatgcccagtacaggaccttatgg

SEQ ID NO: 122487 - DNA, 25 bp, Probe Sequence
attttgagtcactggaccttgcgga

SEQ ID NO: 122488 - DNA, 25 bp, Probe Sequence
attacttgtgactggacctctggtc

SEQ ID NO: 122489 - DNA, 25 bp, Probe Sequence
attgaccggatgctggaccgcaact

SEQ ID NO: 122490 - DNA, 25 bp, Probe Sequence
ataatgtcaggtcttaccagccact

SEQ ID NO: 122491 - DNA, 25 bp, Probe Sequence
atatttctgaggctaaggaccacag

SEQ ID NO: 122492 - DNA, 25 bp, Probe Sequence
attctctgtacgcccagggaaagcg

SEQ ID NO: 122493 - DNA, 25 bp, Probe Sequence
attcctatagggcagcagaaaacaa

SEQ ID NO: 122494 - DNA, 25 bp, Probe Sequence
agtccttacagccataccacaaggt

SEQ ID NO: 122495 - DNA, 25 bp, Probe Sequence
agtccttacagccataccacaaggt

SEQ ID NO: 122496 - DNA, 25 bp, Probe Sequence
agtccttacagccataccacaaggt

SEQ ID NO: 122497 - DNA, 25 bp, Probe Sequence
attgcctgatgggccaacaccaaca

SEQ ID NO: 122498 - DNA, 25 bp, Probe Sequence
attgcacttgtgcctcacgaacata

SEQ ID NO: 122499 - DNA, 25 bp, Probe Sequence
attgctaggagcctgccagaacaag

SEQ ID NO: 122500 - DNA, 25 bp, Probe Sequence
attgaagcagatttccagcaacaag

SEQ ID NO: 122501 - DNA, 25 bp, Probe Sequence
attgtaagcatgacccaacctacca

SEQ ID NO: 122502 - DNA, 25 bp, Probe Sequence
attgtcaagcatgagttccctaaac

SEQ ID NO: 122503 - DNA, 25 bp, Probe Sequence
attggggaatcacttgcacctccaa

SEQ ID NO: 122504 - DNA, 25 bp, Probe Sequence
attgtgggaaatcctgattctcttt

SEQ ID NO: 122505 - DNA, 25 bp, Probe Sequence
atcgtgaggggtctttgtcctctgt

SEQ ID NO: 122506 - DNA, 25 bp, Probe Sequence
atatgggagggggtttggctgcctg

SEQ ID NO: 122507 - DNA, 25 bp, Probe Sequence
attgttagcggggttttgaaggatg

SEQ ID NO: 122508 - DNA, 25 bp, Probe Sequence
attgttgggggtgctctcagaagga

SEQ ID NO: 122509 - DNA, 25 bp, Probe Sequence
attgttaggtgctgacctagacaga

SEQ ID NO: 122510 - DNA, 25 bp, Probe Sequence
attggtcagttatgatcccaggata

SEQ ID NO: 122511 - DNA, 25 bp, Probe Sequence
attggactgctgtggactccactga

SEQ ID NO: 122512 - DNA, 25 bp, Probe Sequence
attgacctcgagacgacctctctgc

SEQ ID NO: 122513 - DNA, 25 bp, Probe Sequence
attaacgcgttcgcagttgcagcga

SEQ ID NO: 122514 - DNA, 25 bp, Probe Sequence
attccactggtttctttagcaggac

SEQ ID NO: 122515 - DNA, 25 bp, Probe Sequence
attccgctgtaatgttttcacaata

SEQ ID NO: 122516 - DNA, 25 bp, Probe Sequence
ataccctgttcagatatggaaaaat

SEQ ID NO: 122517 - DNA, 25 bp, Probe Sequence
attggtcgttgagttatgggaagaa

SEQ ID NO: 122518 - DNA, 25 bp, Probe Sequence
attggcactttgatcttgaaattaa

SEQ ID NO: 122519 - DNA, 25 bp, Probe Sequence
attggcagctagacagttagaaatt

SEQ ID NO: 122520 - DNA, 25 bp, Probe Sequence
attccaataggcttcatagtatatc

SEQ ID NO: 122521 - DNA, 25 bp, Probe Sequence
attcctcgacaggtgcacgtgtatc

SEQ ID NO: 122522 - DNA, 25 bp, Probe Sequence
attggtagattgggctgcgcgtagt

SEQ ID NO: 122523 - DNA, 25 bp, Probe Sequence
attggtttcacgcctcaggcaatta

SEQ ID NO: 122524 - DNA, 25 bp, Probe Sequence
attggttatcatgggaaagtattct

SEQ ID NO: 122525 - DNA, 25 bp, Probe Sequence
attgattttacggaagatgttatat

SEQ ID NO: 122526 - DNA, 25 bp, Probe Sequence
attttggtactgtgatggggtcatc

SEQ ID NO: 122527 - DNA, 25 bp, Probe Sequence
attcaagttttgtccaggatggccc

SEQ ID NO: 122528 - DNA, 25 bp, Probe Sequence
attcgagttattttaggcctgcctt

SEQ ID NO: 122529 - DNA, 25 bp, Probe Sequence
attcgaacttaacagatgcctcctc

SEQ ID NO: 122530 - DNA, 25 bp, Probe Sequence
atacgaagcgttttcggcttcctgc

SEQ ID NO: 122531 - DNA, 25 bp, Probe Sequence
attcaaacaggctgtcggtctcctc

SEQ ID NO: 122532 - DNA, 25 bp, Probe Sequence
attcgaaatggctggcggtaaggct

SEQ ID NO: 122533 - DNA, 25 bp, Probe Sequence
attggcccatggtgccaggttagtt

SEQ ID NO: 122534 - DNA, 25 bp, Probe Sequence
attggttaaaagcaagtcatagttc

SEQ ID NO: 122535 - DNA, 25 bp, Probe Sequence
attggtcaaaaatcaactgcagcga

SEQ ID NO: 122536 - DNA, 25 bp, Probe Sequence
attggtctaaaattgaacatcctag

SEQ ID NO: 122537 - DNA, 25 bp, Probe Sequence
attgtatccaaatttatgccactta

SEQ ID NO: 122538 - DNA, 25 bp, Probe Sequence
attgaacgccaaattgggcctgtaa

SEQ ID NO: 122539 - DNA, 25 bp, Probe Sequence
attggagggcaagtctggtgccagc

SEQ ID NO: 122540 - DNA, 25 bp, Probe Sequence
attggcaggggagctcatattgatg

SEQ ID NO: 122541 - DNA, 25 bp, Probe Sequence
attgacagtggggttcatgggtgca

SEQ ID NO: 122542 - DNA, 25 bp, Probe Sequence
attggagggaccactgggtgagaga

SEQ ID NO: 122543 - DNA, 25 bp, Probe Sequence
attggggagaactttggttgtggca

SEQ ID NO: 122544 - DNA, 25 bp, Probe Sequence
attgggaacctgatgggtttggcat

SEQ ID NO: 122545 - DNA, 25 bp, Probe Sequence
attgggcccagatgtgggtttgctc

SEQ ID NO: 122546 - DNA, 25 bp, Probe Sequence
attggagcccagttgtaacttggta

SEQ ID NO: 122547 - DNA, 25 bp, Probe Sequence
attgagacctttagctaacttagtg

SEQ ID NO: 122548 - DNA, 25 bp, Probe Sequence
attgtagaattgggcaacaccttgt

SEQ ID NO: 122549 - DNA, 25 bp, Probe Sequence
attgataccaaggccattccactgt

SEQ ID NO: 122550 - DNA, 25 bp, Probe Sequence
attgaactcaaccacatgatcaaag

SEQ ID NO: 122551 - DNA, 25 bp, Probe Sequence
attgatatctcggatacaatagagg

SEQ ID NO: 122552 - DNA, 25 bp, Probe Sequence
attgtaatctcagttcaaaagttaa

SEQ ID NO: 122553 - DNA, 25 bp, Probe Sequence
attccactcccttgtaacaattagg

SEQ ID NO: 122554 - DNA, 25 bp, Probe Sequence
attgttctaatggccaatagagaca

SEQ ID NO: 122555 - DNA, 25 bp, Probe Sequence
attcgttatacggaagatgatgaac

SEQ ID NO: 122556 - DNA, 25 bp, Probe Sequence
attggtaatttggatgaaggaagct

SEQ ID NO: 122557 - DNA, 25 bp, Probe Sequence
atgggccaaagtgtacattgagact

SEQ ID NO: 122558 - DNA, 25 bp, Probe Sequence
attgtgcaatacagtttcattaact

SEQ ID NO: 122559 - DNA, 25 bp, Probe Sequence
attgcccatatcacgtctttacgca

SEQ ID NO: 122560 - DNA, 25 bp, Probe Sequence
aggagcctgtaatcctagctactca

SEQ ID NO: 122561 - DNA, 25 bp, Probe Sequence
aggagcctgtaatcctagctactca

SEQ ID NO: 122562 - DNA, 25 bp, Probe Sequence
attaccttaaagcatcaccactcat

SEQ ID NO: 122563 - DNA, 25 bp, Probe Sequence
attgaccaagagttgtcaacaactt

SEQ ID NO: 122564 - DNA, 25 bp, Probe Sequence
attgatccaggacatccatagcccg

SEQ ID NO: 122565 - DNA, 25 bp, Probe Sequence
atagatccacgaggcaccaaggcct

SEQ ID NO: 122566 - DNA, 25 bp, Probe Sequence
atatgggaccaggcccagagtcctg

SEQ ID NO: 122567 - DNA, 25 bp, Probe Sequence
atagtggcagtgcgtgccacgtccg

SEQ ID NO: 122568 - DNA, 25 bp, Probe Sequence
attgtggaggccatggagcgctttg

SEQ ID NO: 122569 - DNA, 25 bp, Probe Sequence
attgggcagtacgtggactctcagt

SEQ ID NO: 122570 - DNA, 25 bp, Probe Sequence
attgggcagtacgtggactctcagt

SEQ ID NO: 122571 - DNA, 25 bp, Probe Sequence
attgggtgtactggcacagctcatc

SEQ ID NO: 122572 - DNA, 25 bp, Probe Sequence
attgagctatggtcgtgccactaca

SEQ ID NO: 122573 - DNA, 25 bp, Probe Sequence
attggctggagaaatctcacaatca

SEQ ID NO: 122574 - DNA, 25 bp, Probe Sequence
attggggctgtgccatcggcaaagc

SEQ ID NO: 122575 - DNA, 25 bp, Probe Sequence
attgtggggcatcgaccgagacagc

SEQ ID NO: 122576 - DNA, 25 bp, Probe Sequence
attgtgtggagtgacggaactgcag

SEQ ID NO: 122577 - DNA, 25 bp, Probe Sequence
attggattggtaactctacctcaga

SEQ ID NO: 122578 - DNA, 25 bp, Probe Sequence
attctgtaggttgttctgcctcaaa

SEQ ID NO: 122579 - DNA, 25 bp, Probe Sequence
attgattcaggttgcagttacttaa

SEQ ID NO: 122580 - DNA, 25 bp, Probe Sequence
attactaggtcaagatctagcgata

SEQ ID NO: 122581 - DNA, 25 bp, Probe Sequence
attgagctaggggggtcagccagcc

SEQ ID NO: 122582 - DNA, 25 bp, Probe Sequence
attggtaatgctaccgtcaccagca

SEQ ID NO: 122583 - DNA, 25 bp, Probe Sequence
attgagaccatatctcgatcctcct

SEQ ID NO: 122584 - DNA, 25 bp, Probe Sequence
attgagatctcactactcgttctcc

SEQ ID NO: 122585 - DNA, 25 bp, Probe Sequence
attggcatgccacagggattctcct

SEQ ID NO: 122586 - DNA, 25 bp, Probe Sequence
attggagcctaatagctgattcctc

SEQ ID NO: 122587 - DNA, 25 bp, Probe Sequence
attggcaggtattttctcacatcct

SEQ ID NO: 122588 - DNA, 25 bp, Probe Sequence
attgtgcaggtgtcatttatctatg

SEQ ID NO: 122589 - DNA, 25 bp, Probe Sequence
attggcaaatgttgtctctcattgc

SEQ ID NO: 122590 - DNA, 25 bp, Probe Sequence
attggtagcaagtttctatctggaa

SEQ ID NO: 122591 - DNA, 25 bp, Probe Sequence
attgtatatgggttccttgtgaaac

SEQ ID NO: 122592 - DNA, 25 bp, Probe Sequence
attgaatctgggttcttttttgact

SEQ ID NO: 122593 - DNA, 25 bp, Probe Sequence
attggaaggcagattattttatatt

SEQ ID NO: 122594 - DNA, 25 bp, Probe Sequence
attggtaggcaaatgttatgctata

SEQ ID NO: 122595 - DNA, 25 bp, Probe Sequence
attgggcagacatatcttcattaag

SEQ ID NO: 122596 - DNA, 25 bp, Probe Sequence
attgtgtgacgctggcattcttggg

SEQ ID NO: 122597 - DNA, 25 bp, Probe Sequence
attgatggtcagccaggtgccttca

SEQ ID NO: 122598 - DNA, 25 bp, Probe Sequence
attgagattccagtggtgacttcac

SEQ ID NO: 122599 - DNA, 25 bp, Probe Sequence
attgcagatttagggagcctgccaa

SEQ ID NO: 122600 - DNA, 25 bp, Probe Sequence
attgctgcttaagagacattgggac

SEQ ID NO: 122601 - DNA, 25 bp, Probe Sequence
attgtcattgtcgggtttggggctt

SEQ ID NO: 122602 - DNA, 25 bp, Probe Sequence
attggcattgtgggtctttgaagtt

SEQ ID NO: 122603 - DNA, 25 bp, Probe Sequence
attggcattgaggacttccggacct

SEQ ID NO: 122604 - DNA, 25 bp, Probe Sequence
attgggtgggaggacgctactcgct

SEQ ID NO: 122605 - DNA, 25 bp, Probe Sequence
attgggagggcagcaggcagcccgc

SEQ ID NO: 122606 - DNA, 25 bp, Probe Sequence
attggagggtagacagcgcggcaac

SEQ ID NO: 122607 - DNA, 25 bp, Probe Sequence
attggagggtagacagcgcggcaac

SEQ ID NO: 122608 - DNA, 25 bp, Probe Sequence
attggtggaggattcacgggaactg

SEQ ID NO: 122609 - DNA, 25 bp, Probe Sequence
attggtctccggaatcagggaacag

SEQ ID NO: 122610 - DNA, 25 bp, Probe Sequence
attcgcttccggatcaagaagtaga

SEQ ID NO: 122611 - DNA, 25 bp, Probe Sequence
attcctccctgtacgaaaggacaag

SEQ ID NO: 122612 - DNA, 25 bp, Probe Sequence
attcctccctgtacgaaaggacaag

SEQ ID NO: 122613 - DNA, 25 bp, Probe Sequence
agtcacattccctccttaggaatct

SEQ ID NO: 122614 - DNA, 25 bp, Probe Sequence
agtccctccaaccttatagattgtt

SEQ ID NO: 122615 - DNA, 25 bp, Probe Sequence
attccctccaaaattcaagtgttgc

SEQ ID NO: 122616 - DNA, 25 bp, Probe Sequence
attgtcccacaaatgtttggctgtt

SEQ ID NO: 122617 - DNA, 25 bp, Probe Sequence
attgttggtcaaagtattggtactt

SEQ ID NO: 122618 - DNA, 25 bp, Probe Sequence
attgttggaccacttacattgtacc

SEQ ID NO: 122619 - DNA, 25 bp, Probe Sequence
attgatttactccactttttatgcc

SEQ ID NO: 122620 - DNA, 25 bp, Probe Sequence
attgttgagactgccatttctttct

SEQ ID NO: 122621 - DNA, 25 bp, Probe Sequence
attgttaatcctgccagtctttctc

SEQ ID NO: 122622 - DNA, 25 bp, Probe Sequence
attgtctaacacacttctttttcta

SEQ ID NO: 122623 - DNA, 25 bp, Probe Sequence
attggcatacaatactgcctttaat

SEQ ID NO: 122624 - DNA, 25 bp, Probe Sequence
attgtgtaatactaccttagaggat

SEQ ID NO: 122625 - DNA, 25 bp, Probe Sequence
attgggaaactgttcatttgaggat

SEQ ID NO: 122626 - DNA, 25 bp, Probe Sequence
attccagtaacttttttgtgtatgt

SEQ ID NO: 122627 - DNA, 25 bp, Probe Sequence
attccttagtcatggtgttgcgtaa

SEQ ID NO: 122628 - DNA, 25 bp, Probe Sequence
tgattcgtctaaaagcgtcccttaa

SEQ ID NO: 122629 - DNA, 25 bp, Probe Sequence
attctgtgcatgggtaagtaactta

SEQ ID NO: 122630 - DNA, 25 bp, Probe Sequence
attgcatctgggcttaaacccatag

SEQ ID NO: 122631 - DNA, 25 bp, Probe Sequence
attgcaggggggagcagactctcat

SEQ ID NO: 122632 - DNA, 25 bp, Probe Sequence
atatcagtggagaaaatggagactc

SEQ ID NO: 122633 - DNA, 25 bp, Probe Sequence
attcggatgctcaacagagggcact

SEQ ID NO: 122634 - DNA, 25 bp, Probe Sequence
attgccaaggcaacgggtgactgga

SEQ ID NO: 122635 - DNA, 25 bp, Probe Sequence
atatgccgaatcatgggggacctga

SEQ ID NO: 122636 - DNA, 25 bp, Probe Sequence
atatatcaactcagggaacatcccc

SEQ ID NO: 122637 - DNA, 25 bp, Probe Sequence
attgggacatcaggggaacaagccc

SEQ ID NO: 122638 - DNA, 25 bp, Probe Sequence
attgatgggccagagagaacacaac

SEQ ID NO: 122639 - DNA, 25 bp, Probe Sequence
attgctgggccatatgaaaaatcaa

SEQ ID NO: 122640 - DNA, 25 bp, Probe Sequence
attgctgcgtcctagctagaggaat

SEQ ID NO: 122641 - DNA, 25 bp, Probe Sequence
attggctagccatgtgcagaggatt

SEQ ID NO: 122642 - DNA, 25 bp, Probe Sequence
attgctgcgcagatttgcagggttg

SEQ ID NO: 122643 - DNA, 25 bp, Probe Sequence
attgattggtcatttctgctggctt

SEQ ID NO: 122644 - DNA, 25 bp, Probe Sequence
attgattgagacttggctccagtgc

SEQ ID NO: 122645 - DNA, 25 bp, Probe Sequence
attgcatcatagtatttgttgacct

SEQ ID NO: 122646 - DNA, 25 bp, Probe Sequence
attgcctagtatgttaatttgctca

SEQ ID NO: 122647 - DNA, 25 bp, Probe Sequence
attgcctgaaactttaaattgtgct

SEQ ID NO: 122648 - DNA, 25 bp, Probe Sequence
attgctccgtactctaacatctagc

SEQ ID NO: 122649 - DNA, 25 bp, Probe Sequence
attcccgtactgattagtcaacagt

SEQ ID NO: 122650 - DNA, 25 bp, Probe Sequence
attccaggaagtattattccaagag

SEQ ID NO: 122651 - DNA, 25 bp, Probe Sequence
attccggaacataccaatttaagct

SEQ ID NO: 122652 - DNA, 25 bp, Probe Sequence
attcctggaatcactccttttgggt

SEQ ID NO: 122653 - DNA, 25 bp, Probe Sequence
attaccaaattagcccaggcgtggt

SEQ ID NO: 122654 - DNA, 25 bp, Probe Sequence
atatacgaaattatccggccaggag

SEQ ID NO: 122655 - DNA, 25 bp, Probe Sequence
atgtgatgcgaattttcccgaccaa

SEQ ID NO: 122656 - DNA, 25 bp, Probe Sequence
attgcaaacctatacacaaccaagt

SEQ ID NO: 122657 - DNA, 25 bp, Probe Sequence
attgcagtatcctttaaaagcaaaa

SEQ ID NO: 122658 - DNA, 25 bp, Probe Sequence
attggaactgacctgaagaagcaaa

SEQ ID NO: 122659 - DNA, 25 bp, Probe Sequence
attgaaataggccatgaagttaaaa

SEQ ID NO: 122660 - DNA, 25 bp, Probe Sequence
attgaagagggccgcaagccccaaa

SEQ ID NO: 122661 - DNA, 25 bp, Probe Sequence
attcaatacgcgggatagccccaaa

SEQ ID NO: 122662 - DNA, 25 bp, Probe Sequence
attgagaaggcggtgatctccccag

SEQ ID NO: 122663 - DNA, 25 bp, Probe Sequence
attgagaaagggtcccagtgccaga

SEQ ID NO: 122664 - DNA, 25 bp, Probe Sequence
attggactatggctccgattcgact

SEQ ID NO: 122665 - DNA, 25 bp, Probe Sequence
attgcaattattccccatgaacgag

SEQ ID NO: 122666 - DNA, 25 bp, Probe Sequence
attgcaattattccccatgaacgag

SEQ ID NO: 122667 - DNA, 25 bp, Probe Sequence
attgctgctgttggtcccattaagc

SEQ ID NO: 122668 - DNA, 25 bp, Probe Sequence
attgatgtggctttcctcttaaata

SEQ ID NO: 122669 - DNA, 25 bp, Probe Sequence
attgtgaagcatttacctttcaaaa

SEQ ID NO: 122670 - DNA, 25 bp, Probe Sequence
attgtagagaatttccttcctactg

SEQ ID NO: 122671 - DNA, 25 bp, Probe Sequence
attttggttctcacttccaacttag

SEQ ID NO: 122672 - DNA, 25 bp, Probe Sequence
attgttagaattaagttccaactat

SEQ ID NO: 122673 - DNA, 25 bp, Probe Sequence
attgtatacaacatagccccaaata

SEQ ID NO: 122674 - DNA, 25 bp, Probe Sequence
attgtaacttcatgtgtctccaaca

SEQ ID NO: 122675 - DNA, 25 bp, Probe Sequence
attgtagaactcagtgttggacaca

SEQ ID NO: 122676 - DNA, 25 bp, Probe Sequence
attgttgaacaagtctggggaaaat

SEQ ID NO: 122677 - DNA, 25 bp, Probe Sequence
attgtatatacaagtgggacgtaaa

SEQ ID NO: 122678 - DNA, 25 bp, Probe Sequence
attggaagtcatcttggagcgtatg

SEQ ID NO: 122679 - DNA, 25 bp, Probe Sequence
attgaaagctcttcagtggaccttg

SEQ ID NO: 122680 - DNA, 25 bp, Probe Sequence
attgtaagcttatgtcacaggcctg

SEQ ID NO: 122681 - DNA, 25 bp, Probe Sequence
attgaaacttagttcatgtctgctg

SEQ ID NO: 122682 - DNA, 25 bp, Probe Sequence
attgaacgtcatagcctcagctggc

SEQ ID NO: 122683 - DNA, 25 bp, Probe Sequence
attgatacgacatgcaccatctggg

SEQ ID NO: 122684 - DNA, 25 bp, Probe Sequence
attgatacaaagtgagcctgtgcct

SEQ ID NO: 122685 - DNA, 25 bp, Probe Sequence
attgcaagaaaacagtctattcggt

SEQ ID NO: 122686 - DNA, 25 bp, Probe Sequence
attgcagatatttgatgtagttttc

SEQ ID NO: 122687 - DNA, 25 bp, Probe Sequence
attgaggatttgtttggaattcaaa

SEQ ID NO: 122688 - DNA, 25 bp, Probe Sequence
attgaggacttctggcgaatgatct

SEQ ID NO: 122689 - DNA, 25 bp, Probe Sequence
attgagaatttctgagcagtgtgtg

SEQ ID NO: 122690 - DNA, 25 bp, Probe Sequence
attgacaatgttgagaccagctggg

SEQ ID NO: 122691 - DNA, 25 bp, Probe Sequence
attccagactgggaaccagctttca

SEQ ID NO: 122692 - DNA, 25 bp, Probe Sequence
attggacactggacacactagttcc

SEQ ID NO: 122693 - DNA, 25 bp, Probe Sequence
attggccagtggactcatccattct

SEQ ID NO: 122694 - DNA, 25 bp, Probe Sequence
attcgccttgttacactcaatgcaa

SEQ ID NO: 122695 - DNA, 25 bp, Probe Sequence
attgccaccgtctaggctaaacatt

SEQ ID NO: 122696 - DNA, 25 bp, Probe Sequence
attcgccatcgtgagttccaggatt

SEQ ID NO: 122697 - DNA, 25 bp, Probe Sequence
attcccagggagccatgtctggaga

SEQ ID NO: 122698 - DNA, 25 bp, Probe Sequence
cttgccgaaggggagtccgaactag

SEQ ID NO: 122699 - DNA, 25 bp, Probe Sequence
attgcctaaggctggtgcactgaac

SEQ ID NO: 122700 - DNA, 25 bp, Probe Sequence
attgtcgggagcttgtggcacatca

SEQ ID NO: 122701 - DNA, 25 bp, Probe Sequence
attggccaggcgcagtggcacatgc

SEQ ID NO: 122702 - DNA, 25 bp, Probe Sequence
attggatcaacacttctgcagcaca

SEQ ID NO: 122703 - DNA, 25 bp, Probe Sequence
attggatcaaattatcttcagcatg

SEQ ID NO: 122704 - DNA, 25 bp, Probe Sequence
attggactgattcatgctattgcaa

SEQ ID NO: 122705 - DNA, 25 bp, Probe Sequence
attggactctaattgctttgaacta

SEQ ID NO: 122706 - DNA, 25 bp, Probe Sequence
attgggccatagtttgttaatctca

SEQ ID NO: 122707 - DNA, 25 bp, Probe Sequence
attgggctgctgcatattttaatca

SEQ ID NO: 122708 - DNA, 25 bp, Probe Sequence
attgtttgctgttattagtaataaa

SEQ ID NO: 122709 - DNA, 25 bp, Probe Sequence
attgtcttgctctctatgggaaaaa

SEQ ID NO: 122710 - DNA, 25 bp, Probe Sequence
gttactttcacctcaggtcgtaact

SEQ ID NO: 122711 - DNA, 25 bp, Probe Sequence
attgactttcccactgtctttaagt

SEQ ID NO: 122712 - DNA, 25 bp, Probe Sequence
attgcaaactctgaactttttacaa

SEQ ID NO: 122713 - DNA, 25 bp, Probe Sequence
attccaatctctgttctgtttggca

SEQ ID NO: 122714 - DNA, 25 bp, Probe Sequence
attctgaagattgtccctcttgcac

SEQ ID NO: 122715 - DNA, 25 bp, Probe Sequence
attggaaattttggcactctgagaa

SEQ ID NO: 122716 - DNA, 25 bp, Probe Sequence
attggagaatactttgcttcatagt

SEQ ID NO: 122717 - DNA, 25 bp, Probe Sequence
attgtgacttacttatctgtatcgg

SEQ ID NO: 122718 - DNA, 25 bp, Probe Sequence
attgtgctttatgaatctgtcctgt

SEQ ID NO: 122719 - DNA, 25 bp, Probe Sequence
attggttatggttcattgtccggag

SEQ ID NO: 122720 - DNA, 25 bp, Probe Sequence
attgtcctattttatgatcccagga

SEQ ID NO: 122721 - DNA, 25 bp, Probe Sequence
attggcctttattggatcaactgag

SEQ ID NO: 122722 - DNA, 25 bp, Probe Sequence
attgagccccctgagagaatggagt

SEQ ID NO: 122723 - DNA, 25 bp, Probe Sequence
attgcacccaccctgtagaagatgg

SEQ ID NO: 122724 - DNA, 25 bp, Probe Sequence
attgcacccaccctgtagaagatgg

SEQ ID NO: 122725 - DNA, 25 bp, Probe Sequence
attgacgcgacgctcacaggagggc

SEQ ID NO: 122726 - DNA, 25 bp, Probe Sequence
attgggggcatgttcacagtggctg

SEQ ID NO: 122727 - DNA, 25 bp, Probe Sequence
attgtggctgtcaaatccatgtgtc

SEQ ID NO: 122728 - DNA, 25 bp, Probe Sequence
attgtgcctttattttatgagcccc

SEQ ID NO: 122729 - DNA, 25 bp, Probe Sequence
atgtacacgatttttaaggaccacg

SEQ ID NO: 122730 - DNA, 25 bp, Probe Sequence
attaccacttaaagaggaaccagag

SEQ ID NO: 122731 - DNA, 25 bp, Probe Sequence
attccgcacttaaggattaaccagg

SEQ ID NO: 122732 - DNA, 25 bp, Probe Sequence
attccacaatctatggcttccacca

SEQ ID NO: 122733 - DNA, 25 bp, Probe Sequence
atatacgaattagagtcccatccat

SEQ ID NO: 122734 - DNA, 25 bp, Probe Sequence
attgaccaaggaaatcggcctctat

SEQ ID NO: 122735 - DNA, 25 bp, Probe Sequence
attgccttggagaattcgagttatt

SEQ ID NO: 122736 - DNA, 25 bp, Probe Sequence
attgcaatgttcagtcctagttttt

SEQ ID NO: 122737 - DNA, 25 bp, Probe Sequence
attgacgtctatgggtgtttgtttt

SEQ ID NO: 122738 - DNA, 25 bp, Probe Sequence
attgaagctttttgttgccttatct

SEQ ID NO: 122739 - DNA, 25 bp, Probe Sequence
attgggcttcttcgttaatagatta

SEQ ID NO: 122740 - DNA, 25 bp, Probe Sequence
attggtctctctaggtttttatata

SEQ ID NO: 122741 - DNA, 25 bp, Probe Sequence
attgctctttttgtattttcgtagt

SEQ ID NO: 122742 - DNA, 25 bp, Probe Sequence
attgtgttacttttattatttggat

SEQ ID NO: 122743 - DNA, 25 bp, Probe Sequence
attggtttgctatttgatcttcttg

SEQ ID NO: 122744 - DNA, 25 bp, Probe Sequence
attggttctcagttaacttctcaga

SEQ ID NO: 122745 - DNA, 25 bp, Probe Sequence
attggtttccaatactgcacacata

SEQ ID NO: 122746 - DNA, 25 bp, Probe Sequence
attggtttccaatactgcacacata

SEQ ID NO: 122747 - DNA, 25 bp, Probe Sequence
attggattctctcatcaaggctaca

SEQ ID NO: 122748 - DNA, 25 bp, Probe Sequence
attgtattatgtgacaaccatgcag

SEQ ID NO: 122749 - DNA, 25 bp, Probe Sequence
attgttatgactggtacactctggc

SEQ ID NO: 122750 - DNA, 25 bp, Probe Sequence
attggtaggctaatcacactctgta

SEQ ID NO: 122751 - DNA, 25 bp, Probe Sequence
attggttgtgtaatcctttgtgaaa

SEQ ID NO: 122752 - DNA, 25 bp, Probe Sequence
attgtcttacatatactttctagaa

SEQ ID NO: 122753 - DNA, 25 bp, Probe Sequence
attgtttccttgtactgatataaac

SEQ ID NO: 122754 - DNA, 25 bp, Probe Sequence
attgcttgtgcctcaactgtttaag

SEQ ID NO: 122755 - DNA, 25 bp, Probe Sequence
attgtgtgttgctggactgttttgg

SEQ ID NO: 122756 - DNA, 25 bp, Probe Sequence
attgtgagttggggcactggctgtg

SEQ ID NO: 122757 - DNA, 25 bp, Probe Sequence
attggaggggctacaggcagctgga

SEQ ID NO: 122758 - DNA, 25 bp, Probe Sequence
attgagcaggtagttccgcacgtgt

SEQ ID NO: 122759 - DNA, 25 bp, Probe Sequence
attgtatgtgtactttcatgccagt

SEQ ID NO: 122760 - DNA, 25 bp, Probe Sequence
attgtgcaggtgtcatttatctatg

SEQ ID NO: 122761 - DNA, 25 bp, Probe Sequence
atttcgggaagtttgcctggctagt

SEQ ID NO: 122762 - DNA, 25 bp, Probe Sequence
attgtagggtagagagacgctgggt

SEQ ID NO: 122763 - DNA, 25 bp, Probe Sequence
attgtagggtacagaatagagcgtg

SEQ ID NO: 122764 - DNA, 25 bp, Probe Sequence
attaattggtaagtgaaaactctgt

SEQ ID NO: 122765 - DNA, 25 bp, Probe Sequence
attgtgctttgatactaaaaatctg

SEQ ID NO: 122766 - DNA, 25 bp, Probe Sequence
attggtttatgctgttaacaatcag

SEQ ID NO: 122767 - DNA, 25 bp, Probe Sequence
attggttgaatgtgtatctatttga

SEQ ID NO: 122768 - DNA, 25 bp, Probe Sequence
attcgattgctatttgagactttta

SEQ ID NO: 122769 - DNA, 25 bp, Probe Sequence
attctggttaattggggcttattgc

SEQ ID NO: 122770 - DNA, 25 bp, Probe Sequence
attgatggtggtcatccgcatctgg

SEQ ID NO: 122771 - DNA, 25 bp, Probe Sequence
attgatggtggtcatccgcatctgg

SEQ ID NO: 122772 - DNA, 25 bp, Probe Sequence
attgtggatatttgtcctgcatcag

SEQ ID NO: 122773 - DNA, 25 bp, Probe Sequence
attgtggatatttgtcctgcatcag

SEQ ID NO: 122774 - DNA, 25 bp, Probe Sequence
attgtagatactagtccctgtgtca

SEQ ID NO: 122775 - DNA, 25 bp, Probe Sequence
attgggacagtttacagcttgatca

SEQ ID NO: 122776 - DNA, 25 bp, Probe Sequence
attggagcacatgttactgcttcat

SEQ ID NO: 122777 - DNA, 25 bp, Probe Sequence
attgatgtgactttctgacactgat

SEQ ID NO: 122778 - DNA, 25 bp, Probe Sequence
attgttgacatgaatctatgcgtga

SEQ ID NO: 122779 - DNA, 25 bp, Probe Sequence
attttgacatccctgaaggggagct

SEQ ID NO: 122780 - DNA, 25 bp, Probe Sequence
attgcttgaacccaggaggtggagg

SEQ ID NO: 122781 - DNA, 25 bp, Probe Sequence
attgcttgaacccaggaggcggagg

SEQ ID NO: 122782 - DNA, 25 bp, Probe Sequence
attgcattagagcacggagtccgtc

SEQ ID NO: 122783 - DNA, 25 bp, Probe Sequence
attgatatatgctcaagcagatgtt

SEQ ID NO: 122784 - DNA, 25 bp, Probe Sequence
attgcaggaggccacactgatgttc

SEQ ID NO: 122785 - DNA, 25 bp, Probe Sequence
attggcgagatcccatggatgataa

SEQ ID NO: 122786 - DNA, 25 bp, Probe Sequence
attgtgccagacccttgatggagga

SEQ ID NO: 122787 - DNA, 25 bp, Probe Sequence
attggccatttccattatggtggca

SEQ ID NO: 122788 - DNA, 25 bp, Probe Sequence
attggccatgtttcaatcgaatgga

SEQ ID NO: 122789 - DNA, 25 bp, Probe Sequence
attggcgtttgtcatcagaatcaga

SEQ ID NO: 122790 - DNA, 25 bp, Probe Sequence
attgggttttattagcacaaatgtt

SEQ ID NO: 122791 - DNA, 25 bp, Probe Sequence
attgtgttccttttccacagattgt

SEQ ID NO: 122792 - DNA, 25 bp, Probe Sequence
attggtatcattaagacaacagatt

SEQ ID NO: 122793 - DNA, 25 bp, Probe Sequence
attggttatccaatgccaacaggat

SEQ ID NO: 122794 - DNA, 25 bp, Probe Sequence
attgagcttcatcatgaccagaagc

SEQ ID NO: 122795 - DNA, 25 bp, Probe Sequence
attggttccaagacgcgtaggcgag

SEQ ID NO: 122796 - DNA, 25 bp, Probe Sequence
attgcttccctcatctcagtaggga

SEQ ID NO: 122797 - DNA, 25 bp, Probe Sequence
attgcttccctcatctcagtaggga

SEQ ID NO: 122798 - DNA, 25 bp, Probe Sequence
attattccttgagtctttagggatt

SEQ ID NO: 122799 - DNA, 25 bp, Probe Sequence
attgttccttgcttttatagttgta

SEQ ID NO: 122800 - DNA, 25 bp, Probe Sequence
attgcttcttgtgttttactgtcag

SEQ ID NO: 122801 - DNA, 25 bp, Probe Sequence
attccttttcttgtttatcagcagt

SEQ ID NO: 122802 - DNA, 25 bp, Probe Sequence
attccatatttataatgttggccac

SEQ ID NO: 122803 - DNA, 25 bp, Probe Sequence
attccatatttataatgttggccac

SEQ ID NO: 122804 - DNA, 25 bp, Probe Sequence
attcctactatatacccatagaact

SEQ ID NO: 122805 - DNA, 25 bp, Probe Sequence
attccaacgtgatattccttgaagt

SEQ ID NO: 122806 - DNA, 25 bp, Probe Sequence
gagttaaagctataacctgtaacct

SEQ ID NO: 122807 - DNA, 25 bp, Probe Sequence
attgtagaaatatagacctgtgaaa

SEQ ID NO: 122808 - DNA, 25 bp, Probe Sequence
attgtcaaaatagtccaccagtgat

SEQ ID NO: 122809 - DNA, 25 bp, Probe Sequence
attgtcgacgtgactcaccagacgt

SEQ ID NO: 122810 - DNA, 25 bp, Probe Sequence
attgtagactgtaccaagaagcaac

SEQ ID NO: 122811 - DNA, 25 bp, Probe Sequence
attgtgaactttccatcagactgcc

SEQ ID NO: 122812 - DNA, 25 bp, Probe Sequence
ataggaaccactcaggtgcagccag

SEQ ID NO: 122813 - DNA, 25 bp, Probe Sequence
ataacaaccacacattgggccaggc

SEQ ID NO: 122814 - DNA, 25 bp, Probe Sequence
attaaaccacatcatggaccaaatg

SEQ ID NO: 122815 - DNA, 25 bp, Probe Sequence
attgaagtccaatgcatgataccag

SEQ ID NO: 122816 - DNA, 25 bp, Probe Sequence
attgagcgtccaacctatactaacc

SEQ ID NO: 122817 - DNA, 25 bp, Probe Sequence
attgcgggcacaacattatcctcaa

SEQ ID NO: 122818 - DNA, 25 bp, Probe Sequence
attaggctacgtattccacattgaa

SEQ ID NO: 122819 - DNA, 25 bp, Probe Sequence
aaatggtacgttataacatcaatta

SEQ ID NO: 122820 - DNA, 25 bp, Probe Sequence
atcactggtactctttctaatcctg

SEQ ID NO: 122821 - DNA, 25 bp, Probe Sequence
attccaggactaattcttaatcggc

SEQ ID NO: 122822 - DNA, 25 bp, Probe Sequence
attcctgtaagtttcttaactgcat

SEQ ID NO: 122823 - DNA, 25 bp, Probe Sequence
attgatctctaagtgttctacaact

SEQ ID NO: 122824 - DNA, 25 bp, Probe Sequence
attgatcttaagtgtctccttgctc

SEQ ID NO: 122825 - DNA, 25 bp, Probe Sequence
attgatcttaagtgtctccttgctc

SEQ ID NO: 122826 - DNA, 25 bp, Probe Sequence
attgatcttaagtgtctccttgctc

SEQ ID NO: 122827 - DNA, 25 bp, Probe Sequence
attgatcttcagggctgtttttgtt

SEQ ID NO: 122828 - DNA, 25 bp, Probe Sequence
attgatatatatccttgttttatgt

SEQ ID NO: 122829 - DNA, 25 bp, Probe Sequence
attgaaatgttcgttttctcctgcc

SEQ ID NO: 122830 - DNA, 25 bp, Probe Sequence
attgaacagcttatcttccacttgc

SEQ ID NO: 122831 - DNA, 25 bp, Probe Sequence
attgtacagcatgctatctatagtt

SEQ ID NO: 122832 - DNA, 25 bp, Probe Sequence
attgcaccagatgccattacattta

SEQ ID NO: 122833 - DNA, 25 bp, Probe Sequence
attgcgacagtctgcataacattgt

SEQ ID NO: 122834 - DNA, 25 bp, Probe Sequence
attgccagcaattctaaaattgtag

SEQ ID NO: 122835 - DNA, 25 bp, Probe Sequence
attgtcgcaagtcacagaattattt

SEQ ID NO: 122836 - DNA, 25 bp, Probe Sequence
attgatccaagcatgaccctgtttt

SEQ ID NO: 122837 - DNA, 25 bp, Probe Sequence
attgaccatagatgactccgtttgc

SEQ ID NO: 122838 - DNA, 25 bp, Probe Sequence
attgacttaattgcttctgtttatt

SEQ ID NO: 122839 - DNA, 25 bp, Probe Sequence
attgtttgggctgcttttagtttct

SEQ ID NO: 122840 - DNA, 25 bp, Probe Sequence
attgttcgaatcacttttaggatgt

SEQ ID NO: 122841 - DNA, 25 bp, Probe Sequence
attgttgagaccaagatctgtcaag

SEQ ID NO: 122842 - DNA, 25 bp, Probe Sequence
attgttggcatcaaagtcaccaatg

SEQ ID NO: 122843 - DNA, 25 bp, Probe Sequence
attgtttcatcccatgtacaaaacc

SEQ ID NO: 122844 - DNA, 25 bp, Probe Sequence
attgtgttcaccaagctcacaccat

SEQ ID NO: 122845 - DNA, 25 bp, Probe Sequence
attgttctgctctaactgatacctc

SEQ ID NO: 122846 - DNA, 25 bp, Probe Sequence
attgtctcttcatgtctattccatt

SEQ ID NO: 122847 - DNA, 25 bp, Probe Sequence
attgcttcatccaaaaatcatctga

SEQ ID NO: 122848 - DNA, 25 bp, Probe Sequence
attgggagccatcatatgtcacagt

SEQ ID NO: 122849 - DNA, 25 bp, Probe Sequence
attggagaggattatttcacattga

SEQ ID NO: 122850 - DNA, 25 bp, Probe Sequence
attggagaggattcttttgcattga

SEQ ID NO: 122851 - DNA, 25 bp, Probe Sequence
attggtggctgttggattctgactg

SEQ ID NO: 122852 - DNA, 25 bp, Probe Sequence
attggtgtctgatgagagcctgcct

SEQ ID NO: 122853 - DNA, 25 bp, Probe Sequence
attgcctggctgttgaaggccgtgg

SEQ ID NO: 122854 - DNA, 25 bp, Probe Sequence
attgcctactttaacacctgtcaga

SEQ ID NO: 122855 - DNA, 25 bp, Probe Sequence
attccaacctttaactctgtatcag

SEQ ID NO: 122856 - DNA, 25 bp, Probe Sequence
attcccaccttcgaagattaccaga

SEQ ID NO: 122857 - DNA, 25 bp, Probe Sequence
attcctcacgtcactgagaacccag

SEQ ID NO: 122858 - DNA, 25 bp, Probe Sequence
attgcctacagtgacgaaagtgtct

SEQ ID NO: 122859 - DNA, 25 bp, Probe Sequence
attctctagaggccacagtcagcgg

SEQ ID NO: 122860 - DNA, 25 bp, Probe Sequence
attgctgcatatcgtgccaagggca

SEQ ID NO: 122861 - DNA, 25 bp, Probe Sequence
attgcatctgatggtctcaagggtc

SEQ ID NO: 122862 - DNA, 25 bp, Probe Sequence
attgtccaggcctgcagaggtgcaa

SEQ ID NO: 122863 - DNA, 25 bp, Probe Sequence
attgtccagatttgtcgtgttacag

SEQ ID NO: 122864 - DNA, 25 bp, Probe Sequence
attgtctctttattcagaagctaca

SEQ ID NO: 122865 - DNA, 25 bp, Probe Sequence
attgtactcttatcatgtcatttat

SEQ ID NO: 122866 - DNA, 25 bp, Probe Sequence
attgtccttaatgcagtgatttata

SEQ ID NO: 122867 - DNA, 25 bp, Probe Sequence
attgatcagcttgtgtatggtttag

SEQ ID NO: 122868 - DNA, 25 bp, Probe Sequence
attgtgagctggggcattggctgcg

SEQ ID NO: 122869 - DNA, 25 bp, Probe Sequence
attgcatggcaggtggtttgctggt

SEQ ID NO: 122870 - DNA, 25 bp, Probe Sequence
attgctggtaggctgatgccgcgtc

SEQ ID NO: 122871 - DNA, 25 bp, Probe Sequence
attgtggtatacggtgtcaggtttc

SEQ ID NO: 122872 - DNA, 25 bp, Probe Sequence
atatgggctgactggtgtaggtttg

SEQ ID NO: 122873 - DNA, 25 bp, Probe Sequence
atatgcacgtagttaatgaagttta

SEQ ID NO: 122874 - DNA, 25 bp, Probe Sequence
attgacaggcaataatggttacaac

SEQ ID NO: 122875 - DNA, 25 bp, Probe Sequence
attgacaagaagatcgagttccacc

SEQ ID NO: 122876 - DNA, 25 bp, Probe Sequence
attgcaaagaaattcgccttggcca

SEQ ID NO: 122877 - DNA, 25 bp, Probe Sequence
attgataagtcacttggctctcggc

SEQ ID NO: 122878 - DNA, 25 bp, Probe Sequence
attgtaattcaaatccattcagtgc

SEQ ID NO: 122879 - DNA, 25 bp, Probe Sequence
attgataacatctttcgcttcaccc

SEQ ID NO: 122880 - DNA, 25 bp, Probe Sequence
attgacaaaatcatgaggctcactc

SEQ ID NO: 122881 - DNA, 25 bp, Probe Sequence
attgacagaaatgtctaccagcact

SEQ ID NO: 122882 - DNA, 25 bp, Probe Sequence
attgacaaaataattgagcccacat

SEQ ID NO: 122883 - DNA, 25 bp, Probe Sequence
attgtataaatactcataactaatt

SEQ ID NO: 122884 - DNA, 25 bp, Probe Sequence
attgcattacaacctctaacttaaa

SEQ ID NO: 122885 - DNA, 25 bp, Probe Sequence
attgggcaacaccttgttctataaa

SEQ ID NO: 122886 - DNA, 25 bp, Probe Sequence
attgagagtgattcctttcctaaaa

SEQ ID NO: 122887 - DNA, 25 bp, Probe Sequence
attgagagtgattcctttcctaaaa

SEQ ID NO: 122888 - DNA, 25 bp, Probe Sequence
attgacagtgttgccccagatatca

SEQ ID NO: 122889 - DNA, 25 bp, Probe Sequence
attacgatgttcaccacaggaaatc

SEQ ID NO: 122890 - DNA, 25 bp, Probe Sequence
attgtcctggtcacccagacacaaa

SEQ ID NO: 122891 - DNA, 25 bp, Probe Sequence
attttgctggacaccaaggataaaa

SEQ ID NO: 122892 - DNA, 25 bp, Probe Sequence
attcactccaacacctgggtataaa

SEQ ID NO: 122893 - DNA, 25 bp, Probe Sequence
attccacctcctaccggaatataat

SEQ ID NO: 122894 - DNA, 25 bp, Probe Sequence
attccacctcccaagctggagacat

SEQ ID NO: 122895 - DNA, 25 bp, Probe Sequence
atttatacctagaagtgtggactgc

SEQ ID NO: 122896 - DNA, 25 bp, Probe Sequence
attgctgtaccaaaaggaaacatgc

SEQ ID NO: 122897 - DNA, 25 bp, Probe Sequence
attgctgacccaagaggaaacactc

SEQ ID NO: 122898 - DNA, 25 bp, Probe Sequence
attgctgacctgagaggatggcctc

SEQ ID NO: 122899 - DNA, 25 bp, Probe Sequence
attgtgcacttgaggagctcagatt

SEQ ID NO: 122900 - DNA, 25 bp, Probe Sequence
atattgcaatgctatgggaaagtta

SEQ ID NO: 122901 - DNA, 25 bp, Probe Sequence
attgctaaggagctgatactttgac

SEQ ID NO: 122902 - DNA, 25 bp, Probe Sequence
attgtaagcacacatgtaattgatg

SEQ ID NO: 122903 - DNA, 25 bp, Probe Sequence
attgactggacactatatatatata

SEQ ID NO: 122904 - DNA, 25 bp, Probe Sequence
attgactggatttagatttatctag

SEQ ID NO: 122905 - DNA, 25 bp, Probe Sequence
attgtcagtatttgtgcatattgtg

SEQ ID NO: 122906 - DNA, 25 bp, Probe Sequence
attgtcactgtcatcagaatctgtc

SEQ ID NO: 122907 - DNA, 25 bp, Probe Sequence
attgtcactgccaagcgtacagact

SEQ ID NO: 122908 - DNA, 25 bp, Probe Sequence
attgctactgccaagagctagttct

SEQ ID NO: 122909 - DNA, 25 bp, Probe Sequence
attgctactatcaagagggctgggc

SEQ ID NO: 122910 - DNA, 25 bp, Probe Sequence
attgtacgcacaatgggcggtaggc

SEQ ID NO: 122911 - DNA, 25 bp, Probe Sequence
attgtacgcaaatggcggttaggcg

SEQ ID NO: 122912 - DNA, 25 bp, Probe Sequence
attgtacgcaaatgggctggtaggc

SEQ ID NO: 122913 - DNA, 25 bp, Probe Sequence
attccgccaaagtggcttcaaggcc

SEQ ID NO: 122914 - DNA, 25 bp, Probe Sequence
attcagcgtcatacatgtgggtata

SEQ ID NO: 122915 - DNA, 25 bp, Probe Sequence
attccttctgacatggggaaagtca

SEQ ID NO: 122916 - DNA, 25 bp, Probe Sequence
attgccttcaattgggagagaaagc

SEQ ID NO: 122917 - DNA, 25 bp, Probe Sequence
attgtcttgttctgtgatgagggga

SEQ ID NO: 122918 - DNA, 25 bp, Probe Sequence
attgtcttgttctgtgatgagggga

SEQ ID NO: 122919 - DNA, 25 bp, Probe Sequence
attccttcactccagtgtgtggggc

SEQ ID NO: 122920 - DNA, 25 bp, Probe Sequence
attgccccattcctgatcttagggt

SEQ ID NO: 122921 - DNA, 25 bp, Probe Sequence
attctgcctttacgttaccagtgtt

SEQ ID NO: 122922 - DNA, 25 bp, Probe Sequence
atttgccattagtgattaccgagta

SEQ ID NO: 122923 - DNA, 25 bp, Probe Sequence
atttaagtagtatgtgaccgagcta

SEQ ID NO: 122924 - DNA, 25 bp, Probe Sequence
tatttcttggggtggaccaggcgcc

SEQ ID NO: 122925 - DNA, 25 bp, Probe Sequence
atttctacagatgtctgggccaggg

SEQ ID NO: 122926 - DNA, 25 bp, Probe Sequence
atttcggcaacttccagtgcaagga

SEQ ID NO: 122927 - DNA, 25 bp, Probe Sequence
attcatcgacacctaaaatctagga

SEQ ID NO: 122928 - DNA, 25 bp, Probe Sequence
attgatgaagctgtagaaccaacga

SEQ ID NO: 122929 - DNA, 25 bp, Probe Sequence
attgggcagctcctagaatcacagc

SEQ ID NO: 122930 - DNA, 25 bp, Probe Sequence
attgtgtcgtgccaatgagaacaga

SEQ ID NO: 122931 - DNA, 25 bp, Probe Sequence
attgtgccctgccaaggcacagcgt

SEQ ID NO: 122932 - DNA, 25 bp, Probe Sequence
attgtcccgagatgtgtcaggtaat

SEQ ID NO: 122933 - DNA, 25 bp, Probe Sequence
attgaccctgaatcttgaagacgtt

SEQ ID NO: 122934 - DNA, 25 bp, Probe Sequence
attgagtctttatctgtgacagtat

SEQ ID NO: 122935 - DNA, 25 bp, Probe Sequence
attgtgactattgttggtcaaagta

SEQ ID NO: 122936 - DNA, 25 bp, Probe Sequence
attgatttccatattggttaggata

SEQ ID NO: 122937 - DNA, 25 bp, Probe Sequence
attaggcccctctattttcaggata

SEQ ID NO: 122938 - DNA, 25 bp, Probe Sequence
attaagtctccagaatccttggaca

SEQ ID NO: 122939 - DNA, 25 bp, Probe Sequence
attgtggtttccaacccagtggaca

SEQ ID NO: 122940 - DNA, 25 bp, Probe Sequence
attgaattattcttccccatgggaa

SEQ ID NO: 122941 - DNA, 25 bp, Probe Sequence
attgacagtatttctcagcatcact

SEQ ID NO: 122942 - DNA, 25 bp, Probe Sequence
attgcagtgcatattatacatccct

SEQ ID NO: 122943 - DNA, 25 bp, Probe Sequence
attgaaaatattaccatgagccatc

SEQ ID NO: 122944 - DNA, 25 bp, Probe Sequence
attatggaataaacctggcgtcagc

SEQ ID NO: 122945 - DNA, 25 bp, Probe Sequence
attgaggagaaaccttgggcagctc

SEQ ID NO: 122946 - DNA, 25 bp, Probe Sequence
attgagtatctgtcactcctggggt

SEQ ID NO: 122947 - DNA, 25 bp, Probe Sequence
attgaggatagatgcaggcgggtga

SEQ ID NO: 122948 - DNA, 25 bp, Probe Sequence
attgagcagaagtacgactgtggag

SEQ ID NO: 122949 - DNA, 25 bp, Probe Sequence
attgactaacataatattgctgaga

SEQ ID NO: 122950 - DNA, 25 bp, Probe Sequence
attgccagaatcagatatcaggaag

SEQ ID NO: 122951 - DNA, 25 bp, Probe Sequence
attgtcacaaaggccatcagctcca

SEQ ID NO: 122952 - DNA, 25 bp, Probe Sequence
attgatatgataaactctagctcta

SEQ ID NO: 122953 - DNA, 25 bp, Probe Sequence
attgttctatatcttcgctctagct

SEQ ID NO: 122954 - DNA, 25 bp, Probe Sequence
attgatgtgtactcttcctattgat

SEQ ID NO: 122955 - DNA, 25 bp, Probe Sequence
attgatctgcgttttgtcacttttc

SEQ ID NO: 122956 - DNA, 25 bp, Probe Sequence
attgagtcgtattctgtcacataat

SEQ ID NO: 122957 - DNA, 25 bp, Probe Sequence
attgtgatgcgttcttgccagtaca

SEQ ID NO: 122958 - DNA, 25 bp, Probe Sequence
attatgcagaatccacgccagtaca

SEQ ID NO: 122959 - DNA, 25 bp, Probe Sequence
attgctggaaccaaacagatgacca

SEQ ID NO: 122960 - DNA, 25 bp, Probe Sequence
attgatggacacttaagatgattcc

SEQ ID NO: 122961 - DNA, 25 bp, Probe Sequence
attgtttgagctacacagatatatc

SEQ ID NO: 122962 - DNA, 25 bp, Probe Sequence
attgtttgtcatgaaattacttaag

SEQ ID NO: 122963 - DNA, 25 bp, Probe Sequence
attgtttacagaccatttaattaat

SEQ ID NO: 122964 - DNA, 25 bp, Probe Sequence
attgttatacacagctttatgatat

SEQ ID NO: 122965 - DNA, 25 bp, Probe Sequence
attgttctacacctgttttgttatg

SEQ ID NO: 122966 - DNA, 25 bp, Probe Sequence
attgtttatacactgttctccaaag

SEQ ID NO: 122967 - DNA, 25 bp, Probe Sequence
attgtgttctaattgatctctccta

SEQ ID NO: 122968 - DNA, 25 bp, Probe Sequence
attgcttttaattatgacatgcctg

SEQ ID NO: 122969 - DNA, 25 bp, Probe Sequence
attgttgttacatatgagctatgtg

SEQ ID NO: 122970 - DNA, 25 bp, Probe Sequence
attgttgtgcttagaattgctggat

SEQ ID NO: 122971 - DNA, 25 bp, Probe Sequence
attgtattggtatactgcaggcttc

SEQ ID NO: 122972 - DNA, 25 bp, Probe Sequence
attgcttggacttaactagttatca

SEQ ID NO: 122973 - DNA, 25 bp, Probe Sequence
attgtgctgttcgtagtttgtataa

SEQ ID NO: 122974 - DNA, 25 bp, Probe Sequence
attgcaagtcccttgtcttgataaa

SEQ ID NO: 122975 - DNA, 25 bp, Probe Sequence
attgatgcagtcttctattctaaaa

SEQ ID NO: 122976 - DNA, 25 bp, Probe Sequence
attgctgcagtcattcagatggaaa

SEQ ID NO: 122977 - DNA, 25 bp, Probe Sequence
attgccatctagtacatatgcagac

SEQ ID NO: 122978 - DNA, 25 bp, Probe Sequence
attgcacattagaactagctacact

SEQ ID NO: 122979 - DNA, 25 bp, Probe Sequence
attgacattgtcaacacctccagtt

SEQ ID NO: 122980 - DNA, 25 bp, Probe Sequence
attgagctagccacagtgcagcctg

SEQ ID NO: 122981 - DNA, 25 bp, Probe Sequence
attgacgacctggatgctgaagctg

SEQ ID NO: 122982 - DNA, 25 bp, Probe Sequence
attgagtcacatttgttgaagctgc

SEQ ID NO: 122983 - DNA, 25 bp, Probe Sequence
attgactcatcatctgtcagtaatg

SEQ ID NO: 122984 - DNA, 25 bp, Probe Sequence
attgacatgatctgtgccattctag

SEQ ID NO: 122985 - DNA, 25 bp, Probe Sequence
attgtatgcatgtgccacatttcgc

SEQ ID NO: 122986 - DNA, 25 bp, Probe Sequence
attgttctgatagcactattcaaag

SEQ ID NO: 122987 - DNA, 25 bp, Probe Sequence
attcccgaagtcctgttcagaagga

SEQ ID NO: 122988 - DNA, 25 bp, Probe Sequence
attctccaaagcagtgttcacacgg

SEQ ID NO: 122989 - DNA, 25 bp, Probe Sequence
ataacccagccgctgttaatccaat

SEQ ID NO: 122990 - DNA, 25 bp, Probe Sequence
atagccctaggggtggtatgaccca

SEQ ID NO: 122991 - DNA, 25 bp, Probe Sequence
attgtcctggttggtggttctactc

SEQ ID NO: 122992 - DNA, 25 bp, Probe Sequence
attccactttgtggaggtcctcgcc

SEQ ID NO: 122993 - DNA, 25 bp, Probe Sequence
attgcctttgtagtgctttcggccc

SEQ ID NO: 122994 - DNA, 25 bp, Probe Sequence
attgcctttggcaattcttcttctc

SEQ ID NO: 122995 - DNA, 25 bp, Probe Sequence
attgcctattgatacactttactaa

SEQ ID NO: 122996 - DNA, 25 bp, Probe Sequence
attgcaattgtgttacttttattat

SEQ ID NO: 122997 - DNA, 25 bp, Probe Sequence
attgtatctgtgtaacattttgtat

SEQ ID NO: 122998 - DNA, 25 bp, Probe Sequence
attgtattgtactatattgtttata

SEQ ID NO: 122999 - DNA, 25 bp, Probe Sequence
attgttctttgatatgtggcttagt

SEQ ID NO: 123000 - DNA, 25 bp, Probe Sequence
attgttttcatatcttggctatttt

SEQ ID NO: 123001 - DNA, 25 bp, Probe Sequence
attgtattcatatctatttgcattt

SEQ ID NO: 123002 - DNA, 25 bp, Probe Sequence
attcctatatagtttattgacaata

SEQ ID NO: 123003 - DNA, 25 bp, Probe Sequence
atgatcgaaagtgtaactgacaatc

SEQ ID NO: 123004 - DNA, 25 bp, Probe Sequence
attgccaaaggcatgaatcatacaa

SEQ ID NO: 123005 - DNA, 25 bp, Probe Sequence
attgacagattgctagaaagacata

SEQ ID NO: 123006 - DNA, 25 bp, Probe Sequence
attgcaagatagttaaaggcactaa

SEQ ID NO: 123007 - DNA, 25 bp, Probe Sequence
attgaacttacaggatatgagacta

SEQ ID NO: 123008 - DNA, 25 bp, Probe Sequence
attaccagtaagcataagtcatatt

SEQ ID NO: 123009 - DNA, 25 bp, Probe Sequence
attccggttatttaagtcatttctg

SEQ ID NO: 123010 - DNA, 25 bp, Probe Sequence
attccgtggttttcaacatggtact

SEQ ID NO: 123011 - DNA, 25 bp, Probe Sequence
attccggtttttgtcagtacatcta

SEQ ID NO: 123012 - DNA, 25 bp, Probe Sequence
ataccggttttgactcatcgggatt

SEQ ID NO: 123013 - DNA, 25 bp, Probe Sequence
atatacaggtttatgcctaggatgt

SEQ ID NO: 123014 - DNA, 25 bp, Probe Sequence
attgacaaattttggcctttctttg

SEQ ID NO: 123015 - DNA, 25 bp, Probe Sequence
attcccgatttgtagcactttgttg

SEQ ID NO: 123016 - DNA, 25 bp, Probe Sequence
attgcccgtttccatacagggtctc

SEQ ID NO: 123017 - DNA, 25 bp, Probe Sequence
attgcccgtaggttaagaggtcagc

SEQ ID NO: 123018 - DNA, 25 bp, Probe Sequence
cttcccgtggggtaagccaggcaga

SEQ ID NO: 123019 - DNA, 25 bp, Probe Sequence
attcctttaccattaagccaggctt

SEQ ID NO: 123020 - DNA, 25 bp, Probe Sequence
attgactgttaccattgaatgagat

SEQ ID NO: 123021 - DNA, 25 bp, Probe Sequence
attgactgcttgtcccagaagcaat

SEQ ID NO: 123022 - DNA, 25 bp, Probe Sequence
attgattcaagtttctagcagatat

SEQ ID NO: 123023 - DNA, 25 bp, Probe Sequence
attgtctcaacattcattcacagat

SEQ ID NO: 123024 - DNA, 25 bp, Probe Sequence
atctgactgaaattaaacgagcgaa

SEQ ID NO: 123025 - DNA, 25 bp, Probe Sequence
attgttgcaaagtagtgaatggcaa

SEQ ID NO: 123026 - DNA, 25 bp, Probe Sequence
aggttggggatatgactgacaagga

SEQ ID NO: 123027 - DNA, 25 bp, Probe Sequence
aggctcggggagtgaaggcctcgtt

SEQ ID NO: 123028 - DNA, 25 bp, Probe Sequence
attcccgggatgtgaaactccgtct

SEQ ID NO: 123029 - DNA, 25 bp, Probe Sequence
attgactccggacagaaagccctct

SEQ ID NO: 123030 - DNA, 25 bp, Probe Sequence
attacccggttcagaattgcttcat

SEQ ID NO: 123031 - DNA, 25 bp, Probe Sequence
attatcctgggcaaggggaagtcca

SEQ ID NO: 123032 - DNA, 25 bp, Probe Sequence
attcttctgaaataggtactgtgcc

SEQ ID NO: 123033 - DNA, 25 bp, Probe Sequence
attgctcctgttaaaggaactgaca

SEQ ID NO: 123034 - DNA, 25 bp, Probe Sequence
attctccgacagataggaatatgaa

SEQ ID NO: 123035 - DNA, 25 bp, Probe Sequence
attcccgacgagagagactgagggg

SEQ ID NO: 123036 - DNA, 25 bp, Probe Sequence
atgtcccgtagacaagactaaaggc

SEQ ID NO: 123037 - DNA, 25 bp, Probe Sequence
attcctttagagcaacacaaaatgg

SEQ ID NO: 123038 - DNA, 25 bp, Probe Sequence
attcctattaagtacagccgcaaga

SEQ ID NO: 123039 - DNA, 25 bp, Probe Sequence
attgacaatctggactaccccaaga

SEQ ID NO: 123040 - DNA, 25 bp, Probe Sequence
attgacaactctggcatacggccca

SEQ ID NO: 123041 - DNA, 25 bp, Probe Sequence
attgaaagtgtggagacaggcctga

SEQ ID NO: 123042 - DNA, 25 bp, Probe Sequence
attgcagaaggtacagagcctccga

SEQ ID NO: 123043 - DNA, 25 bp, Probe Sequence
atatagaagagaaagcccccaggcc

SEQ ID NO: 123044 - DNA, 25 bp, Probe Sequence
attacaggtgtgagccaaccacgcc

SEQ ID NO: 123045 - DNA, 25 bp, Probe Sequence
attccattgggaagtccacaaccct

SEQ ID NO: 123046 - DNA, 25 bp, Probe Sequence
attccattgggcgagattaatcagc

SEQ ID NO: 123047 - DNA, 25 bp, Probe Sequence
attctcactggctgtgattaagaat

SEQ ID NO: 123048 - DNA, 25 bp, Probe Sequence
attgttcattgctgggagaagaatg

SEQ ID NO: 123049 - DNA, 25 bp, Probe Sequence
attgcatatattttggggacacaga

SEQ ID NO: 123050 - DNA, 25 bp, Probe Sequence
attgcttttcagtgccgcacaatga

SEQ ID NO: 123051 - DNA, 25 bp, Probe Sequence
attgtattccaaagacgacaatttt

SEQ ID NO: 123052 - DNA, 25 bp, Probe Sequence
attgtttgacaaatggcaactgact

SEQ ID NO: 123053 - DNA, 25 bp, Probe Sequence
attctgcttccagtaggcatagcta

SEQ ID NO: 123054 - DNA, 25 bp, Probe Sequence
attctgctactcgaacagatgagct

SEQ ID NO: 123055 - DNA, 25 bp, Probe Sequence
attgatcacacatatgacacaggct

SEQ ID NO: 123056 - DNA, 25 bp, Probe Sequence
attgacaacaaatcatctcgctaaa

SEQ ID NO: 123057 - DNA, 25 bp, Probe Sequence
attgacaagaaatgccccttcactg

SEQ ID NO: 123058 - DNA, 25 bp, Probe Sequence
attgacaagaaatgccccttcactg

SEQ ID NO: 123059 - DNA, 25 bp, Probe Sequence
attgacaagaaatgccccttcactg

SEQ ID NO: 123060 - DNA, 25 bp, Probe Sequence
attaatcagaaaccccacttccatt

SEQ ID NO: 123061 - DNA, 25 bp, Probe Sequence
attgagggagagacctttcttcctt

SEQ ID NO: 123062 - DNA, 25 bp, Probe Sequence
attctcccaggagctgttttactgt

SEQ ID NO: 123063 - DNA, 25 bp, Probe Sequence
attctcccaggagctgttttactgt

SEQ ID NO: 123064 - DNA, 25 bp, Probe Sequence
attctcccaggagctgttttactgt

SEQ ID NO: 123065 - DNA, 25 bp, Probe Sequence
attgcccacatgtaccaggttgagt

SEQ ID NO: 123066 - DNA, 25 bp, Probe Sequence
attctccaagaagcagtcatacgta

SEQ ID NO: 123067 - DNA, 25 bp, Probe Sequence
attctccgaaagcaactcctgacaa

SEQ ID NO: 123068 - DNA, 25 bp, Probe Sequence
attcccggatagcaacctcgggaca

SEQ ID NO: 123069 - DNA, 25 bp, Probe Sequence
attcccgggatacaggccggatgca

SEQ ID NO: 123070 - DNA, 25 bp, Probe Sequence
attccaggggaacatattgaagatc

SEQ ID NO: 123071 - DNA, 25 bp, Probe Sequence
attcccgggatccaattctggacac

SEQ ID NO: 123072 - DNA, 25 bp, Probe Sequence
attcccgggatgtcaacccaacaca

SEQ ID NO: 123073 - DNA, 25 bp, Probe Sequence
attcccgggatgtgatctatcagac

SEQ ID NO: 123074 - DNA, 25 bp, Probe Sequence
attcccgggatcttaacatcaggaa

SEQ ID NO: 123075 - DNA, 25 bp, Probe Sequence
attccaggggccatgcaggagcttg

SEQ ID NO: 123076 - DNA, 25 bp, Probe Sequence
attccactgtggcattgccgttcta

SEQ ID NO: 123077 - DNA, 25 bp, Probe Sequence
attcttggatgacgtcggcgttgct

SEQ ID NO: 123078 - DNA, 25 bp, Probe Sequence
attgcttgttgccacaaaggtgtgt

SEQ ID NO: 123079 - DNA, 25 bp, Probe Sequence
attgcccattgccataaattttgtc

SEQ ID NO: 123080 - DNA, 25 bp, Probe Sequence
attgatgtcttggctaaattttgat

SEQ ID NO: 123081 - DNA, 25 bp, Probe Sequence
attgttctccataaggcattttatt

SEQ ID NO: 123082 - DNA, 25 bp, Probe Sequence
attccagctccaatagcgtatatta

SEQ ID NO: 123083 - DNA, 25 bp, Probe Sequence
attccaaaagattgctgtagctctc

SEQ ID NO: 123084 - DNA, 25 bp, Probe Sequence
attccagccaagatgttcatgtagt

SEQ ID NO: 123085 - DNA, 25 bp, Probe Sequence
attccatcccgtagtaagatccatg

SEQ ID NO: 123086 - DNA, 25 bp, Probe Sequence
attccaagggtgatcataatgccaa

SEQ ID NO: 123087 - DNA, 25 bp, Probe Sequence
attcccatggtggcctcaagaaagg

SEQ ID NO: 123088 - DNA, 25 bp, Probe Sequence
attcccatggtggcctcaagaaagg

SEQ ID NO: 123089 - DNA, 25 bp, Probe Sequence
attcccttctgagttaatgtcaaat

SEQ ID NO: 123090 - DNA, 25 bp, Probe Sequence
attcccattgtgattaattgaaatt

SEQ ID NO: 123091 - DNA, 25 bp, Probe Sequence
attccccttggaaactggcacaaga

SEQ ID NO: 123092 - DNA, 25 bp, Probe Sequence
attcgcaccattgcggtcgcgcgga

SEQ ID NO: 123093 - DNA, 25 bp, Probe Sequence
attctcaccactgaagggcgtaatg

SEQ ID NO: 123094 - DNA, 25 bp, Probe Sequence
attccaccgacgtggaggcagccgt

SEQ ID NO: 123095 - DNA, 25 bp, Probe Sequence
attcatcagcaggagtggagggtgg

SEQ ID NO: 123096 - DNA, 25 bp, Probe Sequence
attctcatgctgaagctgtagccta

SEQ ID NO: 123097 - DNA, 25 bp, Probe Sequence
attccagtggtgacttcactgatat

SEQ ID NO: 123098 - DNA, 25 bp, Probe Sequence
attccagtggtgacttcactgatat

SEQ ID NO: 123099 - DNA, 25 bp, Probe Sequence
attccaaagttattgcctactaagt

SEQ ID NO: 123100 - DNA, 25 bp, Probe Sequence
attccaaactgaaatgtcaacctgt

SEQ ID NO: 123101 - DNA, 25 bp, Probe Sequence
attcctgaatcttggctaaactctt

SEQ ID NO: 123102 - DNA, 25 bp, Probe Sequence
attcctgcctttctaaatgtggtgg

SEQ ID NO: 123103 - DNA, 25 bp, Probe Sequence
attccgtttgccgtacatcaatggg

SEQ ID NO: 123104 - DNA, 25 bp, Probe Sequence
attgaattttggcatcccagatggg

SEQ ID NO: 123105 - DNA, 25 bp, Probe Sequence
attaaactggaatctcaaagggtat

SEQ ID NO: 123106 - DNA, 25 bp, Probe Sequence
atatgaatacgccaattctaccggg

SEQ ID NO: 123107 - DNA, 25 bp, Probe Sequence
attgcaaactcctattcaaccttga

SEQ ID NO: 123108 - DNA, 25 bp, Probe Sequence
attccaagctaccatgtaacttttt

SEQ ID NO: 123109 - DNA, 25 bp, Probe Sequence
attgaaggcccactgtagcctggtt

SEQ ID NO: 123110 - DNA, 25 bp, Probe Sequence
attagagctcgccacgaactagggt

SEQ ID NO: 123111 - DNA, 25 bp, Probe Sequence
attgagacaccaaagaccagaggag

SEQ ID NO: 123112 - DNA, 25 bp, Probe Sequence
attgaacccatgtacatagagagaa

SEQ ID NO: 123113 - DNA, 25 bp, Probe Sequence
attcatgaccctctcagggtacacc

SEQ ID NO: 123114 - DNA, 25 bp, Probe Sequence
attcttctgactctagatgggacac

SEQ ID NO: 123115 - DNA, 25 bp, Probe Sequence
attccacgaggcattgagaaaacta

SEQ ID NO: 123116 - DNA, 25 bp, Probe Sequence
attcctcagacctgctaaaagagct

SEQ ID NO: 123117 - DNA, 25 bp, Probe Sequence
attcctcgacccctgaaaaggatga

SEQ ID NO: 123118 - DNA, 25 bp, Probe Sequence
attcttaactctgacacaattggat

SEQ ID NO: 123119 - DNA, 25 bp, Probe Sequence
attgctatctactggtcctttggaa

SEQ ID NO: 123120 - DNA, 25 bp, Probe Sequence
attgctcacattgtgcagtactatg

SEQ ID NO: 123121 - DNA, 25 bp, Probe Sequence
attgcatctcttgatttaatcatgt

SEQ ID NO: 123122 - DNA, 25 bp, Probe Sequence
attgactcttcttactacactggaa

SEQ ID NO: 123123 - DNA, 25 bp, Probe Sequence
attcctcttgctaagtacaaataaa

SEQ ID NO: 123124 - DNA, 25 bp, Probe Sequence
attcctctctgtagatgctaggata

SEQ ID NO: 123125 - DNA, 25 bp, Probe Sequence
attgaacatgctagggctcggtcac

SEQ ID NO: 123126 - DNA, 25 bp, Probe Sequence
attgaacatgctagggctcggtcac

SEQ ID NO: 123127 - DNA, 25 bp, Probe Sequence
atatgagacaccgggccggatccag

SEQ ID NO: 123128 - DNA, 25 bp, Probe Sequence
attgaggccctgcagttagtttgcg

SEQ ID NO: 123129 - DNA, 25 bp, Probe Sequence
attgaggcactcttggttttctatg

SEQ ID NO: 123130 - DNA, 25 bp, Probe Sequence
attgagtgattctggttgcattcct

SEQ ID NO: 123131 - DNA, 25 bp, Probe Sequence
attgcactgttttgggagttcctgc

SEQ ID NO: 123132 - DNA, 25 bp, Probe Sequence
attgcaattggatttcaggttccct

SEQ ID NO: 123133 - DNA, 25 bp, Probe Sequence
attgatatcgaatatcactctctct

SEQ ID NO: 123134 - DNA, 25 bp, Probe Sequence
attgaatctgattggacattttctt

SEQ ID NO: 123135 - DNA, 25 bp, Probe Sequence
attgcaattttggatgattattctt

SEQ ID NO: 123136 - DNA, 25 bp, Probe Sequence
attgcaatttcttaggtaaccttat

SEQ ID NO: 123137 - DNA, 25 bp, Probe Sequence
attaattttgaatctacctcaatat

SEQ ID NO: 123138 - DNA, 25 bp, Probe Sequence
attctctttagttaaggcaccaatt

SEQ ID NO: 123139 - DNA, 25 bp, Probe Sequence
attctttgtggacattggcccagtc

SEQ ID NO: 123140 - DNA, 25 bp, Probe Sequence
attcctggaggacactcccatcaga

SEQ ID NO: 123141 - DNA, 25 bp, Probe Sequence
attcctgagaagtggaccccagagg

SEQ ID NO: 123142 - DNA, 25 bp, Probe Sequence
attccagaagcatttggtccaaagg

SEQ ID NO: 123143 - DNA, 25 bp, Probe Sequence
attgcctatggctaatagtctcaaa

SEQ ID NO: 123144 - DNA, 25 bp, Probe Sequence
attgcctagcacaatagtgagtaca

SEQ ID NO: 123145 - DNA, 25 bp, Probe Sequence
attgcccacatgatcagtggctttg

SEQ ID NO: 123146 - DNA, 25 bp, Probe Sequence
attgcactactgatgaatcgtcctc

SEQ ID NO: 123147 - DNA, 25 bp, Probe Sequence
attgcacacaagatggatggtcgcc

SEQ ID NO: 123148 - DNA, 25 bp, Probe Sequence
attgcacacaagatggatggtcgcc

SEQ ID NO: 123149 - DNA, 25 bp, Probe Sequence
attgacatcaagaagtgtgtgaagc

SEQ ID NO: 123150 - DNA, 25 bp, Probe Sequence
attgcagcatccttagatgggacgc

SEQ ID NO: 123151 - DNA, 25 bp, Probe Sequence
attgcagatgcgcagacatggcggc

SEQ ID NO: 123152 - DNA, 25 bp, Probe Sequence
attgcattgcagtagcatcatttta

SEQ ID NO: 123153 - DNA, 25 bp, Probe Sequence
attgcagtagcagcatatctttttt

SEQ ID NO: 123154 - DNA, 25 bp, Probe Sequence
attgcgcaatgccataaatttcttc

SEQ ID NO: 123155 - DNA, 25 bp, Probe Sequence
attgccatgagccaaatacttcttg

SEQ ID NO: 123156 - DNA, 25 bp, Probe Sequence
attgccatgagccaaatacttcttg

SEQ ID NO: 123157 - DNA, 25 bp, Probe Sequence
attccatgtctgggatgacttcaca

SEQ ID NO: 123158 - DNA, 25 bp, Probe Sequence
attccatgtcttcaattgtcacgca

SEQ ID NO: 123159 - DNA, 25 bp, Probe Sequence
attgcactggctattcatcttgcac

SEQ ID NO: 123160 - DNA, 25 bp, Probe Sequence
attgctcagggactcatctttccct

SEQ ID NO: 123161 - DNA, 25 bp, Probe Sequence
attccaggcaggcacatttctttgg

SEQ ID NO: 123162 - DNA, 25 bp, Probe Sequence
attccaggatccaatattactgcct

SEQ ID NO: 123163 - DNA, 25 bp, Probe Sequence
attgccattaccataccattggcat

SEQ ID NO: 123164 - DNA, 25 bp, Probe Sequence
attgccattgatgactgcaccttcc

SEQ ID NO: 123165 - DNA, 25 bp, Probe Sequence
attgcctggtgatcaagactctcct

SEQ ID NO: 123166 - DNA, 25 bp, Probe Sequence
attgcttggtattcattacttcatg

SEQ ID NO: 123167 - DNA, 25 bp, Probe Sequence
attgcttgacaaacataagcccagc

SEQ ID NO: 123168 - DNA, 25 bp, Probe Sequence
attgctggccaagatgaggaccact

SEQ ID NO: 123169 - DNA, 25 bp, Probe Sequence
attgcttgccagagatgaacacaga

SEQ ID NO: 123170 - DNA, 25 bp, Probe Sequence
attgcatctctacttgtgaacagat

SEQ ID NO: 123171 - DNA, 25 bp, Probe Sequence
attgcactccagcctggacaatgag

SEQ ID NO: 123172 - DNA, 25 bp, Probe Sequence
attgcctgccccttatacataggaa

SEQ ID NO: 123173 - DNA, 25 bp, Probe Sequence
attccgctcgccacaaatatgggta

SEQ ID NO: 123174 - DNA, 25 bp, Probe Sequence
attcccatctactcaggaagctgag

SEQ ID NO: 123175 - DNA, 25 bp, Probe Sequence
attccctagaactaagaagctacac

SEQ ID NO: 123176 - DNA, 25 bp, Probe Sequence
attccctagtttgcagaactgtctg

SEQ ID NO: 123177 - DNA, 25 bp, Probe Sequence
attccttaatttagaaaagctcatt

SEQ ID NO: 123178 - DNA, 25 bp, Probe Sequence
attcttaagactgagagacttctct

SEQ ID NO: 123179 - DNA, 25 bp, Probe Sequence
attgctttaggcctggagactttca

SEQ ID NO: 123180 - DNA, 25 bp, Probe Sequence
attccttatggccatcaagacctcc

SEQ ID NO: 123181 - DNA, 25 bp, Probe Sequence
attcgtattgcgccgctagaggtga

SEQ ID NO: 123182 - DNA, 25 bp, Probe Sequence
attccattctcgtggaggagtttcc

SEQ ID NO: 123183 - DNA, 25 bp, Probe Sequence
attccttccaagctagtgtttttca

SEQ ID NO: 123184 - DNA, 25 bp, Probe Sequence
attccttacctgctattcttgtact

SEQ ID NO: 123185 - DNA, 25 bp, Probe Sequence
attccaataccggctatgttaaatt

SEQ ID NO: 123186 - DNA, 25 bp, Probe Sequence
attcaccaacacagtagttttgtat

SEQ ID NO: 123187 - DNA, 25 bp, Probe Sequence
attgacaataatttcaggttttgta

SEQ ID NO: 123188 - DNA, 25 bp, Probe Sequence
attccctaattcaagttgtgtttct

SEQ ID NO: 123189 - DNA, 25 bp, Probe Sequence
attcccgttgtcagtatatgctcca

SEQ ID NO: 123190 - DNA, 25 bp, Probe Sequence
attcccgttgtcagtatatgctcca

SEQ ID NO: 123191 - DNA, 25 bp, Probe Sequence
attcccgggatgcgacatttcatat

SEQ ID NO: 123192 - DNA, 25 bp, Probe Sequence
attgcccgtgttctcacagttatta

SEQ ID NO: 123193 - DNA, 25 bp, Probe Sequence
attcccttgttagcaagttcagtgg

SEQ ID NO: 123194 - DNA, 25 bp, Probe Sequence
attccctgactttctctagttagat

SEQ ID NO: 123195 - DNA, 25 bp, Probe Sequence
attcctctattctctggcagtataa

SEQ ID NO: 123196 - DNA, 25 bp, Probe Sequence
attcgcctactccgtgaagtctagg

SEQ ID NO: 123197 - DNA, 25 bp, Probe Sequence
attccttcacctttgaacttcgaga

SEQ ID NO: 123198 - DNA, 25 bp, Probe Sequence
attccttcaacagaacactttaatg

SEQ ID NO: 123199 - DNA, 25 bp, Probe Sequence
attcccatccaaaaatagttaagat

SEQ ID NO: 123200 - DNA, 25 bp, Probe Sequence
attaggaccacagatttggtttaga

SEQ ID NO: 123201 - DNA, 25 bp, Probe Sequence
attctgatactacgcgtgttgtttt

SEQ ID NO: 123202 - DNA, 25 bp, Probe Sequence
attctgatggtctgatgtggctgtt

SEQ ID NO: 123203 - DNA, 25 bp, Probe Sequence
attgctaggctatatctggaggatg

SEQ ID NO: 123204 - DNA, 25 bp, Probe Sequence
attgcataggacagacttaggagtt

SEQ ID NO: 123205 - DNA, 25 bp, Probe Sequence
attcgatggacacagctatggaggt

SEQ ID NO: 123206 - DNA, 25 bp, Probe Sequence
attcgtgtgaatcagactaagtggg

SEQ ID NO: 123207 - DNA, 25 bp, Probe Sequence
atccgggatccgcagttgagggaat

SEQ ID NO: 123208 - DNA, 25 bp, Probe Sequence
attcggggacgtttcatgagtggac

SEQ ID NO: 123209 - DNA, 25 bp, Probe Sequence
attcgggagtctgagtatagagaga

SEQ ID NO: 123210 - DNA, 25 bp, Probe Sequence
attcgttggtgctcatgtcttgaca

SEQ ID NO: 123211 - DNA, 25 bp, Probe Sequence
atatctggggcctgcagttcttatg

SEQ ID NO: 123212 - DNA, 25 bp, Probe Sequence
attcgaaggctctctctttctagag

SEQ ID NO: 123213 - DNA, 25 bp, Probe Sequence
attcaccaagtctccctatcaggag

SEQ ID NO: 123214 - DNA, 25 bp, Probe Sequence
attccgagagaattccaaagagggt

SEQ ID NO: 123215 - DNA, 25 bp, Probe Sequence
attcaggaagattacctaagagagc

SEQ ID NO: 123216 - DNA, 25 bp, Probe Sequence
attcgaacctcaagcctaggacacc

SEQ ID NO: 123217 - DNA, 25 bp, Probe Sequence
attccaacacctgccatagggacca

SEQ ID NO: 123218 - DNA, 25 bp, Probe Sequence
attgacaacatcctcccagagaagg

SEQ ID NO: 123219 - DNA, 25 bp, Probe Sequence
attgcaaatactgcccgcaaagctc

SEQ ID NO: 123220 - DNA, 25 bp, Probe Sequence
attgaaatacttgcatacatacatt

SEQ ID NO: 123221 - DNA, 25 bp, Probe Sequence
attaaatactgtggttgcctctatg

SEQ ID NO: 123222 - DNA, 25 bp, Probe Sequence
attgcaaaagcactggctcatccgc

SEQ ID NO: 123223 - DNA, 25 bp, Probe Sequence
attgcaactggcctggccgcaacag

SEQ ID NO: 123224 - DNA, 25 bp, Probe Sequence
attgcctctgagggagtccaactgt

SEQ ID NO: 123225 - DNA, 25 bp, Probe Sequence
attgctctgggttagatcgcgacct

SEQ ID NO: 123226 - DNA, 25 bp, Probe Sequence
attgcttggattgctacatggaccc

SEQ ID NO: 123227 - DNA, 25 bp, Probe Sequence
attgcttatgccactcacagagaca

SEQ ID NO: 123228 - DNA, 25 bp, Probe Sequence
attgctgataccaatatcaccagca

SEQ ID NO: 123229 - DNA, 25 bp, Probe Sequence
attgctgatagctcaatatcccatc

SEQ ID NO: 123230 - DNA, 25 bp, Probe Sequence
attgctgcaactggcaaacctgccg

SEQ ID NO: 123231 - DNA, 25 bp, Probe Sequence
attccacactggtaacctgcagcag

SEQ ID NO: 123232 - DNA, 25 bp, Probe Sequence
attgcaacagtttcacaccatcaca

SEQ ID NO: 123233 - DNA, 25 bp, Probe Sequence
attgccaacattgcacagccaggct

SEQ ID NO: 123234 - DNA, 25 bp, Probe Sequence
attgcctcaatttcagagcctgtta

SEQ ID NO: 123235 - DNA, 25 bp, Probe Sequence
attcctaattcctgtatgttatcca

SEQ ID NO: 123236 - DNA, 25 bp, Probe Sequence
attcctatttccctaagatctacta

SEQ ID NO: 123237 - DNA, 25 bp, Probe Sequence
attcattattttgtaaagccctatg

SEQ ID NO: 123238 - DNA, 25 bp, Probe Sequence
atttccatttacttaagacttaatg

SEQ ID NO: 123239 - DNA, 25 bp, Probe Sequence
attccaattctatatccgacttgaa

SEQ ID NO: 123240 - DNA, 25 bp, Probe Sequence
attccaacttcatgtcaatacactg

SEQ ID NO: 123241 - DNA, 25 bp, Probe Sequence
attccaactgtataattgacctgtt

SEQ ID NO: 123242 - DNA, 25 bp, Probe Sequence
attgcctccttatccttgagatttc

SEQ ID NO: 123243 - DNA, 25 bp, Probe Sequence
attgccatcaaattgcccttggact

SEQ ID NO: 123244 - DNA, 25 bp, Probe Sequence
attgctgccaaaaccacatgggctg

SEQ ID NO: 123245 - DNA, 25 bp, Probe Sequence
attccacgaagagactggcctgcaa

SEQ ID NO: 123246 - DNA, 25 bp, Probe Sequence
attgctcaggattatggggtcttaa

SEQ ID NO: 123247 - DNA, 25 bp, Probe Sequence
attgctgcagggtggagtttgatct

SEQ ID NO: 123248 - DNA, 25 bp, Probe Sequence
attgctggattatatagtagtacta

SEQ ID NO: 123249 - DNA, 25 bp, Probe Sequence
attctcgcatgataaggatggtact

SEQ ID NO: 123250 - DNA, 25 bp, Probe Sequence
ataccgcagattcaggcatggattc

SEQ ID NO: 123251 - DNA, 25 bp, Probe Sequence
attcctcagatgccactggctggca

SEQ ID NO: 123252 - DNA, 25 bp, Probe Sequence
attctcatcagtcgcaatgattcag

SEQ ID NO: 123253 - DNA, 25 bp, Probe Sequence
attgctgagctgggcatctatccag

SEQ ID NO: 123254 - DNA, 25 bp, Probe Sequence
attgctgactgtggacaactcgaat

SEQ ID NO: 123255 - DNA, 25 bp, Probe Sequence
attctatcttggacaaccagctatc

SEQ ID NO: 123256 - DNA, 25 bp, Probe Sequence
attctgagcttgcaatgccgccaag

SEQ ID NO: 123257 - DNA, 25 bp, Probe Sequence
attcggcttgaggtcaccaaggccc

SEQ ID NO: 123258 - DNA, 25 bp, Probe Sequence
attcgccttaggcatgtgcaagtcc

SEQ ID NO: 123259 - DNA, 25 bp, Probe Sequence
attcctcttgggctgaagcagacca

SEQ ID NO: 123260 - DNA, 25 bp, Probe Sequence
attccctggtgcggtaccagtgcac

SEQ ID NO: 123261 - DNA, 25 bp, Probe Sequence
attcgtaggatgggtgagtcagatg

SEQ ID NO: 123262 - DNA, 25 bp, Probe Sequence
attgcttaggatgatctcagacagt

SEQ ID NO: 123263 - DNA, 25 bp, Probe Sequence
attcgtgggcatgatcctgattctc

SEQ ID NO: 123264 - DNA, 25 bp, Probe Sequence
attgaagcaagcattctatattcca

SEQ ID NO: 123265 - DNA, 25 bp, Probe Sequence
attgctagagatctttatgattaga

SEQ ID NO: 123266 - DNA, 25 bp, Probe Sequence
attgctggttctatttaatggacat

SEQ ID NO: 123267 - DNA, 25 bp, Probe Sequence
attctgcgccttttgttaaaactga

SEQ ID NO: 123268 - DNA, 25 bp, Probe Sequence
attctgttctactattgggaaaatg

SEQ ID NO: 123269 - DNA, 25 bp, Probe Sequence
attctgcctccttctggggaaataa

SEQ ID NO: 123270 - DNA, 25 bp, Probe Sequence
attctcgattctttgaagagatgac

SEQ ID NO: 123271 - DNA, 25 bp, Probe Sequence
attcatcgattcctgctgaaatcat

SEQ ID NO: 123272 - DNA, 25 bp, Probe Sequence
attctagatcatctaagatccatgc

SEQ ID NO: 123273 - DNA, 25 bp, Probe Sequence
attccaactcgtatagcatgcatct

SEQ ID NO: 123274 - DNA, 25 bp, Probe Sequence
attaaagacttttccatctcttaag

SEQ ID NO: 123275 - DNA, 25 bp, Probe Sequence
attccaagttctcacctcttaaaga

SEQ ID NO: 123276 - DNA, 25 bp, Probe Sequence
attccagaacctctcttttctaaga

SEQ ID NO: 123277 - DNA, 25 bp, Probe Sequence
attgctaagaacagtgccttttaca

SEQ ID NO: 123278 - DNA, 25 bp, Probe Sequence
attgcggtataaagtctcatttcca

SEQ ID NO: 123279 - DNA, 25 bp, Probe Sequence
attgcagagtatgatacttccactc

SEQ ID NO: 123280 - DNA, 25 bp, Probe Sequence
attgccatattcttacttgaatgct

SEQ ID NO: 123281 - DNA, 25 bp, Probe Sequence
attgcactattatttgttgctatta

SEQ ID NO: 123282 - DNA, 25 bp, Probe Sequence
attgcctttgattttgactatggaa

SEQ ID NO: 123283 - DNA, 25 bp, Probe Sequence
attgcctgattctgtggactggaga

SEQ ID NO: 123284 - DNA, 25 bp, Probe Sequence
attgcatagaatgttggccttgcag

SEQ ID NO: 123285 - DNA, 25 bp, Probe Sequence
attgccgcaatggttcacagttgat

SEQ ID NO: 123286 - DNA, 25 bp, Probe Sequence
attgcccagtggtgacatgtgctct

SEQ ID NO: 123287 - DNA, 25 bp, Probe Sequence
attcagctgctgggtgtccattgcc

SEQ ID NO: 123288 - DNA, 25 bp, Probe Sequence
attcctcatgaattgattaatgccc

SEQ ID NO: 123289 - DNA, 25 bp, Probe Sequence
attctgcagctgcttataaagctcc

SEQ ID NO: 123290 - DNA, 25 bp, Probe Sequence
attccagccttttggacagtatctt

SEQ ID NO: 123291 - DNA, 25 bp, Probe Sequence
attccagctttcagctggccgcatt

SEQ ID NO: 123292 - DNA, 25 bp, Probe Sequence
attcctcaattgggctggccacatt

SEQ ID NO: 123293 - DNA, 25 bp, Probe Sequence
attcctacctggacatgtcccatta

SEQ ID NO: 123294 - DNA, 25 bp, Probe Sequence
attcctaaaggaatctgaccatttt

SEQ ID NO: 123295 - DNA, 25 bp, Probe Sequence
attgctctagaatgtattactttgt

SEQ ID NO: 123296 - DNA, 25 bp, Probe Sequence
attgcatttctatgccatttttagt

SEQ ID NO: 123297 - DNA, 25 bp, Probe Sequence
attgcttttatagattcttgatttt

SEQ ID NO: 123298 - DNA, 25 bp, Probe Sequence
attgctcctaattaatatttatatg

SEQ ID NO: 123299 - DNA, 25 bp, Probe Sequence
attgctgttccttaatttgattaat

SEQ ID NO: 123300 - DNA, 25 bp, Probe Sequence
attgctgttccttaatttgattaat

SEQ ID NO: 123301 - DNA, 25 bp, Probe Sequence
attgctttgtcttgatgtttctatc

SEQ ID NO: 123302 - DNA, 25 bp, Probe Sequence
attgctttgtcttgcttatagtcat

SEQ ID NO: 123303 - DNA, 25 bp, Probe Sequence
attgctattttctttgtcatgttgg

SEQ ID NO: 123304 - DNA, 25 bp, Probe Sequence
attccagatttctttgtcctctaag

SEQ ID NO: 123305 - DNA, 25 bp, Probe Sequence
attccagattttcgtgtacccattc

SEQ ID NO: 123306 - DNA, 25 bp, Probe Sequence
attccattcctactatatacccata

SEQ ID NO: 123307 - DNA, 25 bp, Probe Sequence
attccatcccatcatcttggtacta

SEQ ID NO: 123308 - DNA, 25 bp, Probe Sequence
attccatggcaccgtcaaggctgag

SEQ ID NO: 123309 - DNA, 25 bp, Probe Sequence
attccatggcaccgtcaaggctgag

SEQ ID NO: 123310 - DNA, 25 bp, Probe Sequence
attgcctgccccggcagagattatg

SEQ ID NO: 123311 - DNA, 25 bp, Probe Sequence
attgcagctgccgtggtggctaaag

SEQ ID NO: 123312 - DNA, 25 bp, Probe Sequence
attgcagctgctgtgctggatgcag

SEQ ID NO: 123313 - DNA, 25 bp, Probe Sequence
attgctgctgctttgtagatgatga

SEQ ID NO: 123314 - DNA, 25 bp, Probe Sequence
attgctctgctctgtctgagatttt

SEQ ID NO: 123315 - DNA, 25 bp, Probe Sequence
attgctctgctctgtctgagatttt

SEQ ID NO: 123316 - DNA, 25 bp, Probe Sequence
attgctctgctctgtctgagatttt

SEQ ID NO: 123317 - DNA, 25 bp, Probe Sequence
attgcagatgtctttagaggctctt

SEQ ID NO: 123318 - DNA, 25 bp, Probe Sequence
attgcagtgtcaactaggcctcagt

SEQ ID NO: 123319 - DNA, 25 bp, Probe Sequence
attgcatatttgctatgtcctcagt

SEQ ID NO: 123320 - DNA, 25 bp, Probe Sequence
tctattttttaactaatcacccctg

SEQ ID NO: 123321 - DNA, 25 bp, Probe Sequence
attgctacttcaagctctttaaatc

SEQ ID NO: 123322 - DNA, 25 bp, Probe Sequence
attgccacttcaactctaaggaata

SEQ ID NO: 123323 - DNA, 25 bp, Probe Sequence
attgcatacttgcacatcaaatcga

SEQ ID NO: 123324 - DNA, 25 bp, Probe Sequence
attgcgcaatgccataaatttcttc

SEQ ID NO: 123325 - DNA, 25 bp, Probe Sequence
attctggttacttgatttctatata

SEQ ID NO: 123326 - DNA, 25 bp, Probe Sequence
attgcagtgcttcccagattattga

SEQ ID NO: 123327 - DNA, 25 bp, Probe Sequence
attgcaggtctgacgatctttggca

SEQ ID NO: 123328 - DNA, 25 bp, Probe Sequence
attatgaggtcccaccctagaccta

SEQ ID NO: 123329 - DNA, 25 bp, Probe Sequence
atttggggggattcctagcaactat

SEQ ID NO: 123330 - DNA, 25 bp, Probe Sequence
attctgggctggattctgaagcaat

SEQ ID NO: 123331 - DNA, 25 bp, Probe Sequence
attctggggctgtcttatgaaaata

SEQ ID NO: 123332 - DNA, 25 bp, Probe Sequence
attctagggcagtttacattttatt

SEQ ID NO: 123333 - DNA, 25 bp, Probe Sequence
attctggtaagtatgtgcttttctg

SEQ ID NO: 123334 - DNA, 25 bp, Probe Sequence
attaatgacgccttcaacctggcca

SEQ ID NO: 123335 - DNA, 25 bp, Probe Sequence
attagtgacctatgacagtttgtca

SEQ ID NO: 123336 - DNA, 25 bp, Probe Sequence
attcaaactcttggccttgatagtc

SEQ ID NO: 123337 - DNA, 25 bp, Probe Sequence
attctgagacatttcgcctgagata

SEQ ID NO: 123338 - DNA, 25 bp, Probe Sequence
attcatgagaactatgctgcccata

SEQ ID NO: 123339 - DNA, 25 bp, Probe Sequence
attgcgagcacattacttgctgcat

SEQ ID NO: 123340 - DNA, 25 bp, Probe Sequence
attgccacactattttgtgatttaa

SEQ ID NO: 123341 - DNA, 25 bp, Probe Sequence
attctacaccaaattgtctcttcaa

SEQ ID NO: 123342 - DNA, 25 bp, Probe Sequence
attctataatattttggctaccaca

SEQ ID NO: 123343 - DNA, 25 bp, Probe Sequence
attctggatataacttgggcacctc

SEQ ID NO: 123344 - DNA, 25 bp, Probe Sequence
attcttgatgatatctgtgtggcaa

SEQ ID NO: 123345 - DNA, 25 bp, Probe Sequence
attctcagaactcagatgtggctag

SEQ ID NO: 123346 - DNA, 25 bp, Probe Sequence
attgctaagacagtagatgttaagt

SEQ ID NO: 123347 - DNA, 25 bp, Probe Sequence
attctaagcagcaaagtgctcaaga

SEQ ID NO: 123348 - DNA, 25 bp, Probe Sequence
attgccaggagtacagtgctcttgt

SEQ ID NO: 123349 - DNA, 25 bp, Probe Sequence
attgccaggagtacagtgctcttgt

SEQ ID NO: 123350 - DNA, 25 bp, Probe Sequence
attgccaatgagtaatgctgtgcct

SEQ ID NO: 123351 - DNA, 25 bp, Probe Sequence
attgccagcagcacacatcagatgc

SEQ ID NO: 123352 - DNA, 25 bp, Probe Sequence
attctgcagatcaccacgtggatat

SEQ ID NO: 123353 - DNA, 25 bp, Probe Sequence
attgcgcaatattcaccgtatataa

SEQ ID NO: 123354 - DNA, 25 bp, Probe Sequence
attgcctgtaatcccctaataagtc

SEQ ID NO: 123355 - DNA, 25 bp, Probe Sequence
attcttgtaacacctctcaatggtt

SEQ ID NO: 123356 - DNA, 25 bp, Probe Sequence
atttgtgtaatctccaaaagtgttt

SEQ ID NO: 123357 - DNA, 25 bp, Probe Sequence
attctgtttactgccacaagcactg

SEQ ID NO: 123358 - DNA, 25 bp, Probe Sequence
attctctatgtagtgccaagtaggc

SEQ ID NO: 123359 - DNA, 25 bp, Probe Sequence
attcagctttgagccactgtaagca

SEQ ID NO: 123360 - DNA, 25 bp, Probe Sequence
attctgctttgatgcctttaaagaa

SEQ ID NO: 123361 - DNA, 25 bp, Probe Sequence
attctgttttacattatatcaatga

SEQ ID NO: 123362 - DNA, 25 bp, Probe Sequence
attctgtcattaaactcatattttg

SEQ ID NO: 123363 - DNA, 25 bp, Probe Sequence
attctttcgagtttgtttttgtcat

SEQ ID NO: 123364 - DNA, 25 bp, Probe Sequence
attcttttgactttgtttctcttgt

SEQ ID NO: 123365 - DNA, 25 bp, Probe Sequence
attcttttgactttgtttctcttgt

SEQ ID NO: 123366 - DNA, 25 bp, Probe Sequence
attgctttctgacttgagtctcctc

SEQ ID NO: 123367 - DNA, 25 bp, Probe Sequence
attcatttctgtctaatttcactct

SEQ ID NO: 123368 - DNA, 25 bp, Probe Sequence
attcccctcagcatacaattacgct

SEQ ID NO: 123369 - DNA, 25 bp, Probe Sequence
attacagcctaaataaagcttggca

SEQ ID NO: 123370 - DNA, 25 bp, Probe Sequence
attatggccgaaagcaacctggtgc

SEQ ID NO: 123371 - DNA, 25 bp, Probe Sequence
attcgggcgaagacaaacggatgca

SEQ ID NO: 123372 - DNA, 25 bp, Probe Sequence
attctggcgcagatacaaacagtga

SEQ ID NO: 123373 - DNA, 25 bp, Probe Sequence
attctgatccagttcaccagtaggt

SEQ ID NO: 123374 - DNA, 25 bp, Probe Sequence
attctgatccagttcaccagtaggt

SEQ ID NO: 123375 - DNA, 25 bp, Probe Sequence
attctgtgcccattgaacaataact

SEQ ID NO: 123376 - DNA, 25 bp, Probe Sequence
attccccaagaattctagcaatctt

SEQ ID NO: 123377 - DNA, 25 bp, Probe Sequence
attcccttaggctttagcagctttg

SEQ ID NO: 123378 - DNA, 25 bp, Probe Sequence
attcctcactgaaggtggggtttgt

SEQ ID NO: 123379 - DNA, 25 bp, Probe Sequence
attccacattgaagttgtgtgcagt

SEQ ID NO: 123380 - DNA, 25 bp, Probe Sequence
attccaatcatgtcctttatccagt

SEQ ID NO: 123381 - DNA, 25 bp, Probe Sequence
attcgagacatttcttatcatccat

SEQ ID NO: 123382 - DNA, 25 bp, Probe Sequence
attctgaatatatgtcatctcccaa

SEQ ID NO: 123383 - DNA, 25 bp, Probe Sequence
attagacagtcaattccattaaaat

SEQ ID NO: 123384 - DNA, 25 bp, Probe Sequence
attctgggtcaaatccttgaattca

SEQ ID NO: 123385 - DNA, 25 bp, Probe Sequence
attgccagtgtctttctttggtgcc

SEQ ID NO: 123386 - DNA, 25 bp, Probe Sequence
attgccagtgtctttctttggtgcc

SEQ ID NO: 123387 - DNA, 25 bp, Probe Sequence
attgctctgtgtatatctcttggaa

SEQ ID NO: 123388 - DNA, 25 bp, Probe Sequence
attctgatcattattcttcatgtaa

SEQ ID NO: 123389 - DNA, 25 bp, Probe Sequence
attccatgattagtttttatgacca

SEQ ID NO: 123390 - DNA, 25 bp, Probe Sequence
attccatcttacattagtgattcca

SEQ ID NO: 123391 - DNA, 25 bp, Probe Sequence
attccacttttgttaatgtctctca

SEQ ID NO: 123392 - DNA, 25 bp, Probe Sequence
attccatttgtttgttgctggtata

SEQ ID NO: 123393 - DNA, 25 bp, Probe Sequence
attgccatatttattcggtggaaaa

SEQ ID NO: 123394 - DNA, 25 bp, Probe Sequence
attgccaactttgttaagtggctca

SEQ ID NO: 123395 - DNA, 25 bp, Probe Sequence
attccaagcttcatattaaccctac

SEQ ID NO: 123396 - DNA, 25 bp, Probe Sequence
attcaccaaaatcattatcccttaa

SEQ ID NO: 123397 - DNA, 25 bp, Probe Sequence
attactcaggaagaacaccctctaa

SEQ ID NO: 123398 - DNA, 25 bp, Probe Sequence
attaaaggaacctaatggtgcttat

SEQ ID NO: 123399 - DNA, 25 bp, Probe Sequence
ataacgaacaacagcaacgtcttga

SEQ ID NO: 123400 - DNA, 25 bp, Probe Sequence
attccacaaaacagctgcattggtt

SEQ ID NO: 123401 - DNA, 25 bp, Probe Sequence
attccacaaaaccgccattgtcatc

SEQ ID NO: 123402 - DNA, 25 bp, Probe Sequence
attccacaagcattgccttcttatt

SEQ ID NO: 123403 - DNA, 25 bp, Probe Sequence
attccctggtgtccttcttagagat

SEQ ID NO: 123404 - DNA, 25 bp, Probe Sequence
attccactgtactcattcataaggt

SEQ ID NO: 123405 - DNA, 25 bp, Probe Sequence
attcctgctttctcagttacatgtt

SEQ ID NO: 123406 - DNA, 25 bp, Probe Sequence
attcctgttctagatctcagacatg

SEQ ID NO: 123407 - DNA, 25 bp, Probe Sequence
ataccgtttttcttcaacaatggcg

SEQ ID NO: 123408 - DNA, 25 bp, Probe Sequence
attcctttctatcctacaacaagag

SEQ ID NO: 123409 - DNA, 25 bp, Probe Sequence
attccacttctaattgatatacaca

SEQ ID NO: 123410 - DNA, 25 bp, Probe Sequence
attgcctttcaatgcatgtttcaat

SEQ ID NO: 123411 - DNA, 25 bp, Probe Sequence
attccattcatctaagagtcattga

SEQ ID NO: 123412 - DNA, 25 bp, Probe Sequence
attcagcataccttacagtattact

SEQ ID NO: 123413 - DNA, 25 bp, Probe Sequence
attcctatgccttagcagtcttatc

SEQ ID NO: 123414 - DNA, 25 bp, Probe Sequence
attgccacagttatcactgcttatc

SEQ ID NO: 123415 - DNA, 25 bp, Probe Sequence
attgccgagttactgtcagcatttc

SEQ ID NO: 123416 - DNA, 25 bp, Probe Sequence
attcgctgcactaactgtgcccgat

SEQ ID NO: 123417 - DNA, 25 bp, Probe Sequence
attcctagccgagtgtgacacagtg

SEQ ID NO: 123418 - DNA, 25 bp, Probe Sequence
attcctagacatattgcactacttt

SEQ ID NO: 123419 - DNA, 25 bp, Probe Sequence
attccatagaacatatattcagcat

SEQ ID NO: 123420 - DNA, 25 bp, Probe Sequence
attgccaaaactcaagtcacctcag

SEQ ID NO: 123421 - DNA, 25 bp, Probe Sequence
agtaactatgactgacgtccccaga

SEQ ID NO: 123422 - DNA, 25 bp, Probe Sequence
attacttcgacccacagtactttga

SEQ ID NO: 123423 - DNA, 25 bp, Probe Sequence
attcctacagaaggcggtgacttta

SEQ ID NO: 123424 - DNA, 25 bp, Probe Sequence
attgcctgaacatggcggggctttc

SEQ ID NO: 123425 - DNA, 25 bp, Probe Sequence
attgccatgtagtatggagagggct

SEQ ID NO: 123426 - DNA, 25 bp, Probe Sequence
attgccatctaggcagtcagcaccc

SEQ ID NO: 123427 - DNA, 25 bp, Probe Sequence
attccagctatggagctagctttaa

SEQ ID NO: 123428 - DNA, 25 bp, Probe Sequence
attgccgatatttctcaggtctaca

SEQ ID NO: 123429 - DNA, 25 bp, Probe Sequence
attcctgagtcttccagagcctaag

SEQ ID NO: 123430 - DNA, 25 bp, Probe Sequence
attccagcgtcttctagagagctta

SEQ ID NO: 123431 - DNA, 25 bp, Probe Sequence
attccagcattcctctcagaaggga

SEQ ID NO: 123432 - DNA, 25 bp, Probe Sequence
attccagtgtgcctgtatggagtgg

SEQ ID NO: 123433 - DNA, 25 bp, Probe Sequence
attcagggccatcgcgtggaggtga

SEQ ID NO: 123434 - DNA, 25 bp, Probe Sequence
attcagcagcgactgcaggaggagc

SEQ ID NO: 123435 - DNA, 25 bp, Probe Sequence
attccctggcagtgaggagcccatc

SEQ ID NO: 123436 - DNA, 25 bp, Probe Sequence
attccactacacctggctgaggttc

SEQ ID NO: 123437 - DNA, 25 bp, Probe Sequence
attcctcccactggtcagagagttc

SEQ ID NO: 123438 - DNA, 25 bp, Probe Sequence
attccatcccactactcagaatggc

SEQ ID NO: 123439 - DNA, 25 bp, Probe Sequence
attccaggccagaaccagcacagga

SEQ ID NO: 123440 - DNA, 25 bp, Probe Sequence
attcacagactaaaccaggaggatt

SEQ ID NO: 123441 - DNA, 25 bp, Probe Sequence
attaagaataattgtagtcaggatt

SEQ ID NO: 123442 - DNA, 25 bp, Probe Sequence
attaaaatacaagaagcagctgagg

SEQ ID NO: 123443 - DNA, 25 bp, Probe Sequence
cttaaaaactacctcatgacgttgg

SEQ ID NO: 123444 - DNA, 25 bp, Probe Sequence
attaaagcaactgagtgtagatttg

SEQ ID NO: 123445 - DNA, 25 bp, Probe Sequence
attcagaagcatacttggaactaat

SEQ ID NO: 123446 - DNA, 25 bp, Probe Sequence
attaaaatacaattgacaccagtaa

SEQ ID NO: 123447 - DNA, 25 bp, Probe Sequence
atgtaaagaccatcgagactaggaa

SEQ ID NO: 123448 - DNA, 25 bp, Probe Sequence
attcaaacagtctcaggaaatcaaa

SEQ ID NO: 123449 - DNA, 25 bp, Probe Sequence
atatctcaaagtaaagtcattaaca

SEQ ID NO: 123450 - DNA, 25 bp, Probe Sequence
attctagccagtaatggacttcaga

SEQ ID NO: 123451 - DNA, 25 bp, Probe Sequence
attgccagccaaatattataccata

SEQ ID NO: 123452 - DNA, 25 bp, Probe Sequence
attgcctgctcgattatatagaaaa

SEQ ID NO: 123453 - DNA, 25 bp, Probe Sequence
attccgtctgtcccataataaaatg

SEQ ID NO: 123454 - DNA, 25 bp, Probe Sequence
ataaagctatattctgtaaaaaaga

SEQ ID NO: 123455 - DNA, 25 bp, Probe Sequence
atatcaagatgattctggctgaaaa

SEQ ID NO: 123456 - DNA, 25 bp, Probe Sequence
attaagtgaatttatgaccagaata

SEQ ID NO: 123457 - DNA, 25 bp, Probe Sequence
attaagtgcagaaataactaagaca

SEQ ID NO: 123458 - DNA, 25 bp, Probe Sequence
attcaagtgcattaaagtctacaat

SEQ ID NO: 123459 - DNA, 25 bp, Probe Sequence
attcaagatctctggcagtggagga

SEQ ID NO: 123460 - DNA, 25 bp, Probe Sequence
attaagcccagatgcaggtagagaa

SEQ ID NO: 123461 - DNA, 25 bp, Probe Sequence
attccccatatgtgttggagaatga

SEQ ID NO: 123462 - DNA, 25 bp, Probe Sequence
attcctacttcatggatgtgaaatg

SEQ ID NO: 123463 - DNA, 25 bp, Probe Sequence
attccaatttcatgttgatgatata

SEQ ID NO: 123464 - DNA, 25 bp, Probe Sequence
attccaaatatgagatgcattgtta

SEQ ID NO: 123465 - DNA, 25 bp, Probe Sequence
attcctaataggatctgtttgattg

SEQ ID NO: 123466 - DNA, 25 bp, Probe Sequence
attccataatatgttctttatttgg

SEQ ID NO: 123467 - DNA, 25 bp, Probe Sequence
attccatgaatcgcttctcttttga

SEQ ID NO: 123468 - DNA, 25 bp, Probe Sequence
attcctgagttaggctttctcttca

SEQ ID NO: 123469 - DNA, 25 bp, Probe Sequence
attcctattggagtgcaatccttac

SEQ ID NO: 123470 - DNA, 25 bp, Probe Sequence
attccagttctgtctgatatccttc

SEQ ID NO: 123471 - DNA, 25 bp, Probe Sequence
attccaggagagttgatgaccttca

SEQ ID NO: 123472 - DNA, 25 bp, Probe Sequence
attaatgtgagatatgtaccttcat

SEQ ID NO: 123473 - DNA, 25 bp, Probe Sequence
atatgaattaggtgtactgtactga

SEQ ID NO: 123474 - DNA, 25 bp, Probe Sequence
atgaaatcgaacagtcgctgaacgg

SEQ ID NO: 123475 - DNA, 25 bp, Probe Sequence
atatagatcgttacaaccgaacagg

SEQ ID NO: 123476 - DNA, 25 bp, Probe Sequence
attctatcccgtgaccagagaaggc

SEQ ID NO: 123477 - DNA, 25 bp, Probe Sequence
attcttccacaagagctttgtcagg

SEQ ID NO: 123478 - DNA, 25 bp, Probe Sequence
attcctccattagcgctctgtggag

SEQ ID NO: 123479 - DNA, 25 bp, Probe Sequence
attcctgcttgtagttggtgttgag

SEQ ID NO: 123480 - DNA, 25 bp, Probe Sequence
attccctgtggagtggaggatgcta

SEQ ID NO: 123481 - DNA, 25 bp, Probe Sequence
attctcactggggcgaaggagtgga

SEQ ID NO: 123482 - DNA, 25 bp, Probe Sequence
attactgggggcttcagtggaggaa

SEQ ID NO: 123483 - DNA, 25 bp, Probe Sequence
attcgtccgggagttgtgatgggta

SEQ ID NO: 123484 - DNA, 25 bp, Probe Sequence
atatgcctcaggtgtgcttttggga

SEQ ID NO: 123485 - DNA, 25 bp, Probe Sequence
attcactggagctggcaggtttgga

SEQ ID NO: 123486 - DNA, 25 bp, Probe Sequence
attcctaatcaacatggagtggaga

SEQ ID NO: 123487 - DNA, 25 bp, Probe Sequence
attcttagtaatgagtatgaggaga

SEQ ID NO: 123488 - DNA, 25 bp, Probe Sequence
attcctttgtgctgactatgccgag

SEQ ID NO: 123489 - DNA, 25 bp, Probe Sequence
attccaactgacagaatctgccaga

SEQ ID NO: 123490 - DNA, 25 bp, Probe Sequence
attccaggcgttgaactgccaggtg

SEQ ID NO: 123491 - DNA, 25 bp, Probe Sequence
attccacccatggcaaattccatgg

SEQ ID NO: 123492 - DNA, 25 bp, Probe Sequence
attaaagctgcaagaggactccagg

SEQ ID NO: 123493 - DNA, 25 bp, Probe Sequence
attctatagtgcctgggtctcagcg

SEQ ID NO: 123494 - DNA, 25 bp, Probe Sequence
attctgaagggcaggcctcatgcag

SEQ ID NO: 123495 - DNA, 25 bp, Probe Sequence
attcagtcggaatggcgctcagcag

SEQ ID NO: 123496 - DNA, 25 bp, Probe Sequence
attacccgaatggagtctgcactgt

SEQ ID NO: 123497 - DNA, 25 bp, Probe Sequence
attacatccaaacagtggaggcttc

SEQ ID NO: 123498 - DNA, 25 bp, Probe Sequence
attagtctaactagtggtcaggctt

SEQ ID NO: 123499 - DNA, 25 bp, Probe Sequence
attagatctttaggggacagaggat

SEQ ID NO: 123500 - DNA, 25 bp, Probe Sequence
attaatctggtaatttgtcacggat

SEQ ID NO: 123501 - DNA, 25 bp, Probe Sequence
attagactttcataatgtcctgtat

SEQ ID NO: 123502 - DNA, 25 bp, Probe Sequence
attaaatctttaacattccgtcata

SEQ ID NO: 123503 - DNA, 25 bp, Probe Sequence
attaaacctctaacttactgataag

SEQ ID NO: 123504 - DNA, 25 bp, Probe Sequence
atagcaactcctgtactctactaaa

SEQ ID NO: 123505 - DNA, 25 bp, Probe Sequence
attcatactcttgtcatatggtcta

SEQ ID NO: 123506 - DNA, 25 bp, Probe Sequence
attcatgagtccgtatcaacgctat

SEQ ID NO: 123507 - DNA, 25 bp, Probe Sequence
attcatcaataatatctacatgcta

SEQ ID NO: 123508 - DNA, 25 bp, Probe Sequence
cttagcttactaactgggcaaacct

SEQ ID NO: 123509 - DNA, 25 bp, Probe Sequence
ctaagtctaggagtcggcgacgatc

SEQ ID NO: 123510 - DNA, 25 bp, Probe Sequence
attagtcatgagctcttgggacgaa

SEQ ID NO: 123511 - DNA, 25 bp, Probe Sequence
attagcatcagatttgcagtaggta

SEQ ID NO: 123512 - DNA, 25 bp, Probe Sequence
attagaaatgtaggcaaatgtaggc

SEQ ID NO: 123513 - DNA, 25 bp, Probe Sequence
attactcaagtaggttagaagcaga

SEQ ID NO: 123514 - DNA, 25 bp, Probe Sequence
attcctcatagcaagtatcaaggga

SEQ ID NO: 123515 - DNA, 25 bp, Probe Sequence
attctctcatcaaggctacaattgc

SEQ ID NO: 123516 - DNA, 25 bp, Probe Sequence
attcactgcaaactcccagttgcaa

SEQ ID NO: 123517 - DNA, 25 bp, Probe Sequence
attctcacataagcccagttcatca

SEQ ID NO: 123518 - DNA, 25 bp, Probe Sequence
attctcacataagcccagttcatca

SEQ ID NO: 123519 - DNA, 25 bp, Probe Sequence
attccagtgatagcatccaatgacc

SEQ ID NO: 123520 - DNA, 25 bp, Probe Sequence
attccagtgtccaatgtcaatttga

SEQ ID NO: 123521 - DNA, 25 bp, Probe Sequence
attccttgtggaaccatatgtataa

SEQ ID NO: 123522 - DNA, 25 bp, Probe Sequence
attactagtgaatccatttcaacct

SEQ ID NO: 123523 - DNA, 25 bp, Probe Sequence
attcctgaggaatagtttgcaattc

SEQ ID NO: 123524 - DNA, 25 bp, Probe Sequence
attctgctagataatgaagctttca

SEQ ID NO: 123525 - DNA, 25 bp, Probe Sequence
attctgtagcattgccagcgttctc

SEQ ID NO: 123526 - DNA, 25 bp, Probe Sequence
attctgctggattgccacagttatc

SEQ ID NO: 123527 - DNA, 25 bp, Probe Sequence
attcttctgatgtaacatgtgatac

SEQ ID NO: 123528 - DNA, 25 bp, Probe Sequence
attctcttgaattgtcatgctgaca

SEQ ID NO: 123529 - DNA, 25 bp, Probe Sequence
attcgtagcaaattctgtggcagtt

SEQ ID NO: 123530 - DNA, 25 bp, Probe Sequence
attcctatcaatgtctagattgtaa

SEQ ID NO: 123531 - DNA, 25 bp, Probe Sequence
atttggacgatgatgtaattgtaca

SEQ ID NO: 123532 - DNA, 25 bp, Probe Sequence
attctggtggtgagatagcaattca

SEQ ID NO: 123533 - DNA, 25 bp, Probe Sequence
attctgtgggatactatacaagcag

SEQ ID NO: 123534 - DNA, 25 bp, Probe Sequence
attccttggatcttatgcacagaac

SEQ ID NO: 123535 - DNA, 25 bp, Probe Sequence
attcattatcgtttattcagtgtcc

SEQ ID NO: 123536 - DNA, 25 bp, Probe Sequence
attcttgacagatttagtcgttcca

SEQ ID NO: 123537 - DNA, 25 bp, Probe Sequence
atttatctagaaaggtcgttcccag

SEQ ID NO: 123538 - DNA, 25 bp, Probe Sequence
attcgtacagaaagtgtggttacca

SEQ ID NO: 123539 - DNA, 25 bp, Probe Sequence
attccttccaatagttagatctacc

SEQ ID NO: 123540 - DNA, 25 bp, Probe Sequence
attccttctaacgtgtgagatgtcc

SEQ ID NO: 123541 - DNA, 25 bp, Probe Sequence
attcctttatgatctggcacttctc

SEQ ID NO: 123542 - DNA, 25 bp, Probe Sequence
attccttgtatttttaatttctgca

SEQ ID NO: 123543 - DNA, 25 bp, Probe Sequence
attccttgtctgccattctgaatat

SEQ ID NO: 123544 - DNA, 25 bp, Probe Sequence
attccattgtatgcatgtgccacat

SEQ ID NO: 123545 - DNA, 25 bp, Probe Sequence
attccagatgagtcactgtaactct

SEQ ID NO: 123546 - DNA, 25 bp, Probe Sequence
attccgagcattccagtaactgttt

SEQ ID NO: 123547 - DNA, 25 bp, Probe Sequence
attcccgagatgcaggaggccttct

SEQ ID NO: 123548 - DNA, 25 bp, Probe Sequence
attcacaacaatggggctggactca

SEQ ID NO: 123549 - DNA, 25 bp, Probe Sequence
attacaactatgtcattcgggctaa

SEQ ID NO: 123550 - DNA, 25 bp, Probe Sequence
attagacagtcttcatttccagcca

SEQ ID NO: 123551 - DNA, 25 bp, Probe Sequence
attaccagatcatcagtttagcttc

SEQ ID NO: 123552 - DNA, 25 bp, Probe Sequence
attcccaacatctataggtatgcaa

SEQ ID NO: 123553 - DNA, 25 bp, Probe Sequence
attaccaagcccagagatacagatg

SEQ ID NO: 123554 - DNA, 25 bp, Probe Sequence
attcccaaggacaggcttcagcatc

SEQ ID NO: 123555 - DNA, 25 bp, Probe Sequence
attccacgagaaagggcatcttctg

SEQ ID NO: 123556 - DNA, 25 bp, Probe Sequence
attctacgtgcagcgggttctctgc

SEQ ID NO: 123557 - DNA, 25 bp, Probe Sequence
attccaggagtcgtggtttcttgcc

SEQ ID NO: 123558 - DNA, 25 bp, Probe Sequence
attcctgtaggcttcctattttcac

SEQ ID NO: 123559 - DNA, 25 bp, Probe Sequence
attcccattcactttgattttctac

SEQ ID NO: 123560 - DNA, 25 bp, Probe Sequence
attccatcttcttttcattatacca

SEQ ID NO: 123561 - DNA, 25 bp, Probe Sequence
attctatttctctatgtttattcta

SEQ ID NO: 123562 - DNA, 25 bp, Probe Sequence
attctatttctctatgtttattcta

SEQ ID NO: 123563 - DNA, 25 bp, Probe Sequence
attctttttgagatacgtttattgt

SEQ ID NO: 123564 - DNA, 25 bp, Probe Sequence
attcttttcatacaaccattttcaa

SEQ ID NO: 123565 - DNA, 25 bp, Probe Sequence
attcttttcatacaaccattttcaa

SEQ ID NO: 123566 - DNA, 25 bp, Probe Sequence
atttttccagaagcccactattgcc

SEQ ID NO: 123567 - DNA, 25 bp, Probe Sequence
atactttctagataccgctctttgc

SEQ ID NO: 123568 - DNA, 25 bp, Probe Sequence
attcttataccatgaacagctcttt

SEQ ID NO: 123569 - DNA, 25 bp, Probe Sequence
attctcagaacagctaacctctaat

SEQ ID NO: 123570 - DNA, 25 bp, Probe Sequence
attcgagaacccatagccaatagag

SEQ ID NO: 123571 - DNA, 25 bp, Probe Sequence
attcgaaacgaagtagccaacagga

SEQ ID NO: 123572 - DNA, 25 bp, Probe Sequence
attcacaaattatgcttccaacaaa

SEQ ID NO: 123573 - DNA, 25 bp, Probe Sequence
attcctgcaattttcttcaggcagc

SEQ ID NO: 123574 - DNA, 25 bp, Probe Sequence
attcagtggacatttgttctgggtt

SEQ ID NO: 123575 - DNA, 25 bp, Probe Sequence
attcctgaggccttgatttcaggtt

SEQ ID NO: 123576 - DNA, 25 bp, Probe Sequence
attagcggtgtatttcttgaagttt

SEQ ID NO: 123577 - DNA, 25 bp, Probe Sequence
attagcggtgtatttcttgaagttt

SEQ ID NO: 123578 - DNA, 25 bp, Probe Sequence
attcagggtgtctgtgctctgactg

SEQ ID NO: 123579 - DNA, 25 bp, Probe Sequence
attccagtgtaatctgcagtgtcgt

SEQ ID NO: 123580 - DNA, 25 bp, Probe Sequence
attccagtgtaatctgcagtgtcgt

SEQ ID NO: 123581 - DNA, 25 bp, Probe Sequence
attcgtggttgagcacaggctggtt

SEQ ID NO: 123582 - DNA, 25 bp, Probe Sequence
cttcgggataggtacaatgtcgtga

SEQ ID NO: 123583 - DNA, 25 bp, Probe Sequence
attccggtcagggtcaagtcgtgtt

SEQ ID NO: 123584 - DNA, 25 bp, Probe Sequence
attcctgttagggccaagcctagtg

SEQ ID NO: 123585 - DNA, 25 bp, Probe Sequence
attcctgttgaagcataaccttgga

SEQ ID NO: 123586 - DNA, 25 bp, Probe Sequence
atttcctgagaatcgaaccttggtt

SEQ ID NO: 123587 - DNA, 25 bp, Probe Sequence
attctccaacgatatacaaattgga

SEQ ID NO: 123588 - DNA, 25 bp, Probe Sequence
attccgaaacataatatcaatttta

SEQ ID NO: 123589 - DNA, 25 bp, Probe Sequence
attcctcaaaataacatcaatctat

SEQ ID NO: 123590 - DNA, 25 bp, Probe Sequence
attcctttctaaactgctactcatg

SEQ ID NO: 123591 - DNA, 25 bp, Probe Sequence
attccgttatatatcttgagtcata

SEQ ID NO: 123592 - DNA, 25 bp, Probe Sequence
attccgtggtgtgtatgtaccatgt

SEQ ID NO: 123593 - DNA, 25 bp, Probe Sequence
attcccgggatggctttaccatctt

SEQ ID NO: 123594 - DNA, 25 bp, Probe Sequence
attcccgggatgttcgaaagcatct

SEQ ID NO: 123595 - DNA, 25 bp, Probe Sequence
attcccgggatgatagaagttctca

SEQ ID NO: 123596 - DNA, 25 bp, Probe Sequence
attcccgggatggaatgcacagtgt

SEQ ID NO: 123597 - DNA, 25 bp, Probe Sequence
attcccgggatggaacacagcatga

SEQ ID NO: 123598 - DNA, 25 bp, Probe Sequence
attcctccattgctaaacagatgaa

SEQ ID NO: 123599 - DNA, 25 bp, Probe Sequence
attcctgtctgtgtaattcgatgta

SEQ ID NO: 123600 - DNA, 25 bp, Probe Sequence
attccgtctgattctaatagagagc

SEQ ID NO: 123601 - DNA, 25 bp, Probe Sequence
attccgtctgattctaatagagagc

SEQ ID NO: 123602 - DNA, 25 bp, Probe Sequence
attccattttacaagacatgggcat

SEQ ID NO: 123603 - DNA, 25 bp, Probe Sequence
attccctgaaacaagacatcgagca

SEQ ID NO: 123604 - DNA, 25 bp, Probe Sequence
attcccgcaaactataaagagcatg

SEQ ID NO: 123605 - DNA, 25 bp, Probe Sequence
attccctgtaattcgcataagtcat

SEQ ID NO: 123606 - DNA, 25 bp, Probe Sequence
attcccttgaattgtgtattgatgc

SEQ ID NO: 123607 - DNA, 25 bp, Probe Sequence
attcccagctgtaatgttgtgtatg

SEQ ID NO: 123608 - DNA, 25 bp, Probe Sequence
attcccctttgctatgtgatgctac

SEQ ID NO: 123609 - DNA, 25 bp, Probe Sequence
attcctggtgtttatgtcacatagc

SEQ ID NO: 123610 - DNA, 25 bp, Probe Sequence
attcctgctcacttgcaagtacaat

SEQ ID NO: 123611 - DNA, 25 bp, Probe Sequence
attcctggactgacaggctacagtt

SEQ ID NO: 123612 - DNA, 25 bp, Probe Sequence
attctttactcaaggataacacggc

SEQ ID NO: 123613 - DNA, 25 bp, Probe Sequence
attcagtaaatcagatgtacaccga

SEQ ID NO: 123614 - DNA, 25 bp, Probe Sequence
attagtaactgcacactatttccct

SEQ ID NO: 123615 - DNA, 25 bp, Probe Sequence
attaataatacacagaattttcatt

SEQ ID NO: 123616 - DNA, 25 bp, Probe Sequence
attctctagtaataaatttgtagca

SEQ ID NO: 123617 - DNA, 25 bp, Probe Sequence
attcttagtacttaaaatatctcag

SEQ ID NO: 123618 - DNA, 25 bp, Probe Sequence
atatcttaggacccaaagaaaggca

SEQ ID NO: 123619 - DNA, 25 bp, Probe Sequence
attctctacaaccacaaagacattg

SEQ ID NO: 123620 - DNA, 25 bp, Probe Sequence
attcctactgacaacattataactg

SEQ ID NO: 123621 - DNA, 25 bp, Probe Sequence
attcggacaggccacatgatgcata

SEQ ID NO: 123622 - DNA, 25 bp, Probe Sequence
attaggacatggggctatgcatagc

SEQ ID NO: 123623 - DNA, 25 bp, Probe Sequence
attcggaacagagcaatctgagaca

SEQ ID NO: 123624 - DNA, 25 bp, Probe Sequence
attcggcaaacagcacactaatcct

SEQ ID NO: 123625 - DNA, 25 bp, Probe Sequence
attctggtacaagcaccttatctat

SEQ ID NO: 123626 - DNA, 25 bp, Probe Sequence
attctgcccagataatcgtgtctcc

SEQ ID NO: 123627 - DNA, 25 bp, Probe Sequence
attctgccctatttatgtttctact

SEQ ID NO: 123628 - DNA, 25 bp, Probe Sequence
attctccatcactttttttgctatc

SEQ ID NO: 123629 - DNA, 25 bp, Probe Sequence
attcgctctagacttttgttggtcg

SEQ ID NO: 123630 - DNA, 25 bp, Probe Sequence
attcctgcaaagcttgctttgggga

SEQ ID NO: 123631 - DNA, 25 bp, Probe Sequence
attcctacaagtggtctcagtggtg

SEQ ID NO: 123632 - DNA, 25 bp, Probe Sequence
attcctgctcagatagtactgtggg

SEQ ID NO: 123633 - DNA, 25 bp, Probe Sequence
attcccgggatacactgggtgctgg

SEQ ID NO: 123634 - DNA, 25 bp, Probe Sequence
attcccgggatagcagtggactgtc

SEQ ID NO: 123635 - DNA, 25 bp, Probe Sequence
attcccgggattgcatctgggctta

SEQ ID NO: 123636 - DNA, 25 bp, Probe Sequence
attcccgggatgacatattatttaa

SEQ ID NO: 123637 - DNA, 25 bp, Probe Sequence
attcccgggatatttgaataataat

SEQ ID NO: 123638 - DNA, 25 bp, Probe Sequence
attcccgggatagcaagtgaaaaag

SEQ ID NO: 123639 - DNA, 25 bp, Probe Sequence
attcccgggatctcaacagttaaat

SEQ ID NO: 123640 - DNA, 25 bp, Probe Sequence
attcccgggatctggtatcttcaaa

SEQ ID NO: 123641 - DNA, 25 bp, Probe Sequence
attcgggaggtgtgtggctttgccc

SEQ ID NO: 123642 - DNA, 25 bp, Probe Sequence
attcggtgagcggtggtggtttatt

SEQ ID NO: 123643 - DNA, 25 bp, Probe Sequence
attcaggggctagagtgattttttt

SEQ ID NO: 123644 - DNA, 25 bp, Probe Sequence
attcaggaggcaagtcaatcttttt

SEQ ID NO: 123645 - DNA, 25 bp, Probe Sequence
attcagggctcttcaaacttgtttg

SEQ ID NO: 123646 - DNA, 25 bp, Probe Sequence
attcaggcaccatccaaatgctgtt

SEQ ID NO: 123647 - DNA, 25 bp, Probe Sequence
attaggcctcaatctgaactctcct

SEQ ID NO: 123648 - DNA, 25 bp, Probe Sequence
attagacccagttattccacttttg

SEQ ID NO: 123649 - DNA, 25 bp, Probe Sequence
attagcacaccatggttatttttct

SEQ ID NO: 123650 - DNA, 25 bp, Probe Sequence
attaaaccctggatcagtcctttga

SEQ ID NO: 123651 - DNA, 25 bp, Probe Sequence
attaataccactacccgtgaattat

SEQ ID NO: 123652 - DNA, 25 bp, Probe Sequence
attaatagactccattccagtaatg

SEQ ID NO: 123653 - DNA, 25 bp, Probe Sequence
attcaaatggcccctccagaaagtt

SEQ ID NO: 123654 - DNA, 25 bp, Probe Sequence
attcaaattgtctgtcctgtggagc

SEQ ID NO: 123655 - DNA, 25 bp, Probe Sequence
attaactttagattgactggacact

SEQ ID NO: 123656 - DNA, 25 bp, Probe Sequence
attacctcctagggccaggaagcca

SEQ ID NO: 123657 - DNA, 25 bp, Probe Sequence
atcccaccctcgaggcagggaaaag

SEQ ID NO: 123658 - DNA, 25 bp, Probe Sequence
atatccatccgcagagggcggccaa

SEQ ID NO: 123659 - DNA, 25 bp, Probe Sequence
attctgaccagcagtgtgacggccg

SEQ ID NO: 123660 - DNA, 25 bp, Probe Sequence
attctatgtcatatgtggcctggcc

SEQ ID NO: 123661 - DNA, 25 bp, Probe Sequence
attcggtcaattgtcactgtcatca

SEQ ID NO: 123662 - DNA, 25 bp, Probe Sequence
attcggtcaattgtcactgtcatca

SEQ ID NO: 123663 - DNA, 25 bp, Probe Sequence
attctagtattttcagcactccata

SEQ ID NO: 123664 - DNA, 25 bp, Probe Sequence
attctcttatttctgtccagcatat

SEQ ID NO: 123665 - DNA, 25 bp, Probe Sequence
attcctctatttgttcagatctcat

SEQ ID NO: 123666 - DNA, 25 bp, Probe Sequence
attacttttctgggtatgtgctgat

SEQ ID NO: 123667 - DNA, 25 bp, Probe Sequence
attcctgttgtcagtatatgctcca

SEQ ID NO: 123668 - DNA, 25 bp, Probe Sequence
attctttttctggctaactgacaaa

SEQ ID NO: 123669 - DNA, 25 bp, Probe Sequence
atttatattctggcctacacagcag

SEQ ID NO: 123670 - DNA, 25 bp, Probe Sequence
attaacattcactttcaacgggcaa

SEQ ID NO: 123671 - DNA, 25 bp, Probe Sequence
attcacatatgtgcagtgtcagcac

SEQ ID NO: 123672 - DNA, 25 bp, Probe Sequence
attcgcagtgcccagtgatggcatt

SEQ ID NO: 123673 - DNA, 25 bp, Probe Sequence
attagccagcaccagatgcatgagc

SEQ ID NO: 123674 - DNA, 25 bp, Probe Sequence
attcacctgccgaagctgtctgagc

SEQ ID NO: 123675 - DNA, 25 bp, Probe Sequence
attcagaccctgaagagtcagactg

SEQ ID NO: 123676 - DNA, 25 bp, Probe Sequence
attcagaccctgaagagtcagactg

SEQ ID NO: 123677 - DNA, 25 bp, Probe Sequence
attcatacgcctctactgatacatg

SEQ ID NO: 123678 - DNA, 25 bp, Probe Sequence
attcattctactcatactacacacc

SEQ ID NO: 123679 - DNA, 25 bp, Probe Sequence
attccccacctgtagtaacagccat

SEQ ID NO: 123680 - DNA, 25 bp, Probe Sequence
attcccctcgcgtttaacacaatat

SEQ ID NO: 123681 - DNA, 25 bp, Probe Sequence
atgtaccgtcctttccaatacgatt

SEQ ID NO: 123682 - DNA, 25 bp, Probe Sequence
atgtaccgtcctttccaatacgatt

SEQ ID NO: 123683 - DNA, 25 bp, Probe Sequence
attactcttccaggtccaatagtga

SEQ ID NO: 123684 - DNA, 25 bp, Probe Sequence
attagccttcgcggggcaaaatgga

SEQ ID NO: 123685 - DNA, 25 bp, Probe Sequence
atttccttcacctggtagaaggatg

SEQ ID NO: 123686 - DNA, 25 bp, Probe Sequence
atttccttaaactgtgtggactgtg

SEQ ID NO: 123687 - DNA, 25 bp, Probe Sequence
attcccttaaatttgtatggcactg

SEQ ID NO: 123688 - DNA, 25 bp, Probe Sequence
attccgctctcatgagggtgaaact

SEQ ID NO: 123689 - DNA, 25 bp, Probe Sequence
attcaatgccccgaagctggaaacc

SEQ ID NO: 123690 - DNA, 25 bp, Probe Sequence
attcataacccagctgtggaccact

SEQ ID NO: 123691 - DNA, 25 bp, Probe Sequence
attcatacacgcaggtgggctccag

SEQ ID NO: 123692 - DNA, 25 bp, Probe Sequence
attcaagccgcttggaggctcatct

SEQ ID NO: 123693 - DNA, 25 bp, Probe Sequence
attcaatgaagcggagctggaattc

SEQ ID NO: 123694 - DNA, 25 bp, Probe Sequence
attcagaatatgctcagggaatgcc

SEQ ID NO: 123695 - DNA, 25 bp, Probe Sequence
attctcagttttgctggaggccgca

SEQ ID NO: 123696 - DNA, 25 bp, Probe Sequence
attacattttgatcgggacccactt

SEQ ID NO: 123697 - DNA, 25 bp, Probe Sequence
attattcttatctaattccacccct

SEQ ID NO: 123698 - DNA, 25 bp, Probe Sequence
attattcttatctaattccacccct

SEQ ID NO: 123699 - DNA, 25 bp, Probe Sequence
attattcttatctaattccacccct

SEQ ID NO: 123700 - DNA, 25 bp, Probe Sequence
attaatcttattctatcctcttttc

SEQ ID NO: 123701 - DNA, 25 bp, Probe Sequence
attaacttttagaaatctcaatatt

SEQ ID NO: 123702 - DNA, 25 bp, Probe Sequence
attacacttttagtattcaccagca

SEQ ID NO: 123703 - DNA, 25 bp, Probe Sequence
attacagttgtacagttcccagtct

SEQ ID NO: 123704 - DNA, 25 bp, Probe Sequence
attaagcggaggtgttcccaggctg

SEQ ID NO: 123705 - DNA, 25 bp, Probe Sequence
attaagcggaggtgttcccaggctg

SEQ ID NO: 123706 - DNA, 25 bp, Probe Sequence
attaagcggaggtgttcccaggctg

SEQ ID NO: 123707 - DNA, 25 bp, Probe Sequence
attactgcaggaaaaggtcccggag

SEQ ID NO: 123708 - DNA, 25 bp, Probe Sequence
atttctggagtctgggtcttccgag

SEQ ID NO: 123709 - DNA, 25 bp, Probe Sequence
atttctggagtctgggtcttccgag

SEQ ID NO: 123710 - DNA, 25 bp, Probe Sequence
attcttgaagtctggtgatgctgcc

SEQ ID NO: 123711 - DNA, 25 bp, Probe Sequence
attaaccagacattgtggcatgtgc

SEQ ID NO: 123712 - DNA, 25 bp, Probe Sequence
attctccatcagatctgggatgatg

SEQ ID NO: 123713 - DNA, 25 bp, Probe Sequence
attctgccaatgttatggtagatgg

SEQ ID NO: 123714 - DNA, 25 bp, Probe Sequence
attctcaacatctcagaccactgga

SEQ ID NO: 123715 - DNA, 25 bp, Probe Sequence
attcagaccatagcaactcctgtac

SEQ ID NO: 123716 - DNA, 25 bp, Probe Sequence
attcaggcaccagcatattcctatg

SEQ ID NO: 123717 - DNA, 25 bp, Probe Sequence
attctagcagcatccattcttgttt

SEQ ID NO: 123718 - DNA, 25 bp, Probe Sequence
attcttcagctcccatatttttaga

SEQ ID NO: 123719 - DNA, 25 bp, Probe Sequence
attctccagcatatcttttctgttg

SEQ ID NO: 123720 - DNA, 25 bp, Probe Sequence
attccgtcatatcttatgtctttgt

SEQ ID NO: 123721 - DNA, 25 bp, Probe Sequence
attccgtgaatgtatattgtcttgt

SEQ ID NO: 123722 - DNA, 25 bp, Probe Sequence
attcgtgtgtatttagtacactgat

SEQ ID NO: 123723 - DNA, 25 bp, Probe Sequence
attcgacagctatttcagtatcaag

SEQ ID NO: 123724 - DNA, 25 bp, Probe Sequence
attctcacctagtatcaatgaaagg

SEQ ID NO: 123725 - DNA, 25 bp, Probe Sequence
attcttcctgtgttcaatgttgatg

SEQ ID NO: 123726 - DNA, 25 bp, Probe Sequence
attctatggtagctcacttggatgc

SEQ ID NO: 123727 - DNA, 25 bp, Probe Sequence
attctaggtgatttcctcactgaca

SEQ ID NO: 123728 - DNA, 25 bp, Probe Sequence
attcaagagagatgtccacggccga

SEQ ID NO: 123729 - DNA, 25 bp, Probe Sequence
attcaagaggaatcgcagatcccaa

SEQ ID NO: 123730 - DNA, 25 bp, Probe Sequence
attcatcgaggttttcagtcacttc

SEQ ID NO: 123731 - DNA, 25 bp, Probe Sequence
attctctgagttatttccctgtctc

SEQ ID NO: 123732 - DNA, 25 bp, Probe Sequence
attctgggttttgtgttcttcatac

SEQ ID NO: 123733 - DNA, 25 bp, Probe Sequence
attcgggcttttatgatgtgcctac

SEQ ID NO: 123734 - DNA, 25 bp, Probe Sequence
attcgatgcgtgtttaatgatgatg

SEQ ID NO: 123735 - DNA, 25 bp, Probe Sequence
attcactgtgtgactaatagcatga

SEQ ID NO: 123736 - DNA, 25 bp, Probe Sequence
attcactgatgtccttcagacagaa

SEQ ID NO: 123737 - DNA, 25 bp, Probe Sequence
attcggcctcctgaaatgacagcag

SEQ ID NO: 123738 - DNA, 25 bp, Probe Sequence
attcggccttcacgcataaaggcag

SEQ ID NO: 123739 - DNA, 25 bp, Probe Sequence
attcccttcggccaaacagacaggt

SEQ ID NO: 123740 - DNA, 25 bp, Probe Sequence
attcccttcttccaaatatgacttt

SEQ ID NO: 123741 - DNA, 25 bp, Probe Sequence
attccctaatatgtatactatcttt

SEQ ID NO: 123742 - DNA, 25 bp, Probe Sequence
attcttgcagcatttcgtaactttt

SEQ ID NO: 123743 - DNA, 25 bp, Probe Sequence
attcagtgcaggtttggatacatct

SEQ ID NO: 123744 - DNA, 25 bp, Probe Sequence
attagatgcaggtcgtacataactt

SEQ ID NO: 123745 - DNA, 25 bp, Probe Sequence
attcagatcaggtcggctatcaagc

SEQ ID NO: 123746 - DNA, 25 bp, Probe Sequence
attcagaatgactgtgtaaagcctc

SEQ ID NO: 123747 - DNA, 25 bp, Probe Sequence
attcagcttcacggtgatgaaaaac

SEQ ID NO: 123748 - DNA, 25 bp, Probe Sequence
attcgttctcgcctggtttggaaca

SEQ ID NO: 123749 - DNA, 25 bp, Probe Sequence
attcagactaccctaatttgtaaat

SEQ ID NO: 123750 - DNA, 25 bp, Probe Sequence
attaacccctgcaaagtttctacag

SEQ ID NO: 123751 - DNA, 25 bp, Probe Sequence
atttaatagcctccaggttctttca

SEQ ID NO: 123752 - DNA, 25 bp, Probe Sequence
attctaatgaaccctgagtgtcttg

SEQ ID NO: 123753 - DNA, 25 bp, Probe Sequence
attcccatggaccctcaggtcatgt

SEQ ID NO: 123754 - DNA, 25 bp, Probe Sequence
attcacctttctcctagaatgctgt

SEQ ID NO: 123755 - DNA, 25 bp, Probe Sequence
attcaccgtttggctcgatattata

SEQ ID NO: 123756 - DNA, 25 bp, Probe Sequence
attcaccctttgtctagtgatcttg

SEQ ID NO: 123757 - DNA, 25 bp, Probe Sequence
attcactacctctactactggttaa

SEQ ID NO: 123758 - DNA, 25 bp, Probe Sequence
attcacttactaactttcttgaaat

SEQ ID NO: 123759 - DNA, 25 bp, Probe Sequence
attctctgtactatgtcgattcgac

SEQ ID NO: 123760 - DNA, 25 bp, Probe Sequence
attctctgtactatgtcgattcgac

SEQ ID NO: 123761 - DNA, 25 bp, Probe Sequence
attcacgtaccaatggcactattca

SEQ ID NO: 123762 - DNA, 25 bp, Probe Sequence
attcagcgatcagcattggaactgt

SEQ ID NO: 123763 - DNA, 25 bp, Probe Sequence
attcatgccatggtttaaagttaat

SEQ ID NO: 123764 - DNA, 25 bp, Probe Sequence
attcagccttatccaactagggaaa

SEQ ID NO: 123765 - DNA, 25 bp, Probe Sequence
attctgttttaagctcatggatcaa

SEQ ID NO: 123766 - DNA, 25 bp, Probe Sequence
attctgaatattaacggtggtgaaa

SEQ ID NO: 123767 - DNA, 25 bp, Probe Sequence
attcatggtgaatttgggtggaaaa

SEQ ID NO: 123768 - DNA, 25 bp, Probe Sequence
attctggtggtggatggcggggact

SEQ ID NO: 123769 - DNA, 25 bp, Probe Sequence
attcggctgcggaagggcttggcct

SEQ ID NO: 123770 - DNA, 25 bp, Probe Sequence
attcgagtgtggtggccactgtgcc

SEQ ID NO: 123771 - DNA, 25 bp, Probe Sequence
attcatgggctgcggaggactgggc

SEQ ID NO: 123772 - DNA, 25 bp, Probe Sequence
attctgggctgccaggaaacgattt

SEQ ID NO: 123773 - DNA, 25 bp, Probe Sequence
attcattggtgcctaaagaacttta

SEQ ID NO: 123774 - DNA, 25 bp, Probe Sequence
attcttgttgccacagctggagctc

SEQ ID NO: 123775 - DNA, 25 bp, Probe Sequence
attcttcttctcaagcactgacact

SEQ ID NO: 123776 - DNA, 25 bp, Probe Sequence
attcttcgcttcacaatgtctcgtg

SEQ ID NO: 123777 - DNA, 25 bp, Probe Sequence
attcttcaatgtaagcatagtgctc

SEQ ID NO: 123778 - DNA, 25 bp, Probe Sequence
attctgaccatgaatactgcagaga

SEQ ID NO: 123779 - DNA, 25 bp, Probe Sequence
attctgaaactatctcattgagggt

SEQ ID NO: 123780 - DNA, 25 bp, Probe Sequence
attcgaaacttacctgcgggactgc

SEQ ID NO: 123781 - DNA, 25 bp, Probe Sequence
attaaaacattcccggtgtgagctg

SEQ ID NO: 123782 - DNA, 25 bp, Probe Sequence
attacaaggcccctcgaatggtgct

SEQ ID NO: 123783 - DNA, 25 bp, Probe Sequence
attaaaccaggcctgaggagcgatg

SEQ ID NO: 123784 - DNA, 25 bp, Probe Sequence
attaatatacaggcttagtcagctg

SEQ ID NO: 123785 - DNA, 25 bp, Probe Sequence
attcagatataagatgttgtacata

SEQ ID NO: 123786 - DNA, 25 bp, Probe Sequence
attcaacataacaagctcattatta

SEQ ID NO: 123787 - DNA, 25 bp, Probe Sequence
attcaaccagcaacagtcaacattt

SEQ ID NO: 123788 - DNA, 25 bp, Probe Sequence
attcaaacacgtatccataattttt

SEQ ID NO: 123789 - DNA, 25 bp, Probe Sequence
attctttcttgtatctccgttgatt

SEQ ID NO: 123790 - DNA, 25 bp, Probe Sequence
attctttgttttaatcttgcgatgt

SEQ ID NO: 123791 - DNA, 25 bp, Probe Sequence
attcttagttcttttctttgatctg

SEQ ID NO: 123792 - DNA, 25 bp, Probe Sequence
attcttcgtctttttgcttggatat

SEQ ID NO: 123793 - DNA, 25 bp, Probe Sequence
attctgtcggtattacttctgtgga

SEQ ID NO: 123794 - DNA, 25 bp, Probe Sequence
attctctctagtttacttgtgtgtg

SEQ ID NO: 123795 - DNA, 25 bp, Probe Sequence
attcagactggtgatatcgtgatgt

SEQ ID NO: 123796 - DNA, 25 bp, Probe Sequence
attcaactctgtgacacagcacatg

SEQ ID NO: 123797 - DNA, 25 bp, Probe Sequence
attcagacattgggagcagcagcag

SEQ ID NO: 123798 - DNA, 25 bp, Probe Sequence
attcagtcattgggaaatgccgccc

SEQ ID NO: 123799 - DNA, 25 bp, Probe Sequence
attctatatgtggacaaatcgacct

SEQ ID NO: 123800 - DNA, 25 bp, Probe Sequence
attctatttgggcaagagatgcgct

SEQ ID NO: 123801 - DNA, 25 bp, Probe Sequence
attctttttggagcaatacctacaa

SEQ ID NO: 123802 - DNA, 25 bp, Probe Sequence
attctttttctctcaagagttccat

SEQ ID NO: 123803 - DNA, 25 bp, Probe Sequence
atatctattttttcaacggacccat

SEQ ID NO: 123804 - DNA, 25 bp, Probe Sequence
aacttttgggagcacggactgtcag

SEQ ID NO: 123805 - DNA, 25 bp, Probe Sequence
atagctaaaaaacactggccttcag

SEQ ID NO: 123806 - DNA, 25 bp, Probe Sequence
attcacaaaaaacaatagcctcatc

SEQ ID NO: 123807 - DNA, 25 bp, Probe Sequence
agtctaaaagggctagagcattttt

SEQ ID NO: 123808 - DNA, 25 bp, Probe Sequence
agttgaacagggccctgaagcgcgt

SEQ ID NO: 123809 - DNA, 25 bp, Probe Sequence
atttcagaagggccacggaccacat

SEQ ID NO: 123810 - DNA, 25 bp, Probe Sequence
attctcagatggcgaccgtgtaaat

SEQ ID NO: 123811 - DNA, 25 bp, Probe Sequence
attcatcgtgaggggtctttgtcct

SEQ ID NO: 123812 - DNA, 25 bp, Probe Sequence
attcatcaggcggtcttgtacaccc

SEQ ID NO: 123813 - DNA, 25 bp, Probe Sequence
attctcaggagttgcttgtacattc

SEQ ID NO: 123814 - DNA, 25 bp, Probe Sequence
attaagagcttcctgattgagattc

SEQ ID NO: 123815 - DNA, 25 bp, Probe Sequence
attcaaacctgcatattgtgatttt

SEQ ID NO: 123816 - DNA, 25 bp, Probe Sequence
attaaacaagtcaattctgtgtggt

SEQ ID NO: 123817 - DNA, 25 bp, Probe Sequence
attcatgaagcaaatctatctgcaa

SEQ ID NO: 123818 - DNA, 25 bp, Probe Sequence
attcagagcatctgtctttgcagca

SEQ ID NO: 123819 - DNA, 25 bp, Probe Sequence
attcaatgctattgccattaccata

SEQ ID NO: 123820 - DNA, 25 bp, Probe Sequence
attattctgtgatgcttagactact

SEQ ID NO: 123821 - DNA, 25 bp, Probe Sequence
attaagccatgcatgtctaagtacg

SEQ ID NO: 123822 - DNA, 25 bp, Probe Sequence
attctgcacgatctgtatatagtac

SEQ ID NO: 123823 - DNA, 25 bp, Probe Sequence
attctgccattgcctttgaaagatc

SEQ ID NO: 123824 - DNA, 25 bp, Probe Sequence
attctgctcattggcttctaccaac

SEQ ID NO: 123825 - DNA, 25 bp, Probe Sequence
attctgatgtatgggtgctaaaaaa

SEQ ID NO: 123826 - DNA, 25 bp, Probe Sequence
attctgatgaggaggctcaagaagc

SEQ ID NO: 123827 - DNA, 25 bp, Probe Sequence
attttgggtctggcagctgaaagca

SEQ ID NO: 123828 - DNA, 25 bp, Probe Sequence
attttaccttcctgtgaagcaaact

SEQ ID NO: 123829 - DNA, 25 bp, Probe Sequence
attcataacgtgtatctttaagaaa

SEQ ID NO: 123830 - DNA, 25 bp, Probe Sequence
attacaactctgttttagaaataat

SEQ ID NO: 123831 - DNA, 25 bp, Probe Sequence
attagcagaacgctcttgaaacaag

SEQ ID NO: 123832 - DNA, 25 bp, Probe Sequence
atcttgctttccccattggaactag

SEQ ID NO: 123833 - DNA, 25 bp, Probe Sequence
attattcttccccatgggaaaatga

SEQ ID NO: 123834 - DNA, 25 bp, Probe Sequence
attcttgcttccttaaattaatatg

SEQ ID NO: 123835 - DNA, 25 bp, Probe Sequence
attctctgctaggcctaagattttg

SEQ ID NO: 123836 - DNA, 25 bp, Probe Sequence
attcacagctcattttagagctctg

SEQ ID NO: 123837 - DNA, 25 bp, Probe Sequence
attctcagccattttgggcatatgt

SEQ ID NO: 123838 - DNA, 25 bp, Probe Sequence
attctagacttattagccattgtat

SEQ ID NO: 123839 - DNA, 25 bp, Probe Sequence
attctgaactgtatccatattttaa

SEQ ID NO: 123840 - DNA, 25 bp, Probe Sequence
attctagacatttgtctattttgtt

SEQ ID NO: 123841 - DNA, 25 bp, Probe Sequence
attctagaagcacacctctttttga

SEQ ID NO: 123842 - DNA, 25 bp, Probe Sequence
atatgctaatagacagcccctttgc

SEQ ID NO: 123843 - DNA, 25 bp, Probe Sequence
atatgtaattctaacacccattccc

SEQ ID NO: 123844 - DNA, 25 bp, Probe Sequence
attctagatattaaccccatattta

SEQ ID NO: 123845 - DNA, 25 bp, Probe Sequence
attcttttatcaatcccagcatttt

SEQ ID NO: 123846 - DNA, 25 bp, Probe Sequence
attctctgtggtatctcacgtttct

SEQ ID NO: 123847 - DNA, 25 bp, Probe Sequence
attcatgctgatggtggggcacagt

SEQ ID NO: 123848 - DNA, 25 bp, Probe Sequence
attcatgccatagtatgggccccgg

SEQ ID NO: 123849 - DNA, 25 bp, Probe Sequence
attcagcacatatataacgtctctc

SEQ ID NO: 123850 - DNA, 25 bp, Probe Sequence
attctgccataggaacacttctgtc

SEQ ID NO: 123851 - DNA, 25 bp, Probe Sequence
attcttaaggattgccatgtcagtc

SEQ ID NO: 123852 - DNA, 25 bp, Probe Sequence
attttagaggggtcagctgctgtgc

SEQ ID NO: 123853 - DNA, 25 bp, Probe Sequence
attctatagtggcagaaagctgggc

SEQ ID NO: 123854 - DNA, 25 bp, Probe Sequence
attacaagggccagaagctagctga

SEQ ID NO: 123855 - DNA, 25 bp, Probe Sequence
atataagggggaggaagtcactggc

SEQ ID NO: 123856 - DNA, 25 bp, Probe Sequence
attaggggcaggggacaccttggct

SEQ ID NO: 123857 - DNA, 25 bp, Probe Sequence
attcagggagctgcaaatgccctct

SEQ ID NO: 123858 - DNA, 25 bp, Probe Sequence
attcacgtgccagcaacagacctac

SEQ ID NO: 123859 - DNA, 25 bp, Probe Sequence
attctcttgaccaaatagactcata

SEQ ID NO: 123860 - DNA, 25 bp, Probe Sequence
attctcgtatctgccatgagttcaa

SEQ ID NO: 123861 - DNA, 25 bp, Probe Sequence
attctgcatttcttcgagtggtaag

SEQ ID NO: 123862 - DNA, 25 bp, Probe Sequence
attcagcctggcttcaaattgtaag

SEQ ID NO: 123863 - DNA, 25 bp, Probe Sequence
attctctctgaacacacattgctat

SEQ ID NO: 123864 - DNA, 25 bp, Probe Sequence
attctttccatgaaccatctgcttt

SEQ ID NO: 123865 - DNA, 25 bp, Probe Sequence
attctttccttggctcagttgtgtt

SEQ ID NO: 123866 - DNA, 25 bp, Probe Sequence
atatcctgacttattcgagtggttt

SEQ ID NO: 123867 - DNA, 25 bp, Probe Sequence
attctctgctttccttggattggct

SEQ ID NO: 123868 - DNA, 25 bp, Probe Sequence
attctcacttttgttgactgccaac

SEQ ID NO: 123869 - DNA, 25 bp, Probe Sequence
attctcacttttgttgactgccaac

SEQ ID NO: 123870 - DNA, 25 bp, Probe Sequence
attctcacttttgttgactgccaac

SEQ ID NO: 123871 - DNA, 25 bp, Probe Sequence
attacctcatttgttgtgtgactga

SEQ ID NO: 123872 - DNA, 25 bp, Probe Sequence
attacgatgttgcccgtggggtgca

SEQ ID NO: 123873 - DNA, 25 bp, Probe Sequence
attacttcattgttcagtggccggc

SEQ ID NO: 123874 - DNA, 25 bp, Probe Sequence
attactacattgcacaggttcagcc

SEQ ID NO: 123875 - DNA, 25 bp, Probe Sequence
atctactcagacaggaccttcgcac

SEQ ID NO: 123876 - DNA, 25 bp, Probe Sequence
atctactcagacaggaccttcgcac

SEQ ID NO: 123877 - DNA, 25 bp, Probe Sequence
attaacaaagagaagcgcctgcaac

SEQ ID NO: 123878 - DNA, 25 bp, Probe Sequence
attacagcaagactgtcagcctcca

SEQ ID NO: 123879 - DNA, 25 bp, Probe Sequence
attagcgcagagaccttcactgccc

SEQ ID NO: 123880 - DNA, 25 bp, Probe Sequence
attcatgccgagacctgctattcaa

SEQ ID NO: 123881 - DNA, 25 bp, Probe Sequence
atgttccagcaggtcgacttcaaca

SEQ ID NO: 123882 - DNA, 25 bp, Probe Sequence
attacctagttcgctcaaacactac

SEQ ID NO: 123883 - DNA, 25 bp, Probe Sequence
attacccaggtctgactgaccacca

SEQ ID NO: 123884 - DNA, 25 bp, Probe Sequence
attacctaggctgtactgccacaaa

SEQ ID NO: 123885 - DNA, 25 bp, Probe Sequence
attacaggtacggtattctcaccaa

SEQ ID NO: 123886 - DNA, 25 bp, Probe Sequence
attacaggataccccattctgagga

SEQ ID NO: 123887 - DNA, 25 bp, Probe Sequence
attcacagctgggcacaacttcaga

SEQ ID NO: 123888 - DNA, 25 bp, Probe Sequence
attacacaaatattcatggttacta

SEQ ID NO: 123889 - DNA, 25 bp, Probe Sequence
attaatattttactgctggtcactc

SEQ ID NO: 123890 - DNA, 25 bp, Probe Sequence
attaagtctgtacatgtgcgtgcac

SEQ ID NO: 123891 - DNA, 25 bp, Probe Sequence
attcagttctgatgtctgtgtgtgc

SEQ ID NO: 123892 - DNA, 25 bp, Probe Sequence
attcagtagtatttgcattgtatag

SEQ ID NO: 123893 - DNA, 25 bp, Probe Sequence
attagccagtcatatacctatagtc

SEQ ID NO: 123894 - DNA, 25 bp, Probe Sequence
attcaggtgtaactcatcacttagt

SEQ ID NO: 123895 - DNA, 25 bp, Probe Sequence
attagggtaactagctattgagtat

SEQ ID NO: 123896 - DNA, 25 bp, Probe Sequence
attatgggcgaaatatgttttctct

SEQ ID NO: 123897 - DNA, 25 bp, Probe Sequence
attatggtctagctatcgttatttg

SEQ ID NO: 123898 - DNA, 25 bp, Probe Sequence
attagctgggcatggtgacgggcgc

SEQ ID NO: 123899 - DNA, 25 bp, Probe Sequence
attagctacgcatcgtggtgtgcgc

SEQ ID NO: 123900 - DNA, 25 bp, Probe Sequence
attaaacgagacgggtgcatctgcg

SEQ ID NO: 123901 - DNA, 25 bp, Probe Sequence
attagtaaaattgcagtgatctggt

SEQ ID NO: 123902 - DNA, 25 bp, Probe Sequence
attcaataacagtttctggacagga

SEQ ID NO: 123903 - DNA, 25 bp, Probe Sequence
attaaaagcagtctcggaaacacag

SEQ ID NO: 123904 - DNA, 25 bp, Probe Sequence
attcaattgagacctttagctaact

SEQ ID NO: 123905 - DNA, 25 bp, Probe Sequence
attctatgtaccctttactactctc

SEQ ID NO: 123906 - DNA, 25 bp, Probe Sequence
attcagtgaactcttttctcattct

SEQ ID NO: 123907 - DNA, 25 bp, Probe Sequence
attaaatgcacgcttttgtcatgtc

SEQ ID NO: 123908 - DNA, 25 bp, Probe Sequence
attaagtcatgtcctggtaccgtcc

SEQ ID NO: 123909 - DNA, 25 bp, Probe Sequence
attcaggaatatctgttcccagccc

SEQ ID NO: 123910 - DNA, 25 bp, Probe Sequence
attaatatatatctgctgtccagac

SEQ ID NO: 123911 - DNA, 25 bp, Probe Sequence
attagatgatcaaagatgtgctcca

SEQ ID NO: 123912 - DNA, 25 bp, Probe Sequence
attacatgctgacatgttctgccac

SEQ ID NO: 123913 - DNA, 25 bp, Probe Sequence
attcatcactgtggtgttctccatg

SEQ ID NO: 123914 - DNA, 25 bp, Probe Sequence
attacaatgctgtctgtccaactgc

SEQ ID NO: 123915 - DNA, 25 bp, Probe Sequence
attcagcaatgtccgcatcaacttg

SEQ ID NO: 123916 - DNA, 25 bp, Probe Sequence
attcatcattgggctcacttctaat

SEQ ID NO: 123917 - DNA, 25 bp, Probe Sequence
attcactaggataatgcgtgctaat

SEQ ID NO: 123918 - DNA, 25 bp, Probe Sequence
attctctggttttctgtgtaattcc

SEQ ID NO: 123919 - DNA, 25 bp, Probe Sequence
attctctgcagttttctgttgggcc

SEQ ID NO: 123920 - DNA, 25 bp, Probe Sequence
attttgcattatatctaggaaccat

SEQ ID NO: 123921 - DNA, 25 bp, Probe Sequence
attattgcaaacctatacacaacca

SEQ ID NO: 123922 - DNA, 25 bp, Probe Sequence
attactccaacattgaggccaacga

SEQ ID NO: 123923 - DNA, 25 bp, Probe Sequence
attaccaaagacagaccaatcaact

SEQ ID NO: 123924 - DNA, 25 bp, Probe Sequence
attaccaaagaggcctgctcttgaa

SEQ ID NO: 123925 - DNA, 25 bp, Probe Sequence
attagcatcagtcaacccctgctaa

SEQ ID NO: 123926 - DNA, 25 bp, Probe Sequence
attagtcataaaacaccatcattaa

SEQ ID NO: 123927 - DNA, 25 bp, Probe Sequence
attagatccatttctgcagaactta

SEQ ID NO: 123928 - DNA, 25 bp, Probe Sequence
attagtgccatcattgagaaagagg

SEQ ID NO: 123929 - DNA, 25 bp, Probe Sequence
attaggcctatttaggtgacactat

SEQ ID NO: 123930 - DNA, 25 bp, Probe Sequence
attaggcctatttaggtgacactat

SEQ ID NO: 123931 - DNA, 25 bp, Probe Sequence
attaggcctatttaggtgacactat

SEQ ID NO: 123932 - DNA, 25 bp, Probe Sequence
attaggcctatttaggtgacactat

SEQ ID NO: 123933 - DNA, 25 bp, Probe Sequence
attaggcctatttaggtgacactat

SEQ ID NO: 123934 - DNA, 25 bp, Probe Sequence
attaggcctatttaggtgacactat

SEQ ID NO: 123935 - DNA, 25 bp, Probe Sequence
attaggcctatttaggtgacactat

SEQ ID NO: 123936 - DNA, 25 bp, Probe Sequence
attaagctcatgttctacacagact

SEQ ID NO: 123937 - DNA, 25 bp, Probe Sequence
attcaaggcatttctatcacatatt

SEQ ID NO: 123938 - DNA, 25 bp, Probe Sequence
attcaatcacatcactagcactttt

SEQ ID NO: 123939 - DNA, 25 bp, Probe Sequence
attcatgtcctgcatacatacatat

SEQ ID NO: 123940 - DNA, 25 bp, Probe Sequence
attcacataatgccaaatacacaat

SEQ ID NO: 123941 - DNA, 25 bp, Probe Sequence
attcactcattgtaagataacagtt

SEQ ID NO: 123942 - DNA, 25 bp, Probe Sequence
attcatcctctgtgatggaatggtc

SEQ ID NO: 123943 - DNA, 25 bp, Probe Sequence
attcatccctgtagcattgttcgtt

SEQ ID NO: 123944 - DNA, 25 bp, Probe Sequence
attctagtatgttttgttcctgctg

SEQ ID NO: 123945 - DNA, 25 bp, Probe Sequence
attctagctgtaactctttccagtt

SEQ ID NO: 123946 - DNA, 25 bp, Probe Sequence
attctattaaatacattgcaccaaa

SEQ ID NO: 123947 - DNA, 25 bp, Probe Sequence
attcttcagaaaacctccaaagtag

SEQ ID NO: 123948 - DNA, 25 bp, Probe Sequence
attcttcggcagatcactgtaaatg

SEQ ID NO: 123949 - DNA, 25 bp, Probe Sequence
attctcatcccatctaagttgaaga

SEQ ID NO: 123950 - DNA, 25 bp, Probe Sequence
attctattgcaatgttattctgagc

SEQ ID NO: 123951 - DNA, 25 bp, Probe Sequence
attctattgctttgtcttgcttata

SEQ ID NO: 123952 - DNA, 25 bp, Probe Sequence
attctacattcttgcttccttaaat

SEQ ID NO: 123953 - DNA, 25 bp, Probe Sequence
attctaatgtgtgtacttcataata

SEQ ID NO: 123954 - DNA, 25 bp, Probe Sequence
attctcatttatgcatgatctatgc

SEQ ID NO: 123955 - DNA, 25 bp, Probe Sequence
attctcattctttcagaaaggcttg

SEQ ID NO: 123956 - DNA, 25 bp, Probe Sequence
attcacattctaataaacagttata

SEQ ID NO: 123957 - DNA, 25 bp, Probe Sequence
attcacatctcatttttccgtaaaa

SEQ ID NO: 123958 - DNA, 25 bp, Probe Sequence
attacatcgattcttccaaatttca

SEQ ID NO: 123959 - DNA, 25 bp, Probe Sequence
attaactgcattcttgtaacacctc

SEQ ID NO: 123960 - DNA, 25 bp, Probe Sequence
attagaccatatctcataaaacctt

SEQ ID NO: 123961 - DNA, 25 bp, Probe Sequence
attaaagaatactataaacacctct

SEQ ID NO: 123962 - DNA, 25 bp, Probe Sequence
attaaacacacccatacaaacattg

SEQ ID NO: 123963 - DNA, 25 bp, Probe Sequence
attacaaacacagttgaaagactta

SEQ ID NO: 123964 - DNA, 25 bp, Probe Sequence
attaaaccactgaacaattgtctta

SEQ ID NO: 123965 - DNA, 25 bp, Probe Sequence
attaaatctcacagagactgtttct

SEQ ID NO: 123966 - DNA, 25 bp, Probe Sequence
attcaaacacaagcagccgttctct

SEQ ID NO: 123967 - DNA, 25 bp, Probe Sequence
attacaagcagattaatccctcttt

SEQ ID NO: 123968 - DNA, 25 bp, Probe Sequence
attaactgagtagctctcctgactt

SEQ ID NO: 123969 - DNA, 25 bp, Probe Sequence
attaactgagtagctctcctgactt

SEQ ID NO: 123970 - DNA, 25 bp, Probe Sequence
attaagtcctactttacatatgctt

SEQ ID NO: 123971 - DNA, 25 bp, Probe Sequence
atctcaagtcccttttaaaatcgct

SEQ ID NO: 123972 - DNA, 25 bp, Probe Sequence
attcaaggccctactatgcaaaaag

SEQ ID NO: 123973 - DNA, 25 bp, Probe Sequence
attcaacatcctttcatgataaaaa

SEQ ID NO: 123974 - DNA, 25 bp, Probe Sequence
attcaagcactccagacttgattaa

SEQ ID NO: 123975 - DNA, 25 bp, Probe Sequence
attaatgcagtcaagccagatcact

SEQ ID NO: 123976 - DNA, 25 bp, Probe Sequence
attcatgatgagacagtccaactct

SEQ ID NO: 123977 - DNA, 25 bp, Probe Sequence
attcattatgatcaacagacctcac

SEQ ID NO: 123978 - DNA, 25 bp, Probe Sequence
attcattcattagtaagcagcaatc

SEQ ID NO: 123979 - DNA, 25 bp, Probe Sequence
attcttgcttagacagtcagcattt

SEQ ID NO: 123980 - DNA, 25 bp, Probe Sequence
attcttcatgtaatcattcataaat

SEQ ID NO: 123981 - DNA, 25 bp, Probe Sequence
attcttgcatctggccttagaaatg

SEQ ID NO: 123982 - DNA, 25 bp, Probe Sequence
attcttacttgaattgtgcaatttg

SEQ ID NO: 123983 - DNA, 25 bp, Probe Sequence
attcttgacaactatttgcttttga

SEQ ID NO: 123984 - DNA, 25 bp, Probe Sequence
attctaccaactaatatgtctctat

SEQ ID NO: 123985 - DNA, 25 bp, Probe Sequence
attaaccagagaagtctttccaaga

SEQ ID NO: 123986 - DNA, 25 bp, Probe Sequence
attacactagagacgtcttccagat

SEQ ID NO: 123987 - DNA, 25 bp, Probe Sequence
attaactcactaaatctgagccagt

SEQ ID NO: 123988 - DNA, 25 bp, Probe Sequence
attacctacatagaaaggtgtttga

SEQ ID NO: 123989 - DNA, 25 bp, Probe Sequence
attcttccacgagagagggctttct

SEQ ID NO: 123990 - DNA, 25 bp, Probe Sequence
attttaaagcaacaggcctttctca

SEQ ID NO: 123991 - DNA, 25 bp, Probe Sequence
atttcggacggatggatccctttcg

SEQ ID NO: 123992 - DNA, 25 bp, Probe Sequence
attttggacttatctggtgcctttc

SEQ ID NO: 123993 - DNA, 25 bp, Probe Sequence
atttttcacccaacgggagctcgtg

SEQ ID NO: 123994 - DNA, 25 bp, Probe Sequence
attctagtcagctgcaggcgggaag

SEQ ID NO: 123995 - DNA, 25 bp, Probe Sequence
attcaggtatgctggggtggagccc

SEQ ID NO: 123996 - DNA, 25 bp, Probe Sequence
attaggtaggtatggttgcaggcac

SEQ ID NO: 123997 - DNA, 25 bp, Probe Sequence
attagcggggccaggtggcaggcac

SEQ ID NO: 123998 - DNA, 25 bp, Probe Sequence
attagccgggcatggtggtgggagc

SEQ ID NO: 123999 - DNA, 25 bp, Probe Sequence
attagctagggctggggtcagccac

SEQ ID NO: 124000 - DNA, 25 bp, Probe Sequence
attactagataggtctggatgtctg

SEQ ID NO: 124001 - DNA, 25 bp, Probe Sequence
attactacatgacactgggcaagct

SEQ ID NO: 124002 - DNA, 25 bp, Probe Sequence
atatgactacaacacagtccccttc

SEQ ID NO: 124003 - DNA, 25 bp, Probe Sequence
attatgtgacaaccatgcaggctcc

SEQ ID NO: 124004 - DNA, 25 bp, Probe Sequence
attcttgatcaaatccagagctcct

SEQ ID NO: 124005 - DNA, 25 bp, Probe Sequence
attcatcttcaaagcacaactctat

SEQ ID NO: 124006 - DNA, 25 bp, Probe Sequence
attacttcaaatcctttggtcactg

SEQ ID NO: 124007 - DNA, 25 bp, Probe Sequence
attaaagcaattcctttgacctgtc

SEQ ID NO: 124008 - DNA, 25 bp, Probe Sequence
attagagagaatcccttgtggactg

SEQ ID NO: 124009 - DNA, 25 bp, Probe Sequence
attatgaggaggttggtgtggattc

SEQ ID NO: 124010 - DNA, 25 bp, Probe Sequence
atgtatgaggagggggaaatttgta

SEQ ID NO: 124011 - DNA, 25 bp, Probe Sequence
attaactgagccacgaaatgctgtt

SEQ ID NO: 124012 - DNA, 25 bp, Probe Sequence
attacaacagccatcgaggacttat

SEQ ID NO: 124013 - DNA, 25 bp, Probe Sequence
attaaaactcttggtggtcacatat

SEQ ID NO: 124014 - DNA, 25 bp, Probe Sequence
attaaggcgtttggaggaactcatc

SEQ ID NO: 124015 - DNA, 25 bp, Probe Sequence
attagaggctttgctgggacataac

SEQ ID NO: 124016 - DNA, 25 bp, Probe Sequence
attaagacatgcactatgaggaata

SEQ ID NO: 124017 - DNA, 25 bp, Probe Sequence
attacagtatgtctatatgatgaaa

SEQ ID NO: 124018 - DNA, 25 bp, Probe Sequence
attacagtatgtctatatgatgaaa

SEQ ID NO: 124019 - DNA, 25 bp, Probe Sequence
attacagtatgtctatatgatgaaa

SEQ ID NO: 124020 - DNA, 25 bp, Probe Sequence
attacagtatgtctatatgatgaaa

SEQ ID NO: 124021 - DNA, 25 bp, Probe Sequence
attcacgcaagtttcagtgtcaaat

SEQ ID NO: 124022 - DNA, 25 bp, Probe Sequence
attcactgagcaaaccagctttaaa

SEQ ID NO: 124023 - DNA, 25 bp, Probe Sequence
attaagcagcatgaccgcttcctga

SEQ ID NO: 124024 - DNA, 25 bp, Probe Sequence
attaaagcatcaacacggcctggca

SEQ ID NO: 124025 - DNA, 25 bp, Probe Sequence
atataagcattcgcaaggagtggaa

SEQ ID NO: 124026 - DNA, 25 bp, Probe Sequence
attacagcatttcagagtattggag

SEQ ID NO: 124027 - DNA, 25 bp, Probe Sequence
attcacagttgttattgtttacaga

SEQ ID NO: 124028 - DNA, 25 bp, Probe Sequence
attacagtggttgatgccttacatg

SEQ ID NO: 124029 - DNA, 25 bp, Probe Sequence
attacttagcgttattctagactta

SEQ ID NO: 124030 - DNA, 25 bp, Probe Sequence
attcactgtcactttttctcatgtt

SEQ ID NO: 124031 - DNA, 25 bp, Probe Sequence
attcaatctaatttttctctgtgga

SEQ ID NO: 124032 - DNA, 25 bp, Probe Sequence
attcagcgaactttctttgctgctg

SEQ ID NO: 124033 - DNA, 25 bp, Probe Sequence
attacaaattttcactgctgctcct

SEQ ID NO: 124034 - DNA, 25 bp, Probe Sequence
attcataaatatgtcccttctcttt

SEQ ID NO: 124035 - DNA, 25 bp, Probe Sequence
attataaatgcttttcagatatgtc

SEQ ID NO: 124036 - DNA, 25 bp, Probe Sequence
attaactcacttaggagaattcaga

SEQ ID NO: 124037 - DNA, 25 bp, Probe Sequence
attaattcactaagctgcctagcca

SEQ ID NO: 124038 - DNA, 25 bp, Probe Sequence
attaatagctaaatggccacaccaa

SEQ ID NO: 124039 - DNA, 25 bp, Probe Sequence
attatcatatgtttgtacccgtcac

SEQ ID NO: 124040 - DNA, 25 bp, Probe Sequence
attcatattcatttgtatccaaggt

SEQ ID NO: 124041 - DNA, 25 bp, Probe Sequence
attcatttcatttccactcgtggtt

SEQ ID NO: 124042 - DNA, 25 bp, Probe Sequence
attcattctatgtgccgttttgttg

SEQ ID NO: 124043 - DNA, 25 bp, Probe Sequence
attcagtctgtgcaacggatttttt

SEQ ID NO: 124044 - DNA, 25 bp, Probe Sequence
aacgttgggcatcatggtttttgaa

SEQ ID NO: 124045 - DNA, 25 bp, Probe Sequence
atacctagggcggaagtgctctcgg

SEQ ID NO: 124046 - DNA, 25 bp, Probe Sequence
gaacgttgagggcacgagtcgggtc

SEQ ID NO: 124047 - DNA, 25 bp, Probe Sequence
gactagttacggagggtgagggttg

SEQ ID NO: 124048 - DNA, 25 bp, Probe Sequence
tttaattaccggctgttgagggcat

SEQ ID NO: 124049 - DNA, 25 bp, Probe Sequence
attacttacagacctgtttagggct

SEQ ID NO: 124050 - DNA, 25 bp, Probe Sequence
attactgagttttttagtgagggct

SEQ ID NO: 124051 - DNA, 25 bp, Probe Sequence
attcttggtagttctcttgggcaga

SEQ ID NO: 124052 - DNA, 25 bp, Probe Sequence
attcagttgttgtgcctcatggaga

SEQ ID NO: 124053 - DNA, 25 bp, Probe Sequence
attcagtttcctgcccagaatgatc

SEQ ID NO: 124054 - DNA, 25 bp, Probe Sequence
attaatcctcctccacatacaatgg

SEQ ID NO: 124055 - DNA, 25 bp, Probe Sequence
attaatcctcctccacatacaatgg

SEQ ID NO: 124056 - DNA, 25 bp, Probe Sequence
attcatgtcctaagacagcttcaag

SEQ ID NO: 124057 - DNA, 25 bp, Probe Sequence
attatggtctaagagcgctcaggct

SEQ ID NO: 124058 - DNA, 25 bp, Probe Sequence
attaggttaatgggagctggctgcc

SEQ ID NO: 124059 - DNA, 25 bp, Probe Sequence
attcaggcttcaatggacaggcacc

SEQ ID NO: 124060 - DNA, 25 bp, Probe Sequence
attaggctccaagatcatgctgatc

SEQ ID NO: 124061 - DNA, 25 bp, Probe Sequence
attcagacccaagattctgtcctcc

SEQ ID NO: 124062 - DNA, 25 bp, Probe Sequence
attagaccccagggagtgacctctc

SEQ ID NO: 124063 - DNA, 25 bp, Probe Sequence
attaaccttcagctgagacacttcc

SEQ ID NO: 124064 - DNA, 25 bp, Probe Sequence
attaacgctattatgattccttcct

SEQ ID NO: 124065 - DNA, 25 bp, Probe Sequence
attacgcttttcagatcctttcaat

SEQ ID NO: 124066 - DNA, 25 bp, Probe Sequence
attaacattgctactttccttgcca

SEQ ID NO: 124067 - DNA, 25 bp, Probe Sequence
attaaattgcttttgacaatctgaa

SEQ ID NO: 124068 - DNA, 25 bp, Probe Sequence
attaacttcctgtatgctgcaactc

SEQ ID NO: 124069 - DNA, 25 bp, Probe Sequence
attaattttcattcatcaacctctc

SEQ ID NO: 124070 - DNA, 25 bp, Probe Sequence
attaattttgcaacccactgatggg

SEQ ID NO: 124071 - DNA, 25 bp, Probe Sequence
attacataaaattctcactctgagg

SEQ ID NO: 124072 - DNA, 25 bp, Probe Sequence
attacatataaatcatggcctgagc

SEQ ID NO: 124073 - DNA, 25 bp, Probe Sequence
attatagaagcaagaaggcgatagc

SEQ ID NO: 124074 - DNA, 25 bp, Probe Sequence
atctcaaaagcaacatggggacggg

SEQ ID NO: 124075 - DNA, 25 bp, Probe Sequence
attcagcaaacaatgttggaattgg

SEQ ID NO: 124076 - DNA, 25 bp, Probe Sequence
attagagaaatatgctatgagattg

SEQ ID NO: 124077 - DNA, 25 bp, Probe Sequence
attaccacagtattctagagacggg

SEQ ID NO: 124078 - DNA, 25 bp, Probe Sequence
attagccctgttttataggtgagga

SEQ ID NO: 124079 - DNA, 25 bp, Probe Sequence
attagcctttgccttattctgtgca

SEQ ID NO: 124080 - DNA, 25 bp, Probe Sequence
attagcctcgatctttttgattaag

SEQ ID NO: 124081 - DNA, 25 bp, Probe Sequence
attcatcttcgactttctaaaaaag

SEQ ID NO: 124082 - DNA, 25 bp, Probe Sequence
attcattttacactctatataataa

SEQ ID NO: 124083 - DNA, 25 bp, Probe Sequence
attcatagttaccaatgcaataaaa

SEQ ID NO: 124084 - DNA, 25 bp, Probe Sequence
attcatggttactatgacacattat

SEQ ID NO: 124085 - DNA, 25 bp, Probe Sequence
attcaggttggattatgcatgttta

SEQ ID NO: 124086 - DNA, 25 bp, Probe Sequence
attacttcatgcgcaatgctgactt

SEQ ID NO: 124087 - DNA, 25 bp, Probe Sequence
attaatttgaccatctctcttatta

SEQ ID NO: 124088 - DNA, 25 bp, Probe Sequence
attaagtagtctagatctcagttaa

SEQ ID NO: 124089 - DNA, 25 bp, Probe Sequence
attaagtatgttccattatattcca

SEQ ID NO: 124090 - DNA, 25 bp, Probe Sequence
attcacagtgtgttcctttgtattc

SEQ ID NO: 124091 - DNA, 25 bp, Probe Sequence
attcacaactgatatcttagctatt

SEQ ID NO: 124092 - DNA, 25 bp, Probe Sequence
attcagcatcctttatctgtgactt

SEQ ID NO: 124093 - DNA, 25 bp, Probe Sequence
attagatcagcagatatggtggctt

SEQ ID NO: 124094 - DNA, 25 bp, Probe Sequence
attaatgacactttggtagcactaa

SEQ ID NO: 124095 - DNA, 25 bp, Probe Sequence
attaaacgggtgatgaactgacaga

SEQ ID NO: 124096 - DNA, 25 bp, Probe Sequence
attaaacagctgggagaaactggga

SEQ ID NO: 124097 - DNA, 25 bp, Probe Sequence
attagaagagtcccatgaaaggtgg

SEQ ID NO: 124098 - DNA, 25 bp, Probe Sequence
attacaagaatcctatagaccagtg

SEQ ID NO: 124099 - DNA, 25 bp, Probe Sequence
atttaaatacatcatctggccaggc

SEQ ID NO: 124100 - DNA, 25 bp, Probe Sequence
attaataaagctccattgtgcctgc

SEQ ID NO: 124101 - DNA, 25 bp, Probe Sequence
attatagaaagtcatttctcaaaat

SEQ ID NO: 124102 - DNA, 25 bp, Probe Sequence
attatataaagcccagtaaagaata

SEQ ID NO: 124103 - DNA, 25 bp, Probe Sequence
attacccaatactgtatataaggca

SEQ ID NO: 124104 - DNA, 25 bp, Probe Sequence
attacggtaacggccacttggccag

SEQ ID NO: 124105 - DNA, 25 bp, Probe Sequence
attactggtaaagcctcatttgaat

SEQ ID NO: 124106 - DNA, 25 bp, Probe Sequence
attactggtaaagcctcatttgaat

SEQ ID NO: 124107 - DNA, 25 bp, Probe Sequence
attactggtaaagcctcatttgaat

SEQ ID NO: 124108 - DNA, 25 bp, Probe Sequence
attaatgtgtatccagggacatttt

SEQ ID NO: 124109 - DNA, 25 bp, Probe Sequence
attaatgtgtatccagggacatttt

SEQ ID NO: 124110 - DNA, 25 bp, Probe Sequence
attagcttgcttaaggcatactttt

SEQ ID NO: 124111 - DNA, 25 bp, Probe Sequence
attaccggtcgatgcaacgagtgat

SEQ ID NO: 124112 - DNA, 25 bp, Probe Sequence
attaccgaattgtagccaggtatga

SEQ ID NO: 124113 - DNA, 25 bp, Probe Sequence
attaccagtggttgatgcgggtttt

SEQ ID NO: 124114 - DNA, 25 bp, Probe Sequence
attaccagtggcgttgttgcatgtt

SEQ ID NO: 124115 - DNA, 25 bp, Probe Sequence
attaccgtcaacagtgtgattctac

SEQ ID NO: 124116 - DNA, 25 bp, Probe Sequence
attaccaatgaagagggcatcctat

SEQ ID NO: 124117 - DNA, 25 bp, Probe Sequence
attacccaaacccatggctctattt

SEQ ID NO: 124118 - DNA, 25 bp, Probe Sequence
attaccacctgacctgcagggatgt

SEQ ID NO: 124119 - DNA, 25 bp, Probe Sequence
attaccatggtgatccggttttggc

SEQ ID NO: 124120 - DNA, 25 bp, Probe Sequence
attaccatgctgattgcggtttttg

SEQ ID NO: 124121 - DNA, 25 bp, Probe Sequence
attaccatggtgatgcggttttggc

SEQ ID NO: 124122 - DNA, 25 bp, Probe Sequence
attaccatggtgatgcggttttggc

SEQ ID NO: 124123 - DNA, 25 bp, Probe Sequence
attaccatggtaatccgttttgcca

SEQ ID NO: 124124 - DNA, 25 bp, Probe Sequence
attaactccataatcctgtttctga

SEQ ID NO: 124125 - DNA, 25 bp, Probe Sequence
attaaatcctccagcttttgaacct

SEQ ID NO: 124126 - DNA, 25 bp, Probe Sequence
attaagatctctaatctgttttgag

SEQ ID NO: 124127 - DNA, 25 bp, Probe Sequence
attacaatttcgtcgtctcagtcaa

SEQ ID NO: 124128 - DNA, 25 bp, Probe Sequence
attactttttgtctctcaggaagga

SEQ ID NO: 124129 - DNA, 25 bp, Probe Sequence
attactttgttctcccatgaaagaa

SEQ ID NO: 124130 - DNA, 25 bp, Probe Sequence
atcttctttggtgcccgacaaatgg

SEQ ID NO: 124131 - DNA, 25 bp, Probe Sequence
attttgttgggcaccgaaatcacgg

SEQ ID NO: 124132 - DNA, 25 bp, Probe Sequence
atttttcccacaaacgaaagcattg

SEQ ID NO: 124133 - DNA, 25 bp, Probe Sequence
attatagtacccacacatgcaaaat

SEQ ID NO: 124134 - DNA, 25 bp, Probe Sequence
attacaaagccgatgctgctgagaa

SEQ ID NO: 124135 - DNA, 25 bp, Probe Sequence
attacaaagccgatgctgctgagaa

SEQ ID NO: 124136 - DNA, 25 bp, Probe Sequence
attcacacatacggagtctgcaaaa

SEQ ID NO: 124137 - DNA, 25 bp, Probe Sequence
attcacatcatattaattcctaaag

SEQ ID NO: 124138 - DNA, 25 bp, Probe Sequence
attcacatctgatcaatgtcctaat

SEQ ID NO: 124139 - DNA, 25 bp, Probe Sequence
attcacttctgtcatgtattatatt

SEQ ID NO: 124140 - DNA, 25 bp, Probe Sequence
attcactgtcgagatggctaatcag

SEQ ID NO: 124141 - DNA, 25 bp, Probe Sequence
attactgtgtgagttgtgcaattca

SEQ ID NO: 124142 - DNA, 25 bp, Probe Sequence
attagtgttgtcagccatcttggga

SEQ ID NO: 124143 - DNA, 25 bp, Probe Sequence
attaatgtcgtcactcacatgcacg

SEQ ID NO: 124144 - DNA, 25 bp, Probe Sequence
attaatgtcgtcactcacatgcacg

SEQ ID NO: 124145 - DNA, 25 bp, Probe Sequence
attcaattgtggcccatgcaagcaa

SEQ ID NO: 124146 - DNA, 25 bp, Probe Sequence
attcaagtgtgaccctcatgaggca

SEQ ID NO: 124147 - DNA, 25 bp, Probe Sequence
atagctttgtgggcgcatcgagtgc

SEQ ID NO: 124148 - DNA, 25 bp, Probe Sequence
atagtcatttgcccgtcaagttatt

SEQ ID NO: 124149 - DNA, 25 bp, Probe Sequence
atatgtatgggcattacctcttagt

SEQ ID NO: 124150 - DNA, 25 bp, Probe Sequence
attttggtgtttgaatcctgggtct

SEQ ID NO: 124151 - DNA, 25 bp, Probe Sequence
attttgacgtgaataagtatctcgg

SEQ ID NO: 124152 - DNA, 25 bp, Probe Sequence
attcacccaacaaaagtgtctctgt

SEQ ID NO: 124153 - DNA, 25 bp, Probe Sequence
attacccaaataaactgtgcatatg

SEQ ID NO: 124154 - DNA, 25 bp, Probe Sequence
attactgtataaacaacgacgcatg

SEQ ID NO: 124155 - DNA, 25 bp, Probe Sequence
attactgttacatatactgcttgca

SEQ ID NO: 124156 - DNA, 25 bp, Probe Sequence
attacttctgattcattaatggcca

SEQ ID NO: 124157 - DNA, 25 bp, Probe Sequence
attatcttctatatcttcaggcgcg

SEQ ID NO: 124158 - DNA, 25 bp, Probe Sequence
attacaacttttagctgcagtggag

SEQ ID NO: 124159 - DNA, 25 bp, Probe Sequence
attaaacgtgtttgctgcagtaaaa

SEQ ID NO: 124160 - DNA, 25 bp, Probe Sequence
attaacctgtgtgctgtacttttac

SEQ ID NO: 124161 - DNA, 25 bp, Probe Sequence
atttacctggtatctacatccttac

SEQ ID NO: 124162 - DNA, 25 bp, Probe Sequence
attcaagcactcttaaaaccactta

SEQ ID NO: 124163 - DNA, 25 bp, Probe Sequence
attcaacctttaagaaccttatcat

SEQ ID NO: 124164 - DNA, 25 bp, Probe Sequence
atttgtcctttcagaaggccgtgaa

SEQ ID NO: 124165 - DNA, 25 bp, Probe Sequence
attttgcctttcatatagaaagttt

SEQ ID NO: 124166 - DNA, 25 bp, Probe Sequence
attttacttccaaacaagaatgtct

SEQ ID NO: 124167 - DNA, 25 bp, Probe Sequence
atttggccccttgatactgaattca

SEQ ID NO: 124168 - DNA, 25 bp, Probe Sequence
attatgaccctctgaagactgactc

SEQ ID NO: 124169 - DNA, 25 bp, Probe Sequence
attactgtttcatgactgactgact

SEQ ID NO: 124170 - DNA, 25 bp, Probe Sequence
attaggctggtatggtgacacacac

SEQ ID NO: 124171 - DNA, 25 bp, Probe Sequence
attagctgggtgtggtggcccatgc

SEQ ID NO: 124172 - DNA, 25 bp, Probe Sequence
attagctgggtgtgctggtgcatgc

SEQ ID NO: 124173 - DNA, 25 bp, Probe Sequence
attagctgggtgtggtggcatgtgc

SEQ ID NO: 124174 - DNA, 25 bp, Probe Sequence
attagctgggcgtggtggcacatgc

SEQ ID NO: 124175 - DNA, 25 bp, Probe Sequence
attagctgggcttatgtgtgaagtt

SEQ ID NO: 124176 - DNA, 25 bp, Probe Sequence
attagtgtgccttctggacaaatta

SEQ ID NO: 124177 - DNA, 25 bp, Probe Sequence
attagtgtactgtttgaaacaaaag

SEQ ID NO: 124178 - DNA, 25 bp, Probe Sequence
attatttcactgcggattactacaa

SEQ ID NO: 124179 - DNA, 25 bp, Probe Sequence
ataattccaaagtgtaattccaaag

SEQ ID NO: 124180 - DNA, 25 bp, Probe Sequence
ataattctaaacaggttaccaaatg

SEQ ID NO: 124181 - DNA, 25 bp, Probe Sequence
attattctaaatgaagtaactcgga

SEQ ID NO: 124182 - DNA, 25 bp, Probe Sequence
atttttgaaatggtagctgaggcta

SEQ ID NO: 124183 - DNA, 25 bp, Probe Sequence
attattctagccagtaatggacttc

SEQ ID NO: 124184 - DNA, 25 bp, Probe Sequence
attatctttgccagttggagtgctg

SEQ ID NO: 124185 - DNA, 25 bp, Probe Sequence
attactgaattcacatatgtatgtt

SEQ ID NO: 124186 - DNA, 25 bp, Probe Sequence
attatctgcaaccttaattcagctg

SEQ ID NO: 124187 - DNA, 25 bp, Probe Sequence
attattgctgcaactggcaaacctg

SEQ ID NO: 124188 - DNA, 25 bp, Probe Sequence
attttgagaacttgccaaccaggga

SEQ ID NO: 124189 - DNA, 25 bp, Probe Sequence
atttcgaacaatcacctccagttat

SEQ ID NO: 124190 - DNA, 25 bp, Probe Sequence
atctactactaaaacgtccagttct

SEQ ID NO: 124191 - DNA, 25 bp, Probe Sequence
attacgactgaatgcactttagtat

SEQ ID NO: 124192 - DNA, 25 bp, Probe Sequence
attacgatgtcctcaggttatcata

SEQ ID NO: 124193 - DNA, 25 bp, Probe Sequence
attaaagtttaaagctatggcatca

SEQ ID NO: 124194 - DNA, 25 bp, Probe Sequence
attaaagataagtcatttcaggtgc

SEQ ID NO: 124195 - DNA, 25 bp, Probe Sequence
attagaacatgatgagcttcgggag

SEQ ID NO: 124196 - DNA, 25 bp, Probe Sequence
attaatgcacatttactcacgtgga

SEQ ID NO: 124197 - DNA, 25 bp, Probe Sequence
attaaacattcttgctgctgcgctg

SEQ ID NO: 124198 - DNA, 25 bp, Probe Sequence
attaacaaggcttgaatctgtatta

SEQ ID NO: 124199 - DNA, 25 bp, Probe Sequence
attacatggaggctcaatcttgagt

SEQ ID NO: 124200 - DNA, 25 bp, Probe Sequence
attcactagagtggcaagtctttgt

SEQ ID NO: 124201 - DNA, 25 bp, Probe Sequence
attacataagatgcctgtttgctat

SEQ ID NO: 124202 - DNA, 25 bp, Probe Sequence
attaacaagatgagccttgtgctcc

SEQ ID NO: 124203 - DNA, 25 bp, Probe Sequence
atatggacgggacgccttggttgac

SEQ ID NO: 124204 - DNA, 25 bp, Probe Sequence
atatccacggtgttccttatgttat

SEQ ID NO: 124205 - DNA, 25 bp, Probe Sequence
attcacaccaggccaatccttgtta

SEQ ID NO: 124206 - DNA, 25 bp, Probe Sequence
attcacacgggccagtttgtgtatt

SEQ ID NO: 124207 - DNA, 25 bp, Probe Sequence
attacagtgggggcatttctttata

SEQ ID NO: 124208 - DNA, 25 bp, Probe Sequence
atctggcgtggcagaatacctcttt

SEQ ID NO: 124209 - DNA, 25 bp, Probe Sequence
atatcagggcctgagtgacctcctt

SEQ ID NO: 124210 - DNA, 25 bp, Probe Sequence
atatcagttccgaaaagcactctcg

SEQ ID NO: 124211 - DNA, 25 bp, Probe Sequence
attacttggcaaaaaattccgcact

SEQ ID NO: 124212 - DNA, 25 bp, Probe Sequence
attagcttggtttattctccttact

SEQ ID NO: 124213 - DNA, 25 bp, Probe Sequence
attagctcagtgctttttgccttta

SEQ ID NO: 124214 - DNA, 25 bp, Probe Sequence
attagcagagctctttatgtgacct

SEQ ID NO: 124215 - DNA, 25 bp, Probe Sequence
atttaagccctttgatctagacatc

SEQ ID NO: 124216 - DNA, 25 bp, Probe Sequence
attaaccccatatttagatacatga

SEQ ID NO: 124217 - DNA, 25 bp, Probe Sequence
attaactggcctgatctaacaatga

SEQ ID NO: 124218 - DNA, 25 bp, Probe Sequence
attaacataccagacattgacagcg

SEQ ID NO: 124219 - DNA, 25 bp, Probe Sequence
attcaagattccagagtctgaatgc

SEQ ID NO: 124220 - DNA, 25 bp, Probe Sequence
attaagcattctaagagccgagata

SEQ ID NO: 124221 - DNA, 25 bp, Probe Sequence
attaaattctaacccagggcatggg

SEQ ID NO: 124222 - DNA, 25 bp, Probe Sequence
acctattacgactccatgggtggga

SEQ ID NO: 124223 - DNA, 25 bp, Probe Sequence
agttttactgatgttctgggtgggg

SEQ ID NO: 124224 - DNA, 25 bp, Probe Sequence
taatttttctaagccggggatggtg

SEQ ID NO: 124225 - DNA, 25 bp, Probe Sequence
aggtttgtctaagctgcctgggtat

SEQ ID NO: 124226 - DNA, 25 bp, Probe Sequence
agtgtcgttattatccttgtggagt

SEQ ID NO: 124227 - DNA, 25 bp, Probe Sequence
atttcttacctaagtctttggagat

SEQ ID NO: 124228 - DNA, 25 bp, Probe Sequence
attttggacttcccctattgggcat

SEQ ID NO: 124229 - DNA, 25 bp, Probe Sequence
attaaatactgtgccttaggagact

SEQ ID NO: 124230 - DNA, 25 bp, Probe Sequence
attacaatccttgacctcagtgaaa

SEQ ID NO: 124231 - DNA, 25 bp, Probe Sequence
atttcagtcctttacttgtggaatc

SEQ ID NO: 124232 - DNA, 25 bp, Probe Sequence
atttagtgccctctttagccagaat

SEQ ID NO: 124233 - DNA, 25 bp, Probe Sequence
attttagtctccttttcagggatgt

SEQ ID NO: 124234 - DNA, 25 bp, Probe Sequence
attagtactaccttaggctgggcac

SEQ ID NO: 124235 - DNA, 25 bp, Probe Sequence
attagaacttccatacactgctggt

SEQ ID NO: 124236 - DNA, 25 bp, Probe Sequence
attagccacatcttcttggcatctg

SEQ ID NO: 124237 - DNA, 25 bp, Probe Sequence
attacctgcatgctttgagctcagc

SEQ ID NO: 124238 - DNA, 25 bp, Probe Sequence
attacctgcatgctttgagctcagc

SEQ ID NO: 124239 - DNA, 25 bp, Probe Sequence
attagactcatgctgattagacaaa

SEQ ID NO: 124240 - DNA, 25 bp, Probe Sequence
attagtcatctgctagttaccatgg

SEQ ID NO: 124241 - DNA, 25 bp, Probe Sequence
attagtatcgcctattaccattgtg

SEQ ID NO: 124242 - DNA, 25 bp, Probe Sequence
attagatatatcctattcccttcct

SEQ ID NO: 124243 - DNA, 25 bp, Probe Sequence
attaatgatttggtttctcccctgg

SEQ ID NO: 124244 - DNA, 25 bp, Probe Sequence
attactgatttgaccttacctacta

SEQ ID NO: 124245 - DNA, 25 bp, Probe Sequence
attaacaattacttgctaactatta

SEQ ID NO: 124246 - DNA, 25 bp, Probe Sequence
attacaacattgtttctcacacttg

SEQ ID NO: 124247 - DNA, 25 bp, Probe Sequence
attaagaactgcattcccacatcct

SEQ ID NO: 124248 - DNA, 25 bp, Probe Sequence
attagatttctcatttgccaataat

SEQ ID NO: 124249 - DNA, 25 bp, Probe Sequence
attattttccttgctggataagttg

SEQ ID NO: 124250 - DNA, 25 bp, Probe Sequence
attacctgttcttgcctaataagtt

SEQ ID NO: 124251 - DNA, 25 bp, Probe Sequence
attatcctgaacagctctttggtgc

SEQ ID NO: 124252 - DNA, 25 bp, Probe Sequence
attaccttatcatgtcttagagccc

SEQ ID NO: 124253 - DNA, 25 bp, Probe Sequence
attactgtttgctctctataatccc

SEQ ID NO: 124254 - DNA, 25 bp, Probe Sequence
atttcgttaccactgcatgcaaatc

SEQ ID NO: 124255 - DNA, 25 bp, Probe Sequence
attacactcaagggtgcatgcacta

SEQ ID NO: 124256 - DNA, 25 bp, Probe Sequence
attacagccggtggtcatgccatga

SEQ ID NO: 124257 - DNA, 25 bp, Probe Sequence
attaatcacgcgatgttgactgcac

SEQ ID NO: 124258 - DNA, 25 bp, Probe Sequence
attaacagcagtgtggagactgcag

SEQ ID NO: 124259 - DNA, 25 bp, Probe Sequence
atttgagagtgtgtggaagtccccc

SEQ ID NO: 124260 - DNA, 25 bp, Probe Sequence
attacattgttggtggcacgtcccc

SEQ ID NO: 124261 - DNA, 25 bp, Probe Sequence
attacattgttggtggcacgtcccc

SEQ ID NO: 124262 - DNA, 25 bp, Probe Sequence
attacatcgttggctacaacctccc

SEQ ID NO: 124263 - DNA, 25 bp, Probe Sequence
attacattttgactaccacaactca

SEQ ID NO: 124264 - DNA, 25 bp, Probe Sequence
attacatctttattaacctcagcat

SEQ ID NO: 124265 - DNA, 25 bp, Probe Sequence
attaatcttttgtcaacttcctgat

SEQ ID NO: 124266 - DNA, 25 bp, Probe Sequence
attaatttttgagatcttactgctt

SEQ ID NO: 124267 - DNA, 25 bp, Probe Sequence
attacatacaattcagttcttactt

SEQ ID NO: 124268 - DNA, 25 bp, Probe Sequence
attacctcaaagcagtcattcctta

SEQ ID NO: 124269 - DNA, 25 bp, Probe Sequence
attacctaaacttgtctggctccca

SEQ ID NO: 124270 - DNA, 25 bp, Probe Sequence
attaccgaaactggattgcttcaaa

SEQ ID NO: 124271 - DNA, 25 bp, Probe Sequence
attacagctgaataaatgtgtctaa

SEQ ID NO: 124272 - DNA, 25 bp, Probe Sequence
attactgtacttttatgttctcaag

SEQ ID NO: 124273 - DNA, 25 bp, Probe Sequence
attactaatctcttttcatttcaaa

SEQ ID NO: 124274 - DNA, 25 bp, Probe Sequence
attactatcattttttgttgccaaa

SEQ ID NO: 124275 - DNA, 25 bp, Probe Sequence
attacctgcaaattgggaagccaaa

SEQ ID NO: 124276 - DNA, 25 bp, Probe Sequence
attaccgctacattggcaagaccat

SEQ ID NO: 124277 - DNA, 25 bp, Probe Sequence
attatgctttaattctgaggaccat

SEQ ID NO: 124278 - DNA, 25 bp, Probe Sequence
attacttacatatctgatgccttgt

SEQ ID NO: 124279 - DNA, 25 bp, Probe Sequence
attaagctaatggtcctgttatgtc

SEQ ID NO: 124280 - DNA, 25 bp, Probe Sequence
attaagctaagcccttactagacca

SEQ ID NO: 124281 - DNA, 25 bp, Probe Sequence
attattctagagcactctgatcaat

SEQ ID NO: 124282 - DNA, 25 bp, Probe Sequence
attatccctagccaagcttcaaggc

SEQ ID NO: 124283 - DNA, 25 bp, Probe Sequence
attaccatatactacagctttgtgg

SEQ ID NO: 124284 - DNA, 25 bp, Probe Sequence
attaccatgtgatcgctttttgcag

SEQ ID NO: 124285 - DNA, 25 bp, Probe Sequence
attaccatggtgatgcgttttgcag

SEQ ID NO: 124286 - DNA, 25 bp, Probe Sequence
attaccattgtgatgcgttcttgcc

SEQ ID NO: 124287 - DNA, 25 bp, Probe Sequence
attacaatcggaacacattcagctg

SEQ ID NO: 124288 - DNA, 25 bp, Probe Sequence
attacaagcggaggcgctgccgcgc

SEQ ID NO: 124289 - DNA, 25 bp, Probe Sequence
attaagttctgaggcagctccgcag

SEQ ID NO: 124290 - DNA, 25 bp, Probe Sequence
attaacctctgagggccagcacagc

SEQ ID NO: 124291 - DNA, 25 bp, Probe Sequence
attatacttctgagctgctaccaca

SEQ ID NO: 124292 - DNA, 25 bp, Probe Sequence
attatacaataggctggtgacacca

SEQ ID NO: 124293 - DNA, 25 bp, Probe Sequence
attaccagctaagatgcgaaatcac

SEQ ID NO: 124294 - DNA, 25 bp, Probe Sequence
attacacagcctactgtaaaaatgc

SEQ ID NO: 124295 - DNA, 25 bp, Probe Sequence
attaccaacttgataaatgctactc

SEQ ID NO: 124296 - DNA, 25 bp, Probe Sequence
attagcctacttggataaattacat

SEQ ID NO: 124297 - DNA, 25 bp, Probe Sequence
attacctacctttcatcatgtttct

SEQ ID NO: 124298 - DNA, 25 bp, Probe Sequence
attactgttggctttctatttttct

SEQ ID NO: 124299 - DNA, 25 bp, Probe Sequence
attactttgtaaattcgtgtgtatt

SEQ ID NO: 124300 - DNA, 25 bp, Probe Sequence
attactttgtttcacatgatttcag

SEQ ID NO: 124301 - DNA, 25 bp, Probe Sequence
attaccctttatcacatgaattctt

SEQ ID NO: 124302 - DNA, 25 bp, Probe Sequence
attagtgcctctcacaaaagatcct

SEQ ID NO: 124303 - DNA, 25 bp, Probe Sequence
attagtgcctcggaaatgtagaatt

SEQ ID NO: 124304 - DNA, 25 bp, Probe Sequence
attactccactggaatggaagacat

SEQ ID NO: 124305 - DNA, 25 bp, Probe Sequence
attacaccctagctgaaggacatcc

SEQ ID NO: 124306 - DNA, 25 bp, Probe Sequence
atttaccaacagctgaaggatgcca

SEQ ID NO: 124307 - DNA, 25 bp, Probe Sequence
atttacctactgcccaattaccagt

SEQ ID NO: 124308 - DNA, 25 bp, Probe Sequence
ataaacgctcactccgaattagcgg

SEQ ID NO: 124309 - DNA, 25 bp, Probe Sequence
attacatcccacttccgaagaactg

SEQ ID NO: 124310 - DNA, 25 bp, Probe Sequence
attacatcataagttctcaagcaga

SEQ ID NO: 124311 - DNA, 25 bp, Probe Sequence
attagccatgaacttgccaatcaaa

SEQ ID NO: 124312 - DNA, 25 bp, Probe Sequence
attagcctgtgactctgtgatgtat

SEQ ID NO: 124313 - DNA, 25 bp, Probe Sequence
attagcacatgttttgcatattata

SEQ ID NO: 124314 - DNA, 25 bp, Probe Sequence
atttagcagctttgtcgtcatgtag

SEQ ID NO: 124315 - DNA, 25 bp, Probe Sequence
attttgagtgatttcagcgttgaac

SEQ ID NO: 124316 - DNA, 25 bp, Probe Sequence
attttgctgagtaggattttaacac

SEQ ID NO: 124317 - DNA, 25 bp, Probe Sequence
attttcgctggtgaacttcagaact

SEQ ID NO: 124318 - DNA, 25 bp, Probe Sequence
attactactgtgtgcaagttagaga

SEQ ID NO: 124319 - DNA, 25 bp, Probe Sequence
attactctctatgcacggtttgtga

SEQ ID NO: 124320 - DNA, 25 bp, Probe Sequence
attaccctgtacattattttgatgg

SEQ ID NO: 124321 - DNA, 25 bp, Probe Sequence
attacttctgggactttattctatg

SEQ ID NO: 124322 - DNA, 25 bp, Probe Sequence
attactattgttccttttgtcacag

SEQ ID NO: 124323 - DNA, 25 bp, Probe Sequence
atttccagtttagttaatgtcaagt

SEQ ID NO: 124324 - DNA, 25 bp, Probe Sequence
atactctaccttcattaattacttc

SEQ ID NO: 124325 - DNA, 25 bp, Probe Sequence
atattttgacctctaatttactgta

SEQ ID NO: 124326 - DNA, 25 bp, Probe Sequence
ataatttaccatcctgaaagtccag

SEQ ID NO: 124327 - DNA, 25 bp, Probe Sequence
atatcatgcctgtgtttaacgtcga

SEQ ID NO: 124328 - DNA, 25 bp, Probe Sequence
attatcctgtgtgtgtctaggtaga

SEQ ID NO: 124329 - DNA, 25 bp, Probe Sequence
attatccagtgagtttttgttcaat

SEQ ID NO: 124330 - DNA, 25 bp, Probe Sequence
attaaagtgatatatggtcttgaaa

SEQ ID NO: 124331 - DNA, 25 bp, Probe Sequence
attagtggtgaaagtgttctatgca

SEQ ID NO: 124332 - DNA, 25 bp, Probe Sequence
atttggggaacgcgtgtcatccctt

SEQ ID NO: 124333 - DNA, 25 bp, Probe Sequence
attttcggaacgctttgctttctct

SEQ ID NO: 124334 - DNA, 25 bp, Probe Sequence
attttggtggactgtgatttttcca

SEQ ID NO: 124335 - DNA, 25 bp, Probe Sequence
atttttggcgagtggttggtctgaa

SEQ ID NO: 124336 - DNA, 25 bp, Probe Sequence
atttttccgcaaatcagtcggttga

SEQ ID NO: 124337 - DNA, 25 bp, Probe Sequence
attttagccccagcagacttttagc

SEQ ID NO: 124338 - DNA, 25 bp, Probe Sequence
atttttcccccagtgaatgatttag

SEQ ID NO: 124339 - DNA, 25 bp, Probe Sequence
attatcttctccacatctgaaattc

SEQ ID NO: 124340 - DNA, 25 bp, Probe Sequence
attacattcttctgatgtaacatgt

SEQ ID NO: 124341 - DNA, 25 bp, Probe Sequence
attacatactgttagagaccactgg

SEQ ID NO: 124342 - DNA, 25 bp, Probe Sequence
attacatactgttagagaccactgg

SEQ ID NO: 124343 - DNA, 25 bp, Probe Sequence
attatgaaatgcacgacaccctggg

SEQ ID NO: 124344 - DNA, 25 bp, Probe Sequence
attttccagttggacaggcctggtt

SEQ ID NO: 124345 - DNA, 25 bp, Probe Sequence
attactcctgtagaagtctttgctt

SEQ ID NO: 124346 - DNA, 25 bp, Probe Sequence
attactacgtacttggctatttctc

SEQ ID NO: 124347 - DNA, 25 bp, Probe Sequence
attactgcccaagtgaggtttggtc

SEQ ID NO: 124348 - DNA, 25 bp, Probe Sequence
attactgccctccttggattatgag

SEQ ID NO: 124349 - DNA, 25 bp, Probe Sequence
attagtgcctcatgactgtgtttga

SEQ ID NO: 124350 - DNA, 25 bp, Probe Sequence
attactgtcatatgcttcctattgc

SEQ ID NO: 124351 - DNA, 25 bp, Probe Sequence
attatgcccagtacatgaccttatg

SEQ ID NO: 124352 - DNA, 25 bp, Probe Sequence
atttggacaggttgatccagaatgt

SEQ ID NO: 124353 - DNA, 25 bp, Probe Sequence
attttgacgtgctctcgcgagattt

SEQ ID NO: 124354 - DNA, 25 bp, Probe Sequence
attatggaggtcctccatgcagaga

SEQ ID NO: 124355 - DNA, 25 bp, Probe Sequence
attattgcagtgtcatgttctgtaa

SEQ ID NO: 124356 - DNA, 25 bp, Probe Sequence
attttgcagatttaggcttaccttc

SEQ ID NO: 124357 - DNA, 25 bp, Probe Sequence
agtttcctattatcttggttaagtg

SEQ ID NO: 124358 - DNA, 25 bp, Probe Sequence
attttctctaaatgcctgggtaagg

SEQ ID NO: 124359 - DNA, 25 bp, Probe Sequence
attactgccgtaaccctgatggtga

SEQ ID NO: 124360 - DNA, 25 bp, Probe Sequence
attacatccagaaatccttcggatt

SEQ ID NO: 124361 - DNA, 25 bp, Probe Sequence
attacatgttgaaatcctgattgtt

SEQ ID NO: 124362 - DNA, 25 bp, Probe Sequence
attacttctattaccatgttgtttt

SEQ ID NO: 124363 - DNA, 25 bp, Probe Sequence
attatgcgtcatgagaaatgttgtg

SEQ ID NO: 124364 - DNA, 25 bp, Probe Sequence
atttgagctcataggaacaggtaga

SEQ ID NO: 124365 - DNA, 25 bp, Probe Sequence
attttgcttcaggatccaagtgaca

SEQ ID NO: 124366 - DNA, 25 bp, Probe Sequence
attttcctaaattaatgtgcaagta

SEQ ID NO: 124367 - DNA, 25 bp, Probe Sequence
attttctccaaacaagtacaatgat

SEQ ID NO: 124368 - DNA, 25 bp, Probe Sequence
atttttccaaacgtattgagcaaca

SEQ ID NO: 124369 - DNA, 25 bp, Probe Sequence
attttcaataaatctgggacaacag

SEQ ID NO: 124370 - DNA, 25 bp, Probe Sequence
attttcaaaagcactacaggcccat

SEQ ID NO: 124371 - DNA, 25 bp, Probe Sequence
attttcaatatgcaagttaggctta

SEQ ID NO: 124372 - DNA, 25 bp, Probe Sequence
attttgcacaacagtattaaggtac

SEQ ID NO: 124373 - DNA, 25 bp, Probe Sequence
atattatgactactttttaagaatt

SEQ ID NO: 124374 - DNA, 25 bp, Probe Sequence
atttcgttacgtatgttaagatttg

SEQ ID NO: 124375 - DNA, 25 bp, Probe Sequence
attatctctgtaggaacttttagtt

SEQ ID NO: 124376 - DNA, 25 bp, Probe Sequence
attttgctgctgggcaacttcttct

SEQ ID NO: 124377 - DNA, 25 bp, Probe Sequence
atttagggtatgcagctccttttgt

SEQ ID NO: 124378 - DNA, 25 bp, Probe Sequence
attttctgttgacattcttttggtg

SEQ ID NO: 124379 - DNA, 25 bp, Probe Sequence
attacttttgaatttctaatctgtg

SEQ ID NO: 124380 - DNA, 25 bp, Probe Sequence
attactattcagtaattcatttgtt

SEQ ID NO: 124381 - DNA, 25 bp, Probe Sequence
attactattgcctttgattttgact

SEQ ID NO: 124382 - DNA, 25 bp, Probe Sequence
attatccattcgtccgttgatagac

SEQ ID NO: 124383 - DNA, 25 bp, Probe Sequence
attacacttcgtttgatgtcatgaa

SEQ ID NO: 124384 - DNA, 25 bp, Probe Sequence
attatgttccagattgaccatgaat

SEQ ID NO: 124385 - DNA, 25 bp, Probe Sequence
attagtctacacattacattgaagt

SEQ ID NO: 124386 - DNA, 25 bp, Probe Sequence
attacacgacactttttgatacagc

SEQ ID NO: 124387 - DNA, 25 bp, Probe Sequence
atttactaccgttttgaacagacat

SEQ ID NO: 124388 - DNA, 25 bp, Probe Sequence
atttccttccatcctgaataacgaa

SEQ ID NO: 124389 - DNA, 25 bp, Probe Sequence
atttcttatccagccaaacgaagct

SEQ ID NO: 124390 - DNA, 25 bp, Probe Sequence
atcttctatcccaccaaaaataagc

SEQ ID NO: 124391 - DNA, 25 bp, Probe Sequence
agctttactactgtggaaagaccac

SEQ ID NO: 124392 - DNA, 25 bp, Probe Sequence
atttctttactatggaaaaccacat

SEQ ID NO: 124393 - DNA, 25 bp, Probe Sequence
atttttcaagcctccaaacatcacc

SEQ ID NO: 124394 - DNA, 25 bp, Probe Sequence
attatggtcaactttctaaattaga

SEQ ID NO: 124395 - DNA, 25 bp, Probe Sequence
atttagtcccagaaataaactgaga

SEQ ID NO: 124396 - DNA, 25 bp, Probe Sequence
attttctacggttgcaaactgctga

SEQ ID NO: 124397 - DNA, 25 bp, Probe Sequence
attttctcacatcctgtgggactct

SEQ ID NO: 124398 - DNA, 25 bp, Probe Sequence
attttgtgactccttcaggaagtta

SEQ ID NO: 124399 - DNA, 25 bp, Probe Sequence
attttctaccctaatttcactggag

SEQ ID NO: 124400 - DNA, 25 bp, Probe Sequence
attttccgtcttatttcatttctgt

SEQ ID NO: 124401 - DNA, 25 bp, Probe Sequence
atttacctgtgcgtggcttactact

SEQ ID NO: 124402 - DNA, 25 bp, Probe Sequence
atttgacatcttctggttattactc

SEQ ID NO: 124403 - DNA, 25 bp, Probe Sequence
atttgaacttgtttggaacttgtca

SEQ ID NO: 124404 - DNA, 25 bp, Probe Sequence
atattaacttgtgctgtcgcctttt

SEQ ID NO: 124405 - DNA, 25 bp, Probe Sequence
atattaagtaacacctacttttgct

SEQ ID NO: 124406 - DNA, 25 bp, Probe Sequence
ataaaattcaacatcccttcgtggt

SEQ ID NO: 124407 - DNA, 25 bp, Probe Sequence
gtactaatttacatccttaccgaat

SEQ ID NO: 124408 - DNA, 25 bp, Probe Sequence
gtacttgttttcaccattgggctaa

SEQ ID NO: 124409 - DNA, 25 bp, Probe Sequence
ataattcttttcccaatgtaggtat

SEQ ID NO: 124410 - DNA, 25 bp, Probe Sequence
attttcttcttgttccattaagtca

SEQ ID NO: 124411 - DNA, 25 bp, Probe Sequence
attttacctagttcaattcacctag

SEQ ID NO: 124412 - DNA, 25 bp, Probe Sequence
attttacctagctaccactaggtgg

SEQ ID NO: 124413 - DNA, 25 bp, Probe Sequence
atttataaacacagccctcgtgggc

SEQ ID NO: 124414 - DNA, 25 bp, Probe Sequence
attataataaacaccctcaccactg

SEQ ID NO: 124415 - DNA, 25 bp, Probe Sequence
attattaattacacctcttcaccta

SEQ ID NO: 124416 - DNA, 25 bp, Probe Sequence
atacttgaaggagccctttcccatc

SEQ ID NO: 124417 - DNA, 25 bp, Probe Sequence
attttaagggtcacttgcctcctgt

SEQ ID NO: 124418 - DNA, 25 bp, Probe Sequence
gtatttaaggttcccgttgcatttg

SEQ ID NO: 124419 - DNA, 25 bp, Probe Sequence
atttataacgttctcagtcctttgt

SEQ ID NO: 124420 - DNA, 25 bp, Probe Sequence
atatttacctggaggactcgtactt

SEQ ID NO: 124421 - DNA, 25 bp, Probe Sequence
attactccagctcaaggaccttact

SEQ ID NO: 124422 - DNA, 25 bp, Probe Sequence
attatggcccagtacaagaccttaa

SEQ ID NO: 124423 - DNA, 25 bp, Probe Sequence
attatggagcacaatgtaagacaaa

SEQ ID NO: 124424 - DNA, 25 bp, Probe Sequence
attatggtgacacctatatgaacac

SEQ ID NO: 124425 - DNA, 25 bp, Probe Sequence
attagcctggcacgatggtgggcac

SEQ ID NO: 124426 - DNA, 25 bp, Probe Sequence
attagcagcggttattcggtgagcg

SEQ ID NO: 124427 - DNA, 25 bp, Probe Sequence
attatttggatgtatatcagtggag

SEQ ID NO: 124428 - DNA, 25 bp, Probe Sequence
attatttttgagatgcaggaattac

SEQ ID NO: 124429 - DNA, 25 bp, Probe Sequence
atttttttagagtgctggttccagc

SEQ ID NO: 124430 - DNA, 25 bp, Probe Sequence
attttgtttaatgtctggtgctttc

SEQ ID NO: 124431 - DNA, 25 bp, Probe Sequence
attttgttgtactgttatggcttct

SEQ ID NO: 124432 - DNA, 25 bp, Probe Sequence
attttttgtcttattcagaagctcc

SEQ ID NO: 124433 - DNA, 25 bp, Probe Sequence
attttttctgctggtggataaacat

SEQ ID NO: 124434 - DNA, 25 bp, Probe Sequence
attttgcttttcgtgttagaacaca

SEQ ID NO: 124435 - DNA, 25 bp, Probe Sequence
attacttatggatcatgctttaaaa

SEQ ID NO: 124436 - DNA, 25 bp, Probe Sequence
attacctgtggatatttgtataaaa

SEQ ID NO: 124437 - DNA, 25 bp, Probe Sequence
attacctggtcattttgtgatcaca

SEQ ID NO: 124438 - DNA, 25 bp, Probe Sequence
attagcctggcatggtggtgtacgc

SEQ ID NO: 124439 - DNA, 25 bp, Probe Sequence
attagcctggcatggtggtgtacgc

SEQ ID NO: 124440 - DNA, 25 bp, Probe Sequence
attagccaggcatggtggcgtatgc

SEQ ID NO: 124441 - DNA, 25 bp, Probe Sequence
attagccgagcatggtggcctgtgc

SEQ ID NO: 124442 - DNA, 25 bp, Probe Sequence
attagccaggcatggtggcacctgc

SEQ ID NO: 124443 - DNA, 25 bp, Probe Sequence
attagccaggcatggtggcacctgc

SEQ ID NO: 124444 - DNA, 25 bp, Probe Sequence
attaccgcgcattgagtagaccaag

SEQ ID NO: 124445 - DNA, 25 bp, Probe Sequence
attacgcagcacatacttactaact

SEQ ID NO: 124446 - DNA, 25 bp, Probe Sequence
attactgacctatgctctaaaacat

SEQ ID NO: 124447 - DNA, 25 bp, Probe Sequence
attacttcaatcaagcccaaatttc

SEQ ID NO: 124448 - DNA, 25 bp, Probe Sequence
attacattaccattgccactgattt

SEQ ID NO: 124449 - DNA, 25 bp, Probe Sequence
attagtgttcagtgccattttatac

SEQ ID NO: 124450 - DNA, 25 bp, Probe Sequence
attagatttagtggccttcatgtta

SEQ ID NO: 124451 - DNA, 25 bp, Probe Sequence
attacattgggagcagttcatgatt

SEQ ID NO: 124452 - DNA, 25 bp, Probe Sequence
attaggaagtgtttatgttgtttat

SEQ ID NO: 124453 - DNA, 25 bp, Probe Sequence
attagtgaaggtggcttttgcttta

SEQ ID NO: 124454 - DNA, 25 bp, Probe Sequence
attactgactgcttatgtatcttgt

SEQ ID NO: 124455 - DNA, 25 bp, Probe Sequence
attatatgactaggtgcttgctttt

SEQ ID NO: 124456 - DNA, 25 bp, Probe Sequence
attatgaaggctacatctgtgcttt

SEQ ID NO: 124457 - DNA, 25 bp, Probe Sequence
attagccaggccaacagatctcata

SEQ ID NO: 124458 - DNA, 25 bp, Probe Sequence
attagctatggccacgcaactgaga

SEQ ID NO: 124459 - DNA, 25 bp, Probe Sequence
attatctgatgtgatgcctgttgag

SEQ ID NO: 124460 - DNA, 25 bp, Probe Sequence
attatctgatgtgatgcctgttgag

SEQ ID NO: 124461 - DNA, 25 bp, Probe Sequence
attatgtgcttagcttgcttgagat

SEQ ID NO: 124462 - DNA, 25 bp, Probe Sequence
atttaaaacgttctgagtgctgtgt

SEQ ID NO: 124463 - DNA, 25 bp, Probe Sequence
attttaagacgtgtttgtgtttgtg

SEQ ID NO: 124464 - DNA, 25 bp, Probe Sequence
cttttaggaatctctttggaattgg

SEQ ID NO: 124465 - DNA, 25 bp, Probe Sequence
atttaaaaattccacattgaagttg

SEQ ID NO: 124466 - DNA, 25 bp, Probe Sequence
atttaaaaaactcctgtcttgctag

SEQ ID NO: 124467 - DNA, 25 bp, Probe Sequence
atttaaagcaatgtttacccacagc

SEQ ID NO: 124468 - DNA, 25 bp, Probe Sequence
attatcacgaaagatttcccccagt

SEQ ID NO: 124469 - DNA, 25 bp, Probe Sequence
attatcaccacaagttcttcagaca

SEQ ID NO: 124470 - DNA, 25 bp, Probe Sequence
attagcaaccgagttgctgtcccct

SEQ ID NO: 124471 - DNA, 25 bp, Probe Sequence
attagcacaaatgttgtgttcattt

SEQ ID NO: 124472 - DNA, 25 bp, Probe Sequence
attaccatcaatcctggttttgatc

SEQ ID NO: 124473 - DNA, 25 bp, Probe Sequence
attacctaatggagatccatctgtc

SEQ ID NO: 124474 - DNA, 25 bp, Probe Sequence
attacctaatggagatccatctgtc

SEQ ID NO: 124475 - DNA, 25 bp, Probe Sequence
attatttaaggaatatctcttgata

SEQ ID NO: 124476 - DNA, 25 bp, Probe Sequence
attatcctgaatacactattttgaa

SEQ ID NO: 124477 - DNA, 25 bp, Probe Sequence
attatctctagattggtccttgtga

SEQ ID NO: 124478 - DNA, 25 bp, Probe Sequence
attatattatgcctggtgatcctga

SEQ ID NO: 124479 - DNA, 25 bp, Probe Sequence
attatgattctgggctggactgtgg

SEQ ID NO: 124480 - DNA, 25 bp, Probe Sequence
attatgattcaccctctttggagaa

SEQ ID NO: 124481 - DNA, 25 bp, Probe Sequence
atttcatcctccttcaggggatcaa

SEQ ID NO: 124482 - DNA, 25 bp, Probe Sequence
atttcacagttatcaggggatgtac

SEQ ID NO: 124483 - DNA, 25 bp, Probe Sequence
attaccatgtattttgtgaggcagg

SEQ ID NO: 124484 - DNA, 25 bp, Probe Sequence
attatccttgtactttgaggagaag

SEQ ID NO: 124485 - DNA, 25 bp, Probe Sequence
atttctttgtagtgatccagaaggc

SEQ ID NO: 124486 - DNA, 25 bp, Probe Sequence
attttataggagggatccagtgaga

SEQ ID NO: 124487 - DNA, 25 bp, Probe Sequence
atttttaggttagccagtgtgacta

SEQ ID NO: 124488 - DNA, 25 bp, Probe Sequence
atatatgtttggagactgctcggga

SEQ ID NO: 124489 - DNA, 25 bp, Probe Sequence
attagtcattgcgggaccgcgtgga

SEQ ID NO: 124490 - DNA, 25 bp, Probe Sequence
attagtcatcggtatgaccatggtg

SEQ ID NO: 124491 - DNA, 25 bp, Probe Sequence
attagtcatcgctattaccatggtg

SEQ ID NO: 124492 - DNA, 25 bp, Probe Sequence
attagtcatcgctattaccatggtg

SEQ ID NO: 124493 - DNA, 25 bp, Probe Sequence
attagtcatcgctattaccatggtg

SEQ ID NO: 124494 - DNA, 25 bp, Probe Sequence
attagtcatcgctatcaccatgttg

SEQ ID NO: 124495 - DNA, 25 bp, Probe Sequence
attactctgcactatagccatttgc

SEQ ID NO: 124496 - DNA, 25 bp, Probe Sequence
attttcagcacttacatcatttggt

SEQ ID NO: 124497 - DNA, 25 bp, Probe Sequence
attattccacctgctgctatgaagc

SEQ ID NO: 124498 - DNA, 25 bp, Probe Sequence
attactcctattactgtgatgaaca

SEQ ID NO: 124499 - DNA, 25 bp, Probe Sequence
attactcctattactgtgatgaaca

SEQ ID NO: 124500 - DNA, 25 bp, Probe Sequence
attagtgccatgtgcctttcacaca

SEQ ID NO: 124501 - DNA, 25 bp, Probe Sequence
attaggcttgcattattttatcaga

SEQ ID NO: 124502 - DNA, 25 bp, Probe Sequence
attagagcagctgtttgttattgat

SEQ ID NO: 124503 - DNA, 25 bp, Probe Sequence
attatagcatctctgacttttcttt

SEQ ID NO: 124504 - DNA, 25 bp, Probe Sequence
attattcatttattttgtactgttg

SEQ ID NO: 124505 - DNA, 25 bp, Probe Sequence
attatccattacatatttagtttta

SEQ ID NO: 124506 - DNA, 25 bp, Probe Sequence
attatcctattaaatgttggttaat

SEQ ID NO: 124507 - DNA, 25 bp, Probe Sequence
attacccttgtttgttgctgttatt

SEQ ID NO: 124508 - DNA, 25 bp, Probe Sequence
atttacgtggttagtcatcgcgtag

SEQ ID NO: 124509 - DNA, 25 bp, Probe Sequence
atttatgtgggcctttctcgagttt

SEQ ID NO: 124510 - DNA, 25 bp, Probe Sequence
atttatgtacctttttcataactgg

SEQ ID NO: 124511 - DNA, 25 bp, Probe Sequence
attttttcctactataataatgctg

SEQ ID NO: 124512 - DNA, 25 bp, Probe Sequence
atttattccgctgcattgccaaagt

SEQ ID NO: 124513 - DNA, 25 bp, Probe Sequence
attttcctccattatcagccagaag

SEQ ID NO: 124514 - DNA, 25 bp, Probe Sequence
attttcgcaatatgtgaggatgaag

SEQ ID NO: 124515 - DNA, 25 bp, Probe Sequence
attatcggctaatgttctgagaaac

SEQ ID NO: 124516 - DNA, 25 bp, Probe Sequence
gagtacctttactcttagcaaactc

SEQ ID NO: 124517 - DNA, 25 bp, Probe Sequence
gttgtcctttactactgtaaacagt

SEQ ID NO: 124518 - DNA, 25 bp, Probe Sequence
attagcctttaatttgtgcaaacag

SEQ ID NO: 124519 - DNA, 25 bp, Probe Sequence
attacctttacatattatcatgtct

SEQ ID NO: 124520 - DNA, 25 bp, Probe Sequence
attacctctatctctattatttctg

SEQ ID NO: 124521 - DNA, 25 bp, Probe Sequence
attagctctctttagcatacgtctt

SEQ ID NO: 124522 - DNA, 25 bp, Probe Sequence
attaccgtattagtatcgcctatta

SEQ ID NO: 124523 - DNA, 25 bp, Probe Sequence
attacctttcatttatactttgata

SEQ ID NO: 124524 - DNA, 25 bp, Probe Sequence
atttcacaattagttaacttattca

SEQ ID NO: 124525 - DNA, 25 bp, Probe Sequence
atttcaataataacttcctgtttca

SEQ ID NO: 124526 - DNA, 25 bp, Probe Sequence
attatacaaatcactatcgctctat

SEQ ID NO: 124527 - DNA, 25 bp, Probe Sequence
atttccagaatcacgacgcggcaga

SEQ ID NO: 124528 - DNA, 25 bp, Probe Sequence
attaccagccatactaaaggagaac

SEQ ID NO: 124529 - DNA, 25 bp, Probe Sequence
attacctccagttatgaagatatga

SEQ ID NO: 124530 - DNA, 25 bp, Probe Sequence
attaccccaggatgaggtctgccat

SEQ ID NO: 124531 - DNA, 25 bp, Probe Sequence
attatgcttccaacaaaggtctaat

SEQ ID NO: 124532 - DNA, 25 bp, Probe Sequence
attatgtgctcctcaacgtagtaga

SEQ ID NO: 124533 - DNA, 25 bp, Probe Sequence
attagagcatctttcacacattaaa

SEQ ID NO: 124534 - DNA, 25 bp, Probe Sequence
attagagtttaccatgattcagaga

SEQ ID NO: 124535 - DNA, 25 bp, Probe Sequence
attattgtttagctgagatatgaga

SEQ ID NO: 124536 - DNA, 25 bp, Probe Sequence
attatatgctgtaaccatgaaaaaa

SEQ ID NO: 124537 - DNA, 25 bp, Probe Sequence
attataccatgtagccatagtaaat

SEQ ID NO: 124538 - DNA, 25 bp, Probe Sequence
attataaatgtcccttgttacataa

SEQ ID NO: 124539 - DNA, 25 bp, Probe Sequence
attataaatctctcctcttcaaaat

SEQ ID NO: 124540 - DNA, 25 bp, Probe Sequence
attataaatgcagctgcctttaaaa

SEQ ID NO: 124541 - DNA, 25 bp, Probe Sequence
atttataagagatcctttcccattt

SEQ ID NO: 124542 - DNA, 25 bp, Probe Sequence
attataaatggcacctatactggct

SEQ ID NO: 124543 - DNA, 25 bp, Probe Sequence
attattattggagcctaattgttag

SEQ ID NO: 124544 - DNA, 25 bp, Probe Sequence
attatttctactgcttacactttag

SEQ ID NO: 124545 - DNA, 25 bp, Probe Sequence
attatgtgtccctttggaccagtct

SEQ ID NO: 124546 - DNA, 25 bp, Probe Sequence
atttgtgggccatttaattcagggc

SEQ ID NO: 124547 - DNA, 25 bp, Probe Sequence
attattggagcctaattgttaggta

SEQ ID NO: 124548 - DNA, 25 bp, Probe Sequence
attttggtcacatatagttagttac

SEQ ID NO: 124549 - DNA, 25 bp, Probe Sequence
atttatgaccaatttagggagtaca

SEQ ID NO: 124550 - DNA, 25 bp, Probe Sequence
atttagccagcgtttattgtagtaa

SEQ ID NO: 124551 - DNA, 25 bp, Probe Sequence
attataccagtgttaagtgacatag

SEQ ID NO: 124552 - DNA, 25 bp, Probe Sequence
attagacactttggaagatggcata

SEQ ID NO: 124553 - DNA, 25 bp, Probe Sequence
attatatcctcatccaacaggcttt

SEQ ID NO: 124554 - DNA, 25 bp, Probe Sequence
atttcacatccacaggacggtcttg

SEQ ID NO: 124555 - DNA, 25 bp, Probe Sequence
atttacccagttgagcgttcttaga

SEQ ID NO: 124556 - DNA, 25 bp, Probe Sequence
atttgggaaattgaggtcgttgtga

SEQ ID NO: 124557 - DNA, 25 bp, Probe Sequence
atttaagaaatatcggcggggtgca

SEQ ID NO: 124558 - DNA, 25 bp, Probe Sequence
attataaaagtagctggggatggtg

SEQ ID NO: 124559 - DNA, 25 bp, Probe Sequence
atttaatattaaggctgtgggtggt

SEQ ID NO: 124560 - DNA, 25 bp, Probe Sequence
atttttagcttagggcctggtggct

SEQ ID NO: 124561 - DNA, 25 bp, Probe Sequence
atttttgcctgttagtgattgtttc

SEQ ID NO: 124562 - DNA, 25 bp, Probe Sequence
attttctggccttagctctgtgtat

SEQ ID NO: 124563 - DNA, 25 bp, Probe Sequence
attagtcgggcatgagtctgtttcc

SEQ ID NO: 124564 - DNA, 25 bp, Probe Sequence
attatgggaggctctgactgtctcg

SEQ ID NO: 124565 - DNA, 25 bp, Probe Sequence
attaggtcaagttcatagtttctgt

SEQ ID NO: 124566 - DNA, 25 bp, Probe Sequence
attagtgagaatgaaagactctatt

SEQ ID NO: 124567 - DNA, 25 bp, Probe Sequence
attagtctatcaaatgaaactcttt

SEQ ID NO: 124568 - DNA, 25 bp, Probe Sequence
attttctagcatcctgacatcactg

SEQ ID NO: 124569 - DNA, 25 bp, Probe Sequence
attatgtctggctgcagcacactct

SEQ ID NO: 124570 - DNA, 25 bp, Probe Sequence
atttgcttggcaacacgacttgaaa

SEQ ID NO: 124571 - DNA, 25 bp, Probe Sequence
attttggcagcaacatccctaacat

SEQ ID NO: 124572 - DNA, 25 bp, Probe Sequence
attttgacaatgacactcacagaaa

SEQ ID NO: 124573 - DNA, 25 bp, Probe Sequence
atttggaagtactctgcagtggaca

SEQ ID NO: 124574 - DNA, 25 bp, Probe Sequence
atttggagcactttactatggtggg

SEQ ID NO: 124575 - DNA, 25 bp, Probe Sequence
attattggaattaacctggtgctgg

SEQ ID NO: 124576 - DNA, 25 bp, Probe Sequence
attttggaaattggcactgggtgaa

SEQ ID NO: 124577 - DNA, 25 bp, Probe Sequence
attttggaatttcctggatgagaag

SEQ ID NO: 124578 - DNA, 25 bp, Probe Sequence
attatgggactgtttgctttgaaag

SEQ ID NO: 124579 - DNA, 25 bp, Probe Sequence
attatggggctagttgtcctccaac

SEQ ID NO: 124580 - DNA, 25 bp, Probe Sequence
attatggtccttgatatttgcccag

SEQ ID NO: 124581 - DNA, 25 bp, Probe Sequence
attagtctctatctattttcccaca

SEQ ID NO: 124582 - DNA, 25 bp, Probe Sequence
attatttctgtgtgattattcccta

SEQ ID NO: 124583 - DNA, 25 bp, Probe Sequence
attattttttgtatatcctcccaat

SEQ ID NO: 124584 - DNA, 25 bp, Probe Sequence
attatattttggttgtgccccacat

SEQ ID NO: 124585 - DNA, 25 bp, Probe Sequence
atttccatttttaggcacccatagg

SEQ ID NO: 124586 - DNA, 25 bp, Probe Sequence
attatctatattttgtgatactaaa

SEQ ID NO: 124587 - DNA, 25 bp, Probe Sequence
attttggatatctatctgtatctat

SEQ ID NO: 124588 - DNA, 25 bp, Probe Sequence
atttagagatacaaagtactactac

SEQ ID NO: 124589 - DNA, 25 bp, Probe Sequence
atttaaaccatactgtagcaacata

SEQ ID NO: 124590 - DNA, 25 bp, Probe Sequence
atttgaaaggcaaggtaggaggatc

SEQ ID NO: 124591 - DNA, 25 bp, Probe Sequence
atttcaaaggcaaagattgttagat

SEQ ID NO: 124592 - DNA, 25 bp, Probe Sequence
atttcaatttataacgttctcagtc

SEQ ID NO: 124593 - DNA, 25 bp, Probe Sequence
attatgcaacgttatattttgtctt

SEQ ID NO: 124594 - DNA, 25 bp, Probe Sequence
attataacagcatcactttagattt

SEQ ID NO: 124595 - DNA, 25 bp, Probe Sequence
attatatctacatccttttgaaggt

SEQ ID NO: 124596 - DNA, 25 bp, Probe Sequence
attttgcaatataccttttggcagt

SEQ ID NO: 124597 - DNA, 25 bp, Probe Sequence
attttcaaatggcttttggactatc

SEQ ID NO: 124598 - DNA, 25 bp, Probe Sequence
attttcacaaggattcttctatttc

SEQ ID NO: 124599 - DNA, 25 bp, Probe Sequence
atttattcactgattaaatcttttc

SEQ ID NO: 124600 - DNA, 25 bp, Probe Sequence
atttttcactttgctacaccattaa

SEQ ID NO: 124601 - DNA, 25 bp, Probe Sequence
attttctcactattggtgtacctta

SEQ ID NO: 124602 - DNA, 25 bp, Probe Sequence
attttctccatgaatgacagcccct

SEQ ID NO: 124603 - DNA, 25 bp, Probe Sequence
attatttatcacatagccccttagc

SEQ ID NO: 124604 - DNA, 25 bp, Probe Sequence
attttcttaatcaacctaattacat

SEQ ID NO: 124605 - DNA, 25 bp, Probe Sequence
attttcctaactccatcttagtgta

SEQ ID NO: 124606 - DNA, 25 bp, Probe Sequence
atagttaataaccaatatatcgtgt

SEQ ID NO: 124607 - DNA, 25 bp, Probe Sequence
atcagtgttttacaataattttgaa

SEQ ID NO: 124608 - DNA, 25 bp, Probe Sequence
acctgactttagagcttttttacat

SEQ ID NO: 124609 - DNA, 25 bp, Probe Sequence
accacactttggctaattttggaat

SEQ ID NO: 124610 - DNA, 25 bp, Probe Sequence
ataccctcaggttgataattttgga

SEQ ID NO: 124611 - DNA, 25 bp, Probe Sequence
atatctaatagtgtacagttgggga

SEQ ID NO: 124612 - DNA, 25 bp, Probe Sequence
aaattatatccgtgagttgggggag

SEQ ID NO: 124613 - DNA, 25 bp, Probe Sequence
ataactttctggattttgtggggag

SEQ ID NO: 124614 - DNA, 25 bp, Probe Sequence
ataacggctctctcttttataggtg

SEQ ID NO: 124615 - DNA, 25 bp, Probe Sequence
ataatagtgccctctttgaaagtgt

SEQ ID NO: 124616 - DNA, 25 bp, Probe Sequence
attatttgtgactctcctgaaattg

SEQ ID NO: 124617 - DNA, 25 bp, Probe Sequence
attatcttgctgaatccttctaaat

SEQ ID NO: 124618 - DNA, 25 bp, Probe Sequence
atttaggcttaccttctgaaatctt

SEQ ID NO: 124619 - DNA, 25 bp, Probe Sequence
attatacctcaagctttatcattct

SEQ ID NO: 124620 - DNA, 25 bp, Probe Sequence
attatacatctcaatggcctttttc

SEQ ID NO: 124621 - DNA, 25 bp, Probe Sequence
attttatccttagcattgcttctgc

SEQ ID NO: 124622 - DNA, 25 bp, Probe Sequence
attttagagttcaatagctgtttct

SEQ ID NO: 124623 - DNA, 25 bp, Probe Sequence
attttccactctcaagttttctact

SEQ ID NO: 124624 - DNA, 25 bp, Probe Sequence
attttccacttgtgacgtcatgtca

SEQ ID NO: 124625 - DNA, 25 bp, Probe Sequence
atttaccactaagacttctgactcc

SEQ ID NO: 124626 - DNA, 25 bp, Probe Sequence
attatgacccaatatacattatgac

SEQ ID NO: 124627 - DNA, 25 bp, Probe Sequence
attatgcccctatatatatcaagat

SEQ ID NO: 124628 - DNA, 25 bp, Probe Sequence
attatccctgtatattgcatgaatg

SEQ ID NO: 124629 - DNA, 25 bp, Probe Sequence
attatctcttgctctaaatgatatg

SEQ ID NO: 124630 - DNA, 25 bp, Probe Sequence
attagtttgctcctcactattgttt

SEQ ID NO: 124631 - DNA, 25 bp, Probe Sequence
attattgcttgtgcctcaactgttt

SEQ ID NO: 124632 - DNA, 25 bp, Probe Sequence
atttactcatgtgccttcaattttg

SEQ ID NO: 124633 - DNA, 25 bp, Probe Sequence
atttatgtttattcaccagtctttg

SEQ ID NO: 124634 - DNA, 25 bp, Probe Sequence
atttatgtttattcaccagtctttg

SEQ ID NO: 124635 - DNA, 25 bp, Probe Sequence
attatcttgttaaatcacagccata

SEQ ID NO: 124636 - DNA, 25 bp, Probe Sequence
atttcttttatcactacctcaactg

SEQ ID NO: 124637 - DNA, 25 bp, Probe Sequence
attttttgtatatcctcccaatctt

SEQ ID NO: 124638 - DNA, 25 bp, Probe Sequence
atttataagttttgacccgcagagt

SEQ ID NO: 124639 - DNA, 25 bp, Probe Sequence
atatataaatttcatggcccggcgc

SEQ ID NO: 124640 - DNA, 25 bp, Probe Sequence
atataagagttatgttagccaggtg

SEQ ID NO: 124641 - DNA, 25 bp, Probe Sequence
gattactactttgtaaccagggagg

SEQ ID NO: 124642 - DNA, 25 bp, Probe Sequence
atttctgttttcattcccagggagc

SEQ ID NO: 124643 - DNA, 25 bp, Probe Sequence
atttctcttgggatctaacgtggga

SEQ ID NO: 124644 - DNA, 25 bp, Probe Sequence
attatccggggcatctactcaatga

SEQ ID NO: 124645 - DNA, 25 bp, Probe Sequence
atttccgggaagacccaatcagagc

SEQ ID NO: 124646 - DNA, 25 bp, Probe Sequence
atttacaggtgcagtcaccgaaaga

SEQ ID NO: 124647 - DNA, 25 bp, Probe Sequence
atttaaaattcagcccagaaaacag

SEQ ID NO: 124648 - DNA, 25 bp, Probe Sequence
atttattatataaagcccagtaaag

SEQ ID NO: 124649 - DNA, 25 bp, Probe Sequence
attttttctgaatcataattaaact

SEQ ID NO: 124650 - DNA, 25 bp, Probe Sequence
attattttcccattctactctagaa

SEQ ID NO: 124651 - DNA, 25 bp, Probe Sequence
attttctttgtttctgactctaata

SEQ ID NO: 124652 - DNA, 25 bp, Probe Sequence
attttggttcttcatattctagtat

SEQ ID NO: 124653 - DNA, 25 bp, Probe Sequence
attttggctttcacaatttatcttt

SEQ ID NO: 124654 - DNA, 25 bp, Probe Sequence
attttggtgttgaaagttcttcctg

SEQ ID NO: 124655 - DNA, 25 bp, Probe Sequence
atttttgtaattgcggtgttcactg

SEQ ID NO: 124656 - DNA, 25 bp, Probe Sequence
attttgttttatggtagcgtctcac

SEQ ID NO: 124657 - DNA, 25 bp, Probe Sequence
attttccttaatggtagaagcccag

SEQ ID NO: 124658 - DNA, 25 bp, Probe Sequence
attattccataaaggtcaaatcatt

SEQ ID NO: 124659 - DNA, 25 bp, Probe Sequence
attatttctagcatggacaatccag

SEQ ID NO: 124660 - DNA, 25 bp, Probe Sequence
attattttcatgctcagaatttcag

SEQ ID NO: 124661 - DNA, 25 bp, Probe Sequence
attatcatctcaactgtggaatatt

SEQ ID NO: 124662 - DNA, 25 bp, Probe Sequence
attatctgctattcgggtaatcttc

SEQ ID NO: 124663 - DNA, 25 bp, Probe Sequence
attttaatcctggagtctcactgtc

SEQ ID NO: 124664 - DNA, 25 bp, Probe Sequence
atagtggtaactgcagttcctcctc

SEQ ID NO: 124665 - DNA, 25 bp, Probe Sequence
atagtggtaactgcagttcctcctc

SEQ ID NO: 124666 - DNA, 25 bp, Probe Sequence
atagttcaaactgcagctaacccta

SEQ ID NO: 124667 - DNA, 25 bp, Probe Sequence
atttccaactccattataccatgta

SEQ ID NO: 124668 - DNA, 25 bp, Probe Sequence
attttatgttctatatacccagtca

SEQ ID NO: 124669 - DNA, 25 bp, Probe Sequence
attttgtttgctatgtaaccgaatt

SEQ ID NO: 124670 - DNA, 25 bp, Probe Sequence
attttgattcctatctcgttcaaat

SEQ ID NO: 124671 - DNA, 25 bp, Probe Sequence
attttgaatcctatggtatttgaac

SEQ ID NO: 124672 - DNA, 25 bp, Probe Sequence
atttcctattctgtggtttttccag

SEQ ID NO: 124673 - DNA, 25 bp, Probe Sequence
atttgcttaacgtggtgcttttaat

SEQ ID NO: 124674 - DNA, 25 bp, Probe Sequence
atttgcctcacctgacaatgtttta

SEQ ID NO: 124675 - DNA, 25 bp, Probe Sequence
attatcctttcattgagccttttat

SEQ ID NO: 124676 - DNA, 25 bp, Probe Sequence
attatttttgctacactcattttat

SEQ ID NO: 124677 - DNA, 25 bp, Probe Sequence
attatttttgtagctcagtttcatt

SEQ ID NO: 124678 - DNA, 25 bp, Probe Sequence
attattccttgtctgtactttagta

SEQ ID NO: 124679 - DNA, 25 bp, Probe Sequence
atttccttgtatctgtagtctttta

SEQ ID NO: 124680 - DNA, 25 bp, Probe Sequence
attttgcctattcagctagttttgt

SEQ ID NO: 124681 - DNA, 25 bp, Probe Sequence
attttgccaatattgccaagttttt

SEQ ID NO: 124682 - DNA, 25 bp, Probe Sequence
atttctcccaaggccaagattgtcc

SEQ ID NO: 124683 - DNA, 25 bp, Probe Sequence
attatttcaaaggcaaagattgtta

SEQ ID NO: 124684 - DNA, 25 bp, Probe Sequence
atttttcaaaactactgcatgttta

SEQ ID NO: 124685 - DNA, 25 bp, Probe Sequence
attttcctagtagatctatattaga

SEQ ID NO: 124686 - DNA, 25 bp, Probe Sequence
attttctctattatatattttccca

SEQ ID NO: 124687 - DNA, 25 bp, Probe Sequence
atctattttattatggtttcccttg

SEQ ID NO: 124688 - DNA, 25 bp, Probe Sequence
attatttccaaaggtgtctgtccct

SEQ ID NO: 124689 - DNA, 25 bp, Probe Sequence
attatttgcccaaagttgtcctctt

SEQ ID NO: 124690 - DNA, 25 bp, Probe Sequence
attatttcactaaagctttcagagc

SEQ ID NO: 124691 - DNA, 25 bp, Probe Sequence
atttttcctcagtgatcttaaaagc

SEQ ID NO: 124692 - DNA, 25 bp, Probe Sequence
attttctggtactctgtgaaagaag

SEQ ID NO: 124693 - DNA, 25 bp, Probe Sequence
attttctgagtcaccttgagttatt

SEQ ID NO: 124694 - DNA, 25 bp, Probe Sequence
attattctagtcctgctttagtcct

SEQ ID NO: 124695 - DNA, 25 bp, Probe Sequence
attattgctgtggtctttctactcc

SEQ ID NO: 124696 - DNA, 25 bp, Probe Sequence
attattattcccattctacatacta

SEQ ID NO: 124697 - DNA, 25 bp, Probe Sequence
attattatacactttactactacaa

SEQ ID NO: 124698 - DNA, 25 bp, Probe Sequence
attatttcccagttagtattatcat

SEQ ID NO: 124699 - DNA, 25 bp, Probe Sequence
attttatcccaagtgactatacaat

SEQ ID NO: 124700 - DNA, 25 bp, Probe Sequence
attatgtcatactaacttgtgaaaa

SEQ ID NO: 124701 - DNA, 25 bp, Probe Sequence
attatgcctgcctaagttctgaact

SEQ ID NO: 124702 - DNA, 25 bp, Probe Sequence
attatcactgataaagatatgtcaa

SEQ ID NO: 124703 - DNA, 25 bp, Probe Sequence
attatcctgaagttgctatggctat

SEQ ID NO: 124704 - DNA, 25 bp, Probe Sequence
attatctcctaattgtatgttagaa

SEQ ID NO: 124705 - DNA, 25 bp, Probe Sequence
attttcctgatgctgatgatattag

SEQ ID NO: 124706 - DNA, 25 bp, Probe Sequence
attttgccagatctgttatctagct

SEQ ID NO: 124707 - DNA, 25 bp, Probe Sequence
attttgctctattttctgatcatga

SEQ ID NO: 124708 - DNA, 25 bp, Probe Sequence
attttgctctattttctgatcatga

SEQ ID NO: 124709 - DNA, 25 bp, Probe Sequence
attttctgctattatcactgataaa

SEQ ID NO: 124710 - DNA, 25 bp, Probe Sequence
atttgcctgttggcactctgattca

SEQ ID NO: 124711 - DNA, 25 bp, Probe Sequence
atttcactttggcactgactgaact

SEQ ID NO: 124712 - DNA, 25 bp, Probe Sequence
atggatttccgtctctggtgtagct

SEQ ID NO: 124713 - DNA, 25 bp, Probe Sequence
atttttgccagtctcatgggtagat

SEQ ID NO: 124714 - DNA, 25 bp, Probe Sequence
atttttggtctcatctggagtgggg

SEQ ID NO: 124715 - DNA, 25 bp, Probe Sequence
attttgattgtcacactgggtcggg

SEQ ID NO: 124716 - DNA, 25 bp, Probe Sequence
atttcagcattggctctacagcgtt

SEQ ID NO: 124717 - DNA, 25 bp, Probe Sequence
attatcgccttttgacagctgtgct

SEQ ID NO: 124718 - DNA, 25 bp, Probe Sequence
atttagctgtcactagcactcttct

SEQ ID NO: 124719 - DNA, 25 bp, Probe Sequence
attttcattcatcaacctctcaatc

SEQ ID NO: 124720 - DNA, 25 bp, Probe Sequence
attttgactagacatcctgtgcaat

SEQ ID NO: 124721 - DNA, 25 bp, Probe Sequence
attatttgcttggctatcttggaca

SEQ ID NO: 124722 - DNA, 25 bp, Probe Sequence
attttactgctggtcactcatggaa

SEQ ID NO: 124723 - DNA, 25 bp, Probe Sequence
atttaccatcatgtgactggaagat

SEQ ID NO: 124724 - DNA, 25 bp, Probe Sequence
atttgacctctctgactgggacatc

SEQ ID NO: 124725 - DNA, 25 bp, Probe Sequence
atttatcctcttggttgcacagtcc

SEQ ID NO: 124726 - DNA, 25 bp, Probe Sequence
atttaactcttgaagtcacaccctc

SEQ ID NO: 124727 - DNA, 25 bp, Probe Sequence
atttaactcttgaagtcacaccctc

SEQ ID NO: 124728 - DNA, 25 bp, Probe Sequence
attttccttctgaagtctgagccca

SEQ ID NO: 124729 - DNA, 25 bp, Probe Sequence
attttcttttgattgatatgacact

SEQ ID NO: 124730 - DNA, 25 bp, Probe Sequence
attatcctttccatgaagacagtct

SEQ ID NO: 124731 - DNA, 25 bp, Probe Sequence
atttcacctttctgcaacaagttag

SEQ ID NO: 124732 - DNA, 25 bp, Probe Sequence
atttcgccgtcctataataggcttt

SEQ ID NO: 124733 - DNA, 25 bp, Probe Sequence
atttctacctctagtaatgggcttt

SEQ ID NO: 124734 - DNA, 25 bp, Probe Sequence
atttcccctcttgaagaggcaattc

SEQ ID NO: 124735 - DNA, 25 bp, Probe Sequence
atttcccgtcccctgagagggatga

SEQ ID NO: 124736 - DNA, 25 bp, Probe Sequence
atttctctgagcagtcagggtggga

SEQ ID NO: 124737 - DNA, 25 bp, Probe Sequence
attatctctgagaagctaggccgtg

SEQ ID NO: 124738 - DNA, 25 bp, Probe Sequence
attattgtgcgcctgtgagcgccca

SEQ ID NO: 124739 - DNA, 25 bp, Probe Sequence
attttggtgtgactaggccacacca

SEQ ID NO: 124740 - DNA, 25 bp, Probe Sequence
attttggttgatcctatgtacctat

SEQ ID NO: 124741 - DNA, 25 bp, Probe Sequence
attttggacttgttcatgtcccctc

SEQ ID NO: 124742 - DNA, 25 bp, Probe Sequence
atttttcctatgtgcagtcactcct

SEQ ID NO: 124743 - DNA, 25 bp, Probe Sequence
atttttctggcctggtactccataa

SEQ ID NO: 124744 - DNA, 25 bp, Probe Sequence
attttgttgccctggatctttataa

SEQ ID NO: 124745 - DNA, 25 bp, Probe Sequence
attttttcacgtaagtccacatata

SEQ ID NO: 124746 - DNA, 25 bp, Probe Sequence
atttttgacacatacacccctaatt

SEQ ID NO: 124747 - DNA, 25 bp, Probe Sequence
attatttgcctatgaaggtactaat

SEQ ID NO: 124748 - DNA, 25 bp, Probe Sequence
attttgtcgccttgaatgggagcaa

SEQ ID NO: 124749 - DNA, 25 bp, Probe Sequence
attttgtttgcttggatggctgaaa

SEQ ID NO: 124750 - DNA, 25 bp, Probe Sequence
atttatggtatttgagtgtgcaaga

SEQ ID NO: 124751 - DNA, 25 bp, Probe Sequence
atttatgccaatttatgtcacatca

SEQ ID NO: 124752 - DNA, 25 bp, Probe Sequence
attataggaattacaaacacagttg

SEQ ID NO: 124753 - DNA, 25 bp, Probe Sequence
attataaacatcacagaacatcctg

SEQ ID NO: 124754 - DNA, 25 bp, Probe Sequence
atatgaaaaagcagagcgactcggt

SEQ ID NO: 124755 - DNA, 25 bp, Probe Sequence
atctaaatgtagagaagttgggatt

SEQ ID NO: 124756 - DNA, 25 bp, Probe Sequence
attattatgttcacaagcttggaat

SEQ ID NO: 124757 - DNA, 25 bp, Probe Sequence
attatatatttcacagactttatca

SEQ ID NO: 124758 - DNA, 25 bp, Probe Sequence
attatctagtacccagtccatgttc

SEQ ID NO: 124759 - DNA, 25 bp, Probe Sequence
attatgctcagtacagacttcacat

SEQ ID NO: 124760 - DNA, 25 bp, Probe Sequence
attatatcagtgaagatcaaccatg

SEQ ID NO: 124761 - DNA, 25 bp, Probe Sequence
attattgagcttcatcatgaccaga

SEQ ID NO: 124762 - DNA, 25 bp, Probe Sequence
atttatcactgtccacaacaatgca

SEQ ID NO: 124763 - DNA, 25 bp, Probe Sequence
atttatgcacacacaaaaacagtat

SEQ ID NO: 124764 - DNA, 25 bp, Probe Sequence
atttatatagaggagacaagtcgta

SEQ ID NO: 124765 - DNA, 25 bp, Probe Sequence
atttatgattggctacttgggctat

SEQ ID NO: 124766 - DNA, 25 bp, Probe Sequence
atttcaaagggttatttgcctcatc

SEQ ID NO: 124767 - DNA, 25 bp, Probe Sequence
atttaagttggatatttctctacat

SEQ ID NO: 124768 - DNA, 25 bp, Probe Sequence
atttccgtgggttattcttcttgat

SEQ ID NO: 124769 - DNA, 25 bp, Probe Sequence
atttcacgggagatttcttgttgct

SEQ ID NO: 124770 - DNA, 25 bp, Probe Sequence
atttcctctaggttttgcttgactc

SEQ ID NO: 124771 - DNA, 25 bp, Probe Sequence
atttcctctaggttttgcttgactc

SEQ ID NO: 124772 - DNA, 25 bp, Probe Sequence
atttcactactggtgttctgttttc

SEQ ID NO: 124773 - DNA, 25 bp, Probe Sequence
atttccccattggtcctgatgttga

SEQ ID NO: 124774 - DNA, 25 bp, Probe Sequence
atttttgcacaagaggctggtctga

SEQ ID NO: 124775 - DNA, 25 bp, Probe Sequence
atttttgcacaaggaattgctttgc

SEQ ID NO: 124776 - DNA, 25 bp, Probe Sequence
attttgccaagaagttctccctgcc

SEQ ID NO: 124777 - DNA, 25 bp, Probe Sequence
atttctgccagaatcaatttcctca

SEQ ID NO: 124778 - DNA, 25 bp, Probe Sequence
atttaactagtattcaatcaccaac

SEQ ID NO: 124779 - DNA, 25 bp, Probe Sequence
atttatagccaggtaccttctcacc

SEQ ID NO: 124780 - DNA, 25 bp, Probe Sequence
attttcctggagtacatttgtcaca

SEQ ID NO: 124781 - DNA, 25 bp, Probe Sequence
attattttggtgcatcaaatctaca

SEQ ID NO: 124782 - DNA, 25 bp, Probe Sequence
attttcgggtccaaaatctcatgaa

SEQ ID NO: 124783 - DNA, 25 bp, Probe Sequence
attattgttgctattaaattctgaa

SEQ ID NO: 124784 - DNA, 25 bp, Probe Sequence
attattggtctttacaagacttgga

SEQ ID NO: 124785 - DNA, 25 bp, Probe Sequence
attataggtgtttccacatgaatta

SEQ ID NO: 124786 - DNA, 25 bp, Probe Sequence
attttgcggtgaaaacataatgatg

SEQ ID NO: 124787 - DNA, 25 bp, Probe Sequence
atttattctggaggatatctaatgt

SEQ ID NO: 124788 - DNA, 25 bp, Probe Sequence
atattctttagatcaattagaggct

SEQ ID NO: 124789 - DNA, 25 bp, Probe Sequence
atatttttaagagatcgtaggcaat

SEQ ID NO: 124790 - DNA, 25 bp, Probe Sequence
attttgtatttggcaactgtgggca

SEQ ID NO: 124791 - DNA, 25 bp, Probe Sequence
atctttgttggaaggagctttggcc

SEQ ID NO: 124792 - DNA, 25 bp, Probe Sequence
attttggcggctgtagttgtggggg

SEQ ID NO: 124793 - DNA, 25 bp, Probe Sequence
atcttgtacggtcactgttggtgcg

SEQ ID NO: 124794 - DNA, 25 bp, Probe Sequence
attttccacgtgcatctgtcatagt

SEQ ID NO: 124795 - DNA, 25 bp, Probe Sequence
atttttctcttgccatttgtagctt

SEQ ID NO: 124796 - DNA, 25 bp, Probe Sequence
attttatccctggacttgtcaagtg

SEQ ID NO: 124797 - DNA, 25 bp, Probe Sequence
attttattccagcgtcttctagaga

SEQ ID NO: 124798 - DNA, 25 bp, Probe Sequence
attttacttcagatacgtcatccag

SEQ ID NO: 124799 - DNA, 25 bp, Probe Sequence
atttttcttcacataggtcttctaa

SEQ ID NO: 124800 - DNA, 25 bp, Probe Sequence
attttactgtcactggaggctctgt

SEQ ID NO: 124801 - DNA, 25 bp, Probe Sequence
atttctaggtcaattgatgtgatta

SEQ ID NO: 124802 - DNA, 25 bp, Probe Sequence
attattaaactgaggtgatgcatgt

SEQ ID NO: 124803 - DNA, 25 bp, Probe Sequence
attatttaagtgtagcgcagatgtg

SEQ ID NO: 124804 - DNA, 25 bp, Probe Sequence
attatttctgagtagagccaggaga

SEQ ID NO: 124805 - DNA, 25 bp, Probe Sequence
attttctctgcaccaagagcacaag

SEQ ID NO: 124806 - DNA, 25 bp, Probe Sequence
attttgcagccagacaagccttgaa

SEQ ID NO: 124807 - DNA, 25 bp, Probe Sequence
attttgatacatggactcagccctt

SEQ ID NO: 124808 - DNA, 25 bp, Probe Sequence
attttattgcatgcactgtgacctt

SEQ ID NO: 124809 - DNA, 25 bp, Probe Sequence
attttgaattggttgctagcactta

SEQ ID NO: 124810 - DNA, 25 bp, Probe Sequence
atttatagcaaatttctagatcatt

SEQ ID NO: 124811 - DNA, 25 bp, Probe Sequence
atttcagcagatctttctacctact

SEQ ID NO: 124812 - DNA, 25 bp, Probe Sequence
atttcagtcatcatttccaaagtca

SEQ ID NO: 124813 - DNA, 25 bp, Probe Sequence
atttcatttctcttccgctaagtaa

SEQ ID NO: 124814 - DNA, 25 bp, Probe Sequence
atttcaatgttcttacaaaactatt

SEQ ID NO: 124815 - DNA, 25 bp, Probe Sequence
atttcaaggactaaagtgggctcta

SEQ ID NO: 124816 - DNA, 25 bp, Probe Sequence
atttccaagagagattgatgggtta

SEQ ID NO: 124817 - DNA, 25 bp, Probe Sequence
atttccatagagaccgtgtggtttt

SEQ ID NO: 124818 - DNA, 25 bp, Probe Sequence
atttcaggaagccacgtgagaattc

SEQ ID NO: 124819 - DNA, 25 bp, Probe Sequence
attatatggcctgacaatatgaatt

SEQ ID NO: 124820 - DNA, 25 bp, Probe Sequence
attattggcctgagatattgatgat

SEQ ID NO: 124821 - DNA, 25 bp, Probe Sequence
attattagtgtgtgatattgccata

SEQ ID NO: 124822 - DNA, 25 bp, Probe Sequence
attttcaatgtcatgcagttgccaa

SEQ ID NO: 124823 - DNA, 25 bp, Probe Sequence
attatataattcctgctgtggcaag

SEQ ID NO: 124824 - DNA, 25 bp, Probe Sequence
atttcacaaattcgctggggataaa

SEQ ID NO: 124825 - DNA, 25 bp, Probe Sequence
atattcacccttcaacaggcaggaa

SEQ ID NO: 124826 - DNA, 25 bp, Probe Sequence
attttccctctcaaaaccagaacat

SEQ ID NO: 124827 - DNA, 25 bp, Probe Sequence
attattacctcctagggccaggaag

SEQ ID NO: 124828 - DNA, 25 bp, Probe Sequence
attttcatttctaatggcccatggg

SEQ ID NO: 124829 - DNA, 25 bp, Probe Sequence
atttggtttcttttgcccattgaat

SEQ ID NO: 124830 - DNA, 25 bp, Probe Sequence
attttgtcttttggtttctgtcagt

SEQ ID NO: 124831 - DNA, 25 bp, Probe Sequence
atttttgagtttgtattagttgata

SEQ ID NO: 124832 - DNA, 25 bp, Probe Sequence
atttttcaatggttcttttgtcgat

SEQ ID NO: 124833 - DNA, 25 bp, Probe Sequence
atttgtacaatggtttattcccaag

SEQ ID NO: 124834 - DNA, 25 bp, Probe Sequence
attttgacaacctgtatcccaagca

SEQ ID NO: 124835 - DNA, 25 bp, Probe Sequence
attttacatacctgctgcaccaaat

SEQ ID NO: 124836 - DNA, 25 bp, Probe Sequence
attattacattttgactaccacaac

SEQ ID NO: 124837 - DNA, 25 bp, Probe Sequence
attatttctttggactcaagctgaa

SEQ ID NO: 124838 - DNA, 25 bp, Probe Sequence
attttatcttgtccgtgaagatgta

SEQ ID NO: 124839 - DNA, 25 bp, Probe Sequence
atttctctgtagccctatgatggct

SEQ ID NO: 124840 - DNA, 25 bp, Probe Sequence
atttctctgcttcactctggaggat

SEQ ID NO: 124841 - DNA, 25 bp, Probe Sequence
attttttctggatatggagtatgtt

SEQ ID NO: 124842 - DNA, 25 bp, Probe Sequence
attttttcagaacatcaccgatttt

SEQ ID NO: 124843 - DNA, 25 bp, Probe Sequence
attttggtgcagaacctcagcctgt

SEQ ID NO: 124844 - DNA, 25 bp, Probe Sequence
atttagtagcagaacttatctcagg

SEQ ID NO: 124845 - DNA, 25 bp, Probe Sequence
attttctaagtatttatcacaggac

SEQ ID NO: 124846 - DNA, 25 bp, Probe Sequence
atttttccaggatcatactcagaga

SEQ ID NO: 124847 - DNA, 25 bp, Probe Sequence
attttttcaaagccactgctgcaaa

SEQ ID NO: 124848 - DNA, 25 bp, Probe Sequence
attttctgtacatggtccatgaaat

SEQ ID NO: 124849 - DNA, 25 bp, Probe Sequence
attttcgtgaaacctgcctacacat

SEQ ID NO: 124850 - DNA, 25 bp, Probe Sequence
attattgctttttcctctgtatact

SEQ ID NO: 124851 - DNA, 25 bp, Probe Sequence
attttgcttttatcttgaaggcata

SEQ ID NO: 124852 - DNA, 25 bp, Probe Sequence
atagtccacttcaccttaatgggtc

SEQ ID NO: 124853 - DNA, 25 bp, Probe Sequence
atttccctctaagcccaagagctgt

SEQ ID NO: 124854 - DNA, 25 bp, Probe Sequence
atttcccgggacagacaaactgctg

SEQ ID NO: 124855 - DNA, 25 bp, Probe Sequence
atttgcccagatgagttgaaaacgt

SEQ ID NO: 124856 - DNA, 25 bp, Probe Sequence
atttgccactgagctggtgaagccc

SEQ ID NO: 124857 - DNA, 25 bp, Probe Sequence
atttgccatctatcgatgggaccca

SEQ ID NO: 124858 - DNA, 25 bp, Probe Sequence
atttgccagccgacgaaaaccagat

SEQ ID NO: 124859 - DNA, 25 bp, Probe Sequence
atttgaagccctctacagactgagt

SEQ ID NO: 124860 - DNA, 25 bp, Probe Sequence
atttgagccccctagtagtctagtg

SEQ ID NO: 124861 - DNA, 25 bp, Probe Sequence
atttaccaccgatgattccatttgt

SEQ ID NO: 124862 - DNA, 25 bp, Probe Sequence
atttttctaggatgtgtcttttgtt

SEQ ID NO: 124863 - DNA, 25 bp, Probe Sequence
attttagtatggtgtctgtttatgt

SEQ ID NO: 124864 - DNA, 25 bp, Probe Sequence
atttctacgtagtgatctgctttta

SEQ ID NO: 124865 - DNA, 25 bp, Probe Sequence
atttctacgtagtgatctgctttta

SEQ ID NO: 124866 - DNA, 25 bp, Probe Sequence
attttgaccatatagattttattat

SEQ ID NO: 124867 - DNA, 25 bp, Probe Sequence
attttactaatatctgtagctattt

SEQ ID NO: 124868 - DNA, 25 bp, Probe Sequence
atttttccaaacatgtagctattgt

SEQ ID NO: 124869 - DNA, 25 bp, Probe Sequence
atttcttcaccaccctgagggttgt

SEQ ID NO: 124870 - DNA, 25 bp, Probe Sequence
atttcttacccccagggattatgat

SEQ ID NO: 124871 - DNA, 25 bp, Probe Sequence
atttcttcttcctcagggactacat

SEQ ID NO: 124872 - DNA, 25 bp, Probe Sequence
atttctccttcctcagaatacactc

SEQ ID NO: 124873 - DNA, 25 bp, Probe Sequence
atttctactccagtccaatgtaact

SEQ ID NO: 124874 - DNA, 25 bp, Probe Sequence
atattgccaaacgacacaggaaatt

SEQ ID NO: 124875 - DNA, 25 bp, Probe Sequence
atatctgaccaagaacattaactat

SEQ ID NO: 124876 - DNA, 25 bp, Probe Sequence
atattgcgggcacaacattatcctc

SEQ ID NO: 124877 - DNA, 25 bp, Probe Sequence
atttcgtgtatatgaatctttctcg

SEQ ID NO: 124878 - DNA, 25 bp, Probe Sequence
atttcagtgctgtcaccgtatttct

SEQ ID NO: 124879 - DNA, 25 bp, Probe Sequence
atttttgtgtgaccatgttgacttc

SEQ ID NO: 124880 - DNA, 25 bp, Probe Sequence
atttttgatgttgcatgctctcaga

SEQ ID NO: 124881 - DNA, 25 bp, Probe Sequence
attttgttggatgtactccaggaaa

SEQ ID NO: 124882 - DNA, 25 bp, Probe Sequence
attttgttagggcagctcttggaaa

SEQ ID NO: 124883 - DNA, 25 bp, Probe Sequence
attattgttatacacagctttatga

SEQ ID NO: 124884 - DNA, 25 bp, Probe Sequence
atttattctatacacagtattccaa

SEQ ID NO: 124885 - DNA, 25 bp, Probe Sequence
atttatttgttacattattccattt

SEQ ID NO: 124886 - DNA, 25 bp, Probe Sequence
attttgttgttactttagttcatca

SEQ ID NO: 124887 - DNA, 25 bp, Probe Sequence
attttttttagttctaatcattgat

SEQ ID NO: 124888 - DNA, 25 bp, Probe Sequence
attttacttgttcattaatcacatg

SEQ ID NO: 124889 - DNA, 25 bp, Probe Sequence
attttgtcactctctattagataat

SEQ ID NO: 124890 - DNA, 25 bp, Probe Sequence
atttttcagctctctgtataaacat

SEQ ID NO: 124891 - DNA, 25 bp, Probe Sequence
attttctcagtggtctagaaaatca

SEQ ID NO: 124892 - DNA, 25 bp, Probe Sequence
attttccatgtcagtagagtaattt

SEQ ID NO: 124893 - DNA, 25 bp, Probe Sequence
attttcctgatcagttggtataaac

SEQ ID NO: 124894 - DNA, 25 bp, Probe Sequence
atttaagtgttactgtggcttcaaa

SEQ ID NO: 124895 - DNA, 25 bp, Probe Sequence
atttaagtattctttatctcacaaa

SEQ ID NO: 124896 - DNA, 25 bp, Probe Sequence
atttactgctatgttttcttagagt

SEQ ID NO: 124897 - DNA, 25 bp, Probe Sequence
attttctggctaattttcttgtaat

SEQ ID NO: 124898 - DNA, 25 bp, Probe Sequence
attttctgtgctaagggtccagtat

SEQ ID NO: 124899 - DNA, 25 bp, Probe Sequence
atatttacgcgttgggttcaggaat

SEQ ID NO: 124900 - DNA, 25 bp, Probe Sequence
atgtttacaggtttgaattaggcta

SEQ ID NO: 124901 - DNA, 25 bp, Probe Sequence
attttaagactttcaattagacaat

SEQ ID NO: 124902 - DNA, 25 bp, Probe Sequence
atttttaacttccaataatacacag

SEQ ID NO: 124903 - DNA, 25 bp, Probe Sequence
atttctgtaacttcagctttgaaag

SEQ ID NO: 124904 - DNA, 25 bp, Probe Sequence
atttcagtaaatgtctttctataac

SEQ ID NO: 124905 - DNA, 25 bp, Probe Sequence
atttcagtgaacacacccctataac

SEQ ID NO: 124906 - DNA, 25 bp, Probe Sequence
ataatcggcaacaaagccctttggg

SEQ ID NO: 124907 - DNA, 25 bp, Probe Sequence
ataatgcccagtacaggaccttagg

SEQ ID NO: 124908 - DNA, 25 bp, Probe Sequence
atagatacaagcctaggagccccag

SEQ ID NO: 124909 - DNA, 25 bp, Probe Sequence
atatagaccacagcagggccacttc

SEQ ID NO: 124910 - DNA, 25 bp, Probe Sequence
atttatagcacagcaattccacttc

SEQ ID NO: 124911 - DNA, 25 bp, Probe Sequence
attttgcactgctcaattctgtttt

SEQ ID NO: 124912 - DNA, 25 bp, Probe Sequence
attttgcctcattattcttgtttta

SEQ ID NO: 124913 - DNA, 25 bp, Probe Sequence
attttgcctcattattcttgtttta

SEQ ID NO: 124914 - DNA, 25 bp, Probe Sequence
attttcctaatgttcttgatttaat

SEQ ID NO: 124915 - DNA, 25 bp, Probe Sequence
attttgcctttctatgttgagatta

SEQ ID NO: 124916 - DNA, 25 bp, Probe Sequence
atttgcccttgcacatgtaagttac

SEQ ID NO: 124917 - DNA, 25 bp, Probe Sequence
atttcacctggcccatcaaaattca

SEQ ID NO: 124918 - DNA, 25 bp, Probe Sequence
atacgagccttcacgcataagaggc

SEQ ID NO: 124919 - DNA, 25 bp, Probe Sequence
atattaggttcaggtgcataaggga

SEQ ID NO: 124920 - DNA, 25 bp, Probe Sequence
atttggagtgtcagcagctatagtg

SEQ ID NO: 124921 - DNA, 25 bp, Probe Sequence
attttgctttcaatcactagagtgc

SEQ ID NO: 124922 - DNA, 25 bp, Probe Sequence
attttctgattaagagccagggcca

SEQ ID NO: 124923 - DNA, 25 bp, Probe Sequence
attttcaagtaggaccatagcgata

SEQ ID NO: 124924 - DNA, 25 bp, Probe Sequence
attttctgcagtttacaatacaata

SEQ ID NO: 124925 - DNA, 25 bp, Probe Sequence
atttgtctgaggttctcaagctaac

SEQ ID NO: 124926 - DNA, 25 bp, Probe Sequence
atttttcatgcgttcccgtatattt

SEQ ID NO: 124927 - DNA, 25 bp, Probe Sequence
atttttatgtgagccctttgtcttc

SEQ ID NO: 124928 - DNA, 25 bp, Probe Sequence
attttgctttagcatccttactctc

SEQ ID NO: 124929 - DNA, 25 bp, Probe Sequence
attttttacatgctgaattagcctc

SEQ ID NO: 124930 - DNA, 25 bp, Probe Sequence
atttttctacagcaactaccttctc

SEQ ID NO: 124931 - DNA, 25 bp, Probe Sequence
atttttctacagcaactaccttctc

SEQ ID NO: 124932 - DNA, 25 bp, Probe Sequence
attttatcaacagcactctaccatc

SEQ ID NO: 124933 - DNA, 25 bp, Probe Sequence
attttatcaacagcactctaccatc

SEQ ID NO: 124934 - DNA, 25 bp, Probe Sequence
attttacaacagttcatccattcac

SEQ ID NO: 124935 - DNA, 25 bp, Probe Sequence
attttccaatactgcatccatggcc

SEQ ID NO: 124936 - DNA, 25 bp, Probe Sequence
attttcaaacactatgacacagacc

SEQ ID NO: 124937 - DNA, 25 bp, Probe Sequence
atttatcaaaagccatccacaagtc

SEQ ID NO: 124938 - DNA, 25 bp, Probe Sequence
attttctttatgtttcaccagctca

SEQ ID NO: 124939 - DNA, 25 bp, Probe Sequence
attttcctgtagtttagcttcgttg

SEQ ID NO: 124940 - DNA, 25 bp, Probe Sequence
attttccttggattgatatcttctt

SEQ ID NO: 124941 - DNA, 25 bp, Probe Sequence
attttgcaattgagtgacacttcat

SEQ ID NO: 124942 - DNA, 25 bp, Probe Sequence
attttccatcatattggcactgcta

SEQ ID NO: 124943 - DNA, 25 bp, Probe Sequence
attttccaacataatggattaatgt

SEQ ID NO: 124944 - DNA, 25 bp, Probe Sequence
atttcctgaccaaattgttttgtgg

SEQ ID NO: 124945 - DNA, 25 bp, Probe Sequence
attttcttccattcttgtcattggt

SEQ ID NO: 124946 - DNA, 25 bp, Probe Sequence
atttctcttcttcctgttattggta

SEQ ID NO: 124947 - DNA, 25 bp, Probe Sequence
atttctcttcttcctgttattggta

SEQ ID NO: 124948 - DNA, 25 bp, Probe Sequence
atttgtttgttgctggtatatagaa

SEQ ID NO: 124949 - DNA, 25 bp, Probe Sequence
attttctatgttctgacactcacag

SEQ ID NO: 124950 - DNA, 25 bp, Probe Sequence
atttccagatgttcttaatccaggg

SEQ ID NO: 124951 - DNA, 25 bp, Probe Sequence
atattccagaaatttttgaaagcag

SEQ ID NO: 124952 - DNA, 25 bp, Probe Sequence
atttcctcaacatttttaagccaat

SEQ ID NO: 124953 - DNA, 25 bp, Probe Sequence
atttttctgtattctactacgaaat

SEQ ID NO: 124954 - DNA, 25 bp, Probe Sequence
attttatcgtcaattataagccaaa

SEQ ID NO: 124955 - DNA, 25 bp, Probe Sequence
attttatcttgtcaattatgccaaa

SEQ ID NO: 124956 - DNA, 25 bp, Probe Sequence
atttttgcaattcaggaaacaagca

SEQ ID NO: 124957 - DNA, 25 bp, Probe Sequence
attttatcaaagcagcagccaaaga

SEQ ID NO: 124958 - DNA, 25 bp, Probe Sequence
atttttcagatacaccacatacata

SEQ ID NO: 124959 - DNA, 25 bp, Probe Sequence
atttttccatcatatctcaaagtaa

SEQ ID NO: 124960 - DNA, 25 bp, Probe Sequence
attttcccattctactctagaaagc

SEQ ID NO: 124961 - DNA, 25 bp, Probe Sequence
attttgccacagactttgaagaaac

SEQ ID NO: 124962 - DNA, 25 bp, Probe Sequence
atttatggacgttgtagaaatgtac

SEQ ID NO: 124963 - DNA, 25 bp, Probe Sequence
atttttatcgtcgtatactgagtac

SEQ ID NO: 124964 - DNA, 25 bp, Probe Sequence
attttattttcttcattttgttctg

SEQ ID NO: 124965 - DNA, 25 bp, Probe Sequence
attttattgttttaacgtgtatgca

SEQ ID NO: 124966 - DNA, 25 bp, Probe Sequence
atttgtatttttttaatcttctgag

SEQ ID NO: 124967 - DNA, 25 bp, Probe Sequence
attttgcattttcatctactcattt

SEQ ID NO: 124968 - DNA, 25 bp, Probe Sequence
atttttgcttgtgttagatcattat

SEQ ID NO: 124969 - DNA, 25 bp, Probe Sequence
attttctctgaaactataacattat

SEQ ID NO: 124970 - DNA, 25 bp, Probe Sequence
attttcgctaaacttctgactttca

SEQ ID NO: 124971 - DNA, 25 bp, Probe Sequence
atttttctaaggatgcttgcattta

SEQ ID NO: 124972 - DNA, 25 bp, Probe Sequence
atttttattcagcagtgttctttaa

SEQ ID NO: 124973 - DNA, 25 bp, Probe Sequence
attttcacattagggctttaaatga

SEQ ID NO: 124974 - DNA, 25 bp, Probe Sequence
attttcctcctcactgttaataatc

SEQ ID NO: 124975 - DNA, 25 bp, Probe Sequence
atacttccacatgtcccttaaaaag

SEQ ID NO: 124976 - DNA, 25 bp, Probe Sequence
atacttatactaccaccctataatg

SEQ ID NO: 124977 - DNA, 25 bp, Probe Sequence
atttattactattccgttatatatc

SEQ ID NO: 124978 - DNA, 25 bp, Probe Sequence
atttatctcctgtctacagtttaat

SEQ ID NO: 124979 - DNA, 25 bp, Probe Sequence
atttatcttcatttgaatgtcttct

SEQ ID NO: 124980 - DNA, 25 bp, Probe Sequence
attttattcaatccatattttctct

SEQ ID NO: 124981 - DNA, 25 bp, Probe Sequence
attttttcaatgactacctctccat

SEQ ID NO: 124982 - DNA, 25 bp, Probe Sequence
atttctaccagtcctgggtcacaat

SEQ ID NO: 124983 - DNA, 25 bp, Probe Sequence
atttataccttctaggagctcctat

SEQ ID NO: 124984 - DNA, 25 bp, Probe Sequence
atttataacttggaaatgccttatt

SEQ ID NO: 124985 - DNA, 25 bp, Probe Sequence
atttataactcagaccccctgatct

SEQ ID NO: 124986 - DNA, 25 bp, Probe Sequence
atttggcaactgacaacccaccatt

SEQ ID NO: 124987 - DNA, 25 bp, Probe Sequence
atttggtcactcaagccatcacaaa

SEQ ID NO: 124988 - DNA, 25 bp, Probe Sequence
atttatctccacactagcagagacc

SEQ ID NO: 124989 - DNA, 25 bp, Probe Sequence
atattacagccagtttggggcccct

SEQ ID NO: 124990 - DNA, 25 bp, Probe Sequence
atattgggcgatttgggggctcggg

SEQ ID NO: 124991 - DNA, 25 bp, Probe Sequence
atatgtgtgaggtagctgagcgtgg

SEQ ID NO: 124992 - DNA, 25 bp, Probe Sequence
atatagtcaagtaggagcagtggaa

SEQ ID NO: 124993 - DNA, 25 bp, Probe Sequence
atttgtcaaggggatggtggcaaac

SEQ ID NO: 124994 - DNA, 25 bp, Probe Sequence
attttttgtgaatggttgcaaagtg

SEQ ID NO: 124995 - DNA, 25 bp, Probe Sequence
atttggttagaagggttacatggtg

SEQ ID NO: 124996 - DNA, 25 bp, Probe Sequence
atttggttaacccattgctggcagt

SEQ ID NO: 124997 - DNA, 25 bp, Probe Sequence
atttgttttctcggcagatctgcaa

SEQ ID NO: 124998 - DNA, 25 bp, Probe Sequence
atttttttccccatgagcatatcat

SEQ ID NO: 124999 - DNA, 25 bp, Probe Sequence
atttattttccgaatgtatcattga

SEQ ID NO: 125000 - DNA, 25 bp, Probe Sequence
atttttctaccaaatttcattctat

SEQ ID NO: 125001 - DNA, 25 bp, Probe Sequence
attttttatccattttcatcttctt

SEQ ID NO: 125002 - DNA, 25 bp, Probe Sequence
attttctatatttgtaactttgcat

SEQ ID NO: 125003 - DNA, 25 bp, Probe Sequence
attttctatgaatgacaccttggtc

SEQ ID NO: 125004 - DNA, 25 bp, Probe Sequence
atttttgatagctgtcccatctggt

SEQ ID NO: 125005 - DNA, 25 bp, Probe Sequence
atttattgactgtgtctggcagatg

SEQ ID NO: 125006 - DNA, 25 bp, Probe Sequence
attttcgacaggttgctgccagaga

SEQ ID NO: 125007 - DNA, 25 bp, Probe Sequence
atttatcggcagcttctgtggatga

SEQ ID NO: 125008 - DNA, 25 bp, Probe Sequence
atttctgaggagctgtcaggccatg

SEQ ID NO: 125009 - DNA, 25 bp, Probe Sequence
atttcatggagctgtgtaccatcga

SEQ ID NO: 125010 - DNA, 25 bp, Probe Sequence
atttcagatacaagcatgtaacaaa

SEQ ID NO: 125011 - DNA, 25 bp, Probe Sequence
atttagatcacatgagagcaaagac

SEQ ID NO: 125012 - DNA, 25 bp, Probe Sequence
atttcatctcactgagcctatttct

SEQ ID NO: 125013 - DNA, 25 bp, Probe Sequence
atttcagatcactgcaacctctgcc

SEQ ID NO: 125014 - DNA, 25 bp, Probe Sequence
atttatatgcaatgccactgcatcc

SEQ ID NO: 125015 - DNA, 25 bp, Probe Sequence
atttcagatggtagccagtgactca

SEQ ID NO: 125016 - DNA, 25 bp, Probe Sequence
atttggattgccctctttcaatttc

SEQ ID NO: 125017 - DNA, 25 bp, Probe Sequence
attttaggcctgcctttgacacttt

SEQ ID NO: 125018 - DNA, 25 bp, Probe Sequence
atttatagccaactgattttcaata

SEQ ID NO: 125019 - DNA, 25 bp, Probe Sequence
attttagcagaggctgttccatgca

SEQ ID NO: 125020 - DNA, 25 bp, Probe Sequence
atttgcaagatgctcagtccctggt

SEQ ID NO: 125021 - DNA, 25 bp, Probe Sequence
atttgcaagcagcctgttcatcggg

SEQ ID NO: 125022 - DNA, 25 bp, Probe Sequence
atttgctgaatgcttgctacgagcg

SEQ ID NO: 125023 - DNA, 25 bp, Probe Sequence
atttgctcctgcacatgctttggag

SEQ ID NO: 125024 - DNA, 25 bp, Probe Sequence
atttgctcctgcacatgctttggag

SEQ ID NO: 125025 - DNA, 25 bp, Probe Sequence
atttgctcctgcacatgctttggag

SEQ ID NO: 125026 - DNA, 25 bp, Probe Sequence
atttccgtctctggtgtagctgatg

SEQ ID NO: 125027 - DNA, 25 bp, Probe Sequence
atttcctgtttgctgtatgggctcg

SEQ ID NO: 125028 - DNA, 25 bp, Probe Sequence
atttgcctgctgctgctaggaggag

SEQ ID NO: 125029 - DNA, 25 bp, Probe Sequence
atttcttgagattctggtcaaatgt

SEQ ID NO: 125030 - DNA, 25 bp, Probe Sequence
atttttggacattttatagtgtagt

SEQ ID NO: 125031 - DNA, 25 bp, Probe Sequence
atttttagcaattttatatttagat

SEQ ID NO: 125032 - DNA, 25 bp, Probe Sequence
attttatggcatgtcttctatttaa

SEQ ID NO: 125033 - DNA, 25 bp, Probe Sequence
attttcatgttaatttatctgcttg

SEQ ID NO: 125034 - DNA, 25 bp, Probe Sequence
attttctctcattcttgtattgcct

SEQ ID NO: 125035 - DNA, 25 bp, Probe Sequence
attttcttcagctttaatttcataa

SEQ ID NO: 125036 - DNA, 25 bp, Probe Sequence
attttcaccccaataatgttctata

SEQ ID NO: 125037 - DNA, 25 bp, Probe Sequence
attttaatcccaaacatcttcctga

SEQ ID NO: 125038 - DNA, 25 bp, Probe Sequence
atttataaccaaaggatcttgttca

SEQ ID NO: 125039 - DNA, 25 bp, Probe Sequence
atttatgaatcgtaggactgctgtg

SEQ ID NO: 125040 - DNA, 25 bp, Probe Sequence
atttattatttaccaatgctgcatc

SEQ ID NO: 125041 - DNA, 25 bp, Probe Sequence
atttacattccccagaatgtgcctc

SEQ ID NO: 125042 - DNA, 25 bp, Probe Sequence
attttcatgtgttccaacagggtgc

SEQ ID NO: 125043 - DNA, 25 bp, Probe Sequence
attttattttcccctgtggtcagtg

SEQ ID NO: 125044 - DNA, 25 bp, Probe Sequence
atttttgtgaacagcctgatgtttg

SEQ ID NO: 125045 - DNA, 25 bp, Probe Sequence
atttcacttatagacctgattttct

SEQ ID NO: 125046 - DNA, 25 bp, Probe Sequence
atttacatttgagaagcccttgcct

SEQ ID NO: 125047 - DNA, 25 bp, Probe Sequence
atttgtatcttagacgacctgtcca

SEQ ID NO: 125048 - DNA, 25 bp, Probe Sequence
attttatgcaacacaaacactgtcc

SEQ ID NO: 125049 - DNA, 25 bp, Probe Sequence
attttagcatccactatactcatct

SEQ ID NO: 125050 - DNA, 25 bp, Probe Sequence
atttatccatcatccaagaccatcc

SEQ ID NO: 125051 - DNA, 25 bp, Probe Sequence
attttcaagctttcaaatcctccct

SEQ ID NO: 125052 - DNA, 25 bp, Probe Sequence
attttcaaggtttacgcactgcctc

SEQ ID NO: 125053 - DNA, 25 bp, Probe Sequence
attttagagtgtcttaatccagtct

SEQ ID NO: 125054 - DNA, 25 bp, Probe Sequence
atttttggtattttacatacctgct

SEQ ID NO: 125055 - DNA, 25 bp, Probe Sequence
atttcttagtattatctagtaccca

SEQ ID NO: 125056 - DNA, 25 bp, Probe Sequence
atttttcatgtgcatcttttgtcga

SEQ ID NO: 125057 - DNA, 25 bp, Probe Sequence
attttcactggcttctctatattcc

SEQ ID NO: 125058 - DNA, 25 bp, Probe Sequence
attttagctgctttatcatctttac

SEQ ID NO: 125059 - DNA, 25 bp, Probe Sequence
atttttgagatcttactgcttgtca

SEQ ID NO: 125060 - DNA, 25 bp, Probe Sequence
attttatcaattacctcttgtaagg

SEQ ID NO: 125061 - DNA, 25 bp, Probe Sequence
attttactatctccttgttatgaag

SEQ ID NO: 125062 - DNA, 25 bp, Probe Sequence
attttaaatagcgtattgtatatac

SEQ ID NO: 125063 - DNA, 25 bp, Probe Sequence
atttaatatcaactgcattatgtat

SEQ ID NO: 125064 - DNA, 25 bp, Probe Sequence
atttgaaactgacctgccatgagat

SEQ ID NO: 125065 - DNA, 25 bp, Probe Sequence
atttgactacaaccgaagtgcagat

SEQ ID NO: 125066 - DNA, 25 bp, Probe Sequence
atttcaccaagccgcaggatggcga

SEQ ID NO: 125067 - DNA, 25 bp, Probe Sequence
atttcccaatgcctctctgtgggag

SEQ ID NO: 125068 - DNA, 25 bp, Probe Sequence
atttcctcaacatactgtgtcaggt

SEQ ID NO: 125069 - DNA, 25 bp, Probe Sequence
atttctcccaattgtgctttaggtt

SEQ ID NO: 125070 - DNA, 25 bp, Probe Sequence
attttattccatttgcttgttttgt

SEQ ID NO: 125071 - DNA, 25 bp, Probe Sequence
attttattccatttgcttgttttgt

SEQ ID NO: 125072 - DNA, 25 bp, Probe Sequence
attttattccatttgcttgttttgt

SEQ ID NO: 125073 - DNA, 25 bp, Probe Sequence
atttttcctatattgcattaatttt

SEQ ID NO: 125074 - DNA, 25 bp, Probe Sequence
atttatttcttattgctcctaatta

SEQ ID NO: 125075 - DNA, 25 bp, Probe Sequence
atttattgctttaatctgcactcat

SEQ ID NO: 125076 - DNA, 25 bp, Probe Sequence
atttttttatctaatgatcatcatg

SEQ ID NO: 125077 - DNA, 25 bp, Probe Sequence
atttaattttccaacataatggatt

SEQ ID NO: 125078 - DNA, 25 bp, Probe Sequence
atttcaatttcttgctaataaactc

SEQ ID NO: 125079 - DNA, 25 bp, Probe Sequence
atttcacaatgtcgtgctaaataaa

SEQ ID NO: 125080 - DNA, 25 bp, Probe Sequence
atttgcctgctgtgttacaaaaata

SEQ ID NO: 125081 - DNA, 25 bp, Probe Sequence
atttgacttgcacctataaaattaa

SEQ ID NO: 125082 - DNA, 25 bp, Probe Sequence
atttaggtgacactatagaacaagt

SEQ ID NO: 125083 - DNA, 25 bp, Probe Sequence
atttagcagtaaactgagagtagag

SEQ ID NO: 125084 - DNA, 25 bp, Probe Sequence
atttcagaaccaattgcgagtcatg

SEQ ID NO: 125085 - DNA, 25 bp, Probe Sequence
atttgcagcaaactggatggaattg

SEQ ID NO: 125086 - DNA, 25 bp, Probe Sequence
atttctgcagaacttactgtacagt

SEQ ID NO: 125087 - DNA, 25 bp, Probe Sequence
atatttgggagtgactgcaagcatt

SEQ ID NO: 125088 - DNA, 25 bp, Probe Sequence
atttttgtagatgagctgtgtgcct

SEQ ID NO: 125089 - DNA, 25 bp, Probe Sequence
atttttgcctggggcttgtgcagct

SEQ ID NO: 125090 - DNA, 25 bp, Probe Sequence
atttttgcacgggtcagattatttt

SEQ ID NO: 125091 - DNA, 25 bp, Probe Sequence
attttatgcctcagtatattattat

SEQ ID NO: 125092 - DNA, 25 bp, Probe Sequence
attttagctctgaaggatttagtag

SEQ ID NO: 125093 - DNA, 25 bp, Probe Sequence
atttctcgttcatgttttagcaaga

SEQ ID NO: 125094 - DNA, 25 bp, Probe Sequence
atttggctgttctggtttcaggcaa

SEQ ID NO: 125095 - DNA, 25 bp, Probe Sequence
atttagctgtggtgtgtgcttcaga

SEQ ID NO: 125096 - DNA, 25 bp, Probe Sequence
atattccgaggagctgtttccagaa

SEQ ID NO: 125097 - DNA, 25 bp, Probe Sequence
atttccgcaggagcctgggcaagaa

SEQ ID NO: 125098 - DNA, 25 bp, Probe Sequence
atttcctgaggatatcgtgagccga

SEQ ID NO: 125099 - DNA, 25 bp, Probe Sequence
atttagcatggatcttcgtaccaag

SEQ ID NO: 125100 - DNA, 25 bp, Probe Sequence
atttataggaaccttgtcctctggt

SEQ ID NO: 125101 - DNA, 25 bp, Probe Sequence
atttaatggaattcttttctttgat

SEQ ID NO: 125102 - DNA, 25 bp, Probe Sequence
atttaaggaatatctcttgatatag

SEQ ID NO: 125103 - DNA, 25 bp, Probe Sequence
atttgagaagaaatactcctgtatt

SEQ ID NO: 125104 - DNA, 25 bp, Probe Sequence
atttgtataaagatttttcatgtga

SEQ ID NO: 125105 - DNA, 25 bp, Probe Sequence
atttccatttagatttttgcctatc

SEQ ID NO: 125106 - DNA, 25 bp, Probe Sequence
atttctggtttggtttgttctctag

SEQ ID NO: 125107 - DNA, 25 bp, Probe Sequence
atttcatttcagggtcttggctgcc

SEQ ID NO: 125108 - DNA, 25 bp, Probe Sequence
atttgatttctgcattttggccctc

SEQ ID NO: 125109 - DNA, 25 bp, Probe Sequence
atttgcaatattcctttgggcctct

SEQ ID NO: 125110 - DNA, 25 bp, Probe Sequence
attttatctttcatgtgggctaatg

SEQ ID NO: 125111 - DNA, 25 bp, Probe Sequence
attttattttgcttatttttatgat

SEQ ID NO: 125112 - DNA, 25 bp, Probe Sequence
attttattttgctgagttgttctaa

SEQ ID NO: 125113 - DNA, 25 bp, Probe Sequence
atttacattttatatttttgtacat

SEQ ID NO: 125114 - DNA, 25 bp, Probe Sequence
atttcctttttgcatgttatagata

SEQ ID NO: 125115 - DNA, 25 bp, Probe Sequence
atttcttttatgggtctgttagtca

SEQ ID NO: 125116 - DNA, 25 bp, Probe Sequence
atttttgtacatcgcttctttttca

SEQ ID NO: 125117 - DNA, 25 bp, Probe Sequence
attttatcatatctgcttctgtttt

SEQ ID NO: 125118 - DNA, 25 bp, Probe Sequence
atttctacatagtcagctacttctg

SEQ ID NO: 125119 - DNA, 25 bp, Probe Sequence
atttctcagcattctcaagagttta

SEQ ID NO: 125120 - DNA, 25 bp, Probe Sequence
atcttcatcagtgacgaggtatatc

SEQ ID NO: 125121 - DNA, 25 bp, Probe Sequence
atttatgctgctagactgtgggtca

SEQ ID NO: 125122 - DNA, 25 bp, Probe Sequence
atattcagcttgcacatttggtaat

SEQ ID NO: 125123 - DNA, 25 bp, Probe Sequence
atttacttggacttgcatgtgatgt

SEQ ID NO: 125124 - DNA, 25 bp, Probe Sequence
atttgacaatgaacatctgaggctg

SEQ ID NO: 125125 - DNA, 25 bp, Probe Sequence
atttataaagatctggcctgttcct

SEQ ID NO: 125126 - DNA, 25 bp, Probe Sequence
atttaaatacatcgtgacctgtgta

SEQ ID NO: 125127 - DNA, 25 bp, Probe Sequence
atttaattacattgggagcagttca

SEQ ID NO: 125128 - DNA, 25 bp, Probe Sequence
atttcaactagatcaagacatgtta

SEQ ID NO: 125129 - DNA, 25 bp, Probe Sequence
atttactctagtccaagccatcatt

SEQ ID NO: 125130 - DNA, 25 bp, Probe Sequence
atttatatctatacctagcaccagt

SEQ ID NO: 125131 - DNA, 25 bp, Probe Sequence
atttgattaaacctagacgcattag

SEQ ID NO: 125132 - DNA, 25 bp, Probe Sequence
atttatgtaaacttatgactcttca

SEQ ID NO: 125133 - DNA, 25 bp, Probe Sequence
atttttgacaaatatagcatctata

SEQ ID NO: 125134 - DNA, 25 bp, Probe Sequence
atttttgattaattgatttccatat

SEQ ID NO: 125135 - DNA, 25 bp, Probe Sequence
attttttatagcctgtattcacaat

SEQ ID NO: 125136 - DNA, 25 bp, Probe Sequence
attttttccatgtttcattgcctga

SEQ ID NO: 125137 - DNA, 25 bp, Probe Sequence
atttctgcattcgagtcttaaccat

SEQ ID NO: 125138 - DNA, 25 bp, Probe Sequence
atttctgaagacccatctcaacgtt

SEQ ID NO: 125139 - DNA, 25 bp, Probe Sequence
atttcattaagatctctaatctgtt

SEQ ID NO: 125140 - DNA, 25 bp, Probe Sequence
atttattgtctattttatatctgtt

SEQ ID NO: 125141 - DNA, 25 bp, Probe Sequence
atttcatttctggagctccatttgt

SEQ ID NO: 125142 - DNA, 25 bp, Probe Sequence
atattcttttacaccaattcttcct

SEQ ID NO: 125143 - DNA, 25 bp, Probe Sequence
atttctttttctgtattttctctct

SEQ ID NO: 125144 - DNA, 25 bp, Probe Sequence
atttctctttactggatgtttattt

SEQ ID NO: 125145 - DNA, 25 bp, Probe Sequence
atttcattttggtggtgctaatgtt

SEQ ID NO: 125146 - DNA, 25 bp, Probe Sequence
atttatttggagtggaggcattgtt

SEQ ID NO: 125147 - DNA, 25 bp, Probe Sequence
atatttttgggttacttcagtgtgt

SEQ ID NO: 125148 - DNA, 25 bp, Probe Sequence
attttttaggttaactgagctgctt

SEQ ID NO: 125149 - DNA, 25 bp, Probe Sequence
attttttattgtaacattgtatgat

SEQ ID NO: 125150 - DNA, 25 bp, Probe Sequence
atttccttatctctcagtggaagat

SEQ ID NO: 125151 - DNA, 25 bp, Probe Sequence
atttcttttgcccagcagggtaata

SEQ ID NO: 125152 - DNA, 25 bp, Probe Sequence
atttttgcatatgtatagaggataa

SEQ ID NO: 125153 - DNA, 25 bp, Probe Sequence
atttttcaaggattgcactgagtaa

SEQ ID NO: 125154 - DNA, 25 bp, Probe Sequence
atttcttcctgattgtgcctagtat

SEQ ID NO: 125155 - DNA, 25 bp, Probe Sequence
atttctacctaagtcagctttcatc

SEQ ID NO: 125156 - DNA, 25 bp, Probe Sequence
atttgcccgctaatcaagcctaacc

SEQ ID NO: 125157 - DNA, 25 bp, Probe Sequence
atttcaccagcttacaactcaaacc

SEQ ID NO: 125158 - DNA, 25 bp, Probe Sequence
atttaccaatgctgcatcatctcag

SEQ ID NO: 125159 - DNA, 25 bp, Probe Sequence
atttttgcaatctactcatctgaca

SEQ ID NO: 125160 - DNA, 25 bp, Probe Sequence
atttatgtgaacttgctcctgcacc

SEQ ID NO: 125161 - DNA, 25 bp, Probe Sequence
atttagtgacacatttccatcctat

SEQ ID NO: 125162 - DNA, 25 bp, Probe Sequence
atttatgatgttgctttccactcgt

SEQ ID NO: 125163 - DNA, 25 bp, Probe Sequence
atttagatttttctccatcctgttt

SEQ ID NO: 125164 - DNA, 25 bp, Probe Sequence
atttagctttgcacttctaactgtg

SEQ ID NO: 125165 - DNA, 25 bp, Probe Sequence
atttgagcttacagttctgcaggct

SEQ ID NO: 125166 - DNA, 25 bp, Probe Sequence
atattggcacgaataggtagcggaa

SEQ ID NO: 125167 - DNA, 25 bp, Probe Sequence
atattggcctgagaggagagtggac

SEQ ID NO: 125168 - DNA, 25 bp, Probe Sequence
atttctgcttgagtatggtgttaac

SEQ ID NO: 125169 - DNA, 25 bp, Probe Sequence
atttctgagtatgaggcgggatcca

SEQ ID NO: 125170 - DNA, 25 bp, Probe Sequence
atttcttctcatcagactgggatcc

SEQ ID NO: 125171 - DNA, 25 bp, Probe Sequence
atttcattctgaccagacagatgta

SEQ ID NO: 125172 - DNA, 25 bp, Probe Sequence
atttcattgtgatcagctagcttat

SEQ ID NO: 125173 - DNA, 25 bp, Probe Sequence
atttcattgtgatcagctagcttat

SEQ ID NO: 125174 - DNA, 25 bp, Probe Sequence
atttactgttaactatctgtataga

SEQ ID NO: 125175 - DNA, 25 bp, Probe Sequence
atttactgtatatctactttggtat

SEQ ID NO: 125176 - DNA, 25 bp, Probe Sequence
atttgttgtgtactacgtttggtat

SEQ ID NO: 125177 - DNA, 25 bp, Probe Sequence
atttaatgctgatctactataaggt

SEQ ID NO: 125178 - DNA, 25 bp, Probe Sequence
atttaatctgcatctgttttagaaa

SEQ ID NO: 125179 - DNA, 25 bp, Probe Sequence
atttatattgcagtatcctttaaaa

SEQ ID NO: 125180 - DNA, 25 bp, Probe Sequence
atttatttgctgttccttgtctact

SEQ ID NO: 125181 - DNA, 25 bp, Probe Sequence
atttttgctggtccctagaccactt

SEQ ID NO: 125182 - DNA, 25 bp, Probe Sequence
atttttgtgacttcccagcactaga

SEQ ID NO: 125183 - DNA, 25 bp, Probe Sequence
atttcttgtaagtatggagcccaga

SEQ ID NO: 125184 - DNA, 25 bp, Probe Sequence
atttgggtctgagatcggcccagct

SEQ ID NO: 125185 - DNA, 25 bp, Probe Sequence
aactgggactatctagtcaacagat

SEQ ID NO: 125186 - DNA, 25 bp, Probe Sequence
atttgggccttgaagagtaattgac

SEQ ID NO: 125187 - DNA, 25 bp, Probe Sequence
atttgaggccatgcttaatatattt

SEQ ID NO: 125188 - DNA, 25 bp, Probe Sequence
atttagcagactgtggactgtaata

SEQ ID NO: 125189 - DNA, 25 bp, Probe Sequence
atttggcaactgtgggcaataatat

SEQ ID NO: 125190 - DNA, 25 bp, Probe Sequence
atggctaccgtctgggacagtatac

SEQ ID NO: 125191 - DNA, 25 bp, Probe Sequence
acgtgagccttatgggagcgtttcc

SEQ ID NO: 125192 - DNA, 25 bp, Probe Sequence
aggagaacccattgggcggtttcag

SEQ ID NO: 125193 - DNA, 25 bp, Probe Sequence
acttgaatcccatgggggtcccatg

SEQ ID NO: 125194 - DNA, 25 bp, Probe Sequence
atttgaacccatttgaggttcttca

SEQ ID NO: 125195 - DNA, 25 bp, Probe Sequence
atttacccgatatcaggttcttctt

SEQ ID NO: 125196 - DNA, 25 bp, Probe Sequence
ataacccactgaaacaggttttgtg

SEQ ID NO: 125197 - DNA, 25 bp, Probe Sequence
atttcccattgcatacaggttattg

SEQ ID NO: 125198 - DNA, 25 bp, Probe Sequence
atttcatccattattagcctggggt

SEQ ID NO: 125199 - DNA, 25 bp, Probe Sequence
atttcccactaaagagcttggattt

SEQ ID NO: 125200 - DNA, 25 bp, Probe Sequence
atttgaccctaaaatctatgtgttt

SEQ ID NO: 125201 - DNA, 25 bp, Probe Sequence
atatagactgcaaacaagtgcttgt

SEQ ID NO: 125202 - DNA, 25 bp, Probe Sequence
atataatggcatcacctggctttca

SEQ ID NO: 125203 - DNA, 25 bp, Probe Sequence
atttaggattcacgcaagtttcagt

SEQ ID NO: 125204 - DNA, 25 bp, Probe Sequence
atttagctgtttccaaactacagtc

SEQ ID NO: 125205 - DNA, 25 bp, Probe Sequence
atttactagtattcaaacgatatgt

SEQ ID NO: 125206 - DNA, 25 bp, Probe Sequence
atttacatagtttcaacctttctgc

SEQ ID NO: 125207 - DNA, 25 bp, Probe Sequence
atttatcagagcatgtcaccctttt

SEQ ID NO: 125208 - DNA, 25 bp, Probe Sequence
atttactcacattcacacgcgattg

SEQ ID NO: 125209 - DNA, 25 bp, Probe Sequence
atttcatccaactacttgtgatctc

SEQ ID NO: 125210 - DNA, 25 bp, Probe Sequence
atttctcaacatgcctggagatgcc

SEQ ID NO: 125211 - DNA, 25 bp, Probe Sequence
atttgctgcagagtcctatggagta

SEQ ID NO: 125212 - DNA, 25 bp, Probe Sequence
atttcactgacttctagcacggttg

SEQ ID NO: 125213 - DNA, 25 bp, Probe Sequence
atttctgcgaaagatcaaggtctgc

SEQ ID NO: 125214 - DNA, 25 bp, Probe Sequence
atatttgcagaaagtcgcatagggt

SEQ ID NO: 125215 - DNA, 25 bp, Probe Sequence
atatcttggaacttctgacagaggt

SEQ ID NO: 125216 - DNA, 25 bp, Probe Sequence
atatcggcgacattgtggacttggc

SEQ ID NO: 125217 - DNA, 25 bp, Probe Sequence
atttgtgcgagatgggaccagctct

SEQ ID NO: 125218 - DNA, 25 bp, Probe Sequence
atttgggcattacgatcacctctta

SEQ ID NO: 125219 - DNA, 25 bp, Probe Sequence
atttctggttatcatttctcttccc

SEQ ID NO: 125220 - DNA, 25 bp, Probe Sequence
atttagatcttatattggtttgcac

SEQ ID NO: 125221 - DNA, 25 bp, Probe Sequence
atttagatctttccatttttctcca

SEQ ID NO: 125222 - DNA, 25 bp, Probe Sequence
atttgagactttctgtcgcatccac

SEQ ID NO: 125223 - DNA, 25 bp, Probe Sequence
atttgcgacttttgaaggctcctct

SEQ ID NO: 125224 - DNA, 25 bp, Probe Sequence
atattcgaattgtaaagatgctttt

SEQ ID NO: 125225 - DNA, 25 bp, Probe Sequence
atttcagccactttcaagatgttag

SEQ ID NO: 125226 - DNA, 25 bp, Probe Sequence
atttcacagactttatcaatgtata

SEQ ID NO: 125227 - DNA, 25 bp, Probe Sequence
atttcaagcctagttgctaatatag

SEQ ID NO: 125228 - DNA, 25 bp, Probe Sequence
atttcaaaccctgcttatgatatga

SEQ ID NO: 125229 - DNA, 25 bp, Probe Sequence
atttaaattctgtacttatatctgt

SEQ ID NO: 125230 - DNA, 25 bp, Probe Sequence
atttagtttctatctttccaggcaa

SEQ ID NO: 125231 - DNA, 25 bp, Probe Sequence
atttcattcctcaaacctttcagga

SEQ ID NO: 125232 - DNA, 25 bp, Probe Sequence
atttcatactccagaactttcatgt

SEQ ID NO: 125233 - DNA, 25 bp, Probe Sequence
atttgacaccgcagttctgttcagc

SEQ ID NO: 125234 - DNA, 25 bp, Probe Sequence
atttgaagcctgagtgtgtgtacga

SEQ ID NO: 125235 - DNA, 25 bp, Probe Sequence
atttatacctattgttcatgccacg

SEQ ID NO: 125236 - DNA, 25 bp, Probe Sequence
atttctagttattattctagccagt

SEQ ID NO: 125237 - DNA, 25 bp, Probe Sequence
atttgtattttatgatcttggctgt

SEQ ID NO: 125238 - DNA, 25 bp, Probe Sequence
atttatttattatactagctgttaa

SEQ ID NO: 125239 - DNA, 25 bp, Probe Sequence
atttcttttctatatgtcacttttt

SEQ ID NO: 125240 - DNA, 25 bp, Probe Sequence
atttatttattatatgtgcacttca

SEQ ID NO: 125241 - DNA, 25 bp, Probe Sequence
atttatattctttgagtgtgagctt

SEQ ID NO: 125242 - DNA, 25 bp, Probe Sequence
atttatagtcattctaactgcactt

SEQ ID NO: 125243 - DNA, 25 bp, Probe Sequence
atttcagagtattgcttttcacatt

SEQ ID NO: 125244 - DNA, 25 bp, Probe Sequence
atttacagttgcccatgattacatt

SEQ ID NO: 125245 - DNA, 25 bp, Probe Sequence
atttacttcatccaatatttatctg

SEQ ID NO: 125246 - DNA, 25 bp, Probe Sequence
atttacctactctatcattattcct

SEQ ID NO: 125247 - DNA, 25 bp, Probe Sequence
atatccacctcctttaaatactcta

SEQ ID NO: 125248 - DNA, 25 bp, Probe Sequence
atatcccgtcctcaaatattgcttg

SEQ ID NO: 125249 - DNA, 25 bp, Probe Sequence
atcaccccctttgcaatatattttt

SEQ ID NO: 125250 - DNA, 25 bp, Probe Sequence
ataacccactttatttgaatgtgtt

SEQ ID NO: 125251 - DNA, 25 bp, Probe Sequence
aacctccctgttcttatgaattcga

SEQ ID NO: 125252 - DNA, 25 bp, Probe Sequence
aacctccctgttcttatgaattcga

SEQ ID NO: 125253 - DNA, 25 bp, Probe Sequence
atacgtctccttgtttaaaatctga

SEQ ID NO: 125254 - DNA, 25 bp, Probe Sequence
atttactcctctgccaaaaagttga

SEQ ID NO: 125255 - DNA, 25 bp, Probe Sequence
atttagctctctggcccacagaaat

SEQ ID NO: 125256 - DNA, 25 bp, Probe Sequence
atttgcaccttagaacaataatcat

SEQ ID NO: 125257 - DNA, 25 bp, Probe Sequence
atttgcaccttagaacaataatcat

SEQ ID NO: 125258 - DNA, 25 bp, Probe Sequence
atattccctgtagcaacatctcttc

SEQ ID NO: 125259 - DNA, 25 bp, Probe Sequence
atttcactcgtctaaacactttcaa

SEQ ID NO: 125260 - DNA, 25 bp, Probe Sequence
atttccataaaaaccatttacatag

SEQ ID NO: 125261 - DNA, 25 bp, Probe Sequence
atttgcaaagactgacacttctaca

SEQ ID NO: 125262 - DNA, 25 bp, Probe Sequence
atttccaaagaatcagtgtcacaca

SEQ ID NO: 125263 - DNA, 25 bp, Probe Sequence
atttcctcacattataaaacacaag

SEQ ID NO: 125264 - DNA, 25 bp, Probe Sequence
atttgctcccattcatgctgaggct

SEQ ID NO: 125265 - DNA, 25 bp, Probe Sequence
atttcgtgccattcaggaattctgg

SEQ ID NO: 125266 - DNA, 25 bp, Probe Sequence
atttcaggtgcattgagaataagtg

SEQ ID NO: 125267 - DNA, 25 bp, Probe Sequence
atttcagcctgattgtgtttgaagt

SEQ ID NO: 125268 - DNA, 25 bp, Probe Sequence
atttactctgttttcttatagtctt

SEQ ID NO: 125269 - DNA, 25 bp, Probe Sequence
atttatctcttctatgtctagtatt

SEQ ID NO: 125270 - DNA, 25 bp, Probe Sequence
atttatctcttcgctgctgaaataa

SEQ ID NO: 125271 - DNA, 25 bp, Probe Sequence
atttacatccttaccgaatatataa

SEQ ID NO: 125272 - DNA, 25 bp, Probe Sequence
atattagatccatttctgcagaact

SEQ ID NO: 125273 - DNA, 25 bp, Probe Sequence
atttaagacatttatgagacatatt

SEQ ID NO: 125274 - DNA, 25 bp, Probe Sequence
atttaaactcaatcaccatagctga

SEQ ID NO: 125275 - DNA, 25 bp, Probe Sequence
atttaaatcctaacacttcactaat

SEQ ID NO: 125276 - DNA, 25 bp, Probe Sequence
atattgtaactgataatttccataa

SEQ ID NO: 125277 - DNA, 25 bp, Probe Sequence
atttatgaattttatattccgtgaa

SEQ ID NO: 125278 - DNA, 25 bp, Probe Sequence
atttcaatgttgcagattcccagga

SEQ ID NO: 125279 - DNA, 25 bp, Probe Sequence
atttgcaatttcatatataccaggc

SEQ ID NO: 125280 - DNA, 25 bp, Probe Sequence
atttcatgtttccaatgtacctgat

SEQ ID NO: 125281 - DNA, 25 bp, Probe Sequence
atattacttgcacgaagtacttgat

SEQ ID NO: 125282 - DNA, 25 bp, Probe Sequence
atttcactagaactgtgtacttgat

SEQ ID NO: 125283 - DNA, 25 bp, Probe Sequence
atttcaagcagaagttgccgcccta

SEQ ID NO: 125284 - DNA, 25 bp, Probe Sequence
atataaacagttatgtcccctataa

SEQ ID NO: 125285 - DNA, 25 bp, Probe Sequence
atattaacattctaagtctaccaaa

SEQ ID NO: 125286 - DNA, 25 bp, Probe Sequence
atattaacattctaagtctaccaaa

SEQ ID NO: 125287 - DNA, 25 bp, Probe Sequence
atattaactaaatttccctcatcaa

SEQ ID NO: 125288 - DNA, 25 bp, Probe Sequence
atttaactcatatgatctcccttca

SEQ ID NO: 125289 - DNA, 25 bp, Probe Sequence
atttgaaatgtttactgacacttac

SEQ ID NO: 125290 - DNA, 25 bp, Probe Sequence
atttaactttaactatgcctatcgc

SEQ ID NO: 125291 - DNA, 25 bp, Probe Sequence
atatccaggctataaatatcctttc

SEQ ID NO: 125292 - DNA, 25 bp, Probe Sequence
atttatgtctcatgtaatttgcatt

SEQ ID NO: 125293 - DNA, 25 bp, Probe Sequence
atttgtagtcattgtatcacggatt

SEQ ID NO: 125294 - DNA, 25 bp, Probe Sequence
atttctactgatctgatctcactgt

SEQ ID NO: 125295 - DNA, 25 bp, Probe Sequence
atttctcagcatcactatgtagcat

SEQ ID NO: 125296 - DNA, 25 bp, Probe Sequence
atttctcctctaaatgcatgaaatc

SEQ ID NO: 125297 - DNA, 25 bp, Probe Sequence
atttgctccttaatgatgaatttat

SEQ ID NO: 125298 - DNA, 25 bp, Probe Sequence
atttctttctgactagacttgtgat

SEQ ID NO: 125299 - DNA, 25 bp, Probe Sequence
atttcatttaagagatcatttcatt

SEQ ID NO: 125300 - DNA, 25 bp, Probe Sequence
atttcatttttgatgtctatcttat

SEQ ID NO: 125301 - DNA, 25 bp, Probe Sequence
atttgattttagttcaccacattca

SEQ ID NO: 125302 - DNA, 25 bp, Probe Sequence
atttgatttagccaacatgcctttc

SEQ ID NO: 125303 - DNA, 25 bp, Probe Sequence
atatttggtggccaccataagtcct

SEQ ID NO: 125304 - DNA, 25 bp, Probe Sequence
atatttaggccccatccaagaccta

SEQ ID NO: 125305 - DNA, 25 bp, Probe Sequence
atatcttaaccacatcaaggacctg

SEQ ID NO: 125306 - DNA, 25 bp, Probe Sequence
atatcttaactgtagccaaggatcc

SEQ ID NO: 125307 - DNA, 25 bp, Probe Sequence
atattagacattttggagggaccag

SEQ ID NO: 125308 - DNA, 25 bp, Probe Sequence
atatctaggcattttcttggtagca

SEQ ID NO: 125309 - DNA, 25 bp, Probe Sequence
atttcagtgcatctttgggtaatgg

SEQ ID NO: 125310 - DNA, 25 bp, Probe Sequence
atttctttcatgttgtgggttctgg

SEQ ID NO: 125311 - DNA, 25 bp, Probe Sequence
atttctttgcacaaggggtcatgct

SEQ ID NO: 125312 - DNA, 25 bp, Probe Sequence
atttcctcacaaaagagagtcctca

SEQ ID NO: 125313 - DNA, 25 bp, Probe Sequence
atttctctcacttaagcaggatact

SEQ ID NO: 125314 - DNA, 25 bp, Probe Sequence
atgtttctccttcacaagtaacaga

SEQ ID NO: 125315 - DNA, 25 bp, Probe Sequence
atttcttcatttcagcaatgttaca

SEQ ID NO: 125316 - DNA, 25 bp, Probe Sequence
atttcttcagtgtgtaaggttcaga

SEQ ID NO: 125317 - DNA, 25 bp, Probe Sequence
atttcttagttgctagactccctgg

SEQ ID NO: 125318 - DNA, 25 bp, Probe Sequence
atttcttaattggacaactacacta

SEQ ID NO: 125319 - DNA, 25 bp, Probe Sequence
atttcttaaggctaatattccattg

SEQ ID NO: 125320 - DNA, 25 bp, Probe Sequence
atttctgtaaggcaatcttggcaca

SEQ ID NO: 125321 - DNA, 25 bp, Probe Sequence
atttcttgtaggcatcaccatgaac

SEQ ID NO: 125322 - DNA, 25 bp, Probe Sequence
atttctgtttgaaaaccatgacaca

SEQ ID NO: 125323 - DNA, 25 bp, Probe Sequence
atttctgtttgtaagacttaagtga

SEQ ID NO: 125324 - DNA, 25 bp, Probe Sequence
atttctgtttgtcgataagaaatgt

SEQ ID NO: 125325 - DNA, 25 bp, Probe Sequence
atttctttcatttgtagggatattt

SEQ ID NO: 125326 - DNA, 25 bp, Probe Sequence
atttgtttcttatttgtgtaactgt

SEQ ID NO: 125327 - DNA, 25 bp, Probe Sequence
atttgtcttaccttggtgtcacctt

SEQ ID NO: 125328 - DNA, 25 bp, Probe Sequence
atttctgtaaactgcctgtccatgc

SEQ ID NO: 125329 - DNA, 25 bp, Probe Sequence
atttctgaagcgagcgtcttcgatg

SEQ ID NO: 125330 - DNA, 25 bp, Probe Sequence
atttgcatgcaagaagtttatcagg

SEQ ID NO: 125331 - DNA, 25 bp, Probe Sequence
atttgtggatcgtgtttatggtgaa

SEQ ID NO: 125332 - DNA, 25 bp, Probe Sequence
atttgtgtatggtgattggtggagc

SEQ ID NO: 125333 - DNA, 25 bp, Probe Sequence
atttggcttgtgtgcatctggcctg

SEQ ID NO: 125334 - DNA, 25 bp, Probe Sequence
atttgtcatttcagatctgcgcatc

SEQ ID NO: 125335 - DNA, 25 bp, Probe Sequence
atttgctgctgaatacagtcactac

SEQ ID NO: 125336 - DNA, 25 bp, Probe Sequence
atttcttgaaataatccttcatgta

SEQ ID NO: 125337 - DNA, 25 bp, Probe Sequence
atttctaaaataccacatttctgaa

SEQ ID NO: 125338 - DNA, 25 bp, Probe Sequence
atttctatgaaatcgcgcttcttga

SEQ ID NO: 125339 - DNA, 25 bp, Probe Sequence
atttctatgaaatcgtcgcttcttg

SEQ ID NO: 125340 - DNA, 25 bp, Probe Sequence
atattcctggaaacagtcgatctcg

SEQ ID NO: 125341 - DNA, 25 bp, Probe Sequence
atttcacaagaaatcagttgcatat

SEQ ID NO: 125342 - DNA, 25 bp, Probe Sequence
atttcacaagagggtgttatgcata

SEQ ID NO: 125343 - DNA, 25 bp, Probe Sequence
atatttcacaaggggatagatcaga

SEQ ID NO: 125344 - DNA, 25 bp, Probe Sequence
atttcaacacaggggacagctatga

SEQ ID NO: 125345 - DNA, 25 bp, Probe Sequence
atttctatatcaggacagcaactgg

SEQ ID NO: 125346 - DNA, 25 bp, Probe Sequence
atttccataatagcatatacagtgg

SEQ ID NO: 125347 - DNA, 25 bp, Probe Sequence
atttctcatttaacagatgacggag

SEQ ID NO: 125348 - DNA, 25 bp, Probe Sequence
atttgacattgtgacttgactgtgg

SEQ ID NO: 125349 - DNA, 25 bp, Probe Sequence
atatctacacggggttagctgcagg

SEQ ID NO: 125350 - DNA, 25 bp, Probe Sequence
atattagcagcggttattcggtgag

SEQ ID NO: 125351 - DNA, 25 bp, Probe Sequence
atattgaatgctctattgggggaag

SEQ ID NO: 125352 - DNA, 25 bp, Probe Sequence
atttgtgtctattggggtgggaagg

SEQ ID NO: 125353 - DNA, 25 bp, Probe Sequence
atttgtttgttgcgggtggggagag

SEQ ID NO: 125354 - DNA, 25 bp, Probe Sequence
aggttgttagagcctgggatgggga

SEQ ID NO: 125355 - DNA, 25 bp, Probe Sequence
atttcgcttaggccagagtgatggc

SEQ ID NO: 125356 - DNA, 25 bp, Probe Sequence
atttcagcattactgactgcttatg

SEQ ID NO: 125357 - DNA, 25 bp, Probe Sequence
atttacactgacagccactatgctt

SEQ ID NO: 125358 - DNA, 25 bp, Probe Sequence
atttccactgagaggcctagacatg

SEQ ID NO: 125359 - DNA, 25 bp, Probe Sequence
atttgccaatggaaagctctaggaa

SEQ ID NO: 125360 - DNA, 25 bp, Probe Sequence
atttgtaacagccaactctggaaga

SEQ ID NO: 125361 - DNA, 25 bp, Probe Sequence
atttgagaaacgaatcttccaacag

SEQ ID NO: 125362 - DNA, 25 bp, Probe Sequence
atttgtgacaccctatcttgtcaat

SEQ ID NO: 125363 - DNA, 25 bp, Probe Sequence
atttctacacctacttggatatact

SEQ ID NO: 125364 - DNA, 25 bp, Probe Sequence
atttcttactgtactgtctcttact

SEQ ID NO: 125365 - DNA, 25 bp, Probe Sequence
atttctatactattcatctcctgtc

SEQ ID NO: 125366 - DNA, 25 bp, Probe Sequence
atttcaattatctatatcatctcat

SEQ ID NO: 125367 - DNA, 25 bp, Probe Sequence
atttcatgttgatgatatacacaat

SEQ ID NO: 125368 - DNA, 25 bp, Probe Sequence
atttcatttttcaatagcacatatg

SEQ ID NO: 125369 - DNA, 25 bp, Probe Sequence
atttcatagctttcaaaaatcatgc

SEQ ID NO: 125370 - DNA, 25 bp, Probe Sequence
atttcagcggatgcacacacaaccc

SEQ ID NO: 125371 - DNA, 25 bp, Probe Sequence
atttcaactatcaatcaccagtcca

SEQ ID NO: 125372 - DNA, 25 bp, Probe Sequence
atttccctgcacttacagaggtgca

SEQ ID NO: 125373 - DNA, 25 bp, Probe Sequence
atttcccgggattcgagtgtggtgg

SEQ ID NO: 125374 - DNA, 25 bp, Probe Sequence
atttctctcgggaataattttatag

SEQ ID NO: 125375 - DNA, 25 bp, Probe Sequence
atatattctgagtgtaacattttaa

SEQ ID NO: 125376 - DNA, 25 bp, Probe Sequence
atttgtatggcagtgtcagatattt

SEQ ID NO: 125377 - DNA, 25 bp, Probe Sequence
atattgtagggaacagaagcttaag

SEQ ID NO: 125378 - DNA, 25 bp, Probe Sequence
atattttgcagttgccagaccaata

SEQ ID NO: 125379 - DNA, 25 bp, Probe Sequence
atattttgcagttgccagaccaata

SEQ ID NO: 125380 - DNA, 25 bp, Probe Sequence
atttctggactctcagacagccaca

SEQ ID NO: 125381 - DNA, 25 bp, Probe Sequence
atattagtatcatcccacagccaac

SEQ ID NO: 125382 - DNA, 25 bp, Probe Sequence
atttgagattcacgggcacaccttt

SEQ ID NO: 125383 - DNA, 25 bp, Probe Sequence
atttgtgatgtcacttgaccccatt

SEQ ID NO: 125384 - DNA, 25 bp, Probe Sequence
atttgtgatgtcacttgaccccatt

SEQ ID NO: 125385 - DNA, 25 bp, Probe Sequence
atattgttgccatcaatgacccctt

SEQ ID NO: 125386 - DNA, 25 bp, Probe Sequence
atattgttgccatcaatgacccctt

SEQ ID NO: 125387 - DNA, 25 bp, Probe Sequence
atatatatctgctgtccagacagcc

SEQ ID NO: 125388 - DNA, 25 bp, Probe Sequence
atatatgattgatttcagaaaccga

SEQ ID NO: 125389 - DNA, 25 bp, Probe Sequence
atttcacttgattctgtgaaccata

SEQ ID NO: 125390 - DNA, 25 bp, Probe Sequence
atttcatcgatgatctggcagacct

SEQ ID NO: 125391 - DNA, 25 bp, Probe Sequence
atttctcgcagcaggagagactcgg

SEQ ID NO: 125392 - DNA, 25 bp, Probe Sequence
atttcccagcctgcaggcagctggg

SEQ ID NO: 125393 - DNA, 25 bp, Probe Sequence
atttcagggtcttggctgcctgtgg

SEQ ID NO: 125394 - DNA, 25 bp, Probe Sequence
atttcaggcatgtttgagtgttctt

SEQ ID NO: 125395 - DNA, 25 bp, Probe Sequence
atatatagccagtattaggatttct

SEQ ID NO: 125396 - DNA, 25 bp, Probe Sequence
atatattcctactcggtcatactgg

SEQ ID NO: 125397 - DNA, 25 bp, Probe Sequence
atatattcctactcggtcatactgg

SEQ ID NO: 125398 - DNA, 25 bp, Probe Sequence
ataggtcctaattggggatcattct

SEQ ID NO: 125399 - DNA, 25 bp, Probe Sequence
ataggtccagtgaaagggcacagta

SEQ ID NO: 125400 - DNA, 25 bp, Probe Sequence
atatagacctgtgaaaagacgtcaa

SEQ ID NO: 125401 - DNA, 25 bp, Probe Sequence
atataaactgtacacataattatca

SEQ ID NO: 125402 - DNA, 25 bp, Probe Sequence
atatctaaggtatacaaatctgtct

SEQ ID NO: 125403 - DNA, 25 bp, Probe Sequence
atatctttttaatctaacattctca

SEQ ID NO: 125404 - DNA, 25 bp, Probe Sequence
atattttactaccttacactgtcct

SEQ ID NO: 125405 - DNA, 25 bp, Probe Sequence
atattttactaccttacactgtcct

SEQ ID NO: 125406 - DNA, 25 bp, Probe Sequence
atattttactaccttacactgtcct

SEQ ID NO: 125407 - DNA, 25 bp, Probe Sequence
atttcttcatcgacattttccttcc

SEQ ID NO: 125408 - DNA, 25 bp, Probe Sequence
atttcttatccttcttattcttcag

SEQ ID NO: 125409 - DNA, 25 bp, Probe Sequence
atttcttccctatattttgtcatgc

SEQ ID NO: 125410 - DNA, 25 bp, Probe Sequence
atttcattcccaatttgtgtgtgtt

SEQ ID NO: 125411 - DNA, 25 bp, Probe Sequence
atttcagccctaacttctgtgtgga

SEQ ID NO: 125412 - DNA, 25 bp, Probe Sequence
atttcagtgccatacatgttattgt

SEQ ID NO: 125413 - DNA, 25 bp, Probe Sequence
atttcagtcacaacaaatatactat

SEQ ID NO: 125414 - DNA, 25 bp, Probe Sequence
atttcattcataccagataatagct

SEQ ID NO: 125415 - DNA, 25 bp, Probe Sequence
atttctgccaaggatgtgccttcta

SEQ ID NO: 125416 - DNA, 25 bp, Probe Sequence
atattaccaagcaaatccttccacc

SEQ ID NO: 125417 - DNA, 25 bp, Probe Sequence
atattaccaagcaaatccttccacc

SEQ ID NO: 125418 - DNA, 25 bp, Probe Sequence
atataacccagcaaatctgtactta

SEQ ID NO: 125419 - DNA, 25 bp, Probe Sequence
atatacacgaatagacatcaaactc

SEQ ID NO: 125420 - DNA, 25 bp, Probe Sequence
atttcacgacttaatagacaccgaa

SEQ ID NO: 125421 - DNA, 25 bp, Probe Sequence
atttccgtctgatctatgacaccaa

SEQ ID NO: 125422 - DNA, 25 bp, Probe Sequence
atattccgtctgtcccataataaaa

SEQ ID NO: 125423 - DNA, 25 bp, Probe Sequence
atattcctgtgcccacacttaatgt

SEQ ID NO: 125424 - DNA, 25 bp, Probe Sequence
atttctcatttgccaataataatac

SEQ ID NO: 125425 - DNA, 25 bp, Probe Sequence
atttcatacattctcatacatttaa

SEQ ID NO: 125426 - DNA, 25 bp, Probe Sequence
atttcatcacagcttctatttgtga

SEQ ID NO: 125427 - DNA, 25 bp, Probe Sequence
atattgccatatcatggtacctata

SEQ ID NO: 125428 - DNA, 25 bp, Probe Sequence
atttccaatcctggctacttttctt

SEQ ID NO: 125429 - DNA, 25 bp, Probe Sequence
atttctattcagagtactgttttta

SEQ ID NO: 125430 - DNA, 25 bp, Probe Sequence
atttctggtcgacctgttgtgttgt

SEQ ID NO: 125431 - DNA, 25 bp, Probe Sequence
atttggagtggaggcattgttttta

SEQ ID NO: 125432 - DNA, 25 bp, Probe Sequence
atttgcgcagccgtggcatttttct

SEQ ID NO: 125433 - DNA, 25 bp, Probe Sequence
atttgcgcagccgtggcatttttct

SEQ ID NO: 125434 - DNA, 25 bp, Probe Sequence
atttgtggcagattgcctttgtcct

SEQ ID NO: 125435 - DNA, 25 bp, Probe Sequence
atttggactgaaagtgctttccgga

SEQ ID NO: 125436 - DNA, 25 bp, Probe Sequence
atttctatctattgtggctttacca

SEQ ID NO: 125437 - DNA, 25 bp, Probe Sequence
atttcttgtatcttggctgtctggt

SEQ ID NO: 125438 - DNA, 25 bp, Probe Sequence
atttctatttcttgccgagttgaca

SEQ ID NO: 125439 - DNA, 25 bp, Probe Sequence
atttctatttcttggtggagcagca

SEQ ID NO: 125440 - DNA, 25 bp, Probe Sequence
atttctattataaggctaggcaccc

SEQ ID NO: 125441 - DNA, 25 bp, Probe Sequence
atttctttatatgagctcagctgac

SEQ ID NO: 125442 - DNA, 25 bp, Probe Sequence
atttcttctgaaaagccgcacatat

SEQ ID NO: 125443 - DNA, 25 bp, Probe Sequence
atttctgcactgaagtagcaccact

SEQ ID NO: 125444 - DNA, 25 bp, Probe Sequence
atttctgacacatgaagcccactaa

SEQ ID NO: 125445 - DNA, 25 bp, Probe Sequence
atttctaagctacagcgtactccag

SEQ ID NO: 125446 - DNA, 25 bp, Probe Sequence
atttcttgagtacctgttagttagt

SEQ ID NO: 125447 - DNA, 25 bp, Probe Sequence
atttctaggtggttcttcagtccag

SEQ ID NO: 125448 - DNA, 25 bp, Probe Sequence
atttctagggaagtcatctcacttg

SEQ ID NO: 125449 - DNA, 25 bp, Probe Sequence
atttctagatggacccatcacctag

SEQ ID NO: 125450 - DNA, 25 bp, Probe Sequence
atttctagtgttcctgccaatcaga

SEQ ID NO: 125451 - DNA, 25 bp, Probe Sequence
atttgtaatgttgatcccaagatga

SEQ ID NO: 125452 - DNA, 25 bp, Probe Sequence
atttgaattatagtacccacacatg

SEQ ID NO: 125453 - DNA, 25 bp, Probe Sequence
atttgaaacaattaaccagccagta

SEQ ID NO: 125454 - DNA, 25 bp, Probe Sequence
atattgtcaaaatagtccaccagtg

SEQ ID NO: 125455 - DNA, 25 bp, Probe Sequence
atttccataagtggagcctctccgt

SEQ ID NO: 125456 - DNA, 25 bp, Probe Sequence
atttccaaagctatgatctatgttt

SEQ ID NO: 125457 - DNA, 25 bp, Probe Sequence
atttccaaaggcgtatgtattaagt

SEQ ID NO: 125458 - DNA, 25 bp, Probe Sequence
atttccatactggcttttgattata

SEQ ID NO: 125459 - DNA, 25 bp, Probe Sequence
atttctataaatggctttggatcaa

SEQ ID NO: 125460 - DNA, 25 bp, Probe Sequence
atattctaagatctgctttggaaat

SEQ ID NO: 125461 - DNA, 25 bp, Probe Sequence
ataaataatctggtctttgaaaaga

SEQ ID NO: 125462 - DNA, 25 bp, Probe Sequence
atagaacaagtttgctacgaacaaa

SEQ ID NO: 125463 - DNA, 25 bp, Probe Sequence
atatgctaaacttttggccaagaga

SEQ ID NO: 125464 - DNA, 25 bp, Probe Sequence
atagtatcccccttggagcaaggac

SEQ ID NO: 125465 - DNA, 25 bp, Probe Sequence
atattcgtccccaaggagcgagtga

SEQ ID NO: 125466 - DNA, 25 bp, Probe Sequence
atttcgatcctcgtcaggtgcaggt

SEQ ID NO: 125467 - DNA, 25 bp, Probe Sequence
atttggtttccctgccatgagtatt

SEQ ID NO: 125468 - DNA, 25 bp, Probe Sequence
atattttttgcatccccatgcagga

SEQ ID NO: 125469 - DNA, 25 bp, Probe Sequence
atttcttagtaacccactgcagtgt

SEQ ID NO: 125470 - DNA, 25 bp, Probe Sequence
atttgattcagttttttcagcgtct

SEQ ID NO: 125471 - DNA, 25 bp, Probe Sequence
atttgatctgacttttttccttctc

SEQ ID NO: 125472 - DNA, 25 bp, Probe Sequence
atttgctggacgtttgaactctgtt

SEQ ID NO: 125473 - DNA, 25 bp, Probe Sequence
atttgctgaagcatcattgaaccag

SEQ ID NO: 125474 - DNA, 25 bp, Probe Sequence
atttgatgacctagatggaacacat

SEQ ID NO: 125475 - DNA, 25 bp, Probe Sequence
atttgctctcctagggacaagtgta

SEQ ID NO: 125476 - DNA, 25 bp, Probe Sequence
atttctcctttgtgtaagtgataaa

SEQ ID NO: 125477 - DNA, 25 bp, Probe Sequence
atttctcctttgcaatagcagttat

SEQ ID NO: 125478 - DNA, 25 bp, Probe Sequence
atttctctatgtttattctagttaa

SEQ ID NO: 125479 - DNA, 25 bp, Probe Sequence
atttctgcttctctttgtagttgat

SEQ ID NO: 125480 - DNA, 25 bp, Probe Sequence
atttcttctcagtttaaatgtatgt

SEQ ID NO: 125481 - DNA, 25 bp, Probe Sequence
atttgccttcagaatcttcaattgt

SEQ ID NO: 125482 - DNA, 25 bp, Probe Sequence
atttgacttcagccaggtgaactgg

SEQ ID NO: 125483 - DNA, 25 bp, Probe Sequence
atttgacccacttgtctgacattgg

SEQ ID NO: 125484 - DNA, 25 bp, Probe Sequence
atttgctcctgacagtcatacctga

SEQ ID NO: 125485 - DNA, 25 bp, Probe Sequence
atttccctaaatcctgagactgaga

SEQ ID NO: 125486 - DNA, 25 bp, Probe Sequence
atttccctaatgaccccatcagaaa

SEQ ID NO: 125487 - DNA, 25 bp, Probe Sequence
atttccttgaaaactcctacaatat

SEQ ID NO: 125488 - DNA, 25 bp, Probe Sequence
atttcctttaatcctttgactgtca

SEQ ID NO: 125489 - DNA, 25 bp, Probe Sequence
atttggctttgtacactttggtgaa

SEQ ID NO: 125490 - DNA, 25 bp, Probe Sequence
atttgccacttatacttctgattga

SEQ ID NO: 125491 - DNA, 25 bp, Probe Sequence
atatttcctgttcacttgtgcatgg

SEQ ID NO: 125492 - DNA, 25 bp, Probe Sequence
atatgttacattgccatctagtaca

SEQ ID NO: 125493 - DNA, 25 bp, Probe Sequence
atatgttcgactggctcctgattac

SEQ ID NO: 125494 - DNA, 25 bp, Probe Sequence
atttgtcagctttgctccagatcag

SEQ ID NO: 125495 - DNA, 25 bp, Probe Sequence
atattgatcatctgcagtgaagtag

SEQ ID NO: 125496 - DNA, 25 bp, Probe Sequence
atattgaaatcgttgaagcgagaga

SEQ ID NO: 125497 - DNA, 25 bp, Probe Sequence
atttgaaattcacgatatgcataag

SEQ ID NO: 125498 - DNA, 25 bp, Probe Sequence
atttgagttccatatgtgtgcacaa

SEQ ID NO: 125499 - DNA, 25 bp, Probe Sequence
ataggacttccatgacgtcaaggtg

SEQ ID NO: 125500 - DNA, 25 bp, Probe Sequence
atttgacttccaagacagctaaact

SEQ ID NO: 125501 - DNA, 25 bp, Probe Sequence
atattacttctgggactttattcta

SEQ ID NO: 125502 - DNA, 25 bp, Probe Sequence
atattacttgagtgcatttttttgt

SEQ ID NO: 125503 - DNA, 25 bp, Probe Sequence
atatttatatggctttttttcttcg

SEQ ID NO: 125504 - DNA, 25 bp, Probe Sequence
atattcgtactgcactttgtttttc

SEQ ID NO: 125505 - DNA, 25 bp, Probe Sequence
atttctgtccccattatgacttagt

SEQ ID NO: 125506 - DNA, 25 bp, Probe Sequence
atattcgtttacaattgaacttcga

SEQ ID NO: 125507 - DNA, 25 bp, Probe Sequence
atttctgtatttattgttctctgga

SEQ ID NO: 125508 - DNA, 25 bp, Probe Sequence
atttcgttctttatcattcatgctt

SEQ ID NO: 125509 - DNA, 25 bp, Probe Sequence
atttctgtacttttgtatcaactca

SEQ ID NO: 125510 - DNA, 25 bp, Probe Sequence
atttgctgctcactttctttaaact

SEQ ID NO: 125511 - DNA, 25 bp, Probe Sequence
atttgcatacttacctagtgaaact

SEQ ID NO: 125512 - DNA, 25 bp, Probe Sequence
atttgagatatatggctcagtaaat

SEQ ID NO: 125513 - DNA, 25 bp, Probe Sequence
atagcagcagataaagggcattaca

SEQ ID NO: 125514 - DNA, 25 bp, Probe Sequence
atatcatggcagcaaagccaaacag

SEQ ID NO: 125515 - DNA, 25 bp, Probe Sequence
atatactgcaggtaacaaaagtcaa

SEQ ID NO: 125516 - DNA, 25 bp, Probe Sequence
atatccagcatatacaagaaattca

SEQ ID NO: 125517 - DNA, 25 bp, Probe Sequence
ataccagctagggccagtgacagtt

SEQ ID NO: 125518 - DNA, 25 bp, Probe Sequence
ataccatggcatgtccgcattgcag

SEQ ID NO: 125519 - DNA, 25 bp, Probe Sequence
ataggcattgtacctgacattgcta

SEQ ID NO: 125520 - DNA, 25 bp, Probe Sequence
atattctatatatctaatgcctaaa

SEQ ID NO: 125521 - DNA, 25 bp, Probe Sequence
atttctcatcaattctctatcatgt

SEQ ID NO: 125522 - DNA, 25 bp, Probe Sequence
atttgttgcacaggcagatactgct

SEQ ID NO: 125523 - DNA, 25 bp, Probe Sequence
atttgtgctttggcaaacgctgctc

SEQ ID NO: 125524 - DNA, 25 bp, Probe Sequence
atttgtttttcatatcagactaata

SEQ ID NO: 125525 - DNA, 25 bp, Probe Sequence
atttggtgtctttattagactcatg

SEQ ID NO: 125526 - DNA, 25 bp, Probe Sequence
atttggtgctattgtgcagtaacta

SEQ ID NO: 125527 - DNA, 25 bp, Probe Sequence
atttggatgtatatcagtggagaaa

SEQ ID NO: 125528 - DNA, 25 bp, Probe Sequence
atttgcttggctatcttggacatac

SEQ ID NO: 125529 - DNA, 25 bp, Probe Sequence
atttgataggcttgctctgggaatt

SEQ ID NO: 125530 - DNA, 25 bp, Probe Sequence
atttgaagtgtccttgtagatagac

SEQ ID NO: 125531 - DNA, 25 bp, Probe Sequence
atttgacctgcccttgtttatggca

SEQ ID NO: 125532 - DNA, 25 bp, Probe Sequence
atttgaattgccttgcttttatcac

SEQ ID NO: 125533 - DNA, 25 bp, Probe Sequence
atttgcaagtccttttgttgaaaat

SEQ ID NO: 125534 - DNA, 25 bp, Probe Sequence
atttcctgtccttagtgtctgaaga

SEQ ID NO: 125535 - DNA, 25 bp, Probe Sequence
atttcctgtccttagtgtctgaaga

SEQ ID NO: 125536 - DNA, 25 bp, Probe Sequence
atttcctgtccttagtgtctgaaga

SEQ ID NO: 125537 - DNA, 25 bp, Probe Sequence
atttccatgtcaacatagtccagaa

SEQ ID NO: 125538 - DNA, 25 bp, Probe Sequence
atattccatttgtcctttcagaagg

SEQ ID NO: 125539 - DNA, 25 bp, Probe Sequence
atttgcaaatggtcctgatgataca

SEQ ID NO: 125540 - DNA, 25 bp, Probe Sequence
atactgcaataggctctctgagcaa

SEQ ID NO: 125541 - DNA, 25 bp, Probe Sequence
atactgcagctgggctgcatcgccc

SEQ ID NO: 125542 - DNA, 25 bp, Probe Sequence
atttgcagtgcgtctagcacctaga

SEQ ID NO: 125543 - DNA, 25 bp, Probe Sequence
atttgcatgtggatcaaccatcgct

SEQ ID NO: 125544 - DNA, 25 bp, Probe Sequence
atagtagcatgtatcaacacttcat

SEQ ID NO: 125545 - DNA, 25 bp, Probe Sequence
atattcacagctgggcacaacttca

SEQ ID NO: 125546 - DNA, 25 bp, Probe Sequence
atcattccagacggcaactgcctct

SEQ ID NO: 125547 - DNA, 25 bp, Probe Sequence
atatacaacagggcaagctgcacct

SEQ ID NO: 125548 - DNA, 25 bp, Probe Sequence
atattaagagatcacctcacatcca

SEQ ID NO: 125549 - DNA, 25 bp, Probe Sequence
atttgagagaagccacgctgtcctc

SEQ ID NO: 125550 - DNA, 25 bp, Probe Sequence
atattgagggtttcctgtccatatc

SEQ ID NO: 125551 - DNA, 25 bp, Probe Sequence
atataggggatatcacactcctgaa

SEQ ID NO: 125552 - DNA, 25 bp, Probe Sequence
atattgtccaagaaacacctcgaga

SEQ ID NO: 125553 - DNA, 25 bp, Probe Sequence
atttgctgcctggaaaattctcgga

SEQ ID NO: 125554 - DNA, 25 bp, Probe Sequence
atttgcctctgagaacgatctccca

SEQ ID NO: 125555 - DNA, 25 bp, Probe Sequence
atttcctgtgagcatacaaccctgc

SEQ ID NO: 125556 - DNA, 25 bp, Probe Sequence
atttcctgtgagcttgaacagctgc

SEQ ID NO: 125557 - DNA, 25 bp, Probe Sequence
atttctgcaggctgtgtaagcatgt

SEQ ID NO: 125558 - DNA, 25 bp, Probe Sequence
atattcaggagcttctgttatattc

SEQ ID NO: 125559 - DNA, 25 bp, Probe Sequence
atattgcagggttcagtctagattg

SEQ ID NO: 125560 - DNA, 25 bp, Probe Sequence
atttgtagcttatgtcttggctaaa

SEQ ID NO: 125561 - DNA, 25 bp, Probe Sequence
atttggcaattttgatattcctaat

SEQ ID NO: 125562 - DNA, 25 bp, Probe Sequence
atttgagccattactgaattcacat

SEQ ID NO: 125563 - DNA, 25 bp, Probe Sequence
atttgcctcattggccatttccatt

SEQ ID NO: 125564 - DNA, 25 bp, Probe Sequence
atttctgctatttctctgtatctat

SEQ ID NO: 125565 - DNA, 25 bp, Probe Sequence
atttctgtatgtctccatctattga

SEQ ID NO: 125566 - DNA, 25 bp, Probe Sequence
atttctgtatgtctccatctattga

SEQ ID NO: 125567 - DNA, 25 bp, Probe Sequence
atttctgtttctggctatgatatta

SEQ ID NO: 125568 - DNA, 25 bp, Probe Sequence
atttgcctttatggttgtatctgaa

SEQ ID NO: 125569 - DNA, 25 bp, Probe Sequence
atttcctaaaggcttgatctgtttt

SEQ ID NO: 125570 - DNA, 25 bp, Probe Sequence
atttgacataaatgcggtacccttt

SEQ ID NO: 125571 - DNA, 25 bp, Probe Sequence
atataaaagatgcagggtaccccaa

SEQ ID NO: 125572 - DNA, 25 bp, Probe Sequence
atattgtaagcccaggatgttccaa

SEQ ID NO: 125573 - DNA, 25 bp, Probe Sequence
atttgtgacagctgcagttgctccc

SEQ ID NO: 125574 - DNA, 25 bp, Probe Sequence
atatcattacacatgcacccaacct

SEQ ID NO: 125575 - DNA, 25 bp, Probe Sequence
atatatatagcaagaccccacctct

SEQ ID NO: 125576 - DNA, 25 bp, Probe Sequence
atatttagctcaggctttcaccaac

SEQ ID NO: 125577 - DNA, 25 bp, Probe Sequence
atatttcagcattggctctacagcg

SEQ ID NO: 125578 - DNA, 25 bp, Probe Sequence
atatttgcatcctgactaggctgcc

SEQ ID NO: 125579 - DNA, 25 bp, Probe Sequence
atttctgcactcttagctggattct

SEQ ID NO: 125580 - DNA, 25 bp, Probe Sequence
atattgccagcctttcatgagcttc

SEQ ID NO: 125581 - DNA, 25 bp, Probe Sequence
atatttaccactaagacttctgact

SEQ ID NO: 125582 - DNA, 25 bp, Probe Sequence
atttgtaaacaaaagtgcgctggtg

SEQ ID NO: 125583 - DNA, 25 bp, Probe Sequence
atttgttaaaatacagttctgtcat

SEQ ID NO: 125584 - DNA, 25 bp, Probe Sequence
atttgattataactacttaatgtga

SEQ ID NO: 125585 - DNA, 25 bp, Probe Sequence
atttgcttccaaattttaagctgga

SEQ ID NO: 125586 - DNA, 25 bp, Probe Sequence
atttgcattccatggtgttaacatg

SEQ ID NO: 125587 - DNA, 25 bp, Probe Sequence
atttgcaccagttttatccataatg

SEQ ID NO: 125588 - DNA, 25 bp, Probe Sequence
atattcatcggtattcatccaagtt

SEQ ID NO: 125589 - DNA, 25 bp, Probe Sequence
atttcctatgtatttcattccactt

SEQ ID NO: 125590 - DNA, 25 bp, Probe Sequence
atttcctatcattttattatcacca

SEQ ID NO: 125591 - DNA, 25 bp, Probe Sequence
atattcccatattagcttttactca

SEQ ID NO: 125592 - DNA, 25 bp, Probe Sequence
atatttccctgatattttcccagtg

SEQ ID NO: 125593 - DNA, 25 bp, Probe Sequence
atatttctcggttttataccaagca

SEQ ID NO: 125594 - DNA, 25 bp, Probe Sequence
atttctgtgctacggatttaccaaa

SEQ ID NO: 125595 - DNA, 25 bp, Probe Sequence
atttctgtcttaggcactgtcgcct

SEQ ID NO: 125596 - DNA, 25 bp, Probe Sequence
atataagtccaagagctgtcagcct

SEQ ID NO: 125597 - DNA, 25 bp, Probe Sequence
atttgtatccaaggtgctgaatctt

SEQ ID NO: 125598 - DNA, 25 bp, Probe Sequence
atatgtgtcccatcgttaattcacc

SEQ ID NO: 125599 - DNA, 25 bp, Probe Sequence
atttgtagcactttgttgacttcca

SEQ ID NO: 125600 - DNA, 25 bp, Probe Sequence
atttgacagacatccttgcagttta

SEQ ID NO: 125601 - DNA, 25 bp, Probe Sequence
atttgcctgaagccctgtgacaatt

SEQ ID NO: 125602 - DNA, 25 bp, Probe Sequence
atttgcctgcattaccggtcgatgc

SEQ ID NO: 125603 - DNA, 25 bp, Probe Sequence
atttgcctgtttacatagtcagact

SEQ ID NO: 125604 - DNA, 25 bp, Probe Sequence
atttgctttctcttcaagataagtt

SEQ ID NO: 125605 - DNA, 25 bp, Probe Sequence
atttgcatttccataatatctaatt

SEQ ID NO: 125606 - DNA, 25 bp, Probe Sequence
atttgtcttcctttttatgcatgat

SEQ ID NO: 125607 - DNA, 25 bp, Probe Sequence
atttgcatttcctatgtaatgagct

SEQ ID NO: 125608 - DNA, 25 bp, Probe Sequence
atttctggctcctatgtattagatc

SEQ ID NO: 125609 - DNA, 25 bp, Probe Sequence
atatttgtgctatagtatttgattc

SEQ ID NO: 125610 - DNA, 25 bp, Probe Sequence
atattttcttgatctattttttaat

SEQ ID NO: 125611 - DNA, 25 bp, Probe Sequence
atattaacctttgcattttattgaa

SEQ ID NO: 125612 - DNA, 25 bp, Probe Sequence
atattaaccccatatttagatacat

SEQ ID NO: 125613 - DNA, 25 bp, Probe Sequence
atagtaataccctctctctacaaaa

SEQ ID NO: 125614 - DNA, 25 bp, Probe Sequence
atagtgaaaccccatctccaaaaat

SEQ ID NO: 125615 - DNA, 25 bp, Probe Sequence
atattgaacacccagacttttaatt

SEQ ID NO: 125616 - DNA, 25 bp, Probe Sequence
atatacaaactttgacttttgtgaa

SEQ ID NO: 125617 - DNA, 25 bp, Probe Sequence
atatacctggtttacttctttagca

SEQ ID NO: 125618 - DNA, 25 bp, Probe Sequence
atctcaccgaatgtacagttttcca

SEQ ID NO: 125619 - DNA, 25 bp, Probe Sequence
cattcacgttaaatgaagtttcctc

SEQ ID NO: 125620 - DNA, 25 bp, Probe Sequence
ataagcttgtacagaagttccctct

SEQ ID NO: 125621 - DNA, 25 bp, Probe Sequence
ataggttggttaaagtgatggcctt

SEQ ID NO: 125622 - DNA, 25 bp, Probe Sequence
ataggtaggttccacagttactctt

SEQ ID NO: 125623 - DNA, 25 bp, Probe Sequence
agcaagtaggttgaggtccctggga

SEQ ID NO: 125624 - DNA, 25 bp, Probe Sequence
atccggaggttcacaacctctgtgg

SEQ ID NO: 125625 - DNA, 25 bp, Probe Sequence
atttgtatacttagccataacttgg

SEQ ID NO: 125626 - DNA, 25 bp, Probe Sequence
atttgtatacacactgcagaaattc

SEQ ID NO: 125627 - DNA, 25 bp, Probe Sequence
atttgtataactctaaacgcccatg

SEQ ID NO: 125628 - DNA, 25 bp, Probe Sequence
atttgtcgaagcattaaacagcctc

SEQ ID NO: 125629 - DNA, 25 bp, Probe Sequence
atttgtcgcaggaataaagatggct

SEQ ID NO: 125630 - DNA, 25 bp, Probe Sequence
atttgctctgggtcaggaagaagct

SEQ ID NO: 125631 - DNA, 25 bp, Probe Sequence
atttgccaagtgtccaatgagaact

SEQ ID NO: 125632 - DNA, 25 bp, Probe Sequence
atttgccaagttgagtgtacacaaa

SEQ ID NO: 125633 - DNA, 25 bp, Probe Sequence
atttgaaatgtttaggtaactgcaa

SEQ ID NO: 125634 - DNA, 25 bp, Probe Sequence
atttggtataattatggtgggtgat

SEQ ID NO: 125635 - DNA, 25 bp, Probe Sequence
atttggtattttaggcatgtgagtt

SEQ ID NO: 125636 - DNA, 25 bp, Probe Sequence
atttgggacattcagtaggagcatt

SEQ ID NO: 125637 - DNA, 25 bp, Probe Sequence
atttggtatctttagttagagatgg

SEQ ID NO: 125638 - DNA, 25 bp, Probe Sequence
atttgttagcatcaagagtcaagtt

SEQ ID NO: 125639 - DNA, 25 bp, Probe Sequence
atttggttgcatccaaactctggtt

SEQ ID NO: 125640 - DNA, 25 bp, Probe Sequence
atatgggtctgtcaaagcctatact

SEQ ID NO: 125641 - DNA, 25 bp, Probe Sequence
atagggttctgttacatcctcttcg

SEQ ID NO: 125642 - DNA, 25 bp, Probe Sequence
ataggtgtctccaaaatctttgagg

SEQ ID NO: 125643 - DNA, 25 bp, Probe Sequence
ataggagccacaaacttcccagagg

SEQ ID NO: 125644 - DNA, 25 bp, Probe Sequence
atttgacacacagactacagccaga

SEQ ID NO: 125645 - DNA, 25 bp, Probe Sequence
atttgcagacaaggatcttctggaa

SEQ ID NO: 125646 - DNA, 25 bp, Probe Sequence
atttgcaataatgtttctccataac

SEQ ID NO: 125647 - DNA, 25 bp, Probe Sequence
atttgcatcattttgtcccttgtaa

SEQ ID NO: 125648 - DNA, 25 bp, Probe Sequence
atttgcatcattttgtcccttgtaa

SEQ ID NO: 125649 - DNA, 25 bp, Probe Sequence
atttgcatgcataaatttctgaaga

SEQ ID NO: 125650 - DNA, 25 bp, Probe Sequence
atttgtgcataaatatggtgttatt

SEQ ID NO: 125651 - DNA, 25 bp, Probe Sequence
atttgtgatacaatgctgtgcccta

SEQ ID NO: 125652 - DNA, 25 bp, Probe Sequence
atatattaactacttcctctgacca

SEQ ID NO: 125653 - DNA, 25 bp, Probe Sequence
atttgcaaactattcttacgacaaa

SEQ ID NO: 125654 - DNA, 25 bp, Probe Sequence
atatgctgtgggcaggtcctcagta

SEQ ID NO: 125655 - DNA, 25 bp, Probe Sequence
atatcttcaggccatgggttcacca

SEQ ID NO: 125656 - DNA, 25 bp, Probe Sequence
atattaatggtaggatttcagaaaa

SEQ ID NO: 125657 - DNA, 25 bp, Probe Sequence
atattatatggtgcattttagagga

SEQ ID NO: 125658 - DNA, 25 bp, Probe Sequence
atactttggggacttgtagggatgc

SEQ ID NO: 125659 - DNA, 25 bp, Probe Sequence
atacattttggtgtgactaggccac

SEQ ID NO: 125660 - DNA, 25 bp, Probe Sequence
atatcactttggtctccatttttcc

SEQ ID NO: 125661 - DNA, 25 bp, Probe Sequence
atatccatattaaccactatttttc

SEQ ID NO: 125662 - DNA, 25 bp, Probe Sequence
atatcgctaataactactagtatga

SEQ ID NO: 125663 - DNA, 25 bp, Probe Sequence
atttgctgaattactactgtgtgca

SEQ ID NO: 125664 - DNA, 25 bp, Probe Sequence
atttgccatttgagagctgctggat

SEQ ID NO: 125665 - DNA, 25 bp, Probe Sequence
ataggtagttgtggatgctggggat

SEQ ID NO: 125666 - DNA, 25 bp, Probe Sequence
atctggggtgggcaggctgggattc

SEQ ID NO: 125667 - DNA, 25 bp, Probe Sequence
atcgtgaaggaacaggcattttaca

SEQ ID NO: 125668 - DNA, 25 bp, Probe Sequence
atagtattgaaatggccagtttact

SEQ ID NO: 125669 - DNA, 25 bp, Probe Sequence
ataggtgagggtctccacatttact

SEQ ID NO: 125670 - DNA, 25 bp, Probe Sequence
atataggtgagggtctccacattta

SEQ ID NO: 125671 - DNA, 25 bp, Probe Sequence
atatatgctagagcctcactcctgt

SEQ ID NO: 125672 - DNA, 25 bp, Probe Sequence
atatgtgtcaaccaccatttcagct

SEQ ID NO: 125673 - DNA, 25 bp, Probe Sequence
atatttctactgatctgatctcact

SEQ ID NO: 125674 - DNA, 25 bp, Probe Sequence
atttgtccagcgacactcattcatt

SEQ ID NO: 125675 - DNA, 25 bp, Probe Sequence
atatgattccacccatggcaaattc

SEQ ID NO: 125676 - DNA, 25 bp, Probe Sequence
atatgaagtcaccctagccatcatt

SEQ ID NO: 125677 - DNA, 25 bp, Probe Sequence
atatcaaaactcatgaccatcatcg

SEQ ID NO: 125678 - DNA, 25 bp, Probe Sequence
atatttgtactattgaccatcctga

SEQ ID NO: 125679 - DNA, 25 bp, Probe Sequence
atattggaattgtgacgatcctcat

SEQ ID NO: 125680 - DNA, 25 bp, Probe Sequence
atttgtctgttattgaggacccatc

SEQ ID NO: 125681 - DNA, 25 bp, Probe Sequence
atttgtgcagtttttgaagaggcca

SEQ ID NO: 125682 - DNA, 25 bp, Probe Sequence
atttgtggttatttactcatgtgcc

SEQ ID NO: 125683 - DNA, 25 bp, Probe Sequence
atttgtagcatttattcactgatta

SEQ ID NO: 125684 - DNA, 25 bp, Probe Sequence
atattccatgcattagtacacttta

SEQ ID NO: 125685 - DNA, 25 bp, Probe Sequence
atattgacatgagtataccagttta

SEQ ID NO: 125686 - DNA, 25 bp, Probe Sequence
atatttatggacacacagtttgcat

SEQ ID NO: 125687 - DNA, 25 bp, Probe Sequence
atttgttgaggccttatgattcagc

SEQ ID NO: 125688 - DNA, 25 bp, Probe Sequence
atttgtgtgaggacttctgcatctt

SEQ ID NO: 125689 - DNA, 25 bp, Probe Sequence
atatatattgcactggctattcatc

SEQ ID NO: 125690 - DNA, 25 bp, Probe Sequence
atatatataaggttactgcataatg

SEQ ID NO: 125691 - DNA, 25 bp, Probe Sequence
atatctctgaagctggattgatacg

SEQ ID NO: 125692 - DNA, 25 bp, Probe Sequence
atatcctttggtcttccacagtcat

SEQ ID NO: 125693 - DNA, 25 bp, Probe Sequence
atatcccttgttcattagctaccta

SEQ ID NO: 125694 - DNA, 25 bp, Probe Sequence
atatttttttcctttgcattcatct

SEQ ID NO: 125695 - DNA, 25 bp, Probe Sequence
atacattctattatttttcctccct

SEQ ID NO: 125696 - DNA, 25 bp, Probe Sequence
atatcattcctagtacctttttgcc

SEQ ID NO: 125697 - DNA, 25 bp, Probe Sequence
atattgttctacacctgttttgtta

SEQ ID NO: 125698 - DNA, 25 bp, Probe Sequence
atatttctcaacatgcctggagatg

SEQ ID NO: 125699 - DNA, 25 bp, Probe Sequence
atattctccaaagctcagtatctga

SEQ ID NO: 125700 - DNA, 25 bp, Probe Sequence
atattctgtaaacctaatgtctgta

SEQ ID NO: 125701 - DNA, 25 bp, Probe Sequence
atatgtaaacaaattcaatgcccta

SEQ ID NO: 125702 - DNA, 25 bp, Probe Sequence
atattaaacatatttccaattcaaa

SEQ ID NO: 125703 - DNA, 25 bp, Probe Sequence
atccaaaagccatctcaagtaaaag

SEQ ID NO: 125704 - DNA, 25 bp, Probe Sequence
ataccaagacctgctcaatgttaag

SEQ ID NO: 125705 - DNA, 25 bp, Probe Sequence
atatacgagaacgccatgattgctg

SEQ ID NO: 125706 - DNA, 25 bp, Probe Sequence
atatacacaaacatccatttctaca

SEQ ID NO: 125707 - DNA, 25 bp, Probe Sequence
atattcccaaattcatatttcagaa

SEQ ID NO: 125708 - DNA, 25 bp, Probe Sequence
atattaactatgtactcagtgtcaa

SEQ ID NO: 125709 - DNA, 25 bp, Probe Sequence
atattaggtaggtatggttgcaggc

SEQ ID NO: 125710 - DNA, 25 bp, Probe Sequence
atattaagtagtctagatctcagtt

SEQ ID NO: 125711 - DNA, 25 bp, Probe Sequence
atatttagtagtttatttctgctct

SEQ ID NO: 125712 - DNA, 25 bp, Probe Sequence
atatttactacatattttccatctg

SEQ ID NO: 125713 - DNA, 25 bp, Probe Sequence
atatttttaatcttcccaacattgt

SEQ ID NO: 125714 - DNA, 25 bp, Probe Sequence
atattttataacttgtccatacaga

SEQ ID NO: 125715 - DNA, 25 bp, Probe Sequence
atatgttatttaccttcagatctaa

SEQ ID NO: 125716 - DNA, 25 bp, Probe Sequence
atttgctgattatacttctgagctg

SEQ ID NO: 125717 - DNA, 25 bp, Probe Sequence
atttgtgactataagctttgtgctt

SEQ ID NO: 125718 - DNA, 25 bp, Probe Sequence
atttgtgttgataaggattgcatta

SEQ ID NO: 125719 - DNA, 25 bp, Probe Sequence
atttgtgcttcagtacctagataaa

SEQ ID NO: 125720 - DNA, 25 bp, Probe Sequence
atttgggtccaacttcaataatgta

SEQ ID NO: 125721 - DNA, 25 bp, Probe Sequence
atttgtcgtgcctacaatcaagaat

SEQ ID NO: 125722 - DNA, 25 bp, Probe Sequence
atattgtcttcctgcgagaatagaa

SEQ ID NO: 125723 - DNA, 25 bp, Probe Sequence
atttgcagcttgcggcggaatcaca

SEQ ID NO: 125724 - DNA, 25 bp, Probe Sequence
atattgccaataagcgggctacaaa

SEQ ID NO: 125725 - DNA, 25 bp, Probe Sequence
atattctgatgtatgggtgctaaaa

SEQ ID NO: 125726 - DNA, 25 bp, Probe Sequence
atatatctgtggagagtgtcacaca

SEQ ID NO: 125727 - DNA, 25 bp, Probe Sequence
atatcacactgcgatggaggtccca

SEQ ID NO: 125728 - DNA, 25 bp, Probe Sequence
atatcaggatgcaatgtgcatgcct

SEQ ID NO: 125729 - DNA, 25 bp, Probe Sequence
atatgggctgctggatgacgatgac

SEQ ID NO: 125730 - DNA, 25 bp, Probe Sequence
atatgttgctgtggatgggatcccc

SEQ ID NO: 125731 - DNA, 25 bp, Probe Sequence
atattcctttgagtgtatacccagt

SEQ ID NO: 125732 - DNA, 25 bp, Probe Sequence
atattctctttcaatgtaccttcct

SEQ ID NO: 125733 - DNA, 25 bp, Probe Sequence
atattccttagcagatgatcacatg

SEQ ID NO: 125734 - DNA, 25 bp, Probe Sequence
atattcctgggctgatccacaacat

SEQ ID NO: 125735 - DNA, 25 bp, Probe Sequence
atattcctgctggctaacaacagaa

SEQ ID NO: 125736 - DNA, 25 bp, Probe Sequence
atagtgcctcatagtctacttagaa

SEQ ID NO: 125737 - DNA, 25 bp, Probe Sequence
ataatgccagtacagacttaggact

SEQ ID NO: 125738 - DNA, 25 bp, Probe Sequence
atagtgccgcgataacagtacgtgt

SEQ ID NO: 125739 - DNA, 25 bp, Probe Sequence
ataggacggaaaacctactgctggt

SEQ ID NO: 125740 - DNA, 25 bp, Probe Sequence
atgggagggaggagccaaccttgct

SEQ ID NO: 125741 - DNA, 25 bp, Probe Sequence
atttggaggaggtcccacaactcgt

SEQ ID NO: 125742 - DNA, 25 bp, Probe Sequence
atttgtgaggaggacttctcgccct

SEQ ID NO: 125743 - DNA, 25 bp, Probe Sequence
atattttggtggattctctgtccta

SEQ ID NO: 125744 - DNA, 25 bp, Probe Sequence
atattggggtagctttcatttcttc

SEQ ID NO: 125745 - DNA, 25 bp, Probe Sequence
atattagggtacgttcttgtgaatt

SEQ ID NO: 125746 - DNA, 25 bp, Probe Sequence
atattaggaataactgcgtggggtt

SEQ ID NO: 125747 - DNA, 25 bp, Probe Sequence
atatttaattacattgggagcagtt

SEQ ID NO: 125748 - DNA, 25 bp, Probe Sequence
atatttcagcaaacgttgggcatca

SEQ ID NO: 125749 - DNA, 25 bp, Probe Sequence
atatattatgggtgtgctgggtgca

SEQ ID NO: 125750 - DNA, 25 bp, Probe Sequence
atatttagctgggcacagtggtgtg

SEQ ID NO: 125751 - DNA, 25 bp, Probe Sequence
atattcacacatggtcaactgggac

SEQ ID NO: 125752 - DNA, 25 bp, Probe Sequence
atattcaccctttgtctagtgatct

SEQ ID NO: 125753 - DNA, 25 bp, Probe Sequence
atattccctttgttaatgttataga

SEQ ID NO: 125754 - DNA, 25 bp, Probe Sequence
atatcccactttgcaaactttaact

SEQ ID NO: 125755 - DNA, 25 bp, Probe Sequence
atatcccactttgcaaactttaact

SEQ ID NO: 125756 - DNA, 25 bp, Probe Sequence
atatcccactttgcaaactttaact

SEQ ID NO: 125757 - DNA, 25 bp, Probe Sequence
atatcattcagctgtccaaaaaata

SEQ ID NO: 125758 - DNA, 25 bp, Probe Sequence
atatattcagacccaaaactatcaa

SEQ ID NO: 125759 - DNA, 25 bp, Probe Sequence
atatatagagtgcccatgtgaaata

SEQ ID NO: 125760 - DNA, 25 bp, Probe Sequence
atattaatgttgactgttaattctt

SEQ ID NO: 125761 - DNA, 25 bp, Probe Sequence
atttgagatgttccattttctgtat

SEQ ID NO: 125762 - DNA, 25 bp, Probe Sequence
atttgtatgtgtcactagtgtctaa

SEQ ID NO: 125763 - DNA, 25 bp, Probe Sequence
atttgttgtttggatatttcatata

SEQ ID NO: 125764 - DNA, 25 bp, Probe Sequence
atatctcttgatatagaatttttat

SEQ ID NO: 125765 - DNA, 25 bp, Probe Sequence
atatgtctgttaggggatactttaa

SEQ ID NO: 125766 - DNA, 25 bp, Probe Sequence
atatgtcagtatagaggctctactt

SEQ ID NO: 125767 - DNA, 25 bp, Probe Sequence
atattgcggcatagtgtcaggattt

SEQ ID NO: 125768 - DNA, 25 bp, Probe Sequence
atatctgtgctctaataacgatgta

SEQ ID NO: 125769 - DNA, 25 bp, Probe Sequence
atattatgtcatactaacttgtgaa

SEQ ID NO: 125770 - DNA, 25 bp, Probe Sequence
atattatggtgacacctatatgaac

SEQ ID NO: 125771 - DNA, 25 bp, Probe Sequence
atagtaggtcatctcctctgaggag

SEQ ID NO: 125772 - DNA, 25 bp, Probe Sequence
atatgtatgtgtgggcttgcttaga

SEQ ID NO: 125773 - DNA, 25 bp, Probe Sequence
atatattgatgtgactttctgacac

SEQ ID NO: 125774 - DNA, 25 bp, Probe Sequence
atatactatgtccatatttatacta

SEQ ID NO: 125775 - DNA, 25 bp, Probe Sequence
atatttgaggccatgcttaatatat

SEQ ID NO: 125776 - DNA, 25 bp, Probe Sequence
atattcttgggctctctaatgtgat

SEQ ID NO: 125777 - DNA, 25 bp, Probe Sequence
atattgcttaagtatttggctgttt

SEQ ID NO: 125778 - DNA, 25 bp, Probe Sequence
atttgttgctcgttttatctatatt

SEQ ID NO: 125779 - DNA, 25 bp, Probe Sequence
atttgttcctgtattcatgtatgta

SEQ ID NO: 125780 - DNA, 25 bp, Probe Sequence
atttgtctcgtacctacagatatgt

SEQ ID NO: 125781 - DNA, 25 bp, Probe Sequence
atttgtctgtgtactcaagcaataa

SEQ ID NO: 125782 - DNA, 25 bp, Probe Sequence
atttgtcgtgttacagttatacaat

SEQ ID NO: 125783 - DNA, 25 bp, Probe Sequence
atatatgctttgtttcagggtttat

SEQ ID NO: 125784 - DNA, 25 bp, Probe Sequence
atatatgcttccagaatggggctta

SEQ ID NO: 125785 - DNA, 25 bp, Probe Sequence
atatacttctataagagcgtgactt

SEQ ID NO: 125786 - DNA, 25 bp, Probe Sequence
atatacttaataatggaaggtctgc

SEQ ID NO: 125787 - DNA, 25 bp, Probe Sequence
atatcacttgtatcttaataggtta

SEQ ID NO: 125788 - DNA, 25 bp, Probe Sequence
atattcttctgcagttaatggggta

SEQ ID NO: 125789 - DNA, 25 bp, Probe Sequence
atatacaacctgcttgggtggagaa

SEQ ID NO: 125790 - DNA, 25 bp, Probe Sequence
atatagtgacctcatgtgagctggg

SEQ ID NO: 125791 - DNA, 25 bp, Probe Sequence
atataggtaccactgagcctggaga

SEQ ID NO: 125792 - DNA, 25 bp, Probe Sequence
atattcagaacgactggctcttagg

SEQ ID NO: 125793 - DNA, 25 bp, Probe Sequence
atatacatagcatgacatttctttg

SEQ ID NO: 125794 - DNA, 25 bp, Probe Sequence
atatacacagcagacctagccatgg

SEQ ID NO: 125795 - DNA, 25 bp, Probe Sequence
atatactccaggccaataccacagt

SEQ ID NO: 125796 - DNA, 25 bp, Probe Sequence
atattctcaccatcctgactgaagt

SEQ ID NO: 125797 - DNA, 25 bp, Probe Sequence
atatctcgacacaactctactactt

SEQ ID NO: 125798 - DNA, 25 bp, Probe Sequence
atattcgagcagaacctttaaattc

SEQ ID NO: 125799 - DNA, 25 bp, Probe Sequence
atattcacaagtttctgttgacctt

SEQ ID NO: 125800 - DNA, 25 bp, Probe Sequence
atattcacaagtttctgttgacctt

SEQ ID NO: 125801 - DNA, 25 bp, Probe Sequence
atttgtacattatttgttgtccttt

SEQ ID NO: 125802 - DNA, 25 bp, Probe Sequence
atttgttgttgttgctgtttccttt

SEQ ID NO: 125803 - DNA, 25 bp, Probe Sequence
atttgatttattacttcccaatatt

SEQ ID NO: 125804 - DNA, 25 bp, Probe Sequence
atattgatcaattttcattcccacc

SEQ ID NO: 125805 - DNA, 25 bp, Probe Sequence
atttggcaaacagcaatgatcttcc

SEQ ID NO: 125806 - DNA, 25 bp, Probe Sequence
atatctggaaactagcactgttacc

SEQ ID NO: 125807 - DNA, 25 bp, Probe Sequence
atattgttttgctaggtgttcatcc

SEQ ID NO: 125808 - DNA, 25 bp, Probe Sequence
atttgtatattgtggatgtgttcat

SEQ ID NO: 125809 - DNA, 25 bp, Probe Sequence
atataaatcatttcaggtggttaca

SEQ ID NO: 125810 - DNA, 25 bp, Probe Sequence
atatctcaataagaggggctccaat

SEQ ID NO: 125811 - DNA, 25 bp, Probe Sequence
atatccattgaatcggtagtcccag

SEQ ID NO: 125812 - DNA, 25 bp, Probe Sequence
atatggatctgataactgaggtccc

SEQ ID NO: 125813 - DNA, 25 bp, Probe Sequence
atatgtgcagcgttacctggaggcg

SEQ ID NO: 125814 - DNA, 25 bp, Probe Sequence
atatgagccggtggccgtgttagtg

SEQ ID NO: 125815 - DNA, 25 bp, Probe Sequence
atatactctgtgagccaggtatggt

SEQ ID NO: 125816 - DNA, 25 bp, Probe Sequence
atacgtgattgcagccgggcatggt

SEQ ID NO: 125817 - DNA, 25 bp, Probe Sequence
atatctaatgtgatgcccggaatat

SEQ ID NO: 125818 - DNA, 25 bp, Probe Sequence
atatcattaagcattggctgaaaat

SEQ ID NO: 125819 - DNA, 25 bp, Probe Sequence
atattttcagcaattcctgggaatt

SEQ ID NO: 125820 - DNA, 25 bp, Probe Sequence
atatttatacagcaccagacgcgat

SEQ ID NO: 125821 - DNA, 25 bp, Probe Sequence
atatttctgaaaacctaccagccag

SEQ ID NO: 125822 - DNA, 25 bp, Probe Sequence
atacttagaagagactgaccaccat

SEQ ID NO: 125823 - DNA, 25 bp, Probe Sequence
atactaaggactgaagccactacat

SEQ ID NO: 125824 - DNA, 25 bp, Probe Sequence
atatgctcgagtctccagagtcact

SEQ ID NO: 125825 - DNA, 25 bp, Probe Sequence
atcagcggaccatccagaatgacat

SEQ ID NO: 125826 - DNA, 25 bp, Probe Sequence
ataggccacactttaatatcacatt

SEQ ID NO: 125827 - DNA, 25 bp, Probe Sequence
atatctcgccaggatgtaggctcca

SEQ ID NO: 125828 - DNA, 25 bp, Probe Sequence
atatcttcatcagtgacgaggtata

SEQ ID NO: 125829 - DNA, 25 bp, Probe Sequence
atatttacagtaggtagatgatgca

SEQ ID NO: 125830 - DNA, 25 bp, Probe Sequence
atatctatacctagcaccagtgctt

SEQ ID NO: 125831 - DNA, 25 bp, Probe Sequence
atataaagccccagaatgtcccttg

SEQ ID NO: 125832 - DNA, 25 bp, Probe Sequence
atataaaccccctcagtcattttga

SEQ ID NO: 125833 - DNA, 25 bp, Probe Sequence
atataaacccctcagacagtttgct

SEQ ID NO: 125834 - DNA, 25 bp, Probe Sequence
atataacctccctcatactgaattt

SEQ ID NO: 125835 - DNA, 25 bp, Probe Sequence
atttgtacatctgttacctgatttg

SEQ ID NO: 125836 - DNA, 25 bp, Probe Sequence
atttgtacattgatggacacttaag

SEQ ID NO: 125837 - DNA, 25 bp, Probe Sequence
atatctgttttgctgtaacattgaa

SEQ ID NO: 125838 - DNA, 25 bp, Probe Sequence
atattgagttctaatgttacatctg

SEQ ID NO: 125839 - DNA, 25 bp, Probe Sequence
atataagttgtactgcgtatgcagt

SEQ ID NO: 125840 - DNA, 25 bp, Probe Sequence
atatgtaggatgaaccagtctggtg

SEQ ID NO: 125841 - DNA, 25 bp, Probe Sequence
atatgtacgatgacagtgcaatcat

SEQ ID NO: 125842 - DNA, 25 bp, Probe Sequence
atattacctgcagggattctcccta

SEQ ID NO: 125843 - DNA, 25 bp, Probe Sequence
atattatcctgtacacttatcccta

SEQ ID NO: 125844 - DNA, 25 bp, Probe Sequence
atattatcctgtacacttatcccta

SEQ ID NO: 125845 - DNA, 25 bp, Probe Sequence
atattatcaagcttacctactgtta

SEQ ID NO: 125846 - DNA, 25 bp, Probe Sequence
atattagcatcagtcaacccctgct

SEQ ID NO: 125847 - DNA, 25 bp, Probe Sequence
atattcagaccatagcaactcctgt

SEQ ID NO: 125848 - DNA, 25 bp, Probe Sequence
atatgtgagacccacagctgacatc

SEQ ID NO: 125849 - DNA, 25 bp, Probe Sequence
atatgtgctgaaatctcagcatgaa

SEQ ID NO: 125850 - DNA, 25 bp, Probe Sequence
atatgtgatatattctgatgtatgg

SEQ ID NO: 125851 - DNA, 25 bp, Probe Sequence
atatgcttgatattgtgaaaaggtg

SEQ ID NO: 125852 - DNA, 25 bp, Probe Sequence
atatcgtgtatccgaaaattgctaa

SEQ ID NO: 125853 - DNA, 25 bp, Probe Sequence
atatctggtatcctggcacaataat

SEQ ID NO: 125854 - DNA, 25 bp, Probe Sequence
atttgggcatcacttcacaatgttc

SEQ ID NO: 125855 - DNA, 25 bp, Probe Sequence
atttgtggatgctgtccctgatatt

SEQ ID NO: 125856 - DNA, 25 bp, Probe Sequence
atattgtggatatttgtcctgcatc

SEQ ID NO: 125857 - DNA, 25 bp, Probe Sequence
atttgtgtcataagacatcttcaag

SEQ ID NO: 125858 - DNA, 25 bp, Probe Sequence
atatatacttcaagacatcatgtcg

SEQ ID NO: 125859 - DNA, 25 bp, Probe Sequence
atattgagtgctgtgactcttcctc

SEQ ID NO: 125860 - DNA, 25 bp, Probe Sequence
ataggaagctggcaccactcagctc

SEQ ID NO: 125861 - DNA, 25 bp, Probe Sequence
ataggatggatacacacacccctgt

SEQ ID NO: 125862 - DNA, 25 bp, Probe Sequence
atgacgggtaaatggcccgcctggg

SEQ ID NO: 125863 - DNA, 25 bp, Probe Sequence
ataaacgtcaaatgtctgtccctgg

SEQ ID NO: 125864 - DNA, 25 bp, Probe Sequence
atatagaggagacaagtcgtaacat

SEQ ID NO: 125865 - DNA, 25 bp, Probe Sequence
atatagaaagcaccatgatttgaat

SEQ ID NO: 125866 - DNA, 25 bp, Probe Sequence
atatcaaagactcattgcttaattc

SEQ ID NO: 125867 - DNA, 25 bp, Probe Sequence
atatgataaactctagctctaaatg

SEQ ID NO: 125868 - DNA, 25 bp, Probe Sequence
atatgaaggaccttatttggcatat

SEQ ID NO: 125869 - DNA, 25 bp, Probe Sequence
ataggggaccagatttgtaatatag

SEQ ID NO: 125870 - DNA, 25 bp, Probe Sequence
atattggaaccagtttgcttattta

SEQ ID NO: 125871 - DNA, 25 bp, Probe Sequence
atatctggcataccgataggcttat

SEQ ID NO: 125872 - DNA, 25 bp, Probe Sequence
atatctagaaggtatgtggcattta

SEQ ID NO: 125873 - DNA, 25 bp, Probe Sequence
atatatgagtatcgtatgtgtatga

SEQ ID NO: 125874 - DNA, 25 bp, Probe Sequence
atatctgtgatgcctatgactttga

SEQ ID NO: 125875 - DNA, 25 bp, Probe Sequence
atatgcatgtcactgcatgataatt

SEQ ID NO: 125876 - DNA, 25 bp, Probe Sequence
atatcactcaccataatttaaataa

SEQ ID NO: 125877 - DNA, 25 bp, Probe Sequence
atatattccatctttttaacataaa

SEQ ID NO: 125878 - DNA, 25 bp, Probe Sequence
atatatctcagctatttttttaaag

SEQ ID NO: 125879 - DNA, 25 bp, Probe Sequence
atattgtacatacttggttgttaac

SEQ ID NO: 125880 - DNA, 25 bp, Probe Sequence
atatatgttataccttgtatgatag

SEQ ID NO: 125881 - DNA, 25 bp, Probe Sequence
atatgcatactctggctttgtgact

SEQ ID NO: 125882 - DNA, 25 bp, Probe Sequence
atatcaccatcttggttgttgtgct

SEQ ID NO: 125883 - DNA, 25 bp, Probe Sequence
atatactgtctctgtttgcatcatt

SEQ ID NO: 125884 - DNA, 25 bp, Probe Sequence
atattgatctttttatcatgatcct

SEQ ID NO: 125885 - DNA, 25 bp, Probe Sequence
atatgtgactatccttcatctacct

SEQ ID NO: 125886 - DNA, 25 bp, Probe Sequence
atattttatccttagcattgcttct

SEQ ID NO: 125887 - DNA, 25 bp, Probe Sequence
atatttgtaactttgcatgttcttg

SEQ ID NO: 125888 - DNA, 25 bp, Probe Sequence
atatatttcacagactttatcaatg

SEQ ID NO: 125889 - DNA, 25 bp, Probe Sequence
atatcttatccatatctttaggctg

SEQ ID NO: 125890 - DNA, 25 bp, Probe Sequence
atatctcctctctttggttagggaa

SEQ ID NO: 125891 - DNA, 25 bp, Probe Sequence
atatccccatgcttaattgtgcagt

SEQ ID NO: 125892 - DNA, 25 bp, Probe Sequence
atatccctcagcctggtgagggtga

SEQ ID NO: 125893 - DNA, 25 bp, Probe Sequence
atattagatcccatgggaggctgca

SEQ ID NO: 125894 - DNA, 25 bp, Probe Sequence
atattagcccacaagagcagtccta

SEQ ID NO: 125895 - DNA, 25 bp, Probe Sequence
atattacactacagatcctccagat

SEQ ID NO: 125896 - DNA, 25 bp, Probe Sequence
atgacgtcggacagatactctcgtg

SEQ ID NO: 125897 - DNA, 25 bp, Probe Sequence
atacctctggtcagaatccggatac

SEQ ID NO: 125898 - DNA, 25 bp, Probe Sequence
atagccctaaatgtactcttgaact

SEQ ID NO: 125899 - DNA, 25 bp, Probe Sequence
atagggccataatggaattctgaag

SEQ ID NO: 125900 - DNA, 25 bp, Probe Sequence
atagccccaaaacaagactgacaaa

SEQ ID NO: 125901 - DNA, 25 bp, Probe Sequence
ataccccacacaaaaaactgcaaca

SEQ ID NO: 125902 - DNA, 25 bp, Probe Sequence
atacccacccagaatgagacatcca

SEQ ID NO: 125903 - DNA, 25 bp, Probe Sequence
ataccagccgctgcaaaatcatgcc

SEQ ID NO: 125904 - DNA, 25 bp, Probe Sequence
atatcatcatcgtctataaactagc

SEQ ID NO: 125905 - DNA, 25 bp, Probe Sequence
atatcctggtgttaacctgactcat

SEQ ID NO: 125906 - DNA, 25 bp, Probe Sequence
atattcggtgtttaccatgcatact

SEQ ID NO: 125907 - DNA, 25 bp, Probe Sequence
atttggcttgtgtattccatataaa

SEQ ID NO: 125908 - DNA, 25 bp, Probe Sequence
atattgctgctggtacatctacaaa

SEQ ID NO: 125909 - DNA, 25 bp, Probe Sequence
atattatctcttgctctaaatgata

SEQ ID NO: 125910 - DNA, 25 bp, Probe Sequence
atattgtgtgttatctgacaagata

SEQ ID NO: 125911 - DNA, 25 bp, Probe Sequence
atattgatgtgactttctgacactg

SEQ ID NO: 125912 - DNA, 25 bp, Probe Sequence
atattgatggcctaataacctgcaa

SEQ ID NO: 125913 - DNA, 25 bp, Probe Sequence
atattcatgtcctaagacagcttca

SEQ ID NO: 125914 - DNA, 25 bp, Probe Sequence
atatcaatatccagaaactacaaca

SEQ ID NO: 125915 - DNA, 25 bp, Probe Sequence
atacattgactatgaaacccagtac

SEQ ID NO: 125916 - DNA, 25 bp, Probe Sequence
atatcattgaacacacataccagag

SEQ ID NO: 125917 - DNA, 25 bp, Probe Sequence
atatatcagacatgaccataaatag

SEQ ID NO: 125918 - DNA, 25 bp, Probe Sequence
atatatcagggaccacattattatt

SEQ ID NO: 125919 - DNA, 25 bp, Probe Sequence
atatatcaagccagcatttgtattt

SEQ ID NO: 125920 - DNA, 25 bp, Probe Sequence
atattcaatagcaggctttattcat

SEQ ID NO: 125921 - DNA, 25 bp, Probe Sequence
atattccacagaggggatctttctg

SEQ ID NO: 125922 - DNA, 25 bp, Probe Sequence
atattgccgcaatggttcacagttg

SEQ ID NO: 125923 - DNA, 25 bp, Probe Sequence
atattccagcacaaagtccacagtg

SEQ ID NO: 125924 - DNA, 25 bp, Probe Sequence
atattccagaataagcctcccattt

SEQ ID NO: 125925 - DNA, 25 bp, Probe Sequence
atattctagatattaaccccatatt

SEQ ID NO: 125926 - DNA, 25 bp, Probe Sequence
atatcacaacaatttgacacccttc

SEQ ID NO: 125927 - DNA, 25 bp, Probe Sequence
atatcacatataagtcaaaccctaa

SEQ ID NO: 125928 - DNA, 25 bp, Probe Sequence
atatacatatggctaaggctactat

SEQ ID NO: 125929 - DNA, 25 bp, Probe Sequence
atatccattggctgtaagacctttc

SEQ ID NO: 125930 - DNA, 25 bp, Probe Sequence
atatcacttaattgttaacagcttt

SEQ ID NO: 125931 - DNA, 25 bp, Probe Sequence
atataagcattctgttacctgtgat

SEQ ID NO: 125932 - DNA, 25 bp, Probe Sequence
atatgtaaatgtgttagcactgata

SEQ ID NO: 125933 - DNA, 25 bp, Probe Sequence
atatttcacagactttatcaatgta

SEQ ID NO: 125934 - DNA, 25 bp, Probe Sequence
atatttacatgattttgcctattgt

SEQ ID NO: 125935 - DNA, 25 bp, Probe Sequence
atattttgctgtttatgatctattt

SEQ ID NO: 125936 - DNA, 25 bp, Probe Sequence
atattgtgcctggtgtcaactttta

SEQ ID NO: 125937 - DNA, 25 bp, Probe Sequence
atattcatccaggttaaccttgata

SEQ ID NO: 125938 - DNA, 25 bp, Probe Sequence
atatttcaagtggtttagttgctag

SEQ ID NO: 125939 - DNA, 25 bp, Probe Sequence
atatttatattgcagtatcctttaa

SEQ ID NO: 125940 - DNA, 25 bp, Probe Sequence
atatatttatattgcagtatccttt

SEQ ID NO: 125941 - DNA, 25 bp, Probe Sequence
atatctttatcctgtatcagccttg

SEQ ID NO: 125942 - DNA, 25 bp, Probe Sequence
atagcatttttaggttagccagtgt

SEQ ID NO: 125943 - DNA, 25 bp, Probe Sequence
atagctgtagattacgtgaaggaag

SEQ ID NO: 125944 - DNA, 25 bp, Probe Sequence
atatctgtgctactactgtgctagg

SEQ ID NO: 125945 - DNA, 25 bp, Probe Sequence
atatatgctgaattacttgtgaaga

SEQ ID NO: 125946 - DNA, 25 bp, Probe Sequence
atattttgttcagtggtgtgcagac

SEQ ID NO: 125947 - DNA, 25 bp, Probe Sequence
atatattctgatgtatgggtgctaa

SEQ ID NO: 125948 - DNA, 25 bp, Probe Sequence
atatttgcttaacgtggtgctttta

SEQ ID NO: 125949 - DNA, 25 bp, Probe Sequence
atattcgtctccctggagttatgtt

SEQ ID NO: 125950 - DNA, 25 bp, Probe Sequence
atccttgaagtccggggtattatgt

SEQ ID NO: 125951 - DNA, 25 bp, Probe Sequence
atagtgtacagttggggagtacatt

SEQ ID NO: 125952 - DNA, 25 bp, Probe Sequence
atatttacatttgagaagcccttgc

SEQ ID NO: 125953 - DNA, 25 bp, Probe Sequence
atatggtaattgttaaagacttcag

SEQ ID NO: 125954 - DNA, 25 bp, Probe Sequence
ataggtatatactgacaaggcttca

SEQ ID NO: 125955 - DNA, 25 bp, Probe Sequence
atatggttcaatttacgactgccta

SEQ ID NO: 125956 - DNA, 25 bp, Probe Sequence
ataggtattgattgctaccctgacc

SEQ ID NO: 125957 - DNA, 25 bp, Probe Sequence
atatggtatcataagtcctccgtca

SEQ ID NO: 125958 - DNA, 25 bp, Probe Sequence
atatcagtattgagtctgcccgcca

SEQ ID NO: 125959 - DNA, 25 bp, Probe Sequence
atataatttgctagtcatcccctat

SEQ ID NO: 125960 - DNA, 25 bp, Probe Sequence
atatatttttcagatacaccacata

SEQ ID NO: 125961 - DNA, 25 bp, Probe Sequence
atattatgtttagattcccatttgt

SEQ ID NO: 125962 - DNA, 25 bp, Probe Sequence
atatttgtattgccctacccatatt

SEQ ID NO: 125963 - DNA, 25 bp, Probe Sequence
atatctcgtattctcatacttttct

SEQ ID NO: 125964 - DNA, 25 bp, Probe Sequence
atatccttattgtagctactgtttt

SEQ ID NO: 125965 - DNA, 25 bp, Probe Sequence
atatccatcttcaacagtagtgtct

SEQ ID NO: 125966 - DNA, 25 bp, Probe Sequence
atatctttgtgcacaggctgtttcc

SEQ ID NO: 125967 - DNA, 25 bp, Probe Sequence
atatttattgcctgatagttattcc

SEQ ID NO: 125968 - DNA, 25 bp, Probe Sequence
atatgttataccttgtatgatagtt

SEQ ID NO: 125969 - DNA, 25 bp, Probe Sequence
atatttatactatgctcaaagagtt

SEQ ID NO: 125970 - DNA, 25 bp, Probe Sequence
atatatatatattaagccccaggct

SEQ ID NO: 125971 - DNA, 25 bp, Probe Sequence
atatatctcatataacagctatggg

SEQ ID NO: 125972 - DNA, 25 bp, Probe Sequence
atatttttcatagagctcatgagca

SEQ ID NO: 125973 - DNA, 25 bp, Probe Sequence
atatgatttatctccacactagcag

SEQ ID NO: 125974 - DNA, 25 bp, Probe Sequence
atatgatttatctccacactagcag

SEQ ID NO: 125975 - DNA, 25 bp, Probe Sequence
atatctcttatcttacgaaaaaatg

SEQ ID NO: 125976 - DNA, 25 bp, Probe Sequence
atatcgtttcataacaaaattactt

SEQ ID NO: 125977 - DNA, 25 bp, Probe Sequence
atatattttatcaccaacatttcaa

SEQ ID NO: 125978 - DNA, 25 bp, Probe Sequence
atatatcgtgtatccgaaaattgct

SEQ ID NO: 125979 - DNA, 25 bp, Probe Sequence
atattcttataccgcaaaaatcagc

SEQ ID NO: 125980 - DNA, 25 bp, Probe Sequence
atatctaaatagcgcaccactatat

SEQ ID NO: 125981 - DNA, 25 bp, Probe Sequence
atattaaatacccacatttgacata

SEQ ID NO: 125982 - DNA, 25 bp, Probe Sequence
atattacaacgcggcagcattatga

SEQ ID NO: 125983 - DNA, 25 bp, Probe Sequence
atattcatattcggccacagttgga

SEQ ID NO: 125984 - DNA, 25 bp, Probe Sequence
atattcattttactgccactgtgga

SEQ ID NO: 125985 - DNA, 25 bp, Probe Sequence
atattatttgcttggctatcttgga

SEQ ID NO: 125986 - DNA, 25 bp, Probe Sequence
atattacttgcctatctgacttcat

SEQ ID NO: 125987 - DNA, 25 bp, Probe Sequence
atatatacttccgaggcacctgcat

SEQ ID NO: 125988 - DNA, 25 bp, Probe Sequence
atatatgaccacgctcacccgcatg

SEQ ID NO: 125989 - DNA, 25 bp, Probe Sequence
atatagaccctgctacccagatgat

SEQ ID NO: 125990 - DNA, 25 bp, Probe Sequence
atatggttcctggcaagcccatgtg

SEQ ID NO: 125991 - DNA, 25 bp, Probe Sequence
atatggttcctggcaagcccatgtg

SEQ ID NO: 125992 - DNA, 25 bp, Probe Sequence
ataggatttcatgcagtggtctgtt

SEQ ID NO: 125993 - DNA, 25 bp, Probe Sequence
ataggcgcagtggagcgggttgctt

SEQ ID NO: 125994 - DNA, 25 bp, Probe Sequence
atatacagcagtcagagatgagtat

SEQ ID NO: 125995 - DNA, 25 bp, Probe Sequence
atatatacaatccagattcactgag

SEQ ID NO: 125996 - DNA, 25 bp, Probe Sequence
atattcacaataaagcttctgagta

SEQ ID NO: 125997 - DNA, 25 bp, Probe Sequence
atatctagagtagagttgctagtca

SEQ ID NO: 125998 - DNA, 25 bp, Probe Sequence
atataaggttggctatgcagagtaa

SEQ ID NO: 125999 - DNA, 25 bp, Probe Sequence
atatcaagcgttcttatacactgaa

SEQ ID NO: 126000 - DNA, 25 bp, Probe Sequence
atatttgccattagtgattaccgag

SEQ ID NO: 126001 - DNA, 25 bp, Probe Sequence
atagggactttccattgacgtcaat

SEQ ID NO: 126002 - DNA, 25 bp, Probe Sequence
ataggggacttccagtgacgtcaat

SEQ ID NO: 126003 - DNA, 25 bp, Probe Sequence
atatttgcacacttttgtgtcgtga

SEQ ID NO: 126004 - DNA, 25 bp, Probe Sequence
atattatgcacactgttcatgcttc

SEQ ID NO: 126005 - DNA, 25 bp, Probe Sequence
atattaatatatatctgctgtccag

SEQ ID NO: 126006 - DNA, 25 bp, Probe Sequence
atatccttgataatcctggtggccc

SEQ ID NO: 126007 - DNA, 25 bp, Probe Sequence
atatcctactaataagcctcaccta

SEQ ID NO: 126008 - DNA, 25 bp, Probe Sequence
atatttggtcactcaagccatcaca

SEQ ID NO: 126009 - DNA, 25 bp, Probe Sequence
atattctagtattttcagcactcca

SEQ ID NO: 126010 - DNA, 25 bp, Probe Sequence
atatttgtgtatttaacagggaggg

SEQ ID NO: 126011 - DNA, 25 bp, Probe Sequence
ataacatcttaacagaagggggtgt

SEQ ID NO: 126012 - DNA, 25 bp, Probe Sequence
ataacccaaacatcaaagggacttg

SEQ ID NO: 126013 - DNA, 25 bp, Probe Sequence
aggactcccaaataaaagtatcaga

SEQ ID NO: 126014 - DNA, 25 bp, Probe Sequence
atagtccccaattaacaatggttca

SEQ ID NO: 126015 - DNA, 25 bp, Probe Sequence
atatgagctgcagcaataaaagtgc

SEQ ID NO: 126016 - DNA, 25 bp, Probe Sequence
atatgaccgtcaataccctgtcact

SEQ ID NO: 126017 - DNA, 25 bp, Probe Sequence
atatgacaggctgagagcacctccc

SEQ ID NO: 126018 - DNA, 25 bp, Probe Sequence
atatgacaggctgagagcacctccc

SEQ ID NO: 126019 - DNA, 25 bp, Probe Sequence
atagacaggctaattgcccaccact

SEQ ID NO: 126020 - DNA, 25 bp, Probe Sequence
atatacaggcttagtcagctgccca

SEQ ID NO: 126021 - DNA, 25 bp, Probe Sequence
atagatgcaggcgggtgagctgccc

SEQ ID NO: 126022 - DNA, 25 bp, Probe Sequence
atagatcatctaatgttgagccccc

SEQ ID NO: 126023 - DNA, 25 bp, Probe Sequence
atagccttgagcctagagggccctc

SEQ ID NO: 126024 - DNA, 25 bp, Probe Sequence
ataccatggacacagagatccccta

SEQ ID NO: 126025 - DNA, 25 bp, Probe Sequence
atatgctattatggttaacccctca

SEQ ID NO: 126026 - DNA, 25 bp, Probe Sequence
atatagttagattccaacttcctcc

SEQ ID NO: 126027 - DNA, 25 bp, Probe Sequence
atatatgtacgatgacagtgcaatc

SEQ ID NO: 126028 - DNA, 25 bp, Probe Sequence
atatatgaactttactctgacctgt

SEQ ID NO: 126029 - DNA, 25 bp, Probe Sequence
atataggatcagctccttgacctct

SEQ ID NO: 126030 - DNA, 25 bp, Probe Sequence
atatcaggacagcaactgggccagc

SEQ ID NO: 126031 - DNA, 25 bp, Probe Sequence
atagcaaggcgtcactggagagatg

SEQ ID NO: 126032 - DNA, 25 bp, Probe Sequence
atatgcagaggatgtactgtctgga

SEQ ID NO: 126033 - DNA, 25 bp, Probe Sequence
atatcgagtacatacaggtagttta

SEQ ID NO: 126034 - DNA, 25 bp, Probe Sequence
atatgtcaaaattaagcgtaactgg

SEQ ID NO: 126035 - DNA, 25 bp, Probe Sequence
atatgcctaaaatacttaaatcgga

SEQ ID NO: 126036 - DNA, 25 bp, Probe Sequence
atatactaaaccaactctaatattg

SEQ ID NO: 126037 - DNA, 25 bp, Probe Sequence
ataggtccaaccagctgtacatttg

SEQ ID NO: 126038 - DNA, 25 bp, Probe Sequence
atagttcaaaccaggatgtattcca

SEQ ID NO: 126039 - DNA, 25 bp, Probe Sequence
atagtacgccataggggactttcca

SEQ ID NO: 126040 - DNA, 25 bp, Probe Sequence
atagtacccacacatgcaaaataaa

SEQ ID NO: 126041 - DNA, 25 bp, Probe Sequence
atactctccggacatgaaccataac

SEQ ID NO: 126042 - DNA, 25 bp, Probe Sequence
atatactctccggacatgaaccata

SEQ ID NO: 126043 - DNA, 25 bp, Probe Sequence
atatgatgtggcttggaacaacaat

SEQ ID NO: 126044 - DNA, 25 bp, Probe Sequence
atatttgtctcgtacctacagatat

SEQ ID NO: 126045 - DNA, 25 bp, Probe Sequence
atattttctctgtaaggcacattat

SEQ ID NO: 126046 - DNA, 25 bp, Probe Sequence
atatttgtgtcataagacatcttca

SEQ ID NO: 126047 - DNA, 25 bp, Probe Sequence
atagcttgggaagaaacttgcagat

SEQ ID NO: 126048 - DNA, 25 bp, Probe Sequence
atatcctttgaagaattctgtgctg

SEQ ID NO: 126049 - DNA, 25 bp, Probe Sequence
atatcagcccagtagtcttcttttg

SEQ ID NO: 126050 - DNA, 25 bp, Probe Sequence
atataaccacatttctgagcctttg

SEQ ID NO: 126051 - DNA, 25 bp, Probe Sequence
atataactcaattctatgggataat

SEQ ID NO: 126052 - DNA, 25 bp, Probe Sequence
atataatctatatctaagaagtaac

SEQ ID NO: 126053 - DNA, 25 bp, Probe Sequence
atatattccatatctacaactataa

SEQ ID NO: 126054 - DNA, 25 bp, Probe Sequence
atatttcccatatttcaggtgaata

SEQ ID NO: 126055 - DNA, 25 bp, Probe Sequence
atattacctaaattggttagataca

SEQ ID NO: 126056 - DNA, 25 bp, Probe Sequence
atattacctatgaaaatgtatgagt

SEQ ID NO: 126057 - DNA, 25 bp, Probe Sequence
atatcaacctatatatagtgatggt

SEQ ID NO: 126058 - DNA, 25 bp, Probe Sequence
atatcacaaattcctatagggcagc

SEQ ID NO: 126059 - DNA, 25 bp, Probe Sequence
atatctcggatacaatagaggcaaa

SEQ ID NO: 126060 - DNA, 25 bp, Probe Sequence
atatcccaatatcttgagaacagaa

SEQ ID NO: 126061 - DNA, 25 bp, Probe Sequence
atatcccagtctgacagttcaagaa

SEQ ID NO: 126062 - DNA, 25 bp, Probe Sequence
ataccatcggggaccttaagaagct

SEQ ID NO: 126063 - DNA, 25 bp, Probe Sequence
atacctcaagtgggtctattagcat

SEQ ID NO: 126064 - DNA, 25 bp, Probe Sequence
atagcctaaggtgttttatgtgaat

SEQ ID NO: 126065 - DNA, 25 bp, Probe Sequence
atagcgtaaagtggtgtcttatgct

SEQ ID NO: 126066 - DNA, 25 bp, Probe Sequence
ataccatttactctgttttcttata

SEQ ID NO: 126067 - DNA, 25 bp, Probe Sequence
atatctaattaggttgagctttttt

SEQ ID NO: 126068 - DNA, 25 bp, Probe Sequence
atatcaagatttgggtactttattt

SEQ ID NO: 126069 - DNA, 25 bp, Probe Sequence
atatacaggtttagtatttttgcct

SEQ ID NO: 126070 - DNA, 25 bp, Probe Sequence
atatagatgagctttatatttttat

SEQ ID NO: 126071 - DNA, 25 bp, Probe Sequence
atatcagtgagagtaggcttgtttt

SEQ ID NO: 126072 - DNA, 25 bp, Probe Sequence
atatcgggacatggccctactttgg

SEQ ID NO: 126073 - DNA, 25 bp, Probe Sequence
atcttggggattgctttctgtctga

SEQ ID NO: 126074 - DNA, 25 bp, Probe Sequence
atatgtgtgggtatgtttccttata

SEQ ID NO: 126075 - DNA, 25 bp, Probe Sequence
atatattgggtcgtctgcttccctt

SEQ ID NO: 126076 - DNA, 25 bp, Probe Sequence
atatatgtaaactcgcgtccgtgct

SEQ ID NO: 126077 - DNA, 25 bp, Probe Sequence
atatttcatatacttccgtctcgat

SEQ ID NO: 126078 - DNA, 25 bp, Probe Sequence
atatttttcataatgcctctgccgt

SEQ ID NO: 126079 - DNA, 25 bp, Probe Sequence
atatttttgatgttgcatgctctca

SEQ ID NO: 126080 - DNA, 25 bp, Probe Sequence
atattttattgcatgcactgtgacc

SEQ ID NO: 126081 - DNA, 25 bp, Probe Sequence
atatatctatatagcctcactgtat

SEQ ID NO: 126082 - DNA, 25 bp, Probe Sequence
atatactgtgaacatcctgtcagct

SEQ ID NO: 126083 - DNA, 25 bp, Probe Sequence
atagccttgaatctaattacctagt

SEQ ID NO: 126084 - DNA, 25 bp, Probe Sequence
atatccatctactgtagttaagata

SEQ ID NO: 126085 - DNA, 25 bp, Probe Sequence
ataccattgagggcatagttttaaa

SEQ ID NO: 126086 - DNA, 25 bp, Probe Sequence
ataatatcggccgctgtttgtacag

SEQ ID NO: 126087 - DNA, 25 bp, Probe Sequence
atagatcttagctcacttattccaa

SEQ ID NO: 126088 - DNA, 25 bp, Probe Sequence
atatatgctaaatctttatatacag

SEQ ID NO: 126089 - DNA, 25 bp, Probe Sequence
atatatatatatatcttttcaccat

SEQ ID NO: 126090 - DNA, 25 bp, Probe Sequence
atagatactgaatctgtcttgcctt

SEQ ID NO: 126091 - DNA, 25 bp, Probe Sequence
atatgaaatgaagttgttccctcct

SEQ ID NO: 126092 - DNA, 25 bp, Probe Sequence
atatgattaatacattccgcccctt

SEQ ID NO: 126093 - DNA, 25 bp, Probe Sequence
atatgattataagcattcccctctg

SEQ ID NO: 126094 - DNA, 25 bp, Probe Sequence
atagctttgcaaccttgtactttac

SEQ ID NO: 126095 - DNA, 25 bp, Probe Sequence
atatgtattgcctgttgcttttaaa

SEQ ID NO: 126096 - DNA, 25 bp, Probe Sequence
atataataccatcttctctgttaat

SEQ ID NO: 126097 - DNA, 25 bp, Probe Sequence
atatgaacctattttcatttgtaca

SEQ ID NO: 126098 - DNA, 25 bp, Probe Sequence
atataacctattagtttgctcctca

SEQ ID NO: 126099 - DNA, 25 bp, Probe Sequence
atataagaccactgcttatctgtat

SEQ ID NO: 126100 - DNA, 25 bp, Probe Sequence
atagacagaaaatcattaggtaatt

SEQ ID NO: 126101 - DNA, 25 bp, Probe Sequence
atagctgaaaattacttaaggaaga

SEQ ID NO: 126102 - DNA, 25 bp, Probe Sequence
atatgtatcggatttcttcaaagaa

SEQ ID NO: 126103 - DNA, 25 bp, Probe Sequence
atagatgctcatggtgtgggaaaag

SEQ ID NO: 126104 - DNA, 25 bp, Probe Sequence
atagagtatcactgggaataggccc

SEQ ID NO: 126105 - DNA, 25 bp, Probe Sequence
atagaagacacccgggaccgatcca

SEQ ID NO: 126106 - DNA, 25 bp, Probe Sequence
atagacattagacagggacctgaaa

SEQ ID NO: 126107 - DNA, 25 bp, Probe Sequence
atagacgtagaaaacgcatccttga

SEQ ID NO: 126108 - DNA, 25 bp, Probe Sequence
ataggagataaaacccccactgaga

SEQ ID NO: 126109 - DNA, 25 bp, Probe Sequence
atagtgagtaagttcttccctagag

SEQ ID NO: 126110 - DNA, 25 bp, Probe Sequence
ataggagtactggtttttcataatg

SEQ ID NO: 126111 - DNA, 25 bp, Probe Sequence
atagtagtcactttattggccactt

SEQ ID NO: 126112 - DNA, 25 bp, Probe Sequence
atagtggtcacttaattgacactga

SEQ ID NO: 126113 - DNA, 25 bp, Probe Sequence
atatatggccacactatctacactt

SEQ ID NO: 126114 - DNA, 25 bp, Probe Sequence
atatgataccacaggcagctaggat

SEQ ID NO: 126115 - DNA, 25 bp, Probe Sequence
atatgtatgcccatagcctagaatt

SEQ ID NO: 126116 - DNA, 25 bp, Probe Sequence
atagtacgtctcacttgaaattgct

SEQ ID NO: 126117 - DNA, 25 bp, Probe Sequence
atatgtatcgatgccttttagtttt

SEQ ID NO: 126118 - DNA, 25 bp, Probe Sequence
atatgtattcattcactttcaagat

SEQ ID NO: 126119 - DNA, 25 bp, Probe Sequence
atataactctctacatttctgaatg

SEQ ID NO: 126120 - DNA, 25 bp, Probe Sequence
atatgcagactgactgattctaaga

SEQ ID NO: 126121 - DNA, 25 bp, Probe Sequence
atatcagacatgaccataaatagcg

SEQ ID NO: 126122 - DNA, 25 bp, Probe Sequence
atataggcagatgtacagaactgaa

SEQ ID NO: 126123 - DNA, 25 bp, Probe Sequence
atatgggcagaaaaggctatgctaa

SEQ ID NO: 126124 - DNA, 25 bp, Probe Sequence
atatgtctccaaagaacttgccaaa

SEQ ID NO: 126125 - DNA, 25 bp, Probe Sequence
atatcatccaacaaaatctcattca

SEQ ID NO: 126126 - DNA, 25 bp, Probe Sequence
atataccaccaattacttgtctttt

SEQ ID NO: 126127 - DNA, 25 bp, Probe Sequence
atatttgggcaatgactatattttt

SEQ ID NO: 126128 - DNA, 25 bp, Probe Sequence
atatttgcaatctatctactcattt

SEQ ID NO: 126129 - DNA, 25 bp, Probe Sequence
atatttcttttctatctcatcttga

SEQ ID NO: 126130 - DNA, 25 bp, Probe Sequence
atatactgcttcttgaactcttaga

SEQ ID NO: 126131 - DNA, 25 bp, Probe Sequence
atatccttgctcaggctctttatga

SEQ ID NO: 126132 - DNA, 25 bp, Probe Sequence
atatctttctctgtgcttcactgat

SEQ ID NO: 126133 - DNA, 25 bp, Probe Sequence
atatcatttactggtgtttctgagt

SEQ ID NO: 126134 - DNA, 25 bp, Probe Sequence
atatattaacgcagtcttgtaggca

SEQ ID NO: 126135 - DNA, 25 bp, Probe Sequence
atatgaaaaccatgtgcatcttaaa

SEQ ID NO: 126136 - DNA, 25 bp, Probe Sequence
atatacaactactatgtacctacaa

SEQ ID NO: 126137 - DNA, 25 bp, Probe Sequence
atataggccaactattagtaataat

SEQ ID NO: 126138 - DNA, 25 bp, Probe Sequence
atataggcctgaattttgtaaagta

SEQ ID NO: 126139 - DNA, 25 bp, Probe Sequence
atatcggccgctgtttgtacagaca

SEQ ID NO: 126140 - DNA, 25 bp, Probe Sequence
atatcagacccccagtttcaggaat

SEQ ID NO: 126141 - DNA, 25 bp, Probe Sequence
atatcaactcaacagtattactact

SEQ ID NO: 126142 - DNA, 25 bp, Probe Sequence
atatccagccagtacagtatttttt

SEQ ID NO: 126143 - DNA, 25 bp, Probe Sequence
atatcaagccagcatttgtattttg

SEQ ID NO: 126144 - DNA, 25 bp, Probe Sequence
atatctaggcagtattttgcttttg

SEQ ID NO: 126145 - DNA, 25 bp, Probe Sequence
atatctttcatatttgtttgctgta

SEQ ID NO: 126146 - DNA, 25 bp, Probe Sequence
atatttgttagatttgtagctgata

SEQ ID NO: 126147 - DNA, 25 bp, Probe Sequence
atatttgatctttattgttaataac

SEQ ID NO: 126148 - DNA, 25 bp, Probe Sequence
atatgttgtcttttgtttaagcatt

SEQ ID NO: 126149 - DNA, 25 bp, Probe Sequence
ataggcttcttgtgtgttaaacttg

SEQ ID NO: 126150 - DNA, 25 bp, Probe Sequence
ataggcctctgggagtgatttggtt

SEQ ID NO: 126151 - DNA, 25 bp, Probe Sequence
atagcatacggggatgtgatgttgg

SEQ ID NO: 126152 - DNA, 25 bp, Probe Sequence
atacatgcacgtgaatgttcattgc

SEQ ID NO: 126153 - DNA, 25 bp, Probe Sequence
atatctgaagctgaagatctgagaa

SEQ ID NO: 126154 - DNA, 25 bp, Probe Sequence
atatcgactctggaattgtaaagca

SEQ ID NO: 126155 - DNA, 25 bp, Probe Sequence
atatcacctgctcaacatgtaatta

SEQ ID NO: 126156 - DNA, 25 bp, Probe Sequence
atatctatcttttcatcatgtctat

SEQ ID NO: 126157 - DNA, 25 bp, Probe Sequence
atatctacatgttgtataattggat

SEQ ID NO: 126158 - DNA, 25 bp, Probe Sequence
atatctcctctcttcataattatca

SEQ ID NO: 126159 - DNA, 25 bp, Probe Sequence
atatcccctctttcaatcattggtg

SEQ ID NO: 126160 - DNA, 25 bp, Probe Sequence
atcagtggccctcataactggagta

SEQ ID NO: 126161 - DNA, 25 bp, Probe Sequence
atagtggattgcctacaactggatt

SEQ ID NO: 126162 - DNA, 25 bp, Probe Sequence
atagtgacttgtcgcatgaacggtc

SEQ ID NO: 126163 - DNA, 25 bp, Probe Sequence
atatcaactttgccatatctgcagg

SEQ ID NO: 126164 - DNA, 25 bp, Probe Sequence
atagcaggctgttggcatagctggc

SEQ ID NO: 126165 - DNA, 25 bp, Probe Sequence
atagaggctttggcataggatcaga

SEQ ID NO: 126166 - DNA, 25 bp, Probe Sequence
atatgcctgctatttgaagtgtaat

SEQ ID NO: 126167 - DNA, 25 bp, Probe Sequence
atatccacttttccatgatggaatt

SEQ ID NO: 126168 - DNA, 25 bp, Probe Sequence
atatcactttggatcatggacatga

SEQ ID NO: 126169 - DNA, 25 bp, Probe Sequence
atatagcctggtgtgattgatgtga

SEQ ID NO: 126170 - DNA, 25 bp, Probe Sequence
atatatgcactttgctgtttgatta

SEQ ID NO: 126171 - DNA, 25 bp, Probe Sequence
atatgctgcactaacctttggtatc

SEQ ID NO: 126172 - DNA, 25 bp, Probe Sequence
ataggacatatgtacttgtggaaca

SEQ ID NO: 126173 - DNA, 25 bp, Probe Sequence
atatgtctctatccagctcggtaaa

SEQ ID NO: 126174 - DNA, 25 bp, Probe Sequence
atatgtctctatctcaggtttctca

SEQ ID NO: 126175 - DNA, 25 bp, Probe Sequence
atatcactatctctagagttcacta

SEQ ID NO: 126176 - DNA, 25 bp, Probe Sequence
atataccatcttgaggttacacaaa

SEQ ID NO: 126177 - DNA, 25 bp, Probe Sequence
atatgtccactaacagatgtatata

SEQ ID NO: 126178 - DNA, 25 bp, Probe Sequence
atatgatcacctgttatgttatagg

SEQ ID NO: 126179 - DNA, 25 bp, Probe Sequence
atatgctcagccgggatacctatga

SEQ ID NO: 126180 - DNA, 25 bp, Probe Sequence
atatgctcagccgggatacctatga

SEQ ID NO: 126181 - DNA, 25 bp, Probe Sequence
atatgccctgcgtaaactggatgac

SEQ ID NO: 126182 - DNA, 25 bp, Probe Sequence
atagcccaggacagactatggactt

SEQ ID NO: 126183 - DNA, 25 bp, Probe Sequence
atagcacaacgagctaccgttttta

SEQ ID NO: 126184 - DNA, 25 bp, Probe Sequence
ataccaaggggatgggattgttgaa

SEQ ID NO: 126185 - DNA, 25 bp, Probe Sequence
atatctcaacggcctcggcaattgt

SEQ ID NO: 126186 - DNA, 25 bp, Probe Sequence
atatcatcagatgtgccttgagaat

SEQ ID NO: 126187 - DNA, 25 bp, Probe Sequence
atatcacagatgctgcgcaagagcg

SEQ ID NO: 126188 - DNA, 25 bp, Probe Sequence
atagaagatggggcaaatgtgcttg

SEQ ID NO: 126189 - DNA, 25 bp, Probe Sequence
atagacagatggaccacaatgggaa

SEQ ID NO: 126190 - DNA, 25 bp, Probe Sequence
atagaaggattcccatccctgagct

SEQ ID NO: 126191 - DNA, 25 bp, Probe Sequence
atactagagttacggccttgcggga

SEQ ID NO: 126192 - DNA, 25 bp, Probe Sequence
atactgctcagtgacatggcccagg

SEQ ID NO: 126193 - DNA, 25 bp, Probe Sequence
atactgctcagtgacatggcccagg

SEQ ID NO: 126194 - DNA, 25 bp, Probe Sequence
atactgcctggcagctgcgattcag

SEQ ID NO: 126195 - DNA, 25 bp, Probe Sequence
atagctcacaggagccagatctact

SEQ ID NO: 126196 - DNA, 25 bp, Probe Sequence
atagccaagatggatgccacagcca

SEQ ID NO: 126197 - DNA, 25 bp, Probe Sequence
atagccaagtgccatcagacaagat

SEQ ID NO: 126198 - DNA, 25 bp, Probe Sequence
atatgcacaagtagaagctcaagtc

SEQ ID NO: 126199 - DNA, 25 bp, Probe Sequence
atatcatgaaaatggccatactgcc

SEQ ID NO: 126200 - DNA, 25 bp, Probe Sequence
atacatcaacaaccgaaacgtgccg

SEQ ID NO: 126201 - DNA, 25 bp, Probe Sequence
atatcaactaatcatcaagtttgcc

SEQ ID NO: 126202 - DNA, 25 bp, Probe Sequence
atatcatgactatctattggttcca

SEQ ID NO: 126203 - DNA, 25 bp, Probe Sequence
atatctaaatgagttgtgagttgac

SEQ ID NO: 126204 - DNA, 25 bp, Probe Sequence
atatctctacattttgagtttgatg

SEQ ID NO: 126205 - DNA, 25 bp, Probe Sequence
atatctcatgaatattcgtgcaaaa

SEQ ID NO: 126206 - DNA, 25 bp, Probe Sequence
atatccatgccatatcatgtgtgta

SEQ ID NO: 126207 - DNA, 25 bp, Probe Sequence
atatgacaatgaaatctgtgtgtat

SEQ ID NO: 126208 - DNA, 25 bp, Probe Sequence
atataccataaccagcgtgttgggt

SEQ ID NO: 126209 - DNA, 25 bp, Probe Sequence
atatcaccaaacgggtgtgactcct

SEQ ID NO: 126210 - DNA, 25 bp, Probe Sequence
atatctggaaacgggcattgcctgc

SEQ ID NO: 126211 - DNA, 25 bp, Probe Sequence
atatgtatgacatcctgggtcctga

SEQ ID NO: 126212 - DNA, 25 bp, Probe Sequence
atatgtcaagattcgttggtgctca

SEQ ID NO: 126213 - DNA, 25 bp, Probe Sequence
atagaaagtagccagctgggcacgg

SEQ ID NO: 126214 - DNA, 25 bp, Probe Sequence
atatgaaagctaagcctgtggccat

SEQ ID NO: 126215 - DNA, 25 bp, Probe Sequence
atatacgaatgaatgccagctctgc

SEQ ID NO: 126216 - DNA, 25 bp, Probe Sequence
atatgacaaatagtggctctctgcc

SEQ ID NO: 126217 - DNA, 25 bp, Probe Sequence
atatgccaaatattgagtgctgtga

SEQ ID NO: 126218 - DNA, 25 bp, Probe Sequence
atactataacattgatgtgcctagt

SEQ ID NO: 126219 - DNA, 25 bp, Probe Sequence
atatctgaaacattttccttggatt

SEQ ID NO: 126220 - DNA, 25 bp, Probe Sequence
atatgagaaccgagaccttggaatg

SEQ ID NO: 126221 - DNA, 25 bp, Probe Sequence
atatggaactagaaggctgtttgaa

SEQ ID NO: 126222 - DNA, 25 bp, Probe Sequence
atatggatatgctatcaaactgtga

SEQ ID NO: 126223 - DNA, 25 bp, Probe Sequence
atatgcgatttgacagaagcggaac

SEQ ID NO: 126224 - DNA, 25 bp, Probe Sequence
atatggttcggtaggctgtgtacgg

SEQ ID NO: 126225 - DNA, 25 bp, Probe Sequence
atatccttcaggagtctgtcaaaga

SEQ ID NO: 126226 - DNA, 25 bp, Probe Sequence
atatcctcattgctgcgatcatgtc

SEQ ID NO: 126227 - DNA, 25 bp, Probe Sequence
atatactgcctgcttctatgatgtt

SEQ ID NO: 126228 - DNA, 25 bp, Probe Sequence
atatcccctgtatctatgtgttaaa

SEQ ID NO: 126229 - DNA, 25 bp, Probe Sequence
atatacattctgaaactatctcatt

SEQ ID NO: 126230 - DNA, 25 bp, Probe Sequence
atatgtgctttgctactattccaag

SEQ ID NO: 126231 - DNA, 25 bp, Probe Sequence
ataggctttggtcttttcatctgca

SEQ ID NO: 126232 - DNA, 25 bp, Probe Sequence
ataggctttagagcctttcacctaa

SEQ ID NO: 126233 - DNA, 25 bp, Probe Sequence
atagtcctataagcttttccacttg

SEQ ID NO: 126234 - DNA, 25 bp, Probe Sequence
ataaagtataacccctacccatgtg

SEQ ID NO: 126235 - DNA, 25 bp, Probe Sequence
atataattctaatgtcccacctatg

SEQ ID NO: 126236 - DNA, 25 bp, Probe Sequence
atataactgtaatgccaccacaaaa

SEQ ID NO: 126237 - DNA, 25 bp, Probe Sequence
atatggactgttaactgtccccaga

SEQ ID NO: 126238 - DNA, 25 bp, Probe Sequence
atatgaactgttaatcttggtggat

SEQ ID NO: 126239 - DNA, 25 bp, Probe Sequence
atatgtcactggagctttgttggga

SEQ ID NO: 126240 - DNA, 25 bp, Probe Sequence
atatgtcattccccatatgtgttgg

SEQ ID NO: 126241 - DNA, 25 bp, Probe Sequence
atagtcattccaaatatgagatgca

SEQ ID NO: 126242 - DNA, 25 bp, Probe Sequence
atagacattctcacataagcccagt

SEQ ID NO: 126243 - DNA, 25 bp, Probe Sequence
atagacattctcacataagcccagt

SEQ ID NO: 126244 - DNA, 25 bp, Probe Sequence
atagacttccatgttccatctgagt

SEQ ID NO: 126245 - DNA, 25 bp, Probe Sequence
atagtttctgacatgtgcctatgcg

SEQ ID NO: 126246 - DNA, 25 bp, Probe Sequence
atagttttgtgcagtgacagagatt

SEQ ID NO: 126247 - DNA, 25 bp, Probe Sequence
atagtttgtcacagtaacgttcatt

SEQ ID NO: 126248 - DNA, 25 bp, Probe Sequence
atatgctttgacctactaactttct

SEQ ID NO: 126249 - DNA, 25 bp, Probe Sequence
atatcctctgacgtatcatcttttt

SEQ ID NO: 126250 - DNA, 25 bp, Probe Sequence
atatacacatacgtatgcaaatatt

SEQ ID NO: 126251 - DNA, 25 bp, Probe Sequence
atatgaactacctatggacatctat

SEQ ID NO: 126252 - DNA, 25 bp, Probe Sequence
ataggaatgtccttgcccatatata

SEQ ID NO: 126253 - DNA, 25 bp, Probe Sequence
ataggaatgacctatggcttactga

SEQ ID NO: 126254 - DNA, 25 bp, Probe Sequence
atagacctgaccaaggtgccagcta

SEQ ID NO: 126255 - DNA, 25 bp, Probe Sequence
atagtccatactgagtgtcatcaac

SEQ ID NO: 126256 - DNA, 25 bp, Probe Sequence
atagcatcttgaatagagagctgca

SEQ ID NO: 126257 - DNA, 25 bp, Probe Sequence
atagcagattagcatgatagtcatt

SEQ ID NO: 126258 - DNA, 25 bp, Probe Sequence
atatgttgtgagcatataccttcac

SEQ ID NO: 126259 - DNA, 25 bp, Probe Sequence
atagccttgaattaagtcttccttc

SEQ ID NO: 126260 - DNA, 25 bp, Probe Sequence
atagacgatgttttaatgtaccttc

SEQ ID NO: 126261 - DNA, 25 bp, Probe Sequence
atgaaggtgttttcgaattccgtga

SEQ ID NO: 126262 - DNA, 25 bp, Probe Sequence
atcacgggactttccaaatgtcgta

SEQ ID NO: 126263 - DNA, 25 bp, Probe Sequence
atcacgggactttccaaaatgtcgt

SEQ ID NO: 126264 - DNA, 25 bp, Probe Sequence
atcacgggactttccaaaatgtcgt

SEQ ID NO: 126265 - DNA, 25 bp, Probe Sequence
atcacgggactttccaaaatgtcgt

SEQ ID NO: 126266 - DNA, 25 bp, Probe Sequence
atcggggaccttaagaagctgattg

SEQ ID NO: 126267 - DNA, 25 bp, Probe Sequence
atgcgaactacagtttggaacttgg

SEQ ID NO: 126268 - DNA, 25 bp, Probe Sequence
atcgacctccgctggaggaatgggg

SEQ ID NO: 126269 - DNA, 25 bp, Probe Sequence
accacggccgagcgggaaatcgtgc

SEQ ID NO: 126270 - DNA, 25 bp, Probe Sequence
atgccacggccgagggagaaggagt

SEQ ID NO: 126271 - DNA, 25 bp, Probe Sequence
atatcacaacccagaagtaaccacc

SEQ ID NO: 126272 - DNA, 25 bp, Probe Sequence
ataatgaggcccaggttaacccaga

SEQ ID NO: 126273 - DNA, 25 bp, Probe Sequence
ataatagtcccacagggaacctggg

SEQ ID NO: 126274 - DNA, 25 bp, Probe Sequence
atactggtccagtctaggagaacct

SEQ ID NO: 126275 - DNA, 25 bp, Probe Sequence
atctcggttttcaagtggtacactc

SEQ ID NO: 126276 - DNA, 25 bp, Probe Sequence
atctctggggtaaagtgaaatagtt

SEQ ID NO: 126277 - DNA, 25 bp, Probe Sequence
atatctggggtccaagggattggtt

SEQ ID NO: 126278 - DNA, 25 bp, Probe Sequence
atagtgtgtggtgaagatgggtggt

SEQ ID NO: 126279 - DNA, 25 bp, Probe Sequence
ataccgtagaaaagatggcgtgttt

SEQ ID NO: 126280 - DNA, 25 bp, Probe Sequence
atatccgaaactaaatacttgattt

SEQ ID NO: 126281 - DNA, 25 bp, Probe Sequence
atagcagggaacaacagatactggg

SEQ ID NO: 126282 - DNA, 25 bp, Probe Sequence
atagcctaatacaacatgtagctga

SEQ ID NO: 126283 - DNA, 25 bp, Probe Sequence
atgacctagtaaactttgtaccagt

SEQ ID NO: 126284 - DNA, 25 bp, Probe Sequence
atacctactacaacttttcaagaca

SEQ ID NO: 126285 - DNA, 25 bp, Probe Sequence
ataccattattacctctttgaaaat

SEQ ID NO: 126286 - DNA, 25 bp, Probe Sequence
ataggcatatgatacccacttggac

SEQ ID NO: 126287 - DNA, 25 bp, Probe Sequence
atatgtgcagtgtcagcaccatcct

SEQ ID NO: 126288 - DNA, 25 bp, Probe Sequence
atatcatcgctggcgactgcactct

SEQ ID NO: 126289 - DNA, 25 bp, Probe Sequence
atatctgcaggagagctgttctata

SEQ ID NO: 126290 - DNA, 25 bp, Probe Sequence
atatcaagaatctagtttcatctga

SEQ ID NO: 126291 - DNA, 25 bp, Probe Sequence
atatgcaaagcactgacttctaagt

SEQ ID NO: 126292 - DNA, 25 bp, Probe Sequence
atatgctaagtgaaagtgagaagtg

SEQ ID NO: 126293 - DNA, 25 bp, Probe Sequence
atatcctcagaccaggtggaattac

SEQ ID NO: 126294 - DNA, 25 bp, Probe Sequence
atatcctctacctgatggtagtgac

SEQ ID NO: 126295 - DNA, 25 bp, Probe Sequence
atatcttccctctgatgctggaaac

SEQ ID NO: 126296 - DNA, 25 bp, Probe Sequence
atacttgccttggactgtagaacag

SEQ ID NO: 126297 - DNA, 25 bp, Probe Sequence
atactggctttggcactactagtgg

SEQ ID NO: 126298 - DNA, 25 bp, Probe Sequence
atactgccttctgacagactgggtt

SEQ ID NO: 126299 - DNA, 25 bp, Probe Sequence
atatcttcttcaggctctgacaggc

SEQ ID NO: 126300 - DNA, 25 bp, Probe Sequence
atatgcaatttcgtgccattcagga

SEQ ID NO: 126301 - DNA, 25 bp, Probe Sequence
atatcagctgttgtgctcattagtt

SEQ ID NO: 126302 - DNA, 25 bp, Probe Sequence
atatcatctgtcattatattctaat

SEQ ID NO: 126303 - DNA, 25 bp, Probe Sequence
atatcactgtcctttatcatgtttt

SEQ ID NO: 126304 - DNA, 25 bp, Probe Sequence
atatgaggtctctggatagctattt

SEQ ID NO: 126305 - DNA, 25 bp, Probe Sequence
atagtgcattctgaggatagcatat

SEQ ID NO: 126306 - DNA, 25 bp, Probe Sequence
atagtatgtctgtacctggaaggta

SEQ ID NO: 126307 - DNA, 25 bp, Probe Sequence
atactctgatcaccccgagaaagta

SEQ ID NO: 126308 - DNA, 25 bp, Probe Sequence
aacctgatcagcccctaaaggtaat

SEQ ID NO: 126309 - DNA, 25 bp, Probe Sequence
atacctggcaattaatccaaggtca

SEQ ID NO: 126310 - DNA, 25 bp, Probe Sequence
atatccagaaactacaacaaactca

SEQ ID NO: 126311 - DNA, 25 bp, Probe Sequence
atatcctgataatctctataatact

SEQ ID NO: 126312 - DNA, 25 bp, Probe Sequence
atatctgctatcatttctatagtat

SEQ ID NO: 126313 - DNA, 25 bp, Probe Sequence
atatcctcatatttttaccatattt

SEQ ID NO: 126314 - DNA, 25 bp, Probe Sequence
atagctatcatgtgtttcccaaatc

SEQ ID NO: 126315 - DNA, 25 bp, Probe Sequence
atatgctcataagaacccacacaat

SEQ ID NO: 126316 - DNA, 25 bp, Probe Sequence
atatggaaacagaagctcaccagaa

SEQ ID NO: 126317 - DNA, 25 bp, Probe Sequence
atatggagcacttaaataccgtatg

SEQ ID NO: 126318 - DNA, 25 bp, Probe Sequence
atatgctgtcctcaatagatccacc

SEQ ID NO: 126319 - DNA, 25 bp, Probe Sequence
atatctgctctctgttagatctcac

SEQ ID NO: 126320 - DNA, 25 bp, Probe Sequence
atatctgtcagatgcttgtatccac

SEQ ID NO: 126321 - DNA, 25 bp, Probe Sequence
atatctgagagtgtcatccatctcc

SEQ ID NO: 126322 - DNA, 25 bp, Probe Sequence
atatctggagtacctgctctgtttt

SEQ ID NO: 126323 - DNA, 25 bp, Probe Sequence
atatctgaggaaactgcacttgatt

SEQ ID NO: 126324 - DNA, 25 bp, Probe Sequence
atatgctagtcgatagagcggcttt

SEQ ID NO: 126325 - DNA, 25 bp, Probe Sequence
atagctttgcagatgatgtgggttt

SEQ ID NO: 126326 - DNA, 25 bp, Probe Sequence
atagtgactctgtgcttgtctgttt

SEQ ID NO: 126327 - DNA, 25 bp, Probe Sequence
atatgttatcagtgtaatgctttat

SEQ ID NO: 126328 - DNA, 25 bp, Probe Sequence
atagttacactatatatgctcttag

SEQ ID NO: 126329 - DNA, 25 bp, Probe Sequence
atagtatcaagcaggattgctttca

SEQ ID NO: 126330 - DNA, 25 bp, Probe Sequence
atagttatggccggatttgcttttt

SEQ ID NO: 126331 - DNA, 25 bp, Probe Sequence
atagtttgtccagattagctttcat

SEQ ID NO: 126332 - DNA, 25 bp, Probe Sequence
atagcttctacctcagctacttatt

SEQ ID NO: 126333 - DNA, 25 bp, Probe Sequence
atagttctatcctctaattccatta

SEQ ID NO: 126334 - DNA, 25 bp, Probe Sequence
atagcttgtaccagtacttcctctc

SEQ ID NO: 126335 - DNA, 25 bp, Probe Sequence
atagtttacactgttttcatcttgt

SEQ ID NO: 126336 - DNA, 25 bp, Probe Sequence
atagttttactttcttggcactgga

SEQ ID NO: 126337 - DNA, 25 bp, Probe Sequence
atagttggtactctgattcctctgg

SEQ ID NO: 126338 - DNA, 25 bp, Probe Sequence
atagttccaaatccagaatgcctct

SEQ ID NO: 126339 - DNA, 25 bp, Probe Sequence
atagtatctcagattgaccatttct

SEQ ID NO: 126340 - DNA, 25 bp, Probe Sequence
atatgttcagcaatgttgatctcat

SEQ ID NO: 126341 - DNA, 25 bp, Probe Sequence
atatgcgagcaaagcattctcatca

SEQ ID NO: 126342 - DNA, 25 bp, Probe Sequence
atatgccaagattcattccatgatt

SEQ ID NO: 126343 - DNA, 25 bp, Probe Sequence
atatccatagatagttcattcattc

SEQ ID NO: 126344 - DNA, 25 bp, Probe Sequence
atatccataaattttatctgtcaat

SEQ ID NO: 126345 - DNA, 25 bp, Probe Sequence
atatcctttcatgtatatttccaca

SEQ ID NO: 126346 - DNA, 25 bp, Probe Sequence
atatcttggtttaccatgattccaa

SEQ ID NO: 126347 - DNA, 25 bp, Probe Sequence
atatgcgggtgttaggtatccagga

SEQ ID NO: 126348 - DNA, 25 bp, Probe Sequence
atatgcgggtccagtgtcaacagta

SEQ ID NO: 126349 - DNA, 25 bp, Probe Sequence
atatcttggttcatcttcaaaatca

SEQ ID NO: 126350 - DNA, 25 bp, Probe Sequence
atatctatggtaatattttgaccct

SEQ ID NO: 126351 - DNA, 25 bp, Probe Sequence
atatccatgtgtatgtggttagaca

SEQ ID NO: 126352 - DNA, 25 bp, Probe Sequence
atatcttttatcagtgttcagatca

SEQ ID NO: 126353 - DNA, 25 bp, Probe Sequence
atatctattttaactgcttcagaca

SEQ ID NO: 126354 - DNA, 25 bp, Probe Sequence
atatctgttctgcaactgttgaaac

SEQ ID NO: 126355 - DNA, 25 bp, Probe Sequence
atatccgtggactgctttgatcaac

SEQ ID NO: 126356 - DNA, 25 bp, Probe Sequence
atatccagggactacttctcattgc

SEQ ID NO: 126357 - DNA, 25 bp, Probe Sequence
atatcctcaagcatacttcctaaag

SEQ ID NO: 126358 - DNA, 25 bp, Probe Sequence
atatctaaagcagtttactcatcaa

SEQ ID NO: 126359 - DNA, 25 bp, Probe Sequence
atacagacaggcgtgaagacattca

SEQ ID NO: 126360 - DNA, 25 bp, Probe Sequence
ataaagggccaggaacaatcagcag

SEQ ID NO: 126361 - DNA, 25 bp, Probe Sequence
atatgacagtggcaatgaaaatcaa

SEQ ID NO: 126362 - DNA, 25 bp, Probe Sequence
atatcccattggttaaaagcaagtc

SEQ ID NO: 126363 - DNA, 25 bp, Probe Sequence
atatccaactgttgtatacacagag

SEQ ID NO: 126364 - DNA, 25 bp, Probe Sequence
atatgccaccgattgcaggacacaa

SEQ ID NO: 126365 - DNA, 25 bp, Probe Sequence
atatgccacctcaaacaagcacaag

SEQ ID NO: 126366 - DNA, 25 bp, Probe Sequence
atatgcaaactaaatcactcgctca

SEQ ID NO: 126367 - DNA, 25 bp, Probe Sequence
atatgccaggtagacaccagcccaa

SEQ ID NO: 126368 - DNA, 25 bp, Probe Sequence
atatgccttgtaaatggctcaccga

SEQ ID NO: 126369 - DNA, 25 bp, Probe Sequence
atatgccttgtaaatggctcaccga

SEQ ID NO: 126370 - DNA, 25 bp, Probe Sequence
atatggcctcaatatgtgccgccag

SEQ ID NO: 126371 - DNA, 25 bp, Probe Sequence
atatggacataacttgtgaaggatg

SEQ ID NO: 126372 - DNA, 25 bp, Probe Sequence
atagtgaatagaatctggacaggat

SEQ ID NO: 126373 - DNA, 25 bp, Probe Sequence
atagcttccaatacaagcacagggg

SEQ ID NO: 126374 - DNA, 25 bp, Probe Sequence
atagctgtccaagtgcgagggggcc

SEQ ID NO: 126375 - DNA, 25 bp, Probe Sequence
atagagtcagatctgtgggggcccc

SEQ ID NO: 126376 - DNA, 25 bp, Probe Sequence
atagagtatgcacatttgggactgc

SEQ ID NO: 126377 - DNA, 25 bp, Probe Sequence
ataggtgtgaacagtgtgtaccagt

SEQ ID NO: 126378 - DNA, 25 bp, Probe Sequence
atacgttgactccgggattccagtc

SEQ ID NO: 126379 - DNA, 25 bp, Probe Sequence
atagctggtggtgggcgctaatcct

SEQ ID NO: 126380 - DNA, 25 bp, Probe Sequence
atagcgacgcgctggcgttacagcg

SEQ ID NO: 126381 - DNA, 25 bp, Probe Sequence
atatggatcgccagtctttacatcg

SEQ ID NO: 126382 - DNA, 25 bp, Probe Sequence
ataggacactcaagacttttgactg

SEQ ID NO: 126383 - DNA, 25 bp, Probe Sequence
atagatgacccccaggtattgtctt

SEQ ID NO: 126384 - DNA, 25 bp, Probe Sequence
atagagaccgtgtggtttttgttca

SEQ ID NO: 126385 - DNA, 25 bp, Probe Sequence
ataggacagacttaggagttttgtt

SEQ ID NO: 126386 - DNA, 25 bp, Probe Sequence
ataccaccactttgggggctttgtg

SEQ ID NO: 126387 - DNA, 25 bp, Probe Sequence
atatccccaatgttgcgtgggctag

SEQ ID NO: 126388 - DNA, 25 bp, Probe Sequence
atatgctttaagaatcgatggggga

SEQ ID NO: 126389 - DNA, 25 bp, Probe Sequence
atatgcttcacaaagaagggtggga

SEQ ID NO: 126390 - DNA, 25 bp, Probe Sequence
atactctcgtgcaaaaggggtgcat

SEQ ID NO: 126391 - DNA, 25 bp, Probe Sequence
atacctctggcatgagacagtggtg

SEQ ID NO: 126392 - DNA, 25 bp, Probe Sequence
atacctgtggcatcaccaagttccc

SEQ ID NO: 126393 - DNA, 25 bp, Probe Sequence
atatgcccaggttaccaacaatcct

SEQ ID NO: 126394 - DNA, 25 bp, Probe Sequence
atatcccagctttcaacaaaatttg

SEQ ID NO: 126395 - DNA, 25 bp, Probe Sequence
atatcgctagttaaaagatgcactt

SEQ ID NO: 126396 - DNA, 25 bp, Probe Sequence
atacgtaacgaaaaggcctagcgag

SEQ ID NO: 126397 - DNA, 25 bp, Probe Sequence
atatctgaacccatggaggctcata

SEQ ID NO: 126398 - DNA, 25 bp, Probe Sequence
atagaaactgtcatgttgagtcata

SEQ ID NO: 126399 - DNA, 25 bp, Probe Sequence
atagaggatggtactgttttcatac

SEQ ID NO: 126400 - DNA, 25 bp, Probe Sequence
ataatcgtttgcattttgttacttg

SEQ ID NO: 126401 - DNA, 25 bp, Probe Sequence
atacaggtttagtatttttgcctgt

SEQ ID NO: 126402 - DNA, 25 bp, Probe Sequence
atatgctggttgtgtatgctttgtc

SEQ ID NO: 126403 - DNA, 25 bp, Probe Sequence
atatgcattatcttttataatcttc

SEQ ID NO: 126404 - DNA, 25 bp, Probe Sequence
atatgtagactttgtcttatgtgtc

SEQ ID NO: 126405 - DNA, 25 bp, Probe Sequence
atatgaatgacattgctgtcgtttt

SEQ ID NO: 126406 - DNA, 25 bp, Probe Sequence
atatgcaatgccactgcatccatgc

SEQ ID NO: 126407 - DNA, 25 bp, Probe Sequence
atatggtgctcattctcatccatcc

SEQ ID NO: 126408 - DNA, 25 bp, Probe Sequence
atatgagtgccatgcatccaattcc

SEQ ID NO: 126409 - DNA, 25 bp, Probe Sequence
atagggcaatataccaatctcctga

SEQ ID NO: 126410 - DNA, 25 bp, Probe Sequence
atatgtgatatatttcccctcttga

SEQ ID NO: 126411 - DNA, 25 bp, Probe Sequence
atatggtatgaggtcgccacttctc

SEQ ID NO: 126412 - DNA, 25 bp, Probe Sequence
atatgagtagtggctctcccaacta

SEQ ID NO: 126413 - DNA, 25 bp, Probe Sequence
atctacttggctgccttcaattttg

SEQ ID NO: 126414 - DNA, 25 bp, Probe Sequence
atatgcactctggtaccttaatttt

SEQ ID NO: 126415 - DNA, 25 bp, Probe Sequence
atatgcagctgtgatacttgtagat

SEQ ID NO: 126416 - DNA, 25 bp, Probe Sequence
atatgcactgtccatcatgtttatt

SEQ ID NO: 126417 - DNA, 25 bp, Probe Sequence
atagcatgatgctctgcagttttat

SEQ ID NO: 126418 - DNA, 25 bp, Probe Sequence
atatgatgctcggctgatttttgtt

SEQ ID NO: 126419 - DNA, 25 bp, Probe Sequence
atatgttcggtgttcagatggtaat

SEQ ID NO: 126420 - DNA, 25 bp, Probe Sequence
atatgttcggcttttcatgtatgta

SEQ ID NO: 126421 - DNA, 25 bp, Probe Sequence
ataggactgttctttgctgttgttg

SEQ ID NO: 126422 - DNA, 25 bp, Probe Sequence
atagggctatattttggcagctggg

SEQ ID NO: 126423 - DNA, 25 bp, Probe Sequence
atagagcccacatttgggtgctggg

SEQ ID NO: 126424 - DNA, 25 bp, Probe Sequence
ataatggtcagctatttttggttgc

SEQ ID NO: 126425 - DNA, 25 bp, Probe Sequence
atactggcccagattttgccactgg

SEQ ID NO: 126426 - DNA, 25 bp, Probe Sequence
atcaattccccgttaatggagcggg

SEQ ID NO: 126427 - DNA, 25 bp, Probe Sequence
ataaaccctcaaggacagggaggat

SEQ ID NO: 126428 - DNA, 25 bp, Probe Sequence
ataaaatgcgtgaacccgggaggcg

SEQ ID NO: 126429 - DNA, 25 bp, Probe Sequence
atacctgttgtgagacccgaggggc

SEQ ID NO: 126430 - DNA, 25 bp, Probe Sequence
atactaattctataccccagatggg

SEQ ID NO: 126431 - DNA, 25 bp, Probe Sequence
atacaatgattcaggtccctcaggg

SEQ ID NO: 126432 - DNA, 25 bp, Probe Sequence
aaacataccgggagccataccgcac

SEQ ID NO: 126433 - DNA, 25 bp, Probe Sequence
gtaactaccaggctcggaacttcct

SEQ ID NO: 126434 - DNA, 25 bp, Probe Sequence
gtaactaccaggctcggaacttcct

SEQ ID NO: 126435 - DNA, 25 bp, Probe Sequence
gtaccaacctggctactggaatccc

SEQ ID NO: 126436 - DNA, 25 bp, Probe Sequence
gtaccaacctggctactggaatccc

SEQ ID NO: 126437 - DNA, 25 bp, Probe Sequence
atagcaaacactcggtcctgtttcc

SEQ ID NO: 126438 - DNA, 25 bp, Probe Sequence
atacaaacagttcgacactgaccga

SEQ ID NO: 126439 - DNA, 25 bp, Probe Sequence
atagggacagtaagacactttggaa

SEQ ID NO: 126440 - DNA, 25 bp, Probe Sequence
atatggggcccaagctactggtgcc

SEQ ID NO: 126441 - DNA, 25 bp, Probe Sequence
atatgggcctgagttgtacccacca

SEQ ID NO: 126442 - DNA, 25 bp, Probe Sequence
atatggaagggttctacgccagcca

SEQ ID NO: 126443 - DNA, 25 bp, Probe Sequence
atatggaacggctctcagcggagca

SEQ ID NO: 126444 - DNA, 25 bp, Probe Sequence
atcagggaacactctcaggaacaac

SEQ ID NO: 126445 - DNA, 25 bp, Probe Sequence
atatgggagcaaccaccatggacca

SEQ ID NO: 126446 - DNA, 25 bp, Probe Sequence
atatggaataagactgccagtgacc

SEQ ID NO: 126447 - DNA, 25 bp, Probe Sequence
atatgcagaatcggttggtgcgtct

SEQ ID NO: 126448 - DNA, 25 bp, Probe Sequence
atatgctgaatagtgctttggcttg

SEQ ID NO: 126449 - DNA, 25 bp, Probe Sequence
atatccacaagtgctcgtgctgtgc

SEQ ID NO: 126450 - DNA, 25 bp, Probe Sequence
atatgccaagaggtgcaatgtggtg

SEQ ID NO: 126451 - DNA, 25 bp, Probe Sequence
atatgctcaatgctaccatgtgcgc

SEQ ID NO: 126452 - DNA, 25 bp, Probe Sequence
atacttcatctgacatccaggtgta

SEQ ID NO: 126453 - DNA, 25 bp, Probe Sequence
atacggcatttcccgggacagacaa

SEQ ID NO: 126454 - DNA, 25 bp, Probe Sequence
atactggcagttcactgtggacagt

SEQ ID NO: 126455 - DNA, 25 bp, Probe Sequence
atagtcaagtaggagcagtggaaat

SEQ ID NO: 126456 - DNA, 25 bp, Probe Sequence
atagtcaggtttttgtcatgtaatt

SEQ ID NO: 126457 - DNA, 25 bp, Probe Sequence
atagctctgacgttttgttgtaata

SEQ ID NO: 126458 - DNA, 25 bp, Probe Sequence
atagttaccgtacattgctgccata

SEQ ID NO: 126459 - DNA, 25 bp, Probe Sequence
atagttcatccaaactaacccagac

SEQ ID NO: 126460 - DNA, 25 bp, Probe Sequence
atggtatcaagaaaccccgatcaca

SEQ ID NO: 126461 - DNA, 25 bp, Probe Sequence
atgagatagggaacccccctgacta

SEQ ID NO: 126462 - DNA, 25 bp, Probe Sequence
atgagatagggaacccccctgacta

SEQ ID NO: 126463 - DNA, 25 bp, Probe Sequence
atagtttgagaagcccagcactgcc

SEQ ID NO: 126464 - DNA, 25 bp, Probe Sequence
atagtgtcacagtgttcacagcaca

SEQ ID NO: 126465 - DNA, 25 bp, Probe Sequence
ataggacgcagctgttgccatgacg

SEQ ID NO: 126466 - DNA, 25 bp, Probe Sequence
atagtcccagctagttgggaggctg

SEQ ID NO: 126467 - DNA, 25 bp, Probe Sequence
atacccacagtacggctggcagggt

SEQ ID NO: 126468 - DNA, 25 bp, Probe Sequence
atacctcacatgttgaccggctatg

SEQ ID NO: 126469 - DNA, 25 bp, Probe Sequence
atagcactcacttccaaaagattgt

SEQ ID NO: 126470 - DNA, 25 bp, Probe Sequence
atagcatctacccctaaaaattctt

SEQ ID NO: 126471 - DNA, 25 bp, Probe Sequence
atatgatataccacattaacagaat

SEQ ID NO: 126472 - DNA, 25 bp, Probe Sequence
atagacccctgccattcataatgaa

SEQ ID NO: 126473 - DNA, 25 bp, Probe Sequence
atagaactatctgcattatctatgc

SEQ ID NO: 126474 - DNA, 25 bp, Probe Sequence
atagacttactggctgtagcaatgc

SEQ ID NO: 126475 - DNA, 25 bp, Probe Sequence
atactgtaactgagagagccagcgt

SEQ ID NO: 126476 - DNA, 25 bp, Probe Sequence
atagatggaaatgtgtggcatgcac

SEQ ID NO: 126477 - DNA, 25 bp, Probe Sequence
atagatcatgtattttctactcaat

SEQ ID NO: 126478 - DNA, 25 bp, Probe Sequence
atagatcattcctttcaactggacc

SEQ ID NO: 126479 - DNA, 25 bp, Probe Sequence
atatgtcatctcctattcattgctt

SEQ ID NO: 126480 - DNA, 25 bp, Probe Sequence
atatgtcaccacaatcttgcttttt

SEQ ID NO: 126481 - DNA, 25 bp, Probe Sequence
atatgtttgccaatctccttgtttt

SEQ ID NO: 126482 - DNA, 25 bp, Probe Sequence
atagtaactactccctgctttatat

SEQ ID NO: 126483 - DNA, 25 bp, Probe Sequence
ataggaaccttgtcctctggttata

SEQ ID NO: 126484 - DNA, 25 bp, Probe Sequence
atatgaacaccttacaccctgtgtt

SEQ ID NO: 126485 - DNA, 25 bp, Probe Sequence
atagagacacacaagaacccttcaa

SEQ ID NO: 126486 - DNA, 25 bp, Probe Sequence
ataggcagcaacagcaacaacaaaa

SEQ ID NO: 126487 - DNA, 25 bp, Probe Sequence
ataggacagacagcacgcacatcaa

SEQ ID NO: 126488 - DNA, 25 bp, Probe Sequence
ataggagcaaataaccatgtcaaat

SEQ ID NO: 126489 - DNA, 25 bp, Probe Sequence
atagctgtcaacttaaatgtcagag

SEQ ID NO: 126490 - DNA, 25 bp, Probe Sequence
ataggctatagcgtacatgaatcag

SEQ ID NO: 126491 - DNA, 25 bp, Probe Sequence
atatggtaatccttatgcatctcag

SEQ ID NO: 126492 - DNA, 25 bp, Probe Sequence
atatggtacatattttgacatgcat

SEQ ID NO: 126493 - DNA, 25 bp, Probe Sequence
atagtgtgggaaattgctctgcatt

SEQ ID NO: 126494 - DNA, 25 bp, Probe Sequence
atagctgctggtgttgtcactgaga

SEQ ID NO: 126495 - DNA, 25 bp, Probe Sequence
atactgccttgtgttcagtgaaccc

SEQ ID NO: 126496 - DNA, 25 bp, Probe Sequence
atagctgccttaaagtcagtaactt

SEQ ID NO: 126497 - DNA, 25 bp, Probe Sequence
atcacttgttaatgtctaaacttta

SEQ ID NO: 126498 - DNA, 25 bp, Probe Sequence
atagttttgaaccaccaagtctctt

SEQ ID NO: 126499 - DNA, 25 bp, Probe Sequence
atagttatggaaaacaccagtatag

SEQ ID NO: 126500 - DNA, 25 bp, Probe Sequence
atatggctgtggaaaaacgaattaa

SEQ ID NO: 126501 - DNA, 25 bp, Probe Sequence
atagacctgtgaaaagacgtcaata

SEQ ID NO: 126502 - DNA, 25 bp, Probe Sequence
atagactgcagaaaaggggaactca

SEQ ID NO: 126503 - DNA, 25 bp, Probe Sequence
atagacatggaaggggatcgcaaca

SEQ ID NO: 126504 - DNA, 25 bp, Probe Sequence
atagaaatcaaggtgttcaatacag

SEQ ID NO: 126505 - DNA, 25 bp, Probe Sequence
atcaagcacaaccggttcacaaagg

SEQ ID NO: 126506 - DNA, 25 bp, Probe Sequence
atagatcacaaccagatgttccaat

SEQ ID NO: 126507 - DNA, 25 bp, Probe Sequence
atagactacacacatgtcatgcgtt

SEQ ID NO: 126508 - DNA, 25 bp, Probe Sequence
atagagctaacccttatctgtaagt

SEQ ID NO: 126509 - DNA, 25 bp, Probe Sequence
atagtgctttggcttgtcgaatgag

SEQ ID NO: 126510 - DNA, 25 bp, Probe Sequence
atatggctgtatcagagggctttga

SEQ ID NO: 126511 - DNA, 25 bp, Probe Sequence
atatgtggtttggatgtgtgcttta

SEQ ID NO: 126512 - DNA, 25 bp, Probe Sequence
atatgtttcatggaagttgtttata

SEQ ID NO: 126513 - DNA, 25 bp, Probe Sequence
atagtaactgtgtaatttgttcaag

SEQ ID NO: 126514 - DNA, 25 bp, Probe Sequence
atactagaccttattcgttctaacg

SEQ ID NO: 126515 - DNA, 25 bp, Probe Sequence
atagtgatgactgttttggtttgaa

SEQ ID NO: 126516 - DNA, 25 bp, Probe Sequence
atatgtatactatctttttatctga

SEQ ID NO: 126517 - DNA, 25 bp, Probe Sequence
atctgttaattgtccttttagtagc

SEQ ID NO: 126518 - DNA, 25 bp, Probe Sequence
atatgttcaaatgccttttagctgg

SEQ ID NO: 126519 - DNA, 25 bp, Probe Sequence
atatgttctctaggccttttagaaa

SEQ ID NO: 126520 - DNA, 25 bp, Probe Sequence
atatgtcctctgttgtatgtttaag

SEQ ID NO: 126521 - DNA, 25 bp, Probe Sequence
atatgcactttgctgtttgattaag

SEQ ID NO: 126522 - DNA, 25 bp, Probe Sequence
atagactgatgtctctttggccgga

SEQ ID NO: 126523 - DNA, 25 bp, Probe Sequence
atagagcggatgctttcatgcaccc

SEQ ID NO: 126524 - DNA, 25 bp, Probe Sequence
atagagcggatgctttcatgcaccc

SEQ ID NO: 126525 - DNA, 25 bp, Probe Sequence
atatgcacagtatctattggaacca

SEQ ID NO: 126526 - DNA, 25 bp, Probe Sequence
atacacgttactgatcttactcaca

SEQ ID NO: 126527 - DNA, 25 bp, Probe Sequence
atacactgttaccttttgactgtac

SEQ ID NO: 126528 - DNA, 25 bp, Probe Sequence
atacctgctacagtattttggggag

SEQ ID NO: 126529 - DNA, 25 bp, Probe Sequence
atacctcacacagcgttggtgttgt

SEQ ID NO: 126530 - DNA, 25 bp, Probe Sequence
atacccgatcgtgtgtggtgtgcgt

SEQ ID NO: 126531 - DNA, 25 bp, Probe Sequence
atagccgcgcagcatcgtgaagggc

SEQ ID NO: 126532 - DNA, 25 bp, Probe Sequence
atagcatcgacatcacgagaaggag

SEQ ID NO: 126533 - DNA, 25 bp, Probe Sequence
atagcttgaacctgggaagcagagg

SEQ ID NO: 126534 - DNA, 25 bp, Probe Sequence
atagcttgtacctgtgttcagtggt

SEQ ID NO: 126535 - DNA, 25 bp, Probe Sequence
atactatctttttatctgaagtaat

SEQ ID NO: 126536 - DNA, 25 bp, Probe Sequence
ataccctttgtcttggagtagaata

SEQ ID NO: 126537 - DNA, 25 bp, Probe Sequence
atagtgcctcctaaggggttaatat

SEQ ID NO: 126538 - DNA, 25 bp, Probe Sequence
atatggcccgcgctggagtttcaat

SEQ ID NO: 126539 - DNA, 25 bp, Probe Sequence
atatgtccccataaagcgttgacca

SEQ ID NO: 126540 - DNA, 25 bp, Probe Sequence
atagacgcaccattgaagttaaccg

SEQ ID NO: 126541 - DNA, 25 bp, Probe Sequence
atagcaagccactagaaccaaggcc

SEQ ID NO: 126542 - DNA, 25 bp, Probe Sequence
atacaaccctaagtcaataacctga

SEQ ID NO: 126543 - DNA, 25 bp, Probe Sequence
atactaccatcaatactcatcatta

SEQ ID NO: 126544 - DNA, 25 bp, Probe Sequence
ataccttcatgtaagccatcattga

SEQ ID NO: 126545 - DNA, 25 bp, Probe Sequence
ataggcttcatagtatatctctgtc

SEQ ID NO: 126546 - DNA, 25 bp, Probe Sequence
atacctgcatcagtgtcattccttt

SEQ ID NO: 126547 - DNA, 25 bp, Probe Sequence
atagccgatatcagaatttgtgttg

SEQ ID NO: 126548 - DNA, 25 bp, Probe Sequence
atatgggaactctactagatgtggt

SEQ ID NO: 126549 - DNA, 25 bp, Probe Sequence
atagaggaaacttatgcaggcatgg

SEQ ID NO: 126550 - DNA, 25 bp, Probe Sequence
atagatgggattaacagcagtgtgg

SEQ ID NO: 126551 - DNA, 25 bp, Probe Sequence
atatgattgacatcaagaagtgtgt

SEQ ID NO: 126552 - DNA, 25 bp, Probe Sequence
atcacttgtcatgataaagtccaaa

SEQ ID NO: 126553 - DNA, 25 bp, Probe Sequence
atcactgtgcctttaacctactgaa

SEQ ID NO: 126554 - DNA, 25 bp, Probe Sequence
atcactggcctataataaatgggtt

SEQ ID NO: 126555 - DNA, 25 bp, Probe Sequence
atacaagcatgtaacaaaaaaggtg

SEQ ID NO: 126556 - DNA, 25 bp, Probe Sequence
atcaaagctcacaccaaatttttct

SEQ ID NO: 126557 - DNA, 25 bp, Probe Sequence
ataaacccctcagacagtttgctta

SEQ ID NO: 126558 - DNA, 25 bp, Probe Sequence
atgaaactttttctcagttagttga

SEQ ID NO: 126559 - DNA, 25 bp, Probe Sequence
atagaaacttttgtctttactgaga

SEQ ID NO: 126560 - DNA, 25 bp, Probe Sequence
ataaacttttaggcctgaataggag

SEQ ID NO: 126561 - DNA, 25 bp, Probe Sequence
ctcaacggtttggatcctagaaggt

SEQ ID NO: 126562 - DNA, 25 bp, Probe Sequence
atctgtcgggaagattcttgtaggt

SEQ ID NO: 126563 - DNA, 25 bp, Probe Sequence
acgatgtggtaacctccggtttgtg

SEQ ID NO: 126564 - DNA, 25 bp, Probe Sequence
atgcgggcaaaactgttccgatttg

SEQ ID NO: 126565 - DNA, 25 bp, Probe Sequence
acgccaataggactttccgttgacg

SEQ ID NO: 126566 - DNA, 25 bp, Probe Sequence
ataaaatgagggtgcccagcttata

SEQ ID NO: 126567 - DNA, 25 bp, Probe Sequence
ataccaataaagtgaccctgttctc

SEQ ID NO: 126568 - DNA, 25 bp, Probe Sequence
ataccaataaagtgaccctgctctc

SEQ ID NO: 126569 - DNA, 25 bp, Probe Sequence
ataccaataaagtgaccctgctctc

SEQ ID NO: 126570 - DNA, 25 bp, Probe Sequence
ataccaataaagtggccctgctctc

SEQ ID NO: 126571 - DNA, 25 bp, Probe Sequence
atacccaaactgtctggcagtcact

SEQ ID NO: 126572 - DNA, 25 bp, Probe Sequence
atacccatagacatctaactgagtt

SEQ ID NO: 126573 - DNA, 25 bp, Probe Sequence
ataccctgtacatatctttgagttc

SEQ ID NO: 126574 - DNA, 25 bp, Probe Sequence
ataccggaccatcaacaacagtgtt

SEQ ID NO: 126575 - DNA, 25 bp, Probe Sequence
atagtacgacctttactgtcgtatt

SEQ ID NO: 126576 - DNA, 25 bp, Probe Sequence
atagtaggggcaattttgtctgtag

SEQ ID NO: 126577 - DNA, 25 bp, Probe Sequence
atcttacagggcactttgtcttggt

SEQ ID NO: 126578 - DNA, 25 bp, Probe Sequence
atcaatacggaaacattggatttga

SEQ ID NO: 126579 - DNA, 25 bp, Probe Sequence
atactacgtaatggccggctgtctg

SEQ ID NO: 126580 - DNA, 25 bp, Probe Sequence
atactacctaattgttactgtggag

SEQ ID NO: 126581 - DNA, 25 bp, Probe Sequence
ataccagccaagatgttccgaaggg

SEQ ID NO: 126582 - DNA, 25 bp, Probe Sequence
ataccaataaaatctccagcgaggc

SEQ ID NO: 126583 - DNA, 25 bp, Probe Sequence
atacgcacaaaaatattaggtaggt

SEQ ID NO: 126584 - DNA, 25 bp, Probe Sequence
ataatcctctacattagcggtaggt

SEQ ID NO: 126585 - DNA, 25 bp, Probe Sequence
ataattctgctaccgtggggaagtg

SEQ ID NO: 126586 - DNA, 25 bp, Probe Sequence
atagcttcgctgacagttagggcaa

SEQ ID NO: 126587 - DNA, 25 bp, Probe Sequence
ataatcgtctctcgtctaggggaga

SEQ ID NO: 126588 - DNA, 25 bp, Probe Sequence
ataaaggcctggggggggtgcacat

SEQ ID NO: 126589 - DNA, 25 bp, Probe Sequence
atacaggacccgaggagggctcacc

SEQ ID NO: 126590 - DNA, 25 bp, Probe Sequence
atacttcaccccagcagaggttcat

SEQ ID NO: 126591 - DNA, 25 bp, Probe Sequence
atacttgaacagttccaactgtaca

SEQ ID NO: 126592 - DNA, 25 bp, Probe Sequence
atactaaaagatcacaactgtcaca

SEQ ID NO: 126593 - DNA, 25 bp, Probe Sequence
ataccaagaagagtacttttctaag

SEQ ID NO: 126594 - DNA, 25 bp, Probe Sequence
atacccaggacagcatgtccctgct

SEQ ID NO: 126595 - DNA, 25 bp, Probe Sequence
atacccaggacagcatgtccctgct

SEQ ID NO: 126596 - DNA, 25 bp, Probe Sequence
atacccaggacagcatgtccctgct

SEQ ID NO: 126597 - DNA, 25 bp, Probe Sequence
atacaagatggttgccgggtcatgt

SEQ ID NO: 126598 - DNA, 25 bp, Probe Sequence
atacgaatgttaccaggcatggcag

SEQ ID NO: 126599 - DNA, 25 bp, Probe Sequence
atagcggtttgactcacgggggatt

SEQ ID NO: 126600 - DNA, 25 bp, Probe Sequence
atactgattttactacagggagaca

SEQ ID NO: 126601 - DNA, 25 bp, Probe Sequence
atacctgttgtggtacggttacaag

SEQ ID NO: 126602 - DNA, 25 bp, Probe Sequence
ataactgcatttcgtttggttagtc

SEQ ID NO: 126603 - DNA, 25 bp, Probe Sequence
atactgtctgtatctttggttatcc

SEQ ID NO: 126604 - DNA, 25 bp, Probe Sequence
ataccatcgtgatccggttttgcaa

SEQ ID NO: 126605 - DNA, 25 bp, Probe Sequence
atactctccttactaagtttgggag

SEQ ID NO: 126606 - DNA, 25 bp, Probe Sequence
atacgtcacttttacatgtttttag

SEQ ID NO: 126607 - DNA, 25 bp, Probe Sequence
ataccctcctcaaataacttgctta

SEQ ID NO: 126608 - DNA, 25 bp, Probe Sequence
atacctataccaaatctaatgtcat

SEQ ID NO: 126609 - DNA, 25 bp, Probe Sequence
atagcccaataaacctagagtatac

SEQ ID NO: 126610 - DNA, 25 bp, Probe Sequence
atagccgactgtatacagaggttca

SEQ ID NO: 126611 - DNA, 25 bp, Probe Sequence
atagggcaggaaatcacagcaaatt

SEQ ID NO: 126612 - DNA, 25 bp, Probe Sequence
atagagaactaaatcacagtactca

SEQ ID NO: 126613 - DNA, 25 bp, Probe Sequence
ataggatttctatcaaagactacta

SEQ ID NO: 126614 - DNA, 25 bp, Probe Sequence
ataggttgtctctgcatacacgaac

SEQ ID NO: 126615 - DNA, 25 bp, Probe Sequence
ataggccttctctgaaaatgtatga

SEQ ID NO: 126616 - DNA, 25 bp, Probe Sequence
atagtcgttcaataaacatatcagc

SEQ ID NO: 126617 - DNA, 25 bp, Probe Sequence
ataccgtgtgaaccaaacaatctct

SEQ ID NO: 126618 - DNA, 25 bp, Probe Sequence
ataccagctttagccaactttctgt

SEQ ID NO: 126619 - DNA, 25 bp, Probe Sequence
ataccaattacatggaacttttctg

SEQ ID NO: 126620 - DNA, 25 bp, Probe Sequence
ataccaaagatgtggaagtgatttt

SEQ ID NO: 126621 - DNA, 25 bp, Probe Sequence
ataccaaagtcgcaagaatggcttt

SEQ ID NO: 126622 - DNA, 25 bp, Probe Sequence
atactataactcgagaaaaggcatt

SEQ ID NO: 126623 - DNA, 25 bp, Probe Sequence
atactttcctagacataaaggtgga

SEQ ID NO: 126624 - DNA, 25 bp, Probe Sequence
atcagctttttctattgttagggga

SEQ ID NO: 126625 - DNA, 25 bp, Probe Sequence
atagctttcttctatggatctcctg

SEQ ID NO: 126626 - DNA, 25 bp, Probe Sequence
atagtctatcttttggatttgagtt

SEQ ID NO: 126627 - DNA, 25 bp, Probe Sequence
atagtcccttatgtatatagctttt

SEQ ID NO: 126628 - DNA, 25 bp, Probe Sequence
atcagttcctgttgttaatcgtaga

SEQ ID NO: 126629 - DNA, 25 bp, Probe Sequence
atatgtgttgcttttgtaataggaa

SEQ ID NO: 126630 - DNA, 25 bp, Probe Sequence
atagctgctttatctataacaggca

SEQ ID NO: 126631 - DNA, 25 bp, Probe Sequence
atagtgcctgctgacttaggtggcg

SEQ ID NO: 126632 - DNA, 25 bp, Probe Sequence
atagatgcctgggaattgcgtaaag

SEQ ID NO: 126633 - DNA, 25 bp, Probe Sequence
atagatgcctgggaattgcgtaaag

SEQ ID NO: 126634 - DNA, 25 bp, Probe Sequence
ataaccggacatatgagtcaaagga

SEQ ID NO: 126635 - DNA, 25 bp, Probe Sequence
atcagcaggcggctattggtaaacg

SEQ ID NO: 126636 - DNA, 25 bp, Probe Sequence
atgctgggatggtgttcgtaactac

SEQ ID NO: 126637 - DNA, 25 bp, Probe Sequence
atatggagctggggtttaacactaa

SEQ ID NO: 126638 - DNA, 25 bp, Probe Sequence
atatgggctatctggactaccggaa

SEQ ID NO: 126639 - DNA, 25 bp, Probe Sequence
atatgggctacatttagtcagaaaa

SEQ ID NO: 126640 - DNA, 25 bp, Probe Sequence
atatggggactatagtgcaacctat

SEQ ID NO: 126641 - DNA, 25 bp, Probe Sequence
atagtagaggaatcagtcaagcaaa

SEQ ID NO: 126642 - DNA, 25 bp, Probe Sequence
atagggaggatttgagctcatagga

SEQ ID NO: 126643 - DNA, 25 bp, Probe Sequence
ataggaattatttcgttggctgaac

SEQ ID NO: 126644 - DNA, 25 bp, Probe Sequence
atatggctattgctactggtggtgc

SEQ ID NO: 126645 - DNA, 25 bp, Probe Sequence
atatggctattgttaatttcttgtt

SEQ ID NO: 126646 - DNA, 25 bp, Probe Sequence
ataggcttgttttcttaatatgctt

SEQ ID NO: 126647 - DNA, 25 bp, Probe Sequence
atagagtagttgttccatgcagtat

SEQ ID NO: 126648 - DNA, 25 bp, Probe Sequence
ataggtgatgttcctccatcttacg

SEQ ID NO: 126649 - DNA, 25 bp, Probe Sequence
ataggtcatgttccatatatgttat

SEQ ID NO: 126650 - DNA, 25 bp, Probe Sequence
atagagtcagaatcttgctattgat

SEQ ID NO: 126651 - DNA, 25 bp, Probe Sequence
atatggtgcccttctgatgctaaga

SEQ ID NO: 126652 - DNA, 25 bp, Probe Sequence
atggggccctggagctgcaaaatcc

SEQ ID NO: 126653 - DNA, 25 bp, Probe Sequence
atagaggcacctgtttgcacacact

SEQ ID NO: 126654 - DNA, 25 bp, Probe Sequence
atagcatgacattctttcttcctgc

SEQ ID NO: 126655 - DNA, 25 bp, Probe Sequence
atagataatagtacatgtcacctta

SEQ ID NO: 126656 - DNA, 25 bp, Probe Sequence
atagctaataacaaccacacattgg

SEQ ID NO: 126657 - DNA, 25 bp, Probe Sequence
atagaaacactcatagccaattggt

SEQ ID NO: 126658 - DNA, 25 bp, Probe Sequence
atagaagcctccgtggctttctgga

SEQ ID NO: 126659 - DNA, 25 bp, Probe Sequence
atagaaggctctggtggtacctctg

SEQ ID NO: 126660 - DNA, 25 bp, Probe Sequence
ataaatttgttgtgtactacgtttg

SEQ ID NO: 126661 - DNA, 25 bp, Probe Sequence
ctaaattccgtctgattctaataga

SEQ ID NO: 126662 - DNA, 25 bp, Probe Sequence
ataccattccagaggttcacaagaa

SEQ ID NO: 126663 - DNA, 25 bp, Probe Sequence
atactatttcaactagaccccacac

SEQ ID NO: 126664 - DNA, 25 bp, Probe Sequence
atcacagtttaacacaagctcccct

SEQ ID NO: 126665 - DNA, 25 bp, Probe Sequence
atacatttataataggagtccagct

SEQ ID NO: 126666 - DNA, 25 bp, Probe Sequence
atacattttttaagtcgctctgcct

SEQ ID NO: 126667 - DNA, 25 bp, Probe Sequence
ataaagttgttagctccttgactat

SEQ ID NO: 126668 - DNA, 25 bp, Probe Sequence
ataagggggacaccgcctgtgattt

SEQ ID NO: 126669 - DNA, 25 bp, Probe Sequence
atagacagggagaactcgtcggcag

SEQ ID NO: 126670 - DNA, 25 bp, Probe Sequence
atagagggctgagtcacttctgggg

SEQ ID NO: 126671 - DNA, 25 bp, Probe Sequence
atagcggtctgactcacggggaatt

SEQ ID NO: 126672 - DNA, 25 bp, Probe Sequence
atagcggtctgactcacggggattt

SEQ ID NO: 126673 - DNA, 25 bp, Probe Sequence
ataggtgatcaattcacaaggccat

SEQ ID NO: 126674 - DNA, 25 bp, Probe Sequence
ataggatctcaactcataaatacaa

SEQ ID NO: 126675 - DNA, 25 bp, Probe Sequence
atagaattcaacataacaagctcat

SEQ ID NO: 126676 - DNA, 25 bp, Probe Sequence
atagaaatatacacagcagaatgtt

SEQ ID NO: 126677 - DNA, 25 bp, Probe Sequence
atagaagcaagaaggcgatagcttt

SEQ ID NO: 126678 - DNA, 25 bp, Probe Sequence
atagacagacagatatcgataggat

SEQ ID NO: 126679 - DNA, 25 bp, Probe Sequence
atagaggctcaaccaatataggata

SEQ ID NO: 126680 - DNA, 25 bp, Probe Sequence
atagacgagcaacaattaccataaa

SEQ ID NO: 126681 - DNA, 25 bp, Probe Sequence
atagggacttggcatatacacagat

SEQ ID NO: 126682 - DNA, 25 bp, Probe Sequence
atagggttggtttatactgcaatat

SEQ ID NO: 126683 - DNA, 25 bp, Probe Sequence
ataggacatttatttatactcaata

SEQ ID NO: 126684 - DNA, 25 bp, Probe Sequence
ataggcacattatatcaacactttg

SEQ ID NO: 126685 - DNA, 25 bp, Probe Sequence
atagtgctttcaaatacaccttttt

SEQ ID NO: 126686 - DNA, 25 bp, Probe Sequence
ataggctttattaatcaactgatgt

SEQ ID NO: 126687 - DNA, 25 bp, Probe Sequence
atagtgctttatatttgtctgattt

SEQ ID NO: 126688 - DNA, 25 bp, Probe Sequence
ataggcaacttcatttggcttgtgt

SEQ ID NO: 126689 - DNA, 25 bp, Probe Sequence
ataggcccttttatgtgttgcttct

SEQ ID NO: 126690 - DNA, 25 bp, Probe Sequence
ataggcacctgtggttaagcttccc

SEQ ID NO: 126691 - DNA, 25 bp, Probe Sequence
ataggaagcatttctgtaaccaacc

SEQ ID NO: 126692 - DNA, 25 bp, Probe Sequence
ataggtaacttcatagacctaaatt

SEQ ID NO: 126693 - DNA, 25 bp, Probe Sequence
atacctaacattttagacctagtca

SEQ ID NO: 126694 - DNA, 25 bp, Probe Sequence
atacctccaactttatagacttgtg

SEQ ID NO: 126695 - DNA, 25 bp, Probe Sequence
atacagatgcccagtcttgaacttt

SEQ ID NO: 126696 - DNA, 25 bp, Probe Sequence
atacctggcctggtctggacacagt

SEQ ID NO: 126697 - DNA, 25 bp, Probe Sequence
ataccagacattgacagcgaacatt

SEQ ID NO: 126698 - DNA, 25 bp, Probe Sequence
ataaagaatttatgcagcaccaaaa

SEQ ID NO: 126699 - DNA, 25 bp, Probe Sequence
ataccagggttaagtcacaaaacag

SEQ ID NO: 126700 - DNA, 25 bp, Probe Sequence
ataccattggatatatttaacacat

SEQ ID NO: 126701 - DNA, 25 bp, Probe Sequence
ataccttgagacttcattgttccca

SEQ ID NO: 126702 - DNA, 25 bp, Probe Sequence
atagcctgggaagttctgttgctgc

SEQ ID NO: 126703 - DNA, 25 bp, Probe Sequence
atacctacagacggtgttctgtgcc

SEQ ID NO: 126704 - DNA, 25 bp, Probe Sequence
atagacaaggacggccattttcacc

SEQ ID NO: 126705 - DNA, 25 bp, Probe Sequence
atagaggaggacggggtgctttcca

SEQ ID NO: 126706 - DNA, 25 bp, Probe Sequence
atacggagcagtgcgtacgccttac

SEQ ID NO: 126707 - DNA, 25 bp, Probe Sequence
ataccagcagattttgtgaaccttc

SEQ ID NO: 126708 - DNA, 25 bp, Probe Sequence
atagaagcaacattctgggactctt

SEQ ID NO: 126709 - DNA, 25 bp, Probe Sequence
atcagactggaaacgggactttcta

SEQ ID NO: 126710 - DNA, 25 bp, Probe Sequence
atagaatggagtacccgcactgtgt

SEQ ID NO: 126711 - DNA, 25 bp, Probe Sequence
atagttggagatacctcaatttctt

SEQ ID NO: 126712 - DNA, 25 bp, Probe Sequence
atagatttggtttctcacatcgttt

SEQ ID NO: 126713 - DNA, 25 bp, Probe Sequence
atagagttggatcactttttttctt

SEQ ID NO: 126714 - DNA, 25 bp, Probe Sequence
atagcagttcagtgcctttgttggt

SEQ ID NO: 126715 - DNA, 25 bp, Probe Sequence
atactgttaagagtccttttgaatt

SEQ ID NO: 126716 - DNA, 25 bp, Probe Sequence
atagtgtaatatttcttttgctttt

SEQ ID NO: 126717 - DNA, 25 bp, Probe Sequence
atagtatactattgattgttatttt

SEQ ID NO: 126718 - DNA, 25 bp, Probe Sequence
atagttactgagtccactttattct

SEQ ID NO: 126719 - DNA, 25 bp, Probe Sequence
atagtgtatatgtgatacttgatat

SEQ ID NO: 126720 - DNA, 25 bp, Probe Sequence
atagattgataatagccttgcatgt

SEQ ID NO: 126721 - DNA, 25 bp, Probe Sequence
atagctttaaaacctgtgtgccatt

SEQ ID NO: 126722 - DNA, 25 bp, Probe Sequence
atagctcttgtaacgggtgacacat

SEQ ID NO: 126723 - DNA, 25 bp, Probe Sequence
atagctttgctcactgatttggtat

SEQ ID NO: 126724 - DNA, 25 bp, Probe Sequence
atagctcaagtctctgccatttgta

SEQ ID NO: 126725 - DNA, 25 bp, Probe Sequence
atagtgcaaggagctccatttccga

SEQ ID NO: 126726 - DNA, 25 bp, Probe Sequence
atagttgaaggactcctgttccgtt

SEQ ID NO: 126727 - DNA, 25 bp, Probe Sequence
atacgtgaaatactcagctgtccct

SEQ ID NO: 126728 - DNA, 25 bp, Probe Sequence
aacgaaaacgctggttagcaccgca

SEQ ID NO: 126729 - DNA, 25 bp, Probe Sequence
aaaggaacacggttctgagcccaag

SEQ ID NO: 126730 - DNA, 25 bp, Probe Sequence
ataatggaacccttgttgaccgcta

SEQ ID NO: 126731 - DNA, 25 bp, Probe Sequence
atagactgaacacctatgtctcccc

SEQ ID NO: 126732 - DNA, 25 bp, Probe Sequence
ataggtgagaagtactcccccatgc

SEQ ID NO: 126733 - DNA, 25 bp, Probe Sequence
atagaagagaaagcccccaggccat

SEQ ID NO: 126734 - DNA, 25 bp, Probe Sequence
atagaaatgtttgtccccagagcca

SEQ ID NO: 126735 - DNA, 25 bp, Probe Sequence
taaggaccttatgttaccgacacca

SEQ ID NO: 126736 - DNA, 25 bp, Probe Sequence
atagaacctttagatactccaactc

SEQ ID NO: 126737 - DNA, 25 bp, Probe Sequence
atagtacccattaggacttccatga

SEQ ID NO: 126738 - DNA, 25 bp, Probe Sequence
atagaacccagaaagaatcatcaaa

SEQ ID NO: 126739 - DNA, 25 bp, Probe Sequence
atagaacgccaaactgctctcagta

SEQ ID NO: 126740 - DNA, 25 bp, Probe Sequence
atagacaccgaatcattcatactgg

SEQ ID NO: 126741 - DNA, 25 bp, Probe Sequence
atagcacatatggaattttgcaaag

SEQ ID NO: 126742 - DNA, 25 bp, Probe Sequence
atagagtcacgctttgattcacaga

SEQ ID NO: 126743 - DNA, 25 bp, Probe Sequence
aggaatataggcagatgtacagaac

SEQ ID NO: 126744 - DNA, 25 bp, Probe Sequence
aggaatatagccaatcccacggcca

SEQ ID NO: 126745 - DNA, 25 bp, Probe Sequence
aggaatatagccaatcccacggcca

SEQ ID NO: 126746 - DNA, 25 bp, Probe Sequence
aggaatatagccaatcccacggcca

SEQ ID NO: 126747 - DNA, 25 bp, Probe Sequence
atggatttttccaccatgcgggagc

SEQ ID NO: 126748 - DNA, 25 bp, Probe Sequence
atagattttttcagacttgtcaagc

SEQ ID NO: 126749 - DNA, 25 bp, Probe Sequence
atagtttctgtaattggcttttgaa

SEQ ID NO: 126750 - DNA, 25 bp, Probe Sequence
atagttgtattattgttgtttcata

SEQ ID NO: 126751 - DNA, 25 bp, Probe Sequence
atagtggccttcatgatttatctca

SEQ ID NO: 126752 - DNA, 25 bp, Probe Sequence
atagttgcactttatcatattttac

SEQ ID NO: 126753 - DNA, 25 bp, Probe Sequence
atagttccctcaacacaattgctaa

SEQ ID NO: 126754 - DNA, 25 bp, Probe Sequence
atagtatacctctcacaaggtcctt

SEQ ID NO: 126755 - DNA, 25 bp, Probe Sequence
atagtttctgtttaataggtcttgt

SEQ ID NO: 126756 - DNA, 25 bp, Probe Sequence
atagatgtttcttttatatggattt

SEQ ID NO: 126757 - DNA, 25 bp, Probe Sequence
atagatgattttaccatcacgagat

SEQ ID NO: 126758 - DNA, 25 bp, Probe Sequence
atagatgaagttagaccattagccc

SEQ ID NO: 126759 - DNA, 25 bp, Probe Sequence
ataagaatttgcatacttacctagt

SEQ ID NO: 126760 - DNA, 25 bp, Probe Sequence
ataaaagtccacacttcgtttgtgc

SEQ ID NO: 126761 - DNA, 25 bp, Probe Sequence
ataaacagtacctgctctcaaattg

SEQ ID NO: 126762 - DNA, 25 bp, Probe Sequence
atacttactacctgctgggcacatt

SEQ ID NO: 126763 - DNA, 25 bp, Probe Sequence
atacctagcaccagtgcttggcatc

SEQ ID NO: 126764 - DNA, 25 bp, Probe Sequence
atcccaagcctttatgcttgagtcc

SEQ ID NO: 126765 - DNA, 25 bp, Probe Sequence
atactaagcagcaaaatcttggtgt

SEQ ID NO: 126766 - DNA, 25 bp, Probe Sequence
atagctacatgaccataatgtgttt

SEQ ID NO: 126767 - DNA, 25 bp, Probe Sequence
atagtaataaatcattgctgtacaa

SEQ ID NO: 126768 - DNA, 25 bp, Probe Sequence
atagtccaccagtgattctgtaaag

SEQ ID NO: 126769 - DNA, 25 bp, Probe Sequence
atagtccagtaagatctcatgtaga

SEQ ID NO: 126770 - DNA, 25 bp, Probe Sequence
atagtgcaagttcgagattatctca

SEQ ID NO: 126771 - DNA, 25 bp, Probe Sequence
atagagtggttggcagagtcctcat

SEQ ID NO: 126772 - DNA, 25 bp, Probe Sequence
atagagctgtgctgtggttccgtga

SEQ ID NO: 126773 - DNA, 25 bp, Probe Sequence
atcgacatcccggagtgaccgtgac

SEQ ID NO: 126774 - DNA, 25 bp, Probe Sequence
atcaccatccccatggtactgatgc

SEQ ID NO: 126775 - DNA, 25 bp, Probe Sequence
ataccacgccacagggttagaacca

SEQ ID NO: 126776 - DNA, 25 bp, Probe Sequence
ataaccatgcccagtgctttaggga

SEQ ID NO: 126777 - DNA, 25 bp, Probe Sequence
ataaaccccatttgacttcatgcct

SEQ ID NO: 126778 - DNA, 25 bp, Probe Sequence
ataagaaccctttatgtaccatctg

SEQ ID NO: 126779 - DNA, 25 bp, Probe Sequence
atagcaaaccggaagaaagccattt

SEQ ID NO: 126780 - DNA, 25 bp, Probe Sequence
ttcccaaaccgcagactacatcttt

SEQ ID NO: 126781 - DNA, 25 bp, Probe Sequence
atgaccaaacccaggtttctcttgc

SEQ ID NO: 126782 - DNA, 25 bp, Probe Sequence
ataccaccactgaggtgttcttgcc

SEQ ID NO: 126783 - DNA, 25 bp, Probe Sequence
ataccactcaaatgtgtgaccacat

SEQ ID NO: 126784 - DNA, 25 bp, Probe Sequence
atagccactttgttttgggcaatga

SEQ ID NO: 126785 - DNA, 25 bp, Probe Sequence
ataccactcttcttcctaggaatta

SEQ ID NO: 126786 - DNA, 25 bp, Probe Sequence
atactacagctttgtggtaggccat

SEQ ID NO: 126787 - DNA, 25 bp, Probe Sequence
atagctatgcctttatggttaagat

SEQ ID NO: 126788 - DNA, 25 bp, Probe Sequence
atagctcatttacatggctccaaga

SEQ ID NO: 126789 - DNA, 25 bp, Probe Sequence
atagtatttctcctttgcaatagca

SEQ ID NO: 126790 - DNA, 25 bp, Probe Sequence
ataccatcttctctgttaatacata

SEQ ID NO: 126791 - DNA, 25 bp, Probe Sequence
ataccactgtaaacttcacatacag

SEQ ID NO: 126792 - DNA, 25 bp, Probe Sequence
atagcatcagttgatccttactaag

SEQ ID NO: 126793 - DNA, 25 bp, Probe Sequence
atagacttgctttcactgtactgta

SEQ ID NO: 126794 - DNA, 25 bp, Probe Sequence
atagctttgcattaccttacatgac

SEQ ID NO: 126795 - DNA, 25 bp, Probe Sequence
atagctcctcaagatcataacatac

SEQ ID NO: 126796 - DNA, 25 bp, Probe Sequence
atagcccctagattgctcaatcaat

SEQ ID NO: 126797 - DNA, 25 bp, Probe Sequence
atagccctctagtcagttatattgc

SEQ ID NO: 126798 - DNA, 25 bp, Probe Sequence
atagtatctctctctggtcatgaat

SEQ ID NO: 126799 - DNA, 25 bp, Probe Sequence
atagcttctctctcatcggagatat

SEQ ID NO: 126800 - DNA, 25 bp, Probe Sequence
atagatgccttcctctcagaggtgt

SEQ ID NO: 126801 - DNA, 25 bp, Probe Sequence
atagcaactgctctctgcaagtagt

SEQ ID NO: 126802 - DNA, 25 bp, Probe Sequence
atagcatactgccttctgacagact

SEQ ID NO: 126803 - DNA, 25 bp, Probe Sequence
atagatgcagccgttgcaggcgaag

SEQ ID NO: 126804 - DNA, 25 bp, Probe Sequence
atagctccgactacagcatgtggag

SEQ ID NO: 126805 - DNA, 25 bp, Probe Sequence
atagctctgagattaggcaatggaa

SEQ ID NO: 126806 - DNA, 25 bp, Probe Sequence
ataactgagtgaatgctcgcataga

SEQ ID NO: 126807 - DNA, 25 bp, Probe Sequence
atagttcgatgttgatgctcttgca

SEQ ID NO: 126808 - DNA, 25 bp, Probe Sequence
atagatactgtgaagctgctcgctc

SEQ ID NO: 126809 - DNA, 25 bp, Probe Sequence
atagatactgtgaagctgctcgctc

SEQ ID NO: 126810 - DNA, 25 bp, Probe Sequence
atagcaagcgcggagctgcgcagcg

SEQ ID NO: 126811 - DNA, 25 bp, Probe Sequence
atagcaagcgcggagctgcgcagcg

SEQ ID NO: 126812 - DNA, 25 bp, Probe Sequence
atagaagccgcttctagtggtgccc

SEQ ID NO: 126813 - DNA, 25 bp, Probe Sequence
atgaatcgcactgttcgttcatcct

SEQ ID NO: 126814 - DNA, 25 bp, Probe Sequence
ataaccaatatatcgtgtatccgaa

SEQ ID NO: 126815 - DNA, 25 bp, Probe Sequence
atagcctcacaaacctgttattcca

SEQ ID NO: 126816 - DNA, 25 bp, Probe Sequence
atagcctcacaaacctgttattcca

SEQ ID NO: 126817 - DNA, 25 bp, Probe Sequence
atagtcaacagtttttatatgccca

SEQ ID NO: 126818 - DNA, 25 bp, Probe Sequence
atagtcaacagggtcttcgtggctt

SEQ ID NO: 126819 - DNA, 25 bp, Probe Sequence
atagtcactgggctccctgtgactt

SEQ ID NO: 126820 - DNA, 25 bp, Probe Sequence
atagtcactgggctccctgtgactt

SEQ ID NO: 126821 - DNA, 25 bp, Probe Sequence
atagtcactgggctccctgtgactt

SEQ ID NO: 126822 - DNA, 25 bp, Probe Sequence
atagaatatgggatcccgtgtgtgt

SEQ ID NO: 126823 - DNA, 25 bp, Probe Sequence
atagacaagggctgccgggtgctgt

SEQ ID NO: 126824 - DNA, 25 bp, Probe Sequence
atagaccagggcttggcaaagtgtt

SEQ ID NO: 126825 - DNA, 25 bp, Probe Sequence
atagcaccagtgactgtgagcacgg

SEQ ID NO: 126826 - DNA, 25 bp, Probe Sequence
atagactatgaggctgcgaaggcag

SEQ ID NO: 126827 - DNA, 25 bp, Probe Sequence
atagactatgaggctgcgaaggcag

SEQ ID NO: 126828 - DNA, 25 bp, Probe Sequence
atagaggagcagttggaaccagcag

SEQ ID NO: 126829 - DNA, 25 bp, Probe Sequence
atagaagacactcgggaccgatgcc

SEQ ID NO: 126830 - DNA, 25 bp, Probe Sequence
atagaagacaccggggccgatccag

SEQ ID NO: 126831 - DNA, 25 bp, Probe Sequence
atagaagacaccgggaccgatccca

SEQ ID NO: 126832 - DNA, 25 bp, Probe Sequence
atagctaaaccctgtctctactaaa

SEQ ID NO: 126833 - DNA, 25 bp, Probe Sequence
atagaaaattactgtcatgtgctca

SEQ ID NO: 126834 - DNA, 25 bp, Probe Sequence
atagcacataattactaccttcccc

SEQ ID NO: 126835 - DNA, 25 bp, Probe Sequence
atagaccagactttggccagtcctc

SEQ ID NO: 126836 - DNA, 25 bp, Probe Sequence
atagaggaggtgaaggcacagatcc

SEQ ID NO: 126837 - DNA, 25 bp, Probe Sequence
ataaaacggcaacacagctcacaag

SEQ ID NO: 126838 - DNA, 25 bp, Probe Sequence
atacaaggcggccaagaaccccagc

SEQ ID NO: 126839 - DNA, 25 bp, Probe Sequence
ataaagcacgtgcaaggactcccgg

SEQ ID NO: 126840 - DNA, 25 bp, Probe Sequence
ataaaccattaactggccatcctgg

SEQ ID NO: 126841 - DNA, 25 bp, Probe Sequence
atagcaaggttctagggctcttcgc

SEQ ID NO: 126842 - DNA, 25 bp, Probe Sequence
ataccaatctcctgaggcttgtgga

SEQ ID NO: 126843 - DNA, 25 bp, Probe Sequence
ataccaaagcactgctggcctatgc

SEQ ID NO: 126844 - DNA, 25 bp, Probe Sequence
atacccagagattgctgctgttcta

SEQ ID NO: 126845 - DNA, 25 bp, Probe Sequence
ataccatgctgatcatgtggttcta

SEQ ID NO: 126846 - DNA, 25 bp, Probe Sequence
ataccatgctgatcatgtggttcta

SEQ ID NO: 126847 - DNA, 25 bp, Probe Sequence
ataccatgctagtcttgatgctgct

SEQ ID NO: 126848 - DNA, 25 bp, Probe Sequence
atactgcagtgactgccgtcagctc

SEQ ID NO: 126849 - DNA, 25 bp, Probe Sequence
atagatgggagacgcgctcaatccg

SEQ ID NO: 126850 - DNA, 25 bp, Probe Sequence
atagatgaacagttgctctcagttt

SEQ ID NO: 126851 - DNA, 25 bp, Probe Sequence
atagagaagagagactcggttctaa

SEQ ID NO: 126852 - DNA, 25 bp, Probe Sequence
atagagaaaatctgcttggttctat

SEQ ID NO: 126853 - DNA, 25 bp, Probe Sequence
atagagtaatatttgagctgtgttc

SEQ ID NO: 126854 - DNA, 25 bp, Probe Sequence
atagagtaatatttgagctgtgttc

SEQ ID NO: 126855 - DNA, 25 bp, Probe Sequence
atagagtaatatttgagctgtgttc

SEQ ID NO: 126856 - DNA, 25 bp, Probe Sequence
atagcgcctataactcgctgctgtt

SEQ ID NO: 126857 - DNA, 25 bp, Probe Sequence
atacggtgactttcctgtgttgatg

SEQ ID NO: 126858 - DNA, 25 bp, Probe Sequence
atacggccggttttgtgttagcagc

SEQ ID NO: 126859 - DNA, 25 bp, Probe Sequence
atactgtcctggttagttttgtaca

SEQ ID NO: 126860 - DNA, 25 bp, Probe Sequence
atacttcctgtgccacagttactat

SEQ ID NO: 126861 - DNA, 25 bp, Probe Sequence
atactcgttctccaacttgcaaatg

SEQ ID NO: 126862 - DNA, 25 bp, Probe Sequence
atacctttgtgcacagttgaatggg

SEQ ID NO: 126863 - DNA, 25 bp, Probe Sequence
atacgccctctttcatctgtaaggg

SEQ ID NO: 126864 - DNA, 25 bp, Probe Sequence
atacgcccttggcacagtcggatga

SEQ ID NO: 126865 - DNA, 25 bp, Probe Sequence
atagactccttcgtgatctggggat

SEQ ID NO: 126866 - DNA, 25 bp, Probe Sequence
atagagccctgtagcaacttggaag

SEQ ID NO: 126867 - DNA, 25 bp, Probe Sequence
atagaatatcattaacctgggaagt

SEQ ID NO: 126868 - DNA, 25 bp, Probe Sequence
atagattattgtaacctttcaacct

SEQ ID NO: 126869 - DNA, 25 bp, Probe Sequence
atagatgtgttattacttcctcaat

SEQ ID NO: 126870 - DNA, 25 bp, Probe Sequence
aaatgtttacagatccccaagcctg

SEQ ID NO: 126871 - DNA, 25 bp, Probe Sequence
ataatttaataatgccaccaactct

SEQ ID NO: 126872 - DNA, 25 bp, Probe Sequence
ataactgtcttaagaccccacctat

SEQ ID NO: 126873 - DNA, 25 bp, Probe Sequence
ataatttatatacaccctccaaata

SEQ ID NO: 126874 - DNA, 25 bp, Probe Sequence
atagaattgttaccaacctccaaag

SEQ ID NO: 126875 - DNA, 25 bp, Probe Sequence
atagaactttagaccactgtcagaa

SEQ ID NO: 126876 - DNA, 25 bp, Probe Sequence
atagaagcttcttgctcctgtttaa

SEQ ID NO: 126877 - DNA, 25 bp, Probe Sequence
atagcagatctgttttgtggtttgg

SEQ ID NO: 126878 - DNA, 25 bp, Probe Sequence
atagccttgcatgttgtagttagag

SEQ ID NO: 126879 - DNA, 25 bp, Probe Sequence
atagcatttgctttcctggttagag

SEQ ID NO: 126880 - DNA, 25 bp, Probe Sequence
ataaatgttgagtcttagttaagca

SEQ ID NO: 126881 - DNA, 25 bp, Probe Sequence
ataaaattggcacataattcaaaaa

SEQ ID NO: 126882 - DNA, 25 bp, Probe Sequence
atagaaattagcgtaatattgagaa

SEQ ID NO: 126883 - DNA, 25 bp, Probe Sequence
atagcctcattacctaggatatagg

SEQ ID NO: 126884 - DNA, 25 bp, Probe Sequence
atagatccatgttcccgcagataag

SEQ ID NO: 126885 - DNA, 25 bp, Probe Sequence
atagatcacatttgcttctaaaatt

SEQ ID NO: 126886 - DNA, 25 bp, Probe Sequence
atagctgtagtccattctaataatt

SEQ ID NO: 126887 - DNA, 25 bp, Probe Sequence
atacggatgtcctctacatcgtgtc

SEQ ID NO: 126888 - DNA, 25 bp, Probe Sequence
atagagtttgcctcaacacatgtga

SEQ ID NO: 126889 - DNA, 25 bp, Probe Sequence
atagagctgtgtctgtatacactgg

SEQ ID NO: 126890 - DNA, 25 bp, Probe Sequence
atagagcagattcagtgttacagtg

SEQ ID NO: 126891 - DNA, 25 bp, Probe Sequence
atagagctcattcagaatctccact

SEQ ID NO: 126892 - DNA, 25 bp, Probe Sequence
atagacatcttcaagccagtgcgca

SEQ ID NO: 126893 - DNA, 25 bp, Probe Sequence
atagaccatacatacgatcagcaaa

SEQ ID NO: 126894 - DNA, 25 bp, Probe Sequence
atagacatgaacaacacctcactac

SEQ ID NO: 126895 - DNA, 25 bp, Probe Sequence
atagcaggatatgacaactcttatt

SEQ ID NO: 126896 - DNA, 25 bp, Probe Sequence
atagcatagtaccataccacttata

SEQ ID NO: 126897 - DNA, 25 bp, Probe Sequence
atactcagatcatatacctcttaat

SEQ ID NO: 126898 - DNA, 25 bp, Probe Sequence
ataccgatcaggaatcttgctccaa

SEQ ID NO: 126899 - DNA, 25 bp, Probe Sequence
atacctcatataatacttgctcaac

SEQ ID NO: 126900 - DNA, 25 bp, Probe Sequence
atagcctcactgtataattcagaaa

SEQ ID NO: 126901 - DNA, 25 bp, Probe Sequence
ataccaacccataatccagctgaac

SEQ ID NO: 126902 - DNA, 25 bp, Probe Sequence
atacgcatgactacattacaacggg

SEQ ID NO: 126903 - DNA, 25 bp, Probe Sequence
ataccaatgcttttatcaaacagaa

SEQ ID NO: 126904 - DNA, 25 bp, Probe Sequence
ataccaagactctgtctcaaaaaaa

SEQ ID NO: 126905 - DNA, 25 bp, Probe Sequence
ataaacaacagctgaagcaaaaaaa

SEQ ID NO: 126906 - DNA, 25 bp, Probe Sequence
atactacaaccaacggtgaaaacat

SEQ ID NO: 126907 - DNA, 25 bp, Probe Sequence
ataacccacgaaaggctgaaaagca

SEQ ID NO: 126908 - DNA, 25 bp, Probe Sequence
atcccgcccgactggaggatagaga

SEQ ID NO: 126909 - DNA, 25 bp, Probe Sequence
ataccctctgtgtgggatggaaagg

SEQ ID NO: 126910 - DNA, 25 bp, Probe Sequence
ataaagtgtgtgtgcaggggaaaaa

SEQ ID NO: 126911 - DNA, 25 bp, Probe Sequence
ataaagtgtgtgtgcagggaaaaaa

SEQ ID NO: 126912 - DNA, 25 bp, Probe Sequence
ataatcagtgacacccggaaatgag

SEQ ID NO: 126913 - DNA, 25 bp, Probe Sequence
ataaggtccagggccggacacagtg

SEQ ID NO: 126914 - DNA, 25 bp, Probe Sequence
atcaagagttttggccggacctttg

SEQ ID NO: 126915 - DNA, 25 bp, Probe Sequence
atctaagtttggtgcgaacgccatt

SEQ ID NO: 126916 - DNA, 25 bp, Probe Sequence
ataaattccttgttgatgtaccctt

SEQ ID NO: 126917 - DNA, 25 bp, Probe Sequence
ataactactttattgaagaccttgg

SEQ ID NO: 126918 - DNA, 25 bp, Probe Sequence
ataactaacctaagcaagaatcatt

SEQ ID NO: 126919 - DNA, 25 bp, Probe Sequence
atagactagaccaagcagaagaaag

SEQ ID NO: 126920 - DNA, 25 bp, Probe Sequence
atagaatagacagggagaactcgtc

SEQ ID NO: 126921 - DNA, 25 bp, Probe Sequence
ataaataaaagcaaaaccgccacag

SEQ ID NO: 126922 - DNA, 25 bp, Probe Sequence
atagaatcaatactgccaattccag

SEQ ID NO: 126923 - DNA, 25 bp, Probe Sequence
atacgacagatgatgcttttcgaaa

SEQ ID NO: 126924 - DNA, 25 bp, Probe Sequence
atagctgataagattctctgtagag

SEQ ID NO: 126925 - DNA, 25 bp, Probe Sequence
atactgaagaacatcacttaagaga

SEQ ID NO: 126926 - DNA, 25 bp, Probe Sequence
ataatggccaaagccttcaaaagcc

SEQ ID NO: 126927 - DNA, 25 bp, Probe Sequence
atacgggccacagctttcaaatcgt

SEQ ID NO: 126928 - DNA, 25 bp, Probe Sequence
atacggagcgaagcatgtgatcatg

SEQ ID NO: 126929 - DNA, 25 bp, Probe Sequence
atagagagagcaccagctttgaaga

SEQ ID NO: 126930 - DNA, 25 bp, Probe Sequence
atagctatgcagttatcacatggga

SEQ ID NO: 126931 - DNA, 25 bp, Probe Sequence
atacatataaaatctgcgggcttca

SEQ ID NO: 126932 - DNA, 25 bp, Probe Sequence
atacgattcagatggctgcggctct

SEQ ID NO: 126933 - DNA, 25 bp, Probe Sequence
atacgaggcgtcagctgctggcctc

SEQ ID NO: 126934 - DNA, 25 bp, Probe Sequence
atactacggtcaatgctctgaaatc

SEQ ID NO: 126935 - DNA, 25 bp, Probe Sequence
atacttctggtcagtagccagcatc

SEQ ID NO: 126936 - DNA, 25 bp, Probe Sequence
atactgttttctatagctactttat

SEQ ID NO: 126937 - DNA, 25 bp, Probe Sequence
ataaggtattcctgaggccttgatt

SEQ ID NO: 126938 - DNA, 25 bp, Probe Sequence
ataagtttctactgggtatatttca

SEQ ID NO: 126939 - DNA, 25 bp, Probe Sequence
atacagtttcttgactagctttagt

SEQ ID NO: 126940 - DNA, 25 bp, Probe Sequence
ataccatagtcttaaaccaattaat

SEQ ID NO: 126941 - DNA, 25 bp, Probe Sequence
atacctttcttttagccaatggaga

SEQ ID NO: 126942 - DNA, 25 bp, Probe Sequence
ataccgtgtctgttaagcaaatgtt

SEQ ID NO: 126943 - DNA, 25 bp, Probe Sequence
atactcagtctatggaagcaacgtc

SEQ ID NO: 126944 - DNA, 25 bp, Probe Sequence
atcttcacccagaggagaagcctca

SEQ ID NO: 126945 - DNA, 25 bp, Probe Sequence
atctccacagcctggtaaattccat

SEQ ID NO: 126946 - DNA, 25 bp, Probe Sequence
atacccactgggctaagtttcatat

SEQ ID NO: 126947 - DNA, 25 bp, Probe Sequence
atacccactgcaaaagtagtagtca

SEQ ID NO: 126948 - DNA, 25 bp, Probe Sequence
ataccaaatagaatgactaaagtca

SEQ ID NO: 126949 - DNA, 25 bp, Probe Sequence
atagcagcactaaactgactaagat

SEQ ID NO: 126950 - DNA, 25 bp, Probe Sequence
atagacacagcattttcactccaga

SEQ ID NO: 126951 - DNA, 25 bp, Probe Sequence
atagacaagtgtaatctcaccataa

SEQ ID NO: 126952 - DNA, 25 bp, Probe Sequence
atagaaactgtgtcagtcaccaaaa

SEQ ID NO: 126953 - DNA, 25 bp, Probe Sequence
atactctaagaatgtcacacaacaa

SEQ ID NO: 126954 - DNA, 25 bp, Probe Sequence
atacccataatatctgccgaacatc

SEQ ID NO: 126955 - DNA, 25 bp, Probe Sequence
ataccgacatattacataccccatg

SEQ ID NO: 126956 - DNA, 25 bp, Probe Sequence
atacgacagtgttccaaatcccatc

SEQ ID NO: 126957 - DNA, 25 bp, Probe Sequence
atacgtgtatgttcacttacgcctc

SEQ ID NO: 126958 - DNA, 25 bp, Probe Sequence
atactgtgtatgctggcattcacac

SEQ ID NO: 126959 - DNA, 25 bp, Probe Sequence
atactgagtctgtatcagctgctcc

SEQ ID NO: 126960 - DNA, 25 bp, Probe Sequence
atactgaagtggtagcatgctctgt

SEQ ID NO: 126961 - DNA, 25 bp, Probe Sequence
atacgaatgaatgccagctctgctt

SEQ ID NO: 126962 - DNA, 25 bp, Probe Sequence
atagctgtgagaaaacccatgcatt

SEQ ID NO: 126963 - DNA, 25 bp, Probe Sequence
atagctttgtttacccagatatagg

SEQ ID NO: 126964 - DNA, 25 bp, Probe Sequence
atactatttttctcctaatatgctg

SEQ ID NO: 126965 - DNA, 25 bp, Probe Sequence
atctttatttattccctagtttgca

SEQ ID NO: 126966 - DNA, 25 bp, Probe Sequence
atacctattgttcatgccacgtttc

SEQ ID NO: 126967 - DNA, 25 bp, Probe Sequence
atagcgtattgtatatacgcctcac

SEQ ID NO: 126968 - DNA, 25 bp, Probe Sequence
atagactttgtcccaaatgctctcc

SEQ ID NO: 126969 - DNA, 25 bp, Probe Sequence
atagactttgtcccaaatgctctcc

SEQ ID NO: 126970 - DNA, 25 bp, Probe Sequence
ataaatttgtcacaagcaccagcct

SEQ ID NO: 126971 - DNA, 25 bp, Probe Sequence
ataaattgtccataggccacacttt

SEQ ID NO: 126972 - DNA, 25 bp, Probe Sequence
atacttttccatatggtataccttg

SEQ ID NO: 126973 - DNA, 25 bp, Probe Sequence
atacttttctaactgagttgtccta

SEQ ID NO: 126974 - DNA, 25 bp, Probe Sequence
atacttttctcttggagtattgtaa

SEQ ID NO: 126975 - DNA, 25 bp, Probe Sequence
atggtccttcttgtgggacttgaag

SEQ ID NO: 126976 - DNA, 25 bp, Probe Sequence
atacttctataagagcgtgacttgt

SEQ ID NO: 126977 - DNA, 25 bp, Probe Sequence
atacttttgagatactgatattgtt

SEQ ID NO: 126978 - DNA, 25 bp, Probe Sequence
atacttgttattgtctgcttttttt

SEQ ID NO: 126979 - DNA, 25 bp, Probe Sequence
atactctgagttattacttactgta

SEQ ID NO: 126980 - DNA, 25 bp, Probe Sequence
ataccagagttggtcatgatttact

SEQ ID NO: 126981 - DNA, 25 bp, Probe Sequence
atagccagcatttccgattttgaca

SEQ ID NO: 126982 - DNA, 25 bp, Probe Sequence
ataccatcttacacattttcatgca

SEQ ID NO: 126983 - DNA, 25 bp, Probe Sequence
atagctttggccagcaatttacaaa

SEQ ID NO: 126984 - DNA, 25 bp, Probe Sequence
atagcttttcttgaatattcccata

SEQ ID NO: 126985 - DNA, 25 bp, Probe Sequence
atagctattttatcatttccttcat

SEQ ID NO: 126986 - DNA, 25 bp, Probe Sequence
atgcaactttttcttaccattcaaa

SEQ ID NO: 126987 - DNA, 25 bp, Probe Sequence
ataaattgctttcctaacaactagc

SEQ ID NO: 126988 - DNA, 25 bp, Probe Sequence
ataactgttttgctacaacccatga

SEQ ID NO: 126989 - DNA, 25 bp, Probe Sequence
atacaaggttggctacgccctcaat

SEQ ID NO: 126990 - DNA, 25 bp, Probe Sequence
atactatttgggctctctcccataa

SEQ ID NO: 126991 - DNA, 25 bp, Probe Sequence
ataccatttatggttctctccgcaa

SEQ ID NO: 126992 - DNA, 25 bp, Probe Sequence
ataccttctgggatcttcaatatca

SEQ ID NO: 126993 - DNA, 25 bp, Probe Sequence
atactttagaggacccacatatcat

SEQ ID NO: 126994 - DNA, 25 bp, Probe Sequence
ataccatggagagatgcctctctta

SEQ ID NO: 126995 - DNA, 25 bp, Probe Sequence
ataccacaaggtacgtccatttgga

SEQ ID NO: 126996 - DNA, 25 bp, Probe Sequence
ataccaagacctgcttctcattatg

SEQ ID NO: 126997 - DNA, 25 bp, Probe Sequence
atacttgagaccgcattatttatgg

SEQ ID NO: 126998 - DNA, 25 bp, Probe Sequence
ataattagtgctgtacatttgattg

SEQ ID NO: 126999 - DNA, 25 bp, Probe Sequence
ataactgaggctgcataatttatac

SEQ ID NO: 127000 - DNA, 25 bp, Probe Sequence
atagcactgaatgcctacaggacaa

SEQ ID NO: 127001 - DNA, 25 bp, Probe Sequence
atacattgaaggggtcaggcacagt

SEQ ID NO: 127002 - DNA, 25 bp, Probe Sequence
atagaaccagcctgccatggcaagg

SEQ ID NO: 127003 - DNA, 25 bp, Probe Sequence
atagaaccagataagcacagtaaga

SEQ ID NO: 127004 - DNA, 25 bp, Probe Sequence
atagaagtcagagcatcaccagaat

SEQ ID NO: 127005 - DNA, 25 bp, Probe Sequence
acgaggtggacttccaagagtactg

SEQ ID NO: 127006 - DNA, 25 bp, Probe Sequence
atgcaacgggactctccaaaatgtc

SEQ ID NO: 127007 - DNA, 25 bp, Probe Sequence
atacgcgggatagccccaaatgtta

SEQ ID NO: 127008 - DNA, 25 bp, Probe Sequence
atacggctgagtgcaagccccaagt

SEQ ID NO: 127009 - DNA, 25 bp, Probe Sequence
atactattggtgtatacctccaact

SEQ ID NO: 127010 - DNA, 25 bp, Probe Sequence
atagaatatagtttgtgtgtcacaa

SEQ ID NO: 127011 - DNA, 25 bp, Probe Sequence
atagaattcatttttgacccagatg

SEQ ID NO: 127012 - DNA, 25 bp, Probe Sequence
atagctactcaatttagcactgcca

SEQ ID NO: 127013 - DNA, 25 bp, Probe Sequence
atagcttcatctttctagataccca

SEQ ID NO: 127014 - DNA, 25 bp, Probe Sequence
atagcagtagcttgtcttttccaca

SEQ ID NO: 127015 - DNA, 25 bp, Probe Sequence
atagcgtatacgagccttcacgcat

SEQ ID NO: 127016 - DNA, 25 bp, Probe Sequence
ataaatctgaagaggcttctcctgt

SEQ ID NO: 127017 - DNA, 25 bp, Probe Sequence
ataaatctgaaaaagctactccaca

SEQ ID NO: 127018 - DNA, 25 bp, Probe Sequence
atagaattgcctagaagctaatatt

SEQ ID NO: 127019 - DNA, 25 bp, Probe Sequence
atagaatatctctgaagctggattg

SEQ ID NO: 127020 - DNA, 25 bp, Probe Sequence
ataacatatgaatgacattgctgtc

SEQ ID NO: 127021 - DNA, 25 bp, Probe Sequence
ataacagagatttgaacttgtttgg

SEQ ID NO: 127022 - DNA, 25 bp, Probe Sequence
ataccaaatatacaggtttagtatt

SEQ ID NO: 127023 - DNA, 25 bp, Probe Sequence
atcaggcaattttcgaggtttttat

SEQ ID NO: 127024 - DNA, 25 bp, Probe Sequence
atctctgaactgtgtgggttttgga

SEQ ID NO: 127025 - DNA, 25 bp, Probe Sequence
atgactacctgaaggggttcttgga

SEQ ID NO: 127026 - DNA, 25 bp, Probe Sequence
ataaacttgaagtggttgtgttgta

SEQ ID NO: 127027 - DNA, 25 bp, Probe Sequence
ataaccctacagaggtggtgagcat

SEQ ID NO: 127028 - DNA, 25 bp, Probe Sequence
ataagcttttaaggtctgactgaca

SEQ ID NO: 127029 - DNA, 25 bp, Probe Sequence
ataccttgtttggaactgcaagcac

SEQ ID NO: 127030 - DNA, 25 bp, Probe Sequence
ataccatggaattgtaaatgctaca

SEQ ID NO: 127031 - DNA, 25 bp, Probe Sequence
ataccccacttgcaacaatgaacac

SEQ ID NO: 127032 - DNA, 25 bp, Probe Sequence
atagcacccattaaaagaaatacct

SEQ ID NO: 127033 - DNA, 25 bp, Probe Sequence
atagcagccttttaacagaactagt

SEQ ID NO: 127034 - DNA, 25 bp, Probe Sequence
atcacagatttccaaaagtactagc

SEQ ID NO: 127035 - DNA, 25 bp, Probe Sequence
atagcagatttacgggaagatttga

SEQ ID NO: 127036 - DNA, 25 bp, Probe Sequence
atagcattgctttcgtgtaaattat

SEQ ID NO: 127037 - DNA, 25 bp, Probe Sequence
atagcatccttcttgtttcatttac

SEQ ID NO: 127038 - DNA, 25 bp, Probe Sequence
atagcatccttcttgtttcatttac

SEQ ID NO: 127039 - DNA, 25 bp, Probe Sequence
atagcatttactatatttgtttagt

SEQ ID NO: 127040 - DNA, 25 bp, Probe Sequence
atagcagtgttttttgttgtttttg

SEQ ID NO: 127041 - DNA, 25 bp, Probe Sequence
atacactgaactttgtttttttctg

SEQ ID NO: 127042 - DNA, 25 bp, Probe Sequence
atagccaaccttatatgttatattc

SEQ ID NO: 127043 - DNA, 25 bp, Probe Sequence
ataaatacctctcccagtgtaaatc

SEQ ID NO: 127044 - DNA, 25 bp, Probe Sequence
ataaattcagcccagcacctggaca

SEQ ID NO: 127045 - DNA, 25 bp, Probe Sequence
atagcattttacccactatagaact

SEQ ID NO: 127046 - DNA, 25 bp, Probe Sequence
atactcacttacacacatctaaaat

SEQ ID NO: 127047 - DNA, 25 bp, Probe Sequence
atagctcacttcttacaatgtacaa

SEQ ID NO: 127048 - DNA, 25 bp, Probe Sequence
atagcactttcattgccagtgtctt

SEQ ID NO: 127049 - DNA, 25 bp, Probe Sequence
atacctccatcactgcatggagttg

SEQ ID NO: 127050 - DNA, 25 bp, Probe Sequence
atagcctaatccctgggcattgctt

SEQ ID NO: 127051 - DNA, 25 bp, Probe Sequence
atacctgggcaactggagctacatt

SEQ ID NO: 127052 - DNA, 25 bp, Probe Sequence
ataccagaggggctgagtgaaaatc

SEQ ID NO: 127053 - DNA, 25 bp, Probe Sequence
atcaccggggtggtttagtggctca

SEQ ID NO: 127054 - DNA, 25 bp, Probe Sequence
atgtcaggtttgggtcttgggttca

SEQ ID NO: 127055 - DNA, 25 bp, Probe Sequence
atgtcaggtttgggtcttgggttca

SEQ ID NO: 127056 - DNA, 25 bp, Probe Sequence
acaaggtacgtccatttggactaca

SEQ ID NO: 127057 - DNA, 25 bp, Probe Sequence
atcaaggcagggtccattaaactaa

SEQ ID NO: 127058 - DNA, 25 bp, Probe Sequence
ataagggagtcactttagatataaa

SEQ ID NO: 127059 - DNA, 25 bp, Probe Sequence
ataaaggtaatttttctcagaatga

SEQ ID NO: 127060 - DNA, 25 bp, Probe Sequence
ataaacctcaccatatttggaagat

SEQ ID NO: 127061 - DNA, 25 bp, Probe Sequence
ataaacccaaatgtggctgggtaga

SEQ ID NO: 127062 - DNA, 25 bp, Probe Sequence
atcaaggctcgagatcttcgcggga

SEQ ID NO: 127063 - DNA, 25 bp, Probe Sequence
ataaggttggtagtctgtgcctctg

SEQ ID NO: 127064 - DNA, 25 bp, Probe Sequence
ataaatgcctttaattgttctcata

SEQ ID NO: 127065 - DNA, 25 bp, Probe Sequence
atgaaggaccttatttggcatataa

SEQ ID NO: 127066 - DNA, 25 bp, Probe Sequence
ataaggaccagaaatcgtgagatgt

SEQ ID NO: 127067 - DNA, 25 bp, Probe Sequence
ataaatttcatggcccggcgcagtg

SEQ ID NO: 127068 - DNA, 25 bp, Probe Sequence
ataaattccacatcatcggcgcagt

SEQ ID NO: 127069 - DNA, 25 bp, Probe Sequence
ataatagactccacacagtcagcaa

SEQ ID NO: 127070 - DNA, 25 bp, Probe Sequence
atcaaaacctcataattcaagaaca

SEQ ID NO: 127071 - DNA, 25 bp, Probe Sequence
ataaaatcccaacatatatactgaa

SEQ ID NO: 127072 - DNA, 25 bp, Probe Sequence
ataaagtcagcctatttggatccga

SEQ ID NO: 127073 - DNA, 25 bp, Probe Sequence
ataagagctccctttgtggggaact

SEQ ID NO: 127074 - DNA, 25 bp, Probe Sequence
atcaaaactcttgttagggtatcta

SEQ ID NO: 127075 - DNA, 25 bp, Probe Sequence
ataaaaatctgagtttctggccttt

SEQ ID NO: 127076 - DNA, 25 bp, Probe Sequence
atacaaaaaattggccgggcgtgat

SEQ ID NO: 127077 - DNA, 25 bp, Probe Sequence
atacaaaaaattggccgggcgtgat

SEQ ID NO: 127078 - DNA, 25 bp, Probe Sequence
atacaggagaagaggacggtcacga

SEQ ID NO: 127079 - DNA, 25 bp, Probe Sequence
caaagtgctaacagaaaggagacat

SEQ ID NO: 127080 - DNA, 25 bp, Probe Sequence
ataaagcaaaaccaccaggaggcat

SEQ ID NO: 127081 - DNA, 25 bp, Probe Sequence
ataacagaaacactcccagggactc

SEQ ID NO: 127082 - DNA, 25 bp, Probe Sequence
ataacagaaacactcccagggactc

SEQ ID NO: 127083 - DNA, 25 bp, Probe Sequence
ataaagaaaaaatggcgtgccttgt

SEQ ID NO: 127084 - DNA, 25 bp, Probe Sequence
ataagagaaagtcacaggccctctt

SEQ ID NO: 127085 - DNA, 25 bp, Probe Sequence
atcgagtcaagctggacgaggcctt

SEQ ID NO: 127086 - DNA, 25 bp, Probe Sequence
ataaatcatatctgtaagaggcttt

SEQ ID NO: 127087 - DNA, 25 bp, Probe Sequence
atactgagcaactgcacaatgagga

SEQ ID NO: 127088 - DNA, 25 bp, Probe Sequence
atacagcaacagccacagaagagga

SEQ ID NO: 127089 - DNA, 25 bp, Probe Sequence
atacacaagcgccaggagaggccaa

SEQ ID NO: 127090 - DNA, 25 bp, Probe Sequence
atagcctcagcgtcaacgagttcaa

SEQ ID NO: 127091 - DNA, 25 bp, Probe Sequence
atagcgctcacgcaagcatggttaa

SEQ ID NO: 127092 - DNA, 25 bp, Probe Sequence
atacagccattccaataggcttcat

SEQ ID NO: 127093 - DNA, 25 bp, Probe Sequence
atactccgcccaaaggctgcagatc

SEQ ID NO: 127094 - DNA, 25 bp, Probe Sequence
atcagatccccaaaacggtatccac

SEQ ID NO: 127095 - DNA, 25 bp, Probe Sequence
atgagaccccatctgaaggtcacca

SEQ ID NO: 127096 - DNA, 25 bp, Probe Sequence
atagcctccctttagaatgtcacat

SEQ ID NO: 127097 - DNA, 25 bp, Probe Sequence
atagcctgcttcttatacaagcccc

SEQ ID NO: 127098 - DNA, 25 bp, Probe Sequence
atactgctctttcaagacagcctcc

SEQ ID NO: 127099 - DNA, 25 bp, Probe Sequence
ataatgttgactccaaaacctataa

SEQ ID NO: 127100 - DNA, 25 bp, Probe Sequence
ataataaagtcatcaatacctcaaa

SEQ ID NO: 127101 - DNA, 25 bp, Probe Sequence
ataaatagcgtatacgagccttcac

SEQ ID NO: 127102 - DNA, 25 bp, Probe Sequence
ataacacggcgatgaacgtcttaca

SEQ ID NO: 127103 - DNA, 25 bp, Probe Sequence
ataactgccgcaggaatgccgtctt

SEQ ID NO: 127104 - DNA, 25 bp, Probe Sequence
atacattccgaggggctcagttctg

SEQ ID NO: 127105 - DNA, 25 bp, Probe Sequence
atacaacacgccggactgactctgg

SEQ ID NO: 127106 - DNA, 25 bp, Probe Sequence
ataaaacaggagtacaggcattggg

SEQ ID NO: 127107 - DNA, 25 bp, Probe Sequence
ataagacccaagtgcccatggtggt

SEQ ID NO: 127108 - DNA, 25 bp, Probe Sequence
ataagtaccggcaccctgagtgctt

SEQ ID NO: 127109 - DNA, 25 bp, Probe Sequence
ataagtacttgtgtcatccagaatg

SEQ ID NO: 127110 - DNA, 25 bp, Probe Sequence
ataactacctgttttgccgggtcag

SEQ ID NO: 127111 - DNA, 25 bp, Probe Sequence
ataaatgacctgttttcacgcggcc

SEQ ID NO: 127112 - DNA, 25 bp, Probe Sequence
ataaataactgctttagacactggc

SEQ ID NO: 127113 - DNA, 25 bp, Probe Sequence
atacaatagactttggggacttggg

SEQ ID NO: 127114 - DNA, 25 bp, Probe Sequence
atacagaaaattaggccagacgtgg

SEQ ID NO: 127115 - DNA, 25 bp, Probe Sequence
ataagaagttttaccagagaatgga

SEQ ID NO: 127116 - DNA, 25 bp, Probe Sequence
ataacattttttcctctggacataa

SEQ ID NO: 127117 - DNA, 25 bp, Probe Sequence
ataccttatttttatctgacatata

SEQ ID NO: 127118 - DNA, 25 bp, Probe Sequence
ataccttctcatttgccattgactt

SEQ ID NO: 127119 - DNA, 25 bp, Probe Sequence
atacctcttcattagtttgtctttg

SEQ ID NO: 127120 - DNA, 25 bp, Probe Sequence
ataagcatttattggttttttctag

SEQ ID NO: 127121 - DNA, 25 bp, Probe Sequence
ataagtttaagagctcccattgtac

SEQ ID NO: 127122 - DNA, 25 bp, Probe Sequence
ataacatttccgtttccatcattga

SEQ ID NO: 127123 - DNA, 25 bp, Probe Sequence
ataaagtctactggtcccatcactg

SEQ ID NO: 127124 - DNA, 25 bp, Probe Sequence
atactggcactatctgtaccatcat

SEQ ID NO: 127125 - DNA, 25 bp, Probe Sequence
atactgagagctacctattggcata

SEQ ID NO: 127126 - DNA, 25 bp, Probe Sequence
atacatgaagcttcatgcacttaaa

SEQ ID NO: 127127 - DNA, 25 bp, Probe Sequence
atcaagagcacttccaaattacagg

SEQ ID NO: 127128 - DNA, 25 bp, Probe Sequence
atacagacaatgtccaagaccacat

SEQ ID NO: 127129 - DNA, 25 bp, Probe Sequence
atacataaattaaaacatcaagctg

SEQ ID NO: 127130 - DNA, 25 bp, Probe Sequence
atacgttgttcaaaattgcataggt

SEQ ID NO: 127131 - DNA, 25 bp, Probe Sequence
atacgtggtatctcattggaattgt

SEQ ID NO: 127132 - DNA, 25 bp, Probe Sequence
atacatgtcgcttttaaggaagtgc

SEQ ID NO: 127133 - DNA, 25 bp, Probe Sequence
atacaggccatgtcttgcaagtcta

SEQ ID NO: 127134 - DNA, 25 bp, Probe Sequence
ataaggccattcagcgagggaccat

SEQ ID NO: 127135 - DNA, 25 bp, Probe Sequence
atactggtcattaagagcatgggca

SEQ ID NO: 127136 - DNA, 25 bp, Probe Sequence
atacatttctataggctctgaagca

SEQ ID NO: 127137 - DNA, 25 bp, Probe Sequence
atacgtctttatgctggaatgctat

SEQ ID NO: 127138 - DNA, 25 bp, Probe Sequence
atacttgttgtttggtaatgaacca

SEQ ID NO: 127139 - DNA, 25 bp, Probe Sequence
atacatttggttatgttgataaacc

SEQ ID NO: 127140 - DNA, 25 bp, Probe Sequence
atacctgaggtaacttagatgaaat

SEQ ID NO: 127141 - DNA, 25 bp, Probe Sequence
atactctgagaggctacttggaaag

SEQ ID NO: 127142 - DNA, 25 bp, Probe Sequence
atagccaggtgagtgcagtttgaac

SEQ ID NO: 127143 - DNA, 25 bp, Probe Sequence
atagccatgtaactgagcttggaag

SEQ ID NO: 127144 - DNA, 25 bp, Probe Sequence
atcaccaccaaggacttaaaggaga

SEQ ID NO: 127145 - DNA, 25 bp, Probe Sequence
atcgccaacaagctcttcggagaaa

SEQ ID NO: 127146 - DNA, 25 bp, Probe Sequence
atcgccaacaagctcttcggagaaa

SEQ ID NO: 127147 - DNA, 25 bp, Probe Sequence
aggctcggtaggtttcgagcagaaa

SEQ ID NO: 127148 - DNA, 25 bp, Probe Sequence
agaggggctaggctgatggggaagg

SEQ ID NO: 127149 - DNA, 25 bp, Probe Sequence
atgaggggtgggcttggtttatctg

SEQ ID NO: 127150 - DNA, 25 bp, Probe Sequence
ataaagttgcctctcagttttagct

SEQ ID NO: 127151 - DNA, 25 bp, Probe Sequence
atactaattatccattccttttggc

SEQ ID NO: 127152 - DNA, 25 bp, Probe Sequence
atacataaaatccttacttctcttc

SEQ ID NO: 127153 - DNA, 25 bp, Probe Sequence
ataattagacctttacattcctgaa

SEQ ID NO: 127154 - DNA, 25 bp, Probe Sequence
ataataaatcagaaaccttcctata

SEQ ID NO: 127155 - DNA, 25 bp, Probe Sequence
ataacctttgcaaaccttcaagctg

SEQ ID NO: 127156 - DNA, 25 bp, Probe Sequence
ataacctttgcaaaccttcaagctg

SEQ ID NO: 127157 - DNA, 25 bp, Probe Sequence
ataactttatgccacccttaaatga

SEQ ID NO: 127158 - DNA, 25 bp, Probe Sequence
atacccttagctttcccataagagc

SEQ ID NO: 127159 - DNA, 25 bp, Probe Sequence
atacctttatgttctcccatatata

SEQ ID NO: 127160 - DNA, 25 bp, Probe Sequence
ataacttttttgagtcattgacttc

SEQ ID NO: 127161 - DNA, 25 bp, Probe Sequence
atcaaatagtgctttaggtcaggcc

SEQ ID NO: 127162 - DNA, 25 bp, Probe Sequence
ataacagagctgttttcccagctgc

SEQ ID NO: 127163 - DNA, 25 bp, Probe Sequence
ataaatgatggagctccgaatgtgc

SEQ ID NO: 127164 - DNA, 25 bp, Probe Sequence
atacattgaggttcactctttgtgc

SEQ ID NO: 127165 - DNA, 25 bp, Probe Sequence
atactatgttgacagcgtcttgctg

SEQ ID NO: 127166 - DNA, 25 bp, Probe Sequence
atactagctaactaattctgtcatt

SEQ ID NO: 127167 - DNA, 25 bp, Probe Sequence
atacgcctctactgatacatgtctg

SEQ ID NO: 127168 - DNA, 25 bp, Probe Sequence
atgacccactaacgtggcaacttta

SEQ ID NO: 127169 - DNA, 25 bp, Probe Sequence
ataccccgaagccatggcaagcaag

SEQ ID NO: 127170 - DNA, 25 bp, Probe Sequence
atactccccacgaatgtgaagaggc

SEQ ID NO: 127171 - DNA, 25 bp, Probe Sequence
atactctctgcctggtggtcagatg

SEQ ID NO: 127172 - DNA, 25 bp, Probe Sequence
atacctgtactgcgtgggcagctgg

SEQ ID NO: 127173 - DNA, 25 bp, Probe Sequence
atacctattattcggcgcatgagct

SEQ ID NO: 127174 - DNA, 25 bp, Probe Sequence
atactctttttcagcagagtcagcc

SEQ ID NO: 127175 - DNA, 25 bp, Probe Sequence
atactctcttcttctaggagtccaa

SEQ ID NO: 127176 - DNA, 25 bp, Probe Sequence
ataccaccctgacagagattctcaa

SEQ ID NO: 127177 - DNA, 25 bp, Probe Sequence
atactcccactgaaaccagatcata

SEQ ID NO: 127178 - DNA, 25 bp, Probe Sequence
atacctcaccatggatgacttgaca

SEQ ID NO: 127179 - DNA, 25 bp, Probe Sequence
ataccactcagcagagccttaacca

SEQ ID NO: 127180 - DNA, 25 bp, Probe Sequence
atacactccagaaagcgattaagca

SEQ ID NO: 127181 - DNA, 25 bp, Probe Sequence
atacctcacagagccagttcacatc

SEQ ID NO: 127182 - DNA, 25 bp, Probe Sequence
atacctatcatgtgccctgtatcac

SEQ ID NO: 127183 - DNA, 25 bp, Probe Sequence
atacctatcataactacgtattcat

SEQ ID NO: 127184 - DNA, 25 bp, Probe Sequence
atacacctattaccaccatattatt

SEQ ID NO: 127185 - DNA, 25 bp, Probe Sequence
ataacctatgttgagccttgcttac

SEQ ID NO: 127186 - DNA, 25 bp, Probe Sequence
ataacctgatctaccaagtggctaa

SEQ ID NO: 127187 - DNA, 25 bp, Probe Sequence
ataaattcttccagagtggccaaat

SEQ ID NO: 127188 - DNA, 25 bp, Probe Sequence
ataaagattttctcagtggtctaga

SEQ ID NO: 127189 - DNA, 25 bp, Probe Sequence
atcaatggatataccaaatgtggta

SEQ ID NO: 127190 - DNA, 25 bp, Probe Sequence
atacatgtgcatactacacacagta

SEQ ID NO: 127191 - DNA, 25 bp, Probe Sequence
atactgtgcaatcatcacctctgtc

SEQ ID NO: 127192 - DNA, 25 bp, Probe Sequence
atactgctgcagtcaatccgataac

SEQ ID NO: 127193 - DNA, 25 bp, Probe Sequence
ataccatgctgattgaaaataacta

SEQ ID NO: 127194 - DNA, 25 bp, Probe Sequence
atacccatgactgcaagaatactgg

SEQ ID NO: 127195 - DNA, 25 bp, Probe Sequence
ataaacagacatgcaagcacttttt

SEQ ID NO: 127196 - DNA, 25 bp, Probe Sequence
atggaaaactaagcacctattttgg

SEQ ID NO: 127197 - DNA, 25 bp, Probe Sequence
atcgacaaaatattcccgattttag

SEQ ID NO: 127198 - DNA, 25 bp, Probe Sequence
catcgagaaaatcaacggaacccag

SEQ ID NO: 127199 - DNA, 25 bp, Probe Sequence
ccgagataaaggcaccgaacagcgt

SEQ ID NO: 127200 - DNA, 25 bp, Probe Sequence
gcttgaataaagtgatacgttagag

SEQ ID NO: 127201 - DNA, 25 bp, Probe Sequence
acgattaaagtcctacgtgatctga

SEQ ID NO: 127202 - DNA, 25 bp, Probe Sequence
acgaataaagtgtcttctggcctac

SEQ ID NO: 127203 - DNA, 25 bp, Probe Sequence
atctgtaaaaggtttctccctactg

SEQ ID NO: 127204 - DNA, 25 bp, Probe Sequence
atctaacaaagggctaatacccaga

SEQ ID NO: 127205 - DNA, 25 bp, Probe Sequence
atcgagaaaatcaacggaacccaga

SEQ ID NO: 127206 - DNA, 25 bp, Probe Sequence
atcccaatgaaaaacctacccagca

SEQ ID NO: 127207 - DNA, 25 bp, Probe Sequence
atcaccaggaaaccattaagcccca

SEQ ID NO: 127208 - DNA, 25 bp, Probe Sequence
ataccagcaaaaaatctgaacactc

SEQ ID NO: 127209 - DNA, 25 bp, Probe Sequence
ataccgatacatcttctgcatacgt

SEQ ID NO: 127210 - DNA, 25 bp, Probe Sequence
atacggatcaaaagtcgaccagtgt

SEQ ID NO: 127211 - DNA, 25 bp, Probe Sequence
atacccataaagaatcttccagctt

SEQ ID NO: 127212 - DNA, 25 bp, Probe Sequence
ataccccacaggtaaatcctgtgtt

SEQ ID NO: 127213 - DNA, 25 bp, Probe Sequence
ataaccgcaagataactcctcttat

SEQ ID NO: 127214 - DNA, 25 bp, Probe Sequence
ataaaactctgagagactacttatg

SEQ ID NO: 127215 - DNA, 25 bp, Probe Sequence
ataaaagtcacagaactccttgtag

SEQ ID NO: 127216 - DNA, 25 bp, Probe Sequence
ataaacagtctacacagtctcacgt

SEQ ID NO: 127217 - DNA, 25 bp, Probe Sequence
ataacaatttcatccaattcatctt

SEQ ID NO: 127218 - DNA, 25 bp, Probe Sequence
atacagctttatccactaagtttgt

SEQ ID NO: 127219 - DNA, 25 bp, Probe Sequence
atacgctttactttatagctgaaga

SEQ ID NO: 127220 - DNA, 25 bp, Probe Sequence
atacctatctcccaaatacatcaag

SEQ ID NO: 127221 - DNA, 25 bp, Probe Sequence
atacacgaatagacatcaaactcaa

SEQ ID NO: 127222 - DNA, 25 bp, Probe Sequence
ataccatagtagctcagacccaagg

SEQ ID NO: 127223 - DNA, 25 bp, Probe Sequence
atactctggtagactgaggcgggag

SEQ ID NO: 127224 - DNA, 25 bp, Probe Sequence
atacttagatctactgtaaggcaga

SEQ ID NO: 127225 - DNA, 25 bp, Probe Sequence
ataattttctgtgctaagggtccag

SEQ ID NO: 127226 - DNA, 25 bp, Probe Sequence
ataaagttttaagtggcaggtccag

SEQ ID NO: 127227 - DNA, 25 bp, Probe Sequence
ataacgctgctttagaatgaaggtc

SEQ ID NO: 127228 - DNA, 25 bp, Probe Sequence
ataactcatgtttgtgtagaagaat

SEQ ID NO: 127229 - DNA, 25 bp, Probe Sequence
ataaatagcatctagtacacaaaaa

SEQ ID NO: 127230 - DNA, 25 bp, Probe Sequence
atacacaaccaagtgaaaggattaa

SEQ ID NO: 127231 - DNA, 25 bp, Probe Sequence
ataacaacacacatcaggttttaaa

SEQ ID NO: 127232 - DNA, 25 bp, Probe Sequence
atacagaccaccatatgttctttga

SEQ ID NO: 127233 - DNA, 25 bp, Probe Sequence
atacaagtatgaactattctattta

SEQ ID NO: 127234 - DNA, 25 bp, Probe Sequence
atacaagcagataattttccctcta

SEQ ID NO: 127235 - DNA, 25 bp, Probe Sequence
atacactgattaatttactcacgtt

SEQ ID NO: 127236 - DNA, 25 bp, Probe Sequence
atacaatgtatatgtgagacacaca

SEQ ID NO: 127237 - DNA, 25 bp, Probe Sequence
atacaatggaacatgacttgcaata

SEQ ID NO: 127238 - DNA, 25 bp, Probe Sequence
atacatttgatgtattgaccagaat

SEQ ID NO: 127239 - DNA, 25 bp, Probe Sequence
atacttctgagctgctaccacatga

SEQ ID NO: 127240 - DNA, 25 bp, Probe Sequence
atactctgctactatgtcctcaggt

SEQ ID NO: 127241 - DNA, 25 bp, Probe Sequence
atactgttcaatcgtctctcataat

SEQ ID NO: 127242 - DNA, 25 bp, Probe Sequence
atactcttatagcctgccttcaatt

SEQ ID NO: 127243 - DNA, 25 bp, Probe Sequence
atactctttagattgtgctttcatt

SEQ ID NO: 127244 - DNA, 25 bp, Probe Sequence
atactgttcttatgtcatttgttat

SEQ ID NO: 127245 - DNA, 25 bp, Probe Sequence
atactttgcctttttcactgtgtat

SEQ ID NO: 127246 - DNA, 25 bp, Probe Sequence
atactttgatcgattgctaattttc

SEQ ID NO: 127247 - DNA, 25 bp, Probe Sequence
atacgactgtgaatttgcaaatgtt

SEQ ID NO: 127248 - DNA, 25 bp, Probe Sequence
ataaaccatgatcttgaaagtgcca

SEQ ID NO: 127249 - DNA, 25 bp, Probe Sequence
ataagtcctataaatgagaagtcca

SEQ ID NO: 127250 - DNA, 25 bp, Probe Sequence
ataaaactgataatcggaagacata

SEQ ID NO: 127251 - DNA, 25 bp, Probe Sequence
ataacagactcatcctataagaagt

SEQ ID NO: 127252 - DNA, 25 bp, Probe Sequence
atacctgtgccattctcaataagaa

SEQ ID NO: 127253 - DNA, 25 bp, Probe Sequence
atactcccgctgtctcaaaaataaa

SEQ ID NO: 127254 - DNA, 25 bp, Probe Sequence
atacccaccatacaatagagataga

SEQ ID NO: 127255 - DNA, 25 bp, Probe Sequence
ataacttcgaagccatagggtggag

SEQ ID NO: 127256 - DNA, 25 bp, Probe Sequence
ataacgttaatgcacaagttggtaa

SEQ ID NO: 127257 - DNA, 25 bp, Probe Sequence
ataaggtttatctcaagtctcaatt

SEQ ID NO: 127258 - DNA, 25 bp, Probe Sequence
ataaagacttgaggccatagattcg

SEQ ID NO: 127259 - DNA, 25 bp, Probe Sequence
ataagagactgttccaacggctctg

SEQ ID NO: 127260 - DNA, 25 bp, Probe Sequence
atacataattgctccaagcttcctg

SEQ ID NO: 127261 - DNA, 25 bp, Probe Sequence
atactgagattctgtaagttaccca

SEQ ID NO: 127262 - DNA, 25 bp, Probe Sequence
ataaaattttgttggatgtactcca

SEQ ID NO: 127263 - DNA, 25 bp, Probe Sequence
atacttgatattagatgtgtgatta

SEQ ID NO: 127264 - DNA, 25 bp, Probe Sequence
atacttgactctaatatgattatac

SEQ ID NO: 127265 - DNA, 25 bp, Probe Sequence
atacttcccatattttttgtcactt

SEQ ID NO: 127266 - DNA, 25 bp, Probe Sequence
atacttcctctgtttaacagtcctt

SEQ ID NO: 127267 - DNA, 25 bp, Probe Sequence
atacttcctctgtttaacagtcctt

SEQ ID NO: 127268 - DNA, 25 bp, Probe Sequence
atacttggttcatgataactgccct

SEQ ID NO: 127269 - DNA, 25 bp, Probe Sequence
ataaatggactagctacctggacat

SEQ ID NO: 127270 - DNA, 25 bp, Probe Sequence
ataagactgaccactagttagacta

SEQ ID NO: 127271 - DNA, 25 bp, Probe Sequence
ataagcactactggtaatgttgagc

SEQ ID NO: 127272 - DNA, 25 bp, Probe Sequence
ataagccaagggtaatttcagcgga

SEQ ID NO: 127273 - DNA, 25 bp, Probe Sequence
atcagcagccaggggtagtttggag

SEQ ID NO: 127274 - DNA, 25 bp, Probe Sequence
atcgaggtggggcacttcatgggag

SEQ ID NO: 127275 - DNA, 25 bp, Probe Sequence
aaggatttggaggactaactggaca

SEQ ID NO: 127276 - DNA, 25 bp, Probe Sequence
atctaacctgaagtcctaacggata

SEQ ID NO: 127277 - DNA, 25 bp, Probe Sequence
ataaggccaaatacctcaccaagaa

SEQ ID NO: 127278 - DNA, 25 bp, Probe Sequence
ataagacgcacacgttgtgccgccg

SEQ ID NO: 127279 - DNA, 25 bp, Probe Sequence
ataagaaacacgaaggcatccctga

SEQ ID NO: 127280 - DNA, 25 bp, Probe Sequence
atcagggagggctggtgcatcccaa

SEQ ID NO: 127281 - DNA, 25 bp, Probe Sequence
ataatggacttctggccaagccaac

SEQ ID NO: 127282 - DNA, 25 bp, Probe Sequence
ataagatgactttggtgaaaccccg

SEQ ID NO: 127283 - DNA, 25 bp, Probe Sequence
atacattcactgtctggtgatacct

SEQ ID NO: 127284 - DNA, 25 bp, Probe Sequence
atacttgcttattatgttgacactt

SEQ ID NO: 127285 - DNA, 25 bp, Probe Sequence
atactatctaaatttgctgctcact

SEQ ID NO: 127286 - DNA, 25 bp, Probe Sequence
atactatatatggattgttgtcaga

SEQ ID NO: 127287 - DNA, 25 bp, Probe Sequence
atactgtatgtgtggaatgtgatga

SEQ ID NO: 127288 - DNA, 25 bp, Probe Sequence
atacatgtagggagcaattggtcaa

SEQ ID NO: 127289 - DNA, 25 bp, Probe Sequence
atactgtgctggctccagtgggatt

SEQ ID NO: 127290 - DNA, 25 bp, Probe Sequence
atacttctcagggctagggaacatc

SEQ ID NO: 127291 - DNA, 25 bp, Probe Sequence
atacttcacgcatctatgtggccct

SEQ ID NO: 127292 - DNA, 25 bp, Probe Sequence
atactgtgaacatcctgtcagctgc

SEQ ID NO: 127293 - DNA, 25 bp, Probe Sequence
atactgtatgaagcttgtcctctga

SEQ ID NO: 127294 - DNA, 25 bp, Probe Sequence
atacatgtaaatctagacctctgac

SEQ ID NO: 127295 - DNA, 25 bp, Probe Sequence
atgaactggagtctaggcctctctc

SEQ ID NO: 127296 - DNA, 25 bp, Probe Sequence
atacactgtgcccactagaagcttc

SEQ ID NO: 127297 - DNA, 25 bp, Probe Sequence
atcaacgcgcagacctaaactgatc

SEQ ID NO: 127298 - DNA, 25 bp, Probe Sequence
ataaaggcagtcgtacatactacgt

SEQ ID NO: 127299 - DNA, 25 bp, Probe Sequence
ataaagtcactggggctagctaaac

SEQ ID NO: 127300 - DNA, 25 bp, Probe Sequence
ataaatgtcccttgttacataaaca

SEQ ID NO: 127301 - DNA, 25 bp, Probe Sequence
ataatttccccacattcacaaaatg

SEQ ID NO: 127302 - DNA, 25 bp, Probe Sequence
atacttttcccgaaacacacattgg

SEQ ID NO: 127303 - DNA, 25 bp, Probe Sequence
ataaattccttctaaaccacattgg

SEQ ID NO: 127304 - DNA, 25 bp, Probe Sequence
ataagttactatttattccgctccg

SEQ ID NO: 127305 - DNA, 25 bp, Probe Sequence
ataaaatttgacttctcaccctcac

SEQ ID NO: 127306 - DNA, 25 bp, Probe Sequence
atacagaactaaagttctccttcct

SEQ ID NO: 127307 - DNA, 25 bp, Probe Sequence
ataagcacctagtggccttgagtcc

SEQ ID NO: 127308 - DNA, 25 bp, Probe Sequence
atacagacgaactccctctgtgact

SEQ ID NO: 127309 - DNA, 25 bp, Probe Sequence
atgaagggaacctgcccttgcactt

SEQ ID NO: 127310 - DNA, 25 bp, Probe Sequence
ataaaggaactcaggcgcctcttct

SEQ ID NO: 127311 - DNA, 25 bp, Probe Sequence
ataaaggaactcaggcgcctcttct

SEQ ID NO: 127312 - DNA, 25 bp, Probe Sequence
ataaaggaactcaggcgcctcttct

SEQ ID NO: 127313 - DNA, 25 bp, Probe Sequence
ataaaggaactcaggcgcctcttct

SEQ ID NO: 127314 - DNA, 25 bp, Probe Sequence
ataaagtgactctggggtgcttact

SEQ ID NO: 127315 - DNA, 25 bp, Probe Sequence
atacaagtatatttgcgtgatggtt

SEQ ID NO: 127316 - DNA, 25 bp, Probe Sequence
ataaagcagtaaaggatgatggcat

SEQ ID NO: 127317 - DNA, 25 bp, Probe Sequence
ataatccgggtaggaaggcatctag

SEQ ID NO: 127318 - DNA, 25 bp, Probe Sequence
ataatccgccagaacgaccagaaaa

SEQ ID NO: 127319 - DNA, 25 bp, Probe Sequence
ataagccagtataaaacacctaaat

SEQ ID NO: 127320 - DNA, 25 bp, Probe Sequence
ataaccatgtcaaataccctgttca

SEQ ID NO: 127321 - DNA, 25 bp, Probe Sequence
caacagacttaagacccgttcaaat

SEQ ID NO: 127322 - DNA, 25 bp, Probe Sequence
ataaatcatcaaacaaaccgtacaa

SEQ ID NO: 127323 - DNA, 25 bp, Probe Sequence
ataaattctacacaaggctttcaag

SEQ ID NO: 127324 - DNA, 25 bp, Probe Sequence
ataaactgtacacataattatcatg

SEQ ID NO: 127325 - DNA, 25 bp, Probe Sequence
atactttatatctgtaatgatactg

SEQ ID NO: 127326 - DNA, 25 bp, Probe Sequence
ataacttcgatctgataatgtctcg

SEQ ID NO: 127327 - DNA, 25 bp, Probe Sequence
ataactccaattctaggaatctgtc

SEQ ID NO: 127328 - DNA, 25 bp, Probe Sequence
ataagctccaggtcttatcgtatcc

SEQ ID NO: 127329 - DNA, 25 bp, Probe Sequence
ataacttcggacttatactgatccc

SEQ ID NO: 127330 - DNA, 25 bp, Probe Sequence
atactttcagagttttatctcatcc

SEQ ID NO: 127331 - DNA, 25 bp, Probe Sequence
atactttcaaattattaccatgagt

SEQ ID NO: 127332 - DNA, 25 bp, Probe Sequence
atacattctcatacatttaacttgt

SEQ ID NO: 127333 - DNA, 25 bp, Probe Sequence
atactgtctgtcaatgtgtaacctg

SEQ ID NO: 127334 - DNA, 25 bp, Probe Sequence
atactgttgctatgatgtaactgca

SEQ ID NO: 127335 - DNA, 25 bp, Probe Sequence
atactgcttgcttggagatgtcctc

SEQ ID NO: 127336 - DNA, 25 bp, Probe Sequence
atactgcaggcttctggtagccact

SEQ ID NO: 127337 - DNA, 25 bp, Probe Sequence
atactgagagtgtcatgtttccaca

SEQ ID NO: 127338 - DNA, 25 bp, Probe Sequence
atactgcatgggtcatttcccagca

SEQ ID NO: 127339 - DNA, 25 bp, Probe Sequence
atcaccgtggacagcatcaccatga

SEQ ID NO: 127340 - DNA, 25 bp, Probe Sequence
atacgtgggagctaatcattgcatg

SEQ ID NO: 127341 - DNA, 25 bp, Probe Sequence
atacgtaggacatcctctgcatctt

SEQ ID NO: 127342 - DNA, 25 bp, Probe Sequence
atactgaagggcccttcactgcctt

SEQ ID NO: 127343 - DNA, 25 bp, Probe Sequence
atactggagtctccgttgtctgctt

SEQ ID NO: 127344 - DNA, 25 bp, Probe Sequence
atacggaggtcttgtgtatctgtgg

SEQ ID NO: 127345 - DNA, 25 bp, Probe Sequence
atactggggcttcggagactatggc

SEQ ID NO: 127346 - DNA, 25 bp, Probe Sequence
atcaatggtgccacggagcacatcg

SEQ ID NO: 127347 - DNA, 25 bp, Probe Sequence
ataaaggccatatgtgagacccaca

SEQ ID NO: 127348 - DNA, 25 bp, Probe Sequence
ataaaggtaagtgcagatttccaac

SEQ ID NO: 127349 - DNA, 25 bp, Probe Sequence
ataaaggaaagggcaccatcttcat

SEQ ID NO: 127350 - DNA, 25 bp, Probe Sequence
atacttaataattggcaccgttgct

SEQ ID NO: 127351 - DNA, 25 bp, Probe Sequence
atacttgagattttcctccattttt

SEQ ID NO: 127352 - DNA, 25 bp, Probe Sequence
atactttgaatacctttcatatttt

SEQ ID NO: 127353 - DNA, 25 bp, Probe Sequence
atactttgataacctgtatttaatt

SEQ ID NO: 127354 - DNA, 25 bp, Probe Sequence
atactttcattccctgctatttatg

SEQ ID NO: 127355 - DNA, 25 bp, Probe Sequence
atacttctgattgattcctttgtgt

SEQ ID NO: 127356 - DNA, 25 bp, Probe Sequence
atactttctcgtacacacttttgtg

SEQ ID NO: 127357 - DNA, 25 bp, Probe Sequence
atacatggtctatatccattttctt

SEQ ID NO: 127358 - DNA, 25 bp, Probe Sequence
ataattccattgaaccttgattctg

SEQ ID NO: 127359 - DNA, 25 bp, Probe Sequence
atacttcacaacaatcctaatccta

SEQ ID NO: 127360 - DNA, 25 bp, Probe Sequence
atactctacacaaatggtaaccaaa

SEQ ID NO: 127361 - DNA, 25 bp, Probe Sequence
atactcattgcctactttaacacct

SEQ ID NO: 127362 - DNA, 25 bp, Probe Sequence
atactcaatcactttggtcccatgc

SEQ ID NO: 127363 - DNA, 25 bp, Probe Sequence
atacacataatgtcttggttcctcc

SEQ ID NO: 127364 - DNA, 25 bp, Probe Sequence
atacttagcagtattgttggtctaa

SEQ ID NO: 127365 - DNA, 25 bp, Probe Sequence
ataagttcagtagttgcttccctaa

SEQ ID NO: 127366 - DNA, 25 bp, Probe Sequence
ataaagacttagatgttgccaaaaa

SEQ ID NO: 127367 - DNA, 25 bp, Probe Sequence
ataaaagcttaaattctcatctaaa

SEQ ID NO: 127368 - DNA, 25 bp, Probe Sequence
ataaagacattccaatatttgcaaa

SEQ ID NO: 127369 - DNA, 25 bp, Probe Sequence
atacactgaaaccattattacaatg

SEQ ID NO: 127370 - DNA, 25 bp, Probe Sequence
atacagtataacaactatttacata

SEQ ID NO: 127371 - DNA, 25 bp, Probe Sequence
ataagtctgattctctttaactgtg

SEQ ID NO: 127372 - DNA, 25 bp, Probe Sequence
atacaatggtatctctttctccgtt

SEQ ID NO: 127373 - DNA, 25 bp, Probe Sequence
atacagggatgctgtttttccattc

SEQ ID NO: 127374 - DNA, 25 bp, Probe Sequence
atacagggtctatcttgcttcctac

SEQ ID NO: 127375 - DNA, 25 bp, Probe Sequence
ataaggttattactgtgttttgcac

SEQ ID NO: 127376 - DNA, 25 bp, Probe Sequence
ataagagtctcaatggagttttcta

SEQ ID NO: 127377 - DNA, 25 bp, Probe Sequence
ataacagcccatgtgagtgtattca

SEQ ID NO: 127378 - DNA, 25 bp, Probe Sequence
atactccagccatttgctgtctttg

SEQ ID NO: 127379 - DNA, 25 bp, Probe Sequence
atactcatatgccttctgtggttgg

SEQ ID NO: 127380 - DNA, 25 bp, Probe Sequence
ataagattctgtcataggcatagag

SEQ ID NO: 127381 - DNA, 25 bp, Probe Sequence
atacagtttctcccaggatcacaga

SEQ ID NO: 127382 - DNA, 25 bp, Probe Sequence
atacagtagtccccacttatctgag

SEQ ID NO: 127383 - DNA, 25 bp, Probe Sequence
ataagtcctctccaacagaatatgc

SEQ ID NO: 127384 - DNA, 25 bp, Probe Sequence
atcaagttggcttatccagaaacca

SEQ ID NO: 127385 - DNA, 25 bp, Probe Sequence
atcaaggtatcatatcccaagtacg

SEQ ID NO: 127386 - DNA, 25 bp, Probe Sequence
ataagtgttctgttgacctttactc

SEQ ID NO: 127387 - DNA, 25 bp, Probe Sequence
ataacaggtctgtgatgcccttaga

SEQ ID NO: 127388 - DNA, 25 bp, Probe Sequence
ataataggctttagagcctttcacc

SEQ ID NO: 127389 - DNA, 25 bp, Probe Sequence
ataagtggcattttgggctttcctc

SEQ ID NO: 127390 - DNA, 25 bp, Probe Sequence
ataaatgccatgtgatgggcttttt

SEQ ID NO: 127391 - DNA, 25 bp, Probe Sequence
ataaatccttttgcactgatgtgtt

SEQ ID NO: 127392 - DNA, 25 bp, Probe Sequence
ataaacttactatcattgagtcctt

SEQ ID NO: 127393 - DNA, 25 bp, Probe Sequence
ataaatctgtatcaagacggttctt

SEQ ID NO: 127394 - DNA, 25 bp, Probe Sequence
ataatttctatgaaatcgtcgcttc

SEQ ID NO: 127395 - DNA, 25 bp, Probe Sequence
ataacattcttcgatctctgggatt

SEQ ID NO: 127396 - DNA, 25 bp, Probe Sequence
ataaatgtcatttcactactggtgt

SEQ ID NO: 127397 - DNA, 25 bp, Probe Sequence
ataagatgtttatgaagtatggcat

SEQ ID NO: 127398 - DNA, 25 bp, Probe Sequence
ataaaattatgccgggaatggtggt

SEQ ID NO: 127399 - DNA, 25 bp, Probe Sequence
ataacaagagtccgtgtatgggttt

SEQ ID NO: 127400 - DNA, 25 bp, Probe Sequence
ataaaacgtcactgtgcagagcctt

SEQ ID NO: 127401 - DNA, 25 bp, Probe Sequence
ataaacccagcatcaggcagacctt

SEQ ID NO: 127402 - DNA, 25 bp, Probe Sequence
atcaaaaccaagcgcacgatccagt

SEQ ID NO: 127403 - DNA, 25 bp, Probe Sequence
ataaaggcaccgaacagcgttgaat

SEQ ID NO: 127404 - DNA, 25 bp, Probe Sequence
ataaatggcacctatactggctttt

SEQ ID NO: 127405 - DNA, 25 bp, Probe Sequence
atactttgacacctactgtgttata

SEQ ID NO: 127406 - DNA, 25 bp, Probe Sequence
atactctgaacaagtccgtgatata

SEQ ID NO: 127407 - DNA, 25 bp, Probe Sequence
atactcgagaataataactgaagca

SEQ ID NO: 127408 - DNA, 25 bp, Probe Sequence
atactcgagttagcaagttcagcac

SEQ ID NO: 127409 - DNA, 25 bp, Probe Sequence
atcattgggttcaggagttgagacc

SEQ ID NO: 127410 - DNA, 25 bp, Probe Sequence
atcacgctggatttagggtaggtcc

SEQ ID NO: 127411 - DNA, 25 bp, Probe Sequence
atgcggcagactgaaggacgggtgc

SEQ ID NO: 127412 - DNA, 25 bp, Probe Sequence
atgcacgacaccctgggaggggtga

SEQ ID NO: 127413 - DNA, 25 bp, Probe Sequence
atgccccacctcaggagttgggacc

SEQ ID NO: 127414 - DNA, 25 bp, Probe Sequence
atcttcctcgtcagtggtcaaggtg

SEQ ID NO: 127415 - DNA, 25 bp, Probe Sequence
atcaagttcgacactggtaacctgt

SEQ ID NO: 127416 - DNA, 25 bp, Probe Sequence
atcaagttcgacactggtaacctgt

SEQ ID NO: 127417 - DNA, 25 bp, Probe Sequence
ataagttggtgcatggcggaccctg

SEQ ID NO: 127418 - DNA, 25 bp, Probe Sequence
atgtagcaaaggaggggacccatgg

SEQ ID NO: 127419 - DNA, 25 bp, Probe Sequence
atggaaaaggactcgtaccctcgct

SEQ ID NO: 127420 - DNA, 25 bp, Probe Sequence
ataaaccagttctggtcacctccct

SEQ ID NO: 127421 - DNA, 25 bp, Probe Sequence
ataacttcaggctgggtcgcctgcc

SEQ ID NO: 127422 - DNA, 25 bp, Probe Sequence
atgaatcccagggagccggagtccc

SEQ ID NO: 127423 - DNA, 25 bp, Probe Sequence
atgttaccaggcatggcagtgggcg

SEQ ID NO: 127424 - DNA, 25 bp, Probe Sequence
atactaccatgtgctggggctgggc

SEQ ID NO: 127425 - DNA, 25 bp, Probe Sequence
atacttacatatctgacttctagga

SEQ ID NO: 127426 - DNA, 25 bp, Probe Sequence
atacttactgacacactcaaagaca

SEQ ID NO: 127427 - DNA, 25 bp, Probe Sequence
atactttctcctactctagcaaaca

SEQ ID NO: 127428 - DNA, 25 bp, Probe Sequence
atacatttatcggcattgtccaaaa

SEQ ID NO: 127429 - DNA, 25 bp, Probe Sequence
atacataatcacccttgtcacaaac

SEQ ID NO: 127430 - DNA, 25 bp, Probe Sequence
atactagactccattgtgccttact

SEQ ID NO: 127431 - DNA, 25 bp, Probe Sequence
ataaaagctggcacttggcttccgc

SEQ ID NO: 127432 - DNA, 25 bp, Probe Sequence
atgaaagcctacacctagcattgcc

SEQ ID NO: 127433 - DNA, 25 bp, Probe Sequence
atgaaccctacaaaatccatggcct

SEQ ID NO: 127434 - DNA, 25 bp, Probe Sequence
ataaggcctacttcacaaagcgcct

SEQ ID NO: 127435 - DNA, 25 bp, Probe Sequence
atgacagcctctatcctacaaggcc

SEQ ID NO: 127436 - DNA, 25 bp, Probe Sequence
atacaaatctgcatcttacagatga

SEQ ID NO: 127437 - DNA, 25 bp, Probe Sequence
atcactcaattcctattggagtgca

SEQ ID NO: 127438 - DNA, 25 bp, Probe Sequence
atactaatgcacgagtctgggcgcg

SEQ ID NO: 127439 - DNA, 25 bp, Probe Sequence
atacaagcatgatgacactggccga

SEQ ID NO: 127440 - DNA, 25 bp, Probe Sequence
atacaatcatgctgtgcttgcaggt

SEQ ID NO: 127441 - DNA, 25 bp, Probe Sequence
atacaggcagcccatgatgccgtgg

SEQ ID NO: 127442 - DNA, 25 bp, Probe Sequence
atacacagcagacctagccatgggc

SEQ ID NO: 127443 - DNA, 25 bp, Probe Sequence
atacactgagattaggccgggcaca

SEQ ID NO: 127444 - DNA, 25 bp, Probe Sequence
ataagtgcagatttggctcaagtaa

SEQ ID NO: 127445 - DNA, 25 bp, Probe Sequence
ataaatgcagtagtgaccttctcaa

SEQ ID NO: 127446 - DNA, 25 bp, Probe Sequence
ataaatcagatcgtgcctctttacc

SEQ ID NO: 127447 - DNA, 25 bp, Probe Sequence
ataaacagagagagtccctacccct

SEQ ID NO: 127448 - DNA, 25 bp, Probe Sequence
ataaaagcagggttggcctcagccc

SEQ ID NO: 127449 - DNA, 25 bp, Probe Sequence
ataaaaggagggcagcagctgagac

SEQ ID NO: 127450 - DNA, 25 bp, Probe Sequence
ataaacagggatccacagcgtgact

SEQ ID NO: 127451 - DNA, 25 bp, Probe Sequence
ataaacggggcagatgtctacttgt

SEQ ID NO: 127452 - DNA, 25 bp, Probe Sequence
atcaaggctggatacggttgacttc

SEQ ID NO: 127453 - DNA, 25 bp, Probe Sequence
atacagcaggtatagggaatcctat

SEQ ID NO: 127454 - DNA, 25 bp, Probe Sequence
atacacaccacatacggaatggcca

SEQ ID NO: 127455 - DNA, 25 bp, Probe Sequence
ataaaccagaaagtgtattgccaac

SEQ ID NO: 127456 - DNA, 25 bp, Probe Sequence
ataaacctgtctatcttatgccaga

SEQ ID NO: 127457 - DNA, 25 bp, Probe Sequence
ataaccgtgcttctttcatgtcagg

SEQ ID NO: 127458 - DNA, 25 bp, Probe Sequence
atacacgctggctgttttttaaaat

SEQ ID NO: 127459 - DNA, 25 bp, Probe Sequence
atcaaccgggacttttcgcaaaatg

SEQ ID NO: 127460 - DNA, 25 bp, Probe Sequence
ataacagctttatctttcaaaatag

SEQ ID NO: 127461 - DNA, 25 bp, Probe Sequence
atacacatcttttcattttgcctcg

SEQ ID NO: 127462 - DNA, 25 bp, Probe Sequence
atacagtcaactgagtgtttgctag

SEQ ID NO: 127463 - DNA, 25 bp, Probe Sequence
atacatgtagtctggctgttggctt

SEQ ID NO: 127464 - DNA, 25 bp, Probe Sequence
ataagctgagaccggtggctctctt

SEQ ID NO: 127465 - DNA, 25 bp, Probe Sequence
ataagctgagaccggtggctctctt

SEQ ID NO: 127466 - DNA, 25 bp, Probe Sequence
ataatctgggacgacaggttcatct

SEQ ID NO: 127467 - DNA, 25 bp, Probe Sequence
ataacaagcatacccagtgttctgc

SEQ ID NO: 127468 - DNA, 25 bp, Probe Sequence
ataaaagctaggcgtgtttgatgcg

SEQ ID NO: 127469 - DNA, 25 bp, Probe Sequence
ataaaatcaccacggtctttagcca

SEQ ID NO: 127470 - DNA, 25 bp, Probe Sequence
atcaaaacccacagtccattgtgaa

SEQ ID NO: 127471 - DNA, 25 bp, Probe Sequence
ataaaacccagtaatgcgatgcttg

SEQ ID NO: 127472 - DNA, 25 bp, Probe Sequence
ataaataacccttcacgtgtcacct

SEQ ID NO: 127473 - DNA, 25 bp, Probe Sequence
ataaatgaagctgctggccgggcgc

SEQ ID NO: 127474 - DNA, 25 bp, Probe Sequence
ataaatgaagctgctggccgggcgc

SEQ ID NO: 127475 - DNA, 25 bp, Probe Sequence
ataaagaagcgctgcaggaggtgga

SEQ ID NO: 127476 - DNA, 25 bp, Probe Sequence
ataaaacacatttgatggaatagga

SEQ ID NO: 127477 - DNA, 25 bp, Probe Sequence
ataatgatgccaatgggtggaatga

SEQ ID NO: 127478 - DNA, 25 bp, Probe Sequence
atacagcaccagacgcgatggcaaa

SEQ ID NO: 127479 - DNA, 25 bp, Probe Sequence
ataaccaggtcctggccaacggtct

SEQ ID NO: 127480 - DNA, 25 bp, Probe Sequence
aaaaaattcacatggccgggtgtca

SEQ ID NO: 127481 - DNA, 25 bp, Probe Sequence
ataaagaattacaaggccgggcgtg

SEQ ID NO: 127482 - DNA, 25 bp, Probe Sequence
ataagagaattagaccccagggagt

SEQ ID NO: 127483 - DNA, 25 bp, Probe Sequence
ataaaaatatagtcagcccagcatg

SEQ ID NO: 127484 - DNA, 25 bp, Probe Sequence
atcagagcatagaggtggccccagt

SEQ ID NO: 127485 - DNA, 25 bp, Probe Sequence
atcatgaccagaagcttgacgcacc

SEQ ID NO: 127486 - DNA, 25 bp, Probe Sequence
atgagcagcaaagtctctcgcgaca

SEQ ID NO: 127487 - DNA, 25 bp, Probe Sequence
atacagagagacatgctcagccacc

SEQ ID NO: 127488 - DNA, 25 bp, Probe Sequence
atacatgaagtagtgtctgccatac

SEQ ID NO: 127489 - DNA, 25 bp, Probe Sequence
atacaaagtttgactatctgactcc

SEQ ID NO: 127490 - DNA, 25 bp, Probe Sequence
ataagaaagtggatttgatccccag

SEQ ID NO: 127491 - DNA, 25 bp, Probe Sequence
atcaagataaggcatttctttcccg

SEQ ID NO: 127492 - DNA, 25 bp, Probe Sequence
acctactgctggttattcttaccct

SEQ ID NO: 127493 - DNA, 25 bp, Probe Sequence
atacaacatcatcaatcattttgac

SEQ ID NO: 127494 - DNA, 25 bp, Probe Sequence
atacaaatcactatcgctctatctc

SEQ ID NO: 127495 - DNA, 25 bp, Probe Sequence
ataagaacagctaccgctctgagga

SEQ ID NO: 127496 - DNA, 25 bp, Probe Sequence
ataaaacgtgttgtgtgagcatgga

SEQ ID NO: 127497 - DNA, 25 bp, Probe Sequence
ataaatgcaatggttctctgttgtg

SEQ ID NO: 127498 - DNA, 25 bp, Probe Sequence
atacacatccatgttcactgtaaca

SEQ ID NO: 127499 - DNA, 25 bp, Probe Sequence
ataacatgctgacataggcttaaca

SEQ ID NO: 127500 - DNA, 25 bp, Probe Sequence
ataagcattcgcaaggagtggaaac

SEQ ID NO: 127501 - DNA, 25 bp, Probe Sequence
atcaatgcctccaagaatttcaacc

SEQ ID NO: 127502 - DNA, 25 bp, Probe Sequence
ataagcccatcaagaaagtcatggt

SEQ ID NO: 127503 - DNA, 25 bp, Probe Sequence
ataacactatatccagacaagcatg

SEQ ID NO: 127504 - DNA, 25 bp, Probe Sequence
ataaccttgagataacagatgagaa

SEQ ID NO: 127505 - DNA, 25 bp, Probe Sequence
ataactctacgagaccagagagact

SEQ ID NO: 127506 - DNA, 25 bp, Probe Sequence
ataacttactatgaccttgaattcc

SEQ ID NO: 127507 - DNA, 25 bp, Probe Sequence
ataagtctaattgcccattgccata

SEQ ID NO: 127508 - DNA, 25 bp, Probe Sequence
ataagtcaactcttctccttgaaga

SEQ ID NO: 127509 - DNA, 25 bp, Probe Sequence
ataagtagatctttttcattgcaaa

SEQ ID NO: 127510 - DNA, 25 bp, Probe Sequence
atacatggagtgtttcttctcgaca

SEQ ID NO: 127511 - DNA, 25 bp, Probe Sequence
ataagtgaagttacatttgccctaa

SEQ ID NO: 127512 - DNA, 25 bp, Probe Sequence
ataactaatgtatgcaattcccaca

SEQ ID NO: 127513 - DNA, 25 bp, Probe Sequence
ataataattttgccaatattgccaa

SEQ ID NO: 127514 - DNA, 25 bp, Probe Sequence
ataaacttcatgcacctattccaaa

SEQ ID NO: 127515 - DNA, 25 bp, Probe Sequence
ataaaatccatccatgcctttcaca

SEQ ID NO: 127516 - DNA, 25 bp, Probe Sequence
ataaaatgtatgctgttgtgaccaa

SEQ ID NO: 127517 - DNA, 25 bp, Probe Sequence
atacatttgtatttcattgtgaaca

SEQ ID NO: 127518 - DNA, 25 bp, Probe Sequence
atacattctttatcttgacattcaa

SEQ ID NO: 127519 - DNA, 25 bp, Probe Sequence
ataaccattgtttctgtagtttaat

SEQ ID NO: 127520 - DNA, 25 bp, Probe Sequence
ataacttaggttaatagtgcctcat

SEQ ID NO: 127521 - DNA, 25 bp, Probe Sequence
ataactctagagcttgaattttaag

SEQ ID NO: 127522 - DNA, 25 bp, Probe Sequence
ataactctgtatcatgtgtattttc

SEQ ID NO: 127523 - DNA, 25 bp, Probe Sequence
ataactatgctaattgttcataatc

SEQ ID NO: 127524 - DNA, 25 bp, Probe Sequence
atacaaattgtattgcttattcatt

SEQ ID NO: 127525 - DNA, 25 bp, Probe Sequence
atacatattttgtgctaatcttgtt

SEQ ID NO: 127526 - DNA, 25 bp, Probe Sequence
atacatcttagttacaagtctttgg

SEQ ID NO: 127527 - DNA, 25 bp, Probe Sequence
ataacgcttgctatcaagactttgg

SEQ ID NO: 127528 - DNA, 25 bp, Probe Sequence
ataaacattcatgtctacattttgg

SEQ ID NO: 127529 - DNA, 25 bp, Probe Sequence
atacataagtcaactcttctccttg

SEQ ID NO: 127530 - DNA, 25 bp, Probe Sequence
ataagccattatactctttccagga

SEQ ID NO: 127531 - DNA, 25 bp, Probe Sequence
atacagccatggatgagttctctca

SEQ ID NO: 127532 - DNA, 25 bp, Probe Sequence
atgaatgccaggccaacttcatctc

SEQ ID NO: 127533 - DNA, 25 bp, Probe Sequence
ataactcaggcgtctttgcatttct

SEQ ID NO: 127534 - DNA, 25 bp, Probe Sequence
ataaaagggaatctcagtgtctgtt

SEQ ID NO: 127535 - DNA, 25 bp, Probe Sequence
ataaaaggttatatcagctgggcat

SEQ ID NO: 127536 - DNA, 25 bp, Probe Sequence
ataaaaatgctgttcctggctgggc

SEQ ID NO: 127537 - DNA, 25 bp, Probe Sequence
atacaatcaagatatctcatggcat

SEQ ID NO: 127538 - DNA, 25 bp, Probe Sequence
ataacatctctgatcatgctataca

SEQ ID NO: 127539 - DNA, 25 bp, Probe Sequence
atacacattggaactgcctctgctg

SEQ ID NO: 127540 - DNA, 25 bp, Probe Sequence
atacactgggtaacctgatcgtgga

SEQ ID NO: 127541 - DNA, 25 bp, Probe Sequence
atacacagggtgactcacccgtgaa

SEQ ID NO: 127542 - DNA, 25 bp, Probe Sequence
ataacacatagtctacagcctggaa

SEQ ID NO: 127543 - DNA, 25 bp, Probe Sequence
ataagcaacttgaaagtgcctggaa

SEQ ID NO: 127544 - DNA, 25 bp, Probe Sequence
ataaataatctgaggatgtgtttca

SEQ ID NO: 127545 - DNA, 25 bp, Probe Sequence
ataaatcatttcaggtggttacagt

SEQ ID NO: 127546 - DNA, 25 bp, Probe Sequence
ataattccgccaaagtggcttcaag

SEQ ID NO: 127547 - DNA, 25 bp, Probe Sequence
ataatgcggcgggtaggcgtgtacg

SEQ ID NO: 127548 - DNA, 25 bp, Probe Sequence
ataaggcgctgggagaggatgggca

SEQ ID NO: 127549 - DNA, 25 bp, Probe Sequence
ataagcggctggtgacgctgcgact

SEQ ID NO: 127550 - DNA, 25 bp, Probe Sequence
ataaggcctggaacacagtgaacat

SEQ ID NO: 127551 - DNA, 25 bp, Probe Sequence
ataaggctaggcaccctaatctgtt

SEQ ID NO: 127552 - DNA, 25 bp, Probe Sequence
atcaggtaaagggccccttctgctt

SEQ ID NO: 127553 - DNA, 25 bp, Probe Sequence
ataacttgaaggcccgcaattcctt

SEQ ID NO: 127554 - DNA, 25 bp, Probe Sequence
ataatatgttcagggccctagttct

SEQ ID NO: 127555 - DNA, 25 bp, Probe Sequence
ataatcttctcaggacaccatccgt

SEQ ID NO: 127556 - DNA, 25 bp, Probe Sequence
ataacttgtatggagaactcaccaa

SEQ ID NO: 127557 - DNA, 25 bp, Probe Sequence
atcaactggattgacaaaatcatga

SEQ ID NO: 127558 - DNA, 25 bp, Probe Sequence
atcaacaagactgaaacaccccatt

SEQ ID NO: 127559 - DNA, 25 bp, Probe Sequence
atcaaacaatcggaaaccacgcgtc

SEQ ID NO: 127560 - DNA, 25 bp, Probe Sequence
ataaatcactaggtacaatcctggt

SEQ ID NO: 127561 - DNA, 25 bp, Probe Sequence
atacaacaaagcctctaatcctgat

SEQ ID NO: 127562 - DNA, 25 bp, Probe Sequence
ataaaataatctctaaaccatgtta

SEQ ID NO: 127563 - DNA, 25 bp, Probe Sequence
ataagaattactcaaacacaagcat

SEQ ID NO: 127564 - DNA, 25 bp, Probe Sequence
ataaaactgactctcaacatcaaaa

SEQ ID NO: 127565 - DNA, 25 bp, Probe Sequence
ataaggagcgaatcctacatccacc

SEQ ID NO: 127566 - DNA, 25 bp, Probe Sequence
ataaggagcgaatcctacatccacc

SEQ ID NO: 127567 - DNA, 25 bp, Probe Sequence
atcaggaagtgaagccctacaccct

SEQ ID NO: 127568 - DNA, 25 bp, Probe Sequence
ataaaggaactcaggcgcctcttct

SEQ ID NO: 127569 - DNA, 25 bp, Probe Sequence
ataaaggaactcaggcgcctcttct

SEQ ID NO: 127570 - DNA, 25 bp, Probe Sequence
ataaaaagacatcgttcccgcttct

SEQ ID NO: 127571 - DNA, 25 bp, Probe Sequence
ataacaaaactgctaccttctcatc

SEQ ID NO: 127572 - DNA, 25 bp, Probe Sequence
atcaaaaaaatcgtagccttctcca

SEQ ID NO: 127573 - DNA, 25 bp, Probe Sequence
ataaattaatttgaccatctctctt

SEQ ID NO: 127574 - DNA, 25 bp, Probe Sequence
ataacttggttatactatattctgt

SEQ ID NO: 127575 - DNA, 25 bp, Probe Sequence
ataagttggttctagcgcagttttt

SEQ ID NO: 127576 - DNA, 25 bp, Probe Sequence
atcatttttttcagccgtcttaata

SEQ ID NO: 127577 - DNA, 25 bp, Probe Sequence
ataacttttatcctccagatcttaa

SEQ ID NO: 127578 - DNA, 25 bp, Probe Sequence
ataacttgctgtttctcacgtttca

SEQ ID NO: 127579 - DNA, 25 bp, Probe Sequence
atacactaggatttctactggaggt

SEQ ID NO: 127580 - DNA, 25 bp, Probe Sequence
atcaacgttgttatccaggagaatg

SEQ ID NO: 127581 - DNA, 25 bp, Probe Sequence
atacacagctttatgatatcaaaga

SEQ ID NO: 127582 - DNA, 25 bp, Probe Sequence
atacacagtctacagcttcaacaac

SEQ ID NO: 127583 - DNA, 25 bp, Probe Sequence
ataaagactagttcttatcaacctt

SEQ ID NO: 127584 - DNA, 25 bp, Probe Sequence
ataaaactaggtgctgcagcccctg

SEQ ID NO: 127585 - DNA, 25 bp, Probe Sequence
ataaaactgatgttactagcctctc

SEQ ID NO: 127586 - DNA, 25 bp, Probe Sequence
atcaaaaaggttgtagcctggccaa

SEQ ID NO: 127587 - DNA, 25 bp, Probe Sequence
agaaccaagaactctaactgtccca

SEQ ID NO: 127588 - DNA, 25 bp, Probe Sequence
ataaacaaaatccactgaggcttcc

SEQ ID NO: 127589 - DNA, 25 bp, Probe Sequence
ataaataaaatgctctctgtcttag

SEQ ID NO: 127590 - DNA, 25 bp, Probe Sequence
ataaatacataacctcattctgaat

SEQ ID NO: 127591 - DNA, 25 bp, Probe Sequence
atacacatacaaacacacaataata

SEQ ID NO: 127592 - DNA, 25 bp, Probe Sequence
ataaccatactaccatcaatactca

SEQ ID NO: 127593 - DNA, 25 bp, Probe Sequence
ataacctgactgaaccaaatccatc

SEQ ID NO: 127594 - DNA, 25 bp, Probe Sequence
ataacctggctgggctgaaactgtc

SEQ ID NO: 127595 - DNA, 25 bp, Probe Sequence
ataactgtatgggagcttaacttta

SEQ ID NO: 127596 - DNA, 25 bp, Probe Sequence
ataatcttattgaaattaccttatc

SEQ ID NO: 127597 - DNA, 25 bp, Probe Sequence
ataattgctgaagagatcccctccc

SEQ ID NO: 127598 - DNA, 25 bp, Probe Sequence
ataatatgcggagagcagccagaaa

SEQ ID NO: 127599 - DNA, 25 bp, Probe Sequence
ataaatgtcacgtccagctctgata

SEQ ID NO: 127600 - DNA, 25 bp, Probe Sequence
atcacttacaggtaccatttatttc

SEQ ID NO: 127601 - DNA, 25 bp, Probe Sequence
atcacttaatttgaaatctattggg

SEQ ID NO: 127602 - DNA, 25 bp, Probe Sequence
ataactaattttgaatgctactgat

SEQ ID NO: 127603 - DNA, 25 bp, Probe Sequence
atcaatctacattttcccaaactgt

SEQ ID NO: 127604 - DNA, 25 bp, Probe Sequence
ataacatacctctcctacgtattat

SEQ ID NO: 127605 - DNA, 25 bp, Probe Sequence
atcaggaacgcctcgatacgctgga

SEQ ID NO: 127606 - DNA, 25 bp, Probe Sequence
atcaaatccgactggctaggctgct

SEQ ID NO: 127607 - DNA, 25 bp, Probe Sequence
atcaaaccggcactgagcttcagcc

SEQ ID NO: 127608 - DNA, 25 bp, Probe Sequence
ataaacactggcttggattgccctt

SEQ ID NO: 127609 - DNA, 25 bp, Probe Sequence
ataaccttagctagagtgtcgcctt

SEQ ID NO: 127610 - DNA, 25 bp, Probe Sequence
ataaccataaccagattcccttgca

SEQ ID NO: 127611 - DNA, 25 bp, Probe Sequence
ataacacttgatgccgtttctttca

SEQ ID NO: 127612 - DNA, 25 bp, Probe Sequence
ataacgttctcagtcctttgttata

SEQ ID NO: 127613 - DNA, 25 bp, Probe Sequence
ataacctgtctcacctggacttaag

SEQ ID NO: 127614 - DNA, 25 bp, Probe Sequence
ataatatctggtatcctggcacaat

SEQ ID NO: 127615 - DNA, 25 bp, Probe Sequence
atacaatctgaggcctcctctctca

SEQ ID NO: 127616 - DNA, 25 bp, Probe Sequence
ataaatctgagcccttctctcattt

SEQ ID NO: 127617 - DNA, 25 bp, Probe Sequence
ataaatatgtctccatctgccttac

SEQ ID NO: 127618 - DNA, 25 bp, Probe Sequence
ataaatatgtctccatctgccttac

SEQ ID NO: 127619 - DNA, 25 bp, Probe Sequence
ataaatatatcaacttgcttgtgag

SEQ ID NO: 127620 - DNA, 25 bp, Probe Sequence
ataacatttaacaagtattgcagta

SEQ ID NO: 127621 - DNA, 25 bp, Probe Sequence
ataagatttaaccatgtttgacata

SEQ ID NO: 127622 - DNA, 25 bp, Probe Sequence
ataagatcttttgctgttgtcccat

SEQ ID NO: 127623 - DNA, 25 bp, Probe Sequence
ataagtgctttatctgtttagacat

SEQ ID NO: 127624 - DNA, 25 bp, Probe Sequence
ataaatgattatttctttctcagaa

SEQ ID NO: 127625 - DNA, 25 bp, Probe Sequence
ataaatcactactcatattaatata

SEQ ID NO: 127626 - DNA, 25 bp, Probe Sequence
ataaccagccattggctatttaaac

SEQ ID NO: 127627 - DNA, 25 bp, Probe Sequence
ataacccaaaggcatgctccagaca

SEQ ID NO: 127628 - DNA, 25 bp, Probe Sequence
ataaatccgatttgaataccaacaa

SEQ ID NO: 127629 - DNA, 25 bp, Probe Sequence
ataaatccaatcaagataggctctg

SEQ ID NO: 127630 - DNA, 25 bp, Probe Sequence
ataacactccaatgatagttttccc

SEQ ID NO: 127631 - DNA, 25 bp, Probe Sequence
ataatagggcaatataccaatctcc

SEQ ID NO: 127632 - DNA, 25 bp, Probe Sequence
ataaagtggactgtgactgcttccc

SEQ ID NO: 127633 - DNA, 25 bp, Probe Sequence
ataacacttacttggtctttcgcac

SEQ ID NO: 127634 - DNA, 25 bp, Probe Sequence
ataacatctccaatttttttgcgaa

SEQ ID NO: 127635 - DNA, 25 bp, Probe Sequence
ataaagatacttatcttttcagcag

SEQ ID NO: 127636 - DNA, 25 bp, Probe Sequence
atgaataaagctcttcctgctccag

SEQ ID NO: 127637 - DNA, 25 bp, Probe Sequence
ataaggagacaccttctttctgggc

SEQ ID NO: 127638 - DNA, 25 bp, Probe Sequence
ataaggtatccgtccatgttcttgc

SEQ ID NO: 127639 - DNA, 25 bp, Probe Sequence
ataactaatgacatccagtgtctcc

SEQ ID NO: 127640 - DNA, 25 bp, Probe Sequence
ataacttcagacatgcatcagtagg

SEQ ID NO: 127641 - DNA, 25 bp, Probe Sequence
atcaacctaattacatcaggataga

SEQ ID NO: 127642 - DNA, 25 bp, Probe Sequence
ataacttcaggtacagcagagataa

SEQ ID NO: 127643 - DNA, 25 bp, Probe Sequence
ataagttggtgtggctaagatggaa

SEQ ID NO: 127644 - DNA, 25 bp, Probe Sequence
atcattttgggaggccacagtgggc

SEQ ID NO: 127645 - DNA, 25 bp, Probe Sequence
atcttaggggaccaccatcgtacat

SEQ ID NO: 127646 - DNA, 25 bp, Probe Sequence
accaaggggacatggctctgaagat

SEQ ID NO: 127647 - DNA, 25 bp, Probe Sequence
ataagggggagctagcctcctatga

SEQ ID NO: 127648 - DNA, 25 bp, Probe Sequence
ataacatgggcggcattcccaccaa

SEQ ID NO: 127649 - DNA, 25 bp, Probe Sequence
ataaagtcagctggctttctcaaaa

SEQ ID NO: 127650 - DNA, 25 bp, Probe Sequence
ataaagctccgattatctcaaaata

SEQ ID NO: 127651 - DNA, 25 bp, Probe Sequence
ataacaatcttgtattctaacataa

SEQ ID NO: 127652 - DNA, 25 bp, Probe Sequence
ataagcaagttgacatttagacata

SEQ ID NO: 127653 - DNA, 25 bp, Probe Sequence
atgcataggaccgacatttcagacg

SEQ ID NO: 127654 - DNA, 25 bp, Probe Sequence
ataagaaccaacattatcacaccaa

SEQ ID NO: 127655 - DNA, 25 bp, Probe Sequence
ataagattccagtctatcttctcca

SEQ ID NO: 127656 - DNA, 25 bp, Probe Sequence
ataaaccatcagcctactcattcaa

SEQ ID NO: 127657 - DNA, 25 bp, Probe Sequence
ataaaatgcatgagaactctgacca

SEQ ID NO: 127658 - DNA, 25 bp, Probe Sequence
ataaatgtgcacatgtaatcatatc

SEQ ID NO: 127659 - DNA, 25 bp, Probe Sequence
ataacagctgcatcattgaccgcac

SEQ ID NO: 127660 - DNA, 25 bp, Probe Sequence
ataaagtcaaataagcctctctgtt

SEQ ID NO: 127661 - DNA, 25 bp, Probe Sequence
ataaacaccaacgatggcctctttt

SEQ ID NO: 127662 - DNA, 25 bp, Probe Sequence
ataagaccaacagcatcctcttcta

SEQ ID NO: 127663 - DNA, 25 bp, Probe Sequence
ataagaccaacagcatcctcttcta

SEQ ID NO: 127664 - DNA, 25 bp, Probe Sequence
ataaatcccacaactgctatttctg

SEQ ID NO: 127665 - DNA, 25 bp, Probe Sequence
ataaatcctccagtctggatcgttt

SEQ ID NO: 127666 - DNA, 25 bp, Probe Sequence
ataacttcctcagcttgagcagttt

SEQ ID NO: 127667 - DNA, 25 bp, Probe Sequence
ataactgtcctcaacaacagcggcc

SEQ ID NO: 127668 - DNA, 25 bp, Probe Sequence
ataactgtgtctatcagcaagcgtc

SEQ ID NO: 127669 - DNA, 25 bp, Probe Sequence
ataactgcagtccttcaaagatgac

SEQ ID NO: 127670 - DNA, 25 bp, Probe Sequence
atcagacagagtggttcatcgacaa

SEQ ID NO: 127671 - DNA, 25 bp, Probe Sequence
atcagagcatgatctgtttggccac

SEQ ID NO: 127672 - DNA, 25 bp, Probe Sequence
atctagttcctggattggttgctaa

SEQ ID NO: 127673 - DNA, 25 bp, Probe Sequence
ataacttcctgattggagtgtgtaa

SEQ ID NO: 127674 - DNA, 25 bp, Probe Sequence
ataatctcttgttatgcagggagta

SEQ ID NO: 127675 - DNA, 25 bp, Probe Sequence
ataatatcttaactgtggaactcaa

SEQ ID NO: 127676 - DNA, 25 bp, Probe Sequence
ataacatcttattgttggtaatagt

SEQ ID NO: 127677 - DNA, 25 bp, Probe Sequence
ataatttacatacttggcataataa

SEQ ID NO: 127678 - DNA, 25 bp, Probe Sequence
ataagttaatgactaatatgtttac

SEQ ID NO: 127679 - DNA, 25 bp, Probe Sequence
ataagtatactgcctgcctatgtga

SEQ ID NO: 127680 - DNA, 25 bp, Probe Sequence
ataaagctccattgtgcctgcaatg

SEQ ID NO: 127681 - DNA, 25 bp, Probe Sequence
ataatatcctcactggccacaatct

SEQ ID NO: 127682 - DNA, 25 bp, Probe Sequence
atcaatactctggctgaccatcgtc

SEQ ID NO: 127683 - DNA, 25 bp, Probe Sequence
atcaacatcatattcagcccatcac

SEQ ID NO: 127684 - DNA, 25 bp, Probe Sequence
atcaacatcatattcagcccatcac

SEQ ID NO: 127685 - DNA, 25 bp, Probe Sequence
ataacacaaatctacacacacacca

SEQ ID NO: 127686 - DNA, 25 bp, Probe Sequence
ataagcatcctattacagaactcca

SEQ ID NO: 127687 - DNA, 25 bp, Probe Sequence
ataatgctcctggtaaggtcccaga

SEQ ID NO: 127688 - DNA, 25 bp, Probe Sequence
ataaccctgccatgtggtttgcaga

SEQ ID NO: 127689 - DNA, 25 bp, Probe Sequence
atcaacggctgccgggtggtctgac

SEQ ID NO: 127690 - DNA, 25 bp, Probe Sequence
atcaacagaagcagccgtgggcaaa

SEQ ID NO: 127691 - DNA, 25 bp, Probe Sequence
atcacacactggatgccgtatggat

SEQ ID NO: 127692 - DNA, 25 bp, Probe Sequence
atcaccagcggcgtctgggtgtgga

SEQ ID NO: 127693 - DNA, 25 bp, Probe Sequence
atcaccactgggaggtggggcctca

SEQ ID NO: 127694 - DNA, 25 bp, Probe Sequence
atccccttggacaaaactgtcgtca

SEQ ID NO: 127695 - DNA, 25 bp, Probe Sequence
atcacgcccggagtagaagcgcata

SEQ ID NO: 127696 - DNA, 25 bp, Probe Sequence
ataagtccagtaggcacatttgata

SEQ ID NO: 127697 - DNA, 25 bp, Probe Sequence
ataagctactaattcacattttaat

SEQ ID NO: 127698 - DNA, 25 bp, Probe Sequence
ataaaagctatactccatctaaaat

SEQ ID NO: 127699 - DNA, 25 bp, Probe Sequence
ataaaagctatactccatctaaaat

SEQ ID NO: 127700 - DNA, 25 bp, Probe Sequence
ataagagcgaaactccatctcaaaa

SEQ ID NO: 127701 - DNA, 25 bp, Probe Sequence
ataagagtgtattaccattaaagtc

SEQ ID NO: 127702 - DNA, 25 bp, Probe Sequence
ataagctgcttataactggaaatgg

SEQ ID NO: 127703 - DNA, 25 bp, Probe Sequence
ataactgctctgtaattctggacat

SEQ ID NO: 127704 - DNA, 25 bp, Probe Sequence
ataaagcctgaatttctgatcaata

SEQ ID NO: 127705 - DNA, 25 bp, Probe Sequence
ataaagctgctaactcctgatctaa

SEQ ID NO: 127706 - DNA, 25 bp, Probe Sequence
atcaaactcattgtcactgtcctgg

SEQ ID NO: 127707 - DNA, 25 bp, Probe Sequence
ataaagctctctgtcatatgctatt

SEQ ID NO: 127708 - DNA, 25 bp, Probe Sequence
ataacagtgtctttctagccataat

SEQ ID NO: 127709 - DNA, 25 bp, Probe Sequence
ataaaagctgtgtttgagcatcaaa

SEQ ID NO: 127710 - DNA, 25 bp, Probe Sequence
ataaacatgtgccctcaggccaaaa

SEQ ID NO: 127711 - DNA, 25 bp, Probe Sequence
ataaagcttgctaccgctcaaaaaa

SEQ ID NO: 127712 - DNA, 25 bp, Probe Sequence
ataaagatacatagaggctcaaagt

SEQ ID NO: 127713 - DNA, 25 bp, Probe Sequence
ataaggattctattgttcagttgtg

SEQ ID NO: 127714 - DNA, 25 bp, Probe Sequence
ataaggatgctaaattccgtctgat

SEQ ID NO: 127715 - DNA, 25 bp, Probe Sequence
ataagaatgtatgtgtccaggcgca

SEQ ID NO: 127716 - DNA, 25 bp, Probe Sequence
ataagagttatgttagccaggtgca

SEQ ID NO: 127717 - DNA, 25 bp, Probe Sequence
ataagttttgacccgcagagtgcac

SEQ ID NO: 127718 - DNA, 25 bp, Probe Sequence
ataagtgctttgtgcccagaggcca

SEQ ID NO: 127719 - DNA, 25 bp, Probe Sequence
ataactgataactccctgagcctca

SEQ ID NO: 127720 - DNA, 25 bp, Probe Sequence
ataactgataactccctgagcctca

SEQ ID NO: 127721 - DNA, 25 bp, Probe Sequence
ataactgataactccctgagcctca

SEQ ID NO: 127722 - DNA, 25 bp, Probe Sequence
ataactgataactccctgagcctca

SEQ ID NO: 127723 - DNA, 25 bp, Probe Sequence
ataactgataactccctgagcctca

SEQ ID NO: 127724 - DNA, 25 bp, Probe Sequence
ataactatgtagggccagggcttga

SEQ ID NO: 127725 - DNA, 25 bp, Probe Sequence
atcaactaagatggatcaaggactt

SEQ ID NO: 127726 - DNA, 25 bp, Probe Sequence
ataactcatagtggagaggaatcct

SEQ ID NO: 127727 - DNA, 25 bp, Probe Sequence
ataacgcattatgaaggcagcacat

SEQ ID NO: 127728 - DNA, 25 bp, Probe Sequence
ataactgctcatgaagatagacaca

SEQ ID NO: 127729 - DNA, 25 bp, Probe Sequence
ataacgtcatgctacagtggtgata

SEQ ID NO: 127730 - DNA, 25 bp, Probe Sequence
ataacgtctcagctggagatcaatt

SEQ ID NO: 127731 - DNA, 25 bp, Probe Sequence
atgaacctccctggggatcaactcc

SEQ ID NO: 127732 - DNA, 25 bp, Probe Sequence
ataatttgctcctgacagtcatacc

SEQ ID NO: 127733 - DNA, 25 bp, Probe Sequence
ataattcctatacgaagcaaactaa

SEQ ID NO: 127734 - DNA, 25 bp, Probe Sequence
atcaatctcgcttaggtaaaattct

SEQ ID NO: 127735 - DNA, 25 bp, Probe Sequence
ataactcatgcctgaacaaaactca

SEQ ID NO: 127736 - DNA, 25 bp, Probe Sequence
atcaccaacttgcaaacagaattca

SEQ ID NO: 127737 - DNA, 25 bp, Probe Sequence
atcaggaacagataaaaccattaga

SEQ ID NO: 127738 - DNA, 25 bp, Probe Sequence
atcgtgcagtgcttaaaaaccggga

SEQ ID NO: 127739 - DNA, 25 bp, Probe Sequence
atcaagagatgataccttaccatgg

SEQ ID NO: 127740 - DNA, 25 bp, Probe Sequence
ataaacagacaacctatagaatgga

SEQ ID NO: 127741 - DNA, 25 bp, Probe Sequence
ataaacagtcactggaaagagtgcc

SEQ ID NO: 127742 - DNA, 25 bp, Probe Sequence
atgctaaagtagctgtgctaggggc

SEQ ID NO: 127743 - DNA, 25 bp, Probe Sequence
ataagacattagctgtctaggcgtg

SEQ ID NO: 127744 - DNA, 25 bp, Probe Sequence
ataaacatgtgggtctctcaaagga

SEQ ID NO: 127745 - DNA, 25 bp, Probe Sequence
ataatactgattttactacagggag

SEQ ID NO: 127746 - DNA, 25 bp, Probe Sequence
ataatacattcagtatactaccaag

SEQ ID NO: 127747 - DNA, 25 bp, Probe Sequence
ataatatcactctgtacatccacaa

SEQ ID NO: 127748 - DNA, 25 bp, Probe Sequence
ataacacctcttaagtctagcacac

SEQ ID NO: 127749 - DNA, 25 bp, Probe Sequence
ataataccatcttctctgttaatac

SEQ ID NO: 127750 - DNA, 25 bp, Probe Sequence
ataattgcgagttgtctcttaatga

SEQ ID NO: 127751 - DNA, 25 bp, Probe Sequence
ataactcaagcaaaatcttcactga

SEQ ID NO: 127752 - DNA, 25 bp, Probe Sequence
ataacatatagtcaattagcacatg

SEQ ID NO: 127753 - DNA, 25 bp, Probe Sequence
ataagcgatatttattatctgcaag

SEQ ID NO: 127754 - DNA, 25 bp, Probe Sequence
ataagcctttaattcatcctcagtg

SEQ ID NO: 127755 - DNA, 25 bp, Probe Sequence
ataaccttggcttgtcatttcagtg

SEQ ID NO: 127756 - DNA, 25 bp, Probe Sequence
ataacacttcaaagtcatcttgcca

SEQ ID NO: 127757 - DNA, 25 bp, Probe Sequence
ataacctttcagaaatgctgtgtgc

SEQ ID NO: 127758 - DNA, 25 bp, Probe Sequence
ataactcttacagtagtctgtataa

SEQ ID NO: 127759 - DNA, 25 bp, Probe Sequence
ataacactataacacttcatatttt

SEQ ID NO: 127760 - DNA, 25 bp, Probe Sequence
ataacctacatggtgtcttaccttt

SEQ ID NO: 127761 - DNA, 25 bp, Probe Sequence
ataatatcgacacagtgctttccgt

SEQ ID NO: 127762 - DNA, 25 bp, Probe Sequence
ataattgtagacattttctcacgtc

SEQ ID NO: 127763 - DNA, 25 bp, Probe Sequence
ataattattacattttgactaccac

SEQ ID NO: 127764 - DNA, 25 bp, Probe Sequence
ataatgtaaacattgggaacagcca

SEQ ID NO: 127765 - DNA, 25 bp, Probe Sequence
aaatgctaaaaacacgaatgtgaaa

SEQ ID NO: 127766 - DNA, 25 bp, Probe Sequence
ataagcataaaacctgacacgttaa

SEQ ID NO: 127767 - DNA, 25 bp, Probe Sequence
ataacaagaacacccacacgttgct

SEQ ID NO: 127768 - DNA, 25 bp, Probe Sequence
ataactgaacacactcatccatttg

SEQ ID NO: 127769 - DNA, 25 bp, Probe Sequence
ataactgttaattctcagccatctt

SEQ ID NO: 127770 - DNA, 25 bp, Probe Sequence
ataactgtgtacttctggtgactgt

SEQ ID NO: 127771 - DNA, 25 bp, Probe Sequence
atcaacgtggcctttgagttcagtt

SEQ ID NO: 127772 - DNA, 25 bp, Probe Sequence
atcaacgttgactctgtggctgaga

SEQ ID NO: 127773 - DNA, 25 bp, Probe Sequence
atcaacgttgactctgtggctgaga

SEQ ID NO: 127774 - DNA, 25 bp, Probe Sequence
atcaattttgggtctggcagctgaa

SEQ ID NO: 127775 - DNA, 25 bp, Probe Sequence
ataagatacatgatttgggctggat

SEQ ID NO: 127776 - DNA, 25 bp, Probe Sequence
atcagtttcgttccgggtcgatgtt

SEQ ID NO: 127777 - DNA, 25 bp, Probe Sequence
atcgtggtggtcccggtggaatgtt

SEQ ID NO: 127778 - DNA, 25 bp, Probe Sequence
atcgtggtggtcccggtggaatgtt

SEQ ID NO: 127779 - DNA, 25 bp, Probe Sequence
atcgtggtggtcccggtggaatgtt

SEQ ID NO: 127780 - DNA, 25 bp, Probe Sequence
atcggggtgaccaagggcaaaggct

SEQ ID NO: 127781 - DNA, 25 bp, Probe Sequence
atcaggtcgatacggccggaagggt

SEQ ID NO: 127782 - DNA, 25 bp, Probe Sequence
atcagcctcgtgttgagccttaaag

SEQ ID NO: 127783 - DNA, 25 bp, Probe Sequence
atcagcccatctacttggcagtgaa

SEQ ID NO: 127784 - DNA, 25 bp, Probe Sequence
atcagctgcggcaagcctagggacc

SEQ ID NO: 127785 - DNA, 25 bp, Probe Sequence
atcagctgcggcaagcctagggacc

SEQ ID NO: 127786 - DNA, 25 bp, Probe Sequence
atcagctgcggcaagcctagggacc

SEQ ID NO: 127787 - DNA, 25 bp, Probe Sequence
atcgtgtggcgacggataaggcctg

SEQ ID NO: 127788 - DNA, 25 bp, Probe Sequence
atcaatgggctgtggatagcggttt

SEQ ID NO: 127789 - DNA, 25 bp, Probe Sequence
ataatgggcgtccctattctctttt

SEQ ID NO: 127790 - DNA, 25 bp, Probe Sequence
ataattggcagatgcccactgcctt

SEQ ID NO: 127791 - DNA, 25 bp, Probe Sequence
ataattgcgcaatattcaccgtata

SEQ ID NO: 127792 - DNA, 25 bp, Probe Sequence
ataataagccatgagcttcgttcta

SEQ ID NO: 127793 - DNA, 25 bp, Probe Sequence
atcactatacctgactcaagtcctg

SEQ ID NO: 127794 - DNA, 25 bp, Probe Sequence
atcacttaaatggagatccagtcga

SEQ ID NO: 127795 - DNA, 25 bp, Probe Sequence
atcactattttgaagcacagcttta

SEQ ID NO: 127796 - DNA, 25 bp, Probe Sequence
ctacgtattagtcatcgctattacc

SEQ ID NO: 127797 - DNA, 25 bp, Probe Sequence
ctacgtattagtcatcgctattaac

SEQ ID NO: 127798 - DNA, 25 bp, Probe Sequence
ataagtattcttcatcagcatttaa

SEQ ID NO: 127799 - DNA, 25 bp, Probe Sequence
ataagtattcttcatcagcatttaa

SEQ ID NO: 127800 - DNA, 25 bp, Probe Sequence
ataaaatgctcctagaagtcttaat

SEQ ID NO: 127801 - DNA, 25 bp, Probe Sequence
ataagatattcccgctttctgtttt

SEQ ID NO: 127802 - DNA, 25 bp, Probe Sequence
ataaggcacatctcagccttcttgt

SEQ ID NO: 127803 - DNA, 25 bp, Probe Sequence
ataaggaatgcagacagtccctttc

SEQ ID NO: 127804 - DNA, 25 bp, Probe Sequence
ataagaatgaactaagtatgtttct

SEQ ID NO: 127805 - DNA, 25 bp, Probe Sequence
atcaaaatgcaacacatgcactttg

SEQ ID NO: 127806 - DNA, 25 bp, Probe Sequence
atcaccaacaacaccgctgaggagt

SEQ ID NO: 127807 - DNA, 25 bp, Probe Sequence
atcactaaccagactccttacaagt

SEQ ID NO: 127808 - DNA, 25 bp, Probe Sequence
atccgaatctcggtccgtcaaagtg

SEQ ID NO: 127809 - DNA, 25 bp, Probe Sequence
atccgaatctcggtccgtcaaagtg

SEQ ID NO: 127810 - DNA, 25 bp, Probe Sequence
atcccgtacgatggccgtcaagaag

SEQ ID NO: 127811 - DNA, 25 bp, Probe Sequence
atcagccgtaccgggcgatgcttgt

SEQ ID NO: 127812 - DNA, 25 bp, Probe Sequence
atcactccgaccggtgagtcatttg

SEQ ID NO: 127813 - DNA, 25 bp, Probe Sequence
atcaccctgactgtggggtgcatcg

SEQ ID NO: 127814 - DNA, 25 bp, Probe Sequence
atcacccccatgatgggtgtcctgg

SEQ ID NO: 127815 - DNA, 25 bp, Probe Sequence
atccccgacatgttcaaagtcccga

SEQ ID NO: 127816 - DNA, 25 bp, Probe Sequence
atcagcctcatgcctgaatcaaatt

SEQ ID NO: 127817 - DNA, 25 bp, Probe Sequence
atcaaatgctgccattgacacagta

SEQ ID NO: 127818 - DNA, 25 bp, Probe Sequence
ataacatgctgccattcttgattgc

SEQ ID NO: 127819 - DNA, 25 bp, Probe Sequence
ataacagctgctgttatgttaactt

SEQ ID NO: 127820 - DNA, 25 bp, Probe Sequence
ataaccactttttgttgggcaatat

SEQ ID NO: 127821 - DNA, 25 bp, Probe Sequence
ataaccactttttgttgggcaatat

SEQ ID NO: 127822 - DNA, 25 bp, Probe Sequence
ataactaatttttccttgtgcattt

SEQ ID NO: 127823 - DNA, 25 bp, Probe Sequence
ataattatagtagtggccttgtttt

SEQ ID NO: 127824 - DNA, 25 bp, Probe Sequence
ataataaacttctggtgtgatactt

SEQ ID NO: 127825 - DNA, 25 bp, Probe Sequence
ataataacttcctgtttcattgtat

SEQ ID NO: 127826 - DNA, 25 bp, Probe Sequence
ataacgatttcccgtcttgactgag

SEQ ID NO: 127827 - DNA, 25 bp, Probe Sequence
atcaacgtttggagccttggcatca

SEQ ID NO: 127828 - DNA, 25 bp, Probe Sequence
atcagccagtttctggggatttgca

SEQ ID NO: 127829 - DNA, 25 bp, Probe Sequence
atcagccagcttctaggtggctcct

SEQ ID NO: 127830 - DNA, 25 bp, Probe Sequence
atcaccattggcaatgagcggttcc

SEQ ID NO: 127831 - DNA, 25 bp, Probe Sequence
atcacctgtgggaagacggacgtgg

SEQ ID NO: 127832 - DNA, 25 bp, Probe Sequence
atcaccctggagatagattacttag

SEQ ID NO: 127833 - DNA, 25 bp, Probe Sequence
ataacctgaaacctttcagcttatc

SEQ ID NO: 127834 - DNA, 25 bp, Probe Sequence
ataacacgaaacactgctcatggta

SEQ ID NO: 127835 - DNA, 25 bp, Probe Sequence
atcagatcacaataaacctcaggtt

SEQ ID NO: 127836 - DNA, 25 bp, Probe Sequence
atcagccaactggaaacaccaactg

SEQ ID NO: 127837 - DNA, 25 bp, Probe Sequence
atctacacttggagaccctacacaa

SEQ ID NO: 127838 - DNA, 25 bp, Probe Sequence
ataagacaattgagctgccccacac

SEQ ID NO: 127839 - DNA, 25 bp, Probe Sequence
atctcaaagagaaaggccccacgct

SEQ ID NO: 127840 - DNA, 25 bp, Probe Sequence
atccaaataaacagaccccgtctgg

SEQ ID NO: 127841 - DNA, 25 bp, Probe Sequence
atccgaaaacacatactgcccgaaa

SEQ ID NO: 127842 - DNA, 25 bp, Probe Sequence
atcgcgaccaagtttaatccacgtt

SEQ ID NO: 127843 - DNA, 25 bp, Probe Sequence
atccatgaaacctttaacctttgca

SEQ ID NO: 127844 - DNA, 25 bp, Probe Sequence
atccatgaaacctttaacctttgca

SEQ ID NO: 127845 - DNA, 25 bp, Probe Sequence
atcaatgaccccttcattgacctca

SEQ ID NO: 127846 - DNA, 25 bp, Probe Sequence
atcacatgtcatattggttgaactc

SEQ ID NO: 127847 - DNA, 25 bp, Probe Sequence
atcacagtgatggcatctgtttgaa

SEQ ID NO: 127848 - DNA, 25 bp, Probe Sequence
atcacaatatgccaagtataacctg

SEQ ID NO: 127849 - DNA, 25 bp, Probe Sequence
ataacattcatcagcttctacctgc

SEQ ID NO: 127850 - DNA, 25 bp, Probe Sequence
ataacctattagtttgctcctcact

SEQ ID NO: 127851 - DNA, 25 bp, Probe Sequence
ataatccttggagcaactcctcacc

SEQ ID NO: 127852 - DNA, 25 bp, Probe Sequence
ataatccttctaatagccatcctct

SEQ ID NO: 127853 - DNA, 25 bp, Probe Sequence
ataatcactgctttataactgactt

SEQ ID NO: 127854 - DNA, 25 bp, Probe Sequence
ataatcacagtatatcaatttctcc

SEQ ID NO: 127855 - DNA, 25 bp, Probe Sequence
atcactaatgctcaacaatttatcc

SEQ ID NO: 127856 - DNA, 25 bp, Probe Sequence
atcacctaatgcccacaaggtactc

SEQ ID NO: 127857 - DNA, 25 bp, Probe Sequence
atcacgatttcacactgggtacagc

SEQ ID NO: 127858 - DNA, 25 bp, Probe Sequence
gataacatttcacaccggttaccgc

SEQ ID NO: 127859 - DNA, 25 bp, Probe Sequence
atcagacttagatacaagccttacc

SEQ ID NO: 127860 - DNA, 25 bp, Probe Sequence
atcacagaaaaatcctgcctaaggc

SEQ ID NO: 127861 - DNA, 25 bp, Probe Sequence
atcacggagaacttcccgctgaagc

SEQ ID NO: 127862 - DNA, 25 bp, Probe Sequence
atcagggcaagatcttcaagtgaac

SEQ ID NO: 127863 - DNA, 25 bp, Probe Sequence
atcagggcaagatcttcaagtgaac

SEQ ID NO: 127864 - DNA, 25 bp, Probe Sequence
ataaggcaagtcctgagcgacctac

SEQ ID NO: 127865 - DNA, 25 bp, Probe Sequence
atcagcgcgcaagagggcagaccga

SEQ ID NO: 127866 - DNA, 25 bp, Probe Sequence
atcaccacaagttcttcagacaggt

SEQ ID NO: 127867 - DNA, 25 bp, Probe Sequence
atcacaaccaccgttacaagtatac

SEQ ID NO: 127868 - DNA, 25 bp, Probe Sequence
atgaacgacctggtgtccgagtacc

SEQ ID NO: 127869 - DNA, 25 bp, Probe Sequence
ataaggagctccttgacacggtcac

SEQ ID NO: 127870 - DNA, 25 bp, Probe Sequence
ataagaactggcctgaatctgtgta

SEQ ID NO: 127871 - DNA, 25 bp, Probe Sequence
atgaagaatcggcatttccttacca

SEQ ID NO: 127872 - DNA, 25 bp, Probe Sequence
ataagaatgtggatttacttcatct

SEQ ID NO: 127873 - DNA, 25 bp, Probe Sequence
ataagcatatgttacttaccttgtt

SEQ ID NO: 127874 - DNA, 25 bp, Probe Sequence
ataagtatcttcatgtatccctgtt

SEQ ID NO: 127875 - DNA, 25 bp, Probe Sequence
ataagatgcctgtttgctatttggt

SEQ ID NO: 127876 - DNA, 25 bp, Probe Sequence
ataagcatggccgccatgtcattgg

SEQ ID NO: 127877 - DNA, 25 bp, Probe Sequence
ataacgctgtgtactcatctcattg

SEQ ID NO: 127878 - DNA, 25 bp, Probe Sequence
ataagcctggtgtctatgctcgtgt

SEQ ID NO: 127879 - DNA, 25 bp, Probe Sequence
ataagcattgggccatagtttgtta

SEQ ID NO: 127880 - DNA, 25 bp, Probe Sequence
ataagcttgaggctcgttttagtga

SEQ ID NO: 127881 - DNA, 25 bp, Probe Sequence
ataagccatgagcttcgttctacgt

SEQ ID NO: 127882 - DNA, 25 bp, Probe Sequence
ataactacgtattcattgtctacct

SEQ ID NO: 127883 - DNA, 25 bp, Probe Sequence
ataatttgcctttcaggtcattccc

SEQ ID NO: 127884 - DNA, 25 bp, Probe Sequence
ataatttcctttgatgacatgtcct

SEQ ID NO: 127885 - DNA, 25 bp, Probe Sequence
ataagtctccttccagataatcttc

SEQ ID NO: 127886 - DNA, 25 bp, Probe Sequence
atcaagccccggccagaaagattcc

SEQ ID NO: 127887 - DNA, 25 bp, Probe Sequence
atcaaccagccaatggaaggcaatt

SEQ ID NO: 127888 - DNA, 25 bp, Probe Sequence
ataaccatcaataaagaagcattct

SEQ ID NO: 127889 - DNA, 25 bp, Probe Sequence
ataactcatcctaaacagagaaatg

SEQ ID NO: 127890 - DNA, 25 bp, Probe Sequence
atcacgttccatccaaataaacttg

SEQ ID NO: 127891 - DNA, 25 bp, Probe Sequence
atcaccttactactaataaacttat

SEQ ID NO: 127892 - DNA, 25 bp, Probe Sequence
atcagccccactttactaagtagtc

SEQ ID NO: 127893 - DNA, 25 bp, Probe Sequence
ataatcccacatatacaaggtcagg

SEQ ID NO: 127894 - DNA, 25 bp, Probe Sequence
ataattacgctggtacaagttaata

SEQ ID NO: 127895 - DNA, 25 bp, Probe Sequence
ataatgtttgggaaaatgtctagaa

SEQ ID NO: 127896 - DNA, 25 bp, Probe Sequence
ataatgtattagtgcaacagttgat

SEQ ID NO: 127897 - DNA, 25 bp, Probe Sequence
atgaagttctacgcacgcgtctgca

SEQ ID NO: 127898 - DNA, 25 bp, Probe Sequence
atcacgtttcctgaccagactgtta

SEQ ID NO: 127899 - DNA, 25 bp, Probe Sequence
atcggaactcctgcccaggatttca

SEQ ID NO: 127900 - DNA, 25 bp, Probe Sequence
atcgggaccctgttgggaactgtca

SEQ ID NO: 127901 - DNA, 25 bp, Probe Sequence
ataagaaccgcttctggcatgacac

SEQ ID NO: 127902 - DNA, 25 bp, Probe Sequence
ataagcagagctcgtttagtgaacc

SEQ ID NO: 127903 - DNA, 25 bp, Probe Sequence
ataagcagagctcgtttagtgaacc

SEQ ID NO: 127904 - DNA, 25 bp, Probe Sequence
ataagcagagctcgttttagtgaac

SEQ ID NO: 127905 - DNA, 25 bp, Probe Sequence
ataactgaattttatctacatgtat

SEQ ID NO: 127906 - DNA, 25 bp, Probe Sequence
ataatgctgtattttatcaaatgtc

SEQ ID NO: 127907 - DNA, 25 bp, Probe Sequence
atcaatggaaatcccatcaccatct

SEQ ID NO: 127908 - DNA, 25 bp, Probe Sequence
atcaatgcagagcactccaggcttc

SEQ ID NO: 127909 - DNA, 25 bp, Probe Sequence
atcagagcatgtcacccttttgctt

SEQ ID NO: 127910 - DNA, 25 bp, Probe Sequence
atcagaatggcaaagcacttggggc

SEQ ID NO: 127911 - DNA, 25 bp, Probe Sequence
atcagacgctgacagttcttcaggc

SEQ ID NO: 127912 - DNA, 25 bp, Probe Sequence
atcagacgctgacagttcttcaggc

SEQ ID NO: 127913 - DNA, 25 bp, Probe Sequence
atcaagtctgtgcgcttctacacag

SEQ ID NO: 127914 - DNA, 25 bp, Probe Sequence
ataagttgctggttcctaacaggaa

SEQ ID NO: 127915 - DNA, 25 bp, Probe Sequence
ataagttgctggttcctaacaggaa

SEQ ID NO: 127916 - DNA, 25 bp, Probe Sequence
ataatgggctagtttcttacaatga

SEQ ID NO: 127917 - DNA, 25 bp, Probe Sequence
ataaggcagtcactttttctctcta

SEQ ID NO: 127918 - DNA, 25 bp, Probe Sequence
atcacggagtacatgttctgtgccg

SEQ ID NO: 127919 - DNA, 25 bp, Probe Sequence
ataagtagtatctgcagtgtgttca

SEQ ID NO: 127920 - DNA, 25 bp, Probe Sequence
ataatgtactcatgggattgtccta

SEQ ID NO: 127921 - DNA, 25 bp, Probe Sequence
ataagccctgcttggtgcatttctt

SEQ ID NO: 127922 - DNA, 25 bp, Probe Sequence
atcaaaccacttgtgtggtcttttt

SEQ ID NO: 127923 - DNA, 25 bp, Probe Sequence
atcatagaccctgacgtgaacattg

SEQ ID NO: 127924 - DNA, 25 bp, Probe Sequence
atcagtaagtgtaaggtgtacttgg

SEQ ID NO: 127925 - DNA, 25 bp, Probe Sequence
atcagtctcaaatgggtttcttgga

SEQ ID NO: 127926 - DNA, 25 bp, Probe Sequence
atcatttagaaatggtttgccttaa

SEQ ID NO: 127927 - DNA, 25 bp, Probe Sequence
atctttgtgaaatagtggttgtgga

SEQ ID NO: 127928 - DNA, 25 bp, Probe Sequence
ataatttcattcttagaggttggga

SEQ ID NO: 127929 - DNA, 25 bp, Probe Sequence
ataatgattcccatatgacctggag

SEQ ID NO: 127930 - DNA, 25 bp, Probe Sequence
ataatgtgtatcctgttgatttggg

SEQ ID NO: 127931 - DNA, 25 bp, Probe Sequence
ataatttctattgatgtcttggcta

SEQ ID NO: 127932 - DNA, 25 bp, Probe Sequence
atcaatttgataggcttgctctggg

SEQ ID NO: 127933 - DNA, 25 bp, Probe Sequence
atcaagttgagatctccatgctagt

SEQ ID NO: 127934 - DNA, 25 bp, Probe Sequence
ataagtgtcagatcaataacagatt

SEQ ID NO: 127935 - DNA, 25 bp, Probe Sequence
ataagtcctgatacaaccacggatg

SEQ ID NO: 127936 - DNA, 25 bp, Probe Sequence
atcgttatgctgatcataccctaat

SEQ ID NO: 127937 - DNA, 25 bp, Probe Sequence
atcaatacatggttctggacctgaa

SEQ ID NO: 127938 - DNA, 25 bp, Probe Sequence
ataattctggtttggatcctgaaga

SEQ ID NO: 127939 - DNA, 25 bp, Probe Sequence
atcattttcctttggacctacaatt

SEQ ID NO: 127940 - DNA, 25 bp, Probe Sequence
atcagtttggtgaattgcaaccaac

SEQ ID NO: 127941 - DNA, 25 bp, Probe Sequence
atcaacttagaatcagaaccacagg

SEQ ID NO: 127942 - DNA, 25 bp, Probe Sequence
atgaagttagaccattagccccaag

SEQ ID NO: 127943 - DNA, 25 bp, Probe Sequence
ataattattgaggactacacaccaa

SEQ ID NO: 127944 - DNA, 25 bp, Probe Sequence
ataatatacagaaggctatcacact

SEQ ID NO: 127945 - DNA, 25 bp, Probe Sequence
ataaccacgatgacgctgatcatga

SEQ ID NO: 127946 - DNA, 25 bp, Probe Sequence
atgaaccacagagccttcaggaacc

SEQ ID NO: 127947 - DNA, 25 bp, Probe Sequence
atgacccctagcccattagggacac

SEQ ID NO: 127948 - DNA, 25 bp, Probe Sequence
ataaccactgtctcattcatgggaa

SEQ ID NO: 127949 - DNA, 25 bp, Probe Sequence
ataaccatgaccagcattgcaggga

SEQ ID NO: 127950 - DNA, 25 bp, Probe Sequence
atcaaggctacaattgctggtggtg

SEQ ID NO: 127951 - DNA, 25 bp, Probe Sequence
ataagcagcgaccttgtggcatcgt

SEQ ID NO: 127952 - DNA, 25 bp, Probe Sequence
ataagacgacgcctgtggcatttgc

SEQ ID NO: 127953 - DNA, 25 bp, Probe Sequence
ataagcacgagagctgtggccagtg

SEQ ID NO: 127954 - DNA, 25 bp, Probe Sequence
atcaaaggaagccgcatgccacaga

SEQ ID NO: 127955 - DNA, 25 bp, Probe Sequence
atcaaatgggagccctccagacata

SEQ ID NO: 127956 - DNA, 25 bp, Probe Sequence
atcaaagggagatgctctcgggaaa

SEQ ID NO: 127957 - DNA, 25 bp, Probe Sequence
atctgaagacgtttgaccggggaat

SEQ ID NO: 127958 - DNA, 25 bp, Probe Sequence
acgaagacactcagccggagttgta

SEQ ID NO: 127959 - DNA, 25 bp, Probe Sequence
atcccatccaacacacggtttaatt

SEQ ID NO: 127960 - DNA, 25 bp, Probe Sequence
atcaaatcactactagaccgtttaa

SEQ ID NO: 127961 - DNA, 25 bp, Probe Sequence
ataatacctactacaacttttcaag

SEQ ID NO: 127962 - DNA, 25 bp, Probe Sequence
ataatacactactttctgttttcaa

SEQ ID NO: 127963 - DNA, 25 bp, Probe Sequence
ataatagccttgcatgttgtagtta

SEQ ID NO: 127964 - DNA, 25 bp, Probe Sequence
ataattgtctctacagtctgatatt

SEQ ID NO: 127965 - DNA, 25 bp, Probe Sequence
ataatttctgcttgagtatggtgtt

SEQ ID NO: 127966 - DNA, 25 bp, Probe Sequence
ataatttctgcttgccatgggcatc

SEQ ID NO: 127967 - DNA, 25 bp, Probe Sequence
ataagcttgtcaatgcacatgtaga

SEQ ID NO: 127968 - DNA, 25 bp, Probe Sequence
ataatctaccatagaatgtagtatt

SEQ ID NO: 127969 - DNA, 25 bp, Probe Sequence
ataattaccatatcattcttcacag

SEQ ID NO: 127970 - DNA, 25 bp, Probe Sequence
ataattcagatttatcaatttcctg

SEQ ID NO: 127971 - DNA, 25 bp, Probe Sequence
ataattctgttgtaaagttgtctgt

SEQ ID NO: 127972 - DNA, 25 bp, Probe Sequence
ataatgtctgtttggatactgttcc

SEQ ID NO: 127973 - DNA, 25 bp, Probe Sequence
ataagtgtgctattgaatggctttt

SEQ ID NO: 127974 - DNA, 25 bp, Probe Sequence
ataagcatgctttctttgagtttta

SEQ ID NO: 127975 - DNA, 25 bp, Probe Sequence
ataagcatgtgttatctttatgata

SEQ ID NO: 127976 - DNA, 25 bp, Probe Sequence
ataagctgtacaatcgtttcatcat

SEQ ID NO: 127977 - DNA, 25 bp, Probe Sequence
atcaagctatacatacccttcttct

SEQ ID NO: 127978 - DNA, 25 bp, Probe Sequence
atcaagtgataaaaagtcctctgtc

SEQ ID NO: 127979 - DNA, 25 bp, Probe Sequence
atcaggtatataccagacccccttg

SEQ ID NO: 127980 - DNA, 25 bp, Probe Sequence
atcagggtatttgttccaccttggc

SEQ ID NO: 127981 - DNA, 25 bp, Probe Sequence
atcagggtatttgttccaccttggc

SEQ ID NO: 127982 - DNA, 25 bp, Probe Sequence
atctgggtggttgtggcccagagtc

SEQ ID NO: 127983 - DNA, 25 bp, Probe Sequence
atctggggccttctgaagcccagct

SEQ ID NO: 127984 - DNA, 25 bp, Probe Sequence
atctggggccttctgaagcccagct

SEQ ID NO: 127985 - DNA, 25 bp, Probe Sequence
atcaagggtgttatgggcccagctt

SEQ ID NO: 127986 - DNA, 25 bp, Probe Sequence
ataaggatgtgttctctgagaccca

SEQ ID NO: 127987 - DNA, 25 bp, Probe Sequence
ataaggagctactgctaatccccat

SEQ ID NO: 127988 - DNA, 25 bp, Probe Sequence
atcgtgggctacaaggactcgccct

SEQ ID NO: 127989 - DNA, 25 bp, Probe Sequence
atcttgggctaaagagactttcctt

SEQ ID NO: 127990 - DNA, 25 bp, Probe Sequence
atcttagtaaagcccttttcctctg

SEQ ID NO: 127991 - DNA, 25 bp, Probe Sequence
atcaacattaaagccttttctctca

SEQ ID NO: 127992 - DNA, 25 bp, Probe Sequence
atcactcccataaccctttgttata

SEQ ID NO: 127993 - DNA, 25 bp, Probe Sequence
atcattgcttaaccctcttatggga

SEQ ID NO: 127994 - DNA, 25 bp, Probe Sequence
atcattcttaagctacttggggtgg

SEQ ID NO: 127995 - DNA, 25 bp, Probe Sequence
atccgtgtcaagatttgtcgggtag

SEQ ID NO: 127996 - DNA, 25 bp, Probe Sequence
atcggtccagtgagtatgtagggtc

SEQ ID NO: 127997 - DNA, 25 bp, Probe Sequence
atcggctcgcaaatctttgatacgg

SEQ ID NO: 127998 - DNA, 25 bp, Probe Sequence
atcagtcaccagttttggaaccagt

SEQ ID NO: 127999 - DNA, 25 bp, Probe Sequence
atcagtcttcaaattttggacccat

SEQ ID NO: 128000 - DNA, 25 bp, Probe Sequence
atcagtcttcaaattttggacccat

SEQ ID NO: 128001 - DNA, 25 bp, Probe Sequence
atcacaattcaactttgtcccacct

SEQ ID NO: 128002 - DNA, 25 bp, Probe Sequence
atcactgtcaaactttgtcacccta

SEQ ID NO: 128003 - DNA, 25 bp, Probe Sequence
atcactgtacaggtctggaaccacc

SEQ ID NO: 128004 - DNA, 25 bp, Probe Sequence
atcactaacaggtctttgactcagg

SEQ ID NO: 128005 - DNA, 25 bp, Probe Sequence
atcactaagctcgctttcttgctgt

SEQ ID NO: 128006 - DNA, 25 bp, Probe Sequence
atcacaaaactgagcactcttctgt

SEQ ID NO: 128007 - DNA, 25 bp, Probe Sequence
atcaccaaagacatggtctgtgcag

SEQ ID NO: 128008 - DNA, 25 bp, Probe Sequence
atcaccgagaacagtatgtgtagca

SEQ ID NO: 128009 - DNA, 25 bp, Probe Sequence
atgcaagggactgtgtgttgccaca

SEQ ID NO: 128010 - DNA, 25 bp, Probe Sequence
ataatgagatactgtgcttcccacc

SEQ ID NO: 128011 - DNA, 25 bp, Probe Sequence
atcaaggatatccatgtgccacccc

SEQ ID NO: 128012 - DNA, 25 bp, Probe Sequence
atcagggaactatgccaccgttatc

SEQ ID NO: 128013 - DNA, 25 bp, Probe Sequence
atcaggatgaagttgaacccaggga

SEQ ID NO: 128014 - DNA, 25 bp, Probe Sequence
atcaggagttgacccagcgtcggga

SEQ ID NO: 128015 - DNA, 25 bp, Probe Sequence
atcagaagtcgaccgagctgctcat

SEQ ID NO: 128016 - DNA, 25 bp, Probe Sequence
atcagtcggcagtcatgctgggtct

SEQ ID NO: 128017 - DNA, 25 bp, Probe Sequence
atcagtcggcagtcatgctgggtct

SEQ ID NO: 128018 - DNA, 25 bp, Probe Sequence
atcaggggcaccaatgtgcgtgctg

SEQ ID NO: 128019 - DNA, 25 bp, Probe Sequence
ataataggctccatcgctggtgcca

SEQ ID NO: 128020 - DNA, 25 bp, Probe Sequence
ataatgaggcccatcctgattatgg

SEQ ID NO: 128021 - DNA, 25 bp, Probe Sequence
ataataacttattgccagatttggg

SEQ ID NO: 128022 - DNA, 25 bp, Probe Sequence
ataagtaccgattccacatcattcc

SEQ ID NO: 128023 - DNA, 25 bp, Probe Sequence
atctcaaacctgaatccacactgtg

SEQ ID NO: 128024 - DNA, 25 bp, Probe Sequence
atcaaagcccatatccacatgttgc

SEQ ID NO: 128025 - DNA, 25 bp, Probe Sequence
atcaacgcccataatcataccaagc

SEQ ID NO: 128026 - DNA, 25 bp, Probe Sequence
atcaagggccagtatcaagcacgat

SEQ ID NO: 128027 - DNA, 25 bp, Probe Sequence
atcaatgaaccaccaaagccagctc

SEQ ID NO: 128028 - DNA, 25 bp, Probe Sequence
ataagaccatcatcagagtgcctat

SEQ ID NO: 128029 - DNA, 25 bp, Probe Sequence
ataagactcatgtatctggtcacct

SEQ ID NO: 128030 - DNA, 25 bp, Probe Sequence
ataatacttttcatgcctcactttg

SEQ ID NO: 128031 - DNA, 25 bp, Probe Sequence
ataattctgtttctgacctgtttta

SEQ ID NO: 128032 - DNA, 25 bp, Probe Sequence
ataattctgtttgtgacctgtttta

SEQ ID NO: 128033 - DNA, 25 bp, Probe Sequence
ataatgctatgttttttgtcttttt

SEQ ID NO: 128034 - DNA, 25 bp, Probe Sequence
ataatgcataattgatgttttcgtt

SEQ ID NO: 128035 - DNA, 25 bp, Probe Sequence
ataagtgcaatttggatttcatgtt

SEQ ID NO: 128036 - DNA, 25 bp, Probe Sequence
ataagtatatttgtgctgagcattt

SEQ ID NO: 128037 - DNA, 25 bp, Probe Sequence
ataagttgtactgcgtatgcagttt

SEQ ID NO: 128038 - DNA, 25 bp, Probe Sequence
atcacgtgttataactgtagcgctg

SEQ ID NO: 128039 - DNA, 25 bp, Probe Sequence
atcacctcctaaactgagcagtctc

SEQ ID NO: 128040 - DNA, 25 bp, Probe Sequence
atcaccctccaagctgagcttgcac

SEQ ID NO: 128041 - DNA, 25 bp, Probe Sequence
atcaccgtgacatccgaggtgcctt

SEQ ID NO: 128042 - DNA, 25 bp, Probe Sequence
atcaccgtgacatccgaggtgcctt

SEQ ID NO: 128043 - DNA, 25 bp, Probe Sequence
atcaccgagggcctggaggtgcact

SEQ ID NO: 128044 - DNA, 25 bp, Probe Sequence
atcacctgaggtcatggaggtcgag

SEQ ID NO: 128045 - DNA, 25 bp, Probe Sequence
atcacctgaggtcaggagttcaaga

SEQ ID NO: 128046 - DNA, 25 bp, Probe Sequence
atcactagactactcagctggttaa

SEQ ID NO: 128047 - DNA, 25 bp, Probe Sequence
ataatggatctagcttgatgcttaa

SEQ ID NO: 128048 - DNA, 25 bp, Probe Sequence
ataatgattgtactgccatgagtaa

SEQ ID NO: 128049 - DNA, 25 bp, Probe Sequence
atcagtcatttattggctgtgagaa

SEQ ID NO: 128050 - DNA, 25 bp, Probe Sequence
atcagcatatttttgccatggtaat

SEQ ID NO: 128051 - DNA, 25 bp, Probe Sequence
atcaccccatttcagagttatcaag

SEQ ID NO: 128052 - DNA, 25 bp, Probe Sequence
atcacatcccttcaagagtcctgaa

SEQ ID NO: 128053 - DNA, 25 bp, Probe Sequence
atcactcagctcttaaagcaacctg

SEQ ID NO: 128054 - DNA, 25 bp, Probe Sequence
atcacggtctgttaatccattcatg

SEQ ID NO: 128055 - DNA, 25 bp, Probe Sequence
atcaagttctgttaggcctacatcg

SEQ ID NO: 128056 - DNA, 25 bp, Probe Sequence
ataagtgatcagttaatgcctaaga

SEQ ID NO: 128057 - DNA, 25 bp, Probe Sequence
atctagaggaataaatcgtaacaag

SEQ ID NO: 128058 - DNA, 25 bp, Probe Sequence
atcatcaaggtggccaaggagaaca

SEQ ID NO: 128059 - DNA, 25 bp, Probe Sequence
atcaacgggggcatggagcccaccc

SEQ ID NO: 128060 - DNA, 25 bp, Probe Sequence
atcacacggcggcttggagaaaccc

SEQ ID NO: 128061 - DNA, 25 bp, Probe Sequence
atcaatcccgaggctgctgagagac

SEQ ID NO: 128062 - DNA, 25 bp, Probe Sequence
ataataactgagactgggagaggtg

SEQ ID NO: 128063 - DNA, 25 bp, Probe Sequence
ataatctacgtgactggttgcgcgt

SEQ ID NO: 128064 - DNA, 25 bp, Probe Sequence
atcaccgacgtgatgatctgtgccg

SEQ ID NO: 128065 - DNA, 25 bp, Probe Sequence
atcactttgcctgggatatgagccg

SEQ ID NO: 128066 - DNA, 25 bp, Probe Sequence
atcactgttgctgggtcaaccagcc

SEQ ID NO: 128067 - DNA, 25 bp, Probe Sequence
atcgttgcttcaggtacgccaggat

SEQ ID NO: 128068 - DNA, 25 bp, Probe Sequence
atcaatttctcccaaggccaagatt

SEQ ID NO: 128069 - DNA, 25 bp, Probe Sequence
ataattttgccaatattgccaagtt

SEQ ID NO: 128070 - DNA, 25 bp, Probe Sequence
atcaaggtagtcatatgtccaagta

SEQ ID NO: 128071 - DNA, 25 bp, Probe Sequence
atcacatcggagcagtttcccagtg

SEQ ID NO: 128072 - DNA, 25 bp, Probe Sequence
atcactggtgcagatttatccccag

SEQ ID NO: 128073 - DNA, 25 bp, Probe Sequence
atcacggctctttttaagccctggc

SEQ ID NO: 128074 - DNA, 25 bp, Probe Sequence
atcacaaactctttttaggactgaa

SEQ ID NO: 128075 - DNA, 25 bp, Probe Sequence
atcacaagtcggtactataggccaa

SEQ ID NO: 128076 - DNA, 25 bp, Probe Sequence
atcaacacagctcgcaacttatggc

SEQ ID NO: 128077 - DNA, 25 bp, Probe Sequence
atcaagcacgcagcaatgcagctca

SEQ ID NO: 128078 - DNA, 25 bp, Probe Sequence
ataatctgccaggctatgtgacagt

SEQ ID NO: 128079 - DNA, 25 bp, Probe Sequence
ataaggcacagcacatcgcaagatg

SEQ ID NO: 128080 - DNA, 25 bp, Probe Sequence
ataaggatgatgctcatcgcatagg

SEQ ID NO: 128081 - DNA, 25 bp, Probe Sequence
atcacggcaatgcggctgcactggt

SEQ ID NO: 128082 - DNA, 25 bp, Probe Sequence
atcaaccaatctgatctgcagtagt

SEQ ID NO: 128083 - DNA, 25 bp, Probe Sequence
ataatccatacaattctcttcagtt

SEQ ID NO: 128084 - DNA, 25 bp, Probe Sequence
ataatggcatcacctggctttcaga

SEQ ID NO: 128085 - DNA, 25 bp, Probe Sequence
ataataaacctggctcagcctgagc

SEQ ID NO: 128086 - DNA, 25 bp, Probe Sequence
ataatatcaagacacctgccgagcg

SEQ ID NO: 128087 - DNA, 25 bp, Probe Sequence
atcaaaccaaggcccaggctgcagc

SEQ ID NO: 128088 - DNA, 25 bp, Probe Sequence
atcagaaccagggccagtggccgcc

SEQ ID NO: 128089 - DNA, 25 bp, Probe Sequence
atcagaaccagggccagtggccgcc

SEQ ID NO: 128090 - DNA, 25 bp, Probe Sequence
atcagatatgcgggtccagtgtcaa

SEQ ID NO: 128091 - DNA, 25 bp, Probe Sequence
atcatcctggggacctggtacatgg

SEQ ID NO: 128092 - DNA, 25 bp, Probe Sequence
atcaccatgggaaactgttgtgggc

SEQ ID NO: 128093 - DNA, 25 bp, Probe Sequence
atctgcttcggagactcaggtggcc

SEQ ID NO: 128094 - DNA, 25 bp, Probe Sequence
atcactactcaagaccggaggcaca

SEQ ID NO: 128095 - DNA, 25 bp, Probe Sequence
atcaccactacggaacttattcacg

SEQ ID NO: 128096 - DNA, 25 bp, Probe Sequence
atcacaactggaggtacttcttcaa

SEQ ID NO: 128097 - DNA, 25 bp, Probe Sequence
atcacaacatggggaattttattca

SEQ ID NO: 128098 - DNA, 25 bp, Probe Sequence
atcaagacatgttaaccttttataa

SEQ ID NO: 128099 - DNA, 25 bp, Probe Sequence
atcaagatctttaatccattgtcag

SEQ ID NO: 128100 - DNA, 25 bp, Probe Sequence
ataatctaatcaacttcttgtcaga

SEQ ID NO: 128101 - DNA, 25 bp, Probe Sequence
ataatcagttcaatgctggtttatg

SEQ ID NO: 128102 - DNA, 25 bp, Probe Sequence
atcatcagccttggccatggttttc

SEQ ID NO: 128103 - DNA, 25 bp, Probe Sequence
atcatgaggcacagcgctggcattt

SEQ ID NO: 128104 - DNA, 25 bp, Probe Sequence
ataatgctgacgttcttgcttttgg

SEQ ID NO: 128105 - DNA, 25 bp, Probe Sequence
ataatgtcctgagtcaggcgtggtg

SEQ ID NO: 128106 - DNA, 25 bp, Probe Sequence
ataattgcatcaaggcagggtccat

SEQ ID NO: 128107 - DNA, 25 bp, Probe Sequence
ataattcataaccatagcctcgatc

SEQ ID NO: 128108 - DNA, 25 bp, Probe Sequence
ataatatcatgaccaccatgcccag

SEQ ID NO: 128109 - DNA, 25 bp, Probe Sequence
atcaaacatgcacacgggcgagctt

SEQ ID NO: 128110 - DNA, 25 bp, Probe Sequence
atcaagagcacacttctttgctggt

SEQ ID NO: 128111 - DNA, 25 bp, Probe Sequence
atcaatagccatctctgtttgggag

SEQ ID NO: 128112 - DNA, 25 bp, Probe Sequence
atcacagagacacggtgttctccga

SEQ ID NO: 128113 - DNA, 25 bp, Probe Sequence
atcaaggaagtgctgtctctggagg

SEQ ID NO: 128114 - DNA, 25 bp, Probe Sequence
atcaagaggactgagtttgtgggtg

SEQ ID NO: 128115 - DNA, 25 bp, Probe Sequence
atcaagagtactgtgactggatcaa

SEQ ID NO: 128116 - DNA, 25 bp, Probe Sequence
ataaggccagtcggactgcgacata

SEQ ID NO: 128117 - DNA, 25 bp, Probe Sequence
ataatgccgctgaccaatcacgaat

SEQ ID NO: 128118 - DNA, 25 bp, Probe Sequence
ataatgctccatatatatccagaat

SEQ ID NO: 128119 - DNA, 25 bp, Probe Sequence
ataatggcacataacactccaatga

SEQ ID NO: 128120 - DNA, 25 bp, Probe Sequence
ataatggcattctcagccacctgga

SEQ ID NO: 128121 - DNA, 25 bp, Probe Sequence
atcaattttcattcccaccattgca

SEQ ID NO: 128122 - DNA, 25 bp, Probe Sequence
ataatttgctagtcatcccctatgc

SEQ ID NO: 128123 - DNA, 25 bp, Probe Sequence
ataattgcgcataacttccatctcc

SEQ ID NO: 128124 - DNA, 25 bp, Probe Sequence
ataatcagctcaacactgtcctcac

SEQ ID NO: 128125 - DNA, 25 bp, Probe Sequence
ataatcagctcaacactgtcctcac

SEQ ID NO: 128126 - DNA, 25 bp, Probe Sequence
ataatcagctcaacactgtcctcac

SEQ ID NO: 128127 - DNA, 25 bp, Probe Sequence
ataatcagtcattcatagcactata

SEQ ID NO: 128128 - DNA, 25 bp, Probe Sequence
atcaatgttcattgtaatgttactg

SEQ ID NO: 128129 - DNA, 25 bp, Probe Sequence
atcacatttatggagattattattg

SEQ ID NO: 128130 - DNA, 25 bp, Probe Sequence
atcacttctatggacttatctgcga

SEQ ID NO: 128131 - DNA, 25 bp, Probe Sequence
atcagcttcaagcagattatagtga

SEQ ID NO: 128132 - DNA, 25 bp, Probe Sequence
atcacttagcagcaactgaagacaa

SEQ ID NO: 128133 - DNA, 25 bp, Probe Sequence
atcacgaagcagctccaaaaggaaa

SEQ ID NO: 128134 - DNA, 25 bp, Probe Sequence
atcatcagcaacctcttcaaggagg

SEQ ID NO: 128135 - DNA, 25 bp, Probe Sequence
atcagagtcatggtttccaggagtg

SEQ ID NO: 128136 - DNA, 25 bp, Probe Sequence
atcaagctcagcaaattacctaggc

SEQ ID NO: 128137 - DNA, 25 bp, Probe Sequence
atcacctctgcaaaaattctaagtt

SEQ ID NO: 128138 - DNA, 25 bp, Probe Sequence
atcacctctgcaaaaattctaagtt

SEQ ID NO: 128139 - DNA, 25 bp, Probe Sequence
atcacccatggagagattccacctt

SEQ ID NO: 128140 - DNA, 25 bp, Probe Sequence
atcaagcctatagagatttctcctg

SEQ ID NO: 128141 - DNA, 25 bp, Probe Sequence
atcaacactataattgttccctatg

SEQ ID NO: 128142 - DNA, 25 bp, Probe Sequence
atcaacctatcaaagcttcaaaaac

SEQ ID NO: 128143 - DNA, 25 bp, Probe Sequence
ataattctctcaaaatactaaacag

SEQ ID NO: 128144 - DNA, 25 bp, Probe Sequence
ataattgctccaagcttcctgtaaa

SEQ ID NO: 128145 - DNA, 25 bp, Probe Sequence
atcaagatgtcccaggtcctgggaa

SEQ ID NO: 128146 - DNA, 25 bp, Probe Sequence
atcatgaggtccaggtgttcgagaa

SEQ ID NO: 128147 - DNA, 25 bp, Probe Sequence
atcaaggcagctattgtgtattaaa

SEQ ID NO: 128148 - DNA, 25 bp, Probe Sequence
atcaagtgcagtgtcatcttatcga

SEQ ID NO: 128149 - DNA, 25 bp, Probe Sequence
ataattgagctttctcatctgtcaa

SEQ ID NO: 128150 - DNA, 25 bp, Probe Sequence
ataatctagatgtaatgttgtcact

SEQ ID NO: 128151 - DNA, 25 bp, Probe Sequence
atcagattcacctcatgctgttact

SEQ ID NO: 128152 - DNA, 25 bp, Probe Sequence
atcaattcagactgtgttcattagc

SEQ ID NO: 128153 - DNA, 25 bp, Probe Sequence
atcaattactaggtcaagatctagc

SEQ ID NO: 128154 - DNA, 25 bp, Probe Sequence
atcaaatactatcctatactccagc

SEQ ID NO: 128155 - DNA, 25 bp, Probe Sequence
atcaaaattcaccttcgtcatgctg

SEQ ID NO: 128156 - DNA, 25 bp, Probe Sequence
atcaataatatctacatgctaaatg

SEQ ID NO: 128157 - DNA, 25 bp, Probe Sequence
ataatcctatattgagcttcagtgg

SEQ ID NO: 128158 - DNA, 25 bp, Probe Sequence
atcccctaaagagttcagtgcagga

SEQ ID NO: 128159 - DNA, 25 bp, Probe Sequence
atcaccactaaaatctccaggggca

SEQ ID NO: 128160 - DNA, 25 bp, Probe Sequence
atcaccatctgctatattttcagca

SEQ ID NO: 128161 - DNA, 25 bp, Probe Sequence
atcacaccatgccatgttttccttc

SEQ ID NO: 128162 - DNA, 25 bp, Probe Sequence
atcaatcctggttttgatctgcttg

SEQ ID NO: 128163 - DNA, 25 bp, Probe Sequence
atcaccagtggtttcttctaattat

SEQ ID NO: 128164 - DNA, 25 bp, Probe Sequence
atcaccagggtcagtttctgttaat

SEQ ID NO: 128165 - DNA, 25 bp, Probe Sequence
atcaaaggtgctcttattgcctcca

SEQ ID NO: 128166 - DNA, 25 bp, Probe Sequence
atcaaagactcattgcttaattcta

SEQ ID NO: 128167 - DNA, 25 bp, Probe Sequence
atcaaagatgctttgcctttctcat

SEQ ID NO: 128168 - DNA, 25 bp, Probe Sequence
atcaaggccttgtgctgtgtcactc

SEQ ID NO: 128169 - DNA, 25 bp, Probe Sequence
atcaaggagtgtcctcttgctcctc

SEQ ID NO: 128170 - DNA, 25 bp, Probe Sequence
atcaaggagtgtcctcttgctcctc

SEQ ID NO: 128171 - DNA, 25 bp, Probe Sequence
atcaaggcctggatatctcttctcc

SEQ ID NO: 128172 - DNA, 25 bp, Probe Sequence
atcatagacctgcaagcaaaccccc

SEQ ID NO: 128173 - DNA, 25 bp, Probe Sequence
ataataccgcatttgcaaactaagc

SEQ ID NO: 128174 - DNA, 25 bp, Probe Sequence
atcaaaccacaatgcacatccttac

SEQ ID NO: 128175 - DNA, 25 bp, Probe Sequence
atcacagacatgaaattgcctcacc

SEQ ID NO: 128176 - DNA, 25 bp, Probe Sequence
atcacatccattgatctgcctatcc

SEQ ID NO: 128177 - DNA, 25 bp, Probe Sequence
atcaatctatgtttctctttctgct

SEQ ID NO: 128178 - DNA, 25 bp, Probe Sequence
ataatctgctgagtaatcttccgtt

SEQ ID NO: 128179 - DNA, 25 bp, Probe Sequence
atcatcaaaagttatcttccgttcc

SEQ ID NO: 128180 - DNA, 25 bp, Probe Sequence
atcatagaaattattctccgacaga

SEQ ID NO: 128181 - DNA, 25 bp, Probe Sequence
atcacagcaaattcaagagtccaga

SEQ ID NO: 128182 - DNA, 25 bp, Probe Sequence
atcaagcagattccacgaatcctcg

SEQ ID NO: 128183 - DNA, 25 bp, Probe Sequence
atcacagagcattgccattgacatc

SEQ ID NO: 128184 - DNA, 25 bp, Probe Sequence
atcactaaagcctgacagtgtccgg

SEQ ID NO: 128185 - DNA, 25 bp, Probe Sequence
atcactgaaggtgtgaggagatcgc

SEQ ID NO: 128186 - DNA, 25 bp, Probe Sequence
atcagctggggtgagggctgtgccc

SEQ ID NO: 128187 - DNA, 25 bp, Probe Sequence
atcagctggggtgagggctgtgccc

SEQ ID NO: 128188 - DNA, 25 bp, Probe Sequence
atcacgggaatgaaggagctgtttc

SEQ ID NO: 128189 - DNA, 25 bp, Probe Sequence
atcaatggcgtggatagcggttttg

SEQ ID NO: 128190 - DNA, 25 bp, Probe Sequence
atcaattctgatggtttcttttttt

SEQ ID NO: 128191 - DNA, 25 bp, Probe Sequence
ataatttccctggtgccaatttctt

SEQ ID NO: 128192 - DNA, 25 bp, Probe Sequence
ataattatgccccatgaccaagtgg

SEQ ID NO: 128193 - DNA, 25 bp, Probe Sequence
ataattatgatcccattccaactgt

SEQ ID NO: 128194 - DNA, 25 bp, Probe Sequence
ataatttactctagtccaagccatc

SEQ ID NO: 128195 - DNA, 25 bp, Probe Sequence
ataatttcaactagatcaagacatg

SEQ ID NO: 128196 - DNA, 25 bp, Probe Sequence
atcaattcccaaatgataactcatt

SEQ ID NO: 128197 - DNA, 25 bp, Probe Sequence
atcaggaccccaacaataacttaca

SEQ ID NO: 128198 - DNA, 25 bp, Probe Sequence
atcagatgcaacggcccaaattctt

SEQ ID NO: 128199 - DNA, 25 bp, Probe Sequence
atcaccaaggagccaaacatcctac

SEQ ID NO: 128200 - DNA, 25 bp, Probe Sequence
atcagcgaagaatgccaacacctca

SEQ ID NO: 128201 - DNA, 25 bp, Probe Sequence
atcagctgaagagtggctaacaaaa

SEQ ID NO: 128202 - DNA, 25 bp, Probe Sequence
atcactgtaagcctgtcaaatcata

SEQ ID NO: 128203 - DNA, 25 bp, Probe Sequence
atcagtgaaagctatctacctatcc

SEQ ID NO: 128204 - DNA, 25 bp, Probe Sequence
atcagtgactagcttcctgtagcca

SEQ ID NO: 128205 - DNA, 25 bp, Probe Sequence
atcagtcaaggttctacttgagcaa

SEQ ID NO: 128206 - DNA, 25 bp, Probe Sequence
atcaagaacaatttcaagacatgaa

SEQ ID NO: 128207 - DNA, 25 bp, Probe Sequence
atcaatcatgcctatttaatggaac

SEQ ID NO: 128208 - DNA, 25 bp, Probe Sequence
atccttgccagagtgggctgggacc

SEQ ID NO: 128209 - DNA, 25 bp, Probe Sequence
atcttgctgcaatggtggggggcct

SEQ ID NO: 128210 - DNA, 25 bp, Probe Sequence
atgaatgtaaactcgggggtgctgg

SEQ ID NO: 128211 - DNA, 25 bp, Probe Sequence
atcttgaaagactcttggggtctgt

SEQ ID NO: 128212 - DNA, 25 bp, Probe Sequence
atcggtctaatctactttaggactg

SEQ ID NO: 128213 - DNA, 25 bp, Probe Sequence
atctagttaatctggtggggacatg

SEQ ID NO: 128214 - DNA, 25 bp, Probe Sequence
atctttgttgacccggtacttcata

SEQ ID NO: 128215 - DNA, 25 bp, Probe Sequence
atcccttctacccggaagttgagct

SEQ ID NO: 128216 - DNA, 25 bp, Probe Sequence
atcaccttctacatcctggtgtttg

SEQ ID NO: 128217 - DNA, 25 bp, Probe Sequence
atcacttaggtcacttgggtttcaa

SEQ ID NO: 128218 - DNA, 25 bp, Probe Sequence
atcaagtaggtaaatccggtgttca

SEQ ID NO: 128219 - DNA, 25 bp, Probe Sequence
atcacagttggcacaaacgcagggt

SEQ ID NO: 128220 - DNA, 25 bp, Probe Sequence
atccaggtgagggcagaaagtagtt

SEQ ID NO: 128221 - DNA, 25 bp, Probe Sequence
atcacatggtgatcgaggaacagat

SEQ ID NO: 128222 - DNA, 25 bp, Probe Sequence
atcaatgctgattcggaggacccaa

SEQ ID NO: 128223 - DNA, 25 bp, Probe Sequence
atcaactgaacgcaaatcagccact

SEQ ID NO: 128224 - DNA, 25 bp, Probe Sequence
atgaactaaggtgtctaccatgatt

SEQ ID NO: 128225 - DNA, 25 bp, Probe Sequence
atgagatcttcagatccctacctgt

SEQ ID NO: 128226 - DNA, 25 bp, Probe Sequence
atcatttacagactccctaccatga

SEQ ID NO: 128227 - DNA, 25 bp, Probe Sequence
atgcatttaaaataccactgtaatt

SEQ ID NO: 128228 - DNA, 25 bp, Probe Sequence
atcagttaaacctctcctgtcattc

SEQ ID NO: 128229 - DNA, 25 bp, Probe Sequence
atcacttaaatagcttcttgtcacc

SEQ ID NO: 128230 - DNA, 25 bp, Probe Sequence
atcaattatagaaagtcatttctca

SEQ ID NO: 128231 - DNA, 25 bp, Probe Sequence
atcaactatgaagagctcgtccgca

SEQ ID NO: 128232 - DNA, 25 bp, Probe Sequence
atctaccatgggaagcatcccctga

SEQ ID NO: 128233 - DNA, 25 bp, Probe Sequence
atcaactcggacaactccagcttga

SEQ ID NO: 128234 - DNA, 25 bp, Probe Sequence
atcaacattgatttactccactttt

SEQ ID NO: 128235 - DNA, 25 bp, Probe Sequence
atcagatattgaagctcctcactct

SEQ ID NO: 128236 - DNA, 25 bp, Probe Sequence
atcagagctgggacacagcgcacca

SEQ ID NO: 128237 - DNA, 25 bp, Probe Sequence
atcaagatgatgctgacagagcaca

SEQ ID NO: 128238 - DNA, 25 bp, Probe Sequence
atcacagcattgagcacacagcaac

SEQ ID NO: 128239 - DNA, 25 bp, Probe Sequence
atcacctggagggctcatgcaatca

SEQ ID NO: 128240 - DNA, 25 bp, Probe Sequence
atcacctgaggcgttcaaaagatat

SEQ ID NO: 128241 - DNA, 25 bp, Probe Sequence
atcacttagtaatcaccagagaatt

SEQ ID NO: 128242 - DNA, 25 bp, Probe Sequence
atcaaatatttaccactaagacttc

SEQ ID NO: 128243 - DNA, 25 bp, Probe Sequence
atcagaatctgtcggccaaaagcgg

SEQ ID NO: 128244 - DNA, 25 bp, Probe Sequence
atgcatttcttagccagacaactgc

SEQ ID NO: 128245 - DNA, 25 bp, Probe Sequence
atcatgtcaagttcccaactgagtc

SEQ ID NO: 128246 - DNA, 25 bp, Probe Sequence
atcaatccatctgccagaatctagt

SEQ ID NO: 128247 - DNA, 25 bp, Probe Sequence
atcaaccttgaatgactacagatta

SEQ ID NO: 128248 - DNA, 25 bp, Probe Sequence
atctcccttcagcaacttattttgc

SEQ ID NO: 128249 - DNA, 25 bp, Probe Sequence
atctcccttcagcaacttattttgc

SEQ ID NO: 128250 - DNA, 25 bp, Probe Sequence
atctcccttcagcaacttattttgc

SEQ ID NO: 128251 - DNA, 25 bp, Probe Sequence
atcaaccttaccacttatattcatc

SEQ ID NO: 128252 - DNA, 25 bp, Probe Sequence
atcacaccatttcatacttcaacta

SEQ ID NO: 128253 - DNA, 25 bp, Probe Sequence
atcacaccttttaatgtagctgaat

SEQ ID NO: 128254 - DNA, 25 bp, Probe Sequence
atcaaaggttgcatctgtacagtat

SEQ ID NO: 128255 - DNA, 25 bp, Probe Sequence
atcaagggtatcatatgcgcaagta

SEQ ID NO: 128256 - DNA, 25 bp, Probe Sequence
atcaggttgttagatgctggcatct

SEQ ID NO: 128257 - DNA, 25 bp, Probe Sequence
atcaggaacttgagcatctgcagat

SEQ ID NO: 128258 - DNA, 25 bp, Probe Sequence
atcactaacattatattgcaatgaa

SEQ ID NO: 128259 - DNA, 25 bp, Probe Sequence
atcagatgaaagtaacttgcctgaa

SEQ ID NO: 128260 - DNA, 25 bp, Probe Sequence
atcagaatttgaacactgtccttaa

SEQ ID NO: 128261 - DNA, 25 bp, Probe Sequence
atcaaatcgatgtacatagtttaac

SEQ ID NO: 128262 - DNA, 25 bp, Probe Sequence
atcaaagatatgtttagtttagact

SEQ ID NO: 128263 - DNA, 25 bp, Probe Sequence
atcacaagaatttgtcaattaaatc

SEQ ID NO: 128264 - DNA, 25 bp, Probe Sequence
atcaccagaatcaggaattataaca

SEQ ID NO: 128265 - DNA, 25 bp, Probe Sequence
atcacacacaaaagttacaccaaca

SEQ ID NO: 128266 - DNA, 25 bp, Probe Sequence
atcaaatccagtaatggacaaaaat

SEQ ID NO: 128267 - DNA, 25 bp, Probe Sequence
atcaagatgtagtttgtagcagcaa

SEQ ID NO: 128268 - DNA, 25 bp, Probe Sequence
atcaagcacctgaagtgtcagctga

SEQ ID NO: 128269 - DNA, 25 bp, Probe Sequence
atcaatcacttgtatgtctcacgca

SEQ ID NO: 128270 - DNA, 25 bp, Probe Sequence
atcatacagtagattccatccattc

SEQ ID NO: 128271 - DNA, 25 bp, Probe Sequence
atcatacagtagattccatccattc

SEQ ID NO: 128272 - DNA, 25 bp, Probe Sequence
atcatacagtagattccatccattc

SEQ ID NO: 128273 - DNA, 25 bp, Probe Sequence
atcatacagtagattccatccattc

SEQ ID NO: 128274 - DNA, 25 bp, Probe Sequence
atcaataaagagttcactctgcaaa

SEQ ID NO: 128275 - DNA, 25 bp, Probe Sequence
atcaatagagacgatgtcacgtatt

SEQ ID NO: 128276 - DNA, 25 bp, Probe Sequence
atcacataattccagtcacagtttt

SEQ ID NO: 128277 - DNA, 25 bp, Probe Sequence
atcaaacctgccatagagttactgt

SEQ ID NO: 128278 - DNA, 25 bp, Probe Sequence
atcatacccagcattatacttggtt

SEQ ID NO: 128279 - DNA, 25 bp, Probe Sequence
atcatgatgccaacctcttacgtgc

SEQ ID NO: 128280 - DNA, 25 bp, Probe Sequence
atcatgatcctacctatcaagcact

SEQ ID NO: 128281 - DNA, 25 bp, Probe Sequence
atcaattctcaccatcagcaagaga

SEQ ID NO: 128282 - DNA, 25 bp, Probe Sequence
atcaatttcctcaagccagaaggct

SEQ ID NO: 128283 - DNA, 25 bp, Probe Sequence
atcataagtcctccgtcagaaatta

SEQ ID NO: 128284 - DNA, 25 bp, Probe Sequence
atcacatagtccaaaatcagcagta

SEQ ID NO: 128285 - DNA, 25 bp, Probe Sequence
atcaaagtcgcaaagtccttcaatt

SEQ ID NO: 128286 - DNA, 25 bp, Probe Sequence
atcagattgttttgcagtccttcct

SEQ ID NO: 128287 - DNA, 25 bp, Probe Sequence
atcagatcatgcttcattgccctat

SEQ ID NO: 128288 - DNA, 25 bp, Probe Sequence
atcagttgcatattatccattacat

SEQ ID NO: 128289 - DNA, 25 bp, Probe Sequence
atcagcgtcatattgatgaattcat

SEQ ID NO: 128290 - DNA, 25 bp, Probe Sequence
atcatcagatcgttgctcagcttta

SEQ ID NO: 128291 - DNA, 25 bp, Probe Sequence
atcatggctcactgcagccttgaac

SEQ ID NO: 128292 - DNA, 25 bp, Probe Sequence
atcatgcgaactacagtttggaact

SEQ ID NO: 128293 - DNA, 25 bp, Probe Sequence
atcactgcacacacagtattctgaa

SEQ ID NO: 128294 - DNA, 25 bp, Probe Sequence
atcaaacacatggggatgctttagg

SEQ ID NO: 128295 - DNA, 25 bp, Probe Sequence
atcacaacactggctgagcggatgc

SEQ ID NO: 128296 - DNA, 25 bp, Probe Sequence
atcacaacacactttcagtcatgtc

SEQ ID NO: 128297 - DNA, 25 bp, Probe Sequence
atcacacacacagttgacaacaggg

SEQ ID NO: 128298 - DNA, 25 bp, Probe Sequence
atcagcaaacacaaagacctgcgga

SEQ ID NO: 128299 - DNA, 25 bp, Probe Sequence
atcataaacctcagattcatctgta

SEQ ID NO: 128300 - DNA, 25 bp, Probe Sequence
atctaaacaacaccaaatcattcaa

SEQ ID NO: 128301 - DNA, 25 bp, Probe Sequence
atcattagaaacacagaaaaccaca

SEQ ID NO: 128302 - DNA, 25 bp, Probe Sequence
atctttgaccaaccgaacatgacca

SEQ ID NO: 128303 - DNA, 25 bp, Probe Sequence
atcttgtaccctcatggacatcaga

SEQ ID NO: 128304 - DNA, 25 bp, Probe Sequence
atcatgttagctctcttggtaactc

SEQ ID NO: 128305 - DNA, 25 bp, Probe Sequence
atcaatcgtgcatccttagtgaact

SEQ ID NO: 128306 - DNA, 25 bp, Probe Sequence
atcaacctcaactgtgtgtgcaact

SEQ ID NO: 128307 - DNA, 25 bp, Probe Sequence
atcacactctaagttctattgaacc

SEQ ID NO: 128308 - DNA, 25 bp, Probe Sequence
atccacgaaactaccttcaactcca

SEQ ID NO: 128309 - DNA, 25 bp, Probe Sequence
atcagaagcaaagtacacccattat

SEQ ID NO: 128310 - DNA, 25 bp, Probe Sequence
atcacaacaatttgacacccttcat

SEQ ID NO: 128311 - DNA, 25 bp, Probe Sequence
atcagaaggtgctaagccctctctc

SEQ ID NO: 128312 - DNA, 25 bp, Probe Sequence
atcacagtgtcagagacgcgtcctc

SEQ ID NO: 128313 - DNA, 25 bp, Probe Sequence
atctcagcttcttcaggcggtagct

SEQ ID NO: 128314 - DNA, 25 bp, Probe Sequence
atctcagctactcaggaggctaagg

SEQ ID NO: 128315 - DNA, 25 bp, Probe Sequence
atcacatattctcgcgggtgctaca

SEQ ID NO: 128316 - DNA, 25 bp, Probe Sequence
atcaaatttcatgggatctaggatt

SEQ ID NO: 128317 - DNA, 25 bp, Probe Sequence
atcatcagatatgcgggtccagtgt

SEQ ID NO: 128318 - DNA, 25 bp, Probe Sequence
atcacagatgctgtgaaggtcgtgg

SEQ ID NO: 128319 - DNA, 25 bp, Probe Sequence
atcaacttcttgtcagatatcttgg

SEQ ID NO: 128320 - DNA, 25 bp, Probe Sequence
atcaagcacatccttgctaatttca

SEQ ID NO: 128321 - DNA, 25 bp, Probe Sequence
atcaagccagcatttgtattttgca

SEQ ID NO: 128322 - DNA, 25 bp, Probe Sequence
atcaactgcagcgatggttacattg

SEQ ID NO: 128323 - DNA, 25 bp, Probe Sequence
atcaagctgcaggaggaggagagag

SEQ ID NO: 128324 - DNA, 25 bp, Probe Sequence
atcatcagcgcgcaagagggcagac

SEQ ID NO: 128325 - DNA, 25 bp, Probe Sequence
atcaaccaggcatgacggtgcacgc

SEQ ID NO: 128326 - DNA, 25 bp, Probe Sequence
atcaaccaggcatgacggtgcacgc

SEQ ID NO: 128327 - DNA, 25 bp, Probe Sequence
atccatccagatgaacgtggccgag

SEQ ID NO: 128328 - DNA, 25 bp, Probe Sequence
atgcatgtctaagtacgcacggccg

SEQ ID NO: 128329 - DNA, 25 bp, Probe Sequence
atcagtattgaggccggagggcagg

SEQ ID NO: 128330 - DNA, 25 bp, Probe Sequence
atcatgttctgggtaaggggacgag

SEQ ID NO: 128331 - DNA, 25 bp, Probe Sequence
atcatgttctgggtaaggggacgag

SEQ ID NO: 128332 - DNA, 25 bp, Probe Sequence
atccttctggaacacagggacgcct

SEQ ID NO: 128333 - DNA, 25 bp, Probe Sequence
atcaccgaggaacactgggctgagc

SEQ ID NO: 128334 - DNA, 25 bp, Probe Sequence
atcacccagaaaccaatgccgtaga

SEQ ID NO: 128335 - DNA, 25 bp, Probe Sequence
atcacccaagtgtaaatgctctgtg

SEQ ID NO: 128336 - DNA, 25 bp, Probe Sequence
atcactagcaagatgaacctctctg

SEQ ID NO: 128337 - DNA, 25 bp, Probe Sequence
atcacatgcacacattatacaccct

SEQ ID NO: 128338 - DNA, 25 bp, Probe Sequence
atcaagcatcgtagttaaatctctc

SEQ ID NO: 128339 - DNA, 25 bp, Probe Sequence
atcacactctgtaagtcaatattcc

SEQ ID NO: 128340 - DNA, 25 bp, Probe Sequence
atcacaccgtacatcacaatgaagt

SEQ ID NO: 128341 - DNA, 25 bp, Probe Sequence
atcacaacgtaactcaatcaggagg

SEQ ID NO: 128342 - DNA, 25 bp, Probe Sequence
atcacaactgtatgtctataggaca

SEQ ID NO: 128343 - DNA, 25 bp, Probe Sequence
atcatcgacgtctaccacaagtact

SEQ ID NO: 128344 - DNA, 25 bp, Probe Sequence
atcttccatgcttaccacagggagg

SEQ ID NO: 128345 - DNA, 25 bp, Probe Sequence
atcatatactgtttctgcaatggcg

SEQ ID NO: 128346 - DNA, 25 bp, Probe Sequence
atcacgcgatgttgactgcacaggt

SEQ ID NO: 128347 - DNA, 25 bp, Probe Sequence
atcacactagctcaccagcagtgaa

SEQ ID NO: 128348 - DNA, 25 bp, Probe Sequence
atctaccaggcctcgcgataaaaac

SEQ ID NO: 128349 - DNA, 25 bp, Probe Sequence
atctacctaccaatcgtgaaaacta

SEQ ID NO: 128350 - DNA, 25 bp, Probe Sequence
atcaactgccacggtcggaaagctt

SEQ ID NO: 128351 - DNA, 25 bp, Probe Sequence
atcaagctcaacgttctggagtggc

SEQ ID NO: 128352 - DNA, 25 bp, Probe Sequence
atcaactatcatgcttcggatgtct

SEQ ID NO: 128353 - DNA, 25 bp, Probe Sequence
atcaacttattttggagatgttctc

SEQ ID NO: 128354 - DNA, 25 bp, Probe Sequence
atcatagcttacagatggtataact

SEQ ID NO: 128355 - DNA, 25 bp, Probe Sequence
atcagagtttattctggttaacttg

SEQ ID NO: 128356 - DNA, 25 bp, Probe Sequence
atcaggtattaatcttggatagcta

SEQ ID NO: 128357 - DNA, 25 bp, Probe Sequence
atcaggctttaaactgttgtgccag

SEQ ID NO: 128358 - DNA, 25 bp, Probe Sequence
atcaggtatcatcaacaggttctca

SEQ ID NO: 128359 - DNA, 25 bp, Probe Sequence
atcaggttcacaaacttcatttcag

SEQ ID NO: 128360 - DNA, 25 bp, Probe Sequence
atcggcattaatttttcagtgtagt

SEQ ID NO: 128361 - DNA, 25 bp, Probe Sequence
atctcgttcaaatttttggttcatc

SEQ ID NO: 128362 - DNA, 25 bp, Probe Sequence
atcattttctagaagtatgggtatc

SEQ ID NO: 128363 - DNA, 25 bp, Probe Sequence
atcatggtttgacagaagcagttat

SEQ ID NO: 128364 - DNA, 25 bp, Probe Sequence
atcagatactaacaaggcagcttca

SEQ ID NO: 128365 - DNA, 25 bp, Probe Sequence
atcatgaaatgaataagagggctta

SEQ ID NO: 128366 - DNA, 25 bp, Probe Sequence
atcaacagcacagacagcgagcgct

SEQ ID NO: 128367 - DNA, 25 bp, Probe Sequence
atcaaagtctgttctggcggcattg

SEQ ID NO: 128368 - DNA, 25 bp, Probe Sequence
atcagaagtcagtttgggagaagtc

SEQ ID NO: 128369 - DNA, 25 bp, Probe Sequence
atcagatcttcggcctgagcgagac

SEQ ID NO: 128370 - DNA, 25 bp, Probe Sequence
atcactctggcccattgacagatga

SEQ ID NO: 128371 - DNA, 25 bp, Probe Sequence
atcacttgagcccaggagatcaagg

SEQ ID NO: 128372 - DNA, 25 bp, Probe Sequence
atcacttgagatcaggagttcgaga

SEQ ID NO: 128373 - DNA, 25 bp, Probe Sequence
atcacttcagcccaggagtttgaga

SEQ ID NO: 128374 - DNA, 25 bp, Probe Sequence
atcaccaagccgcagaacctgaatg

SEQ ID NO: 128375 - DNA, 25 bp, Probe Sequence
atcatggaggcccgaaagccgtagg

SEQ ID NO: 128376 - DNA, 25 bp, Probe Sequence
atcatgggccagtaacaagcaagga

SEQ ID NO: 128377 - DNA, 25 bp, Probe Sequence
atcagaaccagatgacacatgaaag

SEQ ID NO: 128378 - DNA, 25 bp, Probe Sequence
atcaccatcatcaaagaccaaaagt

SEQ ID NO: 128379 - DNA, 25 bp, Probe Sequence
atcatagaggctcaaccaatatagg

SEQ ID NO: 128380 - DNA, 25 bp, Probe Sequence
atcataaagctataccttaggttac

SEQ ID NO: 128381 - DNA, 25 bp, Probe Sequence
atcaggaaatactgcctgtagagtt

SEQ ID NO: 128382 - DNA, 25 bp, Probe Sequence
atcagtcagaaagtccctataggat

SEQ ID NO: 128383 - DNA, 25 bp, Probe Sequence
atcagatggacagagcttctgaagg

SEQ ID NO: 128384 - DNA, 25 bp, Probe Sequence
atcagctgtgatgacattttgaggg

SEQ ID NO: 128385 - DNA, 25 bp, Probe Sequence
atcactgtcagtcattctcataggg

SEQ ID NO: 128386 - DNA, 25 bp, Probe Sequence
atcacatatgcacagtatctattgg

SEQ ID NO: 128387 - DNA, 25 bp, Probe Sequence
atcactcactgttgtagcttctgtt

SEQ ID NO: 128388 - DNA, 25 bp, Probe Sequence
atcactggtgttgagctttttttca

SEQ ID NO: 128389 - DNA, 25 bp, Probe Sequence
atcacttgggtggacatatgtctcc

SEQ ID NO: 128390 - DNA, 25 bp, Probe Sequence
atcacttgggtggacatatgtctcc

SEQ ID NO: 128391 - DNA, 25 bp, Probe Sequence
atcacctttatggcaatagtatctc

SEQ ID NO: 128392 - DNA, 25 bp, Probe Sequence
atcacctttattgtaagacagtcca

SEQ ID NO: 128393 - DNA, 25 bp, Probe Sequence
atcaactttgtgagtaataatgtca

SEQ ID NO: 128394 - DNA, 25 bp, Probe Sequence
atcattccttggagttatactaact

SEQ ID NO: 128395 - DNA, 25 bp, Probe Sequence
atcagccctctgttggatatctact

SEQ ID NO: 128396 - DNA, 25 bp, Probe Sequence
atcacctgctcaacatgtaattatt

SEQ ID NO: 128397 - DNA, 25 bp, Probe Sequence
atcagcctccatggagtacttcaaa

SEQ ID NO: 128398 - DNA, 25 bp, Probe Sequence
atcccccattcgaacttaacagatg

SEQ ID NO: 128399 - DNA, 25 bp, Probe Sequence
atccaggcctctgagaattcccaga

SEQ ID NO: 128400 - DNA, 25 bp, Probe Sequence
atctacctacagaaaagtgcccaga

SEQ ID NO: 128401 - DNA, 25 bp, Probe Sequence
atcttctagacacaggcggtcaaga

SEQ ID NO: 128402 - DNA, 25 bp, Probe Sequence
atcttctaaaccaggaccatcagcc

SEQ ID NO: 128403 - DNA, 25 bp, Probe Sequence
atcttctaacccatcgcaaagaggc

SEQ ID NO: 128404 - DNA, 25 bp, Probe Sequence
atcacttgaacccaggaggcaaagg

SEQ ID NO: 128405 - DNA, 25 bp, Probe Sequence
atcactcgaatccgggagacagagg

SEQ ID NO: 128406 - DNA, 25 bp, Probe Sequence
atcactggacattcaggaggcaagt

SEQ ID NO: 128407 - DNA, 25 bp, Probe Sequence
atcacatatactgatgaagagccag

SEQ ID NO: 128408 - DNA, 25 bp, Probe Sequence
atcacatagattgggaaggcaagct

SEQ ID NO: 128409 - DNA, 25 bp, Probe Sequence
atcaccgattgcccttgtcaactca

SEQ ID NO: 128410 - DNA, 25 bp, Probe Sequence
atcacctcattcttcatttcagatc

SEQ ID NO: 128411 - DNA, 25 bp, Probe Sequence
atcacactattttcgagatcatgta

SEQ ID NO: 128412 - DNA, 25 bp, Probe Sequence
atcacagttgtgttcctgacactca

SEQ ID NO: 128413 - DNA, 25 bp, Probe Sequence
atcacaggcactttcctagcctaat

SEQ ID NO: 128414 - DNA, 25 bp, Probe Sequence
atcacaggagcctctttcctaaagc

SEQ ID NO: 128415 - DNA, 25 bp, Probe Sequence
atcacagacaactcacttttgaaga

SEQ ID NO: 128416 - DNA, 25 bp, Probe Sequence
atcacttctagctcacttttaatgc

SEQ ID NO: 128417 - DNA, 25 bp, Probe Sequence
atcactgttgacccttgtggaagat

SEQ ID NO: 128418 - DNA, 25 bp, Probe Sequence
atcaggtgctccacttggatgaatt

SEQ ID NO: 128419 - DNA, 25 bp, Probe Sequence
atcaggactatacctcatttacagt

SEQ ID NO: 128420 - DNA, 25 bp, Probe Sequence
atcacgcctggacgccaatgtgaac

SEQ ID NO: 128421 - DNA, 25 bp, Probe Sequence
atcaccagcctactgcagaagtgca

SEQ ID NO: 128422 - DNA, 25 bp, Probe Sequence
atcatgccaactactgcgagggtga

SEQ ID NO: 128423 - DNA, 25 bp, Probe Sequence
atcatgccaactactgcgagggtga

SEQ ID NO: 128424 - DNA, 25 bp, Probe Sequence
atcatgccaactactgcgagggtga

SEQ ID NO: 128425 - DNA, 25 bp, Probe Sequence
atcatgaaactgggcgatgggcttt

SEQ ID NO: 128426 - DNA, 25 bp, Probe Sequence
atcagagaacataagcacaagtata

SEQ ID NO: 128427 - DNA, 25 bp, Probe Sequence
atcatgggccagaatgttgcagatt

SEQ ID NO: 128428 - DNA, 25 bp, Probe Sequence
atcatgggccagaatgttgcagatt

SEQ ID NO: 128429 - DNA, 25 bp, Probe Sequence
atcattggccatgtttcaatcgaat

SEQ ID NO: 128430 - DNA, 25 bp, Probe Sequence
atcatgggacttttgtatcactgga

SEQ ID NO: 128431 - DNA, 25 bp, Probe Sequence
atcagggacagctttgctaccaggt

SEQ ID NO: 128432 - DNA, 25 bp, Probe Sequence
atcaggacagagtagttccagaggc

SEQ ID NO: 128433 - DNA, 25 bp, Probe Sequence
atcagcccaactggatatcggagac

SEQ ID NO: 128434 - DNA, 25 bp, Probe Sequence
atcagcccagaccagaggctctgag

SEQ ID NO: 128435 - DNA, 25 bp, Probe Sequence
atcactgccacccagaagactgtgg

SEQ ID NO: 128436 - DNA, 25 bp, Probe Sequence
atcacatggaactagaagctgttga

SEQ ID NO: 128437 - DNA, 25 bp, Probe Sequence
atcacgaaagcttaactgctgtggt

SEQ ID NO: 128438 - DNA, 25 bp, Probe Sequence
atcagctaacacgaaacctgtttac

SEQ ID NO: 128439 - DNA, 25 bp, Probe Sequence
atcatggattgctggaggtctttta

SEQ ID NO: 128440 - DNA, 25 bp, Probe Sequence
atcgagtacatacaggtagtttacc

SEQ ID NO: 128441 - DNA, 25 bp, Probe Sequence
atcagatgtaaacaagtcctttcag

SEQ ID NO: 128442 - DNA, 25 bp, Probe Sequence
atcactgtaagacatcgttttctat

SEQ ID NO: 128443 - DNA, 25 bp, Probe Sequence
atcagggtcaagacaaatcttccta

SEQ ID NO: 128444 - DNA, 25 bp, Probe Sequence
atcacgcaaccactaaagctatcca

SEQ ID NO: 128445 - DNA, 25 bp, Probe Sequence
atcacctcccagtaaagtagccatg

SEQ ID NO: 128446 - DNA, 25 bp, Probe Sequence
atctctttccattgaaataggccat

SEQ ID NO: 128447 - DNA, 25 bp, Probe Sequence
atcttgcttccctaatctatggtcg

SEQ ID NO: 128448 - DNA, 25 bp, Probe Sequence
atcttcccacaatacttgcctaagg

SEQ ID NO: 128449 - DNA, 25 bp, Probe Sequence
atcttccccagctatgaagcctatc

SEQ ID NO: 128450 - DNA, 25 bp, Probe Sequence
atcttccttccaggatagatcctat

SEQ ID NO: 128451 - DNA, 25 bp, Probe Sequence
atcactccccaaggaagagccaatg

SEQ ID NO: 128452 - DNA, 25 bp, Probe Sequence
atcatcctctccgtgggcgaggaag

SEQ ID NO: 128453 - DNA, 25 bp, Probe Sequence
atcatcctcaccagtggcaagtgca

SEQ ID NO: 128454 - DNA, 25 bp, Probe Sequence
atcacccagcctctgagagcagtta

SEQ ID NO: 128455 - DNA, 25 bp, Probe Sequence
atcagactgcacctctaagagcatg

SEQ ID NO: 128456 - DNA, 25 bp, Probe Sequence
atcagacatgaccataaatagcgta

SEQ ID NO: 128457 - DNA, 25 bp, Probe Sequence
atcagccatgcatcaaaagcaggaa

SEQ ID NO: 128458 - DNA, 25 bp, Probe Sequence
atcaccatcattgagcaccagaagt

SEQ ID NO: 128459 - DNA, 25 bp, Probe Sequence
atcagaacaatctcctagaagtgcc

SEQ ID NO: 128460 - DNA, 25 bp, Probe Sequence
atcagttgaattccctggatagtcc

SEQ ID NO: 128461 - DNA, 25 bp, Probe Sequence
atcagttatggttcctttggtcgct

SEQ ID NO: 128462 - DNA, 25 bp, Probe Sequence
atcagtgtatgcaacatcctttgta

SEQ ID NO: 128463 - DNA, 25 bp, Probe Sequence
atcagttagccccatttattcagta

SEQ ID NO: 128464 - DNA, 25 bp, Probe Sequence
atcagtcgatatcctggttttggta

SEQ ID NO: 128465 - DNA, 25 bp, Probe Sequence
atcagtcagattctttccttggctc

SEQ ID NO: 128466 - DNA, 25 bp, Probe Sequence
atcaggcaattcaggtccggtcctg

SEQ ID NO: 128467 - DNA, 25 bp, Probe Sequence
atcacgccagctgaggtgggtgtcc

SEQ ID NO: 128468 - DNA, 25 bp, Probe Sequence
atcactgggtgcttgtgcatggtgg

SEQ ID NO: 128469 - DNA, 25 bp, Probe Sequence
atcacgctgtggtttgatgatgcgc

SEQ ID NO: 128470 - DNA, 25 bp, Probe Sequence
atcacgcttgtgatgtggtggccgt

SEQ ID NO: 128471 - DNA, 25 bp, Probe Sequence
atcatggcttgtggtctggtcgcca

SEQ ID NO: 128472 - DNA, 25 bp, Probe Sequence
atcatgttgctgggcagtgactggc

SEQ ID NO: 128473 - DNA, 25 bp, Probe Sequence
atcatgatagtcacaaacgccgcat

SEQ ID NO: 128474 - DNA, 25 bp, Probe Sequence
atcagtgagacataaaagccaacaa

SEQ ID NO: 128475 - DNA, 25 bp, Probe Sequence
atcagccgctcttgaagaagccgac

SEQ ID NO: 128476 - DNA, 25 bp, Probe Sequence
atcaccagtattagaggcaccgcct

SEQ ID NO: 128477 - DNA, 25 bp, Probe Sequence
atcacactgacgtataggactcctt

SEQ ID NO: 128478 - DNA, 25 bp, Probe Sequence
atcatgcctatttaatggaacctcc

SEQ ID NO: 128479 - DNA, 25 bp, Probe Sequence
atcagagctccataatgtaccccac

SEQ ID NO: 128480 - DNA, 25 bp, Probe Sequence
atcagggccatgagtgtcacccaga

SEQ ID NO: 128481 - DNA, 25 bp, Probe Sequence
atcatgggacttcttcactccaaaa

SEQ ID NO: 128482 - DNA, 25 bp, Probe Sequence
atcatcgagaacccattcctcaatg

SEQ ID NO: 128483 - DNA, 25 bp, Probe Sequence
atcattgtgaaccctgacgcacttg

SEQ ID NO: 128484 - DNA, 25 bp, Probe Sequence
atcattggacactggacacactagt

SEQ ID NO: 128485 - DNA, 25 bp, Probe Sequence
atcacttcacaatgttcaactattt

SEQ ID NO: 128486 - DNA, 25 bp, Probe Sequence
atcactcatcaatggctttattttt

SEQ ID NO: 128487 - DNA, 25 bp, Probe Sequence
atcactacacattcctttagtcttc

SEQ ID NO: 128488 - DNA, 25 bp, Probe Sequence
atcactccatttctactgagacttt

SEQ ID NO: 128489 - DNA, 25 bp, Probe Sequence
atcttaattggcataaggacatatc

SEQ ID NO: 128490 - DNA, 25 bp, Probe Sequence
atcatttacggcatgtacttctgca

SEQ ID NO: 128491 - DNA, 25 bp, Probe Sequence
atcactgtacttgttagtatctgat

SEQ ID NO: 128492 - DNA, 25 bp, Probe Sequence
atcagtttctgtcaatatgtattct

SEQ ID NO: 128493 - DNA, 25 bp, Probe Sequence
atcagtttctcagatgacttttcta

SEQ ID NO: 128494 - DNA, 25 bp, Probe Sequence
atcagtatccacctcatagctttac

SEQ ID NO: 128495 - DNA, 25 bp, Probe Sequence
atcagcttagatgccaggctctgtc

SEQ ID NO: 128496 - DNA, 25 bp, Probe Sequence
atcagctgattgtcaccaggggctc

SEQ ID NO: 128497 - DNA, 25 bp, Probe Sequence
atcactttgagcacacacgagctta

SEQ ID NO: 128498 - DNA, 25 bp, Probe Sequence
atcagtgtaacttatacatggccta

SEQ ID NO: 128499 - DNA, 25 bp, Probe Sequence
atcaggtaacattcatattagctca

SEQ ID NO: 128500 - DNA, 25 bp, Probe Sequence
atcagggcccaacatgtggcatgca

SEQ ID NO: 128501 - DNA, 25 bp, Probe Sequence
atcagggccaaacaaggctctgggc

SEQ ID NO: 128502 - DNA, 25 bp, Probe Sequence
atcagggcagcagagacagacccag

SEQ ID NO: 128503 - DNA, 25 bp, Probe Sequence
atcagtggagaaaatggagactcag

SEQ ID NO: 128504 - DNA, 25 bp, Probe Sequence
atcagacgatgagactagaaggaga

SEQ ID NO: 128505 - DNA, 25 bp, Probe Sequence
atcagaccaggccacattaacagaa

SEQ ID NO: 128506 - DNA, 25 bp, Probe Sequence
atcagaccaggccacattaacagaa

SEQ ID NO: 128507 - DNA, 25 bp, Probe Sequence
atcagattcaaccagctgcaaacag

SEQ ID NO: 128508 - DNA, 25 bp, Probe Sequence
atcagtgacacccggaaatgaggac

SEQ ID NO: 128509 - DNA, 25 bp, Probe Sequence
atcactacatcccctgactaaggga

SEQ ID NO: 128510 - DNA, 25 bp, Probe Sequence
atcttgacgctctctttaagggatt

SEQ ID NO: 128511 - DNA, 25 bp, Probe Sequence
atgtctatccttctttgaaagtata

SEQ ID NO: 128512 - DNA, 25 bp, Probe Sequence
atctaactcttctgttcgttgttag

SEQ ID NO: 128513 - DNA, 25 bp, Probe Sequence
atcttgagtttgctttactggttca

SEQ ID NO: 128514 - DNA, 25 bp, Probe Sequence
atctttgagcccattcttctgggtg

SEQ ID NO: 128515 - DNA, 25 bp, Probe Sequence
atcttagagcccctgagcttcaggg

SEQ ID NO: 128516 - DNA, 25 bp, Probe Sequence
atcttagacgacctgtccagatggt

SEQ ID NO: 128517 - DNA, 25 bp, Probe Sequence
atcatctgcaaccatgtgtgtccta

SEQ ID NO: 128518 - DNA, 25 bp, Probe Sequence
atcatgtgaaagggttgctgctgtc

SEQ ID NO: 128519 - DNA, 25 bp, Probe Sequence
atcaggccaatgggcttgcgtttca

SEQ ID NO: 128520 - DNA, 25 bp, Probe Sequence
atcagcccaatgttcctgttggtat

SEQ ID NO: 128521 - DNA, 25 bp, Probe Sequence
atcaccccgttcctgatatttatta

SEQ ID NO: 128522 - DNA, 25 bp, Probe Sequence
atctaccccttacttattattccag

SEQ ID NO: 128523 - DNA, 25 bp, Probe Sequence
atcatacagacctgggttccattcc

SEQ ID NO: 128524 - DNA, 25 bp, Probe Sequence
atcaggaacacagaggttggattct

SEQ ID NO: 128525 - DNA, 25 bp, Probe Sequence
atcggaacacattcagctgctgggt

SEQ ID NO: 128526 - DNA, 25 bp, Probe Sequence
atcagaaccacaacaggttggtcat

SEQ ID NO: 128527 - DNA, 25 bp, Probe Sequence
atcagaatcaagttgtgggtggaaa

SEQ ID NO: 128528 - DNA, 25 bp, Probe Sequence
atcacgccagagtgatggggcgaga

SEQ ID NO: 128529 - DNA, 25 bp, Probe Sequence
atcacccatataaaagagggacatg

SEQ ID NO: 128530 - DNA, 25 bp, Probe Sequence
atcaccacgatcaaaagggacaagc

SEQ ID NO: 128531 - DNA, 25 bp, Probe Sequence
atcccggatctgtaaccgaccgtgt

SEQ ID NO: 128532 - DNA, 25 bp, Probe Sequence
atcgtgggactttaccagatcggtt

SEQ ID NO: 128533 - DNA, 25 bp, Probe Sequence
atcagtttggtttcactcagaccga

SEQ ID NO: 128534 - DNA, 25 bp, Probe Sequence
atcagttatgagtaccacatcgaga

SEQ ID NO: 128535 - DNA, 25 bp, Probe Sequence
atcagttgatgatacgcccgagcag

SEQ ID NO: 128536 - DNA, 25 bp, Probe Sequence
atcagctagatttacactccgggac

SEQ ID NO: 128537 - DNA, 25 bp, Probe Sequence
atcctagtatcctgccaccaggagt

SEQ ID NO: 128538 - DNA, 25 bp, Probe Sequence
atcctggtatccgctaacaggtcaa

SEQ ID NO: 128539 - DNA, 25 bp, Probe Sequence
atctctactaccaccaaggagaata

SEQ ID NO: 128540 - DNA, 25 bp, Probe Sequence
atctgtaccactatctgtttctaaa

SEQ ID NO: 128541 - DNA, 25 bp, Probe Sequence
atctttgcgcctaatcatgtcgtcg

SEQ ID NO: 128542 - DNA, 25 bp, Probe Sequence
atcattcatggcagattgttagtgc

SEQ ID NO: 128543 - DNA, 25 bp, Probe Sequence
atcagccggattttgttattgatat

SEQ ID NO: 128544 - DNA, 25 bp, Probe Sequence
atcagctcggtaattttacatgtct

SEQ ID NO: 128545 - DNA, 25 bp, Probe Sequence
atcactgagcagttgtttatactgt

SEQ ID NO: 128546 - DNA, 25 bp, Probe Sequence
atcttagcagattctctcctagttt

SEQ ID NO: 128547 - DNA, 25 bp, Probe Sequence
atcttgcgtgaactcatcgatgaga

SEQ ID NO: 128548 - DNA, 25 bp, Probe Sequence
atctatggtgcatccaccagggcca

SEQ ID NO: 128549 - DNA, 25 bp, Probe Sequence
atcttggcactgtcagacacggagc

SEQ ID NO: 128550 - DNA, 25 bp, Probe Sequence
atctgctggaggccgaacgtcagga

SEQ ID NO: 128551 - DNA, 25 bp, Probe Sequence
atcatcatggagtggaggtgaagga

SEQ ID NO: 128552 - DNA, 25 bp, Probe Sequence
atcatcatcgtgtgggttgtctctt

SEQ ID NO: 128553 - DNA, 25 bp, Probe Sequence
atcatatctgcttctgtttttccaa

SEQ ID NO: 128554 - DNA, 25 bp, Probe Sequence
atcacctgctgctgtatttgtaaac

SEQ ID NO: 128555 - DNA, 25 bp, Probe Sequence
atcacctcatggcctattatattaa

SEQ ID NO: 128556 - DNA, 25 bp, Probe Sequence
atcagttgcaggcctctgtttctgc

SEQ ID NO: 128557 - DNA, 25 bp, Probe Sequence
atcagtgtgaggtaggtgatgtctc

SEQ ID NO: 128558 - DNA, 25 bp, Probe Sequence
atcagtgtgctgctagagggttctt

SEQ ID NO: 128559 - DNA, 25 bp, Probe Sequence
atcagtggggccaagggttctctgt

SEQ ID NO: 128560 - DNA, 25 bp, Probe Sequence
atctggggttcaaggtggctcctgt

SEQ ID NO: 128561 - DNA, 25 bp, Probe Sequence
atcatggcgcaggatcaaggtgaaa

SEQ ID NO: 128562 - DNA, 25 bp, Probe Sequence
atcagaccaggaggcattgctgtga

SEQ ID NO: 128563 - DNA, 25 bp, Probe Sequence
atcagcattctctaacttgtttggt

SEQ ID NO: 128564 - DNA, 25 bp, Probe Sequence
atcatgctaatatccattgaatcgg

SEQ ID NO: 128565 - DNA, 25 bp, Probe Sequence
atcagttgctgccaccaggaatcgt

SEQ ID NO: 128566 - DNA, 25 bp, Probe Sequence
atcatctctctctatcacagagaca

SEQ ID NO: 128567 - DNA, 25 bp, Probe Sequence
atcagcttgttgagcaatgactttg

SEQ ID NO: 128568 - DNA, 25 bp, Probe Sequence
atcactggattgactgcttcatctt

SEQ ID NO: 128569 - DNA, 25 bp, Probe Sequence
atcagcgtaatgatctgcagcttcg

SEQ ID NO: 128570 - DNA, 25 bp, Probe Sequence
atcagtgtaaattcaggcttcagca

SEQ ID NO: 128571 - DNA, 25 bp, Probe Sequence
atcaggttgaagtcatgagattagg

SEQ ID NO: 128572 - DNA, 25 bp, Probe Sequence
atcagtgttcagatcatagattaat

SEQ ID NO: 128573 - DNA, 25 bp, Probe Sequence
atcagtgtcctcttgctcaaaaatc

SEQ ID NO: 128574 - DNA, 25 bp, Probe Sequence
atcagctgtttttcccaacaaatat

SEQ ID NO: 128575 - DNA, 25 bp, Probe Sequence
atcagctgtttttcccaacaaatat

SEQ ID NO: 128576 - DNA, 25 bp, Probe Sequence
atcttttctcttgctaccaagctat

SEQ ID NO: 128577 - DNA, 25 bp, Probe Sequence
atcttttctcttgctaccaagctat

SEQ ID NO: 128578 - DNA, 25 bp, Probe Sequence
atcttttggatggcagctcccaaaa

SEQ ID NO: 128579 - DNA, 25 bp, Probe Sequence
atcttcttgaagggctgacacgcga

SEQ ID NO: 128580 - DNA, 25 bp, Probe Sequence
atcattttgacaacctgtatcccaa

SEQ ID NO: 128581 - DNA, 25 bp, Probe Sequence
atcattttgacaacctgtatcccaa

SEQ ID NO: 128582 - DNA, 25 bp, Probe Sequence
atcattttgacaacctgtatcccaa

SEQ ID NO: 128583 - DNA, 25 bp, Probe Sequence
atcattaatgacgccttcaacctgg

SEQ ID NO: 128584 - DNA, 25 bp, Probe Sequence
atcattagctatatgccttaaccct

SEQ ID NO: 128585 - DNA, 25 bp, Probe Sequence
atcttagtgtatagcctggaaagac

SEQ ID NO: 128586 - DNA, 25 bp, Probe Sequence
atcattcctctggtcctaaatatac

SEQ ID NO: 128587 - DNA, 25 bp, Probe Sequence
atcttctttcccgtcatcaaatgac

SEQ ID NO: 128588 - DNA, 25 bp, Probe Sequence
atcatacctaccggctcattagtgt

SEQ ID NO: 128589 - DNA, 25 bp, Probe Sequence
atcccaagacaggagtcctcactgt

SEQ ID NO: 128590 - DNA, 25 bp, Probe Sequence
atcaccaagacaagtgtagctttat

SEQ ID NO: 128591 - DNA, 25 bp, Probe Sequence
atcacccagaagctgtggtttgagg

SEQ ID NO: 128592 - DNA, 25 bp, Probe Sequence
atcacccagtatccacatgcggtgg

SEQ ID NO: 128593 - DNA, 25 bp, Probe Sequence
atcaccgcggatggatctaggtatg

SEQ ID NO: 128594 - DNA, 25 bp, Probe Sequence
atcaccgggtatttaggtgctggga

SEQ ID NO: 128595 - DNA, 25 bp, Probe Sequence
atgtttggagtttgtagtgggtggt

SEQ ID NO: 128596 - DNA, 25 bp, Probe Sequence
atgtataaacttgaagtggttgtgt

SEQ ID NO: 128597 - DNA, 25 bp, Probe Sequence
atctaaaagccacccaggccttggt

SEQ ID NO: 128598 - DNA, 25 bp, Probe Sequence
atctataaacctagccatggccatc

SEQ ID NO: 128599 - DNA, 25 bp, Probe Sequence
atctgtccattcctacctggacatg

SEQ ID NO: 128600 - DNA, 25 bp, Probe Sequence
atcttcctcttttacgtgaatgact

SEQ ID NO: 128601 - DNA, 25 bp, Probe Sequence
atcattcctctctgtagatgctagg

SEQ ID NO: 128602 - DNA, 25 bp, Probe Sequence
atcgtaactgcttctagagatggga

SEQ ID NO: 128603 - DNA, 25 bp, Probe Sequence
atctttcctgttccagagaggtggg

SEQ ID NO: 128604 - DNA, 25 bp, Probe Sequence
atctttcctgttccagagaggtggg

SEQ ID NO: 128605 - DNA, 25 bp, Probe Sequence
atcattccttttacaggcacgtgga

SEQ ID NO: 128606 - DNA, 25 bp, Probe Sequence
atcatgtcttttccatgtgtacctg

SEQ ID NO: 128607 - DNA, 25 bp, Probe Sequence
atcagtttccatcagattctgaatg

SEQ ID NO: 128608 - DNA, 25 bp, Probe Sequence
atcattcatacccactgttctgaag

SEQ ID NO: 128609 - DNA, 25 bp, Probe Sequence
atcaccaatctggactgtactcggg

SEQ ID NO: 128610 - DNA, 25 bp, Probe Sequence
atcaccattcttatgtcactttaga

SEQ ID NO: 128611 - DNA, 25 bp, Probe Sequence
atcaccttgatcattggcacttttg

SEQ ID NO: 128612 - DNA, 25 bp, Probe Sequence
atcagcctctgtgtggggctctatt

SEQ ID NO: 128613 - DNA, 25 bp, Probe Sequence
atcagcctcatgactttatagttat

SEQ ID NO: 128614 - DNA, 25 bp, Probe Sequence
atcagtgcttacaattatatggata

SEQ ID NO: 128615 - DNA, 25 bp, Probe Sequence
atcattcattacaaagttcagcatt

SEQ ID NO: 128616 - DNA, 25 bp, Probe Sequence
atcagctcatgataaaggtactcat

SEQ ID NO: 128617 - DNA, 25 bp, Probe Sequence
atcagcatctgaaagacaggcccct

SEQ ID NO: 128618 - DNA, 25 bp, Probe Sequence
atcagcaccaaaacaggcatcaccc

SEQ ID NO: 128619 - DNA, 25 bp, Probe Sequence
atcagaggcatcagacttctcaccc

SEQ ID NO: 128620 - DNA, 25 bp, Probe Sequence
atctgatgagtcagatctcccctcc

SEQ ID NO: 128621 - DNA, 25 bp, Probe Sequence
atcagatgatgacaatttacttccc

SEQ ID NO: 128622 - DNA, 25 bp, Probe Sequence
atcagatgcggtttttttgctccct

SEQ ID NO: 128623 - DNA, 25 bp, Probe Sequence
atcaggggatgtacatctctccctc

SEQ ID NO: 128624 - DNA, 25 bp, Probe Sequence
atcagcttgaagaactatgatcccc

SEQ ID NO: 128625 - DNA, 25 bp, Probe Sequence
atcgctttgaataaatactccctta

SEQ ID NO: 128626 - DNA, 25 bp, Probe Sequence
atcagcttgagcaatttcggaccct

SEQ ID NO: 128627 - DNA, 25 bp, Probe Sequence
atcttcgactttaggtgcatccctc

SEQ ID NO: 128628 - DNA, 25 bp, Probe Sequence
atcttgaaacttagagaaccctttg

SEQ ID NO: 128629 - DNA, 25 bp, Probe Sequence
atcttataactgctcactttccttt

SEQ ID NO: 128630 - DNA, 25 bp, Probe Sequence
atcgttacaattatcatcttttttt

SEQ ID NO: 128631 - DNA, 25 bp, Probe Sequence
atcgtaaatctctttactatgtcct

SEQ ID NO: 128632 - DNA, 25 bp, Probe Sequence
atcatgttaatcaagctctcctcac

SEQ ID NO: 128633 - DNA, 25 bp, Probe Sequence
atcatgtttgaatctacattcactt

SEQ ID NO: 128634 - DNA, 25 bp, Probe Sequence
atcagtgttgactttgaacttcttt

SEQ ID NO: 128635 - DNA, 25 bp, Probe Sequence
atcatgttggactgagctaatttgt

SEQ ID NO: 128636 - DNA, 25 bp, Probe Sequence
atcatgtctatagttcctgagattt

SEQ ID NO: 128637 - DNA, 25 bp, Probe Sequence
atcatgtgcatggaccacctggagg

SEQ ID NO: 128638 - DNA, 25 bp, Probe Sequence
atcatgtctgcataatcctccaaga

SEQ ID NO: 128639 - DNA, 25 bp, Probe Sequence
atctttccagaaaatccaagtccgg

SEQ ID NO: 128640 - DNA, 25 bp, Probe Sequence
atcttcctcaggactattaacccct

SEQ ID NO: 128641 - DNA, 25 bp, Probe Sequence
atcttcctccaggcttgtaataccc

SEQ ID NO: 128642 - DNA, 25 bp, Probe Sequence
atcttacaacaggcttatgaatata

SEQ ID NO: 128643 - DNA, 25 bp, Probe Sequence
atcattacaaatcctgttatctctt

SEQ ID NO: 128644 - DNA, 25 bp, Probe Sequence
atcaccaaacagactccatcatttt

SEQ ID NO: 128645 - DNA, 25 bp, Probe Sequence
atcatccaaacagtccagttgcata

SEQ ID NO: 128646 - DNA, 25 bp, Probe Sequence
atcatcccacagccaacagattgaa

SEQ ID NO: 128647 - DNA, 25 bp, Probe Sequence
atcagacccagccagcagagatgga

SEQ ID NO: 128648 - DNA, 25 bp, Probe Sequence
atcagtaccagcagcaaggcagaac

SEQ ID NO: 128649 - DNA, 25 bp, Probe Sequence
atcagattccagagctgacagctgt

SEQ ID NO: 128650 - DNA, 25 bp, Probe Sequence
atcatgttccattagcccaggtgtt

SEQ ID NO: 128651 - DNA, 25 bp, Probe Sequence
atcagttctctgtgaccagacatga

SEQ ID NO: 128652 - DNA, 25 bp, Probe Sequence
atcagttctctgtgaccagacatga

SEQ ID NO: 128653 - DNA, 25 bp, Probe Sequence
atcagtgacttgtacattcagcaat

SEQ ID NO: 128654 - DNA, 25 bp, Probe Sequence
atcagtgactggtatatcttcatca

SEQ ID NO: 128655 - DNA, 25 bp, Probe Sequence
atcagatgactggctgttttctctg

SEQ ID NO: 128656 - DNA, 25 bp, Probe Sequence
atcatgcaaatgctgtattcttctt

SEQ ID NO: 128657 - DNA, 25 bp, Probe Sequence
atcagggggtgaatctctacattaa

SEQ ID NO: 128658 - DNA, 25 bp, Probe Sequence
atcaggaacctgattttctatgaac

SEQ ID NO: 128659 - DNA, 25 bp, Probe Sequence
atcagaatacattgactgtttttga

SEQ ID NO: 128660 - DNA, 25 bp, Probe Sequence
atcagacatactttttgattattca

SEQ ID NO: 128661 - DNA, 25 bp, Probe Sequence
atcagcctgattttttgctcagtat

SEQ ID NO: 128662 - DNA, 25 bp, Probe Sequence
atcagacctgcatttaatctcagtt

SEQ ID NO: 128663 - DNA, 25 bp, Probe Sequence
atcagaactcatccttgatgtcaaa

SEQ ID NO: 128664 - DNA, 25 bp, Probe Sequence
atcagaactctccttaaaatgcatt

SEQ ID NO: 128665 - DNA, 25 bp, Probe Sequence
atcataatttcaactagatcaagac

SEQ ID NO: 128666 - DNA, 25 bp, Probe Sequence
atcagaactagcacgagacactatc

SEQ ID NO: 128667 - DNA, 25 bp, Probe Sequence
atcatgaaccaatctggatgcctca

SEQ ID NO: 128668 - DNA, 25 bp, Probe Sequence
atcagatcagccagccatgagactc

SEQ ID NO: 128669 - DNA, 25 bp, Probe Sequence
atcatgcaagctggtggctggacca

SEQ ID NO: 128670 - DNA, 25 bp, Probe Sequence
atcatgttctagttgcttgaccctg

SEQ ID NO: 128671 - DNA, 25 bp, Probe Sequence
atctcccaagaggcttcactgcctc

SEQ ID NO: 128672 - DNA, 25 bp, Probe Sequence
atctctcagcatttactgtacgccc

SEQ ID NO: 128673 - DNA, 25 bp, Probe Sequence
atctcacagcatttgccaagtctcc

SEQ ID NO: 128674 - DNA, 25 bp, Probe Sequence
atcatgcaaattagccaatgtatct

SEQ ID NO: 128675 - DNA, 25 bp, Probe Sequence
atcatagcttctacctcagctactt

SEQ ID NO: 128676 - DNA, 25 bp, Probe Sequence
atcatgagataataggcctactcat

SEQ ID NO: 128677 - DNA, 25 bp, Probe Sequence
atcaggatgcaatgtgcatgcctaa

SEQ ID NO: 128678 - DNA, 25 bp, Probe Sequence
atcatggtcatttgtaggcatcaag

SEQ ID NO: 128679 - DNA, 25 bp, Probe Sequence
atcatgggtgtattcaggagctgac

SEQ ID NO: 128680 - DNA, 25 bp, Probe Sequence
atcatgggtgaggtgcgcgatggcg

SEQ ID NO: 128681 - DNA, 25 bp, Probe Sequence
atcagaagcgaggggagcagtgcgt

SEQ ID NO: 128682 - DNA, 25 bp, Probe Sequence
atcatagaaggtgtaggctgctgtg

SEQ ID NO: 128683 - DNA, 25 bp, Probe Sequence
atctcaagaagtgtatggtttaaag

SEQ ID NO: 128684 - DNA, 25 bp, Probe Sequence
atctaagaactatttggttgataca

SEQ ID NO: 128685 - DNA, 25 bp, Probe Sequence
atctaggcattttcttggtagcaca

SEQ ID NO: 128686 - DNA, 25 bp, Probe Sequence
atcgtaattcatccgttgtatcaga

SEQ ID NO: 128687 - DNA, 25 bp, Probe Sequence
atcatttattcattgggttgtcaga

SEQ ID NO: 128688 - DNA, 25 bp, Probe Sequence
atcatttttattgagtctgaatatt

SEQ ID NO: 128689 - DNA, 25 bp, Probe Sequence
atcattattttagggtatactactt

SEQ ID NO: 128690 - DNA, 25 bp, Probe Sequence
atcatataatttgctagtcatcccc

SEQ ID NO: 128691 - DNA, 25 bp, Probe Sequence
atcattaaccatgctgcaggcagcc

SEQ ID NO: 128692 - DNA, 25 bp, Probe Sequence
atcattgaactggtgggacagccac

SEQ ID NO: 128693 - DNA, 25 bp, Probe Sequence
atcttgaccgtgggaccagacacac

SEQ ID NO: 128694 - DNA, 25 bp, Probe Sequence
atcttcaactggtgtccaaagacat

SEQ ID NO: 128695 - DNA, 25 bp, Probe Sequence
atctcaaagtaaagtcattaacatc

SEQ ID NO: 128696 - DNA, 25 bp, Probe Sequence
atctccaggggcaccattgaaatcc

SEQ ID NO: 128697 - DNA, 25 bp, Probe Sequence
atctccaggggcaccattgaaatcc

SEQ ID NO: 128698 - DNA, 25 bp, Probe Sequence
atctcctgggggcacaggaatgtcg

SEQ ID NO: 128699 - DNA, 25 bp, Probe Sequence
atcgagcggctgctgtcaaggttgt

SEQ ID NO: 128700 - DNA, 25 bp, Probe Sequence
atcttgttctggcctagaggtcagt

SEQ ID NO: 128701 - DNA, 25 bp, Probe Sequence
atcaggctgttgtgctgaaggccct

SEQ ID NO: 128702 - DNA, 25 bp, Probe Sequence
atcagtgcgtttggaacagatgacc

SEQ ID NO: 128703 - DNA, 25 bp, Probe Sequence
atcatgtgtgtacgctgaaagatac

SEQ ID NO: 128704 - DNA, 25 bp, Probe Sequence
atcatttgtgcacgtgtatagctca

SEQ ID NO: 128705 - DNA, 25 bp, Probe Sequence
atctgcttggcaatagttaagtcaa

SEQ ID NO: 128706 - DNA, 25 bp, Probe Sequence
atcttcttcaaatttaacacacctc

SEQ ID NO: 128707 - DNA, 25 bp, Probe Sequence
atcttcttcaaatttaacacacctc

SEQ ID NO: 128708 - DNA, 25 bp, Probe Sequence
atcttttaatcattcaccccattac

SEQ ID NO: 128709 - DNA, 25 bp, Probe Sequence
atctggctgtaaggtttgcccttga

SEQ ID NO: 128710 - DNA, 25 bp, Probe Sequence
atctggctgtaaggtttgcccttga

SEQ ID NO: 128711 - DNA, 25 bp, Probe Sequence
atcatgggtattggtcctgtccctg

SEQ ID NO: 128712 - DNA, 25 bp, Probe Sequence
atcatggattttgtttattcctgaa

SEQ ID NO: 128713 - DNA, 25 bp, Probe Sequence
atcaggtgtttagtaggttccataa

SEQ ID NO: 128714 - DNA, 25 bp, Probe Sequence
atcagagctggtgaaatagttgttt

SEQ ID NO: 128715 - DNA, 25 bp, Probe Sequence
atcagagcattgtgcaatacagttt

SEQ ID NO: 128716 - DNA, 25 bp, Probe Sequence
atcaggcatctgtgctgaatgtctt

SEQ ID NO: 128717 - DNA, 25 bp, Probe Sequence
atcagtgacatgtgaggcagtatta

SEQ ID NO: 128718 - DNA, 25 bp, Probe Sequence
atcatgtaagatggcaactgtatta

SEQ ID NO: 128719 - DNA, 25 bp, Probe Sequence
atcagatacagatgcccagtcttga

SEQ ID NO: 128720 - DNA, 25 bp, Probe Sequence
atcagatcacacggcggcttggaga

SEQ ID NO: 128721 - DNA, 25 bp, Probe Sequence
atctgatggactggtgtcctatgga

SEQ ID NO: 128722 - DNA, 25 bp, Probe Sequence
atctgtgtgcataggggcactgaag

SEQ ID NO: 128723 - DNA, 25 bp, Probe Sequence
atcttgtgagtggggcatctgttgg

SEQ ID NO: 128724 - DNA, 25 bp, Probe Sequence
atctttcaggcatgaatgattctag

SEQ ID NO: 128725 - DNA, 25 bp, Probe Sequence
atctttgccgcaaccaatttaataa

SEQ ID NO: 128726 - DNA, 25 bp, Probe Sequence
atctttcccactagccatttaataa

SEQ ID NO: 128727 - DNA, 25 bp, Probe Sequence
atcttcccaactggcactgggcagt

SEQ ID NO: 128728 - DNA, 25 bp, Probe Sequence
atcatatcctcagaccaggtggaat

SEQ ID NO: 128729 - DNA, 25 bp, Probe Sequence
atctacacgccattcactgaggaca

SEQ ID NO: 128730 - DNA, 25 bp, Probe Sequence
atctaaaccttacatgtgtaaaggt

SEQ ID NO: 128731 - DNA, 25 bp, Probe Sequence
atctgtaagcagattttggctaaag

SEQ ID NO: 128732 - DNA, 25 bp, Probe Sequence
atcagtcaatagaacctttgggaag

SEQ ID NO: 128733 - DNA, 25 bp, Probe Sequence
atcttcaaagttgatatttggaact

SEQ ID NO: 128734 - DNA, 25 bp, Probe Sequence
atcatccactcgtgattttttaatt

SEQ ID NO: 128735 - DNA, 25 bp, Probe Sequence
atcatccactcgtgattttttaatt

SEQ ID NO: 128736 - DNA, 25 bp, Probe Sequence
atcatccatctccagaagttttcca

SEQ ID NO: 128737 - DNA, 25 bp, Probe Sequence
atcataactacgtattcattgtcta

SEQ ID NO: 128738 - DNA, 25 bp, Probe Sequence
atcatgctaattgtatacttgtcta

SEQ ID NO: 128739 - DNA, 25 bp, Probe Sequence
atcatgtcatttatatggactgtta

SEQ ID NO: 128740 - DNA, 25 bp, Probe Sequence
atcatgccatcgtgtctacatctgt

SEQ ID NO: 128741 - DNA, 25 bp, Probe Sequence
atcatgccatcgtgtctacatctgt

SEQ ID NO: 128742 - DNA, 25 bp, Probe Sequence
atcatcctcgctatcatattcatta

SEQ ID NO: 128743 - DNA, 25 bp, Probe Sequence
atcatgcgccctgatcagatgtatg

SEQ ID NO: 128744 - DNA, 25 bp, Probe Sequence
atcatgctgctctgccatggttatc

SEQ ID NO: 128745 - DNA, 25 bp, Probe Sequence
atcatcagtgaagctatgatctgct

SEQ ID NO: 128746 - DNA, 25 bp, Probe Sequence
atcatcgcaaaactcatgatgctcc

SEQ ID NO: 128747 - DNA, 25 bp, Probe Sequence
atctcagaagggtgatgtaactttg

SEQ ID NO: 128748 - DNA, 25 bp, Probe Sequence
atctgttcaggttggtgtaccgtgt

SEQ ID NO: 128749 - DNA, 25 bp, Probe Sequence
atctttccatttttctccatggtgt

SEQ ID NO: 128750 - DNA, 25 bp, Probe Sequence
atctagtttaattgtttcaggtgga

SEQ ID NO: 128751 - DNA, 25 bp, Probe Sequence
atctacttctacagttggggctgac

SEQ ID NO: 128752 - DNA, 25 bp, Probe Sequence
atctaatagtgtacagttggggagt

SEQ ID NO: 128753 - DNA, 25 bp, Probe Sequence
atctgcaaaggggcgtcggacaagt

SEQ ID NO: 128754 - DNA, 25 bp, Probe Sequence
atgctaacaggggcgccgtaaagcc

SEQ ID NO: 128755 - DNA, 25 bp, Probe Sequence
atctaaggccttccctgtcagaagg

SEQ ID NO: 128756 - DNA, 25 bp, Probe Sequence
atcataattcttttcccaatgtagg

SEQ ID NO: 128757 - DNA, 25 bp, Probe Sequence
atcattattattgctctccactgta

SEQ ID NO: 128758 - DNA, 25 bp, Probe Sequence
atcaggactttccctgacagctgtg

SEQ ID NO: 128759 - DNA, 25 bp, Probe Sequence
atcagtgtttccaatctgtcctgtt

SEQ ID NO: 128760 - DNA, 25 bp, Probe Sequence
atcagtgtttccaatctgtcctgtt

SEQ ID NO: 128761 - DNA, 25 bp, Probe Sequence
atcagtattttcaatagtgctatgc

SEQ ID NO: 128762 - DNA, 25 bp, Probe Sequence
atcattactgctaataaggcatcat

SEQ ID NO: 128763 - DNA, 25 bp, Probe Sequence
atcatgatattcagtcaaggcactt

SEQ ID NO: 128764 - DNA, 25 bp, Probe Sequence
atcatcatcctcaccagtggcaagt

SEQ ID NO: 128765 - DNA, 25 bp, Probe Sequence
atcatcatcagtatacacattatag

SEQ ID NO: 128766 - DNA, 25 bp, Probe Sequence
atcagtcattcatagcactatatcg

SEQ ID NO: 128767 - DNA, 25 bp, Probe Sequence
atcatgtctacataactttcgtaat

SEQ ID NO: 128768 - DNA, 25 bp, Probe Sequence
atcatgccttatggaaatttctttt

SEQ ID NO: 128769 - DNA, 25 bp, Probe Sequence
atcatcccatcataaatactgcttt

SEQ ID NO: 128770 - DNA, 25 bp, Probe Sequence
atcatcattccctagaaactgccat

SEQ ID NO: 128771 - DNA, 25 bp, Probe Sequence
atctagtagccagggaaatacatgt

SEQ ID NO: 128772 - DNA, 25 bp, Probe Sequence
atctggtaccagttgaaatttttgg

SEQ ID NO: 128773 - DNA, 25 bp, Probe Sequence
atcatggtactagttccgtcttttg

SEQ ID NO: 128774 - DNA, 25 bp, Probe Sequence
atcatagatacttgttttggttttg

SEQ ID NO: 128775 - DNA, 25 bp, Probe Sequence
atcataatccaatctttgttttttt

SEQ ID NO: 128776 - DNA, 25 bp, Probe Sequence
atcttctaaatcctttgttgtcatt

SEQ ID NO: 128777 - DNA, 25 bp, Probe Sequence
atctttaaaccaattgctgctactt

SEQ ID NO: 128778 - DNA, 25 bp, Probe Sequence
atctttaaagcaatgatggtccaga

SEQ ID NO: 128779 - DNA, 25 bp, Probe Sequence
atcttcataatcgaaatggttctga

SEQ ID NO: 128780 - DNA, 25 bp, Probe Sequence
atcattctaatcactgtattttgaa

SEQ ID NO: 128781 - DNA, 25 bp, Probe Sequence
atcatctggttcagtccacttgaaa

SEQ ID NO: 128782 - DNA, 25 bp, Probe Sequence
atcatgaagttcaagcctgactgtg

SEQ ID NO: 128783 - DNA, 25 bp, Probe Sequence
atcatacagaccaccatatgttctt

SEQ ID NO: 128784 - DNA, 25 bp, Probe Sequence
atcataagcacctcaacacttgaat

SEQ ID NO: 128785 - DNA, 25 bp, Probe Sequence
atcagggcaagctcatagcacatgt

SEQ ID NO: 128786 - DNA, 25 bp, Probe Sequence
atcataggaggcttcattcactgat

SEQ ID NO: 128787 - DNA, 25 bp, Probe Sequence
atcatcacggtctttagccatgcac

SEQ ID NO: 128788 - DNA, 25 bp, Probe Sequence
atcatccaaggctgaattatgctca

SEQ ID NO: 128789 - DNA, 25 bp, Probe Sequence
atcggccagtcagatgtttctcatc

SEQ ID NO: 128790 - DNA, 25 bp, Probe Sequence
atcaggaatgactctgtctttgcat

SEQ ID NO: 128791 - DNA, 25 bp, Probe Sequence
atcatggaatgttctgagtccctga

SEQ ID NO: 128792 - DNA, 25 bp, Probe Sequence
atctgagaatttggactaactgcac

SEQ ID NO: 128793 - DNA, 25 bp, Probe Sequence
atctacaagtcagtgccctgtatgc

SEQ ID NO: 128794 - DNA, 25 bp, Probe Sequence
atcatacagactttcctcaacatgt

SEQ ID NO: 128795 - DNA, 25 bp, Probe Sequence
atctacgtattagttcatccgctat

SEQ ID NO: 128796 - DNA, 25 bp, Probe Sequence
atcttcatgaataagcttcagcttg

SEQ ID NO: 128797 - DNA, 25 bp, Probe Sequence
atcatctataaggtgcctcactgtg

SEQ ID NO: 128798 - DNA, 25 bp, Probe Sequence
atcatctactcacacttcacgtgtg

SEQ ID NO: 128799 - DNA, 25 bp, Probe Sequence
atctagacttggatctgccagttgt

SEQ ID NO: 128800 - DNA, 25 bp, Probe Sequence
atcatttcaggtggttacagttttc

SEQ ID NO: 128801 - DNA, 25 bp, Probe Sequence
atcagtctcctttttatcagttttg

SEQ ID NO: 128802 - DNA, 25 bp, Probe Sequence
atctactcgttgttgaaatttttat

SEQ ID NO: 128803 - DNA, 25 bp, Probe Sequence
atctaccgcgggagatttcccaatt

SEQ ID NO: 128804 - DNA, 25 bp, Probe Sequence
atctacatccgaggggaattctaca

SEQ ID NO: 128805 - DNA, 25 bp, Probe Sequence
atctactttaggccaaatccatcac

SEQ ID NO: 128806 - DNA, 25 bp, Probe Sequence
atctcaccattatgacatccatccc

SEQ ID NO: 128807 - DNA, 25 bp, Probe Sequence
atcataatcatgtgtgatcccatca

SEQ ID NO: 128808 - DNA, 25 bp, Probe Sequence
atcatagcatactttgtcgctccac

SEQ ID NO: 128809 - DNA, 25 bp, Probe Sequence
atcatagctcactgattttgctatt

SEQ ID NO: 128810 - DNA, 25 bp, Probe Sequence
atcattgctccatgcattgataata

SEQ ID NO: 128811 - DNA, 25 bp, Probe Sequence
atctactcccagaaataatcaattt

SEQ ID NO: 128812 - DNA, 25 bp, Probe Sequence
atctgcaacctaaaaaactattcat

SEQ ID NO: 128813 - DNA, 25 bp, Probe Sequence
atctaactttaatcgatgctgtttc

SEQ ID NO: 128814 - DNA, 25 bp, Probe Sequence
atcatcccattgtaaagcgacttca

SEQ ID NO: 128815 - DNA, 25 bp, Probe Sequence
atcatactcttgatatccgtctggc

SEQ ID NO: 128816 - DNA, 25 bp, Probe Sequence
atcatgttctagaaatacctgcaac

SEQ ID NO: 128817 - DNA, 25 bp, Probe Sequence
atcatgttcatataataagccagac

SEQ ID NO: 128818 - DNA, 25 bp, Probe Sequence
atcattgtaattcaaatccattcag

SEQ ID NO: 128819 - DNA, 25 bp, Probe Sequence
atcgtgcaaataaacgctcactccg

SEQ ID NO: 128820 - DNA, 25 bp, Probe Sequence
atcagtcgcaatgattcagctcgct

SEQ ID NO: 128821 - DNA, 25 bp, Probe Sequence
atcagtgagcaagcaagcacagcca

SEQ ID NO: 128822 - DNA, 25 bp, Probe Sequence
atctggactcagcagagcacagccc

SEQ ID NO: 128823 - DNA, 25 bp, Probe Sequence
atcttgcacgaggcaccagagtctc

SEQ ID NO: 128824 - DNA, 25 bp, Probe Sequence
atcttgcctagatgtcgatgactgc

SEQ ID NO: 128825 - DNA, 25 bp, Probe Sequence
atcttattgagaggtgaggagtgcc

SEQ ID NO: 128826 - DNA, 25 bp, Probe Sequence
atctcgggaagcttgatggcaatcc

SEQ ID NO: 128827 - DNA, 25 bp, Probe Sequence
atctggggacagtgctggattacag

SEQ ID NO: 128828 - DNA, 25 bp, Probe Sequence
atcggtggacactggtatttattta

SEQ ID NO: 128829 - DNA, 25 bp, Probe Sequence
atcggtggacactggtatttattta

SEQ ID NO: 128830 - DNA, 25 bp, Probe Sequence
atcggtggccacttggatggatttt

SEQ ID NO: 128831 - DNA, 25 bp, Probe Sequence
atctaggcttcgttgggcctttgaa

SEQ ID NO: 128832 - DNA, 25 bp, Probe Sequence
atcttgtctaccttgaggttcctga

SEQ ID NO: 128833 - DNA, 25 bp, Probe Sequence
atcttgtctaccttgaggttcctga

SEQ ID NO: 128834 - DNA, 25 bp, Probe Sequence
atcttctccacatctgaaattcctt

SEQ ID NO: 128835 - DNA, 25 bp, Probe Sequence
atcttgacccagctgaacatgtctt

SEQ ID NO: 128836 - DNA, 25 bp, Probe Sequence
atcaggacctcactcagaaagacta

SEQ ID NO: 128837 - DNA, 25 bp, Probe Sequence
atcggaggctttggcaactgactag

SEQ ID NO: 128838 - DNA, 25 bp, Probe Sequence
atcggggtcattgccaatgatatgg

SEQ ID NO: 128839 - DNA, 25 bp, Probe Sequence
atcaggttctcagtcccaaggagaa

SEQ ID NO: 128840 - DNA, 25 bp, Probe Sequence
atcatggttctagttctcatacaga

SEQ ID NO: 128841 - DNA, 25 bp, Probe Sequence
atcatgtaatatctgtgctctaata

SEQ ID NO: 128842 - DNA, 25 bp, Probe Sequence
atcattcagtaattagctcaaacaa

SEQ ID NO: 128843 - DNA, 25 bp, Probe Sequence
atctatacgagatactccagccaaa

SEQ ID NO: 128844 - DNA, 25 bp, Probe Sequence
atcatggccacaaaacaagtagaaa

SEQ ID NO: 128845 - DNA, 25 bp, Probe Sequence
atcatatctcaaagtaaagtcatta

SEQ ID NO: 128846 - DNA, 25 bp, Probe Sequence
atcttctgcaggataaagactattc

SEQ ID NO: 128847 - DNA, 25 bp, Probe Sequence
atctgtatcggtcagggtccagtca

SEQ ID NO: 128848 - DNA, 25 bp, Probe Sequence
atctctgagcggtggggaccaggag

SEQ ID NO: 128849 - DNA, 25 bp, Probe Sequence
atcatcgtggagtggcgggctcagt

SEQ ID NO: 128850 - DNA, 25 bp, Probe Sequence
atctcgatgtaattgccgtcgtcaa

SEQ ID NO: 128851 - DNA, 25 bp, Probe Sequence
atcttgttaagaaggtcgtgcaaca

SEQ ID NO: 128852 - DNA, 25 bp, Probe Sequence
atcttttcagaggaggaaacataca

SEQ ID NO: 128853 - DNA, 25 bp, Probe Sequence
atcttttcacagcaagaacagtcca

SEQ ID NO: 128854 - DNA, 25 bp, Probe Sequence
atcttcttcacagacatccctgaaa

SEQ ID NO: 128855 - DNA, 25 bp, Probe Sequence
atcatctttgaaaagcatccgtagt

SEQ ID NO: 128856 - DNA, 25 bp, Probe Sequence
atcatcttggagaaacaccttggtt

SEQ ID NO: 128857 - DNA, 25 bp, Probe Sequence
atcttgggcagaacataccgggtgg

SEQ ID NO: 128858 - DNA, 25 bp, Probe Sequence
atctttggcagacagagaattggag

SEQ ID NO: 128859 - DNA, 25 bp, Probe Sequence
atctttggaacatcagcaccagtat

SEQ ID NO: 128860 - DNA, 25 bp, Probe Sequence
atctttggaagctgaatactgaatt

SEQ ID NO: 128861 - DNA, 25 bp, Probe Sequence
atctttggaagctgaatactgaatt

SEQ ID NO: 128862 - DNA, 25 bp, Probe Sequence
atcttcatggaattcacaaagtaat

SEQ ID NO: 128863 - DNA, 25 bp, Probe Sequence
atctatcattggcaacaaacatcat

SEQ ID NO: 128864 - DNA, 25 bp, Probe Sequence
atcatctttggcagacagagaattg

SEQ ID NO: 128865 - DNA, 25 bp, Probe Sequence
atcatcaatgtgtccaacaggtact

SEQ ID NO: 128866 - DNA, 25 bp, Probe Sequence
atcatctcacttgctaacatgtttt

SEQ ID NO: 128867 - DNA, 25 bp, Probe Sequence
atcatctaggtccacccatgttgta

SEQ ID NO: 128868 - DNA, 25 bp, Probe Sequence
atcatcttggtactactagatgtct

SEQ ID NO: 128869 - DNA, 25 bp, Probe Sequence
atctcttgtacaaacgatgtgcttt

SEQ ID NO: 128870 - DNA, 25 bp, Probe Sequence
atctcatttagttgagtagctcttg

SEQ ID NO: 128871 - DNA, 25 bp, Probe Sequence
atctgcctacggtgtcagtgttgga

SEQ ID NO: 128872 - DNA, 25 bp, Probe Sequence
atcggataggagtgtcaggcctctg

SEQ ID NO: 128873 - DNA, 25 bp, Probe Sequence
atgcgtgaaggttcttcaggttctt

SEQ ID NO: 128874 - DNA, 25 bp, Probe Sequence
atggaaagggtcgactggttgcagt

SEQ ID NO: 128875 - DNA, 25 bp, Probe Sequence
atgcgtagggggtcataaggataga

SEQ ID NO: 128876 - DNA, 25 bp, Probe Sequence
atcggttggtgccactgaatggcta

SEQ ID NO: 128877 - DNA, 25 bp, Probe Sequence
atcggagtagtgctcagcatttgga

SEQ ID NO: 128878 - DNA, 25 bp, Probe Sequence
atcggcgtggatctcaacaggaact

SEQ ID NO: 128879 - DNA, 25 bp, Probe Sequence
atcttcagagagtgtgaccaggacc

SEQ ID NO: 128880 - DNA, 25 bp, Probe Sequence
atcttcagattttgtcacaaggaaa

SEQ ID NO: 128881 - DNA, 25 bp, Probe Sequence
atcatgtcagtctgcttagaaataa

SEQ ID NO: 128882 - DNA, 25 bp, Probe Sequence
atcatcctgccagccgagaacaaga

SEQ ID NO: 128883 - DNA, 25 bp, Probe Sequence
atcatgtctgttagggaaagcagga

SEQ ID NO: 128884 - DNA, 25 bp, Probe Sequence
atctatgtgatcttgcggaaacgcg

SEQ ID NO: 128885 - DNA, 25 bp, Probe Sequence
atctattgcctaagagcacaacggg

SEQ ID NO: 128886 - DNA, 25 bp, Probe Sequence
atcattctttctagacacacacaca

SEQ ID NO: 128887 - DNA, 25 bp, Probe Sequence
atcattctttctagacacacacaca

SEQ ID NO: 128888 - DNA, 25 bp, Probe Sequence
atcatgtattttctactcaataaaa

SEQ ID NO: 128889 - DNA, 25 bp, Probe Sequence
atcttgctttgtgtatctcatttaa

SEQ ID NO: 128890 - DNA, 25 bp, Probe Sequence
atcttgcctacttttctttattagc

SEQ ID NO: 128891 - DNA, 25 bp, Probe Sequence
atcttccactattttcaatgtatta

SEQ ID NO: 128892 - DNA, 25 bp, Probe Sequence
atcattactctttttctcagtaaat

SEQ ID NO: 128893 - DNA, 25 bp, Probe Sequence
atcattccttctcttccagagaaca

SEQ ID NO: 128894 - DNA, 25 bp, Probe Sequence
atcttggtttgccttccagaaaaca

SEQ ID NO: 128895 - DNA, 25 bp, Probe Sequence
atcttgcgttgtatgttgaaaatca

SEQ ID NO: 128896 - DNA, 25 bp, Probe Sequence
atcttccctgtgataataacaagca

SEQ ID NO: 128897 - DNA, 25 bp, Probe Sequence
atcttacacgtctactctaaactgc

SEQ ID NO: 128898 - DNA, 25 bp, Probe Sequence
atcatatactcgagacttaccgcat

SEQ ID NO: 128899 - DNA, 25 bp, Probe Sequence
atcttactcatgttactattcacca

SEQ ID NO: 128900 - DNA, 25 bp, Probe Sequence
atcttacattagtgattccatcaaa

SEQ ID NO: 128901 - DNA, 25 bp, Probe Sequence
atcttcaaatcaatggatatcttaa

SEQ ID NO: 128902 - DNA, 25 bp, Probe Sequence
atcttagacagttggtgtaataaat

SEQ ID NO: 128903 - DNA, 25 bp, Probe Sequence
atcttctaagattgttctcagcata

SEQ ID NO: 128904 - DNA, 25 bp, Probe Sequence
atcatccatcaagtcttccacaata

SEQ ID NO: 128905 - DNA, 25 bp, Probe Sequence
atcatctatgacgacttatccaaac

SEQ ID NO: 128906 - DNA, 25 bp, Probe Sequence
atctgattacagacggtgacataac

SEQ ID NO: 128907 - DNA, 25 bp, Probe Sequence
atcatgttcctggtggctggcaaga

SEQ ID NO: 128908 - DNA, 25 bp, Probe Sequence
atcttctccagcggagatggccaat

SEQ ID NO: 128909 - DNA, 25 bp, Probe Sequence
atcttgctcaagtcaggaggccgga

SEQ ID NO: 128910 - DNA, 25 bp, Probe Sequence
atctttcaagaccaggccctggcag

SEQ ID NO: 128911 - DNA, 25 bp, Probe Sequence
atctatttagagcttcaccatggca

SEQ ID NO: 128912 - DNA, 25 bp, Probe Sequence
atctatattagtgtattccaatgcc

SEQ ID NO: 128913 - DNA, 25 bp, Probe Sequence
atctcaattaccatatatacaccca

SEQ ID NO: 128914 - DNA, 25 bp, Probe Sequence
atcttgttctctgatcataaacctc

SEQ ID NO: 128915 - DNA, 25 bp, Probe Sequence
atcttgacacatcctactaaattcc

SEQ ID NO: 128916 - DNA, 25 bp, Probe Sequence
atcttgctgaatccttctaaattct

SEQ ID NO: 128917 - DNA, 25 bp, Probe Sequence
atctcctttgccttaatttactgaa

SEQ ID NO: 128918 - DNA, 25 bp, Probe Sequence
atcttctttcctgcagtttagttaa

SEQ ID NO: 128919 - DNA, 25 bp, Probe Sequence
atctccttttgtgagtttggtgggg

SEQ ID NO: 128920 - DNA, 25 bp, Probe Sequence
atctctcttttttaagtatggaggg

SEQ ID NO: 128921 - DNA, 25 bp, Probe Sequence
atcttctttttctcaggaggtttct

SEQ ID NO: 128922 - DNA, 25 bp, Probe Sequence
atcttttgtctttccgtggagctgt

SEQ ID NO: 128923 - DNA, 25 bp, Probe Sequence
atcattgggtcattcgtctgtggaa

SEQ ID NO: 128924 - DNA, 25 bp, Probe Sequence
atcatttggtgcttagtctttgtaa

SEQ ID NO: 128925 - DNA, 25 bp, Probe Sequence
atctttgtgtgcttgcatccaactg

SEQ ID NO: 128926 - DNA, 25 bp, Probe Sequence
atcatgttgattttgctctttgctt

SEQ ID NO: 128927 - DNA, 25 bp, Probe Sequence
atcatctatatgcttgtcttttcga

SEQ ID NO: 128928 - DNA, 25 bp, Probe Sequence
atcatctagtgttcctcatgtgttc

SEQ ID NO: 128929 - DNA, 25 bp, Probe Sequence
atcatctgtagatcctagtctatct

SEQ ID NO: 128930 - DNA, 25 bp, Probe Sequence
atcattcatggaccagtagattgtt

SEQ ID NO: 128931 - DNA, 25 bp, Probe Sequence
atcttgcagcactatcagtatgttg

SEQ ID NO: 128932 - DNA, 25 bp, Probe Sequence
atctctgtccagtcaggtgtgtgtt

SEQ ID NO: 128933 - DNA, 25 bp, Probe Sequence
atcatattcagcccatcacgctgtg

SEQ ID NO: 128934 - DNA, 25 bp, Probe Sequence
atcatcatctctgcaagactcatcg

SEQ ID NO: 128935 - DNA, 25 bp, Probe Sequence
atcatctccatccataggatatcag

SEQ ID NO: 128936 - DNA, 25 bp, Probe Sequence
atcatccgtatgtcagtgtatctgg

SEQ ID NO: 128937 - DNA, 25 bp, Probe Sequence
atcataagtatctgtgtatctgtga

SEQ ID NO: 128938 - DNA, 25 bp, Probe Sequence
atctagagtagagttgctagtcata

SEQ ID NO: 128939 - DNA, 25 bp, Probe Sequence
atctttgaatacttgctgactgcta

SEQ ID NO: 128940 - DNA, 25 bp, Probe Sequence
atctttgaatacttgctgactgcta

SEQ ID NO: 128941 - DNA, 25 bp, Probe Sequence
atcatttattccgctgcattgccaa

SEQ ID NO: 128942 - DNA, 25 bp, Probe Sequence
atcattaaatactctcttcacccaa

SEQ ID NO: 128943 - DNA, 25 bp, Probe Sequence
atctttatatactctttgcacctcc

SEQ ID NO: 128944 - DNA, 25 bp, Probe Sequence
atctttaatcactctttctctatac

SEQ ID NO: 128945 - DNA, 25 bp, Probe Sequence
atcttgtcaatactacctttctcac

SEQ ID NO: 128946 - DNA, 25 bp, Probe Sequence
atccatgtagcaactgtcctttact

SEQ ID NO: 128947 - DNA, 25 bp, Probe Sequence
atctagtacatgtctttcacttcac

SEQ ID NO: 128948 - DNA, 25 bp, Probe Sequence
atctaaacagtcgtcatccaactcc

SEQ ID NO: 128949 - DNA, 25 bp, Probe Sequence
atcatcaaggagtacatcaccaact

SEQ ID NO: 128950 - DNA, 25 bp, Probe Sequence
agtcattgggaaatgccgcccattt

SEQ ID NO: 128951 - DNA, 25 bp, Probe Sequence
atctttggtggaatgactcctgcag

SEQ ID NO: 128952 - DNA, 25 bp, Probe Sequence
atcttctggctggttgatgttctga

SEQ ID NO: 128953 - DNA, 25 bp, Probe Sequence
atctacttcatggctgggtccagca

SEQ ID NO: 128954 - DNA, 25 bp, Probe Sequence
atcttcatttgaatgtcttctagat

SEQ ID NO: 128955 - DNA, 25 bp, Probe Sequence
atcttatcttgcagcactatcagta

SEQ ID NO: 128956 - DNA, 25 bp, Probe Sequence
atcttgcacttgactgagttgggac

SEQ ID NO: 128957 - DNA, 25 bp, Probe Sequence
atcttgtccgtgaagatgtattgcc

SEQ ID NO: 128958 - DNA, 25 bp, Probe Sequence
atcttggccgtccaggttatggaga

SEQ ID NO: 128959 - DNA, 25 bp, Probe Sequence
atgatagagccgagctcgtttagtg

SEQ ID NO: 128960 - DNA, 25 bp, Probe Sequence
atctgaagggatctcgtgtttgctg

SEQ ID NO: 128961 - DNA, 25 bp, Probe Sequence
atcataacggagcccggagggcgag

SEQ ID NO: 128962 - DNA, 25 bp, Probe Sequence
atcttgccccagaccggcagcctgg

SEQ ID NO: 128963 - DNA, 25 bp, Probe Sequence
atcttctcccattgacaggagcact

SEQ ID NO: 128964 - DNA, 25 bp, Probe Sequence
atcttcccgccatctgatgagcagt

SEQ ID NO: 128965 - DNA, 25 bp, Probe Sequence
atctcccacactaacttgtgcattg

SEQ ID NO: 128966 - DNA, 25 bp, Probe Sequence
atctagcaatcacaacactggctga

SEQ ID NO: 128967 - DNA, 25 bp, Probe Sequence
atcttcaaagctgaactgaatgagt

SEQ ID NO: 128968 - DNA, 25 bp, Probe Sequence
atcttaagagatcagaatggagaga

SEQ ID NO: 128969 - DNA, 25 bp, Probe Sequence
atcttccaggctgagatgtcggagc

SEQ ID NO: 128970 - DNA, 25 bp, Probe Sequence
atctttcagctgtaaatactgtgac

SEQ ID NO: 128971 - DNA, 25 bp, Probe Sequence
atcttcccatatataactggacaga

SEQ ID NO: 128972 - DNA, 25 bp, Probe Sequence
atctctggccatatacagaccgaac

SEQ ID NO: 128973 - DNA, 25 bp, Probe Sequence
atcttgtcaataaacagcattctga

SEQ ID NO: 128974 - DNA, 25 bp, Probe Sequence
atcttgacagtattgactgcagttt

SEQ ID NO: 128975 - DNA, 25 bp, Probe Sequence
atcttgtcactcttttggttttctt

SEQ ID NO: 128976 - DNA, 25 bp, Probe Sequence
atctttccactctttagtttttgat

SEQ ID NO: 128977 - DNA, 25 bp, Probe Sequence
atctttccactgattattcttggct

SEQ ID NO: 128978 - DNA, 25 bp, Probe Sequence
atctctttagcactattttaaggtt

SEQ ID NO: 128979 - DNA, 25 bp, Probe Sequence
atcattttatccgtcttttaagtat

SEQ ID NO: 128980 - DNA, 25 bp, Probe Sequence
atcatctgtcttgcgtgctatttca

SEQ ID NO: 128981 - DNA, 25 bp, Probe Sequence
atcatctgtcattatattctaatta

SEQ ID NO: 128982 - DNA, 25 bp, Probe Sequence
atcattgccaattatcatcatattt

SEQ ID NO: 128983 - DNA, 25 bp, Probe Sequence
atctatgactagacattcactttgc

SEQ ID NO: 128984 - DNA, 25 bp, Probe Sequence
atctcagagctaacatccacacttc

SEQ ID NO: 128985 - DNA, 25 bp, Probe Sequence
atcatcgatgttgtctacaatgcat

SEQ ID NO: 128986 - DNA, 25 bp, Probe Sequence
atctctgcctgtgcttatccagata

SEQ ID NO: 128987 - DNA, 25 bp, Probe Sequence
atcttgacatcagcttcaagcagat

SEQ ID NO: 128988 - DNA, 25 bp, Probe Sequence
atcatctatctcacttcaaaatgta

SEQ ID NO: 128989 - DNA, 25 bp, Probe Sequence
atcttcacatagttctccagttgta

SEQ ID NO: 128990 - DNA, 25 bp, Probe Sequence
atccccaatgttgcgtgggctagac

SEQ ID NO: 128991 - DNA, 25 bp, Probe Sequence
atcccacatattcttgggctctcta

SEQ ID NO: 128992 - DNA, 25 bp, Probe Sequence
atcccacatgggagtgttccctagg

SEQ ID NO: 128993 - DNA, 25 bp, Probe Sequence
atccccaaaacggtatccactgcat

SEQ ID NO: 128994 - DNA, 25 bp, Probe Sequence
atccgtaaaacacctgtaactagct

SEQ ID NO: 128995 - DNA, 25 bp, Probe Sequence
atcatctgtaaaaccgggtaatagt

SEQ ID NO: 128996 - DNA, 25 bp, Probe Sequence
atccggataaacacgcctagattgt

SEQ ID NO: 128997 - DNA, 25 bp, Probe Sequence
atcggggaaacagacctagatccaa

SEQ ID NO: 128998 - DNA, 25 bp, Probe Sequence
atctggggaaaccattcctcgactc

SEQ ID NO: 128999 - DNA, 25 bp, Probe Sequence
atctggtgaataacgatttcccgtc

SEQ ID NO: 129000 - DNA, 25 bp, Probe Sequence
atctttttgaacgattctgccacag

SEQ ID NO: 129001 - DNA, 25 bp, Probe Sequence
atcttgttctgcaaggtgaccccag

SEQ ID NO: 129002 - DNA, 25 bp, Probe Sequence
atctgggtctcccaggacacatcac

SEQ ID NO: 129003 - DNA, 25 bp, Probe Sequence
atctgagcatctttccggaggctaa

SEQ ID NO: 129004 - DNA, 25 bp, Probe Sequence
atctactgcaactggggcctacata

SEQ ID NO: 129005 - DNA, 25 bp, Probe Sequence
atctacgtgactggttgcgcgtagt

SEQ ID NO: 129006 - DNA, 25 bp, Probe Sequence
atctacgggatctttccattatgtc

SEQ ID NO: 129007 - DNA, 25 bp, Probe Sequence
atcatattggcttcattttagttta

SEQ ID NO: 129008 - DNA, 25 bp, Probe Sequence
atcatttgctggttgtttatttttt

SEQ ID NO: 129009 - DNA, 25 bp, Probe Sequence
atcattggtgatttgtctctctttt

SEQ ID NO: 129010 - DNA, 25 bp, Probe Sequence
atcattggagctgtggtatttgtgg

SEQ ID NO: 129011 - DNA, 25 bp, Probe Sequence
atgcttctggccagggatcctgggt

SEQ ID NO: 129012 - DNA, 25 bp, Probe Sequence
atctgccgatccaggttactctgga

SEQ ID NO: 129013 - DNA, 25 bp, Probe Sequence
atcttagaccacagactgactttga

SEQ ID NO: 129014 - DNA, 25 bp, Probe Sequence
atcgtcagagccaacacctttgttg

SEQ ID NO: 129015 - DNA, 25 bp, Probe Sequence
atcattaagctaaactctgactttc

SEQ ID NO: 129016 - DNA, 25 bp, Probe Sequence
atcatttcattaagatctctaatct

SEQ ID NO: 129017 - DNA, 25 bp, Probe Sequence
atcatcttggtaggattgctgcata

SEQ ID NO: 129018 - DNA, 25 bp, Probe Sequence
atcttctggcttgactggatggaag

SEQ ID NO: 129019 - DNA, 25 bp, Probe Sequence
atcttcggcctgagcgagacggaac

SEQ ID NO: 129020 - DNA, 25 bp, Probe Sequence
atcttcgtgaagaccctgactggta

SEQ ID NO: 129021 - DNA, 25 bp, Probe Sequence
atcttcgtgaagaccctgactggta

SEQ ID NO: 129022 - DNA, 25 bp, Probe Sequence
atctgatctggtgtccgtgagggga

SEQ ID NO: 129023 - DNA, 25 bp, Probe Sequence
atctgatctggtgtccgtgagggga

SEQ ID NO: 129024 - DNA, 25 bp, Probe Sequence
atcttcgagatgatcctgagcatgg

SEQ ID NO: 129025 - DNA, 25 bp, Probe Sequence
atcattaggtgtgactgaatttctt

SEQ ID NO: 129026 - DNA, 25 bp, Probe Sequence
atcctaggctgacacctaactcttc

SEQ ID NO: 129027 - DNA, 25 bp, Probe Sequence
atcctgggtgacacagcaagaatct

SEQ ID NO: 129028 - DNA, 25 bp, Probe Sequence
atcccgctggtcatcggacaatttc

SEQ ID NO: 129029 - DNA, 25 bp, Probe Sequence
atcctccggtgcaggagaattttga

SEQ ID NO: 129030 - DNA, 25 bp, Probe Sequence
atcttcacgtttttgcaaactttga

SEQ ID NO: 129031 - DNA, 25 bp, Probe Sequence
atctccccatttgtcaaagttgacc

SEQ ID NO: 129032 - DNA, 25 bp, Probe Sequence
atctccccttgcactaaagtatgta

SEQ ID NO: 129033 - DNA, 25 bp, Probe Sequence
atcttttcttctgttaagtcatgta

SEQ ID NO: 129034 - DNA, 25 bp, Probe Sequence
atcattctttttgagatacgtttat

SEQ ID NO: 129035 - DNA, 25 bp, Probe Sequence
atctttttcttggtataaatgtgtt

SEQ ID NO: 129036 - DNA, 25 bp, Probe Sequence
atctcttatcttacgaaaaaatggt

SEQ ID NO: 129037 - DNA, 25 bp, Probe Sequence
atctgcttttatctaaatgcaaata

SEQ ID NO: 129038 - DNA, 25 bp, Probe Sequence
atctacatttacttaaaggaatcca

SEQ ID NO: 129039 - DNA, 25 bp, Probe Sequence
atctatttctacttggagaggagca

SEQ ID NO: 129040 - DNA, 25 bp, Probe Sequence
atcttctacttgcctgtggggaggg

SEQ ID NO: 129041 - DNA, 25 bp, Probe Sequence
atcttcttatctcatgttgcaggag

SEQ ID NO: 129042 - DNA, 25 bp, Probe Sequence
atcttctgtgtctgcatctgtagga

SEQ ID NO: 129043 - DNA, 25 bp, Probe Sequence
atcttctgtatgttgctgtgtggta

SEQ ID NO: 129044 - DNA, 25 bp, Probe Sequence
atcttcagcatgtatatctggggaa

SEQ ID NO: 129045 - DNA, 25 bp, Probe Sequence
atctatgcatagaattctgagcagc

SEQ ID NO: 129046 - DNA, 25 bp, Probe Sequence
atctcagcatatgttgcaggacacc

SEQ ID NO: 129047 - DNA, 25 bp, Probe Sequence
atctcatgcagttttggggcacctc

SEQ ID NO: 129048 - DNA, 25 bp, Probe Sequence
atcttctgtgtttatggccaatcta

SEQ ID NO: 129049 - DNA, 25 bp, Probe Sequence
atcttctggttattactctgaacat

SEQ ID NO: 129050 - DNA, 25 bp, Probe Sequence
atcttctggtcccataattctccat

SEQ ID NO: 129051 - DNA, 25 bp, Probe Sequence
atcattgtgtgtttctagttccgta

SEQ ID NO: 129052 - DNA, 25 bp, Probe Sequence
atcttgggctttctgtattctgaag

SEQ ID NO: 129053 - DNA, 25 bp, Probe Sequence
atctggggctggaaatgttaggagg

SEQ ID NO: 129054 - DNA, 25 bp, Probe Sequence
atctctgggagcatatttttgaagg

SEQ ID NO: 129055 - DNA, 25 bp, Probe Sequence
atcttgggacatatttgggcactgg

SEQ ID NO: 129056 - DNA, 25 bp, Probe Sequence
atctgggccctgattctgggcatcc

SEQ ID NO: 129057 - DNA, 25 bp, Probe Sequence
atctgggcacaccctttgcccagac

SEQ ID NO: 129058 - DNA, 25 bp, Probe Sequence
atcggcagcagaaggtcatccccgt

SEQ ID NO: 129059 - DNA, 25 bp, Probe Sequence
atcggcagcagaaggtcatccccgt

SEQ ID NO: 129060 - DNA, 25 bp, Probe Sequence
atctgaaagaagatacctccctccc

SEQ ID NO: 129061 - DNA, 25 bp, Probe Sequence
atcgagaagtacatcccgtacaccc

SEQ ID NO: 129062 - DNA, 25 bp, Probe Sequence
atcggaactaccatgcaggctactc

SEQ ID NO: 129063 - DNA, 25 bp, Probe Sequence
atgaaatactcagcttaggcatttt

SEQ ID NO: 129064 - DNA, 25 bp, Probe Sequence
atgaaatacctcaaaagtaatttag

SEQ ID NO: 129065 - DNA, 25 bp, Probe Sequence
atctctatacccaaaatggaggtta

SEQ ID NO: 129066 - DNA, 25 bp, Probe Sequence
atccttgacctcagtgaaagcagtc

SEQ ID NO: 129067 - DNA, 25 bp, Probe Sequence
atcttggacttcaggaaatgcaatt

SEQ ID NO: 129068 - DNA, 25 bp, Probe Sequence
atctggaccttcagcagaaaagtat

SEQ ID NO: 129069 - DNA, 25 bp, Probe Sequence
atcggagccatcatcgcgccaaatt

SEQ ID NO: 129070 - DNA, 25 bp, Probe Sequence
atcggagatattgcaagccagagac

SEQ ID NO: 129071 - DNA, 25 bp, Probe Sequence
atcgtagcttgtacagatcaagaga

SEQ ID NO: 129072 - DNA, 25 bp, Probe Sequence
atgcgatatacacagcagacctagc

SEQ ID NO: 129073 - DNA, 25 bp, Probe Sequence
atcgcatcaacgcgcagacctaaac

SEQ ID NO: 129074 - DNA, 25 bp, Probe Sequence
atccatattggcagaacgaaaacgc

SEQ ID NO: 129075 - DNA, 25 bp, Probe Sequence
acctgaagtcctaacggataagcag

SEQ ID NO: 129076 - DNA, 25 bp, Probe Sequence
atcttcaaccctaactagacataag

SEQ ID NO: 129077 - DNA, 25 bp, Probe Sequence
atcttgcataagctgaactaaaata

SEQ ID NO: 129078 - DNA, 25 bp, Probe Sequence
atcttgcataagctgaactaaaata

SEQ ID NO: 129079 - DNA, 25 bp, Probe Sequence
atcttcaaagcacaactctatttca

SEQ ID NO: 129080 - DNA, 25 bp, Probe Sequence
atcttctcaagaaacctattttata

SEQ ID NO: 129081 - DNA, 25 bp, Probe Sequence
atctcgttcaggggcctttttatca

SEQ ID NO: 129082 - DNA, 25 bp, Probe Sequence
atctatttagagttgccttaacatt

SEQ ID NO: 129083 - DNA, 25 bp, Probe Sequence
atctacctgaagatctttcccatct

SEQ ID NO: 129084 - DNA, 25 bp, Probe Sequence
atcttcctgaagatctctaccattt

SEQ ID NO: 129085 - DNA, 25 bp, Probe Sequence
atcttgccccagattctagatcttg

SEQ ID NO: 129086 - DNA, 25 bp, Probe Sequence
atcttcccaaaaactagctcattaa

SEQ ID NO: 129087 - DNA, 25 bp, Probe Sequence
atcttcccaaacaagctgcattatc

SEQ ID NO: 129088 - DNA, 25 bp, Probe Sequence
atctatctcatcaaacaacacaatg

SEQ ID NO: 129089 - DNA, 25 bp, Probe Sequence
atcattcaccaaccataccagagaa

SEQ ID NO: 129090 - DNA, 25 bp, Probe Sequence
atcttcagccacttctttggagaca

SEQ ID NO: 129091 - DNA, 25 bp, Probe Sequence
atcttcagccacttctttggagaca

SEQ ID NO: 129092 - DNA, 25 bp, Probe Sequence
atcttcagcaacgtcagttggtctc

SEQ ID NO: 129093 - DNA, 25 bp, Probe Sequence
atcttcaaatcccagggtgcagcct

SEQ ID NO: 129094 - DNA, 25 bp, Probe Sequence
atcttagagcatccacagtgggtgc

SEQ ID NO: 129095 - DNA, 25 bp, Probe Sequence
atctgcccaggctataatgcggtgc

SEQ ID NO: 129096 - DNA, 25 bp, Probe Sequence
atcgactcagcccaaaagcttctta

SEQ ID NO: 129097 - DNA, 25 bp, Probe Sequence
atctacatccaccaaaattgtgtgt

SEQ ID NO: 129098 - DNA, 25 bp, Probe Sequence
atctattcaatccaaacttcaagtc

SEQ ID NO: 129099 - DNA, 25 bp, Probe Sequence
atgtattaaccacacttaaacttag

SEQ ID NO: 129100 - DNA, 25 bp, Probe Sequence
atcttttgtacacactttatagtcc

SEQ ID NO: 129101 - DNA, 25 bp, Probe Sequence
atggttttacaatctattaaactgg

SEQ ID NO: 129102 - DNA, 25 bp, Probe Sequence
atcccttaacagttgtatttaacag

SEQ ID NO: 129103 - DNA, 25 bp, Probe Sequence
atcccgttacagattttctggcctt

SEQ ID NO: 129104 - DNA, 25 bp, Probe Sequence
atcgggttaccgttgtattcgcatc

SEQ ID NO: 129105 - DNA, 25 bp, Probe Sequence
atcggtgtgtaaggtggcctattcc

SEQ ID NO: 129106 - DNA, 25 bp, Probe Sequence
atcggatgagaatgtgggaaatacc

SEQ ID NO: 129107 - DNA, 25 bp, Probe Sequence
atcggaagcacatcatgggccagaa

SEQ ID NO: 129108 - DNA, 25 bp, Probe Sequence
atctggacagcaccttggtgccagt

SEQ ID NO: 129109 - DNA, 25 bp, Probe Sequence
atctgtgcagaacatgatgcgtcga

SEQ ID NO: 129110 - DNA, 25 bp, Probe Sequence
atctatgggagcaaggagctgcgca

SEQ ID NO: 129111 - DNA, 25 bp, Probe Sequence
atgcttgaggtgaaggacgccccat

SEQ ID NO: 129112 - DNA, 25 bp, Probe Sequence
agtgcgggtatagacacccccaaat

SEQ ID NO: 129113 - DNA, 25 bp, Probe Sequence
atgtgccggtaaaaatgtccctcac

SEQ ID NO: 129114 - DNA, 25 bp, Probe Sequence
atgaccgttggaaacatcccttctt

SEQ ID NO: 129115 - DNA, 25 bp, Probe Sequence
atcccacttgaaataacccttgcta

SEQ ID NO: 129116 - DNA, 25 bp, Probe Sequence
atcccaccaaaaataagcactccta

SEQ ID NO: 129117 - DNA, 25 bp, Probe Sequence
atccctcgataatgtgggccaccta

SEQ ID NO: 129118 - DNA, 25 bp, Probe Sequence
atctgttggaaatgttggccagctt

SEQ ID NO: 129119 - DNA, 25 bp, Probe Sequence
atctggggcatttacttcgccattc

SEQ ID NO: 129120 - DNA, 25 bp, Probe Sequence
atctagaggtctagcacttcctagt

SEQ ID NO: 129121 - DNA, 25 bp, Probe Sequence
atctagaaaggtcgttcccagcaga

SEQ ID NO: 129122 - DNA, 25 bp, Probe Sequence
atcttcaaacatgccattaccagca

SEQ ID NO: 129123 - DNA, 25 bp, Probe Sequence
atcttcacaatcacacatctgacaa

SEQ ID NO: 129124 - DNA, 25 bp, Probe Sequence
atctcatcaaacaacacaatgaaga

SEQ ID NO: 129125 - DNA, 25 bp, Probe Sequence
atctctacaaattactatgcgagtc

SEQ ID NO: 129126 - DNA, 25 bp, Probe Sequence
atctctccaccttccaaagagtgct

SEQ ID NO: 129127 - DNA, 25 bp, Probe Sequence
atccctagtgtataaaatgctcatc

SEQ ID NO: 129128 - DNA, 25 bp, Probe Sequence
atctttagttttatgaagtcatcgt

SEQ ID NO: 129129 - DNA, 25 bp, Probe Sequence
atcttctagcatttttttactacct

SEQ ID NO: 129130 - DNA, 25 bp, Probe Sequence
atcttatcccattatttctttacct

SEQ ID NO: 129131 - DNA, 25 bp, Probe Sequence
atcttttacctatttcttacaattg

SEQ ID NO: 129132 - DNA, 25 bp, Probe Sequence
atcggttaattatgttattcaagtc

SEQ ID NO: 129133 - DNA, 25 bp, Probe Sequence
atctgttctacacacgtgtattagt

SEQ ID NO: 129134 - DNA, 25 bp, Probe Sequence
atcttgttgacgcatgagctgttta

SEQ ID NO: 129135 - DNA, 25 bp, Probe Sequence
atctctgtggacttacagtctttaa

SEQ ID NO: 129136 - DNA, 25 bp, Probe Sequence
atctttagccaccctgagtttgaag

SEQ ID NO: 129137 - DNA, 25 bp, Probe Sequence
atcttataaaggctagtgtctagag

SEQ ID NO: 129138 - DNA, 25 bp, Probe Sequence
atctgttcaaagtcgtagggcttat

SEQ ID NO: 129139 - DNA, 25 bp, Probe Sequence
atcttaccaaggagaggtgctttgc

SEQ ID NO: 129140 - DNA, 25 bp, Probe Sequence
atcttccagcaggttagaggccttt

SEQ ID NO: 129141 - DNA, 25 bp, Probe Sequence
atcttggagcgtatggaggacttta

SEQ ID NO: 129142 - DNA, 25 bp, Probe Sequence
atctttgtggttcatgaggactttg

SEQ ID NO: 129143 - DNA, 25 bp, Probe Sequence
atcttttggtctggtgcagtgaata

SEQ ID NO: 129144 - DNA, 25 bp, Probe Sequence
atcttgccgtgctctgtattgagta

SEQ ID NO: 129145 - DNA, 25 bp, Probe Sequence
atcgttcagtcgtcgtattagtcat

SEQ ID NO: 129146 - DNA, 25 bp, Probe Sequence
atcgttcaatggttatactactaga

SEQ ID NO: 129147 - DNA, 25 bp, Probe Sequence
atctgtactcaccctgtacgacaaa

SEQ ID NO: 129148 - DNA, 25 bp, Probe Sequence
atcttactcctgttgatgcagctaa

SEQ ID NO: 129149 - DNA, 25 bp, Probe Sequence
atcttcatccttcctgatgagggca

SEQ ID NO: 129150 - DNA, 25 bp, Probe Sequence
atctatgacctacctgtgtgttcat

SEQ ID NO: 129151 - DNA, 25 bp, Probe Sequence
atcttgcagtttattttctcattgt

SEQ ID NO: 129152 - DNA, 25 bp, Probe Sequence
atcttgcagtttattttctcattgt

SEQ ID NO: 129153 - DNA, 25 bp, Probe Sequence
atcttcttgtggagtcttctattgc

SEQ ID NO: 129154 - DNA, 25 bp, Probe Sequence
atctttgttgagagtcttcgtgact

SEQ ID NO: 129155 - DNA, 25 bp, Probe Sequence
atctttatctgagctgcttgtcagt

SEQ ID NO: 129156 - DNA, 25 bp, Probe Sequence
atcttttagtgcgtatgttctgtcc

SEQ ID NO: 129157 - DNA, 25 bp, Probe Sequence
atcgtttatgatgatagctctctgt

SEQ ID NO: 129158 - DNA, 25 bp, Probe Sequence
atcttcttgctattttgctctgttt

SEQ ID NO: 129159 - DNA, 25 bp, Probe Sequence
atgcttttggggttgctcatgactg

SEQ ID NO: 129160 - DNA, 25 bp, Probe Sequence
atcttcctgagttgaatgtccacgt

SEQ ID NO: 129161 - DNA, 25 bp, Probe Sequence
atcttcagctggtggatggtgactt

SEQ ID NO: 129162 - DNA, 25 bp, Probe Sequence
atcttcatttaaggctgagtgtggt

SEQ ID NO: 129163 - DNA, 25 bp, Probe Sequence
atcttatttatacctcagtttgcat

SEQ ID NO: 129164 - DNA, 25 bp, Probe Sequence
atctagatttcatccttttctcatc

SEQ ID NO: 129165 - DNA, 25 bp, Probe Sequence
atctcaaactgcttctttaattcat

SEQ ID NO: 129166 - DNA, 25 bp, Probe Sequence
atcttacagtgatgtgtccttctat

SEQ ID NO: 129167 - DNA, 25 bp, Probe Sequence
atcttactgaaacatagttctgacc

SEQ ID NO: 129168 - DNA, 25 bp, Probe Sequence
atcttccagttacattgtcttactc

SEQ ID NO: 129169 - DNA, 25 bp, Probe Sequence
atcttcctcatttggatttgctttc

SEQ ID NO: 129170 - DNA, 25 bp, Probe Sequence
atcttcctcatttatactattattt

SEQ ID NO: 129171 - DNA, 25 bp, Probe Sequence
atcttgcctcagatatactcatgca

SEQ ID NO: 129172 - DNA, 25 bp, Probe Sequence
atctatcctcatggatcaactgata

SEQ ID NO: 129173 - DNA, 25 bp, Probe Sequence
atcttcctgatggatatgagaatga

SEQ ID NO: 129174 - DNA, 25 bp, Probe Sequence
atctgtacatcaccatcatcaaaga

SEQ ID NO: 129175 - DNA, 25 bp, Probe Sequence
atcttactcagaatcactacacatt

SEQ ID NO: 129176 - DNA, 25 bp, Probe Sequence
atctctggtcagagcctcagaattg

SEQ ID NO: 129177 - DNA, 25 bp, Probe Sequence
atctcgttatgcacctcaagaagtt

SEQ ID NO: 129178 - DNA, 25 bp, Probe Sequence
atctttctctgcgcactctgaaagt

SEQ ID NO: 129179 - DNA, 25 bp, Probe Sequence
atcttccactgttactgtgcagtca

SEQ ID NO: 129180 - DNA, 25 bp, Probe Sequence
atcttcaggatttacagtgcattct

SEQ ID NO: 129181 - DNA, 25 bp, Probe Sequence
atcttctgtgatgacaaatctctgt

SEQ ID NO: 129182 - DNA, 25 bp, Probe Sequence
atcttcagctcatattaatctctct

SEQ ID NO: 129183 - DNA, 25 bp, Probe Sequence
atctctcagcaatattcagcatacc

SEQ ID NO: 129184 - DNA, 25 bp, Probe Sequence
atctcatatgaagtcaccctagcca

SEQ ID NO: 129185 - DNA, 25 bp, Probe Sequence
atctaatgatgcctcaagctgcttc

SEQ ID NO: 129186 - DNA, 25 bp, Probe Sequence
atctgagatgattctctaccctcat

SEQ ID NO: 129187 - DNA, 25 bp, Probe Sequence
atctgaaaaagctactccacatcac

SEQ ID NO: 129188 - DNA, 25 bp, Probe Sequence
atctatagataacggctctccagac

SEQ ID NO: 129189 - DNA, 25 bp, Probe Sequence
atctcacagatgtaaggactcaagt

SEQ ID NO: 129190 - DNA, 25 bp, Probe Sequence
atctgcacagatgaaggtgttcaga

SEQ ID NO: 129191 - DNA, 25 bp, Probe Sequence
atctaggcaacatagtattcatgac

SEQ ID NO: 129192 - DNA, 25 bp, Probe Sequence
atctaagctccaaagttgtctactt

SEQ ID NO: 129193 - DNA, 25 bp, Probe Sequence
atctacctcaacaagtttctaagta

SEQ ID NO: 129194 - DNA, 25 bp, Probe Sequence
atcttcctaagatgtttgatggatt

SEQ ID NO: 129195 - DNA, 25 bp, Probe Sequence
atcttcctgagcaactttctaggct

SEQ ID NO: 129196 - DNA, 25 bp, Probe Sequence
atcttttcagcaacggctcttggct

SEQ ID NO: 129197 - DNA, 25 bp, Probe Sequence
atctgggacgacaggttcatctcta

SEQ ID NO: 129198 - DNA, 25 bp, Probe Sequence
atctggaagcctacggtgttcactc

SEQ ID NO: 129199 - DNA, 25 bp, Probe Sequence
atctgaagagcgtcctgggtcaact

SEQ ID NO: 129200 - DNA, 25 bp, Probe Sequence
atctgacgcggatgcggcatgtgat

SEQ ID NO: 129201 - DNA, 25 bp, Probe Sequence
atctagctgctgaatacgctgaagt

SEQ ID NO: 129202 - DNA, 25 bp, Probe Sequence
atctcagatgcaggatccactaatt

SEQ ID NO: 129203 - DNA, 25 bp, Probe Sequence
atctgtgagagcctgtccatcaact

SEQ ID NO: 129204 - DNA, 25 bp, Probe Sequence
atctctgcaagactcatcgccaaag

SEQ ID NO: 129205 - DNA, 25 bp, Probe Sequence
atctcatgaatattcgtgcaaaaat

SEQ ID NO: 129206 - DNA, 25 bp, Probe Sequence
atctgcagaaatttgctgtcaatat

SEQ ID NO: 129207 - DNA, 25 bp, Probe Sequence
atctagacagcatctgttcaaagtc

SEQ ID NO: 129208 - DNA, 25 bp, Probe Sequence
atctggcacagaggcttgacaaact

SEQ ID NO: 129209 - DNA, 25 bp, Probe Sequence
atctgaaagcacctctgacattcct

SEQ ID NO: 129210 - DNA, 25 bp, Probe Sequence
atctgaaagcacctctgacattcct

SEQ ID NO: 129211 - DNA, 25 bp, Probe Sequence
atctgtgtgaccttgaacttcacat

SEQ ID NO: 129212 - DNA, 25 bp, Probe Sequence
atctgatggccactgtatgtataaa

SEQ ID NO: 129213 - DNA, 25 bp, Probe Sequence
atctctgggatttatgctcatgaac

SEQ ID NO: 129214 - DNA, 25 bp, Probe Sequence
atcttataattgttctcagaatccc

SEQ ID NO: 129215 - DNA, 25 bp, Probe Sequence
atctataatttaatttgccgccgca

SEQ ID NO: 129216 - DNA, 25 bp, Probe Sequence
atctgtattttatctggcgtccaga

SEQ ID NO: 129217 - DNA, 25 bp, Probe Sequence
atcttttgattcctcttgggctgaa

SEQ ID NO: 129218 - DNA, 25 bp, Probe Sequence
atcttttttagtctgaggtgacacc

SEQ ID NO: 129219 - DNA, 25 bp, Probe Sequence
atctctattagatctttaggggaca

SEQ ID NO: 129220 - DNA, 25 bp, Probe Sequence
atcttttatccagttattaatggaa

SEQ ID NO: 129221 - DNA, 25 bp, Probe Sequence
atctattgatgagggtcttaaaaaa

SEQ ID NO: 129222 - DNA, 25 bp, Probe Sequence
atctaagcacaatgcattcaaaaaa

SEQ ID NO: 129223 - DNA, 25 bp, Probe Sequence
atctcatgaaaatgcccttcaaaca

SEQ ID NO: 129224 - DNA, 25 bp, Probe Sequence
atctcaactaacgcctacattacat

SEQ ID NO: 129225 - DNA, 25 bp, Probe Sequence
atctaccattatccccaaatcttat

SEQ ID NO: 129226 - DNA, 25 bp, Probe Sequence
atctactgtattcgtccagagacct

SEQ ID NO: 129227 - DNA, 25 bp, Probe Sequence
atctactttgtctccataagcctgt

SEQ ID NO: 129228 - DNA, 25 bp, Probe Sequence
atctcacgtttctgtagaacttgtg

SEQ ID NO: 129229 - DNA, 25 bp, Probe Sequence
atctactggtcctttggaattgaag

SEQ ID NO: 129230 - DNA, 25 bp, Probe Sequence
atctacgtattattcatcgctatta

SEQ ID NO: 129231 - DNA, 25 bp, Probe Sequence
atctacgtattagtcatcgctatta

SEQ ID NO: 129232 - DNA, 25 bp, Probe Sequence
atctacgtattagtcatcgctatta

SEQ ID NO: 129233 - DNA, 25 bp, Probe Sequence
atctacatgtattcatgccatggtt

SEQ ID NO: 129234 - DNA, 25 bp, Probe Sequence
atctagttttatgcaggctgtttgt

SEQ ID NO: 129235 - DNA, 25 bp, Probe Sequence
atctaattttagaagcctggctaca

SEQ ID NO: 129236 - DNA, 25 bp, Probe Sequence
atctaaaattatacccatgactgac

SEQ ID NO: 129237 - DNA, 25 bp, Probe Sequence
atctaaatttcatccattattagcc

SEQ ID NO: 129238 - DNA, 25 bp, Probe Sequence
atctacccttactcatatgcttaca

SEQ ID NO: 129239 - DNA, 25 bp, Probe Sequence
atcttcagcctatcaggatcacagt

SEQ ID NO: 129240 - DNA, 25 bp, Probe Sequence
atcttcacgtgggctggtatcagtc

SEQ ID NO: 129241 - DNA, 25 bp, Probe Sequence
atcttatgattggctcaagtacagt

SEQ ID NO: 129242 - DNA, 25 bp, Probe Sequence
atctcctgtctggtccgagagcagg

SEQ ID NO: 129243 - DNA, 25 bp, Probe Sequence
atctttgcctcattcacagcggagg

SEQ ID NO: 129244 - DNA, 25 bp, Probe Sequence
atcttctatatcttcaggcgcgcgg

SEQ ID NO: 129245 - DNA, 25 bp, Probe Sequence
atcttattcagcttcggtgtcactg

SEQ ID NO: 129246 - DNA, 25 bp, Probe Sequence
atcgtattacagagttgtcatgcct

SEQ ID NO: 129247 - DNA, 25 bp, Probe Sequence
atcttttacatcatgtcttcagcta

SEQ ID NO: 129248 - DNA, 25 bp, Probe Sequence
atcttatttgccatcatcttgaaca

SEQ ID NO: 129249 - DNA, 25 bp, Probe Sequence
atcttactgcttgtcacttgaatcc

SEQ ID NO: 129250 - DNA, 25 bp, Probe Sequence
atcttactattatgaatttattcta

SEQ ID NO: 129251 - DNA, 25 bp, Probe Sequence
atctttgaattatgatcatttgatt

SEQ ID NO: 129252 - DNA, 25 bp, Probe Sequence
atctatctaaatttcatccattatt

SEQ ID NO: 129253 - DNA, 25 bp, Probe Sequence
atctactataaggtattctatattt

SEQ ID NO: 129254 - DNA, 25 bp, Probe Sequence
atctcctacaagaatgatgcctact

SEQ ID NO: 129255 - DNA, 25 bp, Probe Sequence
atctcactgcaattctatcagttga

SEQ ID NO: 129256 - DNA, 25 bp, Probe Sequence
atctactcacacttcacgtgtgcca

SEQ ID NO: 129257 - DNA, 25 bp, Probe Sequence
atctagtctgatgtactgtatccat

SEQ ID NO: 129258 - DNA, 25 bp, Probe Sequence
atctacactatggtctctgtttctc

SEQ ID NO: 129259 - DNA, 25 bp, Probe Sequence
atctaactgatgaaaatttctctcc

SEQ ID NO: 129260 - DNA, 25 bp, Probe Sequence
atctattgggttaatttctccctat

SEQ ID NO: 129261 - DNA, 25 bp, Probe Sequence
atctattgtgtttttcttctgccaa

SEQ ID NO: 129262 - DNA, 25 bp, Probe Sequence
atctcctggttgatcttttcactag

SEQ ID NO: 129263 - DNA, 25 bp, Probe Sequence
atctttcttttgattcttcctaaca

SEQ ID NO: 129264 - DNA, 25 bp, Probe Sequence
atctctttttatattatgccgcttt

SEQ ID NO: 129265 - DNA, 25 bp, Probe Sequence
atctaatttctgttttataccttat

SEQ ID NO: 129266 - DNA, 25 bp, Probe Sequence
atcttttctctgcttataatacctt

SEQ ID NO: 129267 - DNA, 25 bp, Probe Sequence
atctttgtcatcgggttcagctacc

SEQ ID NO: 129268 - DNA, 25 bp, Probe Sequence
atcttttcatcatgtctatagttcc

SEQ ID NO: 129269 - DNA, 25 bp, Probe Sequence
atctcttttacctaaattgtcctga

SEQ ID NO: 129270 - DNA, 25 bp, Probe Sequence
atcttttgtttttccatctgtactc

SEQ ID NO: 129271 - DNA, 25 bp, Probe Sequence
atctttgatgtcagttccaattatt

SEQ ID NO: 129272 - DNA, 25 bp, Probe Sequence
atcttttgtcaacttcctgattatg

SEQ ID NO: 129273 - DNA, 25 bp, Probe Sequence
atcttattaccaactccttgtgata

SEQ ID NO: 129274 - DNA, 25 bp, Probe Sequence
atctggagtacctgctctgtttttg

SEQ ID NO: 129275 - DNA, 25 bp, Probe Sequence
atctttgtgcaccagctgctggttt

SEQ ID NO: 129276 - DNA, 25 bp, Probe Sequence
atctttgcaggcggtcaggcctata

SEQ ID NO: 129277 - DNA, 25 bp, Probe Sequence
atctactgagagccgtcaggcctgt

SEQ ID NO: 129278 - DNA, 25 bp, Probe Sequence
atctcagtacatctataggaagtga

SEQ ID NO: 129279 - DNA, 25 bp, Probe Sequence
atctcagatctaggcttaagttggg

SEQ ID NO: 129280 - DNA, 25 bp, Probe Sequence
atcctgacaagggacaagacggtgg

SEQ ID NO: 129281 - DNA, 25 bp, Probe Sequence
atcttaaaggcagacattccatttg

SEQ ID NO: 129282 - DNA, 25 bp, Probe Sequence
atctgaaaaggaaagcattctgctc

SEQ ID NO: 129283 - DNA, 25 bp, Probe Sequence
atctgccaccggaaataccatgcac

SEQ ID NO: 129284 - DNA, 25 bp, Probe Sequence
atcgcttccctgaagaactcactca

SEQ ID NO: 129285 - DNA, 25 bp, Probe Sequence
atcgcttccctgaagaactcactca

SEQ ID NO: 129286 - DNA, 25 bp, Probe Sequence
atcttatccttttaccaaatcaata

SEQ ID NO: 129287 - DNA, 25 bp, Probe Sequence
atctatattcacctaaccataaaaa

SEQ ID NO: 129288 - DNA, 25 bp, Probe Sequence
atctttctccaatgatcctatgagg

SEQ ID NO: 129289 - DNA, 25 bp, Probe Sequence
atctcattgcaggaaaggccgaggg

SEQ ID NO: 129290 - DNA, 25 bp, Probe Sequence
atctcactcgtgcaatggccaatgt

SEQ ID NO: 129291 - DNA, 25 bp, Probe Sequence
atctgactcaagcatatcctctatt

SEQ ID NO: 129292 - DNA, 25 bp, Probe Sequence
atctgacaccaggaacctttctctt

SEQ ID NO: 129293 - DNA, 25 bp, Probe Sequence
atctgagatagggcaagtcttttct

SEQ ID NO: 129294 - DNA, 25 bp, Probe Sequence
atctgaaggggcaaattcttttgaa

SEQ ID NO: 129295 - DNA, 25 bp, Probe Sequence
atcttagcggaaattatatatttga

SEQ ID NO: 129296 - DNA, 25 bp, Probe Sequence
atctatgccgtgtatttttgcttta

SEQ ID NO: 129297 - DNA, 25 bp, Probe Sequence
atcgatgccttttagtttttccaat

SEQ ID NO: 129298 - DNA, 25 bp, Probe Sequence
atcgactgatagtgtgttctttccg

SEQ ID NO: 129299 - DNA, 25 bp, Probe Sequence
atctactgtaaagtactctgcccct

SEQ ID NO: 129300 - DNA, 25 bp, Probe Sequence
atctatttgaaagttctcagagttg

SEQ ID NO: 129301 - DNA, 25 bp, Probe Sequence
atctatttgtaaattgctactttgt

SEQ ID NO: 129302 - DNA, 25 bp, Probe Sequence
atcttattgttggtaatagtgcttt

SEQ ID NO: 129303 - DNA, 25 bp, Probe Sequence
atctcaattcttataatcatgttat

SEQ ID NO: 129304 - DNA, 25 bp, Probe Sequence
atctcaattcttataatcatgttat

SEQ ID NO: 129305 - DNA, 25 bp, Probe Sequence
atctcaagtctcaattgaactgcct

SEQ ID NO: 129306 - DNA, 25 bp, Probe Sequence
atctactgtccagctgaaagcactc

SEQ ID NO: 129307 - DNA, 25 bp, Probe Sequence
atctacctctatgtagcaccagctt

SEQ ID NO: 129308 - DNA, 25 bp, Probe Sequence
atctttctctgtttagcagtcacag

SEQ ID NO: 129309 - DNA, 25 bp, Probe Sequence
atctttcctggatcactacagtgaa

SEQ ID NO: 129310 - DNA, 25 bp, Probe Sequence
atcttattccgagcattccagtaac

SEQ ID NO: 129311 - DNA, 25 bp, Probe Sequence
atctaatcatccaaacagtccagtt

SEQ ID NO: 129312 - DNA, 25 bp, Probe Sequence
atctactattcataatgtggctggt

SEQ ID NO: 129313 - DNA, 25 bp, Probe Sequence
atctactttctcctatggatcgctt

SEQ ID NO: 129314 - DNA, 25 bp, Probe Sequence
atctagttttcagtgatcagaagca

SEQ ID NO: 129315 - DNA, 25 bp, Probe Sequence
atctagtttgaggttggacagtggt

SEQ ID NO: 129316 - DNA, 25 bp, Probe Sequence
atctggtttgactccgctggaggtg

SEQ ID NO: 129317 - DNA, 25 bp, Probe Sequence
atctgggcttaaacccataggtagt

SEQ ID NO: 129318 - DNA, 25 bp, Probe Sequence
atctccctgaactccaaggttcagt

SEQ ID NO: 129319 - DNA, 25 bp, Probe Sequence
atggacgtggagtcccacgtgtccg

SEQ ID NO: 129320 - DNA, 25 bp, Probe Sequence
atcgcagtggccattgccacggtca

SEQ ID NO: 129321 - DNA, 25 bp, Probe Sequence
atctcaggtggcatttgcaggtgac

SEQ ID NO: 129322 - DNA, 25 bp, Probe Sequence
atctcacttggccttctgaaggtcc

SEQ ID NO: 129323 - DNA, 25 bp, Probe Sequence
atctactttggttaggtagctccag

SEQ ID NO: 129324 - DNA, 25 bp, Probe Sequence
atctacgttgaatgtactaccacag

SEQ ID NO: 129325 - DNA, 25 bp, Probe Sequence
atctttttatcatgatcctacctat

SEQ ID NO: 129326 - DNA, 25 bp, Probe Sequence
atctgttgtttgggctgcctaactt

SEQ ID NO: 129327 - DNA, 25 bp, Probe Sequence
atctttctcttacctgttatttatc

SEQ ID NO: 129328 - DNA, 25 bp, Probe Sequence
atctttcatctaacacgtgcttttg

SEQ ID NO: 129329 - DNA, 25 bp, Probe Sequence
atctttcatctaacacgtgcttttg

SEQ ID NO: 129330 - DNA, 25 bp, Probe Sequence
atctttgcatccttcaatgacactt

SEQ ID NO: 129331 - DNA, 25 bp, Probe Sequence
atctgtggctcttgtgcaatgaaca

SEQ ID NO: 129332 - DNA, 25 bp, Probe Sequence
atcccactctggacaataaaaacga

SEQ ID NO: 129333 - DNA, 25 bp, Probe Sequence
atctttccggaggctaacagacctg

SEQ ID NO: 129334 - DNA, 25 bp, Probe Sequence
atctttgcctggagtgacactacac

SEQ ID NO: 129335 - DNA, 25 bp, Probe Sequence
atcccggggtggaagcactgacacc

SEQ ID NO: 129336 - DNA, 25 bp, Probe Sequence
atctctcggatctatgggaagtggt

SEQ ID NO: 129337 - DNA, 25 bp, Probe Sequence
atctgccttgctctgggaggggtaa

SEQ ID NO: 129338 - DNA, 25 bp, Probe Sequence
atctcaatctggggtcggtggttaa

SEQ ID NO: 129339 - DNA, 25 bp, Probe Sequence
atctgcagatgccgggggcggcagc

SEQ ID NO: 129340 - DNA, 25 bp, Probe Sequence
atctcagacagtgtgcggcggcaca

SEQ ID NO: 129341 - DNA, 25 bp, Probe Sequence
atctcagtgagtgatggtcagaata

SEQ ID NO: 129342 - DNA, 25 bp, Probe Sequence
atctcattgtgcttcgtatcagtca

SEQ ID NO: 129343 - DNA, 25 bp, Probe Sequence
atctctgtggcttcactcatgaaat

SEQ ID NO: 129344 - DNA, 25 bp, Probe Sequence
atctcatgcgtcatccctgaaataa

SEQ ID NO: 129345 - DNA, 25 bp, Probe Sequence
atctctcgctttgttgtcaaacacc

SEQ ID NO: 129346 - DNA, 25 bp, Probe Sequence
atctatcttttcatcatgtctatag

SEQ ID NO: 129347 - DNA, 25 bp, Probe Sequence
atctcatttatgaacttacttgata

SEQ ID NO: 129348 - DNA, 25 bp, Probe Sequence
atcttttatataatgtactgtaata

SEQ ID NO: 129349 - DNA, 25 bp, Probe Sequence
atctgtttgcattttggccttaaag

SEQ ID NO: 129350 - DNA, 25 bp, Probe Sequence
ttggggttctacagtcgtaaaagag

SEQ ID NO: 129351 - DNA, 25 bp, Probe Sequence
atggggctttccagggaatgaagaa

SEQ ID NO: 129352 - DNA, 25 bp, Probe Sequence
atgggtttccttattgaaaaatcag

SEQ ID NO: 129353 - DNA, 25 bp, Probe Sequence
atgttgctttccactcgtcaaaagc

SEQ ID NO: 129354 - DNA, 25 bp, Probe Sequence
atgagttggtcctttcagcttaaag

SEQ ID NO: 129355 - DNA, 25 bp, Probe Sequence
atgcttctggggttggagcttaaag

SEQ ID NO: 129356 - DNA, 25 bp, Probe Sequence
atctcttagtagttgtggtatattt

SEQ ID NO: 129357 - DNA, 25 bp, Probe Sequence
atcccaatgaatgcgtgttatgttt

SEQ ID NO: 129358 - DNA, 25 bp, Probe Sequence
atcccactcctaggtatgtatccta

SEQ ID NO: 129359 - DNA, 25 bp, Probe Sequence
atcctagtccttttcattacctgat

SEQ ID NO: 129360 - DNA, 25 bp, Probe Sequence
atctcattgttatttacttgactta

SEQ ID NO: 129361 - DNA, 25 bp, Probe Sequence
atctcatcgacctggacttgtgtaa

SEQ ID NO: 129362 - DNA, 25 bp, Probe Sequence
atctattatgcccgacatcttttaa

SEQ ID NO: 129363 - DNA, 25 bp, Probe Sequence
atctatcttccaatacactgtttaa

SEQ ID NO: 129364 - DNA, 25 bp, Probe Sequence
atctatctactcattttgctttcaa

SEQ ID NO: 129365 - DNA, 25 bp, Probe Sequence
atctttcccatcagttgtatgcata

SEQ ID NO: 129366 - DNA, 25 bp, Probe Sequence
atctatttctctagggatatggaag

SEQ ID NO: 129367 - DNA, 25 bp, Probe Sequence
atctacatccttacctgcattggaa

SEQ ID NO: 129368 - DNA, 25 bp, Probe Sequence
atctacatcccacttcctgatgaga

SEQ ID NO: 129369 - DNA, 25 bp, Probe Sequence
atctgaaacctcatcttggagaaat

SEQ ID NO: 129370 - DNA, 25 bp, Probe Sequence
atctaccaagccagtggaggaagca

SEQ ID NO: 129371 - DNA, 25 bp, Probe Sequence
atctacccagccccaatagtgaata

SEQ ID NO: 129372 - DNA, 25 bp, Probe Sequence
atccagccctgagacatgtaggaaa

SEQ ID NO: 129373 - DNA, 25 bp, Probe Sequence
atcccccgattgtcaatggcaggaa

SEQ ID NO: 129374 - DNA, 25 bp, Probe Sequence
atctcccgctgatgagcgaggcggg

SEQ ID NO: 129375 - DNA, 25 bp, Probe Sequence
atctctcctatctgagaaatccagg

SEQ ID NO: 129376 - DNA, 25 bp, Probe Sequence
atctctcctgcttggtgatttcagc

SEQ ID NO: 129377 - DNA, 25 bp, Probe Sequence
atctgtcctgtgtggaatccagtga

SEQ ID NO: 129378 - DNA, 25 bp, Probe Sequence
atctgtcctgtgtggaatccagtga

SEQ ID NO: 129379 - DNA, 25 bp, Probe Sequence
atctccaattttcagcagctcaaga

SEQ ID NO: 129380 - DNA, 25 bp, Probe Sequence
atctccacgtccctagcataaaaaa

SEQ ID NO: 129381 - DNA, 25 bp, Probe Sequence
atctccaacccttctgataacaagg

SEQ ID NO: 129382 - DNA, 25 bp, Probe Sequence
atctcccaccctgtgtatcataggg

SEQ ID NO: 129383 - DNA, 25 bp, Probe Sequence
atctcccaccaaaatctttgaggtt

SEQ ID NO: 129384 - DNA, 25 bp, Probe Sequence
atctctgacaccaatcagatcttcg

SEQ ID NO: 129385 - DNA, 25 bp, Probe Sequence
atctctgaagctggattgatacggg

SEQ ID NO: 129386 - DNA, 25 bp, Probe Sequence
atctgtaccggatgctggcagggag

SEQ ID NO: 129387 - DNA, 25 bp, Probe Sequence
atctgtagccagtcagaggaggagg

SEQ ID NO: 129388 - DNA, 25 bp, Probe Sequence
atcggaccgagcaaggggaggagga

SEQ ID NO: 129389 - DNA, 25 bp, Probe Sequence
atccgcccgagtggtgggaggagag

SEQ ID NO: 129390 - DNA, 25 bp, Probe Sequence
atctcccttactggcttgtaggcag

SEQ ID NO: 129391 - DNA, 25 bp, Probe Sequence
atctacgtttctggcctgatgaagg

SEQ ID NO: 129392 - DNA, 25 bp, Probe Sequence
atctacagcttgcctggcctgaaaa

SEQ ID NO: 129393 - DNA, 25 bp, Probe Sequence
atctgaagccatccaggacgtcatc

SEQ ID NO: 129394 - DNA, 25 bp, Probe Sequence
atctgtatgagcccagagtcctatc

SEQ ID NO: 129395 - DNA, 25 bp, Probe Sequence
atctgtgctgaacggaccgctatcc

SEQ ID NO: 129396 - DNA, 25 bp, Probe Sequence
atctgtgtgcaactaactgactctg

SEQ ID NO: 129397 - DNA, 25 bp, Probe Sequence
atctcgtgagactgactgatgcact

SEQ ID NO: 129398 - DNA, 25 bp, Probe Sequence
atctcgtaatgcctcttgacttggg

SEQ ID NO: 129399 - DNA, 25 bp, Probe Sequence
atctattcaatggtcttggcattgc

SEQ ID NO: 129400 - DNA, 25 bp, Probe Sequence
atctatatgcaatttcgtgccattc

SEQ ID NO: 129401 - DNA, 25 bp, Probe Sequence
atctatgagctttgtcagtgcgcgt

SEQ ID NO: 129402 - DNA, 25 bp, Probe Sequence
atctaagccacaatggtgcgcatga

SEQ ID NO: 129403 - DNA, 25 bp, Probe Sequence
atctcactgcccaaggtctgtgatg

SEQ ID NO: 129404 - DNA, 25 bp, Probe Sequence
atctgccatcaccgagaacagtatg

SEQ ID NO: 129405 - DNA, 25 bp, Probe Sequence
atctgcgtgacaataaacattatgc

SEQ ID NO: 129406 - DNA, 25 bp, Probe Sequence
atctcttacattctagttctggtgc

SEQ ID NO: 129407 - DNA, 25 bp, Probe Sequence
atctattggttccataactctgtat

SEQ ID NO: 129408 - DNA, 25 bp, Probe Sequence
atctgtatcatgtaccaaactgact

SEQ ID NO: 129409 - DNA, 25 bp, Probe Sequence
atctgtatctatagcaacaacccag

SEQ ID NO: 129410 - DNA, 25 bp, Probe Sequence
atcgaatcaagaactcaatcccctt

SEQ ID NO: 129411 - DNA, 25 bp, Probe Sequence
atctgcaacaagaagtttcccactt

SEQ ID NO: 129412 - DNA, 25 bp, Probe Sequence
atctccaagctgaaacttccacgtt

SEQ ID NO: 129413 - DNA, 25 bp, Probe Sequence
atgtccattggatactttccttttt

SEQ ID NO: 129414 - DNA, 25 bp, Probe Sequence
agtcgatactggcacttttttttgc

SEQ ID NO: 129415 - DNA, 25 bp, Probe Sequence
agttatggccggatttgctttttca

SEQ ID NO: 129416 - DNA, 25 bp, Probe Sequence
atgcttaaccggagatacctgtccc

SEQ ID NO: 129417 - DNA, 25 bp, Probe Sequence
atgcttaaacccaagatcctctaac

SEQ ID NO: 129418 - DNA, 25 bp, Probe Sequence
atctctaacagctcaggatctctta

SEQ ID NO: 129419 - DNA, 25 bp, Probe Sequence
atctctgacatggcttggctgactt

SEQ ID NO: 129420 - DNA, 25 bp, Probe Sequence
atctcgaatgtcaagccaaatatga

SEQ ID NO: 129421 - DNA, 25 bp, Probe Sequence
atctgagcgagattaccaagtataa

SEQ ID NO: 129422 - DNA, 25 bp, Probe Sequence
atctacaagattgacagcatttact

SEQ ID NO: 129423 - DNA, 25 bp, Probe Sequence
atctagccatgcttaaacatttttc

SEQ ID NO: 129424 - DNA, 25 bp, Probe Sequence
atctaattgcaataacatcttaaca

SEQ ID NO: 129425 - DNA, 25 bp, Probe Sequence
atctcaagggaatacacatacaaac

SEQ ID NO: 129426 - DNA, 25 bp, Probe Sequence
atctcagagggtagaagccatcatt

SEQ ID NO: 129427 - DNA, 25 bp, Probe Sequence
atcgcatgcggggcgacatgcaact

SEQ ID NO: 129428 - DNA, 25 bp, Probe Sequence
atcgaggagatgccctctgaacgcc

SEQ ID NO: 129429 - DNA, 25 bp, Probe Sequence
atcgaggagatgccctctgaacgcc

SEQ ID NO: 129430 - DNA, 25 bp, Probe Sequence
atcgaggagatgccctctgaacgcc

SEQ ID NO: 129431 - DNA, 25 bp, Probe Sequence
atctgcaggtggccatccgagaggc

SEQ ID NO: 129432 - DNA, 25 bp, Probe Sequence
atctgcagagcatagctccaaaagt

SEQ ID NO: 129433 - DNA, 25 bp, Probe Sequence
atctcacagaagtccactaaagttc

SEQ ID NO: 129434 - DNA, 25 bp, Probe Sequence
atctgccatcaaggcccttaatgct

SEQ ID NO: 129435 - DNA, 25 bp, Probe Sequence
atctgccatcaaggcccttaatgct

SEQ ID NO: 129436 - DNA, 25 bp, Probe Sequence
atctgctaccggccatttagatgac

SEQ ID NO: 129437 - DNA, 25 bp, Probe Sequence
atcgtgcctaggttatgtggtgact

SEQ ID NO: 129438 - DNA, 25 bp, Probe Sequence
atctgtcctgtgttatagtagtttt

SEQ ID NO: 129439 - DNA, 25 bp, Probe Sequence
atctacttctcttatattgagtttt

SEQ ID NO: 129440 - DNA, 25 bp, Probe Sequence
atctactttcttcaatgtgttaacc

SEQ ID NO: 129441 - DNA, 25 bp, Probe Sequence
atccactcttgccctaaggtggaag

SEQ ID NO: 129442 - DNA, 25 bp, Probe Sequence
atctccagtaggcctaatgcttgaa

SEQ ID NO: 129443 - DNA, 25 bp, Probe Sequence
atctgctattcgggtaatcttcaca

SEQ ID NO: 129444 - DNA, 25 bp, Probe Sequence
atcgcatcatcaaaagttatcttcc

SEQ ID NO: 129445 - DNA, 25 bp, Probe Sequence
atctcacataaacatctatatccca

SEQ ID NO: 129446 - DNA, 25 bp, Probe Sequence
atctcgcaaagttattcttccacca

SEQ ID NO: 129447 - DNA, 25 bp, Probe Sequence
atctccagaagttttccatcttccc

SEQ ID NO: 129448 - DNA, 25 bp, Probe Sequence
atctgctgagtaatcttccgtttcc

SEQ ID NO: 129449 - DNA, 25 bp, Probe Sequence
atctctggccagttgtctggtttcc

SEQ ID NO: 129450 - DNA, 25 bp, Probe Sequence
atctctaatctgttttgagtcttta

SEQ ID NO: 129451 - DNA, 25 bp, Probe Sequence
atctctcactttttaagtctcattt

SEQ ID NO: 129452 - DNA, 25 bp, Probe Sequence
atcgctgccaggatatacgtaatct

SEQ ID NO: 129453 - DNA, 25 bp, Probe Sequence
atctcgccaggatgtaggctccagc

SEQ ID NO: 129454 - DNA, 25 bp, Probe Sequence
atctggccatgactggcgaagtctc

SEQ ID NO: 129455 - DNA, 25 bp, Probe Sequence
atctgtctgatactgagcagaaaca

SEQ ID NO: 129456 - DNA, 25 bp, Probe Sequence
atctgtgctgaatgtcttatatgca

SEQ ID NO: 129457 - DNA, 25 bp, Probe Sequence
atctgagtatattatcctgtacact

SEQ ID NO: 129458 - DNA, 25 bp, Probe Sequence
atctgacttcatacatccctcagtt

SEQ ID NO: 129459 - DNA, 25 bp, Probe Sequence
atcgtgctcatcgacagcacaccgt

SEQ ID NO: 129460 - DNA, 25 bp, Probe Sequence
atcgtgctcatcgacagcacaccgt

SEQ ID NO: 129461 - DNA, 25 bp, Probe Sequence
atctcattcatttcgagcaatgtgt

SEQ ID NO: 129462 - DNA, 25 bp, Probe Sequence
atctgtgctactactgtgctaggtc

SEQ ID NO: 129463 - DNA, 25 bp, Probe Sequence
atctgctcatcgtaagtgtaaggct

SEQ ID NO: 129464 - DNA, 25 bp, Probe Sequence
atctgccacagaaggctggtgggtt

SEQ ID NO: 129465 - DNA, 25 bp, Probe Sequence
atctgcccagacgagctggagaagc

SEQ ID NO: 129466 - DNA, 25 bp, Probe Sequence
atctgagcccaggagcctgagacca

SEQ ID NO: 129467 - DNA, 25 bp, Probe Sequence
atcgactcggaagtctgcagccatc

SEQ ID NO: 129468 - DNA, 25 bp, Probe Sequence
atcgagtgccgatttggagtcagtc

SEQ ID NO: 129469 - DNA, 25 bp, Probe Sequence
atccctgccgttagcgactgcgacg

SEQ ID NO: 129470 - DNA, 25 bp, Probe Sequence
atctctgccagagctatggagtgga

SEQ ID NO: 129471 - DNA, 25 bp, Probe Sequence
atctcgccatgtgaagaatggaggc

SEQ ID NO: 129472 - DNA, 25 bp, Probe Sequence
atctgtggtgactggaatgggaccc

SEQ ID NO: 129473 - DNA, 25 bp, Probe Sequence
atcggaggccgggagagcaggcccc

SEQ ID NO: 129474 - DNA, 25 bp, Probe Sequence
acccaggccaggccaacaggacggc

SEQ ID NO: 129475 - DNA, 25 bp, Probe Sequence
atcccgagaagtccagacggctgtg

SEQ ID NO: 129476 - DNA, 25 bp, Probe Sequence
atcccatgaatagcccacacaggta

SEQ ID NO: 129477 - DNA, 25 bp, Probe Sequence
atcccaataatagtcccacagggaa

SEQ ID NO: 129478 - DNA, 25 bp, Probe Sequence
aggccttttaatcctatcaggtagg

SEQ ID NO: 129479 - DNA, 25 bp, Probe Sequence
atcccttctgtagcctaaagtatgg

SEQ ID NO: 129480 - DNA, 25 bp, Probe Sequence
atcccggcagaagctatgaaaggga

SEQ ID NO: 129481 - DNA, 25 bp, Probe Sequence
atctctcggcagaaactctacaagc

SEQ ID NO: 129482 - DNA, 25 bp, Probe Sequence
atctacacacactcatctgactgag

SEQ ID NO: 129483 - DNA, 25 bp, Probe Sequence
atctacagacagtcaatgtggatga

SEQ ID NO: 129484 - DNA, 25 bp, Probe Sequence
atctgacgacgtgaaggagcagatt

SEQ ID NO: 129485 - DNA, 25 bp, Probe Sequence
atcgacatcacgagaaggagtggcc

SEQ ID NO: 129486 - DNA, 25 bp, Probe Sequence
atcgtctctcgtctaggggagacat

SEQ ID NO: 129487 - DNA, 25 bp, Probe Sequence
atcgtctggcgttgtggggatgaac

SEQ ID NO: 129488 - DNA, 25 bp, Probe Sequence
atctgcttgggatgatggaggtact

SEQ ID NO: 129489 - DNA, 25 bp, Probe Sequence
atctcttgttatgcagggagtacag

SEQ ID NO: 129490 - DNA, 25 bp, Probe Sequence
atctgtggtagaacttgggcattca

SEQ ID NO: 129491 - DNA, 25 bp, Probe Sequence
atctgatggatatggcagtggacgt

SEQ ID NO: 129492 - DNA, 25 bp, Probe Sequence
atctgagctctatggcactggttgt

SEQ ID NO: 129493 - DNA, 25 bp, Probe Sequence
atcgaggctataggacgcagctgtt

SEQ ID NO: 129494 - DNA, 25 bp, Probe Sequence
atctgggatcattggcagccacatg

SEQ ID NO: 129495 - DNA, 25 bp, Probe Sequence
atctctggtcactcattgacagggc

SEQ ID NO: 129496 - DNA, 25 bp, Probe Sequence
atcgttgtcacatcagtgactggta

SEQ ID NO: 129497 - DNA, 25 bp, Probe Sequence
atgtcgttacatcactgacggtaat

SEQ ID NO: 129498 - DNA, 25 bp, Probe Sequence
atctcagtgtaacgacatggccagt

SEQ ID NO: 129499 - DNA, 25 bp, Probe Sequence
atctcagtatgaacagaccaggcgg

SEQ ID NO: 129500 - DNA, 25 bp, Probe Sequence
atctctttgacaagcacacctggga

SEQ ID NO: 129501 - DNA, 25 bp, Probe Sequence
atctcttgctgacggtcaccaggat

SEQ ID NO: 129502 - DNA, 25 bp, Probe Sequence
atctcttctgaggatccggcaagat

SEQ ID NO: 129503 - DNA, 25 bp, Probe Sequence
atctaatgtgatgcccggaatatct

SEQ ID NO: 129504 - DNA, 25 bp, Probe Sequence
atctcatagatgacccccaggtatt

SEQ ID NO: 129505 - DNA, 25 bp, Probe Sequence
atctgaagaggcttctcctgtttta

SEQ ID NO: 129506 - DNA, 25 bp, Probe Sequence
atcgaaggcgattactcagtgttaa

SEQ ID NO: 129507 - DNA, 25 bp, Probe Sequence
atctaagggtattctatgtgctaat

SEQ ID NO: 129508 - DNA, 25 bp, Probe Sequence
atctaagggtattctatgtgctaat

SEQ ID NO: 129509 - DNA, 25 bp, Probe Sequence
atctaagggtattctatgtgctaat

SEQ ID NO: 129510 - DNA, 25 bp, Probe Sequence
atctaacgctttaaatggctacttt

SEQ ID NO: 129511 - DNA, 25 bp, Probe Sequence
ccgaacagcgttgaattaactttag

SEQ ID NO: 129512 - DNA, 25 bp, Probe Sequence
atgaaaagggtccagattaagattt

SEQ ID NO: 129513 - DNA, 25 bp, Probe Sequence
atgaagattcgggaaattaaggaat

SEQ ID NO: 129514 - DNA, 25 bp, Probe Sequence
atgacctccgggagaagaactggaa

SEQ ID NO: 129515 - DNA, 25 bp, Probe Sequence
atcgccgttctggtaaaaagctgga

SEQ ID NO: 129516 - DNA, 25 bp, Probe Sequence
atcgccgttctggtaaaaagctgga

SEQ ID NO: 129517 - DNA, 25 bp, Probe Sequence
atcccgtggcttagaaaaactgaat

SEQ ID NO: 129518 - DNA, 25 bp, Probe Sequence
atcccaaggtagaaaccacgcaaat

SEQ ID NO: 129519 - DNA, 25 bp, Probe Sequence
atctacaccctgttaaccaagaaat

SEQ ID NO: 129520 - DNA, 25 bp, Probe Sequence
atctcaccaccatgctagaccatga

SEQ ID NO: 129521 - DNA, 25 bp, Probe Sequence
atctcactgcttcgactaaaaggtt

SEQ ID NO: 129522 - DNA, 25 bp, Probe Sequence
atctctctctatcacagagacacgg

SEQ ID NO: 129523 - DNA, 25 bp, Probe Sequence
atccttcctaacgagtcacggagct

SEQ ID NO: 129524 - DNA, 25 bp, Probe Sequence
atcgcctcccttgatgtcaagatcc

SEQ ID NO: 129525 - DNA, 25 bp, Probe Sequence
atcccctggcttgcagaaaatccag

SEQ ID NO: 129526 - DNA, 25 bp, Probe Sequence
atctgcatttggttctagcaacaat

SEQ ID NO: 129527 - DNA, 25 bp, Probe Sequence
atctcattgtatttaagacactgtc

SEQ ID NO: 129528 - DNA, 25 bp, Probe Sequence
atctgcagtgttccaaagactttgg

SEQ ID NO: 129529 - DNA, 25 bp, Probe Sequence
atctcaggactctaaatactctaac

SEQ ID NO: 129530 - DNA, 25 bp, Probe Sequence
accggacctagcatgattgtaaggg

SEQ ID NO: 129531 - DNA, 25 bp, Probe Sequence
atctcggcacctagtaatggtaaat

SEQ ID NO: 129532 - DNA, 25 bp, Probe Sequence
atctcaggtcctctagaggggaaat

SEQ ID NO: 129533 - DNA, 25 bp, Probe Sequence
atcctggccgccttagcggtagtaa

SEQ ID NO: 129534 - DNA, 25 bp, Probe Sequence
atccccctcagcttaggggaatgca

SEQ ID NO: 129535 - DNA, 25 bp, Probe Sequence
atctgtgtcctactacaggaaaata

SEQ ID NO: 129536 - DNA, 25 bp, Probe Sequence
atccttcttgatggacgaaaaatta

SEQ ID NO: 129537 - DNA, 25 bp, Probe Sequence
atctccagttgaaacgatatacact

SEQ ID NO: 129538 - DNA, 25 bp, Probe Sequence
atctccagttacttcgtgtctacaa

SEQ ID NO: 129539 - DNA, 25 bp, Probe Sequence
atctccagattatgcctatggtgcc

SEQ ID NO: 129540 - DNA, 25 bp, Probe Sequence
atctctagtcagttcagtaggagca

SEQ ID NO: 129541 - DNA, 25 bp, Probe Sequence
atctctatctcaattcagtggccca

SEQ ID NO: 129542 - DNA, 25 bp, Probe Sequence
atctctatctcaactttatgtgcac

SEQ ID NO: 129543 - DNA, 25 bp, Probe Sequence
atctgttgagcctttatgtggcacc

SEQ ID NO: 129544 - DNA, 25 bp, Probe Sequence
atctgattaccttgaattggataca

SEQ ID NO: 129545 - DNA, 25 bp, Probe Sequence
atctgttacctatctcggcataatt

SEQ ID NO: 129546 - DNA, 25 bp, Probe Sequence
atcgctaacgccacactgagttaat

SEQ ID NO: 129547 - DNA, 25 bp, Probe Sequence
atcgtgcaacccaatgagtagtgaa

SEQ ID NO: 129548 - DNA, 25 bp, Probe Sequence
atctcgcacatctgaaaggcactac

SEQ ID NO: 129549 - DNA, 25 bp, Probe Sequence
atctcacgtgcataatatattctac

SEQ ID NO: 129550 - DNA, 25 bp, Probe Sequence
atctcaagtagcatcaatcttatac

SEQ ID NO: 129551 - DNA, 25 bp, Probe Sequence
atctaatgtgctccataaatatata

SEQ ID NO: 129552 - DNA, 25 bp, Probe Sequence
atctgtggctgttcacagaaattca

SEQ ID NO: 129553 - DNA, 25 bp, Probe Sequence
atctgtgcaggttcccataaccagt

SEQ ID NO: 129554 - DNA, 25 bp, Probe Sequence
atctctgctgtgaagccctaacgtg

SEQ ID NO: 129555 - DNA, 25 bp, Probe Sequence
atctctttgttctttgaacatgctg

SEQ ID NO: 129556 - DNA, 25 bp, Probe Sequence
atctgttgtgtttctgagtctaggg

SEQ ID NO: 129557 - DNA, 25 bp, Probe Sequence
atctgttgtgtttctgagtctaggg

SEQ ID NO: 129558 - DNA, 25 bp, Probe Sequence
atctgttgtgtttctgagtctaggg

SEQ ID NO: 129559 - DNA, 25 bp, Probe Sequence
atcgtatgtctgattgacccgggct

SEQ ID NO: 129560 - DNA, 25 bp, Probe Sequence
atctgattttgatttcctccagagc

SEQ ID NO: 129561 - DNA, 25 bp, Probe Sequence
atctgttttgagtctttacaaaata

SEQ ID NO: 129562 - DNA, 25 bp, Probe Sequence
atctctgctttcactctttagaaat

SEQ ID NO: 129563 - DNA, 25 bp, Probe Sequence
atctctgctttcactctttagaaat

SEQ ID NO: 129564 - DNA, 25 bp, Probe Sequence
atctctgcagttcatctcatttcaa

SEQ ID NO: 129565 - DNA, 25 bp, Probe Sequence
atctctcagattacttcattgttca

SEQ ID NO: 129566 - DNA, 25 bp, Probe Sequence
atctctatttcaattttatttccaa

SEQ ID NO: 129567 - DNA, 25 bp, Probe Sequence
atctcactaataattgttcatattg

SEQ ID NO: 129568 - DNA, 25 bp, Probe Sequence
atctcactcaaatctgcagaattat

SEQ ID NO: 129569 - DNA, 25 bp, Probe Sequence
atctcagccaaacctgctgcttggt

SEQ ID NO: 129570 - DNA, 25 bp, Probe Sequence
atctgcctcaaacttatgtggttcg

SEQ ID NO: 129571 - DNA, 25 bp, Probe Sequence
atctgcacgagcacttagcttgttc

SEQ ID NO: 129572 - DNA, 25 bp, Probe Sequence
atctgaccacttggaagttgttgct

SEQ ID NO: 129573 - DNA, 25 bp, Probe Sequence
atctgccctgactgaatgtgttctg

SEQ ID NO: 129574 - DNA, 25 bp, Probe Sequence
atctcctctacagatttttgctgcc

SEQ ID NO: 129575 - DNA, 25 bp, Probe Sequence
atctcagtaaaggatctttggagcc

SEQ ID NO: 129576 - DNA, 25 bp, Probe Sequence
atccaggctaagggccggcggaaga

SEQ ID NO: 129577 - DNA, 25 bp, Probe Sequence
atccaggtgaacatccaggagtggc

SEQ ID NO: 129578 - DNA, 25 bp, Probe Sequence
atctcgttctacaatgccacggatg

SEQ ID NO: 129579 - DNA, 25 bp, Probe Sequence
atctctatttcccacagacaggaat

SEQ ID NO: 129580 - DNA, 25 bp, Probe Sequence
atccgtgttcccccaatgaaaggat

SEQ ID NO: 129581 - DNA, 25 bp, Probe Sequence
atccttattcccaacttaaagtgct

SEQ ID NO: 129582 - DNA, 25 bp, Probe Sequence
atcgcttttatagatttactcagtc

SEQ ID NO: 129583 - DNA, 25 bp, Probe Sequence
atctgttaatacgcatattcacata

SEQ ID NO: 129584 - DNA, 25 bp, Probe Sequence
atctcattaacagtcctttcaatca

SEQ ID NO: 129585 - DNA, 25 bp, Probe Sequence
atctgcgtagatgggaccttccaca

SEQ ID NO: 129586 - DNA, 25 bp, Probe Sequence
atctgcgtagatgggaccttccaca

SEQ ID NO: 129587 - DNA, 25 bp, Probe Sequence
atctcagtggatatatccctcccaa

SEQ ID NO: 129588 - DNA, 25 bp, Probe Sequence
atctcagtggatatatcctcccaaa

SEQ ID NO: 129589 - DNA, 25 bp, Probe Sequence
atctcactgtgtacaattctgaaga

SEQ ID NO: 129590 - DNA, 25 bp, Probe Sequence
atctcactggattctcatggtagga

SEQ ID NO: 129591 - DNA, 25 bp, Probe Sequence
atctgcacattgaccttggcaaaga

SEQ ID NO: 129592 - DNA, 25 bp, Probe Sequence
atctcagcattggctcttctgaaga

SEQ ID NO: 129593 - DNA, 25 bp, Probe Sequence
atgctagcagtggcactttatagcc

SEQ ID NO: 129594 - DNA, 25 bp, Probe Sequence
atctcagccttcttgtgcttaggac

SEQ ID NO: 129595 - DNA, 25 bp, Probe Sequence
atctcaccagattttttatgtactc

SEQ ID NO: 129596 - DNA, 25 bp, Probe Sequence
atctccccagagtattttgtagctg

SEQ ID NO: 129597 - DNA, 25 bp, Probe Sequence
atctccccagagtattttgtagctg

SEQ ID NO: 129598 - DNA, 25 bp, Probe Sequence
atcgccgggagtatggttcagctgc

SEQ ID NO: 129599 - DNA, 25 bp, Probe Sequence
atcccaggagggactggattgggca

SEQ ID NO: 129600 - DNA, 25 bp, Probe Sequence
atctccaggaagcacttgaccaggc

SEQ ID NO: 129601 - DNA, 25 bp, Probe Sequence
atgctccgagttaatttcctgggcc

SEQ ID NO: 129602 - DNA, 25 bp, Probe Sequence
atctggcgaggtcatttactgagtg

SEQ ID NO: 129603 - DNA, 25 bp, Probe Sequence
atctggcagagcccacgtttcatag

SEQ ID NO: 129604 - DNA, 25 bp, Probe Sequence
atctcgcaagcgctgctgtaacgac

SEQ ID NO: 129605 - DNA, 25 bp, Probe Sequence
atctctgcagggcttgtgaccaatg

SEQ ID NO: 129606 - DNA, 25 bp, Probe Sequence
atctctggagagttctgctgggcaa

SEQ ID NO: 129607 - DNA, 25 bp, Probe Sequence
atctctggagagttctggctgggca

SEQ ID NO: 129608 - DNA, 25 bp, Probe Sequence
atctgattagcatctctactgatgg

SEQ ID NO: 129609 - DNA, 25 bp, Probe Sequence
atctcattcagatttataccatgga

SEQ ID NO: 129610 - DNA, 25 bp, Probe Sequence
atctcattcaatttatccaataaga

SEQ ID NO: 129611 - DNA, 25 bp, Probe Sequence
atctctatgattttactatccaaga

SEQ ID NO: 129612 - DNA, 25 bp, Probe Sequence
atctgctttgtggtgacctgatgta

SEQ ID NO: 129613 - DNA, 25 bp, Probe Sequence
atctctcttgtctatacctgataga

SEQ ID NO: 129614 - DNA, 25 bp, Probe Sequence
atctctctctggtcatgaatatata

SEQ ID NO: 129615 - DNA, 25 bp, Probe Sequence
atctcttctatgtctagtattttac

SEQ ID NO: 129616 - DNA, 25 bp, Probe Sequence
atctcttcatacaatagtgacttct

SEQ ID NO: 129617 - DNA, 25 bp, Probe Sequence
atctctgtaatcctagttccttggg

SEQ ID NO: 129618 - DNA, 25 bp, Probe Sequence
atctctggcttcaaagtttcttggg

SEQ ID NO: 129619 - DNA, 25 bp, Probe Sequence
atctcttctcttatgtatttttgtg

SEQ ID NO: 129620 - DNA, 25 bp, Probe Sequence
atctcttgctctaaatgatatgtgt

SEQ ID NO: 129621 - DNA, 25 bp, Probe Sequence
atctgtgtgttagtgtcatcatctg

SEQ ID NO: 129622 - DNA, 25 bp, Probe Sequence
atctgctatgcttgaatgccacgcg

SEQ ID NO: 129623 - DNA, 25 bp, Probe Sequence
atctccatgctgtattgtcacaagc

SEQ ID NO: 129624 - DNA, 25 bp, Probe Sequence
atctcccatgtgtctgacaacagac

SEQ ID NO: 129625 - DNA, 25 bp, Probe Sequence
atctccacatctctgaagaagttga

SEQ ID NO: 129626 - DNA, 25 bp, Probe Sequence
atctctcctcttcaaaatatgctat

SEQ ID NO: 129627 - DNA, 25 bp, Probe Sequence
atctcccattgtcccacaaatgttt

SEQ ID NO: 129628 - DNA, 25 bp, Probe Sequence
atctctccaagtcccaatttgtact

SEQ ID NO: 129629 - DNA, 25 bp, Probe Sequence
atctcccagcaatataattttgaca

SEQ ID NO: 129630 - DNA, 25 bp, Probe Sequence
atctcctgaggcttgtggatttcta

SEQ ID NO: 129631 - DNA, 25 bp, Probe Sequence
atctctctagaaacaagtattccag

SEQ ID NO: 129632 - DNA, 25 bp, Probe Sequence
atctcccataaacgaggtactgcag

SEQ ID NO: 129633 - DNA, 25 bp, Probe Sequence
atctcttaaatcttcaggtacagct

SEQ ID NO: 129634 - DNA, 25 bp, Probe Sequence
atctcctctaagtaaggaagatgct

SEQ ID NO: 129635 - DNA, 25 bp, Probe Sequence
atctctctccagctgacagcagaaa

SEQ ID NO: 129636 - DNA, 25 bp, Probe Sequence
atctccagccagagaatggataaaa

SEQ ID NO: 129637 - DNA, 25 bp, Probe Sequence
atctcggccatgtccaaggacacca

SEQ ID NO: 129638 - DNA, 25 bp, Probe Sequence
atctgcagtgtcaaaataggaccaa

SEQ ID NO: 129639 - DNA, 25 bp, Probe Sequence
atccgtgtccgagtctgacaccatc

SEQ ID NO: 129640 - DNA, 25 bp, Probe Sequence
atctggtgtcactctctaaatgacc

SEQ ID NO: 129641 - DNA, 25 bp, Probe Sequence
atctcggcataattctcataaaaac

SEQ ID NO: 129642 - DNA, 25 bp, Probe Sequence
atctcggatacaatagaggcaaaga

SEQ ID NO: 129643 - DNA, 25 bp, Probe Sequence
atctcggatacaatagaggcaaaga

SEQ ID NO: 129644 - DNA, 25 bp, Probe Sequence
atctgggaacatcaattcttagtgc

SEQ ID NO: 129645 - DNA, 25 bp, Probe Sequence
atgcagggagtacagttcttttcat

SEQ ID NO: 129646 - DNA, 25 bp, Probe Sequence
atctctgaggttcagtatcattttt

SEQ ID NO: 129647 - DNA, 25 bp, Probe Sequence
atctcggtgttctatttatttattg

SEQ ID NO: 129648 - DNA, 25 bp, Probe Sequence
atctcgggcattgtttgcattgtgt

SEQ ID NO: 129649 - DNA, 25 bp, Probe Sequence
atctccaggcttgacttcaatggtt

SEQ ID NO: 129650 - DNA, 25 bp, Probe Sequence
atcccagtgactgattagaatggaa

SEQ ID NO: 129651 - DNA, 25 bp, Probe Sequence
atctgtggtcctgataaaattggat

SEQ ID NO: 129652 - DNA, 25 bp, Probe Sequence
atctggtatcctggcacaataattt

SEQ ID NO: 129653 - DNA, 25 bp, Probe Sequence
atctgcctaccatccaaggattatg

SEQ ID NO: 129654 - DNA, 25 bp, Probe Sequence
atctgtacctcatcaatcagatgat

SEQ ID NO: 129655 - DNA, 25 bp, Probe Sequence
atctctaacatatgatactgatgcc

SEQ ID NO: 129656 - DNA, 25 bp, Probe Sequence
atccttcacgcatatcagctgatcg

SEQ ID NO: 129657 - DNA, 25 bp, Probe Sequence
atcgcttaagcacaggagttggaat

SEQ ID NO: 129658 - DNA, 25 bp, Probe Sequence
atctcccagacaccggcgtgggaat

SEQ ID NO: 129659 - DNA, 25 bp, Probe Sequence
atctcctagaagtgcctgtggaatt

SEQ ID NO: 129660 - DNA, 25 bp, Probe Sequence
atctgccagaagctcccagggaata

SEQ ID NO: 129661 - DNA, 25 bp, Probe Sequence
atcccaaagccttcaggtggagggg

SEQ ID NO: 129662 - DNA, 25 bp, Probe Sequence
atctgccaggagactgagcggctgc

SEQ ID NO: 129663 - DNA, 25 bp, Probe Sequence
atctccagctgcaacggagactctg

SEQ ID NO: 129664 - DNA, 25 bp, Probe Sequence
atctccgagctgaggatgccttgtt

SEQ ID NO: 129665 - DNA, 25 bp, Probe Sequence
atctccgagcagagcctggtggtgt

SEQ ID NO: 129666 - DNA, 25 bp, Probe Sequence
atctccaggatgtttttgtggctgt

SEQ ID NO: 129667 - DNA, 25 bp, Probe Sequence
atctccggcagttattagaccagtt

SEQ ID NO: 129668 - DNA, 25 bp, Probe Sequence
atctccggcagttattagaccagtt

SEQ ID NO: 129669 - DNA, 25 bp, Probe Sequence
atctccggcagttattagaccagtt

SEQ ID NO: 129670 - DNA, 25 bp, Probe Sequence
atctccggcagttattagaccagtt

SEQ ID NO: 129671 - DNA, 25 bp, Probe Sequence
atctctggccaaatatttgtccttt

SEQ ID NO: 129672 - DNA, 25 bp, Probe Sequence
atctctgcgttaattaaatgccttt

SEQ ID NO: 129673 - DNA, 25 bp, Probe Sequence
atctctgctgttgtttatggacttc

SEQ ID NO: 129674 - DNA, 25 bp, Probe Sequence
atctgtgctttgtaagtaccacttc

SEQ ID NO: 129675 - DNA, 25 bp, Probe Sequence
atctgttttgtatgtatccttgtca

SEQ ID NO: 129676 - DNA, 25 bp, Probe Sequence
atctgttttcatcttgaggtggcca

SEQ ID NO: 129677 - DNA, 25 bp, Probe Sequence
atctgtgtgtgtattgtgaagtggt

SEQ ID NO: 129678 - DNA, 25 bp, Probe Sequence
atctgtgtctgtaatttgttggggg

SEQ ID NO: 129679 - DNA, 25 bp, Probe Sequence
atctggtttcagagtcttgggggct

SEQ ID NO: 129680 - DNA, 25 bp, Probe Sequence
atctggtttcagaaccgtaggatga

SEQ ID NO: 129681 - DNA, 25 bp, Probe Sequence
atctgacattatttagacttaggat

SEQ ID NO: 129682 - DNA, 25 bp, Probe Sequence
atctgacctataataagttaaagtt

SEQ ID NO: 129683 - DNA, 25 bp, Probe Sequence
atcggccttaatcctggttaccgtg

SEQ ID NO: 129684 - DNA, 25 bp, Probe Sequence
atctggcctataatgcccgtttcat

SEQ ID NO: 129685 - DNA, 25 bp, Probe Sequence
atctgcagtttactgagggcatttc

SEQ ID NO: 129686 - DNA, 25 bp, Probe Sequence
atcgactggctcctggatgacattt

SEQ ID NO: 129687 - DNA, 25 bp, Probe Sequence
atcgacacgtcatggaccatgactg

SEQ ID NO: 129688 - DNA, 25 bp, Probe Sequence
atcgcaccgtgctgtaaatgtggca

SEQ ID NO: 129689 - DNA, 25 bp, Probe Sequence
atcgcaccgtttccagaagctgcgt

SEQ ID NO: 129690 - DNA, 25 bp, Probe Sequence
atcggatggtttccgtgtctgtgta

SEQ ID NO: 129691 - DNA, 25 bp, Probe Sequence
atcgaggaccttaagtgccgtgtgc

SEQ ID NO: 129692 - DNA, 25 bp, Probe Sequence
atctgaggaacgtggctctagtgtc

SEQ ID NO: 129693 - DNA, 25 bp, Probe Sequence
atcgcaaaactcatgatgctccggc

SEQ ID NO: 129694 - DNA, 25 bp, Probe Sequence
atctgcagaaacgagctgtgcttgc

SEQ ID NO: 129695 - DNA, 25 bp, Probe Sequence
atctcgagaatggagctcttcagcc

SEQ ID NO: 129696 - DNA, 25 bp, Probe Sequence
atctcgagaatggagctcttcagcc

SEQ ID NO: 129697 - DNA, 25 bp, Probe Sequence
atcgccaagatggactcgactgcca

SEQ ID NO: 129698 - DNA, 25 bp, Probe Sequence
atcgccaagatggactcgactgcca

SEQ ID NO: 129699 - DNA, 25 bp, Probe Sequence
atcgccatgagctcactgggcgtcc

SEQ ID NO: 129700 - DNA, 25 bp, Probe Sequence
atcgccatgagctcactgggcgtcc

SEQ ID NO: 129701 - DNA, 25 bp, Probe Sequence
atctgcaatgatgttctggagctgt

SEQ ID NO: 129702 - DNA, 25 bp, Probe Sequence
atctgcaatgatgttctggagctgt

SEQ ID NO: 129703 - DNA, 25 bp, Probe Sequence
atcgcagatcccaatcaaagtgcca

SEQ ID NO: 129704 - DNA, 25 bp, Probe Sequence
atcgagctacctaagaacagctaaa

SEQ ID NO: 129705 - DNA, 25 bp, Probe Sequence
atcgtgtatccgaaaattgctaaga

SEQ ID NO: 129706 - DNA, 25 bp, Probe Sequence
atgcaggaagttcagagttctagga

SEQ ID NO: 129707 - DNA, 25 bp, Probe Sequence
atgcggactgatgttagactttgga

SEQ ID NO: 129708 - DNA, 25 bp, Probe Sequence
atgctggaattacttcagactcaat

SEQ ID NO: 129709 - DNA, 25 bp, Probe Sequence
atctgctagagtttatcaacacaga

SEQ ID NO: 129710 - DNA, 25 bp, Probe Sequence
atctggggtttgtcatcaccatatt

SEQ ID NO: 129711 - DNA, 25 bp, Probe Sequence
atctgttcacttttgctccaatatg

SEQ ID NO: 129712 - DNA, 25 bp, Probe Sequence
atccttcctgatgagggcaagctga

SEQ ID NO: 129713 - DNA, 25 bp, Probe Sequence
atcctggcctcactaagaaaggcaa

SEQ ID NO: 129714 - DNA, 25 bp, Probe Sequence
atcctggaccgatcgaatgcaccaa

SEQ ID NO: 129715 - DNA, 25 bp, Probe Sequence
atcctgggggaaggcacaccgaaag

SEQ ID NO: 129716 - DNA, 25 bp, Probe Sequence
atccgggtgttagctgaccaaaatg

SEQ ID NO: 129717 - DNA, 25 bp, Probe Sequence
atccagggagatcacccctctaatt

SEQ ID NO: 129718 - DNA, 25 bp, Probe Sequence
atcggtgtcattcacctttcgtgtt

SEQ ID NO: 129719 - DNA, 25 bp, Probe Sequence
atcggtgtcattcacctttcgtgtt

SEQ ID NO: 129720 - DNA, 25 bp, Probe Sequence
atctgcgttttgtcacttttcgttt

SEQ ID NO: 129721 - DNA, 25 bp, Probe Sequence
atctggcattttcttatattgtttt

SEQ ID NO: 129722 - DNA, 25 bp, Probe Sequence
atctgacatttgggcttttggggtt

SEQ ID NO: 129723 - DNA, 25 bp, Probe Sequence
atctccatcctggtgtgtacaggcg

SEQ ID NO: 129724 - DNA, 25 bp, Probe Sequence
atctgtccctgttcattacatgtca

SEQ ID NO: 129725 - DNA, 25 bp, Probe Sequence
atctgatgccttcatctgttcagtc

SEQ ID NO: 129726 - DNA, 25 bp, Probe Sequence
atctgatgccttgtaatgccatgta

SEQ ID NO: 129727 - DNA, 25 bp, Probe Sequence
atctgtgctcgcaaatgaagccgga

SEQ ID NO: 129728 - DNA, 25 bp, Probe Sequence
atcgtctctgagtatatagggctga

SEQ ID NO: 129729 - DNA, 25 bp, Probe Sequence
atctgatcagcattaatttggggaa

SEQ ID NO: 129730 - DNA, 25 bp, Probe Sequence
atctgccagaatctagtgggatgga

SEQ ID NO: 129731 - DNA, 25 bp, Probe Sequence
atctgccgtgtgactggtgggatga

SEQ ID NO: 129732 - DNA, 25 bp, Probe Sequence
atctgcacgtgctgggtgtagtgga

SEQ ID NO: 129733 - DNA, 25 bp, Probe Sequence
atctgcccatcactttggctagtga

SEQ ID NO: 129734 - DNA, 25 bp, Probe Sequence
atctccctggcttatgagcaggctg

SEQ ID NO: 129735 - DNA, 25 bp, Probe Sequence
atctccttcctataggctgatgtct

SEQ ID NO: 129736 - DNA, 25 bp, Probe Sequence
atccctttcgatgaggctgttaaat

SEQ ID NO: 129737 - DNA, 25 bp, Probe Sequence
atgaccttccctgggttaatcaatt

SEQ ID NO: 129738 - DNA, 25 bp, Probe Sequence
atctcctgtctacagtttaataaat

SEQ ID NO: 129739 - DNA, 25 bp, Probe Sequence
atgcttttctaatgttttaaccttg

SEQ ID NO: 129740 - DNA, 25 bp, Probe Sequence
cccatcttaactgatttaacccctg

SEQ ID NO: 129741 - DNA, 25 bp, Probe Sequence
ccctctttacgtgattcaaacccag

SEQ ID NO: 129742 - DNA, 25 bp, Probe Sequence
cgccagttgtgcacttttacaagcc

SEQ ID NO: 129743 - DNA, 25 bp, Probe Sequence
atgccctgtgggggtttcagagacc

SEQ ID NO: 129744 - DNA, 25 bp, Probe Sequence
atccctaggctctgttccatgagcc

SEQ ID NO: 129745 - DNA, 25 bp, Probe Sequence
atcctaagggctggtctctgctgaa

SEQ ID NO: 129746 - DNA, 25 bp, Probe Sequence
atcctaactgccggtggggagaact

SEQ ID NO: 129747 - DNA, 25 bp, Probe Sequence
atcctagttgacactgaggggagcc

SEQ ID NO: 129748 - DNA, 25 bp, Probe Sequence
atcctcagtatagccggtgaaccct

SEQ ID NO: 129749 - DNA, 25 bp, Probe Sequence
atcctggttaccgtgtgtaccaaat

SEQ ID NO: 129750 - DNA, 25 bp, Probe Sequence
atcctgggtgcattctttggaccga

SEQ ID NO: 129751 - DNA, 25 bp, Probe Sequence
atcctgagcgtgattccgctgcagc

SEQ ID NO: 129752 - DNA, 25 bp, Probe Sequence
atgccatggcggattctgagcgcct

SEQ ID NO: 129753 - DNA, 25 bp, Probe Sequence
atccccagggctacatactgttttt

SEQ ID NO: 129754 - DNA, 25 bp, Probe Sequence
atcgcccagagggacgacggcgtct

SEQ ID NO: 129755 - DNA, 25 bp, Probe Sequence
atctgctctgagtggaaggccgttc

SEQ ID NO: 129756 - DNA, 25 bp, Probe Sequence
atctccaggagggcaagggcgattc

SEQ ID NO: 129757 - DNA, 25 bp, Probe Sequence
atctccaagattgatcagtggctgg

SEQ ID NO: 129758 - DNA, 25 bp, Probe Sequence
atgccaaggaccgcattcctggaat

SEQ ID NO: 129759 - DNA, 25 bp, Probe Sequence
atccaaatgagacccttcctggaga

SEQ ID NO: 129760 - DNA, 25 bp, Probe Sequence
atctgcaaataactcctccattgaa

SEQ ID NO: 129761 - DNA, 25 bp, Probe Sequence
atcccaaaatgatctccgagaagcc

SEQ ID NO: 129762 - DNA, 25 bp, Probe Sequence
atcccaacaatattcccaaggcctc

SEQ ID NO: 129763 - DNA, 25 bp, Probe Sequence
atcgaaacgtgaacccagtggctct

SEQ ID NO: 129764 - DNA, 25 bp, Probe Sequence
atgaaaagctttcccacttggctct

SEQ ID NO: 129765 - DNA, 25 bp, Probe Sequence
atgaccaagttatgaacgcttttga

SEQ ID NO: 129766 - DNA, 25 bp, Probe Sequence
atctccattttctgaaggtctgtta

SEQ ID NO: 129767 - DNA, 25 bp, Probe Sequence
atctccttgttatgaagtttgactt

SEQ ID NO: 129768 - DNA, 25 bp, Probe Sequence
atctccaagcctatcaagtttgagc

SEQ ID NO: 129769 - DNA, 25 bp, Probe Sequence
atcccggcctgtaacatatctgtaa

SEQ ID NO: 129770 - DNA, 25 bp, Probe Sequence
atcggctccctgtataataaatcaa

SEQ ID NO: 129771 - DNA, 25 bp, Probe Sequence
atctggtcacctagtttacaaattt

SEQ ID NO: 129772 - DNA, 25 bp, Probe Sequence
atctggtcaggggaaacaaaatctt

SEQ ID NO: 129773 - DNA, 25 bp, Probe Sequence
atctgctggcagaggacaatcaaaa

SEQ ID NO: 129774 - DNA, 25 bp, Probe Sequence
atctgctgccagaggggacaaagac

SEQ ID NO: 129775 - DNA, 25 bp, Probe Sequence
atctgcgtgaacggggacgacgccc

SEQ ID NO: 129776 - DNA, 25 bp, Probe Sequence
atgtaggaacactggagcgcctgcc

SEQ ID NO: 129777 - DNA, 25 bp, Probe Sequence
atgataggtcaacagagcaggcctc

SEQ ID NO: 129778 - DNA, 25 bp, Probe Sequence
atgccaggtcagaccgaggacccag

SEQ ID NO: 129779 - DNA, 25 bp, Probe Sequence
atccagttcaggacggagatcccgg

SEQ ID NO: 129780 - DNA, 25 bp, Probe Sequence
atccaggagtggaggaatccaatgg

SEQ ID NO: 129781 - DNA, 25 bp, Probe Sequence
atccagtgggtgagtgccctcagat

SEQ ID NO: 129782 - DNA, 25 bp, Probe Sequence
atccaatgggtttttccctgtacag

SEQ ID NO: 129783 - DNA, 25 bp, Probe Sequence
atccggggtgcctttaggattcagc

SEQ ID NO: 129784 - DNA, 25 bp, Probe Sequence
atcctgggcggagctaaagttgcag

SEQ ID NO: 129785 - DNA, 25 bp, Probe Sequence
atcccaccgatgttctaaagattcg

SEQ ID NO: 129786 - DNA, 25 bp, Probe Sequence
atctccacccacactatcatagatt

SEQ ID NO: 129787 - DNA, 25 bp, Probe Sequence
atccagacccacagtaagagcagct

SEQ ID NO: 129788 - DNA, 25 bp, Probe Sequence
acaaagcccatcccaggagacgggg

SEQ ID NO: 129789 - DNA, 25 bp, Probe Sequence
atcgcggcccacgacaagaggggga

SEQ ID NO: 129790 - DNA, 25 bp, Probe Sequence
atgggacccacgtggagtaggtgac

SEQ ID NO: 129791 - DNA, 25 bp, Probe Sequence
atcgcggtgcgacgaaggagtaggt

SEQ ID NO: 129792 - DNA, 25 bp, Probe Sequence
atccgtgaggagcagcgggcgatgg

SEQ ID NO: 129793 - DNA, 25 bp, Probe Sequence
atcgcgtagtagccatggtgatcgg

SEQ ID NO: 129794 - DNA, 25 bp, Probe Sequence
atctgctttgttgggagtgatggat

SEQ ID NO: 129795 - DNA, 25 bp, Probe Sequence
atcgccttttgacagctgtgctgta

SEQ ID NO: 129796 - DNA, 25 bp, Probe Sequence
atctgaactttcaaagcttgctatt

SEQ ID NO: 129797 - DNA, 25 bp, Probe Sequence
atctgtactttggtcctctgatttc

SEQ ID NO: 129798 - DNA, 25 bp, Probe Sequence
atctgtgcctttgtcagtctacaat

SEQ ID NO: 129799 - DNA, 25 bp, Probe Sequence
atctggggatgaggttgcttactaa

SEQ ID NO: 129800 - DNA, 25 bp, Probe Sequence
atctggctttgcagtttggagaaga

SEQ ID NO: 129801 - DNA, 25 bp, Probe Sequence
atctgagctgcttgtcagtttgttc

SEQ ID NO: 129802 - DNA, 25 bp, Probe Sequence
atctgcactcattgaagtcatttat

SEQ ID NO: 129803 - DNA, 25 bp, Probe Sequence
atctgcaacctgattgattatataa

SEQ ID NO: 129804 - DNA, 25 bp, Probe Sequence
atctgcaaccatgtgtgtcctataa

SEQ ID NO: 129805 - DNA, 25 bp, Probe Sequence
atgcctggccagtggatccttaatt

SEQ ID NO: 129806 - DNA, 25 bp, Probe Sequence
atccgtcaaattcttgtataacttt

SEQ ID NO: 129807 - DNA, 25 bp, Probe Sequence
atcctggcacaataattttatggtt

SEQ ID NO: 129808 - DNA, 25 bp, Probe Sequence
atccctgcctaaaattaactgcttt

SEQ ID NO: 129809 - DNA, 25 bp, Probe Sequence
atctggatgcctcattatgtcaacc

SEQ ID NO: 129810 - DNA, 25 bp, Probe Sequence
atcggtgcgctgcaggaggctagcg

SEQ ID NO: 129811 - DNA, 25 bp, Probe Sequence
atctgggctgcagcgagagattgag

SEQ ID NO: 129812 - DNA, 25 bp, Probe Sequence
atcggcagctaccagcagtgcataa

SEQ ID NO: 129813 - DNA, 25 bp, Probe Sequence
atctgtgacttcatgctctgataac

SEQ ID NO: 129814 - DNA, 25 bp, Probe Sequence
atctggccaatgagtctgctgagac

SEQ ID NO: 129815 - DNA, 25 bp, Probe Sequence
atctgggctaggcctcttagagcct

SEQ ID NO: 129816 - DNA, 25 bp, Probe Sequence
atctggttcagtccacttgaaagta

SEQ ID NO: 129817 - DNA, 25 bp, Probe Sequence
atctggtcccttgcttgaaatgcca

SEQ ID NO: 129818 - DNA, 25 bp, Probe Sequence
atctggtaccttggctggcattatg

SEQ ID NO: 129819 - DNA, 25 bp, Probe Sequence
atctgtgtacactccagctgtttga

SEQ ID NO: 129820 - DNA, 25 bp, Probe Sequence
atctgtacataattgctttgtcttg

SEQ ID NO: 129821 - DNA, 25 bp, Probe Sequence
atctgtcaatgtgatgatctgtgtt

SEQ ID NO: 129822 - DNA, 25 bp, Probe Sequence
atcgcatcagatggctattcatatg

SEQ ID NO: 129823 - DNA, 25 bp, Probe Sequence
atctgctcagactacttctcatgaa

SEQ ID NO: 129824 - DNA, 25 bp, Probe Sequence
atcccagcatccgtggcgtgatgct

SEQ ID NO: 129825 - DNA, 25 bp, Probe Sequence
atcgcaactacaggtacgagctgat

SEQ ID NO: 129826 - DNA, 25 bp, Probe Sequence
atcgcagagctgaggcacactggtg

SEQ ID NO: 129827 - DNA, 25 bp, Probe Sequence
atctgaactgcagcatggattggga

SEQ ID NO: 129828 - DNA, 25 bp, Probe Sequence
atctgacagagcgcggagctgggct

SEQ ID NO: 129829 - DNA, 25 bp, Probe Sequence
atctgcacagaagctagtctgatgg

SEQ ID NO: 129830 - DNA, 25 bp, Probe Sequence
atctgactgaggttactctggtatt

SEQ ID NO: 129831 - DNA, 25 bp, Probe Sequence
atctgagtgaacatatcttctgtat

SEQ ID NO: 129832 - DNA, 25 bp, Probe Sequence
atctgtgttacaatcgttctgtgtt

SEQ ID NO: 129833 - DNA, 25 bp, Probe Sequence
atcgtgttgaggatcattctttgtt

SEQ ID NO: 129834 - DNA, 25 bp, Probe Sequence
atctgcttgtagcaccagctattgg

SEQ ID NO: 129835 - DNA, 25 bp, Probe Sequence
atctggttgagcccaatgtaatcac

SEQ ID NO: 129836 - DNA, 25 bp, Probe Sequence
atctgcttatggcacaatttgcctc

SEQ ID NO: 129837 - DNA, 25 bp, Probe Sequence
atctgttcagtgtcactctgtaccc

SEQ ID NO: 129838 - DNA, 25 bp, Probe Sequence
atcgcattcagagatcatgctgctc

SEQ ID NO: 129839 - DNA, 25 bp, Probe Sequence
atcgagtcagagaatgcactgcctg

SEQ ID NO: 129840 - DNA, 25 bp, Probe Sequence
atcgagtagttaaccaatttgccag

SEQ ID NO: 129841 - DNA, 25 bp, Probe Sequence
atctgagttgtaatagcctacttgt

SEQ ID NO: 129842 - DNA, 25 bp, Probe Sequence
atctggcttgttacaggcgagaaat

SEQ ID NO: 129843 - DNA, 25 bp, Probe Sequence
atctgtctttccgagtgtgagcaca

SEQ ID NO: 129844 - DNA, 25 bp, Probe Sequence
atctgcacatttccgtgttacagca

SEQ ID NO: 129845 - DNA, 25 bp, Probe Sequence
atctgaaattccttttgacacctgc

SEQ ID NO: 129846 - DNA, 25 bp, Probe Sequence
atcgcaatagttttttacttctctt

SEQ ID NO: 129847 - DNA, 25 bp, Probe Sequence
atctgaatatgctttgtcaaactat

SEQ ID NO: 129848 - DNA, 25 bp, Probe Sequence
atctggaagagtttcctgacctact

SEQ ID NO: 129849 - DNA, 25 bp, Probe Sequence
atctgggacagatttcactctcact

SEQ ID NO: 129850 - DNA, 25 bp, Probe Sequence
atcgaggtatagactagcatccaca

SEQ ID NO: 129851 - DNA, 25 bp, Probe Sequence
atcgatgttgtctacaatgcatcta

SEQ ID NO: 129852 - DNA, 25 bp, Probe Sequence
atcgtgtcttctgcactcatgatat

SEQ ID NO: 129853 - DNA, 25 bp, Probe Sequence
atctgtgtttttttcaatcaccctc

SEQ ID NO: 129854 - DNA, 25 bp, Probe Sequence
atctggtttattactctcacccata

SEQ ID NO: 129855 - DNA, 25 bp, Probe Sequence
atctgtgtttcaatttctatgtcta

SEQ ID NO: 129856 - DNA, 25 bp, Probe Sequence
atctgttttctactttatgtgagca

SEQ ID NO: 129857 - DNA, 25 bp, Probe Sequence
atctgtttagtactgtattgtggaa

SEQ ID NO: 129858 - DNA, 25 bp, Probe Sequence
atctgtttccattttagtcacagaa

SEQ ID NO: 129859 - DNA, 25 bp, Probe Sequence
atctgttaactattatccaaacaaa

SEQ ID NO: 129860 - DNA, 25 bp, Probe Sequence
atcctccaaccaatacccaaaaatg

SEQ ID NO: 129861 - DNA, 25 bp, Probe Sequence
atctgtaccattataccctagaaga

SEQ ID NO: 129862 - DNA, 25 bp, Probe Sequence
atctgatacttatttacctataaaa

SEQ ID NO: 129863 - DNA, 25 bp, Probe Sequence
atcgtccttataacagcttatgaaa

SEQ ID NO: 129864 - DNA, 25 bp, Probe Sequence
atcgtccttaagaacgaccaccagg

SEQ ID NO: 129865 - DNA, 25 bp, Probe Sequence
atccccatcaagaaatctgacccgg

SEQ ID NO: 129866 - DNA, 25 bp, Probe Sequence
atccgcctaaccaatgtggccgtgg

SEQ ID NO: 129867 - DNA, 25 bp, Probe Sequence
atcccttgaacctgggtggcagagg

SEQ ID NO: 129868 - DNA, 25 bp, Probe Sequence
atcctttgaacctggaacttgaagg

SEQ ID NO: 129869 - DNA, 25 bp, Probe Sequence
atccttggaacctcatccttggaac

SEQ ID NO: 129870 - DNA, 25 bp, Probe Sequence
atcctgggtaccttcgaattgtgag

SEQ ID NO: 129871 - DNA, 25 bp, Probe Sequence
atcctgtgggactctgttgatggtg

SEQ ID NO: 129872 - DNA, 25 bp, Probe Sequence
atcctgttaagctgggcgttgtggt

SEQ ID NO: 129873 - DNA, 25 bp, Probe Sequence
atgcctttagacattccgttatgca

SEQ ID NO: 129874 - DNA, 25 bp, Probe Sequence
atccctagatactactcaagttaca

SEQ ID NO: 129875 - DNA, 25 bp, Probe Sequence
atcccaaatctctttcattgattac

SEQ ID NO: 129876 - DNA, 25 bp, Probe Sequence
atcccccatctttgtcttgaaacaa

SEQ ID NO: 129877 - DNA, 25 bp, Probe Sequence
atccccggtacatctatactaccaa

SEQ ID NO: 129878 - DNA, 25 bp, Probe Sequence
atccccaggaaatcttcagcaacgt

SEQ ID NO: 129879 - DNA, 25 bp, Probe Sequence
atcctctttgaattacttacatatc

SEQ ID NO: 129880 - DNA, 25 bp, Probe Sequence
atccctgggcagtaaatataatgtg

SEQ ID NO: 129881 - DNA, 25 bp, Probe Sequence
atcccgctcagcatcaaagttagta

SEQ ID NO: 129882 - DNA, 25 bp, Probe Sequence
atccgatgtacaacaggaggaatgt

SEQ ID NO: 129883 - DNA, 25 bp, Probe Sequence
atcgctattaccatggtgatgcggt

SEQ ID NO: 129884 - DNA, 25 bp, Probe Sequence
atcgctattaccatggtgatgcggt

SEQ ID NO: 129885 - DNA, 25 bp, Probe Sequence
atcgctattaccatggtgatgcggt

SEQ ID NO: 129886 - DNA, 25 bp, Probe Sequence
atcgctattaccatgctgattgcgg

SEQ ID NO: 129887 - DNA, 25 bp, Probe Sequence
atcgtgattcctgtccattggactg

SEQ ID NO: 129888 - DNA, 25 bp, Probe Sequence
atctgtatacctgtaatatagcctg

SEQ ID NO: 129889 - DNA, 25 bp, Probe Sequence
atctgtataagctgtaatatcattt

SEQ ID NO: 129890 - DNA, 25 bp, Probe Sequence
atctgtttagacatctgctataatt

SEQ ID NO: 129891 - DNA, 25 bp, Probe Sequence
atctgtgagtatgttttgcaaattc

SEQ ID NO: 129892 - DNA, 25 bp, Probe Sequence
atctgtcatgactgtttggcaaatg

SEQ ID NO: 129893 - DNA, 25 bp, Probe Sequence
atctgtcatgagcatttgtttaata

SEQ ID NO: 129894 - DNA, 25 bp, Probe Sequence
atctggctgtcctttttataatgca

SEQ ID NO: 129895 - DNA, 25 bp, Probe Sequence
atctggctgtcctttttataatgca

SEQ ID NO: 129896 - DNA, 25 bp, Probe Sequence
atctggcttctgcattactattaac

SEQ ID NO: 129897 - DNA, 25 bp, Probe Sequence
atctgtgcttctcataattactgaa

SEQ ID NO: 129898 - DNA, 25 bp, Probe Sequence
atcggctctggctatgatgcttact

SEQ ID NO: 129899 - DNA, 25 bp, Probe Sequence
atccttctgtcattgatcctcagtc

SEQ ID NO: 129900 - DNA, 25 bp, Probe Sequence
atcgccagcatttcgatcctcgtca

SEQ ID NO: 129901 - DNA, 25 bp, Probe Sequence
atcgactgctttcatgctgtcagta

SEQ ID NO: 129902 - DNA, 25 bp, Probe Sequence
atctggtgcttacattctgaatata

SEQ ID NO: 129903 - DNA, 25 bp, Probe Sequence
atctgaggtgataaatgttgtttca

SEQ ID NO: 129904 - DNA, 25 bp, Probe Sequence
atcgaagctatatggtatgatttat

SEQ ID NO: 129905 - DNA, 25 bp, Probe Sequence
atcgtttgcaaatgtcagtttcctc

SEQ ID NO: 129906 - DNA, 25 bp, Probe Sequence
atcgtcttcagcaaggatcagtttc

SEQ ID NO: 129907 - DNA, 25 bp, Probe Sequence
atctgatgtttgaggaagtttttat

SEQ ID NO: 129908 - DNA, 25 bp, Probe Sequence
atcgcagtgttgggtaagactttga

SEQ ID NO: 129909 - DNA, 25 bp, Probe Sequence
atgcgttttgggcagtacatacatg

SEQ ID NO: 129910 - DNA, 25 bp, Probe Sequence
atgcgtttggccagtacaatcaatg

SEQ ID NO: 129911 - DNA, 25 bp, Probe Sequence
atgcgtattccctgtccaaagcatc

SEQ ID NO: 129912 - DNA, 25 bp, Probe Sequence
atgcgggtccagtgtcaacagtatc

SEQ ID NO: 129913 - DNA, 25 bp, Probe Sequence
atgctgccgctgtgggtaatcatgt

SEQ ID NO: 129914 - DNA, 25 bp, Probe Sequence
atctgtcttgaaggcagctacactt

SEQ ID NO: 129915 - DNA, 25 bp, Probe Sequence
atctgttgaaatgctcaagacttca

SEQ ID NO: 129916 - DNA, 25 bp, Probe Sequence
atccgctgaagagctcaggaattga

SEQ ID NO: 129917 - DNA, 25 bp, Probe Sequence
atcccagccaggttcagtggcagtg

SEQ ID NO: 129918 - DNA, 25 bp, Probe Sequence
atcgcccaagcccaagaggcagagg

SEQ ID NO: 129919 - DNA, 25 bp, Probe Sequence
atcccgggccgaagcagtggatgca

SEQ ID NO: 129920 - DNA, 25 bp, Probe Sequence
atcccaggaggccaaacggtgcaac

SEQ ID NO: 129921 - DNA, 25 bp, Probe Sequence
atcccatggtggtcaaagcagtaaa

SEQ ID NO: 129922 - DNA, 25 bp, Probe Sequence
atctggcatggtggccaaagccgat

SEQ ID NO: 129923 - DNA, 25 bp, Probe Sequence
atcggtgccatggcacagacaccct

SEQ ID NO: 129924 - DNA, 25 bp, Probe Sequence
atcgcatgtggcgcaagactcggtc

SEQ ID NO: 129925 - DNA, 25 bp, Probe Sequence
atccattggccctaccttaaagaca

SEQ ID NO: 129926 - DNA, 25 bp, Probe Sequence
atccctgcgccgcgttaacaatgaa

SEQ ID NO: 129927 - DNA, 25 bp, Probe Sequence
atctggatcccagggcttgaactag

SEQ ID NO: 129928 - DNA, 25 bp, Probe Sequence
atctgattccgagggctctgattcg

SEQ ID NO: 129929 - DNA, 25 bp, Probe Sequence
atccctctagaggagcctgttctgt

SEQ ID NO: 129930 - DNA, 25 bp, Probe Sequence
atccacgctggggacgtgtatctct

SEQ ID NO: 129931 - DNA, 25 bp, Probe Sequence
atcgagcgggtgaacattgctttta

SEQ ID NO: 129932 - DNA, 25 bp, Probe Sequence
atctgggtggttagcattcaagtta

SEQ ID NO: 129933 - DNA, 25 bp, Probe Sequence
atctggcctggatttatgctataat

SEQ ID NO: 129934 - DNA, 25 bp, Probe Sequence
atctggcctggaactggtgttaagc

SEQ ID NO: 129935 - DNA, 25 bp, Probe Sequence
atcgctttggacaggtttacacaga

SEQ ID NO: 129936 - DNA, 25 bp, Probe Sequence
atccttgaggacttggtcttcccaa

SEQ ID NO: 129937 - DNA, 25 bp, Probe Sequence
atcccgggagaatgattcccctcat

SEQ ID NO: 129938 - DNA, 25 bp, Probe Sequence
acccggtatggtggtcacctttgct

SEQ ID NO: 129939 - DNA, 25 bp, Probe Sequence
atccttggaaagatgtccttttctg

SEQ ID NO: 129940 - DNA, 25 bp, Probe Sequence
atccagttaacaaccaaatctttct

SEQ ID NO: 129941 - DNA, 25 bp, Probe Sequence
atccgtcattacccaaagacttggg

SEQ ID NO: 129942 - DNA, 25 bp, Probe Sequence
atccagaggttcccaaagatcttgg

SEQ ID NO: 129943 - DNA, 25 bp, Probe Sequence
atccagagggtccccagagacatcc

SEQ ID NO: 129944 - DNA, 25 bp, Probe Sequence
atctggagggccatcttggcacagc

SEQ ID NO: 129945 - DNA, 25 bp, Probe Sequence
atccagggcccaatttgccctgcct

SEQ ID NO: 129946 - DNA, 25 bp, Probe Sequence
atccggtcagtaagaatgcccatcc

SEQ ID NO: 129947 - DNA, 25 bp, Probe Sequence
atcgtactctttggagatgcccatt

SEQ ID NO: 129948 - DNA, 25 bp, Probe Sequence
atctgtgacttctgcgacatgggat

SEQ ID NO: 129949 - DNA, 25 bp, Probe Sequence
atctggatgttctgcagatccccac

SEQ ID NO: 129950 - DNA, 25 bp, Probe Sequence
atctggatgttctgcagatccccac

SEQ ID NO: 129951 - DNA, 25 bp, Probe Sequence
atctggatttcatcaacctcctgtc

SEQ ID NO: 129952 - DNA, 25 bp, Probe Sequence
atcgcgagttcaacatgaccaactt

SEQ ID NO: 129953 - DNA, 25 bp, Probe Sequence
atctggtgatatgcaattccacact

SEQ ID NO: 129954 - DNA, 25 bp, Probe Sequence
atcgatgagactgaatccctacgga

SEQ ID NO: 129955 - DNA, 25 bp, Probe Sequence
atccaagcatcgaaacccaaggggt

SEQ ID NO: 129956 - DNA, 25 bp, Probe Sequence
atcgcctgctacaaaaacaaggtcg

SEQ ID NO: 129957 - DNA, 25 bp, Probe Sequence
atcgcctgcgacaagccacagcagg

SEQ ID NO: 129958 - DNA, 25 bp, Probe Sequence
atcgctttgaggtacaagggctgca

SEQ ID NO: 129959 - DNA, 25 bp, Probe Sequence
atcgaagtgaggtaggtgcggtatt

SEQ ID NO: 129960 - DNA, 25 bp, Probe Sequence
atcgaggctgggtaggagcagggca

SEQ ID NO: 129961 - DNA, 25 bp, Probe Sequence
atcgagcacttcctaacacagagcc

SEQ ID NO: 129962 - DNA, 25 bp, Probe Sequence
atcgatggtgttctcaacaacccgg

SEQ ID NO: 129963 - DNA, 25 bp, Probe Sequence
atcgagactgttctggctaaaccag

SEQ ID NO: 129964 - DNA, 25 bp, Probe Sequence
atccgctctttgtggaaaaactggc

SEQ ID NO: 129965 - DNA, 25 bp, Probe Sequence
atccacttctttgggaacgagacta

SEQ ID NO: 129966 - DNA, 25 bp, Probe Sequence
atccaacctccgggcagaaaactat

SEQ ID NO: 129967 - DNA, 25 bp, Probe Sequence
atccttccttcgtgtgcttgaaaat

SEQ ID NO: 129968 - DNA, 25 bp, Probe Sequence
atcctgtccttgcaggcttctgaat

SEQ ID NO: 129969 - DNA, 25 bp, Probe Sequence
atctgtgagctctgccagtgtatcc

SEQ ID NO: 129970 - DNA, 25 bp, Probe Sequence
atcgcaacatctggatcgtgaagcc

SEQ ID NO: 129971 - DNA, 25 bp, Probe Sequence
atcgagcagctcggtgggaagcagc

SEQ ID NO: 129972 - DNA, 25 bp, Probe Sequence
atccagaccggggcggacatcgccc

SEQ ID NO: 129973 - DNA, 25 bp, Probe Sequence
atcccagcagggggaggcaatccct

SEQ ID NO: 129974 - DNA, 25 bp, Probe Sequence
atcccatgaagagaggggtccttgg

SEQ ID NO: 129975 - DNA, 25 bp, Probe Sequence
atcctcattagtgaaggtggctttt

SEQ ID NO: 129976 - DNA, 25 bp, Probe Sequence
atcctcattagtgaaggtggctttt

SEQ ID NO: 129977 - DNA, 25 bp, Probe Sequence
atccttaaccctagcgatggcttgg

SEQ ID NO: 129978 - DNA, 25 bp, Probe Sequence
accttgaccctcagccaagattggt

SEQ ID NO: 129979 - DNA, 25 bp, Probe Sequence
atccctaccactgtgcgcaagaggg

SEQ ID NO: 129980 - DNA, 25 bp, Probe Sequence
atcccaatccaagatctccagaagc

SEQ ID NO: 129981 - DNA, 25 bp, Probe Sequence
atccctatcactcaagaccaagacc

SEQ ID NO: 129982 - DNA, 25 bp, Probe Sequence
atcccttcctggatgtcatcgggtt

SEQ ID NO: 129983 - DNA, 25 bp, Probe Sequence
atccctttctggatgtcaaagaatt

SEQ ID NO: 129984 - DNA, 25 bp, Probe Sequence
atcccttctgatcgtcttcgagagt

SEQ ID NO: 129985 - DNA, 25 bp, Probe Sequence
atcccttctgatcgtcttcgagagt

SEQ ID NO: 129986 - DNA, 25 bp, Probe Sequence
atcccttctgatcgtcttcgagagt

SEQ ID NO: 129987 - DNA, 25 bp, Probe Sequence
atcctttcatgactgtggcctgagt

SEQ ID NO: 129988 - DNA, 25 bp, Probe Sequence
atcgcttgaagcctgggcctggaaa

SEQ ID NO: 129989 - DNA, 25 bp, Probe Sequence
atcgctgtgaggtcgttgctcgaaa

SEQ ID NO: 129990 - DNA, 25 bp, Probe Sequence
atcgctgagctgcttgtttaaaaaa

SEQ ID NO: 129991 - DNA, 25 bp, Probe Sequence
atctgtgacttttgttctggaatac

SEQ ID NO: 129992 - DNA, 25 bp, Probe Sequence
atccttctgtaactttggtaactgc

SEQ ID NO: 129993 - DNA, 25 bp, Probe Sequence
atcctgggtggacttttgaaaagct

SEQ ID NO: 129994 - DNA, 25 bp, Probe Sequence
atcctaggtaagcttatttcagaac

SEQ ID NO: 129995 - DNA, 25 bp, Probe Sequence
atcctacgaaatcatttgtttctaa

SEQ ID NO: 129996 - DNA, 25 bp, Probe Sequence
atcccactaaatattgtaatcctaa

SEQ ID NO: 129997 - DNA, 25 bp, Probe Sequence
atccttctacttatttagatctttc

SEQ ID NO: 129998 - DNA, 25 bp, Probe Sequence
atccacctcctttaaatactctatt

SEQ ID NO: 129999 - DNA, 25 bp, Probe Sequence
atcccaatctatctaaatttcatcc

SEQ ID NO: 130000 - DNA, 25 bp, Probe Sequence
atcccaactttgaaatattccacaa

SEQ ID NO: 130001 - DNA, 25 bp, Probe Sequence
atccttacttttatttcacacagtt

SEQ ID NO: 130002 - DNA, 25 bp, Probe Sequence
atcctatagttttgccttttccagt

SEQ ID NO: 130003 - DNA, 25 bp, Probe Sequence
atcctaagatcctgcttgttgtaag

SEQ ID NO: 130004 - DNA, 25 bp, Probe Sequence
atccaaggcatccggtttgaggaca

SEQ ID NO: 130005 - DNA, 25 bp, Probe Sequence
atgccagacgctggggatgctggta

SEQ ID NO: 130006 - DNA, 25 bp, Probe Sequence
atcgagcaagctatggatctagtga

SEQ ID NO: 130007 - DNA, 25 bp, Probe Sequence
atctggagagctttggatcctgggt

SEQ ID NO: 130008 - DNA, 25 bp, Probe Sequence
atcctggagcacttgttccgggatg

SEQ ID NO: 130009 - DNA, 25 bp, Probe Sequence
atcctgctacagtctttagggagct

SEQ ID NO: 130010 - DNA, 25 bp, Probe Sequence
atccacatgcaagctaaaggtaatt

SEQ ID NO: 130011 - DNA, 25 bp, Probe Sequence
atcccatgaacattaaagagccaga

SEQ ID NO: 130012 - DNA, 25 bp, Probe Sequence
atcccagcactttgggaggccgagg

SEQ ID NO: 130013 - DNA, 25 bp, Probe Sequence
atcctagcactttggaaggctgagg

SEQ ID NO: 130014 - DNA, 25 bp, Probe Sequence
atcgctcgcaccttggaggtcgagg

SEQ ID NO: 130015 - DNA, 25 bp, Probe Sequence
atccatctagtggtgaaggccagga

SEQ ID NO: 130016 - DNA, 25 bp, Probe Sequence
atcgtcacagtgggcgagtgccggc

SEQ ID NO: 130017 - DNA, 25 bp, Probe Sequence
atcgtcacagtgggcgagtgccggc

SEQ ID NO: 130018 - DNA, 25 bp, Probe Sequence
atcccaatgtgcacgagatcacccg

SEQ ID NO: 130019 - DNA, 25 bp, Probe Sequence
atcccagaggactatgagacccatc

SEQ ID NO: 130020 - DNA, 25 bp, Probe Sequence
atcccactgtggtatagattccata

SEQ ID NO: 130021 - DNA, 25 bp, Probe Sequence
atcccagagctcctgacagttctga

SEQ ID NO: 130022 - DNA, 25 bp, Probe Sequence
atcccatactccaacatcatcagga

SEQ ID NO: 130023 - DNA, 25 bp, Probe Sequence
atcccaagcagcggtcattcaagac

SEQ ID NO: 130024 - DNA, 25 bp, Probe Sequence
atcgccaatcgagtgactgacaagc

SEQ ID NO: 130025 - DNA, 25 bp, Probe Sequence
atcgcgcccatgttgtatgacacat

SEQ ID NO: 130026 - DNA, 25 bp, Probe Sequence
atctggctcacatgtttcagtctgt

SEQ ID NO: 130027 - DNA, 25 bp, Probe Sequence
atgcctgccaaattttagatttacc

SEQ ID NO: 130028 - DNA, 25 bp, Probe Sequence
atccctgccctactgtaggttacct

SEQ ID NO: 130029 - DNA, 25 bp, Probe Sequence
aggaatgccccacaagtgttaccat

SEQ ID NO: 130030 - DNA, 25 bp, Probe Sequence
atgaacagcccctggagaactacct

SEQ ID NO: 130031 - DNA, 25 bp, Probe Sequence
atgaagagcccctttaacaaccgct

SEQ ID NO: 130032 - DNA, 25 bp, Probe Sequence
atgacgaaccagatgttaaaccttg

SEQ ID NO: 130033 - DNA, 25 bp, Probe Sequence
atgtgcgctaaacggggaaacctgt

SEQ ID NO: 130034 - DNA, 25 bp, Probe Sequence
atgtgcctcaaaagggctaacccta

SEQ ID NO: 130035 - DNA, 25 bp, Probe Sequence
atccctgaaaaccaatgacacccta

SEQ ID NO: 130036 - DNA, 25 bp, Probe Sequence
atccctggaagaactagaccctcct

SEQ ID NO: 130037 - DNA, 25 bp, Probe Sequence
atcccggacaacgtggatgcagcct

SEQ ID NO: 130038 - DNA, 25 bp, Probe Sequence
atccgctgccacaacttggtggacg

SEQ ID NO: 130039 - DNA, 25 bp, Probe Sequence
atccgactaaggagagcaggacggc

SEQ ID NO: 130040 - DNA, 25 bp, Probe Sequence
atccatactaggagcgtcagtgagg

SEQ ID NO: 130041 - DNA, 25 bp, Probe Sequence
atcccagctactcgggaggctgagg

SEQ ID NO: 130042 - DNA, 25 bp, Probe Sequence
atcccgagattgccaggagactgct

SEQ ID NO: 130043 - DNA, 25 bp, Probe Sequence
atcgcggagattgggaaccagctgt

SEQ ID NO: 130044 - DNA, 25 bp, Probe Sequence
atccattgaatcggtagtcccagtt

SEQ ID NO: 130045 - DNA, 25 bp, Probe Sequence
atccatcaagtctgtacccaatgtg

SEQ ID NO: 130046 - DNA, 25 bp, Probe Sequence
atcgatattatatgctgtaaccatg

SEQ ID NO: 130047 - DNA, 25 bp, Probe Sequence
atcgatattcttactaaactctgag

SEQ ID NO: 130048 - DNA, 25 bp, Probe Sequence
atcgtgcatccttagtgaacttctg

SEQ ID NO: 130049 - DNA, 25 bp, Probe Sequence
atcgccatcctgttgtgaagttcta

SEQ ID NO: 130050 - DNA, 25 bp, Probe Sequence
atcgctccactgagccaagatcgct

SEQ ID NO: 130051 - DNA, 25 bp, Probe Sequence
atcgtctacatgggccaggatggca

SEQ ID NO: 130052 - DNA, 25 bp, Probe Sequence
atgttccattagcccaggtgttatg

SEQ ID NO: 130053 - DNA, 25 bp, Probe Sequence
agtttggctggggaagtgcttaggt

SEQ ID NO: 130054 - DNA, 25 bp, Probe Sequence
atgtttgagtggataaagtggcccc

SEQ ID NO: 130055 - DNA, 25 bp, Probe Sequence
atgtttgcctggataaagttcctca

SEQ ID NO: 130056 - DNA, 25 bp, Probe Sequence
atgttacctaaatattgtattctct

SEQ ID NO: 130057 - DNA, 25 bp, Probe Sequence
atcctattctttgagttgtttcctg

SEQ ID NO: 130058 - DNA, 25 bp, Probe Sequence
atccttgtgcttaagaaatgtactg

SEQ ID NO: 130059 - DNA, 25 bp, Probe Sequence
atgctggtataaacaaacttactga

SEQ ID NO: 130060 - DNA, 25 bp, Probe Sequence
atgctgtcaaagttacagtttacgc

SEQ ID NO: 130061 - DNA, 25 bp, Probe Sequence
atctggcaaggaaaagtcaaacatc

SEQ ID NO: 130062 - DNA, 25 bp, Probe Sequence
atgcatgccaaaccaaactaaacca

SEQ ID NO: 130063 - DNA, 25 bp, Probe Sequence
atccacaaagatgaggtaaaccagc

SEQ ID NO: 130064 - DNA, 25 bp, Probe Sequence
accagagctgaagagggcaaaagaa

SEQ ID NO: 130065 - DNA, 25 bp, Probe Sequence
atccgccagaacgaccagaaaaaat

SEQ ID NO: 130066 - DNA, 25 bp, Probe Sequence
atccatgcacaatcaacaaaaccaa

SEQ ID NO: 130067 - DNA, 25 bp, Probe Sequence
atccatcccatctaaaaactcttca

SEQ ID NO: 130068 - DNA, 25 bp, Probe Sequence
atccacagtcatcaagaaacctagt

SEQ ID NO: 130069 - DNA, 25 bp, Probe Sequence
atccacgtctagtcagggaccgttc

SEQ ID NO: 130070 - DNA, 25 bp, Probe Sequence
atgccactattagaggcagccacgg

SEQ ID NO: 130071 - DNA, 25 bp, Probe Sequence
atgctactgattggcacgtggcccc

SEQ ID NO: 130072 - DNA, 25 bp, Probe Sequence
atcgacgagtgccgagagctgaacc

SEQ ID NO: 130073 - DNA, 25 bp, Probe Sequence
atcgggacagcccgtgcagaatctg

SEQ ID NO: 130074 - DNA, 25 bp, Probe Sequence
atcgaaacctgccagacatgatgca

SEQ ID NO: 130075 - DNA, 25 bp, Probe Sequence
atcggtcacttgggatcatgagaag

SEQ ID NO: 130076 - DNA, 25 bp, Probe Sequence
atcggccgctgtttgtacagacagc

SEQ ID NO: 130077 - DNA, 25 bp, Probe Sequence
atcggccctactagatgcagagacc

SEQ ID NO: 130078 - DNA, 25 bp, Probe Sequence
atcgcctgttactgcagcaggtctc

SEQ ID NO: 130079 - DNA, 25 bp, Probe Sequence
atccctcctgaccagcagaggttga

SEQ ID NO: 130080 - DNA, 25 bp, Probe Sequence
atccctgactggtgcgtggtggagg

SEQ ID NO: 130081 - DNA, 25 bp, Probe Sequence
atcccaactggatgagtgctgtgga

SEQ ID NO: 130082 - DNA, 25 bp, Probe Sequence
atcccagtctgaaggtctcttagca

SEQ ID NO: 130083 - DNA, 25 bp, Probe Sequence
atccgcactagaaagttcatgacca

SEQ ID NO: 130084 - DNA, 25 bp, Probe Sequence
atccgcactagaaagttcatgacca

SEQ ID NO: 130085 - DNA, 25 bp, Probe Sequence
atgccggccagttaattcattctca

SEQ ID NO: 130086 - DNA, 25 bp, Probe Sequence
atgccgggattcgacatcattccct

SEQ ID NO: 130087 - DNA, 25 bp, Probe Sequence
atccggtgcaaatgcatctgtccac

SEQ ID NO: 130088 - DNA, 25 bp, Probe Sequence
atcctcgtcaggtgcaggtcagcac

SEQ ID NO: 130089 - DNA, 25 bp, Probe Sequence
atcccctcatagttaagtagccact

SEQ ID NO: 130090 - DNA, 25 bp, Probe Sequence
atcctgccttgatttagaatactag

SEQ ID NO: 130091 - DNA, 25 bp, Probe Sequence
atcctccattaagcgagcatacctc

SEQ ID NO: 130092 - DNA, 25 bp, Probe Sequence
atccccaggcagagcgaaacctgct

SEQ ID NO: 130093 - DNA, 25 bp, Probe Sequence
atgaaccaggaatggaaaccataga

SEQ ID NO: 130094 - DNA, 25 bp, Probe Sequence
atgaacagatttcttgaataaaatg

SEQ ID NO: 130095 - DNA, 25 bp, Probe Sequence
atgccactgaatacgttgaaaaaat

SEQ ID NO: 130096 - DNA, 25 bp, Probe Sequence
atgcccatggttatgtaaggcgatg

SEQ ID NO: 130097 - DNA, 25 bp, Probe Sequence
atcgacgcgcttctgtatgggcgcg

SEQ ID NO: 130098 - DNA, 25 bp, Probe Sequence
atggtctcatcaaggtgaacgggcg

SEQ ID NO: 130099 - DNA, 25 bp, Probe Sequence
atggctctgcctacggaaggggctt

SEQ ID NO: 130100 - DNA, 25 bp, Probe Sequence
atgcctcacattgctggcacgggga

SEQ ID NO: 130101 - DNA, 25 bp, Probe Sequence
atcccaggggatggcatcgggccag

SEQ ID NO: 130102 - DNA, 25 bp, Probe Sequence
atcccgaggtatggcagaggtgcaa

SEQ ID NO: 130103 - DNA, 25 bp, Probe Sequence
atccctgagctgaacgggaagctca

SEQ ID NO: 130104 - DNA, 25 bp, Probe Sequence
atcgctctatctcacaaagagacta

SEQ ID NO: 130105 - DNA, 25 bp, Probe Sequence
atcctctgcattgacttgggcactg

SEQ ID NO: 130106 - DNA, 25 bp, Probe Sequence
atcgcctattaccattgtgatgcgt

SEQ ID NO: 130107 - DNA, 25 bp, Probe Sequence
atccctctccagcttgagtggatca

SEQ ID NO: 130108 - DNA, 25 bp, Probe Sequence
atccctctccagcttgagtggatca

SEQ ID NO: 130109 - DNA, 25 bp, Probe Sequence
atccgcgtcctgagagagatggtcc

SEQ ID NO: 130110 - DNA, 25 bp, Probe Sequence
atccagagtgacagtgaacttaagc

SEQ ID NO: 130111 - DNA, 25 bp, Probe Sequence
atccaagtgcacagaaccatttttg

SEQ ID NO: 130112 - DNA, 25 bp, Probe Sequence
atcccacgcaaagccacattgaatt

SEQ ID NO: 130113 - DNA, 25 bp, Probe Sequence
atgcccaggaaagagtctatgcaaa

SEQ ID NO: 130114 - DNA, 25 bp, Probe Sequence
atcccaagaaagccgctcagatccg

SEQ ID NO: 130115 - DNA, 25 bp, Probe Sequence
atcccaaaagacaagccatgcatac

SEQ ID NO: 130116 - DNA, 25 bp, Probe Sequence
atcgacaagaagattgcataaatgc

SEQ ID NO: 130117 - DNA, 25 bp, Probe Sequence
atcccaaatgtgttatgctaaatta

SEQ ID NO: 130118 - DNA, 25 bp, Probe Sequence
atcccagactggttcttgaacagac

SEQ ID NO: 130119 - DNA, 25 bp, Probe Sequence
atcgtcataggttactgctagaaca

SEQ ID NO: 130120 - DNA, 25 bp, Probe Sequence
atcgcctgcgacaagccacagcagg

SEQ ID NO: 130121 - DNA, 25 bp, Probe Sequence
atcgaagagcataatccacagagtg

SEQ ID NO: 130122 - DNA, 25 bp, Probe Sequence
atccgcagacatactccataactca

SEQ ID NO: 130123 - DNA, 25 bp, Probe Sequence
atcccaacagcctcaaagccatggc

SEQ ID NO: 130124 - DNA, 25 bp, Probe Sequence
atccgctacacttgtgaggagccat

SEQ ID NO: 130125 - DNA, 25 bp, Probe Sequence
atcgctggaacctgggaggcagaag

SEQ ID NO: 130126 - DNA, 25 bp, Probe Sequence
atcgcttgaacctgggaggcagagg

SEQ ID NO: 130127 - DNA, 25 bp, Probe Sequence
atcgcttgaacctgggaggcagagg

SEQ ID NO: 130128 - DNA, 25 bp, Probe Sequence
atcgcttgaactctggaggcggagg

SEQ ID NO: 130129 - DNA, 25 bp, Probe Sequence
atcgcttgaacccaggaggcagaga

SEQ ID NO: 130130 - DNA, 25 bp, Probe Sequence
atcgtagcggcgacacgagagagac

SEQ ID NO: 130131 - DNA, 25 bp, Probe Sequence
atcgatagggcaccgcgtgctgatg

SEQ ID NO: 130132 - DNA, 25 bp, Probe Sequence
atcgagaggtactatgcctttgatg

SEQ ID NO: 130133 - DNA, 25 bp, Probe Sequence
atcgaggtgatgaactcctttgagc

SEQ ID NO: 130134 - DNA, 25 bp, Probe Sequence
atcgaggtgatcaagcctggggacc

SEQ ID NO: 130135 - DNA, 25 bp, Probe Sequence
atccgggatctactctgggagacaa

SEQ ID NO: 130136 - DNA, 25 bp, Probe Sequence
atccaatgggaactctggccaagac

SEQ ID NO: 130137 - DNA, 25 bp, Probe Sequence
atccgattcataatttggaagtgac

SEQ ID NO: 130138 - DNA, 25 bp, Probe Sequence
atcctgtttgcattgctatagaagg

SEQ ID NO: 130139 - DNA, 25 bp, Probe Sequence
atcctactgtgcgtgtatatacgcg

SEQ ID NO: 130140 - DNA, 25 bp, Probe Sequence
atcctagtggctattctcgctggga

SEQ ID NO: 130141 - DNA, 25 bp, Probe Sequence
atccaactgactaatcttgggatga

SEQ ID NO: 130142 - DNA, 25 bp, Probe Sequence
atccagatgtaccagctctcgaggt

SEQ ID NO: 130143 - DNA, 25 bp, Probe Sequence
atccaggtccagtgctcagatgtgt

SEQ ID NO: 130144 - DNA, 25 bp, Probe Sequence
atccctgatcggctgccagatggaa

SEQ ID NO: 130145 - DNA, 25 bp, Probe Sequence
atccctggagccctgaagattgagg

SEQ ID NO: 130146 - DNA, 25 bp, Probe Sequence
atcccgaggctgctgagagacggtg

SEQ ID NO: 130147 - DNA, 25 bp, Probe Sequence
atccttggggtttgagagcgctgta

SEQ ID NO: 130148 - DNA, 25 bp, Probe Sequence
atcccattggttaaaagcaagtcat

SEQ ID NO: 130149 - DNA, 25 bp, Probe Sequence
atccaacaaattgaaacaactctca

SEQ ID NO: 130150 - DNA, 25 bp, Probe Sequence
atccgaaaattgctaagacagtaga

SEQ ID NO: 130151 - DNA, 25 bp, Probe Sequence
atcgcagaacgacagaaaaatggag

SEQ ID NO: 130152 - DNA, 25 bp, Probe Sequence
atcgcagatccggggcacaaagagg

SEQ ID NO: 130153 - DNA, 25 bp, Probe Sequence
atgggtccgttggcacaaaggccgc

SEQ ID NO: 130154 - DNA, 25 bp, Probe Sequence
atgcccccgtctgacgaatgacagg

SEQ ID NO: 130155 - DNA, 25 bp, Probe Sequence
atcccagccctagtagcaattaagg

SEQ ID NO: 130156 - DNA, 25 bp, Probe Sequence
atgcccaaagcggtagaattaaaga

SEQ ID NO: 130157 - DNA, 25 bp, Probe Sequence
aggccaaactgggaactctagccgt

SEQ ID NO: 130158 - DNA, 25 bp, Probe Sequence
atgctccaacacagcgaactctact

SEQ ID NO: 130159 - DNA, 25 bp, Probe Sequence
atgcctctgtaaaccaaatttcttt

SEQ ID NO: 130160 - DNA, 25 bp, Probe Sequence
atcctttcatagtcacaagttttgt

SEQ ID NO: 130161 - DNA, 25 bp, Probe Sequence
atccattcctagacctttcattaga

SEQ ID NO: 130162 - DNA, 25 bp, Probe Sequence
atcccccagatcacgatgttgtggc

SEQ ID NO: 130163 - DNA, 25 bp, Probe Sequence
atcccccagaacaagaaggtgagca

SEQ ID NO: 130164 - DNA, 25 bp, Probe Sequence
atccatcaggaaatctagaagacta

SEQ ID NO: 130165 - DNA, 25 bp, Probe Sequence
atccagggaatcataaatcatgcca

SEQ ID NO: 130166 - DNA, 25 bp, Probe Sequence
atcctggggaaaaagcatctgtcaa

SEQ ID NO: 130167 - DNA, 25 bp, Probe Sequence
atcctgggaagggggctcattcaca

SEQ ID NO: 130168 - DNA, 25 bp, Probe Sequence
atcctggagcagggcctgttttcca

SEQ ID NO: 130169 - DNA, 25 bp, Probe Sequence
atcctggagcagggcctgttttcca

SEQ ID NO: 130170 - DNA, 25 bp, Probe Sequence
atccatccggcatgccaggtttgga

SEQ ID NO: 130171 - DNA, 25 bp, Probe Sequence
atccatcacccatctgggtatagcc

SEQ ID NO: 130172 - DNA, 25 bp, Probe Sequence
atgccatcacccggcaggtggaaac

SEQ ID NO: 130173 - DNA, 25 bp, Probe Sequence
atgcctgcaatcctgtagggaaaag

SEQ ID NO: 130174 - DNA, 25 bp, Probe Sequence
atccgcttcctgaatgctgagaatg

SEQ ID NO: 130175 - DNA, 25 bp, Probe Sequence
atcccactgcccaatctagaatatg

SEQ ID NO: 130176 - DNA, 25 bp, Probe Sequence
atcccactgacacatcagaattata

SEQ ID NO: 130177 - DNA, 25 bp, Probe Sequence
atcccagtacagatcgtttctcatc

SEQ ID NO: 130178 - DNA, 25 bp, Probe Sequence
atcgccaataggactatgtattcac

SEQ ID NO: 130179 - DNA, 25 bp, Probe Sequence
atcccagatacgacagatgatgctt

SEQ ID NO: 130180 - DNA, 25 bp, Probe Sequence
atcccacatgaactcctgatgtttt

SEQ ID NO: 130181 - DNA, 25 bp, Probe Sequence
atgccccagaaagagcgggagtcca

SEQ ID NO: 130182 - DNA, 25 bp, Probe Sequence
atgccttaacgagagccgcgagggc

SEQ ID NO: 130183 - DNA, 25 bp, Probe Sequence
atccttccactgagtccgctgaagg

SEQ ID NO: 130184 - DNA, 25 bp, Probe Sequence
atccttccactgaccgtggctaaga

SEQ ID NO: 130185 - DNA, 25 bp, Probe Sequence
atcctctacctgatggtagtgacaa

SEQ ID NO: 130186 - DNA, 25 bp, Probe Sequence
atccttcagccgaaggtcaggcctt

SEQ ID NO: 130187 - DNA, 25 bp, Probe Sequence
atccccgtaatcaatgtgggcctat

SEQ ID NO: 130188 - DNA, 25 bp, Probe Sequence
atcccggtctatcttgtgacatttg

SEQ ID NO: 130189 - DNA, 25 bp, Probe Sequence
atccctgtgttaaagatgtacatat

SEQ ID NO: 130190 - DNA, 25 bp, Probe Sequence
atcccgattcttaagttctgctatt

SEQ ID NO: 130191 - DNA, 25 bp, Probe Sequence
atcccatgagttatttcctattctg

SEQ ID NO: 130192 - DNA, 25 bp, Probe Sequence
atcgccgtgttactgttgcactgat

SEQ ID NO: 130193 - DNA, 25 bp, Probe Sequence
atccgttcttcacttagcaggaata

SEQ ID NO: 130194 - DNA, 25 bp, Probe Sequence
atcctgctttgctgtgtccaggaag

SEQ ID NO: 130195 - DNA, 25 bp, Probe Sequence
atcctcatgtcatccttctaggaag

SEQ ID NO: 130196 - DNA, 25 bp, Probe Sequence
atcgctgagcgatactttcggcagc

SEQ ID NO: 130197 - DNA, 25 bp, Probe Sequence
atccatgcgtttgcaatccggagcc

SEQ ID NO: 130198 - DNA, 25 bp, Probe Sequence
atccagcagattcaaagccaggcac

SEQ ID NO: 130199 - DNA, 25 bp, Probe Sequence
atcgcagccatggtaacagctccaa

SEQ ID NO: 130200 - DNA, 25 bp, Probe Sequence
atccgccagatttgagcagcgcctc

SEQ ID NO: 130201 - DNA, 25 bp, Probe Sequence
atcgcgccggattattgctgcaact

SEQ ID NO: 130202 - DNA, 25 bp, Probe Sequence
atcctaggtctgtattgctcaattt

SEQ ID NO: 130203 - DNA, 25 bp, Probe Sequence
atcccagtttgcgtttgctgttgtg

SEQ ID NO: 130204 - DNA, 25 bp, Probe Sequence
atcctgcatttatggtgtagttctg

SEQ ID NO: 130205 - DNA, 25 bp, Probe Sequence
atcccatctactttattttcatctg

SEQ ID NO: 130206 - DNA, 25 bp, Probe Sequence
atccagtcaactttcagcttttcta

SEQ ID NO: 130207 - DNA, 25 bp, Probe Sequence
atccagcccacagcctgtgtttgta

SEQ ID NO: 130208 - DNA, 25 bp, Probe Sequence
atcccacaatgggctctgtttttat

SEQ ID NO: 130209 - DNA, 25 bp, Probe Sequence
atccatgaccttcgtttcatttctt

SEQ ID NO: 130210 - DNA, 25 bp, Probe Sequence
atcgcgacacatttgtagtcattgt

SEQ ID NO: 130211 - DNA, 25 bp, Probe Sequence
atccatgacaactttggtatcgtgg

SEQ ID NO: 130212 - DNA, 25 bp, Probe Sequence
atcctgaaatatctggttgagccca

SEQ ID NO: 130213 - DNA, 25 bp, Probe Sequence
atccatgaaaactgttctggcacca

SEQ ID NO: 130214 - DNA, 25 bp, Probe Sequence
atccaaatacactttctggaacaaa

SEQ ID NO: 130215 - DNA, 25 bp, Probe Sequence
atgcaaaaacgattccgaaacataa

SEQ ID NO: 130216 - DNA, 25 bp, Probe Sequence
atccaggacatccatagcccgataa

SEQ ID NO: 130217 - DNA, 25 bp, Probe Sequence
atgctactgtctccagaacacgaaa

SEQ ID NO: 130218 - DNA, 25 bp, Probe Sequence
atgcccgaatgccagagaaggtcac

SEQ ID NO: 130219 - DNA, 25 bp, Probe Sequence
atccctgatggctgtggggtcaagt

SEQ ID NO: 130220 - DNA, 25 bp, Probe Sequence
atccactgattctggggtgagaagc

SEQ ID NO: 130221 - DNA, 25 bp, Probe Sequence
atgcctctgtaattggggttgacac

SEQ ID NO: 130222 - DNA, 25 bp, Probe Sequence
atccatcttaattggcataaggaca

SEQ ID NO: 130223 - DNA, 25 bp, Probe Sequence
atcctttcagtgctatgtaggtaaa

SEQ ID NO: 130224 - DNA, 25 bp, Probe Sequence
atcgcctccctggtttatagtagac

SEQ ID NO: 130225 - DNA, 25 bp, Probe Sequence
atccccctttttgatgatctgaatc

SEQ ID NO: 130226 - DNA, 25 bp, Probe Sequence
atccagtcctttaacctcactgaat

SEQ ID NO: 130227 - DNA, 25 bp, Probe Sequence
atcctcttctcttatgtcctaggaa

SEQ ID NO: 130228 - DNA, 25 bp, Probe Sequence
atccaatcccattcttccagggaaa

SEQ ID NO: 130229 - DNA, 25 bp, Probe Sequence
atgcataaaccatgtccccaggaaa

SEQ ID NO: 130230 - DNA, 25 bp, Probe Sequence
atgcataaagccaaatttccagttt

SEQ ID NO: 130231 - DNA, 25 bp, Probe Sequence
atgcataaagccaaatttccagttt

SEQ ID NO: 130232 - DNA, 25 bp, Probe Sequence
atgctaagttgtcagatctccagga

SEQ ID NO: 130233 - DNA, 25 bp, Probe Sequence
atggatggttatcaacccaaatgcc

SEQ ID NO: 130234 - DNA, 25 bp, Probe Sequence
atgctttgttacagacccaagctgt

SEQ ID NO: 130235 - DNA, 25 bp, Probe Sequence
atgatttttactctagtgacagctg

SEQ ID NO: 130236 - DNA, 25 bp, Probe Sequence
atgctttgttccactggctgtggat

SEQ ID NO: 130237 - DNA, 25 bp, Probe Sequence
atgctttgttccactggctgtggat

SEQ ID NO: 130238 - DNA, 25 bp, Probe Sequence
atgcttagactagactggactgatg

SEQ ID NO: 130239 - DNA, 25 bp, Probe Sequence
atgcttagcaaacagcggcacgatg

SEQ ID NO: 130240 - DNA, 25 bp, Probe Sequence
atgctggggcaagatgcagtacaag

SEQ ID NO: 130241 - DNA, 25 bp, Probe Sequence
atgcggtgtagaaatgtttactgtg

SEQ ID NO: 130242 - DNA, 25 bp, Probe Sequence
agcagggcatggagtattaccgtgc

SEQ ID NO: 130243 - DNA, 25 bp, Probe Sequence
atcgcaggagagactgtgattcagc

SEQ ID NO: 130244 - DNA, 25 bp, Probe Sequence
atccatgccatatcatgtgtgtacg

SEQ ID NO: 130245 - DNA, 25 bp, Probe Sequence
atcctggctcagttgcaggctgaca

SEQ ID NO: 130246 - DNA, 25 bp, Probe Sequence
atcctggctaacatggtgaaaccct

SEQ ID NO: 130247 - DNA, 25 bp, Probe Sequence
atcctggctaacactgtgaaacccc

SEQ ID NO: 130248 - DNA, 25 bp, Probe Sequence
atcctgaaaactacagtgacaaggc

SEQ ID NO: 130249 - DNA, 25 bp, Probe Sequence
atccttttttactacacaaggcatg

SEQ ID NO: 130250 - DNA, 25 bp, Probe Sequence
atcctctttattttgtcatagggag

SEQ ID NO: 130251 - DNA, 25 bp, Probe Sequence
atccttataataaaccatgagagta

SEQ ID NO: 130252 - DNA, 25 bp, Probe Sequence
atcctttgtgatgaagcctgaaatt

SEQ ID NO: 130253 - DNA, 25 bp, Probe Sequence
accttgtatcaggggttataatgta

SEQ ID NO: 130254 - DNA, 25 bp, Probe Sequence
atccatatttcggaggtcttctaat

SEQ ID NO: 130255 - DNA, 25 bp, Probe Sequence
atccatgtttccagtgtttcggttt

SEQ ID NO: 130256 - DNA, 25 bp, Probe Sequence
atccctttcgtcagttgctgaggtg

SEQ ID NO: 130257 - DNA, 25 bp, Probe Sequence
atccctatttaagattctgaaggtg

SEQ ID NO: 130258 - DNA, 25 bp, Probe Sequence
atcctccagatctaactattataag

SEQ ID NO: 130259 - DNA, 25 bp, Probe Sequence
atcgcctggatctatcattactgca

SEQ ID NO: 130260 - DNA, 25 bp, Probe Sequence
atcgcctggatctatcattactgca

SEQ ID NO: 130261 - DNA, 25 bp, Probe Sequence
atccctgtgttgtctctagagcagg

SEQ ID NO: 130262 - DNA, 25 bp, Probe Sequence
atcccagccttggcatctagagctt

SEQ ID NO: 130263 - DNA, 25 bp, Probe Sequence
atcccatcgctttgattattgttgc

SEQ ID NO: 130264 - DNA, 25 bp, Probe Sequence
atcctcatctttttttggttctttg

SEQ ID NO: 130265 - DNA, 25 bp, Probe Sequence
atcgctcattcttcttttattattc

SEQ ID NO: 130266 - DNA, 25 bp, Probe Sequence
atccctactagatgttatgtgttct

SEQ ID NO: 130267 - DNA, 25 bp, Probe Sequence
atcccagaaagactatatattgttt

SEQ ID NO: 130268 - DNA, 25 bp, Probe Sequence
atcctcagaccaggtggaattactt

SEQ ID NO: 130269 - DNA, 25 bp, Probe Sequence
atccatctgtcctgtgtggaatcca

SEQ ID NO: 130270 - DNA, 25 bp, Probe Sequence
atccatctgtcctgtgtggaatcca

SEQ ID NO: 130271 - DNA, 25 bp, Probe Sequence
atccatgttcactgtaacaaactga

SEQ ID NO: 130272 - DNA, 25 bp, Probe Sequence
atccagttaccagattcccactgaa

SEQ ID NO: 130273 - DNA, 25 bp, Probe Sequence
atcctgttgaaagcctggaactgaa

SEQ ID NO: 130274 - DNA, 25 bp, Probe Sequence
atcctgcctgaatactcgtaacaga

SEQ ID NO: 130275 - DNA, 25 bp, Probe Sequence
atccagcctggacaacaagaatgaa

SEQ ID NO: 130276 - DNA, 25 bp, Probe Sequence
atcccctggagtagagggcaagagg

SEQ ID NO: 130277 - DNA, 25 bp, Probe Sequence
atcccttgtggactggggacaggac

SEQ ID NO: 130278 - DNA, 25 bp, Probe Sequence
atccctccccctggggagcagttgg

SEQ ID NO: 130279 - DNA, 25 bp, Probe Sequence
atccttccacccttggcaagaatct

SEQ ID NO: 130280 - DNA, 25 bp, Probe Sequence
atccttccacccttggcaagaatct

SEQ ID NO: 130281 - DNA, 25 bp, Probe Sequence
atgcttttcatataggccaagaact

SEQ ID NO: 130282 - DNA, 25 bp, Probe Sequence
atccattgcctatcacctcaaaatt

SEQ ID NO: 130283 - DNA, 25 bp, Probe Sequence
atgctgttgtctttcacccaaaatt

SEQ ID NO: 130284 - DNA, 25 bp, Probe Sequence
atccttgatccgtaacaaaattatt

SEQ ID NO: 130285 - DNA, 25 bp, Probe Sequence
atccggtgcccattagatttcttta

SEQ ID NO: 130286 - DNA, 25 bp, Probe Sequence
atgcccgacccttagaagttttcat

SEQ ID NO: 130287 - DNA, 25 bp, Probe Sequence
atgcccgacccttagaagttttcat

SEQ ID NO: 130288 - DNA, 25 bp, Probe Sequence
atgaaagtcctcagtaagtgttaga

SEQ ID NO: 130289 - DNA, 25 bp, Probe Sequence
ctaagagttctcaggaagttgggta

SEQ ID NO: 130290 - DNA, 25 bp, Probe Sequence
atgcaaagttcctcagaagttggtt

SEQ ID NO: 130291 - DNA, 25 bp, Probe Sequence
atgatacagaccagccaaagttcca

SEQ ID NO: 130292 - DNA, 25 bp, Probe Sequence
atgaacatactcaccctagttagca

SEQ ID NO: 130293 - DNA, 25 bp, Probe Sequence
atgaaaactcatgccccagaaaggg

SEQ ID NO: 130294 - DNA, 25 bp, Probe Sequence
atgaaaaccaatacctatgagaggg

SEQ ID NO: 130295 - DNA, 25 bp, Probe Sequence
atccaaaccagtacaactatattgc

SEQ ID NO: 130296 - DNA, 25 bp, Probe Sequence
atccccatcaagatcacacaacttc

SEQ ID NO: 130297 - DNA, 25 bp, Probe Sequence
atccccatcaagctaccaatgactt

SEQ ID NO: 130298 - DNA, 25 bp, Probe Sequence
atcccagtgttaccacagaagagtt

SEQ ID NO: 130299 - DNA, 25 bp, Probe Sequence
atcccagtgacctcagctaagactg

SEQ ID NO: 130300 - DNA, 25 bp, Probe Sequence
atgcccagtaatcacctcaggcacg

SEQ ID NO: 130301 - DNA, 25 bp, Probe Sequence
atcccatggataaacctcagctata

SEQ ID NO: 130302 - DNA, 25 bp, Probe Sequence
atcccaggtcttcagctgagctgaa

SEQ ID NO: 130303 - DNA, 25 bp, Probe Sequence
atccctggttctgaggagcaagtgc

SEQ ID NO: 130304 - DNA, 25 bp, Probe Sequence
atcccagttatctcaggagactgag

SEQ ID NO: 130305 - DNA, 25 bp, Probe Sequence
atccgacgctactcagatgaaagtg

SEQ ID NO: 130306 - DNA, 25 bp, Probe Sequence
atcctacgctgcttcatcaaagaag

SEQ ID NO: 130307 - DNA, 25 bp, Probe Sequence
atcctcaggctctacaatctagggg

SEQ ID NO: 130308 - DNA, 25 bp, Probe Sequence
atcccaggctgttcgctgaaggagg

SEQ ID NO: 130309 - DNA, 25 bp, Probe Sequence
atgccgaggacttcctattgggctt

SEQ ID NO: 130310 - DNA, 25 bp, Probe Sequence
atccgaggttcttaatatgagattt

SEQ ID NO: 130311 - DNA, 25 bp, Probe Sequence
agcccagttttataacagtatctcc

SEQ ID NO: 130312 - DNA, 25 bp, Probe Sequence
atcctggtttaacaacagtgccctg

SEQ ID NO: 130313 - DNA, 25 bp, Probe Sequence
agccagttttatctaacggctactg

SEQ ID NO: 130314 - DNA, 25 bp, Probe Sequence
accatttttatcagggcccaacatg

SEQ ID NO: 130315 - DNA, 25 bp, Probe Sequence
atcctttatataagtaggcccaaag

SEQ ID NO: 130316 - DNA, 25 bp, Probe Sequence
atcctcattgatccaagcatgaccc

SEQ ID NO: 130317 - DNA, 25 bp, Probe Sequence
atcctgctctatcgtgatgctaaca

SEQ ID NO: 130318 - DNA, 25 bp, Probe Sequence
atcctgtctgtactagaaatgcaaa

SEQ ID NO: 130319 - DNA, 25 bp, Probe Sequence
atcctatgcattttacgcattaaaa

SEQ ID NO: 130320 - DNA, 25 bp, Probe Sequence
atccccattgttgcactgtagcaaa

SEQ ID NO: 130321 - DNA, 25 bp, Probe Sequence
atccacctgtttgacttccatagaa

SEQ ID NO: 130322 - DNA, 25 bp, Probe Sequence
atcccttgtattgtcctgactatag

SEQ ID NO: 130323 - DNA, 25 bp, Probe Sequence
atcctgtcttttgcatgcctgaaga

SEQ ID NO: 130324 - DNA, 25 bp, Probe Sequence
atccttgctgcactgttgcagtcat

SEQ ID NO: 130325 - DNA, 25 bp, Probe Sequence
atcccatcagcgcatcaggtgcata

SEQ ID NO: 130326 - DNA, 25 bp, Probe Sequence
atcccatcatcctatttcatgtata

SEQ ID NO: 130327 - DNA, 25 bp, Probe Sequence
atccacactgatttgtacgtctgac

SEQ ID NO: 130328 - DNA, 25 bp, Probe Sequence
accaaggtagtggactgctgctatc

SEQ ID NO: 130329 - DNA, 25 bp, Probe Sequence
atccggtgtaggcacagctctccta

SEQ ID NO: 130330 - DNA, 25 bp, Probe Sequence
atccgtggatacagacgcttagctc

SEQ ID NO: 130331 - DNA, 25 bp, Probe Sequence
atcctgggtcacagactgggatgag

SEQ ID NO: 130332 - DNA, 25 bp, Probe Sequence
atccggagtcctggagccgggtgtc

SEQ ID NO: 130333 - DNA, 25 bp, Probe Sequence
atccgaagtcctgggactgcgggat

SEQ ID NO: 130334 - DNA, 25 bp, Probe Sequence
atcctgacctcctggactgtaggac

SEQ ID NO: 130335 - DNA, 25 bp, Probe Sequence
atcctggccatccggagagctaaga

SEQ ID NO: 130336 - DNA, 25 bp, Probe Sequence
atcccgctcacatcagaacatgaca

SEQ ID NO: 130337 - DNA, 25 bp, Probe Sequence
atcccctcagcagagatggagagct

SEQ ID NO: 130338 - DNA, 25 bp, Probe Sequence
atcccagcgccatttatgaggagtc

SEQ ID NO: 130339 - DNA, 25 bp, Probe Sequence
atcccagcaccattctataggcaac

SEQ ID NO: 130340 - DNA, 25 bp, Probe Sequence
atccatgatgaccatcctcatagct

SEQ ID NO: 130341 - DNA, 25 bp, Probe Sequence
atccatgtctctagcaatctatgtc

SEQ ID NO: 130342 - DNA, 25 bp, Probe Sequence
atccagattttttatatgtctgcat

SEQ ID NO: 130343 - DNA, 25 bp, Probe Sequence
atcctaattctctaaatatttggta

SEQ ID NO: 130344 - DNA, 25 bp, Probe Sequence
atgccataaccccgttatttgttat

SEQ ID NO: 130345 - DNA, 25 bp, Probe Sequence
atgcagcaaaacagcggtggtttaa

SEQ ID NO: 130346 - DNA, 25 bp, Probe Sequence
atgagaaacttcttagatttttata

SEQ ID NO: 130347 - DNA, 25 bp, Probe Sequence
atgcagaaactaaataatccttaat

SEQ ID NO: 130348 - DNA, 25 bp, Probe Sequence
atgcacagtatctattggaaccaaa

SEQ ID NO: 130349 - DNA, 25 bp, Probe Sequence
atccagatcacattaggctccaaga

SEQ ID NO: 130350 - DNA, 25 bp, Probe Sequence
atccgatatgtgcagagtctcaagg

SEQ ID NO: 130351 - DNA, 25 bp, Probe Sequence
atcctgaactcgacgtcctgaggta

SEQ ID NO: 130352 - DNA, 25 bp, Probe Sequence
atcctggagtggaccctgcgggtcc

SEQ ID NO: 130353 - DNA, 25 bp, Probe Sequence
atccttaggctgattcttggttcct

SEQ ID NO: 130354 - DNA, 25 bp, Probe Sequence
atccaggatgttattcttccttccc

SEQ ID NO: 130355 - DNA, 25 bp, Probe Sequence
atccaagatgttgtttcaccttatc

SEQ ID NO: 130356 - DNA, 25 bp, Probe Sequence
atccagtcatttgtttccatctaaa

SEQ ID NO: 130357 - DNA, 25 bp, Probe Sequence
atccattcagttgatcctaattagc

SEQ ID NO: 130358 - DNA, 25 bp, Probe Sequence
atgctcctaatccaaccttatttgc

SEQ ID NO: 130359 - DNA, 25 bp, Probe Sequence
atgctgacattgacgtagtcgttgt

SEQ ID NO: 130360 - DNA, 25 bp, Probe Sequence
atgctgacgttcttgcttttggcgc

SEQ ID NO: 130361 - DNA, 25 bp, Probe Sequence
atgctgacgttcttgcttttggcgc

SEQ ID NO: 130362 - DNA, 25 bp, Probe Sequence
atgctaggctaggtcactgtctggc

SEQ ID NO: 130363 - DNA, 25 bp, Probe Sequence
atgctggcgcttctctcgtcggcgg

SEQ ID NO: 130364 - DNA, 25 bp, Probe Sequence
atgctggcgctgagtacgtcgtgga

SEQ ID NO: 130365 - DNA, 25 bp, Probe Sequence
atgcgtctcgcatggaagaagtcga

SEQ ID NO: 130366 - DNA, 25 bp, Probe Sequence
atgcgtctgatgtgtcattaagtgc

SEQ ID NO: 130367 - DNA, 25 bp, Probe Sequence
atgcgtctgatgtgtcattaagtgc

SEQ ID NO: 130368 - DNA, 25 bp, Probe Sequence
atgctgtcagtagggatgatcatgg

SEQ ID NO: 130369 - DNA, 25 bp, Probe Sequence
atccctgtgatcatgagtctggctc

SEQ ID NO: 130370 - DNA, 25 bp, Probe Sequence
atcccagatgcattaggtcttgttg

SEQ ID NO: 130371 - DNA, 25 bp, Probe Sequence
atcccctgcatctggactatgtgat

SEQ ID NO: 130372 - DNA, 25 bp, Probe Sequence
atcccctctgtagagatcatgcgaa

SEQ ID NO: 130373 - DNA, 25 bp, Probe Sequence
atcccctttagaatatatcagacaa

SEQ ID NO: 130374 - DNA, 25 bp, Probe Sequence
atccccactctacatatgtaaaaat

SEQ ID NO: 130375 - DNA, 25 bp, Probe Sequence
atccctccctgatattgtattgaaa

SEQ ID NO: 130376 - DNA, 25 bp, Probe Sequence
atccttagcaggagattttctgaga

SEQ ID NO: 130377 - DNA, 25 bp, Probe Sequence
atgcttttgcggacatgtttcctca

SEQ ID NO: 130378 - DNA, 25 bp, Probe Sequence
agttttctggttgtccaactaccat

SEQ ID NO: 130379 - DNA, 25 bp, Probe Sequence
caaaacttggttcttaactaccatg

SEQ ID NO: 130380 - DNA, 25 bp, Probe Sequence
agaaatttggactcttacttaccag

SEQ ID NO: 130381 - DNA, 25 bp, Probe Sequence
agaacatctttgcgttttctaccgg

SEQ ID NO: 130382 - DNA, 25 bp, Probe Sequence
atgcaacttttccagaccttctggt

SEQ ID NO: 130383 - DNA, 25 bp, Probe Sequence
atgccactttggctgaactacaagt

SEQ ID NO: 130384 - DNA, 25 bp, Probe Sequence
atcctctcttggccttactgaagat

SEQ ID NO: 130385 - DNA, 25 bp, Probe Sequence
atcctctcttggccttactgaagat

SEQ ID NO: 130386 - DNA, 25 bp, Probe Sequence
atcctctcttggccttactgaagat

SEQ ID NO: 130387 - DNA, 25 bp, Probe Sequence
atcctctcttggccttactgaagat

SEQ ID NO: 130388 - DNA, 25 bp, Probe Sequence
atcctgcacctactttaatgatata

SEQ ID NO: 130389 - DNA, 25 bp, Probe Sequence
atcccttgtagctttgaatatactg

SEQ ID NO: 130390 - DNA, 25 bp, Probe Sequence
atccatttgtacattgatggacact

SEQ ID NO: 130391 - DNA, 25 bp, Probe Sequence
atccttaggactctgcattaactct

SEQ ID NO: 130392 - DNA, 25 bp, Probe Sequence
atcctagaggccaggcaggagccct

SEQ ID NO: 130393 - DNA, 25 bp, Probe Sequence
atcctgaaggcccgagagcatgtcc

SEQ ID NO: 130394 - DNA, 25 bp, Probe Sequence
atcctaaggatccagcggcagtgac

SEQ ID NO: 130395 - DNA, 25 bp, Probe Sequence
atcccatagtgaactagtgagctat

SEQ ID NO: 130396 - DNA, 25 bp, Probe Sequence
atccagaatggcagtagctttagca

SEQ ID NO: 130397 - DNA, 25 bp, Probe Sequence
atccagaaggagctcaccattggct

SEQ ID NO: 130398 - DNA, 25 bp, Probe Sequence
atccagaaagagtccaccttgcacc

SEQ ID NO: 130399 - DNA, 25 bp, Probe Sequence
atccaccaagagactgccactgtgc

SEQ ID NO: 130400 - DNA, 25 bp, Probe Sequence
atccaggacgacatgctctgtgctg

SEQ ID NO: 130401 - DNA, 25 bp, Probe Sequence
atcctggagctgacacgtgctatcg

SEQ ID NO: 130402 - DNA, 25 bp, Probe Sequence
atcctgggctattggactctctgta

SEQ ID NO: 130403 - DNA, 25 bp, Probe Sequence
atccttggtaagggctccgtgcagt

SEQ ID NO: 130404 - DNA, 25 bp, Probe Sequence
atgccttagttagatgaccctcaaa

SEQ ID NO: 130405 - DNA, 25 bp, Probe Sequence
atgtctttgttagtggagaccgcta

SEQ ID NO: 130406 - DNA, 25 bp, Probe Sequence
atgcctactttcttcaagacctgag

SEQ ID NO: 130407 - DNA, 25 bp, Probe Sequence
atccccttgtacagatgatcctgaa

SEQ ID NO: 130408 - DNA, 25 bp, Probe Sequence
atcccttattttagtgacaatgata

SEQ ID NO: 130409 - DNA, 25 bp, Probe Sequence
atgccagattttgggattacaaata

SEQ ID NO: 130410 - DNA, 25 bp, Probe Sequence
atccagcatccattcctaataaaaa

SEQ ID NO: 130411 - DNA, 25 bp, Probe Sequence
atccagcaacgttccctagaagaac

SEQ ID NO: 130412 - DNA, 25 bp, Probe Sequence
atccgagaggtggccaacaaagtca

SEQ ID NO: 130413 - DNA, 25 bp, Probe Sequence
atccgtgtggtggacacacgccatg

SEQ ID NO: 130414 - DNA, 25 bp, Probe Sequence
atccgagagagtgagagcgctcctg

SEQ ID NO: 130415 - DNA, 25 bp, Probe Sequence
atccagaaggatgatggcagatggc

SEQ ID NO: 130416 - DNA, 25 bp, Probe Sequence
atccagaagtaattgcggaggctcc

SEQ ID NO: 130417 - DNA, 25 bp, Probe Sequence
atccatgaagtttgtggatggcctg

SEQ ID NO: 130418 - DNA, 25 bp, Probe Sequence
atgcagcagaagctagctggccctc

SEQ ID NO: 130419 - DNA, 25 bp, Probe Sequence
atgccaaggcaggagtgtgcaagca

SEQ ID NO: 130420 - DNA, 25 bp, Probe Sequence
atccagatggcatggttgctctatt

SEQ ID NO: 130421 - DNA, 25 bp, Probe Sequence
atccaggaaagatttctctgatatg

SEQ ID NO: 130422 - DNA, 25 bp, Probe Sequence
atccaggccaactactcactaatgg

SEQ ID NO: 130423 - DNA, 25 bp, Probe Sequence
atcctcccagaatctaccagtttat

SEQ ID NO: 130424 - DNA, 25 bp, Probe Sequence
atccacacttgatactaccacttct

SEQ ID NO: 130425 - DNA, 25 bp, Probe Sequence
atccatactggaacagcgataacgt

SEQ ID NO: 130426 - DNA, 25 bp, Probe Sequence
atgccaagttatacacgggacagtt

SEQ ID NO: 130427 - DNA, 25 bp, Probe Sequence
atggaaaatataaccaggtcctggc

SEQ ID NO: 130428 - DNA, 25 bp, Probe Sequence
atgactaaattggccggttgccgtg

SEQ ID NO: 130429 - DNA, 25 bp, Probe Sequence
atgccttgtttggggttctgtgggt

SEQ ID NO: 130430 - DNA, 25 bp, Probe Sequence
atgccttagtctgtgggggtgggtg

SEQ ID NO: 130431 - DNA, 25 bp, Probe Sequence
atccattattagcctggggtgtggt

SEQ ID NO: 130432 - DNA, 25 bp, Probe Sequence
atcctgttgttgctgtggctgatag

SEQ ID NO: 130433 - DNA, 25 bp, Probe Sequence
atccggtgttgcatccttggagaga

SEQ ID NO: 130434 - DNA, 25 bp, Probe Sequence
atcccctgagacatgccttgtagaa

SEQ ID NO: 130435 - DNA, 25 bp, Probe Sequence
atccacctggtcttgttcttatgga

SEQ ID NO: 130436 - DNA, 25 bp, Probe Sequence
atcccctgtatctatgtgttaaata

SEQ ID NO: 130437 - DNA, 25 bp, Probe Sequence
atccccagtctcattgcttagtaga

SEQ ID NO: 130438 - DNA, 25 bp, Probe Sequence
atccccagtctcattgcttagtaga

SEQ ID NO: 130439 - DNA, 25 bp, Probe Sequence
atccccagtctcattgcttagtaga

SEQ ID NO: 130440 - DNA, 25 bp, Probe Sequence
atcccctatgccattgcatatcaat

SEQ ID NO: 130441 - DNA, 25 bp, Probe Sequence
atgccacagtagatgtccacataat

SEQ ID NO: 130442 - DNA, 25 bp, Probe Sequence
atgccagggacagtgtgctcagtaa

SEQ ID NO: 130443 - DNA, 25 bp, Probe Sequence
atgcccacgagggtgatagtaattc

SEQ ID NO: 130444 - DNA, 25 bp, Probe Sequence
atccccagaggggttgtcactttgg

SEQ ID NO: 130445 - DNA, 25 bp, Probe Sequence
atccccagggggttgtgatagcttt

SEQ ID NO: 130446 - DNA, 25 bp, Probe Sequence
atccccaagggattttgatgctgcc

SEQ ID NO: 130447 - DNA, 25 bp, Probe Sequence
atcccctcaggataatctattctct

SEQ ID NO: 130448 - DNA, 25 bp, Probe Sequence
atccttctctgggaaatctactcct

SEQ ID NO: 130449 - DNA, 25 bp, Probe Sequence
atccccagttcctagattaatgcct

SEQ ID NO: 130450 - DNA, 25 bp, Probe Sequence
atccccatcattactggtaaagcct

SEQ ID NO: 130451 - DNA, 25 bp, Probe Sequence
atccccatcattactggtaaagcct

SEQ ID NO: 130452 - DNA, 25 bp, Probe Sequence
atcccctattcacagtgatgaagga

SEQ ID NO: 130453 - DNA, 25 bp, Probe Sequence
atccttcgattactattcgtgccta

SEQ ID NO: 130454 - DNA, 25 bp, Probe Sequence
atgctgtaaatttttatcgtcgtat

SEQ ID NO: 130455 - DNA, 25 bp, Probe Sequence
atgctggaaaatttttatcccagag

SEQ ID NO: 130456 - DNA, 25 bp, Probe Sequence
atgtggtaaattatttcctgaatcc

SEQ ID NO: 130457 - DNA, 25 bp, Probe Sequence
atgctctgtaaagggtcttcctgaa

SEQ ID NO: 130458 - DNA, 25 bp, Probe Sequence
atcctgccagaaattcatttcctaa

SEQ ID NO: 130459 - DNA, 25 bp, Probe Sequence
atgcctctcgagacatacaaatcct

SEQ ID NO: 130460 - DNA, 25 bp, Probe Sequence
atcctcctagtgaagcaaacagcat

SEQ ID NO: 130461 - DNA, 25 bp, Probe Sequence
atcctcacatcattgctacaaaaac

SEQ ID NO: 130462 - DNA, 25 bp, Probe Sequence
atccatcctcatcctagcaataatc

SEQ ID NO: 130463 - DNA, 25 bp, Probe Sequence
atccatacttccttcaatgattgcc

SEQ ID NO: 130464 - DNA, 25 bp, Probe Sequence
atccattctctgggacacatgacgc

SEQ ID NO: 130465 - DNA, 25 bp, Probe Sequence
atcctgctgccggatgacattgagg

SEQ ID NO: 130466 - DNA, 25 bp, Probe Sequence
atcctctctgaggtgaatggcaggt

SEQ ID NO: 130467 - DNA, 25 bp, Probe Sequence
atcctctgctgactccatatggagg

SEQ ID NO: 130468 - DNA, 25 bp, Probe Sequence
atcctgctcgacactatcagggatg

SEQ ID NO: 130469 - DNA, 25 bp, Probe Sequence
atccagctcggaactctagcttagt

SEQ ID NO: 130470 - DNA, 25 bp, Probe Sequence
atcctgctatggtaccattctaatg

SEQ ID NO: 130471 - DNA, 25 bp, Probe Sequence
atccttgaggtactcataccttggt

SEQ ID NO: 130472 - DNA, 25 bp, Probe Sequence
atcctcggaggacatatttcggctt

SEQ ID NO: 130473 - DNA, 25 bp, Probe Sequence
atccttgtgggtcagatttcagagt

SEQ ID NO: 130474 - DNA, 25 bp, Probe Sequence
atccttgggagtcattaccacgcct

SEQ ID NO: 130475 - DNA, 25 bp, Probe Sequence
atcctgaatggagctttaccaccgt

SEQ ID NO: 130476 - DNA, 25 bp, Probe Sequence
atgcctgacggatcatttcaaacct

SEQ ID NO: 130477 - DNA, 25 bp, Probe Sequence
atgccagcactggagatgcaattaa

SEQ ID NO: 130478 - DNA, 25 bp, Probe Sequence
atccgcattgctgataccaatatca

SEQ ID NO: 130479 - DNA, 25 bp, Probe Sequence
atgctggagtgttataccatggaat

SEQ ID NO: 130480 - DNA, 25 bp, Probe Sequence
atgtgcggcattatccacgaggcaa

SEQ ID NO: 130481 - DNA, 25 bp, Probe Sequence
atcctggcaaatactcctgcaggcc

SEQ ID NO: 130482 - DNA, 25 bp, Probe Sequence
atccataaagtcatcctgggctccc

SEQ ID NO: 130483 - DNA, 25 bp, Probe Sequence
atccataaagtcatcctgggctccc

SEQ ID NO: 130484 - DNA, 25 bp, Probe Sequence
atccaacacagtagtagtaggctcc

SEQ ID NO: 130485 - DNA, 25 bp, Probe Sequence
atgccaaacagttgtaccactgcta

SEQ ID NO: 130486 - DNA, 25 bp, Probe Sequence
atccagaaggtgttcacaaagcatg

SEQ ID NO: 130487 - DNA, 25 bp, Probe Sequence
atcctgtgtgggtacctgaagctga

SEQ ID NO: 130488 - DNA, 25 bp, Probe Sequence
atccgtgtgggccagagcatgaaca

SEQ ID NO: 130489 - DNA, 25 bp, Probe Sequence
atccgctatgttggctaagatgcac

SEQ ID NO: 130490 - DNA, 25 bp, Probe Sequence
atcctgtctttgactgaggcatcac

SEQ ID NO: 130491 - DNA, 25 bp, Probe Sequence
atcctgtggtgtccatgaggtacca

SEQ ID NO: 130492 - DNA, 25 bp, Probe Sequence
atccattaatgtatcagttatccca

SEQ ID NO: 130493 - DNA, 25 bp, Probe Sequence
atccatttgtaagcatttatcccat

SEQ ID NO: 130494 - DNA, 25 bp, Probe Sequence
atcctattgaattattcttccccat

SEQ ID NO: 130495 - DNA, 25 bp, Probe Sequence
atgccacttaaatttctttaccacg

SEQ ID NO: 130496 - DNA, 25 bp, Probe Sequence
atccttgtctaatttcaataactac

SEQ ID NO: 130497 - DNA, 25 bp, Probe Sequence
actcctgaaacctcaaacagtacca

SEQ ID NO: 130498 - DNA, 25 bp, Probe Sequence
agctccgaaatcaccaccaaggact

SEQ ID NO: 130499 - DNA, 25 bp, Probe Sequence
atgcccgtgtcaaccacaacaagta

SEQ ID NO: 130500 - DNA, 25 bp, Probe Sequence
atgctgccatggtattccactacat

SEQ ID NO: 130501 - DNA, 25 bp, Probe Sequence
atgctgctgggttcattcattcatt

SEQ ID NO: 130502 - DNA, 25 bp, Probe Sequence
atgcgagcgctatcttcacatagtt

SEQ ID NO: 130503 - DNA, 25 bp, Probe Sequence
atgctagccaaacttcaaattctgt

SEQ ID NO: 130504 - DNA, 25 bp, Probe Sequence
atgctataaaatcatcacggtcttt

SEQ ID NO: 130505 - DNA, 25 bp, Probe Sequence
atgcctaagaaaatactcctctgat

SEQ ID NO: 130506 - DNA, 25 bp, Probe Sequence
atgcctttagaatattgtgcctgtt

SEQ ID NO: 130507 - DNA, 25 bp, Probe Sequence
atgccttctagattcactgtctttt

SEQ ID NO: 130508 - DNA, 25 bp, Probe Sequence
atgccctttgtcccattatttggag

SEQ ID NO: 130509 - DNA, 25 bp, Probe Sequence
atccttttcataccttatttggaat

SEQ ID NO: 130510 - DNA, 25 bp, Probe Sequence
atcctttttgaggctcctttgacta

SEQ ID NO: 130511 - DNA, 25 bp, Probe Sequence
atcctttcattgagccttttatcct

SEQ ID NO: 130512 - DNA, 25 bp, Probe Sequence
atccttactctcaccttttatgaga

SEQ ID NO: 130513 - DNA, 25 bp, Probe Sequence
atcctgtacttcatccttgcaaaga

SEQ ID NO: 130514 - DNA, 25 bp, Probe Sequence
atccgatactcccagatctgtgcaa

SEQ ID NO: 130515 - DNA, 25 bp, Probe Sequence
atcctaactccatgtctctgagcat

SEQ ID NO: 130516 - DNA, 25 bp, Probe Sequence
atcctcaattcacatgtcattagtt

SEQ ID NO: 130517 - DNA, 25 bp, Probe Sequence
atcctcgctatcatattcattaata

SEQ ID NO: 130518 - DNA, 25 bp, Probe Sequence
atccattcaatcatttattcattgg

SEQ ID NO: 130519 - DNA, 25 bp, Probe Sequence
atccactgccttactagatgtaggg

SEQ ID NO: 130520 - DNA, 25 bp, Probe Sequence
atccatgctgcctttcaaagcaagt

SEQ ID NO: 130521 - DNA, 25 bp, Probe Sequence
atgctattgccattaccataccatt

SEQ ID NO: 130522 - DNA, 25 bp, Probe Sequence
atccaagcactgtgccatgtcagca

SEQ ID NO: 130523 - DNA, 25 bp, Probe Sequence
atccacaagtgctcgtgctgtgcga

SEQ ID NO: 130524 - DNA, 25 bp, Probe Sequence
atgcttatcggctctggctatgatg

SEQ ID NO: 130525 - DNA, 25 bp, Probe Sequence
atgctgtattacactgtaatggtgc

SEQ ID NO: 130526 - DNA, 25 bp, Probe Sequence
atcctatgtacctatgttatctatc

SEQ ID NO: 130527 - DNA, 25 bp, Probe Sequence
atcctctgatacagctttatccact

SEQ ID NO: 130528 - DNA, 25 bp, Probe Sequence
atccttgcacaccgctttattaaga

SEQ ID NO: 130529 - DNA, 25 bp, Probe Sequence
atgcctgcatggtgcctttttagga

SEQ ID NO: 130530 - DNA, 25 bp, Probe Sequence
atgcgtgcataccacttttgttctt

SEQ ID NO: 130531 - DNA, 25 bp, Probe Sequence
atgctgcactaacctttggtatcct

SEQ ID NO: 130532 - DNA, 25 bp, Probe Sequence
atgctggtacaagttgtgggactgc

SEQ ID NO: 130533 - DNA, 25 bp, Probe Sequence
atgcgtgcgagaagtcagtggtaac

SEQ ID NO: 130534 - DNA, 25 bp, Probe Sequence
atgcgtgtgattatttggaacagtt

SEQ ID NO: 130535 - DNA, 25 bp, Probe Sequence
atgcctgtacggtttgcagacatca

SEQ ID NO: 130536 - DNA, 25 bp, Probe Sequence
atgctgcgtccctaattgtacacag

SEQ ID NO: 130537 - DNA, 25 bp, Probe Sequence
atgctagctctaaattgtgtacaac

SEQ ID NO: 130538 - DNA, 25 bp, Probe Sequence
atgcggctgcactggtggaagaagc

SEQ ID NO: 130539 - DNA, 25 bp, Probe Sequence
atgcagggcctggaggcgcacaaat

SEQ ID NO: 130540 - DNA, 25 bp, Probe Sequence
atgcagggactgtgaaaaagctttc

SEQ ID NO: 130541 - DNA, 25 bp, Probe Sequence
atgcaggaacagtgactaattttgt

SEQ ID NO: 130542 - DNA, 25 bp, Probe Sequence
atgcagaacttgtgggaatatttta

SEQ ID NO: 130543 - DNA, 25 bp, Probe Sequence
atccaactaggacacatatcttttg

SEQ ID NO: 130544 - DNA, 25 bp, Probe Sequence
atccacagtaggacaccatccttct

SEQ ID NO: 130545 - DNA, 25 bp, Probe Sequence
atccacaatatatcacaaattccta

SEQ ID NO: 130546 - DNA, 25 bp, Probe Sequence
atccatttctgataaagttctctat

SEQ ID NO: 130547 - DNA, 25 bp, Probe Sequence
atccatttctgcagaacttactgta

SEQ ID NO: 130548 - DNA, 25 bp, Probe Sequence
atccttttcagccaactggactgaa

SEQ ID NO: 130549 - DNA, 25 bp, Probe Sequence
atcctgtctcccgatgaaaacatat

SEQ ID NO: 130550 - DNA, 25 bp, Probe Sequence
atcctgtcacatgttgccaaatatt

SEQ ID NO: 130551 - DNA, 25 bp, Probe Sequence
atgcctctcaatctgttccaatggt

SEQ ID NO: 130552 - DNA, 25 bp, Probe Sequence
atgccagtgctgagtgactccaagg

SEQ ID NO: 130553 - DNA, 25 bp, Probe Sequence
atcctggatgaggcgatctacaagg

SEQ ID NO: 130554 - DNA, 25 bp, Probe Sequence
atcctctgatcagggtgagcatcaa

SEQ ID NO: 130555 - DNA, 25 bp, Probe Sequence
atcctgcggcaggactgcagagcag

SEQ ID NO: 130556 - DNA, 25 bp, Probe Sequence
atgccatgtggagaatagaggaaac

SEQ ID NO: 130557 - DNA, 25 bp, Probe Sequence
atgagtgggaaatggctaaaacaat

SEQ ID NO: 130558 - DNA, 25 bp, Probe Sequence
atgagctaaacacagttaaataact

SEQ ID NO: 130559 - DNA, 25 bp, Probe Sequence
atgcctaaatccaagagctaaaaat

SEQ ID NO: 130560 - DNA, 25 bp, Probe Sequence
atccaaactcccaagcaaagtaagc

SEQ ID NO: 130561 - DNA, 25 bp, Probe Sequence
atccaacacatccagaatgcaattg

SEQ ID NO: 130562 - DNA, 25 bp, Probe Sequence
atccaggcgcagcagaacaagtccc

SEQ ID NO: 130563 - DNA, 25 bp, Probe Sequence
atgccattcgactgaacaaacccta

SEQ ID NO: 130564 - DNA, 25 bp, Probe Sequence
atgaatccagaagggaacaagccct

SEQ ID NO: 130565 - DNA, 25 bp, Probe Sequence
atgaattcgaacagcatacccccga

SEQ ID NO: 130566 - DNA, 25 bp, Probe Sequence
atgaattcgaacagcatacccccga

SEQ ID NO: 130567 - DNA, 25 bp, Probe Sequence
atgaaacgatatgagcttccagccc

SEQ ID NO: 130568 - DNA, 25 bp, Probe Sequence
atgaacagccaggtagcttccagcc

SEQ ID NO: 130569 - DNA, 25 bp, Probe Sequence
atgaacatgctagcttcattccctc

SEQ ID NO: 130570 - DNA, 25 bp, Probe Sequence
atgcaggagcttgaagcactcggct

SEQ ID NO: 130571 - DNA, 25 bp, Probe Sequence
atgctggactgttttgacctggttt

SEQ ID NO: 130572 - DNA, 25 bp, Probe Sequence
atgcttactgttctaatctggtggt

SEQ ID NO: 130573 - DNA, 25 bp, Probe Sequence
atccttctgttcttagatctgtatc

SEQ ID NO: 130574 - DNA, 25 bp, Probe Sequence
atgcctgttttcatagacattccca

SEQ ID NO: 130575 - DNA, 25 bp, Probe Sequence
atcctttatgcttgtagattccccc

SEQ ID NO: 130576 - DNA, 25 bp, Probe Sequence
atccttccttggaatggtcccttgt

SEQ ID NO: 130577 - DNA, 25 bp, Probe Sequence
atcctctttattttggtcctttatg

SEQ ID NO: 130578 - DNA, 25 bp, Probe Sequence
atgccttttagtttttccaatgatt

SEQ ID NO: 130579 - DNA, 25 bp, Probe Sequence
atgcctatttaatggaacctccata

SEQ ID NO: 130580 - DNA, 25 bp, Probe Sequence
atgccaattttccagtggatcccca

SEQ ID NO: 130581 - DNA, 25 bp, Probe Sequence
atccaaattgtggacgtgattccct

SEQ ID NO: 130582 - DNA, 25 bp, Probe Sequence
atccaaatggctgcttttgtctccc

SEQ ID NO: 130583 - DNA, 25 bp, Probe Sequence
atccaaatggctgcttttgtctccc

SEQ ID NO: 130584 - DNA, 25 bp, Probe Sequence
atccaaagtttggtgtctctctctc

SEQ ID NO: 130585 - DNA, 25 bp, Probe Sequence
atgcaaaagtcaattgccttcctat

SEQ ID NO: 130586 - DNA, 25 bp, Probe Sequence
atgccccaacaaactcatggcgttg

SEQ ID NO: 130587 - DNA, 25 bp, Probe Sequence
atcctgcacaataaactccggaagc

SEQ ID NO: 130588 - DNA, 25 bp, Probe Sequence
atccagacagtctgaccgtggaacg

SEQ ID NO: 130589 - DNA, 25 bp, Probe Sequence
atcctgacgatcccacaactgggac

SEQ ID NO: 130590 - DNA, 25 bp, Probe Sequence
atccatggtgtcccacaaatggttt

SEQ ID NO: 130591 - DNA, 25 bp, Probe Sequence
atccatggtatcgtacacccagtgt

SEQ ID NO: 130592 - DNA, 25 bp, Probe Sequence
atccagagttcttagagcttgtgtc

SEQ ID NO: 130593 - DNA, 25 bp, Probe Sequence
atcctgagtagctaatgcaccttga

SEQ ID NO: 130594 - DNA, 25 bp, Probe Sequence
atcctgtgatactaagatctcagtc

SEQ ID NO: 130595 - DNA, 25 bp, Probe Sequence
atcctgtgcaacaagtgcaccactc

SEQ ID NO: 130596 - DNA, 25 bp, Probe Sequence
atccattcaagaagatagagctctc

SEQ ID NO: 130597 - DNA, 25 bp, Probe Sequence
atccattcacagccaggagatgctg

SEQ ID NO: 130598 - DNA, 25 bp, Probe Sequence
atcctctgcacagcaagtagcagtg

SEQ ID NO: 130599 - DNA, 25 bp, Probe Sequence
atcctctgcctgctgatggagagtg

SEQ ID NO: 130600 - DNA, 25 bp, Probe Sequence
atccaggcctgccatgttgagaacc

SEQ ID NO: 130601 - DNA, 25 bp, Probe Sequence
atgcgaggtgcctttggaaagcccc

SEQ ID NO: 130602 - DNA, 25 bp, Probe Sequence
atgcgcaatgctgacttggagctag

SEQ ID NO: 130603 - DNA, 25 bp, Probe Sequence
atgcgaaatgcgagtcggctttcct

SEQ ID NO: 130604 - DNA, 25 bp, Probe Sequence
atgccagaactaccctggttactct

SEQ ID NO: 130605 - DNA, 25 bp, Probe Sequence
atcctatactccagctgcttaactt

SEQ ID NO: 130606 - DNA, 25 bp, Probe Sequence
atccattccttcatgtctttattta

SEQ ID NO: 130607 - DNA, 25 bp, Probe Sequence
atcctcatccaacaggctttatgta

SEQ ID NO: 130608 - DNA, 25 bp, Probe Sequence
atcctgaggcacataggccttctga

SEQ ID NO: 130609 - DNA, 25 bp, Probe Sequence
atgccaaggccatgagtgcacgtgc

SEQ ID NO: 130610 - DNA, 25 bp, Probe Sequence
atccaacagccatgagtaacatcaa

SEQ ID NO: 130611 - DNA, 25 bp, Probe Sequence
atccaaaggaattgttaatgcagtt

SEQ ID NO: 130612 - DNA, 25 bp, Probe Sequence
atccaacaggccaggtgcaatcgct

SEQ ID NO: 130613 - DNA, 25 bp, Probe Sequence
atgccagagggctaaggggacactg

SEQ ID NO: 130614 - DNA, 25 bp, Probe Sequence
atccaagtggattgcagacggctca

SEQ ID NO: 130615 - DNA, 25 bp, Probe Sequence
atccttgatgattgacaacacccat

SEQ ID NO: 130616 - DNA, 25 bp, Probe Sequence
atccttgatgtcaacacagcccaaa

SEQ ID NO: 130617 - DNA, 25 bp, Probe Sequence
atccagagacacacaagagcaccaa

SEQ ID NO: 130618 - DNA, 25 bp, Probe Sequence
atccatgagaccattgagtccatca

SEQ ID NO: 130619 - DNA, 25 bp, Probe Sequence
atccaaatccttagcagcccaaact

SEQ ID NO: 130620 - DNA, 25 bp, Probe Sequence
atgccaaattctgtcagctatccaa

SEQ ID NO: 130621 - DNA, 25 bp, Probe Sequence
atccaaatcctggaaccatacatca

SEQ ID NO: 130622 - DNA, 25 bp, Probe Sequence
atccactatcctggcaactcaaggc

SEQ ID NO: 130623 - DNA, 25 bp, Probe Sequence
atccatctactcattcattcataat

SEQ ID NO: 130624 - DNA, 25 bp, Probe Sequence
atcctatatctgtttctacatcaga

SEQ ID NO: 130625 - DNA, 25 bp, Probe Sequence
atccataactgatttccaagctggt

SEQ ID NO: 130626 - DNA, 25 bp, Probe Sequence
atgccataaactgtgacaagtcagt

SEQ ID NO: 130627 - DNA, 25 bp, Probe Sequence
atcctcaagcacatcaacgagctga

SEQ ID NO: 130628 - DNA, 25 bp, Probe Sequence
atcctcactgatgatttcaagctaa

SEQ ID NO: 130629 - DNA, 25 bp, Probe Sequence
atcctgcccatccatttgaggaaga

SEQ ID NO: 130630 - DNA, 25 bp, Probe Sequence
acctccccttcttggggaaatgctg

SEQ ID NO: 130631 - DNA, 25 bp, Probe Sequence
aaatatcctttttcaggaggaactg

SEQ ID NO: 130632 - DNA, 25 bp, Probe Sequence
atgagtggtcttttaattaggaaca

SEQ ID NO: 130633 - DNA, 25 bp, Probe Sequence
atgccttgtttttaatgatatggaa

SEQ ID NO: 130634 - DNA, 25 bp, Probe Sequence
atcctctctttaaatgtgatagtct

SEQ ID NO: 130635 - DNA, 25 bp, Probe Sequence
atgtttcttctaaatggtaatcctt

SEQ ID NO: 130636 - DNA, 25 bp, Probe Sequence
atgcttcccttttaacataaccctg

SEQ ID NO: 130637 - DNA, 25 bp, Probe Sequence
atgcttccacagcgtaaatacaccc

SEQ ID NO: 130638 - DNA, 25 bp, Probe Sequence
agcttccacctccataaagttacct

SEQ ID NO: 130639 - DNA, 25 bp, Probe Sequence
atgattcaacccctttggaaaactg

SEQ ID NO: 130640 - DNA, 25 bp, Probe Sequence
atgcttagagcatgttcttggaaca

SEQ ID NO: 130641 - DNA, 25 bp, Probe Sequence
atgcttagagcatgttcttggaaca

SEQ ID NO: 130642 - DNA, 25 bp, Probe Sequence
atgctgaagaatgtggttgctaaac

SEQ ID NO: 130643 - DNA, 25 bp, Probe Sequence
atgccaaggggtgtgcctgatacca

SEQ ID NO: 130644 - DNA, 25 bp, Probe Sequence
atccaatgccgagtggctgactgta

SEQ ID NO: 130645 - DNA, 25 bp, Probe Sequence
atccaagcaccctaatgactgttta

SEQ ID NO: 130646 - DNA, 25 bp, Probe Sequence
atccattcaccctattagtgggcat

SEQ ID NO: 130647 - DNA, 25 bp, Probe Sequence
atccattcacagttctttgggccag

SEQ ID NO: 130648 - DNA, 25 bp, Probe Sequence
atgccattcagaagtcttggactgc

SEQ ID NO: 130649 - DNA, 25 bp, Probe Sequence
atccaattaatgatgtctgacatgc

SEQ ID NO: 130650 - DNA, 25 bp, Probe Sequence
atccagattcactgtgttcagctct

SEQ ID NO: 130651 - DNA, 25 bp, Probe Sequence
atgctatcaaactgtgatacactta

SEQ ID NO: 130652 - DNA, 25 bp, Probe Sequence
atgctctcgaacagtgtggcctgat

SEQ ID NO: 130653 - DNA, 25 bp, Probe Sequence
atgcttgctacgagcggtggctcat

SEQ ID NO: 130654 - DNA, 25 bp, Probe Sequence
atgccccggatggagctgggtcatt

SEQ ID NO: 130655 - DNA, 25 bp, Probe Sequence
atcctcacgagctatagtggcgcac

SEQ ID NO: 130656 - DNA, 25 bp, Probe Sequence
atccatcagggccatgagtgtcacc

SEQ ID NO: 130657 - DNA, 25 bp, Probe Sequence
atgctgtaggggaagtgccactcgc

SEQ ID NO: 130658 - DNA, 25 bp, Probe Sequence
atgcttgaggggacgaatatccact

SEQ ID NO: 130659 - DNA, 25 bp, Probe Sequence
atgcccaagtggaccagagtcatcc

SEQ ID NO: 130660 - DNA, 25 bp, Probe Sequence
atgcctggaatgccaccaggtatgc

SEQ ID NO: 130661 - DNA, 25 bp, Probe Sequence
atgcgttaatgcccctggcatagcc

SEQ ID NO: 130662 - DNA, 25 bp, Probe Sequence
atgcgttatgcccagacgcagctgg

SEQ ID NO: 130663 - DNA, 25 bp, Probe Sequence
atgcctgacgcatctgtctgaggag

SEQ ID NO: 130664 - DNA, 25 bp, Probe Sequence
atgccatggacatcttcatagagct

SEQ ID NO: 130665 - DNA, 25 bp, Probe Sequence
atccagaacagcctccaagagctct

SEQ ID NO: 130666 - DNA, 25 bp, Probe Sequence
atccacaaggtcgtaaatgcatgct

SEQ ID NO: 130667 - DNA, 25 bp, Probe Sequence
atccagcagggcggtcaaatcttaa

SEQ ID NO: 130668 - DNA, 25 bp, Probe Sequence
atgccaggcggcagtttcatttaac

SEQ ID NO: 130669 - DNA, 25 bp, Probe Sequence
atgacccgagcaagttactttcctt

SEQ ID NO: 130670 - DNA, 25 bp, Probe Sequence
atgacccaagcattggtatctacgg

SEQ ID NO: 130671 - DNA, 25 bp, Probe Sequence
atgcagccccgaatgctggttacgt

SEQ ID NO: 130672 - DNA, 25 bp, Probe Sequence
atgatgcggccagagcaggtttcct

SEQ ID NO: 130673 - DNA, 25 bp, Probe Sequence
atgactgatgtggtagggtaatctt

SEQ ID NO: 130674 - DNA, 25 bp, Probe Sequence
atgaccagtcacaatggttacaggt

SEQ ID NO: 130675 - DNA, 25 bp, Probe Sequence
atgctcgcaggttagagttgggtgt

SEQ ID NO: 130676 - DNA, 25 bp, Probe Sequence
atgctacttgcctacagtggggtgc

SEQ ID NO: 130677 - DNA, 25 bp, Probe Sequence
atgctcatttgctggcggacagttc

SEQ ID NO: 130678 - DNA, 25 bp, Probe Sequence
atcctttgacgctgtgacaatgctg

SEQ ID NO: 130679 - DNA, 25 bp, Probe Sequence
atccattcaactctgtgacacagca

SEQ ID NO: 130680 - DNA, 25 bp, Probe Sequence
atcctagaatctttgtgctctcgct

SEQ ID NO: 130681 - DNA, 25 bp, Probe Sequence
atcctttatctgtgacttcatgctc

SEQ ID NO: 130682 - DNA, 25 bp, Probe Sequence
atccttgtttgattcaccagacttt

SEQ ID NO: 130683 - DNA, 25 bp, Probe Sequence
atccttaggatgcacccaagcttgt

SEQ ID NO: 130684 - DNA, 25 bp, Probe Sequence
atgccagtcgggcagcccaggatag

SEQ ID NO: 130685 - DNA, 25 bp, Probe Sequence
atccttctggtccagcgcaaggagg

SEQ ID NO: 130686 - DNA, 25 bp, Probe Sequence
atccttgggctatgtcagaggcaca

SEQ ID NO: 130687 - DNA, 25 bp, Probe Sequence
atcctttcagaatgtagcactcacg

SEQ ID NO: 130688 - DNA, 25 bp, Probe Sequence
atgcagttacaacagcatacagcat

SEQ ID NO: 130689 - DNA, 25 bp, Probe Sequence
atgcagatctacagcgccagagtgc

SEQ ID NO: 130690 - DNA, 25 bp, Probe Sequence
atgcagatctacagcgccagagtgc

SEQ ID NO: 130691 - DNA, 25 bp, Probe Sequence
atgaattcacgtaccaatggcacta

SEQ ID NO: 130692 - DNA, 25 bp, Probe Sequence
atgaatgccctcatctaattgcctt

SEQ ID NO: 130693 - DNA, 25 bp, Probe Sequence
atgcctggccataatctacattttc

SEQ ID NO: 130694 - DNA, 25 bp, Probe Sequence
atgccttgccaaatatatagtatct

SEQ ID NO: 130695 - DNA, 25 bp, Probe Sequence
atgccttacactacttggtttctga

SEQ ID NO: 130696 - DNA, 25 bp, Probe Sequence
atgccttcctctcagaggtgttcta

SEQ ID NO: 130697 - DNA, 25 bp, Probe Sequence
atgcattttcctacatgggttgact

SEQ ID NO: 130698 - DNA, 25 bp, Probe Sequence
atgcgattctccatcaggaattcac

SEQ ID NO: 130699 - DNA, 25 bp, Probe Sequence
atgccactatccaaagcaaaaactg

SEQ ID NO: 130700 - DNA, 25 bp, Probe Sequence
atgcgtcatccctgaaataataaga

SEQ ID NO: 130701 - DNA, 25 bp, Probe Sequence
atccaccccatccaatttatcaagg

SEQ ID NO: 130702 - DNA, 25 bp, Probe Sequence
atccaccgccactgtgtgaaactgt

SEQ ID NO: 130703 - DNA, 25 bp, Probe Sequence
atccacccacacctgaggaagactc

SEQ ID NO: 130704 - DNA, 25 bp, Probe Sequence
atccatcaaatcactaggaagccta

SEQ ID NO: 130705 - DNA, 25 bp, Probe Sequence
atccatcaaccaagtgggaggtctg

SEQ ID NO: 130706 - DNA, 25 bp, Probe Sequence
atccacacccaatgggtggatgatg

SEQ ID NO: 130707 - DNA, 25 bp, Probe Sequence
atgccaactactgcgagggtgagtg

SEQ ID NO: 130708 - DNA, 25 bp, Probe Sequence
atgcaagactactatcaggggaagg

SEQ ID NO: 130709 - DNA, 25 bp, Probe Sequence
atgctgtctatttcaaggggaactg

SEQ ID NO: 130710 - DNA, 25 bp, Probe Sequence
atgcgatttgacagaagcggaactc

SEQ ID NO: 130711 - DNA, 25 bp, Probe Sequence
atgcggggaccgtgcaggagatgct

SEQ ID NO: 130712 - DNA, 25 bp, Probe Sequence
atgatgtgggaggcctactggacgc

SEQ ID NO: 130713 - DNA, 25 bp, Probe Sequence
atgcgcgggggccatattagcagcg

SEQ ID NO: 130714 - DNA, 25 bp, Probe Sequence
atgccggtggttaatgtggacggtt

SEQ ID NO: 130715 - DNA, 25 bp, Probe Sequence
atgccgcagaccattatctggcggg

SEQ ID NO: 130716 - DNA, 25 bp, Probe Sequence
atgccactgaccagcacatcgtgga

SEQ ID NO: 130717 - DNA, 25 bp, Probe Sequence
atccatctgcctcagacagtgttac

SEQ ID NO: 130718 - DNA, 25 bp, Probe Sequence
atgcttctactgtgacacttatctc

SEQ ID NO: 130719 - DNA, 25 bp, Probe Sequence
atgcatcgcaacggtgacacttact

SEQ ID NO: 130720 - DNA, 25 bp, Probe Sequence
atgcctgcaacgtgaacatcttcga

SEQ ID NO: 130721 - DNA, 25 bp, Probe Sequence
atccatgcaagctgagaaatctcaa

SEQ ID NO: 130722 - DNA, 25 bp, Probe Sequence
atccagcatcccaagatcattctac

SEQ ID NO: 130723 - DNA, 25 bp, Probe Sequence
atgccacatttaaatagtgctacta

SEQ ID NO: 130724 - DNA, 25 bp, Probe Sequence
atccagcactgtaagaagctgtcca

SEQ ID NO: 130725 - DNA, 25 bp, Probe Sequence
atccatgactgtggaggggccaccc

SEQ ID NO: 130726 - DNA, 25 bp, Probe Sequence
atccatactgtgtaggtgcagccag

SEQ ID NO: 130727 - DNA, 25 bp, Probe Sequence
atccatccatctccagggagcaaga

SEQ ID NO: 130728 - DNA, 25 bp, Probe Sequence
atgccaggctgcgcagtgaagaaaa

SEQ ID NO: 130729 - DNA, 25 bp, Probe Sequence
atgccatgactgctaacataaaagg

SEQ ID NO: 130730 - DNA, 25 bp, Probe Sequence
atgccacctgaaaactatgaacctg

SEQ ID NO: 130731 - DNA, 25 bp, Probe Sequence
atgccacctgagatgaacatgaacg

SEQ ID NO: 130732 - DNA, 25 bp, Probe Sequence
atgctacctgattgtataaggaaca

SEQ ID NO: 130733 - DNA, 25 bp, Probe Sequence
atgcatggttattggttagaaaagt

SEQ ID NO: 130734 - DNA, 25 bp, Probe Sequence
atgctcctgtactcttcagagaaga

SEQ ID NO: 130735 - DNA, 25 bp, Probe Sequence
atccactggcactttatctacaaca

SEQ ID NO: 130736 - DNA, 25 bp, Probe Sequence
atgccattgcgtttctaatagaaca

SEQ ID NO: 130737 - DNA, 25 bp, Probe Sequence
cggcattcgttatacggaagatgat

SEQ ID NO: 130738 - DNA, 25 bp, Probe Sequence
atggcttctgtctcccgaaaagaag

SEQ ID NO: 130739 - DNA, 25 bp, Probe Sequence
atgctggtcatttaccctcagaaag

SEQ ID NO: 130740 - DNA, 25 bp, Probe Sequence
atgcgtggctggaaccacattgaag

SEQ ID NO: 130741 - DNA, 25 bp, Probe Sequence
atgcggtttgcatcgactgatagtg

SEQ ID NO: 130742 - DNA, 25 bp, Probe Sequence
atgcctgtatgtttcgtcagatcct

SEQ ID NO: 130743 - DNA, 25 bp, Probe Sequence
atgctttgatttacactcgaactcg

SEQ ID NO: 130744 - DNA, 25 bp, Probe Sequence
atgccttgatctaccactgctaagg

SEQ ID NO: 130745 - DNA, 25 bp, Probe Sequence
atgcctatgatcgtagcacttgggg

SEQ ID NO: 130746 - DNA, 25 bp, Probe Sequence
atgccttgcacacaggtgttggtga

SEQ ID NO: 130747 - DNA, 25 bp, Probe Sequence
atgccgctatcaccatggggatggt

SEQ ID NO: 130748 - DNA, 25 bp, Probe Sequence
atgccgctatcaccatggggatggt

SEQ ID NO: 130749 - DNA, 25 bp, Probe Sequence
atccagcctatcgttgatggatatt

SEQ ID NO: 130750 - DNA, 25 bp, Probe Sequence
atccagaccacaaatgcaggaattt

SEQ ID NO: 130751 - DNA, 25 bp, Probe Sequence
atccacctgacaaagggctgatatt

SEQ ID NO: 130752 - DNA, 25 bp, Probe Sequence
atccacggcactccgcgagctgtat

SEQ ID NO: 130753 - DNA, 25 bp, Probe Sequence
atccacagctactctcagatgctta

SEQ ID NO: 130754 - DNA, 25 bp, Probe Sequence
atgcgaacagaatttcgatgcctat

SEQ ID NO: 130755 - DNA, 25 bp, Probe Sequence
atgctgatgaaatgacctatgccca

SEQ ID NO: 130756 - DNA, 25 bp, Probe Sequence
atgccatcaagtggaacttcaccaa

SEQ ID NO: 130757 - DNA, 25 bp, Probe Sequence
atgcccaaggcaacatcttactagt

SEQ ID NO: 130758 - DNA, 25 bp, Probe Sequence
atgctgacttggagctagatgaggt

SEQ ID NO: 130759 - DNA, 25 bp, Probe Sequence
atgctaagtgaaagtgagaagtgac

SEQ ID NO: 130760 - DNA, 25 bp, Probe Sequence
atgctgtggacaaggtgatgaagga

SEQ ID NO: 130761 - DNA, 25 bp, Probe Sequence
atgcttggagcagtcagtacatacc

SEQ ID NO: 130762 - DNA, 25 bp, Probe Sequence
atgatgcttctgctcaggaatggcc

SEQ ID NO: 130763 - DNA, 25 bp, Probe Sequence
atgcactctatccgggagatggcct

SEQ ID NO: 130764 - DNA, 25 bp, Probe Sequence
atgctgagtgagctgcgtgagggcc

SEQ ID NO: 130765 - DNA, 25 bp, Probe Sequence
atgccaatgggtggaatgatgccac

SEQ ID NO: 130766 - DNA, 25 bp, Probe Sequence
atgccaagaggtgcaatgtggtgtg

SEQ ID NO: 130767 - DNA, 25 bp, Probe Sequence
atgccttgaaggccaggaggtggga

SEQ ID NO: 130768 - DNA, 25 bp, Probe Sequence
atgccataaaggccagctatgtgat

SEQ ID NO: 130769 - DNA, 25 bp, Probe Sequence
atgccatgagaggggtgctgatgga

SEQ ID NO: 130770 - DNA, 25 bp, Probe Sequence
atgcaaggagaccggctgggcatct

SEQ ID NO: 130771 - DNA, 25 bp, Probe Sequence
atgaaggcatggcgatgcccgtcct

SEQ ID NO: 130772 - DNA, 25 bp, Probe Sequence
atgctctggtggctagggatgtact

SEQ ID NO: 130773 - DNA, 25 bp, Probe Sequence
atgcccagtgctttagggaaactat

SEQ ID NO: 130774 - DNA, 25 bp, Probe Sequence
atccagggtcaaagctgcgaaacct

SEQ ID NO: 130775 - DNA, 25 bp, Probe Sequence
atccatgtggttaactggactgacc

SEQ ID NO: 130776 - DNA, 25 bp, Probe Sequence
atgccagtgtttgacagaaatacct

SEQ ID NO: 130777 - DNA, 25 bp, Probe Sequence
accagtctggctttaaaccaactgg

SEQ ID NO: 130778 - DNA, 25 bp, Probe Sequence
accatcctggttcacccagaattga

SEQ ID NO: 130779 - DNA, 25 bp, Probe Sequence
atgtaattggttagccccagacttg

SEQ ID NO: 130780 - DNA, 25 bp, Probe Sequence
atgctaagtggtatccgaggttctt

SEQ ID NO: 130781 - DNA, 25 bp, Probe Sequence
atgccatggtgtgttcccaattatt

SEQ ID NO: 130782 - DNA, 25 bp, Probe Sequence
atgcctgtatcaggggcaccaatgt

SEQ ID NO: 130783 - DNA, 25 bp, Probe Sequence
atgccttctccgggacagattggat

SEQ ID NO: 130784 - DNA, 25 bp, Probe Sequence
atgcctaagcctgtcagagttgttc

SEQ ID NO: 130785 - DNA, 25 bp, Probe Sequence
atgccaaatttgatagactgctgtt

SEQ ID NO: 130786 - DNA, 25 bp, Probe Sequence
atccacattgattttaactgctttg

SEQ ID NO: 130787 - DNA, 25 bp, Probe Sequence
atgccaatatgattatttccagatt

SEQ ID NO: 130788 - DNA, 25 bp, Probe Sequence
atgaaaagctttgtccagcactgga

SEQ ID NO: 130789 - DNA, 25 bp, Probe Sequence
atgagaaacatttggtgcccagaag

SEQ ID NO: 130790 - DNA, 25 bp, Probe Sequence
atgaagaggctgagccccctgaaac

SEQ ID NO: 130791 - DNA, 25 bp, Probe Sequence
atgaagaactgtggcctaattggaa

SEQ ID NO: 130792 - DNA, 25 bp, Probe Sequence
atgaaaaggctcgaaagactggact

SEQ ID NO: 130793 - DNA, 25 bp, Probe Sequence
atgcgtgaacccgggaggcggagct

SEQ ID NO: 130794 - DNA, 25 bp, Probe Sequence
atgccatgaaccgcgaagtcagctc

SEQ ID NO: 130795 - DNA, 25 bp, Probe Sequence
atccataatccttctaatagccatc

SEQ ID NO: 130796 - DNA, 25 bp, Probe Sequence
atgcattaaccactctacagactcc

SEQ ID NO: 130797 - DNA, 25 bp, Probe Sequence
atgcactatgagatgctcttcaact

SEQ ID NO: 130798 - DNA, 25 bp, Probe Sequence
atgccttagaagtctcatatttcaa

SEQ ID NO: 130799 - DNA, 25 bp, Probe Sequence
atgcctttctagtcctattctattg

SEQ ID NO: 130800 - DNA, 25 bp, Probe Sequence
atgccctgcatcaagactcgattgc

SEQ ID NO: 130801 - DNA, 25 bp, Probe Sequence
atgcccagccagtactctttttggc

SEQ ID NO: 130802 - DNA, 25 bp, Probe Sequence
atgcccatccagttttctatatttc

SEQ ID NO: 130803 - DNA, 25 bp, Probe Sequence
atgcccagctaatttttgtattttc

SEQ ID NO: 130804 - DNA, 25 bp, Probe Sequence
atccaagtcaaactttgcacatatt

SEQ ID NO: 130805 - DNA, 25 bp, Probe Sequence
atccacctcatagctttacacattt

SEQ ID NO: 130806 - DNA, 25 bp, Probe Sequence
atccatctccagaagttttccatct

SEQ ID NO: 130807 - DNA, 25 bp, Probe Sequence
atccatgtactgtagtttttcttca

SEQ ID NO: 130808 - DNA, 25 bp, Probe Sequence
atccagctttgttttgggttatcca

SEQ ID NO: 130809 - DNA, 25 bp, Probe Sequence
aggagcttggaccttggtactacct

SEQ ID NO: 130810 - DNA, 25 bp, Probe Sequence
aggagtttgacgaggtgtctcggat

SEQ ID NO: 130811 - DNA, 25 bp, Probe Sequence
atgcggatcttgactgagcggtgac

SEQ ID NO: 130812 - DNA, 25 bp, Probe Sequence
atgcgggttttggcagtagcatcga

SEQ ID NO: 130813 - DNA, 25 bp, Probe Sequence
atgcctgcaattttacctagctacc

SEQ ID NO: 130814 - DNA, 25 bp, Probe Sequence
atgctgcaaattttcctccattatc

SEQ ID NO: 130815 - DNA, 25 bp, Probe Sequence
atccagtttcattgatctcctttct

SEQ ID NO: 130816 - DNA, 25 bp, Probe Sequence
atgccaggaatattgtcatcctttg

SEQ ID NO: 130817 - DNA, 25 bp, Probe Sequence
atgcctggactgttgcccagtgtaa

SEQ ID NO: 130818 - DNA, 25 bp, Probe Sequence
atgcctgcagaacggcctgcatgtt

SEQ ID NO: 130819 - DNA, 25 bp, Probe Sequence
atgccatgcagaactgcacactcag

SEQ ID NO: 130820 - DNA, 25 bp, Probe Sequence
atgcctgagtaccatcctggatgaa

SEQ ID NO: 130821 - DNA, 25 bp, Probe Sequence
atgcctggtaccttgttggaatagt

SEQ ID NO: 130822 - DNA, 25 bp, Probe Sequence
atgcctttaccagtgtgtggatcac

SEQ ID NO: 130823 - DNA, 25 bp, Probe Sequence
atgcccatagacctgaatgttaaca

SEQ ID NO: 130824 - DNA, 25 bp, Probe Sequence
atgcctccattgggaagtctagact

SEQ ID NO: 130825 - DNA, 25 bp, Probe Sequence
atgccccatgatgagtttctggcct

SEQ ID NO: 130826 - DNA, 25 bp, Probe Sequence
atgccccatgatgagtttctggcct

SEQ ID NO: 130827 - DNA, 25 bp, Probe Sequence
atgctcaccgtaagcctttggtcat

SEQ ID NO: 130828 - DNA, 25 bp, Probe Sequence
atgctccctttttaatgtggtcatt

SEQ ID NO: 130829 - DNA, 25 bp, Probe Sequence
atgcatgcgccattttttacttaat

SEQ ID NO: 130830 - DNA, 25 bp, Probe Sequence
atgctgtgtgcattttcatgttctt

SEQ ID NO: 130831 - DNA, 25 bp, Probe Sequence
atgctggagctctgttttgcttaga

SEQ ID NO: 130832 - DNA, 25 bp, Probe Sequence
atgggctccggtgagtctggagtcc

SEQ ID NO: 130833 - DNA, 25 bp, Probe Sequence
atgacactggaggtcaaccggaggc

SEQ ID NO: 130834 - DNA, 25 bp, Probe Sequence
atgagcctgcagaaaacccggtgac

SEQ ID NO: 130835 - DNA, 25 bp, Probe Sequence
atgccctcattaaagcagccggtgt

SEQ ID NO: 130836 - DNA, 25 bp, Probe Sequence
atgaccacatcaaacaggccgggct

SEQ ID NO: 130837 - DNA, 25 bp, Probe Sequence
atgccgaatgcaagaagtcctgggg

SEQ ID NO: 130838 - DNA, 25 bp, Probe Sequence
atccaggcagcattgaagtcaggtg

SEQ ID NO: 130839 - DNA, 25 bp, Probe Sequence
atccaggagttggactcagctctgc

SEQ ID NO: 130840 - DNA, 25 bp, Probe Sequence
atgccagggttgcattcacattcct

SEQ ID NO: 130841 - DNA, 25 bp, Probe Sequence
atccagagtcttcaggagcttcttg

SEQ ID NO: 130842 - DNA, 25 bp, Probe Sequence
atccaggtattcatgtatagtcttg

SEQ ID NO: 130843 - DNA, 25 bp, Probe Sequence
atgccaggcatactttttcatgttt

SEQ ID NO: 130844 - DNA, 25 bp, Probe Sequence
atgcctgtctactgttctatcaatt

SEQ ID NO: 130845 - DNA, 25 bp, Probe Sequence
atgccagttcccttctttatagaag

SEQ ID NO: 130846 - DNA, 25 bp, Probe Sequence
atgccaacacgttatctttataata

SEQ ID NO: 130847 - DNA, 25 bp, Probe Sequence
atgccaaacactagctctgtattaa

SEQ ID NO: 130848 - DNA, 25 bp, Probe Sequence
atgcagataatactcatgtaaatta

SEQ ID NO: 130849 - DNA, 25 bp, Probe Sequence
atgcatatactgtctctgtttgcat

SEQ ID NO: 130850 - DNA, 25 bp, Probe Sequence
atgctaacgcatggcatgtattatt

SEQ ID NO: 130851 - DNA, 25 bp, Probe Sequence
atgccaatgcaaacattatttctga

SEQ ID NO: 130852 - DNA, 25 bp, Probe Sequence
atgtcaacaatccttactgtaaaat

SEQ ID NO: 130853 - DNA, 25 bp, Probe Sequence
atgcaaagcattttaccgtacaaat

SEQ ID NO: 130854 - DNA, 25 bp, Probe Sequence
atgcaaccagtttatccaccaagaa

SEQ ID NO: 130855 - DNA, 25 bp, Probe Sequence
atgctagtcagtatgcaccaccaca

SEQ ID NO: 130856 - DNA, 25 bp, Probe Sequence
atgccatctcaaatggaacacgcca

SEQ ID NO: 130857 - DNA, 25 bp, Probe Sequence
atgctgctcatcacagtgtaactcc

SEQ ID NO: 130858 - DNA, 25 bp, Probe Sequence
atgctgcaaccatggtatacaacaa

SEQ ID NO: 130859 - DNA, 25 bp, Probe Sequence
atgcgaagccatcgagttaccacct

SEQ ID NO: 130860 - DNA, 25 bp, Probe Sequence
atgcctttattgaatctgaaaccat

SEQ ID NO: 130861 - DNA, 25 bp, Probe Sequence
atgcgctttattgcccatgggatat

SEQ ID NO: 130862 - DNA, 25 bp, Probe Sequence
atgctgtttcattcctttgggtaag

SEQ ID NO: 130863 - DNA, 25 bp, Probe Sequence
atgcgctaacattcactcttgtttg

SEQ ID NO: 130864 - DNA, 25 bp, Probe Sequence
atgccaaagtcagcatttgtcctgg

SEQ ID NO: 130865 - DNA, 25 bp, Probe Sequence
atgctgaagttccgaacagtccatg

SEQ ID NO: 130866 - DNA, 25 bp, Probe Sequence
atgctgaagcttttggacttcggca

SEQ ID NO: 130867 - DNA, 25 bp, Probe Sequence
atgctgaacaaagtgctgtcccggc

SEQ ID NO: 130868 - DNA, 25 bp, Probe Sequence
atgcgggaagtgtcagctcccggcg

SEQ ID NO: 130869 - DNA, 25 bp, Probe Sequence
atgctgggctcactacatgggccag

SEQ ID NO: 130870 - DNA, 25 bp, Probe Sequence
atgcttggtgagtctcagtgcccag

SEQ ID NO: 130871 - DNA, 25 bp, Probe Sequence
atgctgtggttactagtgccaaaaa

SEQ ID NO: 130872 - DNA, 25 bp, Probe Sequence
atgctgttgttgctggtctagagac

SEQ ID NO: 130873 - DNA, 25 bp, Probe Sequence
atgctgtatttgagtttctgacaaa

SEQ ID NO: 130874 - DNA, 25 bp, Probe Sequence
atgcttttagtagtatttcagttat

SEQ ID NO: 130875 - DNA, 25 bp, Probe Sequence
atgctttctattggagtttcaggaa

SEQ ID NO: 130876 - DNA, 25 bp, Probe Sequence
atgctcttagttgagtcttgaaaag

SEQ ID NO: 130877 - DNA, 25 bp, Probe Sequence
atgcatttccaaactgccttaaacg

SEQ ID NO: 130878 - DNA, 25 bp, Probe Sequence
atgcagactaccactgcctacaaga

SEQ ID NO: 130879 - DNA, 25 bp, Probe Sequence
atgaagctttgcatcgagaaacgat

SEQ ID NO: 130880 - DNA, 25 bp, Probe Sequence
atgaacgttggagttgcccacagtg

SEQ ID NO: 130881 - DNA, 25 bp, Probe Sequence
atgaaggatccttgcttcgccaaat

SEQ ID NO: 130882 - DNA, 25 bp, Probe Sequence
atgaatttcccagtgttccagtaaa

SEQ ID NO: 130883 - DNA, 25 bp, Probe Sequence
atgctgatttcctcagttccatttt

SEQ ID NO: 130884 - DNA, 25 bp, Probe Sequence
atgctcgtgtcctcaattctaatat

SEQ ID NO: 130885 - DNA, 25 bp, Probe Sequence
atgcctgtgacctcaattaaagcaa

SEQ ID NO: 130886 - DNA, 25 bp, Probe Sequence
atgcctggcaatataattgaccaaa

SEQ ID NO: 130887 - DNA, 25 bp, Probe Sequence
atgcctggcctgttaagtgttaact

SEQ ID NO: 130888 - DNA, 25 bp, Probe Sequence
atgccttgggattaagttttagctg

SEQ ID NO: 130889 - DNA, 25 bp, Probe Sequence
atgcccatgggctataatccttatg

SEQ ID NO: 130890 - DNA, 25 bp, Probe Sequence
atgctcgctgggtaacatacttcaa

SEQ ID NO: 130891 - DNA, 25 bp, Probe Sequence
atgctggctgtggcaaaacatttgc

SEQ ID NO: 130892 - DNA, 25 bp, Probe Sequence
atgctggctgtggcaaaacatttgc

SEQ ID NO: 130893 - DNA, 25 bp, Probe Sequence
atgccgggatcaaagtctgttctgg

SEQ ID NO: 130894 - DNA, 25 bp, Probe Sequence
atgcctgtaatcccagttatctcag

SEQ ID NO: 130895 - DNA, 25 bp, Probe Sequence
atgcctgtaatctcagctacttggg

SEQ ID NO: 130896 - DNA, 25 bp, Probe Sequence
atgcctgtaatcctagcactttgga

SEQ ID NO: 130897 - DNA, 25 bp, Probe Sequence
atgccttacgtctgatcttgatggg

SEQ ID NO: 130898 - DNA, 25 bp, Probe Sequence
atgccttcaacctatgatcatagca

SEQ ID NO: 130899 - DNA, 25 bp, Probe Sequence
atgctgctgctcttcgcaagctgac

SEQ ID NO: 130900 - DNA, 25 bp, Probe Sequence
atgccactccattaacagaaaaaaa

SEQ ID NO: 130901 - DNA, 25 bp, Probe Sequence
atgccaccgcatttatagatcagat

SEQ ID NO: 130902 - DNA, 25 bp, Probe Sequence
atgctcccctataatctgctgagta

SEQ ID NO: 130903 - DNA, 25 bp, Probe Sequence
atgctcctcctttatcttggaattg

SEQ ID NO: 130904 - DNA, 25 bp, Probe Sequence
atgccctcctggtatttgacaactg

SEQ ID NO: 130905 - DNA, 25 bp, Probe Sequence
atgcccagacggactatggacttct

SEQ ID NO: 130906 - DNA, 25 bp, Probe Sequence
atgccacagaacctatcggctcttt

SEQ ID NO: 130907 - DNA, 25 bp, Probe Sequence
atgccacatggacagaggtctccta

SEQ ID NO: 130908 - DNA, 25 bp, Probe Sequence
atgccactgcaacaagcgtgagact

SEQ ID NO: 130909 - DNA, 25 bp, Probe Sequence
atgccgctgctttgaaagagaacct

SEQ ID NO: 130910 - DNA, 25 bp, Probe Sequence
atgcacatgcttttaaagggcccat

SEQ ID NO: 130911 - DNA, 25 bp, Probe Sequence
atgcaatattaatgtaagggctcta

SEQ ID NO: 130912 - DNA, 25 bp, Probe Sequence
atgcaattttaactcctgtcccata

SEQ ID NO: 130913 - DNA, 25 bp, Probe Sequence
atgaatttgtccacactgaaagttc

SEQ ID NO: 130914 - DNA, 25 bp, Probe Sequence
atgaccttgggcacagggaagttct

SEQ ID NO: 130915 - DNA, 25 bp, Probe Sequence
atgaccttgggcacagggaagttct

SEQ ID NO: 130916 - DNA, 25 bp, Probe Sequence
atgaccctgtggatgggagaattac

SEQ ID NO: 130917 - DNA, 25 bp, Probe Sequence
atgacctgcggcgctgggagaagtg

SEQ ID NO: 130918 - DNA, 25 bp, Probe Sequence
aggccgcgggacggatgaacaatgt

SEQ ID NO: 130919 - DNA, 25 bp, Probe Sequence
agtaccgggaagccaatcaataatg

SEQ ID NO: 130920 - DNA, 25 bp, Probe Sequence
agttccaggtaacactgaatttctg

SEQ ID NO: 130921 - DNA, 25 bp, Probe Sequence
atgttggaagttaccaagaagttca

SEQ ID NO: 130922 - DNA, 25 bp, Probe Sequence
atgctctggagacaacatcaaggat

SEQ ID NO: 130923 - DNA, 25 bp, Probe Sequence
atgctaggattgtacaccacagccc

SEQ ID NO: 130924 - DNA, 25 bp, Probe Sequence
atgctaagcaggcacaccagcactg

SEQ ID NO: 130925 - DNA, 25 bp, Probe Sequence
atgccgccaggactgcaagaactga

SEQ ID NO: 130926 - DNA, 25 bp, Probe Sequence
atgcaggcccgacaagtaatgctag

SEQ ID NO: 130927 - DNA, 25 bp, Probe Sequence
atgaagatttgacaagtaacttgct

SEQ ID NO: 130928 - DNA, 25 bp, Probe Sequence
atgaagtttcgcaacatggagacgg

SEQ ID NO: 130929 - DNA, 25 bp, Probe Sequence
atgtacttaccgaagcgaacgcagc

SEQ ID NO: 130930 - DNA, 25 bp, Probe Sequence
atgatcacttactggggaagaaatg

SEQ ID NO: 130931 - DNA, 25 bp, Probe Sequence
atgatgactcccttaaaatagaaat

SEQ ID NO: 130932 - DNA, 25 bp, Probe Sequence
atgaatccccaataattgcagaact

SEQ ID NO: 130933 - DNA, 25 bp, Probe Sequence
atgatgaccctcaggaattgcaaag

SEQ ID NO: 130934 - DNA, 25 bp, Probe Sequence
atgaaatcactgggaacattccaag

SEQ ID NO: 130935 - DNA, 25 bp, Probe Sequence
atgataccatcggggaccttaagaa

SEQ ID NO: 130936 - DNA, 25 bp, Probe Sequence
atgaccctaccagaggttggagaac

SEQ ID NO: 130937 - DNA, 25 bp, Probe Sequence
atgcccgtaccatgacttatgggac

SEQ ID NO: 130938 - DNA, 25 bp, Probe Sequence
atgcccagtacatgaccttatgggg

SEQ ID NO: 130939 - DNA, 25 bp, Probe Sequence
atgcccagtacatgacttatgggac

SEQ ID NO: 130940 - DNA, 25 bp, Probe Sequence
atgcccagtacatgacttatggact

SEQ ID NO: 130941 - DNA, 25 bp, Probe Sequence
atgctcctgggatacgctatgaact

SEQ ID NO: 130942 - DNA, 25 bp, Probe Sequence
atgccctgcgtaaactggatgacac

SEQ ID NO: 130943 - DNA, 25 bp, Probe Sequence
atgcccgagctgagagagagctgaa

SEQ ID NO: 130944 - DNA, 25 bp, Probe Sequence
atgcctctgccgtgcagaaggaatg

SEQ ID NO: 130945 - DNA, 25 bp, Probe Sequence
atgcgtccctgtacagatagtgggg

SEQ ID NO: 130946 - DNA, 25 bp, Probe Sequence
atgagaacacatgaacatagggagg

SEQ ID NO: 130947 - DNA, 25 bp, Probe Sequence
atgacggaaatatattgggatggaa

SEQ ID NO: 130948 - DNA, 25 bp, Probe Sequence
atgccgcccatttaagtacagtgga

SEQ ID NO: 130949 - DNA, 25 bp, Probe Sequence
agtcggtacttagccacctgatgac

SEQ ID NO: 130950 - DNA, 25 bp, Probe Sequence
atgatttgtatcttagacgacctgt

SEQ ID NO: 130951 - DNA, 25 bp, Probe Sequence
atgcagctgtttttaacccacgttt

SEQ ID NO: 130952 - DNA, 25 bp, Probe Sequence
atgccttttttttctgtcactattt

SEQ ID NO: 130953 - DNA, 25 bp, Probe Sequence
atgcctttgattttattcgcaccat

SEQ ID NO: 130954 - DNA, 25 bp, Probe Sequence
atgccttgtgattatcttctccaca

SEQ ID NO: 130955 - DNA, 25 bp, Probe Sequence
atgccttcaaaatgctgcttccact

SEQ ID NO: 130956 - DNA, 25 bp, Probe Sequence
atgcgtgtttaatgatgatgactcc

SEQ ID NO: 130957 - DNA, 25 bp, Probe Sequence
atgccatttgtcaaggaattatcgg

SEQ ID NO: 130958 - DNA, 25 bp, Probe Sequence
atgctacaattcagaggcatttagg

SEQ ID NO: 130959 - DNA, 25 bp, Probe Sequence
atgtacagttttccaatttcacgtg

SEQ ID NO: 130960 - DNA, 25 bp, Probe Sequence
atgtaattgatttcctttacacctg

SEQ ID NO: 130961 - DNA, 25 bp, Probe Sequence
atgctacctatttcctgctggaact

SEQ ID NO: 130962 - DNA, 25 bp, Probe Sequence
atgcatatcctgctactgcagctgc

SEQ ID NO: 130963 - DNA, 25 bp, Probe Sequence
atgctgtacctggatcattctgaag

SEQ ID NO: 130964 - DNA, 25 bp, Probe Sequence
atgctgtcctctgatttagctgctg

SEQ ID NO: 130965 - DNA, 25 bp, Probe Sequence
atgcctgtttgctatttggtggaag

SEQ ID NO: 130966 - DNA, 25 bp, Probe Sequence
atgccattgatcattattcctgtat

SEQ ID NO: 130967 - DNA, 25 bp, Probe Sequence
atgccatatcatgtgtgtacgctga

SEQ ID NO: 130968 - DNA, 25 bp, Probe Sequence
atgcccatcatggagttactttgat

SEQ ID NO: 130969 - DNA, 25 bp, Probe Sequence
atgcctcacaggcttcacagggcag

SEQ ID NO: 130970 - DNA, 25 bp, Probe Sequence
atgcctcacaggcttcacagggcag

SEQ ID NO: 130971 - DNA, 25 bp, Probe Sequence
atgcccacaaccatgccaagatgat

SEQ ID NO: 130972 - DNA, 25 bp, Probe Sequence
atgcctgccaacccatggaagttgt

SEQ ID NO: 130973 - DNA, 25 bp, Probe Sequence
atgcctgaaacggtggacagtgctg

SEQ ID NO: 130974 - DNA, 25 bp, Probe Sequence
atgccatgaccaagggagacattct

SEQ ID NO: 130975 - DNA, 25 bp, Probe Sequence
atgccagcacctaccgagaagctgc

SEQ ID NO: 130976 - DNA, 25 bp, Probe Sequence
atgctctaccagaccatcaacagtc

SEQ ID NO: 130977 - DNA, 25 bp, Probe Sequence
atgctgtaccagtgccagggacaca

SEQ ID NO: 130978 - DNA, 25 bp, Probe Sequence
atgctcataccaacaccgtgtggaa

SEQ ID NO: 130979 - DNA, 25 bp, Probe Sequence
atgttaccttcaggccatgtggaac

SEQ ID NO: 130980 - DNA, 25 bp, Probe Sequence
atgctctactttgacacatgtggct

SEQ ID NO: 130981 - DNA, 25 bp, Probe Sequence
atgctgctagtgttgataaggtttt

SEQ ID NO: 130982 - DNA, 25 bp, Probe Sequence
atgcgctatgtggcctagagcctgt

SEQ ID NO: 130983 - DNA, 25 bp, Probe Sequence
atgctcaagtgaggctgcaggcgcg

SEQ ID NO: 130984 - DNA, 25 bp, Probe Sequence
atgaaatgctagggggccagggaaa

SEQ ID NO: 130985 - DNA, 25 bp, Probe Sequence
atgaatatactctgtgagccaggta

SEQ ID NO: 130986 - DNA, 25 bp, Probe Sequence
atgtcaatgtcactggcatgcagtc

SEQ ID NO: 130987 - DNA, 25 bp, Probe Sequence
atgccagcattgtggatgccatcaa

SEQ ID NO: 130988 - DNA, 25 bp, Probe Sequence
atgcatgccacagtagatgtccaca

SEQ ID NO: 130989 - DNA, 25 bp, Probe Sequence
catgctgccgcaggatgatcagtcc

SEQ ID NO: 130990 - DNA, 25 bp, Probe Sequence
atgctgccgcaggatgatcagtccg

SEQ ID NO: 130991 - DNA, 25 bp, Probe Sequence
atgctgcggcatcttaatcttgagt

SEQ ID NO: 130992 - DNA, 25 bp, Probe Sequence
atgctgcggcatcttaatcttgagt

SEQ ID NO: 130993 - DNA, 25 bp, Probe Sequence
atgctggtgctgtgtctttatgaat

SEQ ID NO: 130994 - DNA, 25 bp, Probe Sequence
atgctggtgctgtgtctttatgaat

SEQ ID NO: 130995 - DNA, 25 bp, Probe Sequence
atgctgattgtgtttcatgggaaat

SEQ ID NO: 130996 - DNA, 25 bp, Probe Sequence
atgctgatctactataaggtattct

SEQ ID NO: 130997 - DNA, 25 bp, Probe Sequence
atgcagattttattggcagctgttt

SEQ ID NO: 130998 - DNA, 25 bp, Probe Sequence
atgccagctgtttatactgctcttt

SEQ ID NO: 130999 - DNA, 25 bp, Probe Sequence
atgccagcttggacatcagtgtttg

SEQ ID NO: 131000 - DNA, 25 bp, Probe Sequence
atgcgcacgtgtgcaagtgtgtgag

SEQ ID NO: 131001 - DNA, 25 bp, Probe Sequence
atgctgggattacaggtgtgagcca

SEQ ID NO: 131002 - DNA, 25 bp, Probe Sequence
atgcttcctgtacagcctgtagaac

SEQ ID NO: 131003 - DNA, 25 bp, Probe Sequence
atgcttcctgtacagcctgcaaaac

SEQ ID NO: 131004 - DNA, 25 bp, Probe Sequence
atgctgtcgggactgagcaggcaat

SEQ ID NO: 131005 - DNA, 25 bp, Probe Sequence
atgctgtggcatgggtgaagaggag

SEQ ID NO: 131006 - DNA, 25 bp, Probe Sequence
atgctgtgtgctgcgaggatcgcca

SEQ ID NO: 131007 - DNA, 25 bp, Probe Sequence
atgctgtgtgctgcgaggatcgcca

SEQ ID NO: 131008 - DNA, 25 bp, Probe Sequence
atgcggatgctcagcagtactccac

SEQ ID NO: 131009 - DNA, 25 bp, Probe Sequence
atgctggatgtcatgcaggaccact

SEQ ID NO: 131010 - DNA, 25 bp, Probe Sequence
agtggacttcgcagtccacttctga

SEQ ID NO: 131011 - DNA, 25 bp, Probe Sequence
agggaacggttggctatgcgtctga

SEQ ID NO: 131012 - DNA, 25 bp, Probe Sequence
agttaacagtttgcagatttcgaat

SEQ ID NO: 131013 - DNA, 25 bp, Probe Sequence
atgcttccacagctaacgttgttaa

SEQ ID NO: 131014 - DNA, 25 bp, Probe Sequence
atgctcttcgagctgagggttattg

SEQ ID NO: 131015 - DNA, 25 bp, Probe Sequence
atgctttcagatctggtcttttttt

SEQ ID NO: 131016 - DNA, 25 bp, Probe Sequence
atgaacctgctgatgacttttttta

SEQ ID NO: 131017 - DNA, 25 bp, Probe Sequence
atgaaggttgttttgcttattgtat

SEQ ID NO: 131018 - DNA, 25 bp, Probe Sequence
atgaaaggttggttcttgactctga

SEQ ID NO: 131019 - DNA, 25 bp, Probe Sequence
atgaacgacttggtgtctgaatatc

SEQ ID NO: 131020 - DNA, 25 bp, Probe Sequence
atgctagtccttgttgtattttgtt

SEQ ID NO: 131021 - DNA, 25 bp, Probe Sequence
atgctatacgtttttgacatttatt

SEQ ID NO: 131022 - DNA, 25 bp, Probe Sequence
atgctaggcgtctgtgtgatttgta

SEQ ID NO: 131023 - DNA, 25 bp, Probe Sequence
atgctaaattccgtctgattctaat

SEQ ID NO: 131024 - DNA, 25 bp, Probe Sequence
atgccttcttccattactcagagat

SEQ ID NO: 131025 - DNA, 25 bp, Probe Sequence
atgccttcttccattactcagagat

SEQ ID NO: 131026 - DNA, 25 bp, Probe Sequence
atgcctgtcttcatcttgaaagaaa

SEQ ID NO: 131027 - DNA, 25 bp, Probe Sequence
atgcactttgctgtttgattaagaa

SEQ ID NO: 131028 - DNA, 25 bp, Probe Sequence
atgaatcaatgcagattttctacag

SEQ ID NO: 131029 - DNA, 25 bp, Probe Sequence
atgaatccagatggcatggttgctc

SEQ ID NO: 131030 - DNA, 25 bp, Probe Sequence
atgcaacctcactatggtatgctgg

SEQ ID NO: 131031 - DNA, 25 bp, Probe Sequence
atgcctgctctgaacagtgtactgt

SEQ ID NO: 131032 - DNA, 25 bp, Probe Sequence
atgctcgccatggaaagctatcagt

SEQ ID NO: 131033 - DNA, 25 bp, Probe Sequence
atgctctgaatggaaccctggctgt

SEQ ID NO: 131034 - DNA, 25 bp, Probe Sequence
atgctaacaggatctacaggatgat

SEQ ID NO: 131035 - DNA, 25 bp, Probe Sequence
atgcagatgacactgactctgagca

SEQ ID NO: 131036 - DNA, 25 bp, Probe Sequence
atgctgagcatctgagctcgctgcc

SEQ ID NO: 131037 - DNA, 25 bp, Probe Sequence
atgcatgatctatgcctgtgctctc

SEQ ID NO: 131038 - DNA, 25 bp, Probe Sequence
atgcgagcaaagcattctcatcagt

SEQ ID NO: 131039 - DNA, 25 bp, Probe Sequence
atgcggagaatgtatattgcctctg

SEQ ID NO: 131040 - DNA, 25 bp, Probe Sequence
atgccgagagagttggaggcctcga

SEQ ID NO: 131041 - DNA, 25 bp, Probe Sequence
atgcgcgtggagttcaagtccgaca

SEQ ID NO: 131042 - DNA, 25 bp, Probe Sequence
atgctggggagtgcggtcagctcca

SEQ ID NO: 131043 - DNA, 25 bp, Probe Sequence
atgctggtaatggccatggtacccc

SEQ ID NO: 131044 - DNA, 25 bp, Probe Sequence
atgctgtgtcattcacactcactac

SEQ ID NO: 131045 - DNA, 25 bp, Probe Sequence
atgcagtgccttcaaagtacgagaa

SEQ ID NO: 131046 - DNA, 25 bp, Probe Sequence
atgcagtctctttattttactagaa

SEQ ID NO: 131047 - DNA, 25 bp, Probe Sequence
atgcacactgttcatgcttctacta

SEQ ID NO: 131048 - DNA, 25 bp, Probe Sequence
atgcatcatcatcgttacaattatc

SEQ ID NO: 131049 - DNA, 25 bp, Probe Sequence
atgcagcatccacttcataattaaa

SEQ ID NO: 131050 - DNA, 25 bp, Probe Sequence
atgcgctcacacttcaaaaccaata

SEQ ID NO: 131051 - DNA, 25 bp, Probe Sequence
atgctgccaacttctaaccgcaata

SEQ ID NO: 131052 - DNA, 25 bp, Probe Sequence
atgcttagactacttgaacccataa

SEQ ID NO: 131053 - DNA, 25 bp, Probe Sequence
atgcataagaatagactgaacacct

SEQ ID NO: 131054 - DNA, 25 bp, Probe Sequence
atgaagaaatgggtatgaagcctcc

SEQ ID NO: 131055 - DNA, 25 bp, Probe Sequence
atgcaataaaaggttatatcagctg

SEQ ID NO: 131056 - DNA, 25 bp, Probe Sequence
atgcagcacataagggttcttcagt

SEQ ID NO: 131057 - DNA, 25 bp, Probe Sequence
atgcgaatacatcagttctatcatt

SEQ ID NO: 131058 - DNA, 25 bp, Probe Sequence
atggtattcccagatcattcttcct

SEQ ID NO: 131059 - DNA, 25 bp, Probe Sequence
atggagtaaacctaattctgccctt

SEQ ID NO: 131060 - DNA, 25 bp, Probe Sequence
atgaaatgagaacccagcttcgccg

SEQ ID NO: 131061 - DNA, 25 bp, Probe Sequence
atgaatttagagttcagcatccggg

SEQ ID NO: 131062 - DNA, 25 bp, Probe Sequence
atgaactttgaggtgccattcgcgc

SEQ ID NO: 131063 - DNA, 25 bp, Probe Sequence
atgagaccattgagtccatcaacca

SEQ ID NO: 131064 - DNA, 25 bp, Probe Sequence
atgcgaaattcaacatggccaacgc

SEQ ID NO: 131065 - DNA, 25 bp, Probe Sequence
atgtgaaatgttacgaccaccgttc

SEQ ID NO: 131066 - DNA, 25 bp, Probe Sequence
atgaaaaaatcccagccctagtagc

SEQ ID NO: 131067 - DNA, 25 bp, Probe Sequence
atgaaatgtgaccacgtccttatta

SEQ ID NO: 131068 - DNA, 25 bp, Probe Sequence
atgaaatgcttccacagctaacgtt

SEQ ID NO: 131069 - DNA, 25 bp, Probe Sequence
atgaagtctggcaactcggacgtgt

SEQ ID NO: 131070 - DNA, 25 bp, Probe Sequence
atgaagtaactggctgggtgctggt

SEQ ID NO: 131071 - DNA, 25 bp, Probe Sequence
atgcacagtcatgtgcctacgtcct

SEQ ID NO: 131072 - DNA, 25 bp, Probe Sequence
atgccgactatagctacgctagctc

SEQ ID NO: 131073 - DNA, 25 bp, Probe Sequence
atgagaactatgccctcgtgtattc

SEQ ID NO: 131074 - DNA, 25 bp, Probe Sequence
atgaacctagcacccgagattctat

SEQ ID NO: 131075 - DNA, 25 bp, Probe Sequence
atgaacctagagcggtgacatgaaa

SEQ ID NO: 131076 - DNA, 25 bp, Probe Sequence
atgcaaccaacacatactgtcagac

SEQ ID NO: 131077 - DNA, 25 bp, Probe Sequence
atgctgactcagtgagacacagtag

SEQ ID NO: 131078 - DNA, 25 bp, Probe Sequence
atgctgcctctgtaaattcatgtat

SEQ ID NO: 131079 - DNA, 25 bp, Probe Sequence
atgctgccattgacacagtagcagt

SEQ ID NO: 131080 - DNA, 25 bp, Probe Sequence
atgcgctcagtgccatgcgttcgct

SEQ ID NO: 131081 - DNA, 25 bp, Probe Sequence
atgcctcgacaggctgttcgtgtgc

SEQ ID NO: 131082 - DNA, 25 bp, Probe Sequence
atgccctgcaccttgttatttggga

SEQ ID NO: 131083 - DNA, 25 bp, Probe Sequence
atgctcctcacctgtattttgtaat

SEQ ID NO: 131084 - DNA, 25 bp, Probe Sequence
atgctcctcacctgtattttgtaat

SEQ ID NO: 131085 - DNA, 25 bp, Probe Sequence
atgacagacccatgtatttttggca

SEQ ID NO: 131086 - DNA, 25 bp, Probe Sequence
atgacttccggagagttgtggactt

SEQ ID NO: 131087 - DNA, 25 bp, Probe Sequence
atgaccttcaagagaattaggactt

SEQ ID NO: 131088 - DNA, 25 bp, Probe Sequence
atgcccttcttaaaaagagagacct

SEQ ID NO: 131089 - DNA, 25 bp, Probe Sequence
atgcccctcagtctgggagaagacc

SEQ ID NO: 131090 - DNA, 25 bp, Probe Sequence
atgcgccctctctggggagaaggga

SEQ ID NO: 131091 - DNA, 25 bp, Probe Sequence
atgcccccattcagcaggaagcagt

SEQ ID NO: 131092 - DNA, 25 bp, Probe Sequence
atgcccacatcatcttaagaagagt

SEQ ID NO: 131093 - DNA, 25 bp, Probe Sequence
atgctgggcatctactttaaaacaa

SEQ ID NO: 131094 - DNA, 25 bp, Probe Sequence
atgccgtagctaattccaatactaa

SEQ ID NO: 131095 - DNA, 25 bp, Probe Sequence
atgctattagcaatttccatatact

SEQ ID NO: 131096 - DNA, 25 bp, Probe Sequence
atgctttcctttaccattccaaagt

SEQ ID NO: 131097 - DNA, 25 bp, Probe Sequence
atgctttctttacgtattcctttgc

SEQ ID NO: 131098 - DNA, 25 bp, Probe Sequence
atgtatttctttctgactagacttg

SEQ ID NO: 131099 - DNA, 25 bp, Probe Sequence
atgctgttatctatcttattgttct

SEQ ID NO: 131100 - DNA, 25 bp, Probe Sequence
atgcttgtatatgcttgaactttct

SEQ ID NO: 131101 - DNA, 25 bp, Probe Sequence
atgctgtggttcttatgagacttgt

SEQ ID NO: 131102 - DNA, 25 bp, Probe Sequence
atgctgcactgtactacaaaattgt

SEQ ID NO: 131103 - DNA, 25 bp, Probe Sequence
atgctgccagaccctcagaatattt

SEQ ID NO: 131104 - DNA, 25 bp, Probe Sequence
atgctcacagtaactcagagattac

SEQ ID NO: 131105 - DNA, 25 bp, Probe Sequence
atgctctcagtaaacctgaacactt

SEQ ID NO: 131106 - DNA, 25 bp, Probe Sequence
atgctgtcacttaataatcaacctg

SEQ ID NO: 131107 - DNA, 25 bp, Probe Sequence
atgcccactgaatataaccctggtt

SEQ ID NO: 131108 - DNA, 25 bp, Probe Sequence
atgacctggcaaacatcaaccaatg

SEQ ID NO: 131109 - DNA, 25 bp, Probe Sequence
atgcaactactctacatagccaaat

SEQ ID NO: 131110 - DNA, 25 bp, Probe Sequence
atgcacaagcttcaatagccgattc

SEQ ID NO: 131111 - DNA, 25 bp, Probe Sequence
atgacaacctctttgagacgtcctt

SEQ ID NO: 131112 - DNA, 25 bp, Probe Sequence
atgacaacgtcattgccagtggctc

SEQ ID NO: 131113 - DNA, 25 bp, Probe Sequence
atgcacacaagcagcatgacactgg

SEQ ID NO: 131114 - DNA, 25 bp, Probe Sequence
atgcacacaagcatgcacagaggca

SEQ ID NO: 131115 - DNA, 25 bp, Probe Sequence
atgcaacaatgcatacagatggaac

SEQ ID NO: 131116 - DNA, 25 bp, Probe Sequence
atgcaggaatctccacacaaatgtc

SEQ ID NO: 131117 - DNA, 25 bp, Probe Sequence
atgctggaatgctatacacataata

SEQ ID NO: 131118 - DNA, 25 bp, Probe Sequence
atgcatgatgcaatcggtctataga

SEQ ID NO: 131119 - DNA, 25 bp, Probe Sequence
atgcgtgctccgcttcaatgagaca

SEQ ID NO: 131120 - DNA, 25 bp, Probe Sequence
atgcgtgctccgcttcaatgagaca

SEQ ID NO: 131121 - DNA, 25 bp, Probe Sequence
atgccccacttcgtcaatagacact

SEQ ID NO: 131122 - DNA, 25 bp, Probe Sequence
atgccccatcttggcttgaagaaca

SEQ ID NO: 131123 - DNA, 25 bp, Probe Sequence
atgcccctcttggcatatcatattt

SEQ ID NO: 131124 - DNA, 25 bp, Probe Sequence
atgctcctcagaatggcacacaatt

SEQ ID NO: 131125 - DNA, 25 bp, Probe Sequence
atgcatcttcctaacccaagcatat

SEQ ID NO: 131126 - DNA, 25 bp, Probe Sequence
atgcttgtgctactcaagccatagt

SEQ ID NO: 131127 - DNA, 25 bp, Probe Sequence
atgcttgcatgcattcacacgtgtg

SEQ ID NO: 131128 - DNA, 25 bp, Probe Sequence
atgcatatgctactaatcaagagta

SEQ ID NO: 131129 - DNA, 25 bp, Probe Sequence
atgctctgctggccgtgcagaagct

SEQ ID NO: 131130 - DNA, 25 bp, Probe Sequence
atgctgctctgatctgagagaaggc

SEQ ID NO: 131131 - DNA, 25 bp, Probe Sequence
atgctgcttcatggggaagaatcca

SEQ ID NO: 131132 - DNA, 25 bp, Probe Sequence
atgctcttgcagaaggaactaccat

SEQ ID NO: 131133 - DNA, 25 bp, Probe Sequence
atgctccatggaactatcattacca

SEQ ID NO: 131134 - DNA, 25 bp, Probe Sequence
atgactattacaaacttatccaaaa

SEQ ID NO: 131135 - DNA, 25 bp, Probe Sequence
atgcatcgtaaaacctttcagaagg

SEQ ID NO: 131136 - DNA, 25 bp, Probe Sequence
atgcatcgtaaaaccttcagaagga

SEQ ID NO: 131137 - DNA, 25 bp, Probe Sequence
atgcatcgtaaaaccttcagaagga

SEQ ID NO: 131138 - DNA, 25 bp, Probe Sequence
atgcttctcaagtcccttatgtaaa

SEQ ID NO: 131139 - DNA, 25 bp, Probe Sequence
atgcttgaaatgtctaactattaaa

SEQ ID NO: 131140 - DNA, 25 bp, Probe Sequence
atgcttatgagagccaagtagtcag

SEQ ID NO: 131141 - DNA, 25 bp, Probe Sequence
atgcttggaatggcaatagggtaga

SEQ ID NO: 131142 - DNA, 25 bp, Probe Sequence
atgcttaaggatgtgattggatgga

SEQ ID NO: 131143 - DNA, 25 bp, Probe Sequence
atgcttttgtatttactgccatgta

SEQ ID NO: 131144 - DNA, 25 bp, Probe Sequence
atgctgtgttatatgacatcatcct

SEQ ID NO: 131145 - DNA, 25 bp, Probe Sequence
atgctatatccaaagctcatctcct

SEQ ID NO: 131146 - DNA, 25 bp, Probe Sequence
atgctcatagaaacactcatagcca

SEQ ID NO: 131147 - DNA, 25 bp, Probe Sequence
atgctcaagacttcattatttgcct

SEQ ID NO: 131148 - DNA, 25 bp, Probe Sequence
atgctaatattgtattttctcttaa

SEQ ID NO: 131149 - DNA, 25 bp, Probe Sequence
atgcatgtactttatattttctata

SEQ ID NO: 131150 - DNA, 25 bp, Probe Sequence
atgcattccacataatttactgata

SEQ ID NO: 131151 - DNA, 25 bp, Probe Sequence
atgcttccaaatgacatctacagat

SEQ ID NO: 131152 - DNA, 25 bp, Probe Sequence
atgcttcatcacacatacagtaaat

SEQ ID NO: 131153 - DNA, 25 bp, Probe Sequence
atgcttcattgccctatgcttataa

SEQ ID NO: 131154 - DNA, 25 bp, Probe Sequence
atgcttctgtatctacttcatgctg

SEQ ID NO: 131155 - DNA, 25 bp, Probe Sequence
atgcttctttctcagtttattggtt

SEQ ID NO: 131156 - DNA, 25 bp, Probe Sequence
atgcttattttgcctttctatgttg

SEQ ID NO: 131157 - DNA, 25 bp, Probe Sequence
atgctttttatccttatctcattta

SEQ ID NO: 131158 - DNA, 25 bp, Probe Sequence
atgtcttaaatcagtcaccagttcc

SEQ ID NO: 131159 - DNA, 25 bp, Probe Sequence
atgctttcaaacaactatgctactc

SEQ ID NO: 131160 - DNA, 25 bp, Probe Sequence
atgctaagccaatctttgcatagct

SEQ ID NO: 131161 - DNA, 25 bp, Probe Sequence
atgcataaggcccctttgtttccat

SEQ ID NO: 131162 - DNA, 25 bp, Probe Sequence
atgcaaacccaccttgtgaatctct

SEQ ID NO: 131163 - DNA, 25 bp, Probe Sequence
atgcaatcaatagtcctggaaaatc

SEQ ID NO: 131164 - DNA, 25 bp, Probe Sequence
atgaagctataaactggaacagact

SEQ ID NO: 131165 - DNA, 25 bp, Probe Sequence
atgaagtgcgacagcattaaagact

SEQ ID NO: 131166 - DNA, 25 bp, Probe Sequence
atgacttggtctgatttattcactg

SEQ ID NO: 131167 - DNA, 25 bp, Probe Sequence
atgctgctgttttgtatttttacca

SEQ ID NO: 131168 - DNA, 25 bp, Probe Sequence
atgctgtgtttaccaatgtttgctg

SEQ ID NO: 131169 - DNA, 25 bp, Probe Sequence
atgcttttatagaccatgctaatgc

SEQ ID NO: 131170 - DNA, 25 bp, Probe Sequence
atgctctctactaccagagctggat

SEQ ID NO: 131171 - DNA, 25 bp, Probe Sequence
atgcacctaattggaagcgccaccc

SEQ ID NO: 131172 - DNA, 25 bp, Probe Sequence
atgaatctaattgctactgacccag

SEQ ID NO: 131173 - DNA, 25 bp, Probe Sequence
atgctcatcttgttgctctagcaga

SEQ ID NO: 131174 - DNA, 25 bp, Probe Sequence
atgctgcatcatctcagtaaggaag

SEQ ID NO: 131175 - DNA, 25 bp, Probe Sequence
atgctacatttccaaggtgaagatg

SEQ ID NO: 131176 - DNA, 25 bp, Probe Sequence
atgcaaatactccctgtggaagaga

SEQ ID NO: 131177 - DNA, 25 bp, Probe Sequence
atgaaatcgtcgcttcttgaagacc

SEQ ID NO: 131178 - DNA, 25 bp, Probe Sequence
gcctgttgctttgctcttgagaata

SEQ ID NO: 131179 - DNA, 25 bp, Probe Sequence
atgaaacactgacctcttgtctcaa

SEQ ID NO: 131180 - DNA, 25 bp, Probe Sequence
atgagaaccgagaccttggaatgtt

SEQ ID NO: 131181 - DNA, 25 bp, Probe Sequence
atgaaagccgaagttatggaccgct

SEQ ID NO: 131182 - DNA, 25 bp, Probe Sequence
atgaacggtgcggcatttcgtccgt

SEQ ID NO: 131183 - DNA, 25 bp, Probe Sequence
atgtacatggtggactatgccggcc

SEQ ID NO: 131184 - DNA, 25 bp, Probe Sequence
atgtacatggtggactatgccggcc

SEQ ID NO: 131185 - DNA, 25 bp, Probe Sequence
atgaacacgtgggctccaagtgcct

SEQ ID NO: 131186 - DNA, 25 bp, Probe Sequence
atgcttcatcgtcggtccgggctgc

SEQ ID NO: 131187 - DNA, 25 bp, Probe Sequence
atgcagtgcaccctggctacgggtt

SEQ ID NO: 131188 - DNA, 25 bp, Probe Sequence
atgcagaggcacagatgtaaggttt

SEQ ID NO: 131189 - DNA, 25 bp, Probe Sequence
atgcaaagccatgtggaagactttc

SEQ ID NO: 131190 - DNA, 25 bp, Probe Sequence
atgacagaggatgcagagaaacttt

SEQ ID NO: 131191 - DNA, 25 bp, Probe Sequence
atgacagtgcaggaagatcgaaagt

SEQ ID NO: 131192 - DNA, 25 bp, Probe Sequence
atgcacagagcataagagccatcaa

SEQ ID NO: 131193 - DNA, 25 bp, Probe Sequence
atgcatccgagacagaacatgctca

SEQ ID NO: 131194 - DNA, 25 bp, Probe Sequence
atgacgtggactttagcatgcagag

SEQ ID NO: 131195 - DNA, 25 bp, Probe Sequence
atgacattgcgacagtctgcataac

SEQ ID NO: 131196 - DNA, 25 bp, Probe Sequence
atgacagaagcctgccttaaccagt

SEQ ID NO: 131197 - DNA, 25 bp, Probe Sequence
atgacaaatccagccagcaaaaata

SEQ ID NO: 131198 - DNA, 25 bp, Probe Sequence
atgagggatcctgcaagcaaaagat

SEQ ID NO: 131199 - DNA, 25 bp, Probe Sequence
atgaggagtcctggaccttgggctg

SEQ ID NO: 131200 - DNA, 25 bp, Probe Sequence
atgagtatgacagggaacttgccct

SEQ ID NO: 131201 - DNA, 25 bp, Probe Sequence
atgaatacacatgtaactaacctgc

SEQ ID NO: 131202 - DNA, 25 bp, Probe Sequence
atgaagctgccagaaacgaacctct

SEQ ID NO: 131203 - DNA, 25 bp, Probe Sequence
atgaagcctatgggagtcaggaccc

SEQ ID NO: 131204 - DNA, 25 bp, Probe Sequence
atgaagtcaatgctgttctctgccc

SEQ ID NO: 131205 - DNA, 25 bp, Probe Sequence
atgaagtttgcaactttccaccctg

SEQ ID NO: 131206 - DNA, 25 bp, Probe Sequence
atgaaataaagagttaccacccagc

SEQ ID NO: 131207 - DNA, 25 bp, Probe Sequence
atgaaataagaccttagccgggcac

SEQ ID NO: 131208 - DNA, 25 bp, Probe Sequence
atgaaagggaagctcgccaggtcca

SEQ ID NO: 131209 - DNA, 25 bp, Probe Sequence
atgaaaggggactaccacaggtatc

SEQ ID NO: 131210 - DNA, 25 bp, Probe Sequence
atgaacaccttacaccctgtgttca

SEQ ID NO: 131211 - DNA, 25 bp, Probe Sequence
atgaacgtcttacaactcagttgtt

SEQ ID NO: 131212 - DNA, 25 bp, Probe Sequence
atgagttgttgttgggaaagggctt

SEQ ID NO: 131213 - DNA, 25 bp, Probe Sequence
aggtttatggagcgatacgcccctg

SEQ ID NO: 131214 - DNA, 25 bp, Probe Sequence
aggcttctttgggttgatcccacct

SEQ ID NO: 131215 - DNA, 25 bp, Probe Sequence
atgaccttttgatggtgacctacct

SEQ ID NO: 131216 - DNA, 25 bp, Probe Sequence
atgaccttatgggactttcctactt

SEQ ID NO: 131217 - DNA, 25 bp, Probe Sequence
atgcatcttttgatacaatctcctt

SEQ ID NO: 131218 - DNA, 25 bp, Probe Sequence
atgctttcatttacacagatatcca

SEQ ID NO: 131219 - DNA, 25 bp, Probe Sequence
atgcttgttgtttcacatgatacat

SEQ ID NO: 131220 - DNA, 25 bp, Probe Sequence
atgatttagtcctcagaaatggact

SEQ ID NO: 131221 - DNA, 25 bp, Probe Sequence
atgactgacgtccccagaagtttct

SEQ ID NO: 131222 - DNA, 25 bp, Probe Sequence
atgaaaggattgcccgattttatca

SEQ ID NO: 131223 - DNA, 25 bp, Probe Sequence
atgaaaagttcatccatttctgata

SEQ ID NO: 131224 - DNA, 25 bp, Probe Sequence
atgaagctactttcccagggctata

SEQ ID NO: 131225 - DNA, 25 bp, Probe Sequence
atgagtgaccattttgtaggttaca

SEQ ID NO: 131226 - DNA, 25 bp, Probe Sequence
atgaatgcacttcctctgtagttaa

SEQ ID NO: 131227 - DNA, 25 bp, Probe Sequence
atgaaccgcatggtgcttgcagttt

SEQ ID NO: 131228 - DNA, 25 bp, Probe Sequence
atgcaaagactggctctaggtattt

SEQ ID NO: 131229 - DNA, 25 bp, Probe Sequence
atgaatgaacatactcaccctagtt

SEQ ID NO: 131230 - DNA, 25 bp, Probe Sequence
atgaaaagccatccagtctcttgtc

SEQ ID NO: 131231 - DNA, 25 bp, Probe Sequence
atgaagcaaccatcattgacattct

SEQ ID NO: 131232 - DNA, 25 bp, Probe Sequence
atgatagtcacaaacgccgcatgtt

SEQ ID NO: 131233 - DNA, 25 bp, Probe Sequence
atgctagtcgatagagcggctttag

SEQ ID NO: 131234 - DNA, 25 bp, Probe Sequence
atgctggtcactagggtgctgtgct

SEQ ID NO: 131235 - DNA, 25 bp, Probe Sequence
atgctcagctacttgtgctggaggt

SEQ ID NO: 131236 - DNA, 25 bp, Probe Sequence
atgcacgctgaatcctgctatggta

SEQ ID NO: 131237 - DNA, 25 bp, Probe Sequence
atgcagctgtgatttgttgctggga

SEQ ID NO: 131238 - DNA, 25 bp, Probe Sequence
atgcactatgcctgattgctgatcg

SEQ ID NO: 131239 - DNA, 25 bp, Probe Sequence
atgcagatggacggtatgtgatggg

SEQ ID NO: 131240 - DNA, 25 bp, Probe Sequence
atgcacaggctccagatattagggc

SEQ ID NO: 131241 - DNA, 25 bp, Probe Sequence
atgaagactctgcaattggtccccg

SEQ ID NO: 131242 - DNA, 25 bp, Probe Sequence
atgaatgacctggtatctgagtacc

SEQ ID NO: 131243 - DNA, 25 bp, Probe Sequence
atgcataacctgccatatctttaca

SEQ ID NO: 131244 - DNA, 25 bp, Probe Sequence
atgcttacgcattctggtgtttcac

SEQ ID NO: 131245 - DNA, 25 bp, Probe Sequence
atgcttcagaattcagagggttcag

SEQ ID NO: 131246 - DNA, 25 bp, Probe Sequence
atgcttcagaattcagagggttcag

SEQ ID NO: 131247 - DNA, 25 bp, Probe Sequence
atgcatctaataacgagctggttcg

SEQ ID NO: 131248 - DNA, 25 bp, Probe Sequence
atgcatgccaaagccattagttgaa

SEQ ID NO: 131249 - DNA, 25 bp, Probe Sequence
atgctgcccataaacacgaggatga

SEQ ID NO: 131250 - DNA, 25 bp, Probe Sequence
atgcacccatgtcccaggtgtatgg

SEQ ID NO: 131251 - DNA, 25 bp, Probe Sequence
atgacccttcatggagtggtaaatg

SEQ ID NO: 131252 - DNA, 25 bp, Probe Sequence
atgaacagttcatcaatgcggccaa

SEQ ID NO: 131253 - DNA, 25 bp, Probe Sequence
atgaacagttcatcaatgcggccaa

SEQ ID NO: 131254 - DNA, 25 bp, Probe Sequence
atgacattgttcttacacggcacaa

SEQ ID NO: 131255 - DNA, 25 bp, Probe Sequence
atgaatgctttgttacagacccaag

SEQ ID NO: 131256 - DNA, 25 bp, Probe Sequence
atgaatttctctacagatgtcccat

SEQ ID NO: 131257 - DNA, 25 bp, Probe Sequence
atgaataatccgccagaacgaccag

SEQ ID NO: 131258 - DNA, 25 bp, Probe Sequence
atgacataagtcagcaaactgcggg

SEQ ID NO: 131259 - DNA, 25 bp, Probe Sequence
atgcaacacggatgataccatcggg

SEQ ID NO: 131260 - DNA, 25 bp, Probe Sequence
atgaacaatggctgctgaccacggc

SEQ ID NO: 131261 - DNA, 25 bp, Probe Sequence
atgaatctgacctctatagcctggc

SEQ ID NO: 131262 - DNA, 25 bp, Probe Sequence
atgaattatgcggcttaaagctgtc

SEQ ID NO: 131263 - DNA, 25 bp, Probe Sequence
atgcttcatttgtatgtcaaagctt

SEQ ID NO: 131264 - DNA, 25 bp, Probe Sequence
atgactaatatgtttacaagttaga

SEQ ID NO: 131265 - DNA, 25 bp, Probe Sequence
atgactaaaatatacaggctgtgac

SEQ ID NO: 131266 - DNA, 25 bp, Probe Sequence
atgatcccaaaatgcggagcttgaa

SEQ ID NO: 131267 - DNA, 25 bp, Probe Sequence
atgaacccaaacatagacttgcaag

SEQ ID NO: 131268 - DNA, 25 bp, Probe Sequence
atgaacctcagcccattaggcagga

SEQ ID NO: 131269 - DNA, 25 bp, Probe Sequence
atgaacctcagcccattaggcagga

SEQ ID NO: 131270 - DNA, 25 bp, Probe Sequence
atgaagcttcatgcacttaaagaag

SEQ ID NO: 131271 - DNA, 25 bp, Probe Sequence
atgactttcttcacagaatcagaag

SEQ ID NO: 131272 - DNA, 25 bp, Probe Sequence
atgaggtccttctggactaaaagcc

SEQ ID NO: 131273 - DNA, 25 bp, Probe Sequence
atgcagatggcagctcaagtgtcta

SEQ ID NO: 131274 - DNA, 25 bp, Probe Sequence
atgctgctggcagatcagggccaga

SEQ ID NO: 131275 - DNA, 25 bp, Probe Sequence
atgctgatgaacttcgtgctgccat

SEQ ID NO: 131276 - DNA, 25 bp, Probe Sequence
atgcattagcagctagtgctccagt

SEQ ID NO: 131277 - DNA, 25 bp, Probe Sequence
atgatgcttagccatagtattcagg

SEQ ID NO: 131278 - DNA, 25 bp, Probe Sequence
atgagcctgcattctatttacagtg

SEQ ID NO: 131279 - DNA, 25 bp, Probe Sequence
atgcacctaattttttatgagatta

SEQ ID NO: 131280 - DNA, 25 bp, Probe Sequence
atgcagaatcaatcacttttaaatc

SEQ ID NO: 131281 - DNA, 25 bp, Probe Sequence
atgctgaagagaggcatctttgtca

SEQ ID NO: 131282 - DNA, 25 bp, Probe Sequence
atgctatagcacgtgcttgcttgaa

SEQ ID NO: 131283 - DNA, 25 bp, Probe Sequence
atgcaatcacaccatgccatgtttt

SEQ ID NO: 131284 - DNA, 25 bp, Probe Sequence
atgaatatacctctgatatggtttg

SEQ ID NO: 131285 - DNA, 25 bp, Probe Sequence
atgctaatatccattgaatcggtag

SEQ ID NO: 131286 - DNA, 25 bp, Probe Sequence
atgctgattttcattgtgcacatgg

SEQ ID NO: 131287 - DNA, 25 bp, Probe Sequence
atgcatgcattttcagttgctcctt

SEQ ID NO: 131288 - DNA, 25 bp, Probe Sequence
atgcatgcattttcagttgctcctt

SEQ ID NO: 131289 - DNA, 25 bp, Probe Sequence
atgcagctcactgatttcatcctca

SEQ ID NO: 131290 - DNA, 25 bp, Probe Sequence
atgcagctcactgatttcatcctca

SEQ ID NO: 131291 - DNA, 25 bp, Probe Sequence
atgcttgatcatctttgcactctgc

SEQ ID NO: 131292 - DNA, 25 bp, Probe Sequence
atgcatgtgccacatttcgctttca

SEQ ID NO: 131293 - DNA, 25 bp, Probe Sequence
atgcagcgctacaattttcattatc

SEQ ID NO: 131294 - DNA, 25 bp, Probe Sequence
atgcagaggaccattgtcatccgcc

SEQ ID NO: 131295 - DNA, 25 bp, Probe Sequence
atgcagaggaccattgtcatccgcc

SEQ ID NO: 131296 - DNA, 25 bp, Probe Sequence
atgtgtggagccgaagaacccctat

SEQ ID NO: 131297 - DNA, 25 bp, Probe Sequence
atgtggggcttgattcacccttcat

SEQ ID NO: 131298 - DNA, 25 bp, Probe Sequence
atgagggagactgttcacctgctgt

SEQ ID NO: 131299 - DNA, 25 bp, Probe Sequence
atgggtagatagtggtgcagtgctt

SEQ ID NO: 131300 - DNA, 25 bp, Probe Sequence
atgcagtgttgctggaggctcttgc

SEQ ID NO: 131301 - DNA, 25 bp, Probe Sequence
atgagtgctttagtgagtcctcagc

SEQ ID NO: 131302 - DNA, 25 bp, Probe Sequence
aggcttttactgttcctcaagcctt

SEQ ID NO: 131303 - DNA, 25 bp, Probe Sequence
aggttaaagtctccggcattgcgct

SEQ ID NO: 131304 - DNA, 25 bp, Probe Sequence
atgagaatgaaactgccgggctatc

SEQ ID NO: 131305 - DNA, 25 bp, Probe Sequence
atgaaagaatactcaggctttgcag

SEQ ID NO: 131306 - DNA, 25 bp, Probe Sequence
atgacaagtatatggggcaattaag

SEQ ID NO: 131307 - DNA, 25 bp, Probe Sequence
atgactagcaaatggtggtgtttat

SEQ ID NO: 131308 - DNA, 25 bp, Probe Sequence
atgaccagaaactgtttccctacgg

SEQ ID NO: 131309 - DNA, 25 bp, Probe Sequence
atgaccagacagacataaagaccct

SEQ ID NO: 131310 - DNA, 25 bp, Probe Sequence
atgacgagacccaaatgatccgcgt

SEQ ID NO: 131311 - DNA, 25 bp, Probe Sequence
atgaaatggcccacagaacctatct

SEQ ID NO: 131312 - DNA, 25 bp, Probe Sequence
atgaacttaccatagtatttttgta

SEQ ID NO: 131313 - DNA, 25 bp, Probe Sequence
atgaacgaaaacaggtgactttgga

SEQ ID NO: 131314 - DNA, 25 bp, Probe Sequence
atgaagcgaacatctgggtggttag

SEQ ID NO: 131315 - DNA, 25 bp, Probe Sequence
atgaacgaacagactcaggcgatgt

SEQ ID NO: 131316 - DNA, 25 bp, Probe Sequence
atgacactgggcaagctaatctatg

SEQ ID NO: 131317 - DNA, 25 bp, Probe Sequence
atgacacttacgacaatgacattgc

SEQ ID NO: 131318 - DNA, 25 bp, Probe Sequence
atgacctaactcagcatggcatctg

SEQ ID NO: 131319 - DNA, 25 bp, Probe Sequence
atgacctaactcagcatggcatctg

SEQ ID NO: 131320 - DNA, 25 bp, Probe Sequence
atgacctaactcagcatggcatctg

SEQ ID NO: 131321 - DNA, 25 bp, Probe Sequence
atgacctaagtttgaatgtatttcc

SEQ ID NO: 131322 - DNA, 25 bp, Probe Sequence
atgacctaagtcaggtaatatacct

SEQ ID NO: 131323 - DNA, 25 bp, Probe Sequence
atgaccgtatgtcaccaagagatga

SEQ ID NO: 131324 - DNA, 25 bp, Probe Sequence
atgacgatgtcgataccaagaagca

SEQ ID NO: 131325 - DNA, 25 bp, Probe Sequence
atgcagcttttgaaatgacattaac

SEQ ID NO: 131326 - DNA, 25 bp, Probe Sequence
atgcagttgcttagagacaacctaa

SEQ ID NO: 131327 - DNA, 25 bp, Probe Sequence
atgcatgtacttatccatactaata

SEQ ID NO: 131328 - DNA, 25 bp, Probe Sequence
atgcatgtttatagctccagccagg

SEQ ID NO: 131329 - DNA, 25 bp, Probe Sequence
atgcatgttcaggttctcaccaggt

SEQ ID NO: 131330 - DNA, 25 bp, Probe Sequence
atgagcttgctgttgtacacagggt

SEQ ID NO: 131331 - DNA, 25 bp, Probe Sequence
atgagtatgtcacttacccgtgctt

SEQ ID NO: 131332 - DNA, 25 bp, Probe Sequence
atgagtatgtcacttacccgtgctt

SEQ ID NO: 131333 - DNA, 25 bp, Probe Sequence
atgcacttctatttagccagcgttt

SEQ ID NO: 131334 - DNA, 25 bp, Probe Sequence
atgacattgtttgatgaagcctaat

SEQ ID NO: 131335 - DNA, 25 bp, Probe Sequence
atgacattgtcgaaagaaagttctt

SEQ ID NO: 131336 - DNA, 25 bp, Probe Sequence
atgaatattcgtgcaaaaatcctca

SEQ ID NO: 131337 - DNA, 25 bp, Probe Sequence
atgagctttcctaaattaaatctat

SEQ ID NO: 131338 - DNA, 25 bp, Probe Sequence
atgagctcccagattcgtcagaatt

SEQ ID NO: 131339 - DNA, 25 bp, Probe Sequence
atggttgccgggtcatgttaattgg

SEQ ID NO: 131340 - DNA, 25 bp, Probe Sequence
atggtccctgggcttaatattcttt

SEQ ID NO: 131341 - DNA, 25 bp, Probe Sequence
atggtccctgttgttctaaagctaa

SEQ ID NO: 131342 - DNA, 25 bp, Probe Sequence
atgaccgcgtttgtggaaaagagaa

SEQ ID NO: 131343 - DNA, 25 bp, Probe Sequence
atgaacggtcaaatgggtgggagta

SEQ ID NO: 131344 - DNA, 25 bp, Probe Sequence
atgaacgcggccaatgtgggctgga

SEQ ID NO: 131345 - DNA, 25 bp, Probe Sequence
atgcagagacgggcttgctgggtgc

SEQ ID NO: 131346 - DNA, 25 bp, Probe Sequence
atgcatgaagcgaacatctgggtgg

SEQ ID NO: 131347 - DNA, 25 bp, Probe Sequence
atgatgccagaagtccggggagcct

SEQ ID NO: 131348 - DNA, 25 bp, Probe Sequence
atgagctagggctctgggggtctgc

SEQ ID NO: 131349 - DNA, 25 bp, Probe Sequence
atgagctagggctctgggggtctgc

SEQ ID NO: 131350 - DNA, 25 bp, Probe Sequence
atgactcactcatttcttggggtcg

SEQ ID NO: 131351 - DNA, 25 bp, Probe Sequence
atgcatgggtcatttgtcttgggtg

SEQ ID NO: 131352 - DNA, 25 bp, Probe Sequence
atgagtggcggcatgttggtagtgc

SEQ ID NO: 131353 - DNA, 25 bp, Probe Sequence
atgactgtcaggatgttgcttcaga

SEQ ID NO: 131354 - DNA, 25 bp, Probe Sequence
atgactgtgggatgtacgtgatatg

SEQ ID NO: 131355 - DNA, 25 bp, Probe Sequence
atgaattgctggtcaaaatgctaaa

SEQ ID NO: 131356 - DNA, 25 bp, Probe Sequence
atgcaatgtgcatgcctaaatggaa

SEQ ID NO: 131357 - DNA, 25 bp, Probe Sequence
atgcacatgtaacccaaatgtccaa

SEQ ID NO: 131358 - DNA, 25 bp, Probe Sequence
atgcacatgtaacccaaatgtccaa

SEQ ID NO: 131359 - DNA, 25 bp, Probe Sequence
atgcacaatcaacaaaaccaagagt

SEQ ID NO: 131360 - DNA, 25 bp, Probe Sequence
atgcaaatacacagattatgccaag

SEQ ID NO: 131361 - DNA, 25 bp, Probe Sequence
atgcaacaaacattgagctagccac

SEQ ID NO: 131362 - DNA, 25 bp, Probe Sequence
atgcaaaatcaccaggacagccaat

SEQ ID NO: 131363 - DNA, 25 bp, Probe Sequence
atgcaaagaccatgcgccggaacac

SEQ ID NO: 131364 - DNA, 25 bp, Probe Sequence
atgacgagtgcagcagctgccagga

SEQ ID NO: 131365 - DNA, 25 bp, Probe Sequence
atgcttgttcaggcacgccagaagg

SEQ ID NO: 131366 - DNA, 25 bp, Probe Sequence
atgcttgtgcctgagctgtcaaaag

SEQ ID NO: 131367 - DNA, 25 bp, Probe Sequence
atgcttggcctttctataaaccagt

SEQ ID NO: 131368 - DNA, 25 bp, Probe Sequence
atgggccctttatttatgacgactt

SEQ ID NO: 131369 - DNA, 25 bp, Probe Sequence
atgacagcccctggattaatgacgt

SEQ ID NO: 131370 - DNA, 25 bp, Probe Sequence
atgcacccctctttcaaatgataat

SEQ ID NO: 131371 - DNA, 25 bp, Probe Sequence
atgactgccttcaagtctcaagaaa

SEQ ID NO: 131372 - DNA, 25 bp, Probe Sequence
atgactgtctccagcaataggatga

SEQ ID NO: 131373 - DNA, 25 bp, Probe Sequence
atgcaagtgtccattgatagatgaa

SEQ ID NO: 131374 - DNA, 25 bp, Probe Sequence
atgagttggctgattgagactgcaa

SEQ ID NO: 131375 - DNA, 25 bp, Probe Sequence
atgagcttcgttctacgtgaacccg

SEQ ID NO: 131376 - DNA, 25 bp, Probe Sequence
atgacttcgtctatgactgtaactg

SEQ ID NO: 131377 - DNA, 25 bp, Probe Sequence
atgagattatccatgtggttaactg

SEQ ID NO: 131378 - DNA, 25 bp, Probe Sequence
atggtttgcctgagctttgaacagt

SEQ ID NO: 131379 - DNA, 25 bp, Probe Sequence
atgagggtgcccagcttataagaat

SEQ ID NO: 131380 - DNA, 25 bp, Probe Sequence
atgcaggtatgttcaggttaagcca

SEQ ID NO: 131381 - DNA, 25 bp, Probe Sequence
atgcaggttgtaatcagaaatagac

SEQ ID NO: 131382 - DNA, 25 bp, Probe Sequence
atgcagtttggtcagctcctgacac

SEQ ID NO: 131383 - DNA, 25 bp, Probe Sequence
atgcagctttttaggctctggagcc

SEQ ID NO: 131384 - DNA, 25 bp, Probe Sequence
atgagtttcttactcgggagctggc

SEQ ID NO: 131385 - DNA, 25 bp, Probe Sequence
atgtgtctgtttatgggggtggttt

SEQ ID NO: 131386 - DNA, 25 bp, Probe Sequence
atgggtttgtttgagggtattatct

SEQ ID NO: 131387 - DNA, 25 bp, Probe Sequence
atgggttttttgtggtcttgagtca

SEQ ID NO: 131388 - DNA, 25 bp, Probe Sequence
atgggttgctctaagggaccttgga

SEQ ID NO: 131389 - DNA, 25 bp, Probe Sequence
atgaagtgtgttaaggggtcggcta

SEQ ID NO: 131390 - DNA, 25 bp, Probe Sequence
atgcaagtgtgaattacgtggtatg

SEQ ID NO: 131391 - DNA, 25 bp, Probe Sequence
atgcacatttactcacgtggaagcc

SEQ ID NO: 131392 - DNA, 25 bp, Probe Sequence
atgacattaaaagtgctgctggtga

SEQ ID NO: 131393 - DNA, 25 bp, Probe Sequence
atgctattatatgatgctgtttgta

SEQ ID NO: 131394 - DNA, 25 bp, Probe Sequence
atgcttccaatcttgctttgtgtat

SEQ ID NO: 131395 - DNA, 25 bp, Probe Sequence
atgcttcaagatttccttgcctgac

SEQ ID NO: 131396 - DNA, 25 bp, Probe Sequence
atgaagattgatcagcttgtgtatg

SEQ ID NO: 131397 - DNA, 25 bp, Probe Sequence
atgcaatggttctctgttgtgtgtg

SEQ ID NO: 131398 - DNA, 25 bp, Probe Sequence
atgcagaggtatgggtgtcgtggct

SEQ ID NO: 131399 - DNA, 25 bp, Probe Sequence
atgcatgaggtcagctttctgcctc

SEQ ID NO: 131400 - DNA, 25 bp, Probe Sequence
atgcagcattgtctttgtctgtccc

SEQ ID NO: 131401 - DNA, 25 bp, Probe Sequence
atgcagcatttccaggtgcttggcg

SEQ ID NO: 131402 - DNA, 25 bp, Probe Sequence
atgcagcagcttcactgactgtggc

SEQ ID NO: 131403 - DNA, 25 bp, Probe Sequence
atgcagcagttggaagacggtggcc

SEQ ID NO: 131404 - DNA, 25 bp, Probe Sequence
atgaaagggacgacgggagctgcat

SEQ ID NO: 131405 - DNA, 25 bp, Probe Sequence
atgaactgggggacaggtctgcgct

SEQ ID NO: 131406 - DNA, 25 bp, Probe Sequence
atgacatggacgggacggtctcggt

SEQ ID NO: 131407 - DNA, 25 bp, Probe Sequence
atgaaggagcgggggtgtggcaggc

SEQ ID NO: 131408 - DNA, 25 bp, Probe Sequence
atgaaccagtgggggcaggtccctc

SEQ ID NO: 131409 - DNA, 25 bp, Probe Sequence
atgaaccagtgggggcaggtccctc

SEQ ID NO: 131410 - DNA, 25 bp, Probe Sequence
atgaaccagtgggggcaggtccctc

SEQ ID NO: 131411 - DNA, 25 bp, Probe Sequence
atgaccaggcggggagacagcccct

SEQ ID NO: 131412 - DNA, 25 bp, Probe Sequence
atgtccagaaggaagaccgcactcc

SEQ ID NO: 131413 - DNA, 25 bp, Probe Sequence
atgttctgagagcatcaggaaatac

SEQ ID NO: 131414 - DNA, 25 bp, Probe Sequence
atgtacttttaccgcaggataccaa

SEQ ID NO: 131415 - DNA, 25 bp, Probe Sequence
agtactccttactgtagaagcctgg

SEQ ID NO: 131416 - DNA, 25 bp, Probe Sequence
agtcccttttgatgggaagtgcagt

SEQ ID NO: 131417 - DNA, 25 bp, Probe Sequence
atgtcccagtctattcgggagtctg

SEQ ID NO: 131418 - DNA, 25 bp, Probe Sequence
atgacccctatttgtctgaggttct

SEQ ID NO: 131419 - DNA, 25 bp, Probe Sequence
atgactggctgttttctctgaatgt

SEQ ID NO: 131420 - DNA, 25 bp, Probe Sequence
atgagctgactgggctttgctacgt

SEQ ID NO: 131421 - DNA, 25 bp, Probe Sequence
atgcacatagctcagcccagatact

SEQ ID NO: 131422 - DNA, 25 bp, Probe Sequence
atgcagatgcagacagatcgcctgt

SEQ ID NO: 131423 - DNA, 25 bp, Probe Sequence
atgcaatgccactgcatccatgcat

SEQ ID NO: 131424 - DNA, 25 bp, Probe Sequence
atgaatcagtcatcatccagctggt

SEQ ID NO: 131425 - DNA, 25 bp, Probe Sequence
atgcaatgagattatattactagtg

SEQ ID NO: 131426 - DNA, 25 bp, Probe Sequence
atgcaagatgatttgtatcttagac

SEQ ID NO: 131427 - DNA, 25 bp, Probe Sequence
atgaaagatttctctgtagcatgca

SEQ ID NO: 131428 - DNA, 25 bp, Probe Sequence
atgaaggagtgcgtgcctgctacga

SEQ ID NO: 131429 - DNA, 25 bp, Probe Sequence
atgaaggagtgcgtgcctgctacga

SEQ ID NO: 131430 - DNA, 25 bp, Probe Sequence
atgaagtaggctgccatattcagag

SEQ ID NO: 131431 - DNA, 25 bp, Probe Sequence
atgaggtaccttgctgtgtaggagg

SEQ ID NO: 131432 - DNA, 25 bp, Probe Sequence
atgacgaagcctcccggaagagaaa

SEQ ID NO: 131433 - DNA, 25 bp, Probe Sequence
atgacgacacctagctctaagagca

SEQ ID NO: 131434 - DNA, 25 bp, Probe Sequence
atgaggaggcctcgctatagcaaaa

SEQ ID NO: 131435 - DNA, 25 bp, Probe Sequence
atgagtaggtagatacagatataga

SEQ ID NO: 131436 - DNA, 25 bp, Probe Sequence
atgagtaggttcgtagcttgattga

SEQ ID NO: 131437 - DNA, 25 bp, Probe Sequence
atgaccatggtatattcctattgga

SEQ ID NO: 131438 - DNA, 25 bp, Probe Sequence
atgaccagcctaaatattctggggg

SEQ ID NO: 131439 - DNA, 25 bp, Probe Sequence
atgagccaaaatgtttcccggtgtt

SEQ ID NO: 131440 - DNA, 25 bp, Probe Sequence
aggacacaaaacagctaccagcggt

SEQ ID NO: 131441 - DNA, 25 bp, Probe Sequence
agtgtactaaactctacgctctggt

SEQ ID NO: 131442 - DNA, 25 bp, Probe Sequence
atgtctactgaggaccctgggactt

SEQ ID NO: 131443 - DNA, 25 bp, Probe Sequence
atgttacgggctgttgatagatttc

SEQ ID NO: 131444 - DNA, 25 bp, Probe Sequence
atgcatatttgggctgggtatggag

SEQ ID NO: 131445 - DNA, 25 bp, Probe Sequence
atgcatttttgagtttgtattagtt

SEQ ID NO: 131446 - DNA, 25 bp, Probe Sequence
atgcatctgtttattctatagttat

SEQ ID NO: 131447 - DNA, 25 bp, Probe Sequence
atgcttgttgcaattgccttttttc

SEQ ID NO: 131448 - DNA, 25 bp, Probe Sequence
atgaatgttcatagctgctttatct

SEQ ID NO: 131449 - DNA, 25 bp, Probe Sequence
atgcaggtctcaatgccgtgtgttc

SEQ ID NO: 131450 - DNA, 25 bp, Probe Sequence
atgcaggtctcttggtatttattga

SEQ ID NO: 131451 - DNA, 25 bp, Probe Sequence
atgaggttttccgatttgcttcagc

SEQ ID NO: 131452 - DNA, 25 bp, Probe Sequence
atgatggtttttattcctggcatcc

SEQ ID NO: 131453 - DNA, 25 bp, Probe Sequence
atgaggtattaatcccctccattgc

SEQ ID NO: 131454 - DNA, 25 bp, Probe Sequence
atgaggaaaagactccctattcagt

SEQ ID NO: 131455 - DNA, 25 bp, Probe Sequence
atgatgggattaacacccttataaa

SEQ ID NO: 131456 - DNA, 25 bp, Probe Sequence
atgggttggaaagcctcttcgagca

SEQ ID NO: 131457 - DNA, 25 bp, Probe Sequence
atgagttatgtcaaacatcccttta

SEQ ID NO: 131458 - DNA, 25 bp, Probe Sequence
atgcagttttggggcacctcttaat

SEQ ID NO: 131459 - DNA, 25 bp, Probe Sequence
atgactttggtgagtagccttgaat

SEQ ID NO: 131460 - DNA, 25 bp, Probe Sequence
atgcactttactagcagttctactg

SEQ ID NO: 131461 - DNA, 25 bp, Probe Sequence
atgcaccactaccacgtatgtacat

SEQ ID NO: 131462 - DNA, 25 bp, Probe Sequence
atgcaccaccatgtcggactaattt

SEQ ID NO: 131463 - DNA, 25 bp, Probe Sequence
atgcaccccacctgtgaagaacagt

SEQ ID NO: 131464 - DNA, 25 bp, Probe Sequence
atgtccaccacccagttctggggat

SEQ ID NO: 131465 - DNA, 25 bp, Probe Sequence
gggagtcccaagatttggggatgtg

SEQ ID NO: 131466 - DNA, 25 bp, Probe Sequence
aggcacccctacctcatgggggtgt

SEQ ID NO: 131467 - DNA, 25 bp, Probe Sequence
atggcccacacgttgtatttggttg

SEQ ID NO: 131468 - DNA, 25 bp, Probe Sequence
atggttagctctttgttttggggtg

SEQ ID NO: 131469 - DNA, 25 bp, Probe Sequence
atgagctttcccatttcttagagga

SEQ ID NO: 131470 - DNA, 25 bp, Probe Sequence
atgagtgttcgatatttgctatagg

SEQ ID NO: 131471 - DNA, 25 bp, Probe Sequence
atgagtttagcagtcttttggagtg

SEQ ID NO: 131472 - DNA, 25 bp, Probe Sequence
atgaccattaggcctatttaggtga

SEQ ID NO: 131473 - DNA, 25 bp, Probe Sequence
atgaccattaggcctatttaggtga

SEQ ID NO: 131474 - DNA, 25 bp, Probe Sequence
atgaccattaggcctatttaggtga

SEQ ID NO: 131475 - DNA, 25 bp, Probe Sequence
atgaccattaggcctatttaggtga

SEQ ID NO: 131476 - DNA, 25 bp, Probe Sequence
atgaccactcatgggtatatgctag

SEQ ID NO: 131477 - DNA, 25 bp, Probe Sequence
atgaccctctgaagactgactcatc

SEQ ID NO: 131478 - DNA, 25 bp, Probe Sequence
atgaagtcttgaagactgcacctta

SEQ ID NO: 131479 - DNA, 25 bp, Probe Sequence
atgcaaattcttgggtcactctcta

SEQ ID NO: 131480 - DNA, 25 bp, Probe Sequence
atgcaaatttccctagatcttctat

SEQ ID NO: 131481 - DNA, 25 bp, Probe Sequence
atgaatgacattgctgtcgtttttt

SEQ ID NO: 131482 - DNA, 25 bp, Probe Sequence
atgagattcgtgggtggcttgcttt

SEQ ID NO: 131483 - DNA, 25 bp, Probe Sequence
atgaagtgaggagatggttatttaa

SEQ ID NO: 131484 - DNA, 25 bp, Probe Sequence
atgaagtcaggctcatctgcttact

SEQ ID NO: 131485 - DNA, 25 bp, Probe Sequence
atgaagtgcccatgattctgtcagt

SEQ ID NO: 131486 - DNA, 25 bp, Probe Sequence
atgaagaccacctattttatatttc

SEQ ID NO: 131487 - DNA, 25 bp, Probe Sequence
atgcaggatccactaattttttgtc

SEQ ID NO: 131488 - DNA, 25 bp, Probe Sequence
atgcaaatacatcaattctatcatt

SEQ ID NO: 131489 - DNA, 25 bp, Probe Sequence
atgcaatatccatacatctccttct

SEQ ID NO: 131490 - DNA, 25 bp, Probe Sequence
atgcaaatctataagctcctgcttt

SEQ ID NO: 131491 - DNA, 25 bp, Probe Sequence
atgactgtctaaagcatgccttatt

SEQ ID NO: 131492 - DNA, 25 bp, Probe Sequence
atgaatgactcaatcaaggctgaaa

SEQ ID NO: 131493 - DNA, 25 bp, Probe Sequence
atgcacatgtctgtcacacatgcac

SEQ ID NO: 131494 - DNA, 25 bp, Probe Sequence
atgcagcagcttaccagaatgcctt

SEQ ID NO: 131495 - DNA, 25 bp, Probe Sequence
atgcagcacattgtactggcctgtg

SEQ ID NO: 131496 - DNA, 25 bp, Probe Sequence
atgagacatcctggaagcagccggc

SEQ ID NO: 131497 - DNA, 25 bp, Probe Sequence
atgaacatcaatggaggcaacactc

SEQ ID NO: 131498 - DNA, 25 bp, Probe Sequence
atgaatatgctgatggagcgaagta

SEQ ID NO: 131499 - DNA, 25 bp, Probe Sequence
atgatgtttgagtcgggaagtaaaa

SEQ ID NO: 131500 - DNA, 25 bp, Probe Sequence
atgagttaattcacgtagtgcttaa

SEQ ID NO: 131501 - DNA, 25 bp, Probe Sequence
atgaattgaattatcttggttgaaa

SEQ ID NO: 131502 - DNA, 25 bp, Probe Sequence
atgaattcagtgaactcttttctca

SEQ ID NO: 131503 - DNA, 25 bp, Probe Sequence
atgcaattcagtggattaagtacat

SEQ ID NO: 131504 - DNA, 25 bp, Probe Sequence
atgacccaggagtctacactcaagt

SEQ ID NO: 131505 - DNA, 25 bp, Probe Sequence
atgaggtagggagtctcactaactc

SEQ ID NO: 131506 - DNA, 25 bp, Probe Sequence
atgaagtgggtgccccactcacttc

SEQ ID NO: 131507 - DNA, 25 bp, Probe Sequence
atgaagtgggtgccccactcacttc

SEQ ID NO: 131508 - DNA, 25 bp, Probe Sequence
atgacagggaacttgccctgcatct

SEQ ID NO: 131509 - DNA, 25 bp, Probe Sequence
atgacactggaaatgatcatcctat

SEQ ID NO: 131510 - DNA, 25 bp, Probe Sequence
atgcaagctggtggctggaccaatg

SEQ ID NO: 131511 - DNA, 25 bp, Probe Sequence
atgcaggtgtggtgcgaccagagac

SEQ ID NO: 131512 - DNA, 25 bp, Probe Sequence
atgcagtgatgtatccaacctatgg

SEQ ID NO: 131513 - DNA, 25 bp, Probe Sequence
atgcagctgatgcagtccgagagct

SEQ ID NO: 131514 - DNA, 25 bp, Probe Sequence
acggatgggtctcagttacaaataa

SEQ ID NO: 131515 - DNA, 25 bp, Probe Sequence
atggttaatgttcacttaaaagaca

SEQ ID NO: 131516 - DNA, 25 bp, Probe Sequence
atgagatgtaatctacctacagaaa

SEQ ID NO: 131517 - DNA, 25 bp, Probe Sequence
atgactgggatgttatggaaagaga

SEQ ID NO: 131518 - DNA, 25 bp, Probe Sequence
atgacatgggaggcgatggggacga

SEQ ID NO: 131519 - DNA, 25 bp, Probe Sequence
atgaatggctgcgacatggggcccg

SEQ ID NO: 131520 - DNA, 25 bp, Probe Sequence
atgaagctgatgcacagggagcacc

SEQ ID NO: 131521 - DNA, 25 bp, Probe Sequence
atgacctgttgatggtggcctacct

SEQ ID NO: 131522 - DNA, 25 bp, Probe Sequence
atgatccggtgagctgggaaacctc

SEQ ID NO: 131523 - DNA, 25 bp, Probe Sequence
atgacctggtgaagaagtacaagct

SEQ ID NO: 131524 - DNA, 25 bp, Probe Sequence
atgagcctggtccatgaagtgccca

SEQ ID NO: 131525 - DNA, 25 bp, Probe Sequence
atgagctgcagcaataaaagtgcta

SEQ ID NO: 131526 - DNA, 25 bp, Probe Sequence
atggtcgttaaggcgtgtacggtgg

SEQ ID NO: 131527 - DNA, 25 bp, Probe Sequence
atggttcggtaggctgtgtacggtg

SEQ ID NO: 131528 - DNA, 25 bp, Probe Sequence
atggtttggtccaggttctgttctg

SEQ ID NO: 131529 - DNA, 25 bp, Probe Sequence
aggtctgggtaatgtatacttttga

SEQ ID NO: 131530 - DNA, 25 bp, Probe Sequence
aggactgtgtaatagtttccctaga

SEQ ID NO: 131531 - DNA, 25 bp, Probe Sequence
atgaaggatgtaaaagttctctctt

SEQ ID NO: 131532 - DNA, 25 bp, Probe Sequence
atgaaagttcaatgttgctgttctt

SEQ ID NO: 131533 - DNA, 25 bp, Probe Sequence
atgaaagcctactcattctcatctt

SEQ ID NO: 131534 - DNA, 25 bp, Probe Sequence
atgcagatacttattgcatttcttt

SEQ ID NO: 131535 - DNA, 25 bp, Probe Sequence
atgagtccatcttcagtgctttttt

SEQ ID NO: 131536 - DNA, 25 bp, Probe Sequence
atgagctacatcctcattgttcaca

SEQ ID NO: 131537 - DNA, 25 bp, Probe Sequence
atgatgcgctcagtgccatgcgttc

SEQ ID NO: 131538 - DNA, 25 bp, Probe Sequence
atgaatgtcctggcagatgctctca

SEQ ID NO: 131539 - DNA, 25 bp, Probe Sequence
atgaatgttgattaatgccatctag

SEQ ID NO: 131540 - DNA, 25 bp, Probe Sequence
atgacattctaataggctgtgagga

SEQ ID NO: 131541 - DNA, 25 bp, Probe Sequence
atgatcatgccgaaaaagtggcgga

SEQ ID NO: 131542 - DNA, 25 bp, Probe Sequence
atgtgatgcccggaatatctggggt

SEQ ID NO: 131543 - DNA, 25 bp, Probe Sequence
atgtgctcccaggttacgggttaat

SEQ ID NO: 131544 - DNA, 25 bp, Probe Sequence
atgatgcccagaggttagctgccgt

SEQ ID NO: 131545 - DNA, 25 bp, Probe Sequence
atgacctggggaaagcgcatggctc

SEQ ID NO: 131546 - DNA, 25 bp, Probe Sequence
atgacctggggaaagcgcatggctc

SEQ ID NO: 131547 - DNA, 25 bp, Probe Sequence
atgacctgggcattaagtataccaa

SEQ ID NO: 131548 - DNA, 25 bp, Probe Sequence
atgatgccgtggcacaggaaggcca

SEQ ID NO: 131549 - DNA, 25 bp, Probe Sequence
atgatgactgtgtgtttggaggcca

SEQ ID NO: 131550 - DNA, 25 bp, Probe Sequence
atgaacggtagaattgtggccacaa

SEQ ID NO: 131551 - DNA, 25 bp, Probe Sequence
atgaaggcgtcgcggatgcgcctca

SEQ ID NO: 131552 - DNA, 25 bp, Probe Sequence
atgactgactgtggggtgggcccag

SEQ ID NO: 131553 - DNA, 25 bp, Probe Sequence
atgactcactgtgggggggtggctg

SEQ ID NO: 131554 - DNA, 25 bp, Probe Sequence
atgagaaatgtgctggggtcgcgtg

SEQ ID NO: 131555 - DNA, 25 bp, Probe Sequence
atggtcgctgtgtgagggtccagga

SEQ ID NO: 131556 - DNA, 25 bp, Probe Sequence
aggccatgctggggaaagccacgtg

SEQ ID NO: 131557 - DNA, 25 bp, Probe Sequence
atgaccagatgggagaaagacagca

SEQ ID NO: 131558 - DNA, 25 bp, Probe Sequence
atgacctgggcatcaaacacacatt

SEQ ID NO: 131559 - DNA, 25 bp, Probe Sequence
atgacctgggcttcccagaagagat

SEQ ID NO: 131560 - DNA, 25 bp, Probe Sequence
atgacgaggagtcatccagaagaac

SEQ ID NO: 131561 - DNA, 25 bp, Probe Sequence
atgaaagaaggccagccaccaacag

SEQ ID NO: 131562 - DNA, 25 bp, Probe Sequence
atgaagacaaggatcacgccacaga

SEQ ID NO: 131563 - DNA, 25 bp, Probe Sequence
atgcagcagatcaaagactccacca

SEQ ID NO: 131564 - DNA, 25 bp, Probe Sequence
atgagatcctcaagcacatcaacga

SEQ ID NO: 131565 - DNA, 25 bp, Probe Sequence
atgaatccttagtagcaatgacagc

SEQ ID NO: 131566 - DNA, 25 bp, Probe Sequence
atgaaacttcattaacagaaggaca

SEQ ID NO: 131567 - DNA, 25 bp, Probe Sequence
atgaaccatgatcccaatccaagtg

SEQ ID NO: 131568 - DNA, 25 bp, Probe Sequence
atgaagccgttggctgagccagcag

SEQ ID NO: 131569 - DNA, 25 bp, Probe Sequence
atgcacacacagatggtcacacaga

SEQ ID NO: 131570 - DNA, 25 bp, Probe Sequence
atgcagccacgattggagaatactt

SEQ ID NO: 131571 - DNA, 25 bp, Probe Sequence
atgaacctgactgggaatcacttat

SEQ ID NO: 131572 - DNA, 25 bp, Probe Sequence
atgaaactgccctgatatctttatc

SEQ ID NO: 131573 - DNA, 25 bp, Probe Sequence
atgataactgccctgaaaagataca

SEQ ID NO: 131574 - DNA, 25 bp, Probe Sequence
atgatgacacttacgacaatgacat

SEQ ID NO: 131575 - DNA, 25 bp, Probe Sequence
atgatgaagctttaggcatgtttaa

SEQ ID NO: 131576 - DNA, 25 bp, Probe Sequence
atgaatggtatgtatgctttttaaa

SEQ ID NO: 131577 - DNA, 25 bp, Probe Sequence
atgaatggtggatctgcttcttact

SEQ ID NO: 131578 - DNA, 25 bp, Probe Sequence
atgcaatggaaatgatgctttttgt

SEQ ID NO: 131579 - DNA, 25 bp, Probe Sequence
atgactatggaagacattttgtcct

SEQ ID NO: 131580 - DNA, 25 bp, Probe Sequence
atgaccaagaaggcctttacagtct

SEQ ID NO: 131581 - DNA, 25 bp, Probe Sequence
atgacctatgtagccgatttgcagc

SEQ ID NO: 131582 - DNA, 25 bp, Probe Sequence
atgacccattaggcctatttaggtg

SEQ ID NO: 131583 - DNA, 25 bp, Probe Sequence
atgacccgtggtacttaataggtgt

SEQ ID NO: 131584 - DNA, 25 bp, Probe Sequence
atgagcccgggtactatgaagatgg

SEQ ID NO: 131585 - DNA, 25 bp, Probe Sequence
atgaccgcaaggaaattgatgagat

SEQ ID NO: 131586 - DNA, 25 bp, Probe Sequence
atgcactccagaagaaaatctcagt

SEQ ID NO: 131587 - DNA, 25 bp, Probe Sequence
atgacaccagaattaaattcactta

SEQ ID NO: 131588 - DNA, 25 bp, Probe Sequence
atgactcataaattaagtccctgta

SEQ ID NO: 131589 - DNA, 25 bp, Probe Sequence
atgaatctacaacatgatgcctctt

SEQ ID NO: 131590 - DNA, 25 bp, Probe Sequence
atgaatttcaagcaacaacttactt

SEQ ID NO: 131591 - DNA, 25 bp, Probe Sequence
atgagtttaattcacccttcacatt

SEQ ID NO: 131592 - DNA, 25 bp, Probe Sequence
atgagtttgaaagggcccatcacag

SEQ ID NO: 131593 - DNA, 25 bp, Probe Sequence
atgagttcaaaagctgccgctcagc

SEQ ID NO: 131594 - DNA, 25 bp, Probe Sequence
atgagttcaaaagctgccgctcagc

SEQ ID NO: 131595 - DNA, 25 bp, Probe Sequence
aggcttactagagagcccatcgcct

SEQ ID NO: 131596 - DNA, 25 bp, Probe Sequence
atggaaaccatagagcccacggcac

SEQ ID NO: 131597 - DNA, 25 bp, Probe Sequence
atgtaaatccattgtcgcatccacc

SEQ ID NO: 131598 - DNA, 25 bp, Probe Sequence
atgaaagactctgctagctccaacc

SEQ ID NO: 131599 - DNA, 25 bp, Probe Sequence
atgaacacaccttctgtgctggcat

SEQ ID NO: 131600 - DNA, 25 bp, Probe Sequence
atgacagcagtggtactgcctggta

SEQ ID NO: 131601 - DNA, 25 bp, Probe Sequence
atgactctgtcagtgaactctggac

SEQ ID NO: 131602 - DNA, 25 bp, Probe Sequence
atgagtcttctgtaattcattgagc

SEQ ID NO: 131603 - DNA, 25 bp, Probe Sequence
atgatttttgaagattgtggcgatg

SEQ ID NO: 131604 - DNA, 25 bp, Probe Sequence
atgaagctcttatctttggtggctg

SEQ ID NO: 131605 - DNA, 25 bp, Probe Sequence
atggattcactagctttcggtggtg

SEQ ID NO: 131606 - DNA, 25 bp, Probe Sequence
atgagttcctattttttctgggaga

SEQ ID NO: 131607 - DNA, 25 bp, Probe Sequence
atgaagtcagttttattcatttaga

SEQ ID NO: 131608 - DNA, 25 bp, Probe Sequence
atgaagaagtctttcagagtgaaaa

SEQ ID NO: 131609 - DNA, 25 bp, Probe Sequence
atgagacaaacttctcagcgtaaag

SEQ ID NO: 131610 - DNA, 25 bp, Probe Sequence
atgttcaaactccatctgcaaaaga

SEQ ID NO: 131611 - DNA, 25 bp, Probe Sequence
atgactggtcctaatctgtaaatga

SEQ ID NO: 131612 - DNA, 25 bp, Probe Sequence
atgacggtccgagtgtgcaagatgg

SEQ ID NO: 131613 - DNA, 25 bp, Probe Sequence
atgacacagctcgggctgtcagagg

SEQ ID NO: 131614 - DNA, 25 bp, Probe Sequence
atgaaagccatccctgatcggctgc

SEQ ID NO: 131615 - DNA, 25 bp, Probe Sequence
atgaaaggcaggcctatttcatcac

SEQ ID NO: 131616 - DNA, 25 bp, Probe Sequence
atgaagcaggcactgctcattaatc

SEQ ID NO: 131617 - DNA, 25 bp, Probe Sequence
atgaagcaggcattgctgccaaggc

SEQ ID NO: 131618 - DNA, 25 bp, Probe Sequence
atgaagcagctcatcgacaacatcc

SEQ ID NO: 131619 - DNA, 25 bp, Probe Sequence
atgactagctttgcacagacacctc

SEQ ID NO: 131620 - DNA, 25 bp, Probe Sequence
atgactgactgactaaatgacaccc

SEQ ID NO: 131621 - DNA, 25 bp, Probe Sequence
atgagtacgacggacacagcaccta

SEQ ID NO: 131622 - DNA, 25 bp, Probe Sequence
atgaggtcagtgctacagccaccta

SEQ ID NO: 131623 - DNA, 25 bp, Probe Sequence
atgaagtcaccgggatgaacctatc

SEQ ID NO: 131624 - DNA, 25 bp, Probe Sequence
atgaagatcactgggggtctccttc

SEQ ID NO: 131625 - DNA, 25 bp, Probe Sequence
atgaaaagcattggagcgtctgaat

SEQ ID NO: 131626 - DNA, 25 bp, Probe Sequence
atgaaccgcttcatgccactgaata

SEQ ID NO: 131627 - DNA, 25 bp, Probe Sequence
atgaagccgcattgcacattctctg

SEQ ID NO: 131628 - DNA, 25 bp, Probe Sequence
atgacatcctgctgatcaagctctc

SEQ ID NO: 131629 - DNA, 25 bp, Probe Sequence
atgacatcctgctgatcaagctctc

SEQ ID NO: 131630 - DNA, 25 bp, Probe Sequence
atgacatcctgctgatcaagctctc

SEQ ID NO: 131631 - DNA, 25 bp, Probe Sequence
atgaaatcatcatcaaagcttgctt

SEQ ID NO: 131632 - DNA, 25 bp, Probe Sequence
atgagttatcatcttagctgtgtta

SEQ ID NO: 131633 - DNA, 25 bp, Probe Sequence
atgatgtgttgtttatagtctgaaa

SEQ ID NO: 131634 - DNA, 25 bp, Probe Sequence
atgaaatggcttaatggtgctgtta

SEQ ID NO: 131635 - DNA, 25 bp, Probe Sequence
atgaaatgtgtgcccatggctgggc

SEQ ID NO: 131636 - DNA, 25 bp, Probe Sequence
atgcaagagttgcagcggctgctcc

SEQ ID NO: 131637 - DNA, 25 bp, Probe Sequence
atgaagcatgttgacggcacctgca

SEQ ID NO: 131638 - DNA, 25 bp, Probe Sequence
atgagactctgtctcatgggcctgt

SEQ ID NO: 131639 - DNA, 25 bp, Probe Sequence
atgagagctattcacgttgccatta

SEQ ID NO: 131640 - DNA, 25 bp, Probe Sequence
atgaatctctcacgagtttcctgtg

SEQ ID NO: 131641 - DNA, 25 bp, Probe Sequence
atgaatcctgtcggtattccttggt

SEQ ID NO: 131642 - DNA, 25 bp, Probe Sequence
atgtatgctcggtggcattgcttcg

SEQ ID NO: 131643 - DNA, 25 bp, Probe Sequence
atgatgttcaggttccaattgtgga

SEQ ID NO: 131644 - DNA, 25 bp, Probe Sequence
atgagttatactcaatttgggtata

SEQ ID NO: 131645 - DNA, 25 bp, Probe Sequence
atgagttatttcctattctgtggtt

SEQ ID NO: 131646 - DNA, 25 bp, Probe Sequence
atgaaaatattgcctgttttgggat

SEQ ID NO: 131647 - DNA, 25 bp, Probe Sequence
atgtaatttgtgcagatttgttggt

SEQ ID NO: 131648 - DNA, 25 bp, Probe Sequence
atgaagttcctgccgtttgcagtgg

SEQ ID NO: 131649 - DNA, 25 bp, Probe Sequence
atgaagattccagttttcacagtag

SEQ ID NO: 131650 - DNA, 25 bp, Probe Sequence
atgaaatacccttcttgatattggt

SEQ ID NO: 131651 - DNA, 25 bp, Probe Sequence
atgaaataaaatggccgtttggatt

SEQ ID NO: 131652 - DNA, 25 bp, Probe Sequence
atgttttaaatcgcctttgtatctc

SEQ ID NO: 131653 - DNA, 25 bp, Probe Sequence
atgataattgagttttcctttgttt

SEQ ID NO: 131654 - DNA, 25 bp, Probe Sequence
atgaaatgcttctttctcagtttat

SEQ ID NO: 131655 - DNA, 25 bp, Probe Sequence
atgaagagctgcctgtttctttcca

SEQ ID NO: 131656 - DNA, 25 bp, Probe Sequence
atgaatggttctttatcatttctct

SEQ ID NO: 131657 - DNA, 25 bp, Probe Sequence
atgaaggtcttgttgattgattatc

SEQ ID NO: 131658 - DNA, 25 bp, Probe Sequence
atgaaagttctgttcgtttatccat

SEQ ID NO: 131659 - DNA, 25 bp, Probe Sequence
atgaaagctcctttggtttgtctac

SEQ ID NO: 131660 - DNA, 25 bp, Probe Sequence
atgaaactagattcttgatattgct

SEQ ID NO: 131661 - DNA, 25 bp, Probe Sequence
atgaaagcattgcactgtacctctc

SEQ ID NO: 131662 - DNA, 25 bp, Probe Sequence
atgaaatatctgttctgcaactgtt

SEQ ID NO: 131663 - DNA, 25 bp, Probe Sequence
atgaattcagtatttgcaccgagat

SEQ ID NO: 131664 - DNA, 25 bp, Probe Sequence
atgaactcgttctgcaggagagatt

SEQ ID NO: 131665 - DNA, 25 bp, Probe Sequence
atgacactacattttcaggaactga

SEQ ID NO: 131666 - DNA, 25 bp, Probe Sequence
atgaccaacttatattgatcatctg

SEQ ID NO: 131667 - DNA, 25 bp, Probe Sequence
atgagcacacaattatagcttgttt

SEQ ID NO: 131668 - DNA, 25 bp, Probe Sequence
atgaaagcaataagcatgtgtgttg

SEQ ID NO: 131669 - DNA, 25 bp, Probe Sequence
atgaaccatataaagtgtctgtgac

SEQ ID NO: 131670 - DNA, 25 bp, Probe Sequence
atgaggccatacaggcagcccatga

SEQ ID NO: 131671 - DNA, 25 bp, Probe Sequence
atgatggccaaaagcacctggagat

SEQ ID NO: 131672 - DNA, 25 bp, Probe Sequence
atgagacatgcatatggcttaggag

SEQ ID NO: 131673 - DNA, 25 bp, Probe Sequence
atgacacatgaaagcagctccaaga

SEQ ID NO: 131674 - DNA, 25 bp, Probe Sequence
atgatgactacaagctgatctcaaa

SEQ ID NO: 131675 - DNA, 25 bp, Probe Sequence
atgaatctactggctaccacaaaat

SEQ ID NO: 131676 - DNA, 25 bp, Probe Sequence
atgagacaactcgatatcccaaggt

SEQ ID NO: 131677 - DNA, 25 bp, Probe Sequence
atgagggagcatgtaccccaggtac

SEQ ID NO: 131678 - DNA, 25 bp, Probe Sequence
atgagcgagaatggctacgaccccc

SEQ ID NO: 131679 - DNA, 25 bp, Probe Sequence
atgaggtaatgatcacgttccatcc

SEQ ID NO: 131680 - DNA, 25 bp, Probe Sequence
atgacgtgtgtgcgcaagttcaccc

SEQ ID NO: 131681 - DNA, 25 bp, Probe Sequence
atgacgtatggtccatagtacccat

SEQ ID NO: 131682 - DNA, 25 bp, Probe Sequence
atgtaaatgagcacataatcccctc

SEQ ID NO: 131683 - DNA, 25 bp, Probe Sequence
atgttcttgcgaaaaatccacagtg

SEQ ID NO: 131684 - DNA, 25 bp, Probe Sequence
atgtatcttcaactggtgtccaaag

SEQ ID NO: 131685 - DNA, 25 bp, Probe Sequence
atgaactgataactctagccacaaa

SEQ ID NO: 131686 - DNA, 25 bp, Probe Sequence
atgacaatgcatttcttagccagac

SEQ ID NO: 131687 - DNA, 25 bp, Probe Sequence
atgaacatgctattctgtcagctga

SEQ ID NO: 131688 - DNA, 25 bp, Probe Sequence
atgactatgctcttctggagctgaa

SEQ ID NO: 131689 - DNA, 25 bp, Probe Sequence
atgacacagtctacatgggcaaagt

SEQ ID NO: 131690 - DNA, 25 bp, Probe Sequence
atgaagatatctaggggcagagtgt

SEQ ID NO: 131691 - DNA, 25 bp, Probe Sequence
atgaaataggctgggcgctatggct

SEQ ID NO: 131692 - DNA, 25 bp, Probe Sequence
atgagaaaagcctcctggtgcatct

SEQ ID NO: 131693 - DNA, 25 bp, Probe Sequence
atgagacaaaccatgcttctgccac

SEQ ID NO: 131694 - DNA, 25 bp, Probe Sequence
atgaactcacccacgatatcatcac

SEQ ID NO: 131695 - DNA, 25 bp, Probe Sequence
atgaactcacccacgatatcatcac

SEQ ID NO: 131696 - DNA, 25 bp, Probe Sequence
atgataaaccacctaaatatccttg

SEQ ID NO: 131697 - DNA, 25 bp, Probe Sequence
atgtttgcaccaaccaaaacctggc

SEQ ID NO: 131698 - DNA, 25 bp, Probe Sequence
atgtattcaactgcaccaagacctc

SEQ ID NO: 131699 - DNA, 25 bp, Probe Sequence
atgtatatcatctgccgcctaaagc

SEQ ID NO: 131700 - DNA, 25 bp, Probe Sequence
atgtatatcatctgccgcctaaagc

SEQ ID NO: 131701 - DNA, 25 bp, Probe Sequence
atgttcaagttggacctaagtgctc

SEQ ID NO: 131702 - DNA, 25 bp, Probe Sequence
atgtatcaagttgaagcaagttcag

SEQ ID NO: 131703 - DNA, 25 bp, Probe Sequence
atgtaaattatggagcacaatgtaa

SEQ ID NO: 131704 - DNA, 25 bp, Probe Sequence
agtaaattagaaacatcctcaacct

SEQ ID NO: 131705 - DNA, 25 bp, Probe Sequence
atgtaatttaacagccccagatatt

SEQ ID NO: 131706 - DNA, 25 bp, Probe Sequence
atgttgaccataacttctccaggat

SEQ ID NO: 131707 - DNA, 25 bp, Probe Sequence
atgttggcgtaaattagccaggtgt

SEQ ID NO: 131708 - DNA, 25 bp, Probe Sequence
atgaggtcaatacgtaagccagagt

SEQ ID NO: 131709 - DNA, 25 bp, Probe Sequence
atgaggtcaatacgtaagccagagt

SEQ ID NO: 131710 - DNA, 25 bp, Probe Sequence
atgacctcatgctcgtgaagctcaa

SEQ ID NO: 131711 - DNA, 25 bp, Probe Sequence
atgacctgaaacctcagcgtgaatt

SEQ ID NO: 131712 - DNA, 25 bp, Probe Sequence
atgactttggaccacatcgctacat

SEQ ID NO: 131713 - DNA, 25 bp, Probe Sequence
atgaccggagaacatctgccatcaa

SEQ ID NO: 131714 - DNA, 25 bp, Probe Sequence
atgaccggagaacatctgccatcaa

SEQ ID NO: 131715 - DNA, 25 bp, Probe Sequence
atgaccaaaatcaagattgctcaaa

SEQ ID NO: 131716 - DNA, 25 bp, Probe Sequence
atgaccaaaatcaagattgctcaaa

SEQ ID NO: 131717 - DNA, 25 bp, Probe Sequence
atgactcaaaatatcgtgctgccac

SEQ ID NO: 131718 - DNA, 25 bp, Probe Sequence
atgacatggaggacgtcctctgccc

SEQ ID NO: 131719 - DNA, 25 bp, Probe Sequence
atgacatggaggacgtcctctgccc

SEQ ID NO: 131720 - DNA, 25 bp, Probe Sequence
atgaagaagagtggtgactcactcc

SEQ ID NO: 131721 - DNA, 25 bp, Probe Sequence
atgaagacagaaggtctgccagctt

SEQ ID NO: 131722 - DNA, 25 bp, Probe Sequence
atgaaatgcaccagtctggctttaa

SEQ ID NO: 131723 - DNA, 25 bp, Probe Sequence
atgatatgaaccagtttctttttgt

SEQ ID NO: 131724 - DNA, 25 bp, Probe Sequence
atgttactccttgatctttgtcttt

SEQ ID NO: 131725 - DNA, 25 bp, Probe Sequence
atgagtcttcctctatgtttgacga

SEQ ID NO: 131726 - DNA, 25 bp, Probe Sequence
atggacttccttttatattaatgag

SEQ ID NO: 131727 - DNA, 25 bp, Probe Sequence
agtccttctctgcttaaataaatgc

SEQ ID NO: 131728 - DNA, 25 bp, Probe Sequence
aggccctgccactattaaaaactga

SEQ ID NO: 131729 - DNA, 25 bp, Probe Sequence
atgactccttccttaaaatccagct

SEQ ID NO: 131730 - DNA, 25 bp, Probe Sequence
atgtcctcttccatcaaaacggtgt

SEQ ID NO: 131731 - DNA, 25 bp, Probe Sequence
atgttttcaccttcataaaccaagg

SEQ ID NO: 131732 - DNA, 25 bp, Probe Sequence
atgttgttgggtttactgacctagg

SEQ ID NO: 131733 - DNA, 25 bp, Probe Sequence
agtattacggtaaactgcccactgc

SEQ ID NO: 131734 - DNA, 25 bp, Probe Sequence
atgtcttactgaattcaaccccata

SEQ ID NO: 131735 - DNA, 25 bp, Probe Sequence
atgtttcttggagacatcccacaat

SEQ ID NO: 131736 - DNA, 25 bp, Probe Sequence
atgttttccactgagcatcacaata

SEQ ID NO: 131737 - DNA, 25 bp, Probe Sequence
atgttttccactgagcatcacaata

SEQ ID NO: 131738 - DNA, 25 bp, Probe Sequence
atgactgtttagttacatccataga

SEQ ID NO: 131739 - DNA, 25 bp, Probe Sequence
atgacctttcatttgagatccgaag

SEQ ID NO: 131740 - DNA, 25 bp, Probe Sequence
atgacccatttaatgcagcttgcaa

SEQ ID NO: 131741 - DNA, 25 bp, Probe Sequence
atgacccttcttagaatgtgcaagt

SEQ ID NO: 131742 - DNA, 25 bp, Probe Sequence
atgaccctactgctgatgataccag

SEQ ID NO: 131743 - DNA, 25 bp, Probe Sequence
atgaccactttaagagatacacatc

SEQ ID NO: 131744 - DNA, 25 bp, Probe Sequence
atgaccctttaacagcatctgcttc

SEQ ID NO: 131745 - DNA, 25 bp, Probe Sequence
atgacctgctaaaattttctgcttg

SEQ ID NO: 131746 - DNA, 25 bp, Probe Sequence
atgacctgtgaggaatatgttgcct

SEQ ID NO: 131747 - DNA, 25 bp, Probe Sequence
atgacctgtctcaaatgctgcttct

SEQ ID NO: 131748 - DNA, 25 bp, Probe Sequence
atgactggtttagtctgcagtctcc

SEQ ID NO: 131749 - DNA, 25 bp, Probe Sequence
atgactgaggtatcctgcggtggct

SEQ ID NO: 131750 - DNA, 25 bp, Probe Sequence
atgacatgaggttactcctagcctg

SEQ ID NO: 131751 - DNA, 25 bp, Probe Sequence
atgatgagacagtccaactctaccg

SEQ ID NO: 131752 - DNA, 25 bp, Probe Sequence
atgactaagtcccatatcacacaca

SEQ ID NO: 131753 - DNA, 25 bp, Probe Sequence
atgactttgctctgaatcaaaccca

SEQ ID NO: 131754 - DNA, 25 bp, Probe Sequence
atgacatttatcttcaaaacaccaa

SEQ ID NO: 131755 - DNA, 25 bp, Probe Sequence
atgagttctgaatccaaatacaaag

SEQ ID NO: 131756 - DNA, 25 bp, Probe Sequence
atggattgtaaagtcaagaagggca

SEQ ID NO: 131757 - DNA, 25 bp, Probe Sequence
atggatcttcgtaccaagagcaccg

SEQ ID NO: 131758 - DNA, 25 bp, Probe Sequence
atgagatcattccttttacaggcac

SEQ ID NO: 131759 - DNA, 25 bp, Probe Sequence
atgaacttggtgtttcacactacca

SEQ ID NO: 131760 - DNA, 25 bp, Probe Sequence
atgacgttgccgattcaccagcact

SEQ ID NO: 131761 - DNA, 25 bp, Probe Sequence
atgacttttctgatgccacattctc

SEQ ID NO: 131762 - DNA, 25 bp, Probe Sequence
atgaccttttgtgccagttgtgcca

SEQ ID NO: 131763 - DNA, 25 bp, Probe Sequence
atgacttttttggccaaaggcttag

SEQ ID NO: 131764 - DNA, 25 bp, Probe Sequence
atgtctttttcagccacgagggtat

SEQ ID NO: 131765 - DNA, 25 bp, Probe Sequence
atgttgtctttatcgactttgtaaa

SEQ ID NO: 131766 - DNA, 25 bp, Probe Sequence
atgggcttttctccaagttcaggaa

SEQ ID NO: 131767 - DNA, 25 bp, Probe Sequence
atgggggtaccccaatctgaagtca

SEQ ID NO: 131768 - DNA, 25 bp, Probe Sequence
atggatcggttgagcccaggaggtc

SEQ ID NO: 131769 - DNA, 25 bp, Probe Sequence
aggatcataacggagcccggagggc

SEQ ID NO: 131770 - DNA, 25 bp, Probe Sequence
atgacttgacaacagccctggaggg

SEQ ID NO: 131771 - DNA, 25 bp, Probe Sequence
atgatcttggaattacctgctgcga

SEQ ID NO: 131772 - DNA, 25 bp, Probe Sequence
atgactatgtgaaggcactgcccgg

SEQ ID NO: 131773 - DNA, 25 bp, Probe Sequence
atgactagtacaccaaagcaatggc

SEQ ID NO: 131774 - DNA, 25 bp, Probe Sequence
atgacaaggacacagttcgaggcca

SEQ ID NO: 131775 - DNA, 25 bp, Probe Sequence
atgactcttaaaagttcgaggctca

SEQ ID NO: 131776 - DNA, 25 bp, Probe Sequence
atgtttatctaatgttgggtccaag

SEQ ID NO: 131777 - DNA, 25 bp, Probe Sequence
atgttctttgtgtattttttctgca

SEQ ID NO: 131778 - DNA, 25 bp, Probe Sequence
atgttcttcggatatggttatggca

SEQ ID NO: 131779 - DNA, 25 bp, Probe Sequence
atgttgggggaaatgtccatagtca

SEQ ID NO: 131780 - DNA, 25 bp, Probe Sequence
atgtgtgggtatgtttccttataag

SEQ ID NO: 131781 - DNA, 25 bp, Probe Sequence
atgtttgttttgtgtccgtatccag

SEQ ID NO: 131782 - DNA, 25 bp, Probe Sequence
atgtttattttgtacttaatacctg

SEQ ID NO: 131783 - DNA, 25 bp, Probe Sequence
gttaactggactgacctaaacgtgg

SEQ ID NO: 131784 - DNA, 25 bp, Probe Sequence
agtagaagaaccctccataaacctg

SEQ ID NO: 131785 - DNA, 25 bp, Probe Sequence
atgtaggaaacacctttcagaccca

SEQ ID NO: 131786 - DNA, 25 bp, Probe Sequence
atgtaggaaggccttctctcagaag

SEQ ID NO: 131787 - DNA, 25 bp, Probe Sequence
atgacgcgaagacggatttcacatc

SEQ ID NO: 131788 - DNA, 25 bp, Probe Sequence
atgacgacaaagctgctaaatctcc

SEQ ID NO: 131789 - DNA, 25 bp, Probe Sequence
atgactgtcaaaggtctaaaattag

SEQ ID NO: 131790 - DNA, 25 bp, Probe Sequence
atgacatccagtgtctccaaaattg

SEQ ID NO: 131791 - DNA, 25 bp, Probe Sequence
atgagcataagtcctctccaacaga

SEQ ID NO: 131792 - DNA, 25 bp, Probe Sequence
atgacattggtggtcctgatcaaga

SEQ ID NO: 131793 - DNA, 25 bp, Probe Sequence
atgttctgcgtgctcctgtagagct

SEQ ID NO: 131794 - DNA, 25 bp, Probe Sequence
atgttctggttgtctgtgtcagctg

SEQ ID NO: 131795 - DNA, 25 bp, Probe Sequence
atgattctaatctctgttccagttt

SEQ ID NO: 131796 - DNA, 25 bp, Probe Sequence
atgtttaacattttgtgccaatttg

SEQ ID NO: 131797 - DNA, 25 bp, Probe Sequence
atgtttatacattatttctaccgag

SEQ ID NO: 131798 - DNA, 25 bp, Probe Sequence
atgttaccatcatgcttttaccctt

SEQ ID NO: 131799 - DNA, 25 bp, Probe Sequence
atgtaagcatggggtttgtttctct

SEQ ID NO: 131800 - DNA, 25 bp, Probe Sequence
atgacaacacctggtttgttctctg

SEQ ID NO: 131801 - DNA, 25 bp, Probe Sequence
atgacaccacagactgttccttcat

SEQ ID NO: 131802 - DNA, 25 bp, Probe Sequence
atgagcacccattatgtactcccat

SEQ ID NO: 131803 - DNA, 25 bp, Probe Sequence
atgagcaccgcaatttacagaaatt

SEQ ID NO: 131804 - DNA, 25 bp, Probe Sequence
atgacctggaattgttagaatattt

SEQ ID NO: 131805 - DNA, 25 bp, Probe Sequence
atgacctggtatttttatgttcctg

SEQ ID NO: 131806 - DNA, 25 bp, Probe Sequence
atgttatgttattgttaattgtact

SEQ ID NO: 131807 - DNA, 25 bp, Probe Sequence
atgattattaagttcaaaatgtcaa

SEQ ID NO: 131808 - DNA, 25 bp, Probe Sequence
atgatttcaagttctgacataatta

SEQ ID NO: 131809 - DNA, 25 bp, Probe Sequence
atgacttcaaagctactgcagacga

SEQ ID NO: 131810 - DNA, 25 bp, Probe Sequence
atgacctcaaccattgggaccatat

SEQ ID NO: 131811 - DNA, 25 bp, Probe Sequence
atgacattaagcctttggaaccaaa

SEQ ID NO: 131812 - DNA, 25 bp, Probe Sequence
atgacttgacggcagtgagcagcac

SEQ ID NO: 131813 - DNA, 25 bp, Probe Sequence
atgacctggccgcagtgaggcggat

SEQ ID NO: 131814 - DNA, 25 bp, Probe Sequence
atgacctggccgcagtgaggcgatt

SEQ ID NO: 131815 - DNA, 25 bp, Probe Sequence
atgacgtcggcgttgctgggagaat

SEQ ID NO: 131816 - DNA, 25 bp, Probe Sequence
atgtaaccctgctttgggaatatgg

SEQ ID NO: 131817 - DNA, 25 bp, Probe Sequence
atgacagaccagtccttgtggaata

SEQ ID NO: 131818 - DNA, 25 bp, Probe Sequence
atgacaaccttctacatgggaccaa

SEQ ID NO: 131819 - DNA, 25 bp, Probe Sequence
atgaaacctactccattgataacga

SEQ ID NO: 131820 - DNA, 25 bp, Probe Sequence
atgaaagaatccatcattgttatta

SEQ ID NO: 131821 - DNA, 25 bp, Probe Sequence
atgaaaagcattaccttgcctattt

SEQ ID NO: 131822 - DNA, 25 bp, Probe Sequence
atgagctatagtgaccatcggctta

SEQ ID NO: 131823 - DNA, 25 bp, Probe Sequence
atgaccacagtccatgccatcactg

SEQ ID NO: 131824 - DNA, 25 bp, Probe Sequence
atgatccacagcggagaccctgtta

SEQ ID NO: 131825 - DNA, 25 bp, Probe Sequence
atgtccaaggattggccgcttgtcg

SEQ ID NO: 131826 - DNA, 25 bp, Probe Sequence
atgtaccatgactggcggctggtgc

SEQ ID NO: 131827 - DNA, 25 bp, Probe Sequence
atgtgatcctactgacagccatcgt

SEQ ID NO: 131828 - DNA, 25 bp, Probe Sequence
atgttggaatccgaagccacttccc

SEQ ID NO: 131829 - DNA, 25 bp, Probe Sequence
atgactggaatgctgcaagcctctt

SEQ ID NO: 131830 - DNA, 25 bp, Probe Sequence
atgagaggagagactgaaatgcagt

SEQ ID NO: 131831 - DNA, 25 bp, Probe Sequence
atgacgtgaatgaggctgtgcagct

SEQ ID NO: 131832 - DNA, 25 bp, Probe Sequence
atgagcaaggcacgggctgctggca

SEQ ID NO: 131833 - DNA, 25 bp, Probe Sequence
atgacaatctgggagtgtgctggca

SEQ ID NO: 131834 - DNA, 25 bp, Probe Sequence
atgacatactcgcagcagtgttact

SEQ ID NO: 131835 - DNA, 25 bp, Probe Sequence
atgagcagattggtccgtgcttacc

SEQ ID NO: 131836 - DNA, 25 bp, Probe Sequence
atgacagtgtgactctagatgatct

SEQ ID NO: 131837 - DNA, 25 bp, Probe Sequence
atgacactgatactgctattttgaa

SEQ ID NO: 131838 - DNA, 25 bp, Probe Sequence
atgagcatcatgaactcgtttgtaa

SEQ ID NO: 131839 - DNA, 25 bp, Probe Sequence
atgagcatagaagttcagaagtaat

SEQ ID NO: 131840 - DNA, 25 bp, Probe Sequence
atgagcatggaaatagcaaaacaac

SEQ ID NO: 131841 - DNA, 25 bp, Probe Sequence
atgacagggtgttgcagtaacaaaa

SEQ ID NO: 131842 - DNA, 25 bp, Probe Sequence
atgagcagtgagctggtgttccacc

SEQ ID NO: 131843 - DNA, 25 bp, Probe Sequence
atgtgagtccctgtgatggccaggc

SEQ ID NO: 131844 - DNA, 25 bp, Probe Sequence
atgtgagtccctgtgatggccaggc

SEQ ID NO: 131845 - DNA, 25 bp, Probe Sequence
atgtgagtccctgtgatggccaggc

SEQ ID NO: 131846 - DNA, 25 bp, Probe Sequence
atgagacccaaggtcagcagccacc

SEQ ID NO: 131847 - DNA, 25 bp, Probe Sequence
atgagcatctcgggcagtagcgccc

SEQ ID NO: 131848 - DNA, 25 bp, Probe Sequence
atgacattgctttggttcagctctc

SEQ ID NO: 131849 - DNA, 25 bp, Probe Sequence
atgactttttggaatagccctgtct

SEQ ID NO: 131850 - DNA, 25 bp, Probe Sequence
atgactatctttattcacactcttc

SEQ ID NO: 131851 - DNA, 25 bp, Probe Sequence
atgacatttttaaccaatccaatct

SEQ ID NO: 131852 - DNA, 25 bp, Probe Sequence
atgacatttttaaccaatccaatct

SEQ ID NO: 131853 - DNA, 25 bp, Probe Sequence
atgacagttgttaacctattaagtt

SEQ ID NO: 131854 - DNA, 25 bp, Probe Sequence
atgacattattaaagttttcaaatt

SEQ ID NO: 131855 - DNA, 25 bp, Probe Sequence
atgacttcagtatagatttgttttt

SEQ ID NO: 131856 - DNA, 25 bp, Probe Sequence
atgacttgccattataattaaaact

SEQ ID NO: 131857 - DNA, 25 bp, Probe Sequence
atgagtttcattaaaatagattatc

SEQ ID NO: 131858 - DNA, 25 bp, Probe Sequence
atgactgctttttaagaaattcttg

SEQ ID NO: 131859 - DNA, 25 bp, Probe Sequence
atgacgttggtaggaaagcatttct

SEQ ID NO: 131860 - DNA, 25 bp, Probe Sequence
atgacgttgatttcagcacaacttt

SEQ ID NO: 131861 - DNA, 25 bp, Probe Sequence
atgacagaacttccaccaatgcatc

SEQ ID NO: 131862 - DNA, 25 bp, Probe Sequence
atgagagatccaaacaccaagcgct

SEQ ID NO: 131863 - DNA, 25 bp, Probe Sequence
atgagagatccaaacttcaagcact

SEQ ID NO: 131864 - DNA, 25 bp, Probe Sequence
atgagcatggccacactgtcagtga

SEQ ID NO: 131865 - DNA, 25 bp, Probe Sequence
atgacatgtcctgcatcttctataa

SEQ ID NO: 131866 - DNA, 25 bp, Probe Sequence
atgactagacattcactttgcaaat

SEQ ID NO: 131867 - DNA, 25 bp, Probe Sequence
atgagatagacatctcctcctacat

SEQ ID NO: 131868 - DNA, 25 bp, Probe Sequence
atgaccagaagtttgccatctacat

SEQ ID NO: 131869 - DNA, 25 bp, Probe Sequence
atgactgcaagaatactggcagttc

SEQ ID NO: 131870 - DNA, 25 bp, Probe Sequence
atgagtgcacgtgccgaggctatca

SEQ ID NO: 131871 - DNA, 25 bp, Probe Sequence
atgaggctcgattcatcaggcggtc

SEQ ID NO: 131872 - DNA, 25 bp, Probe Sequence
atgaggccttggatgctctggatgc

SEQ ID NO: 131873 - DNA, 25 bp, Probe Sequence
atgaggttcaaggtgctgctttgca

SEQ ID NO: 131874 - DNA, 25 bp, Probe Sequence
atgactgttgagtgtgctctttcac

SEQ ID NO: 131875 - DNA, 25 bp, Probe Sequence
atgactgcttacctggacttgttgc

SEQ ID NO: 131876 - DNA, 25 bp, Probe Sequence
atgacatttcacgggagatttcttg

SEQ ID NO: 131877 - DNA, 25 bp, Probe Sequence
atgacattgccctgctgagactggc

SEQ ID NO: 131878 - DNA, 25 bp, Probe Sequence
atgacattgtcgtgaaggtgctgaa

SEQ ID NO: 131879 - DNA, 25 bp, Probe Sequence
atgacttccagctgattggcatcca

SEQ ID NO: 131880 - DNA, 25 bp, Probe Sequence
atgactacacatttgattggacaat

SEQ ID NO: 131881 - DNA, 25 bp, Probe Sequence
atgatatacctgtaactgtacctat

SEQ ID NO: 131882 - DNA, 25 bp, Probe Sequence
atgatgaacctggaacttctgtgaa

SEQ ID NO: 131883 - DNA, 25 bp, Probe Sequence
atgaccacccgtgtgatcttgaaca

SEQ ID NO: 131884 - DNA, 25 bp, Probe Sequence
atgacacacctccgtgtgatttatg

SEQ ID NO: 131885 - DNA, 25 bp, Probe Sequence
atgacacaatccctggggctgtgca

SEQ ID NO: 131886 - DNA, 25 bp, Probe Sequence
atgacaccatcccagaggactatga

SEQ ID NO: 131887 - DNA, 25 bp, Probe Sequence
atgacaccatcccagaggactatga

SEQ ID NO: 131888 - DNA, 25 bp, Probe Sequence
atgacaccatcccagaggactatga

SEQ ID NO: 131889 - DNA, 25 bp, Probe Sequence
atgacaccatcccagaggactatga

SEQ ID NO: 131890 - DNA, 25 bp, Probe Sequence
atgacactcttcctgacagcagaat

SEQ ID NO: 131891 - DNA, 25 bp, Probe Sequence
atgagcagttcatcaatgcagccaa

SEQ ID NO: 131892 - DNA, 25 bp, Probe Sequence
atgagcagttcatcaatgcagccaa

SEQ ID NO: 131893 - DNA, 25 bp, Probe Sequence
atgagcagttcatcaatgcggccaa

SEQ ID NO: 131894 - DNA, 25 bp, Probe Sequence
atgagcagttcatcaatgcggccaa

SEQ ID NO: 131895 - DNA, 25 bp, Probe Sequence
atgagctttatcccatggagccaga

SEQ ID NO: 131896 - DNA, 25 bp, Probe Sequence
atgagcatatcatcagccttggcca

SEQ ID NO: 131897 - DNA, 25 bp, Probe Sequence
atgagcagatcaggacacttagcaa

SEQ ID NO: 131898 - DNA, 25 bp, Probe Sequence
atgagcaacatgcagatctacagcg

SEQ ID NO: 131899 - DNA, 25 bp, Probe Sequence
atgagcacataggactctagacggc

SEQ ID NO: 131900 - DNA, 25 bp, Probe Sequence
atgaccaatgccttccaatatgtgc

SEQ ID NO: 131901 - DNA, 25 bp, Probe Sequence
atgaccaatgacaatccatttctgt

SEQ ID NO: 131902 - DNA, 25 bp, Probe Sequence
atgaccaataccaacccataatcca

SEQ ID NO: 131903 - DNA, 25 bp, Probe Sequence
atgaccaaactgaaatctgtaagca

SEQ ID NO: 131904 - DNA, 25 bp, Probe Sequence
atgacccaacataacacatgtatac

SEQ ID NO: 131905 - DNA, 25 bp, Probe Sequence
atgagcctcaactaaaacctcacac

SEQ ID NO: 131906 - DNA, 25 bp, Probe Sequence
atgacgtgatccttaaagactgcta

SEQ ID NO: 131907 - DNA, 25 bp, Probe Sequence
atgacctgtcactataatatactgt

SEQ ID NO: 131908 - DNA, 25 bp, Probe Sequence
atgacatctccatgcatactattgt

SEQ ID NO: 131909 - DNA, 25 bp, Probe Sequence
atgaccccttcttctatgatgaaca

SEQ ID NO: 131910 - DNA, 25 bp, Probe Sequence
agacccctttgggtgctaagacgct

SEQ ID NO: 131911 - DNA, 25 bp, Probe Sequence
agaccccaactggtggaaaggagct

SEQ ID NO: 131912 - DNA, 25 bp, Probe Sequence
aggtcccaaggaacgccataggact

SEQ ID NO: 131913 - DNA, 25 bp, Probe Sequence
atgaggcaaccggtgggacagggac

SEQ ID NO: 131914 - DNA, 25 bp, Probe Sequence
atgatggcagacgaactgctggaag

SEQ ID NO: 131915 - DNA, 25 bp, Probe Sequence
atgagctgaagctaacgctgcatga

SEQ ID NO: 131916 - DNA, 25 bp, Probe Sequence
atgagtatctaggatgccatgatga

SEQ ID NO: 131917 - DNA, 25 bp, Probe Sequence
atgagtatcatacaggtagaggtta

SEQ ID NO: 131918 - DNA, 25 bp, Probe Sequence
atgagtattagccttttaagttatg

SEQ ID NO: 131919 - DNA, 25 bp, Probe Sequence
atgagtttgacgatattgacagagt

SEQ ID NO: 131920 - DNA, 25 bp, Probe Sequence
atgacattgatgactgatttgtaca

SEQ ID NO: 131921 - DNA, 25 bp, Probe Sequence
atgagcacagacgtgatgggtcatt

SEQ ID NO: 131922 - DNA, 25 bp, Probe Sequence
atgacgctgatcatgatgagggtgt

SEQ ID NO: 131923 - DNA, 25 bp, Probe Sequence
atgatatgcgatttgacagaagcgg

SEQ ID NO: 131924 - DNA, 25 bp, Probe Sequence
atgaggtagacgaagaagaggaaga

SEQ ID NO: 131925 - DNA, 25 bp, Probe Sequence
atgaggtaacttggcacagggaggt

SEQ ID NO: 131926 - DNA, 25 bp, Probe Sequence
atgagagctatgatgcctgcaaggg

SEQ ID NO: 131927 - DNA, 25 bp, Probe Sequence
atgagatgatcgacgtcatcggggt

SEQ ID NO: 131928 - DNA, 25 bp, Probe Sequence
atgagatgcattgttacaggaagtc

SEQ ID NO: 131929 - DNA, 25 bp, Probe Sequence
atgatgtgcatgtccttgaaggctg

SEQ ID NO: 131930 - DNA, 25 bp, Probe Sequence
atgatggctgatccctatttgtgac

SEQ ID NO: 131931 - DNA, 25 bp, Probe Sequence
atgagggtttctgatctgtactttg

SEQ ID NO: 131932 - DNA, 25 bp, Probe Sequence
atggggatttagctttgcacttcta

SEQ ID NO: 131933 - DNA, 25 bp, Probe Sequence
atgagggagtttcgttctggctcta

SEQ ID NO: 131934 - DNA, 25 bp, Probe Sequence
atgagggtgagctggtcccctctat

SEQ ID NO: 131935 - DNA, 25 bp, Probe Sequence
atgaggatggcagccctaacctgga

SEQ ID NO: 131936 - DNA, 25 bp, Probe Sequence
atgagtgaggacgcctacacggtgc

SEQ ID NO: 131937 - DNA, 25 bp, Probe Sequence
atgagggagaccccgacagaggacg

SEQ ID NO: 131938 - DNA, 25 bp, Probe Sequence
atgaggtaaaccagcacaagaagtc

SEQ ID NO: 131939 - DNA, 25 bp, Probe Sequence
atgggtgtaacaaaatctcagaaat

SEQ ID NO: 131940 - DNA, 25 bp, Probe Sequence
atgagctttaaaactccataggaaa

SEQ ID NO: 131941 - DNA, 25 bp, Probe Sequence
atgagtttaacatctccacattcag

SEQ ID NO: 131942 - DNA, 25 bp, Probe Sequence
atgacattataaatctctcctcttc

SEQ ID NO: 131943 - DNA, 25 bp, Probe Sequence
atgacctgaaatgtagcctctgtcc

SEQ ID NO: 131944 - DNA, 25 bp, Probe Sequence
atgatccgaataactacctgttttg

SEQ ID NO: 131945 - DNA, 25 bp, Probe Sequence
atgaccgctgtgatgcgggctggtt

SEQ ID NO: 131946 - DNA, 25 bp, Probe Sequence
atgagccggtggccgtgttagtgtt

SEQ ID NO: 131947 - DNA, 25 bp, Probe Sequence
atgactcgggtgctgttgcatttct

SEQ ID NO: 131948 - DNA, 25 bp, Probe Sequence
atgactagtaatctttctatgtctc

SEQ ID NO: 131949 - DNA, 25 bp, Probe Sequence
atgagaaggaactttgtcacatcta

SEQ ID NO: 131950 - DNA, 25 bp, Probe Sequence
atggcaactaactcactcaattttc

SEQ ID NO: 131951 - DNA, 25 bp, Probe Sequence
atggttctgaacttgaccttttggg

SEQ ID NO: 131952 - DNA, 25 bp, Probe Sequence
atgttcctgaaaatacctataggac

SEQ ID NO: 131953 - DNA, 25 bp, Probe Sequence
atgttcctgaggtctcagccttgga

SEQ ID NO: 131954 - DNA, 25 bp, Probe Sequence
atgtatccgttgcctacattgggat

SEQ ID NO: 131955 - DNA, 25 bp, Probe Sequence
atgtactttctcctttctggaataa

SEQ ID NO: 131956 - DNA, 25 bp, Probe Sequence
atgacttctcctcggacctggagaa

SEQ ID NO: 131957 - DNA, 25 bp, Probe Sequence
atgacttctcctcggacctggagaa

SEQ ID NO: 131958 - DNA, 25 bp, Probe Sequence
atgagctcttcgtggaggctgtgga

SEQ ID NO: 131959 - DNA, 25 bp, Probe Sequence
atgaccatgtagtggcaagcagcct

SEQ ID NO: 131960 - DNA, 25 bp, Probe Sequence
atgaccaaagttgggagatcactgt

SEQ ID NO: 131961 - DNA, 25 bp, Probe Sequence
atgaccataaatagcgtatacgagc

SEQ ID NO: 131962 - DNA, 25 bp, Probe Sequence
atgacgatgatcctgtggactacga

SEQ ID NO: 131963 - DNA, 25 bp, Probe Sequence
atgacgtggtcttggagcttctgac

SEQ ID NO: 131964 - DNA, 25 bp, Probe Sequence
atgacgtgcgctttgagagcaactt

SEQ ID NO: 131965 - DNA, 25 bp, Probe Sequence
atgagctatcctttcaaacagctat

SEQ ID NO: 131966 - DNA, 25 bp, Probe Sequence
atgagtacctggtcaaccacttgcc

SEQ ID NO: 131967 - DNA, 25 bp, Probe Sequence
atgatgtcccatctaaacagtcgtc

SEQ ID NO: 131968 - DNA, 25 bp, Probe Sequence
atgatctaggatttagaacgtcgta

SEQ ID NO: 131969 - DNA, 25 bp, Probe Sequence
atgttaacacataaaatcggtataa

SEQ ID NO: 131970 - DNA, 25 bp, Probe Sequence
atgtaataaattgtgcactttctaa

SEQ ID NO: 131971 - DNA, 25 bp, Probe Sequence
atgtatttattccagacctttctgc

SEQ ID NO: 131972 - DNA, 25 bp, Probe Sequence
atgatagttttcccgtttacatagg

SEQ ID NO: 131973 - DNA, 25 bp, Probe Sequence
atgactttatacccaattctacata

SEQ ID NO: 131974 - DNA, 25 bp, Probe Sequence
atgactttcaggcataaaatcaata

SEQ ID NO: 131975 - DNA, 25 bp, Probe Sequence
atgactcttcatttatatagttact

SEQ ID NO: 131976 - DNA, 25 bp, Probe Sequence
atgagtcttcagttctcatcattta

SEQ ID NO: 131977 - DNA, 25 bp, Probe Sequence
atgatgtgcctacatgcatatttta

SEQ ID NO: 131978 - DNA, 25 bp, Probe Sequence
atgagatccaccaacatcttttatt

SEQ ID NO: 131979 - DNA, 25 bp, Probe Sequence
atgttccactccactttgtatagac

SEQ ID NO: 131980 - DNA, 25 bp, Probe Sequence
atgtctagttttatttgtataggaa

SEQ ID NO: 131981 - DNA, 25 bp, Probe Sequence
atgttagttctcaggatttatcagg

SEQ ID NO: 131982 - DNA, 25 bp, Probe Sequence
atgttaagtcctctatttgtctgag

SEQ ID NO: 131983 - DNA, 25 bp, Probe Sequence
atgtctatagtcccagctagttggg

SEQ ID NO: 131984 - DNA, 25 bp, Probe Sequence
atgtatatggctccactgtggcttg

SEQ ID NO: 131985 - DNA, 25 bp, Probe Sequence
atgagatcaattccctggtgcggta

SEQ ID NO: 131986 - DNA, 25 bp, Probe Sequence
atgagacagacagttgcggtgggtg

SEQ ID NO: 131987 - DNA, 25 bp, Probe Sequence
atgagacagacagttgcggtgggtg

SEQ ID NO: 131988 - DNA, 25 bp, Probe Sequence
atgagacagacagttgcggtgggtg

SEQ ID NO: 131989 - DNA, 25 bp, Probe Sequence
atgagacagacagttgcggtgggtg

SEQ ID NO: 131990 - DNA, 25 bp, Probe Sequence
atgagaagatgatttcgtctgagtt

SEQ ID NO: 131991 - DNA, 25 bp, Probe Sequence
atgaccactggatcgtcgacacaga

SEQ ID NO: 131992 - DNA, 25 bp, Probe Sequence
atgaccgctggatcaacgatgtgga

SEQ ID NO: 131993 - DNA, 25 bp, Probe Sequence
atgaccttggagccacacttttgaa

SEQ ID NO: 131994 - DNA, 25 bp, Probe Sequence
atgacccttggccataatatgattt

SEQ ID NO: 131995 - DNA, 25 bp, Probe Sequence
atggcccgttctcaatgagctgttg

SEQ ID NO: 131996 - DNA, 25 bp, Probe Sequence
atgaccctggtcttcaatggttagc

SEQ ID NO: 131997 - DNA, 25 bp, Probe Sequence
atgaccctggtcttcaatggttagc

SEQ ID NO: 131998 - DNA, 25 bp, Probe Sequence
atgaccttgcgtgacagagacttcc

SEQ ID NO: 131999 - DNA, 25 bp, Probe Sequence
atgaccaagggaaggatgcctgtca

SEQ ID NO: 132000 - DNA, 25 bp, Probe Sequence
atgaccaagccgagaatcgaatcaa

SEQ ID NO: 132001 - DNA, 25 bp, Probe Sequence
atgaccagcactcgttggcggaaag

SEQ ID NO: 132002 - DNA, 25 bp, Probe Sequence
atgtccggcgcctggagtataagcc

SEQ ID NO: 132003 - DNA, 25 bp, Probe Sequence
atgtcttctccctggaatgagttga

SEQ ID NO: 132004 - DNA, 25 bp, Probe Sequence
atgtcttccgtgtgctggatacact

SEQ ID NO: 132005 - DNA, 25 bp, Probe Sequence
atgtcttccaaagtatggaacactc

SEQ ID NO: 132006 - DNA, 25 bp, Probe Sequence
atgtcctctagataaaacacccgat

SEQ ID NO: 132007 - DNA, 25 bp, Probe Sequence
atgtcactgttggaaataaactgcc

SEQ ID NO: 132008 - DNA, 25 bp, Probe Sequence
atgatcctgtatctagaaaacccat

SEQ ID NO: 132009 - DNA, 25 bp, Probe Sequence
atgtccgtagttttatagtcctatt

SEQ ID NO: 132010 - DNA, 25 bp, Probe Sequence
atgttggttttaatagtgtcaattt

SEQ ID NO: 132011 - DNA, 25 bp, Probe Sequence
atgttggcacctggatggagtgctc

SEQ ID NO: 132012 - DNA, 25 bp, Probe Sequence
atgatattgcccttgtgcagcttgc

SEQ ID NO: 132013 - DNA, 25 bp, Probe Sequence
atgatatttgtctttcagtatggta

SEQ ID NO: 132014 - DNA, 25 bp, Probe Sequence
atgatttctgttatcaagaagtatt

SEQ ID NO: 132015 - DNA, 25 bp, Probe Sequence
atgttgtctttgttgtagtgaaatt

SEQ ID NO: 132016 - DNA, 25 bp, Probe Sequence
atgatggatctgctgtgtccaaaaa

SEQ ID NO: 132017 - DNA, 25 bp, Probe Sequence
atgatgaaggctcttctgagaacaa

SEQ ID NO: 132018 - DNA, 25 bp, Probe Sequence
atgaggggcttcacgagaggccaca

SEQ ID NO: 132019 - DNA, 25 bp, Probe Sequence
atgaggcaggtatcactagaggtca

SEQ ID NO: 132020 - DNA, 25 bp, Probe Sequence
atgaggaggtcagcccattggctcc

SEQ ID NO: 132021 - DNA, 25 bp, Probe Sequence
atgaggaggtcagcccattggctcc

SEQ ID NO: 132022 - DNA, 25 bp, Probe Sequence
atgtagggtgcagaccgtactccat

SEQ ID NO: 132023 - DNA, 25 bp, Probe Sequence
atgttgggtgaacggctgtttcctc

SEQ ID NO: 132024 - DNA, 25 bp, Probe Sequence
atgttgggtgaacggctgtttcctc

SEQ ID NO: 132025 - DNA, 25 bp, Probe Sequence
atgttggtttgcgtgtgggaatccc

SEQ ID NO: 132026 - DNA, 25 bp, Probe Sequence
atgtgtcaatgaacctgggaaattc

SEQ ID NO: 132027 - DNA, 25 bp, Probe Sequence
atgtccttgaaggctgaatgaacag

SEQ ID NO: 132028 - DNA, 25 bp, Probe Sequence
atgttctgtgaatctcgagtgagcg

SEQ ID NO: 132029 - DNA, 25 bp, Probe Sequence
atgtatttaatagcgaggatcagtg

SEQ ID NO: 132030 - DNA, 25 bp, Probe Sequence
atgatattgcatttagccgggccgg

SEQ ID NO: 132031 - DNA, 25 bp, Probe Sequence
atgtcttcaatttacttggccggca

SEQ ID NO: 132032 - DNA, 25 bp, Probe Sequence
atgatattagagctcactcatgtcc

SEQ ID NO: 132033 - DNA, 25 bp, Probe Sequence
atgagttagcagaagcctttcagaa

SEQ ID NO: 132034 - DNA, 25 bp, Probe Sequence
atgagagggagggcagccttctgcc

SEQ ID NO: 132035 - DNA, 25 bp, Probe Sequence
atgagacagatgtggtgtttctctc

SEQ ID NO: 132036 - DNA, 25 bp, Probe Sequence
atgatgacattctggtctcgtcttc

SEQ ID NO: 132037 - DNA, 25 bp, Probe Sequence
atgatggtggatacgctcttgatct

SEQ ID NO: 132038 - DNA, 25 bp, Probe Sequence
atgagattggcatggctttatttgt

SEQ ID NO: 132039 - DNA, 25 bp, Probe Sequence
atgagagtgtctaggcctttgaatg

SEQ ID NO: 132040 - DNA, 25 bp, Probe Sequence
atgagggtctcactgctttaggatt

SEQ ID NO: 132041 - DNA, 25 bp, Probe Sequence
atgagcaggtgctaccttttgggat

SEQ ID NO: 132042 - DNA, 25 bp, Probe Sequence
atgagaagggacgtgcttttgagca

SEQ ID NO: 132043 - DNA, 25 bp, Probe Sequence
atgagaagggtattgcctcctggaa

SEQ ID NO: 132044 - DNA, 25 bp, Probe Sequence
atggggcaggcttagccccggaagc

SEQ ID NO: 132045 - DNA, 25 bp, Probe Sequence
atgaggtacgctgaggcctgggagt

SEQ ID NO: 132046 - DNA, 25 bp, Probe Sequence
atgatggcaaggagcggcccgaagt

SEQ ID NO: 132047 - DNA, 25 bp, Probe Sequence
atgatgagacggacatggcccagct

SEQ ID NO: 132048 - DNA, 25 bp, Probe Sequence
atgatgagacggacatggcccagct

SEQ ID NO: 132049 - DNA, 25 bp, Probe Sequence
atgagcagaggaagagatcccagat

SEQ ID NO: 132050 - DNA, 25 bp, Probe Sequence
atgacgcagctgtgatatgcaccag

SEQ ID NO: 132051 - DNA, 25 bp, Probe Sequence
atgtcgctgtcaggatcatgccctg

SEQ ID NO: 132052 - DNA, 25 bp, Probe Sequence
atgatgaaccgcttcatgccactga

SEQ ID NO: 132053 - DNA, 25 bp, Probe Sequence
atgtaacacatcaatcatggaatga

SEQ ID NO: 132054 - DNA, 25 bp, Probe Sequence
atgtagacttttcagaatggcttct

SEQ ID NO: 132055 - DNA, 25 bp, Probe Sequence
atgttgtatctttggaggggttttg

SEQ ID NO: 132056 - DNA, 25 bp, Probe Sequence
atggcgtatctatcggaaggatttc

SEQ ID NO: 132057 - DNA, 25 bp, Probe Sequence
atgtcgaattacgttgattggtttt

SEQ ID NO: 132058 - DNA, 25 bp, Probe Sequence
atgtatcctcccgattattgcgtat

SEQ ID NO: 132059 - DNA, 25 bp, Probe Sequence
atgtcacgtccagctctgatatctt

SEQ ID NO: 132060 - DNA, 25 bp, Probe Sequence
atgatcaggtcaactccgatgcgtt

SEQ ID NO: 132061 - DNA, 25 bp, Probe Sequence
atgatgaggtgcctccacaacttcc

SEQ ID NO: 132062 - DNA, 25 bp, Probe Sequence
atgatcattgtccctacagacaccc

SEQ ID NO: 132063 - DNA, 25 bp, Probe Sequence
atgatcaaccagccatggatgaact

SEQ ID NO: 132064 - DNA, 25 bp, Probe Sequence
atgatcaagtgaaaggtacagcaga

SEQ ID NO: 132065 - DNA, 25 bp, Probe Sequence
atgtcaaggccgctgctaatcagat

SEQ ID NO: 132066 - DNA, 25 bp, Probe Sequence
atgataaactctagctctaaatgct

SEQ ID NO: 132067 - DNA, 25 bp, Probe Sequence
atgataccagtgctgctgtaactga

SEQ ID NO: 132068 - DNA, 25 bp, Probe Sequence
atgagacaggctggcttattagctg

SEQ ID NO: 132069 - DNA, 25 bp, Probe Sequence
atgagaaagccttcttttggggtca

SEQ ID NO: 132070 - DNA, 25 bp, Probe Sequence
atggaacttttctgtaatgggtaca

SEQ ID NO: 132071 - DNA, 25 bp, Probe Sequence
atgagcaacttgttcccaaagctgg

SEQ ID NO: 132072 - DNA, 25 bp, Probe Sequence
atggaggctccatacctaagtcaga

SEQ ID NO: 132073 - DNA, 25 bp, Probe Sequence
aggtggaccagctaaccaacgacaa

SEQ ID NO: 132074 - DNA, 25 bp, Probe Sequence
atgagtgtactaccaatctaactaa

SEQ ID NO: 132075 - DNA, 25 bp, Probe Sequence
atgaggtccataaagatttactgct

SEQ ID NO: 132076 - DNA, 25 bp, Probe Sequence
atgacctctatataattatcaccgt

SEQ ID NO: 132077 - DNA, 25 bp, Probe Sequence
atgacctttcaagaactgcaccgtt

SEQ ID NO: 132078 - DNA, 25 bp, Probe Sequence
atgacctttaatgacactacatttt

SEQ ID NO: 132079 - DNA, 25 bp, Probe Sequence
atgttctttatacagcctagttaat

SEQ ID NO: 132080 - DNA, 25 bp, Probe Sequence
atgtttgtaggaccaccgaatataa

SEQ ID NO: 132081 - DNA, 25 bp, Probe Sequence
atgttttgaggaccctccatactgt

SEQ ID NO: 132082 - DNA, 25 bp, Probe Sequence
atgttttgaaactcttgtatttatg

SEQ ID NO: 132083 - DNA, 25 bp, Probe Sequence
atgttttgaaaatgtctgtgagctg

SEQ ID NO: 132084 - DNA, 25 bp, Probe Sequence
atgtctgttagggaaagcaggagcc

SEQ ID NO: 132085 - DNA, 25 bp, Probe Sequence
atgtctgacaatagtgaaacagttg

SEQ ID NO: 132086 - DNA, 25 bp, Probe Sequence
atgatatagcacattgataacattt

SEQ ID NO: 132087 - DNA, 25 bp, Probe Sequence
atgatgtacatcatgtgtcagttat

SEQ ID NO: 132088 - DNA, 25 bp, Probe Sequence
atgagaatcacaactgtatgtctat

SEQ ID NO: 132089 - DNA, 25 bp, Probe Sequence
atgataatcacacctgcatttgctg

SEQ ID NO: 132090 - DNA, 25 bp, Probe Sequence
atgatctgaatctctgacttattga

SEQ ID NO: 132091 - DNA, 25 bp, Probe Sequence
atgatgcaaatctctataccagctg

SEQ ID NO: 132092 - DNA, 25 bp, Probe Sequence
atgagataataggcctactcatatg

SEQ ID NO: 132093 - DNA, 25 bp, Probe Sequence
atgtatgaacaggtatcctattgtc

SEQ ID NO: 132094 - DNA, 25 bp, Probe Sequence
atgttaaagtaacccatcttgcagg

SEQ ID NO: 132095 - DNA, 25 bp, Probe Sequence
atgttaatagttttccctggaatag

SEQ ID NO: 132096 - DNA, 25 bp, Probe Sequence
atgttaatagttttccctggaatag

SEQ ID NO: 132097 - DNA, 25 bp, Probe Sequence
atgttaatagttttccctggaatag

SEQ ID NO: 132098 - DNA, 25 bp, Probe Sequence
atgttaatagttttccctggaatag

SEQ ID NO: 132099 - DNA, 25 bp, Probe Sequence
agtctaaattagctacccaaatatg

SEQ ID NO: 132100 - DNA, 25 bp, Probe Sequence
atgttaccaccgttgacaccaaaag

SEQ ID NO: 132101 - DNA, 25 bp, Probe Sequence
atgattatcgcagaacgacagaaaa

SEQ ID NO: 132102 - DNA, 25 bp, Probe Sequence
atgtttacactagggatcaggacca

SEQ ID NO: 132103 - DNA, 25 bp, Probe Sequence
cttttgagaaacctaggggcacatt

SEQ ID NO: 132104 - DNA, 25 bp, Probe Sequence
acctgacctaacctaggagggctct

SEQ ID NO: 132105 - DNA, 25 bp, Probe Sequence
aacaaccaaagtcaggggccttcag

SEQ ID NO: 132106 - DNA, 25 bp, Probe Sequence
aagccccgaaggctggggcggctca

SEQ ID NO: 132107 - DNA, 25 bp, Probe Sequence
atgatccccgcatggtgttgggggt

SEQ ID NO: 132108 - DNA, 25 bp, Probe Sequence
atgtcacctcaaaaattttggggct

SEQ ID NO: 132109 - DNA, 25 bp, Probe Sequence
atgttgttcaaatgcattttggggg

SEQ ID NO: 132110 - DNA, 25 bp, Probe Sequence
atgtgtaattttccatttgggggca

SEQ ID NO: 132111 - DNA, 25 bp, Probe Sequence
atgataaaagttcacttcagtggga

SEQ ID NO: 132112 - DNA, 25 bp, Probe Sequence
atgtctagtattttactgtcactgg

SEQ ID NO: 132113 - DNA, 25 bp, Probe Sequence
atgtctacataactttcgtaatggc

SEQ ID NO: 132114 - DNA, 25 bp, Probe Sequence
atgtccaaaagccttccagaagtca

SEQ ID NO: 132115 - DNA, 25 bp, Probe Sequence
atgtccaaggatcatctccggaatg

SEQ ID NO: 132116 - DNA, 25 bp, Probe Sequence
atgtgcgctgtttgaacccgtaagc

SEQ ID NO: 132117 - DNA, 25 bp, Probe Sequence
atgttttttagactctctgtattgc

SEQ ID NO: 132118 - DNA, 25 bp, Probe Sequence
atgtttttaatgttgtctgtcttct

SEQ ID NO: 132119 - DNA, 25 bp, Probe Sequence
atgtttttaatgttgtctgtcttct

SEQ ID NO: 132120 - DNA, 25 bp, Probe Sequence
atgtttttaatgttgtctgtcttct

SEQ ID NO: 132121 - DNA, 25 bp, Probe Sequence
agtctttccagaggagtttcttaat

SEQ ID NO: 132122 - DNA, 25 bp, Probe Sequence
atgttctccacaaggagcttcctga

SEQ ID NO: 132123 - DNA, 25 bp, Probe Sequence
atgattgtcaccggaggtatagctg

SEQ ID NO: 132124 - DNA, 25 bp, Probe Sequence
atgatttatcctgagtgctgtatct

SEQ ID NO: 132125 - DNA, 25 bp, Probe Sequence
atgatagtccaggaattgctgactt

SEQ ID NO: 132126 - DNA, 25 bp, Probe Sequence
atgatagccacagtattgctcccta

SEQ ID NO: 132127 - DNA, 25 bp, Probe Sequence
atgatagccacagtattgctcccta

SEQ ID NO: 132128 - DNA, 25 bp, Probe Sequence
atgtatgcactggtatagcaccctt

SEQ ID NO: 132129 - DNA, 25 bp, Probe Sequence
atgttgcctgcaatagggctcttgt

SEQ ID NO: 132130 - DNA, 25 bp, Probe Sequence
atgtaactgcattgagaactgcata

SEQ ID NO: 132131 - DNA, 25 bp, Probe Sequence
atgtcagtctgcttagaaataacag

SEQ ID NO: 132132 - DNA, 25 bp, Probe Sequence
atgagtgctctctgagagaatcact

SEQ ID NO: 132133 - DNA, 25 bp, Probe Sequence
atgagcactatgttcgcggacactc

SEQ ID NO: 132134 - DNA, 25 bp, Probe Sequence
atgagcactatgttcgcggacactc

SEQ ID NO: 132135 - DNA, 25 bp, Probe Sequence
atgagaccatgatcgaggacgtgca

SEQ ID NO: 132136 - DNA, 25 bp, Probe Sequence
atgagttctgctacaaggtggtgca

SEQ ID NO: 132137 - DNA, 25 bp, Probe Sequence
atgtttctcaacaaggggtaagctt

SEQ ID NO: 132138 - DNA, 25 bp, Probe Sequence
atgtttccaacctggagtataatat

SEQ ID NO: 132139 - DNA, 25 bp, Probe Sequence
atgttgtagaatgtcagggttttat

SEQ ID NO: 132140 - DNA, 25 bp, Probe Sequence
atgtttatgagtattagccttttaa

SEQ ID NO: 132141 - DNA, 25 bp, Probe Sequence
atgtatttggctattagatcactag

SEQ ID NO: 132142 - DNA, 25 bp, Probe Sequence
atgtttttgcatactttgcatcttt

SEQ ID NO: 132143 - DNA, 25 bp, Probe Sequence
atgatgttttgcagcattccccatt

SEQ ID NO: 132144 - DNA, 25 bp, Probe Sequence
atgattgtgtatgtgccgctaccac

SEQ ID NO: 132145 - DNA, 25 bp, Probe Sequence
atgattgtgtatgtgccgctaccac

SEQ ID NO: 132146 - DNA, 25 bp, Probe Sequence
atgttggtaccttccatcaagcact

SEQ ID NO: 132147 - DNA, 25 bp, Probe Sequence
ctgccacggatggtggcctcaacct

SEQ ID NO: 132148 - DNA, 25 bp, Probe Sequence
atgtgcaccgttgggaccaatgcct

SEQ ID NO: 132149 - DNA, 25 bp, Probe Sequence
atgtgaactgtaactgacaagatga

SEQ ID NO: 132150 - DNA, 25 bp, Probe Sequence
atgatggcattctcctggcaagaga

SEQ ID NO: 132151 - DNA, 25 bp, Probe Sequence
atgaggctgtggaccgagagataga

SEQ ID NO: 132152 - DNA, 25 bp, Probe Sequence
atgaggtaggtaggcaggaaaacgg

SEQ ID NO: 132153 - DNA, 25 bp, Probe Sequence
aggcgaaggtagcagtaagccaaga

SEQ ID NO: 132154 - DNA, 25 bp, Probe Sequence
atgaggaatagtttaggaccacaag

SEQ ID NO: 132155 - DNA, 25 bp, Probe Sequence
atgaggtacgagctggatacccaag

SEQ ID NO: 132156 - DNA, 25 bp, Probe Sequence
atgagggccgagatgcagtgactcg

SEQ ID NO: 132157 - DNA, 25 bp, Probe Sequence
atgaggagaccgaagggcaccgagt

SEQ ID NO: 132158 - DNA, 25 bp, Probe Sequence
atgggagcagacagggcgacgggtc

SEQ ID NO: 132159 - DNA, 25 bp, Probe Sequence
atgggcagattatgagactttgggt

SEQ ID NO: 132160 - DNA, 25 bp, Probe Sequence
atgtggaataagccaattttacgtc

SEQ ID NO: 132161 - DNA, 25 bp, Probe Sequence
atgttggaagcagcatactttcaaa

SEQ ID NO: 132162 - DNA, 25 bp, Probe Sequence
atgtgggtgataggaattttaaaga

SEQ ID NO: 132163 - DNA, 25 bp, Probe Sequence
atgattggtttgtaacattccttaa

SEQ ID NO: 132164 - DNA, 25 bp, Probe Sequence
atgattttctctaaatgcctgggta

SEQ ID NO: 132165 - DNA, 25 bp, Probe Sequence
atgttttcactaatctgttgagagc

SEQ ID NO: 132166 - DNA, 25 bp, Probe Sequence
atgatgctgtacgtatttttttctt

SEQ ID NO: 132167 - DNA, 25 bp, Probe Sequence
atgatggctagctttgtttaatgtc

SEQ ID NO: 132168 - DNA, 25 bp, Probe Sequence
atgtccttgttattttattgccttt

SEQ ID NO: 132169 - DNA, 25 bp, Probe Sequence
atgtccttgttattttattgccttt

SEQ ID NO: 132170 - DNA, 25 bp, Probe Sequence
atgttaattctatgtttagcttttt

SEQ ID NO: 132171 - DNA, 25 bp, Probe Sequence
atgtatagtcttgagtattagctaa

SEQ ID NO: 132172 - DNA, 25 bp, Probe Sequence
atgatgctagtttgcatatgttttc

SEQ ID NO: 132173 - DNA, 25 bp, Probe Sequence
atgttggtctacacttttgccaaat

SEQ ID NO: 132174 - DNA, 25 bp, Probe Sequence
atgataacatctatttgtagtccca

SEQ ID NO: 132175 - DNA, 25 bp, Probe Sequence
atgatcacagcaatacttgtatgca

SEQ ID NO: 132176 - DNA, 25 bp, Probe Sequence
atgatagctcgttgtatccagcacc

SEQ ID NO: 132177 - DNA, 25 bp, Probe Sequence
atgatagctcttgggcatcgatctc

SEQ ID NO: 132178 - DNA, 25 bp, Probe Sequence
atgatagtcatttgcccgtcaagtt

SEQ ID NO: 132179 - DNA, 25 bp, Probe Sequence
atgatattgctttgctacagctcag

SEQ ID NO: 132180 - DNA, 25 bp, Probe Sequence
atgttttttgcagcagcatgaatgc

SEQ ID NO: 132181 - DNA, 25 bp, Probe Sequence
atgtagcccattaccacatgtagcc

SEQ ID NO: 132182 - DNA, 25 bp, Probe Sequence
atgtgcccagcattgactaatgttc

SEQ ID NO: 132183 - DNA, 25 bp, Probe Sequence
atgatgctcggctgatttttgttta

SEQ ID NO: 132184 - DNA, 25 bp, Probe Sequence
atgttctggtggtttgattgtttac

SEQ ID NO: 132185 - DNA, 25 bp, Probe Sequence
atgtcactggagctttgttgggaaa

SEQ ID NO: 132186 - DNA, 25 bp, Probe Sequence
atgagtttatgtcctctgtcgggac

SEQ ID NO: 132187 - DNA, 25 bp, Probe Sequence
atgagattaatgctgcttggggcca

SEQ ID NO: 132188 - DNA, 25 bp, Probe Sequence
atgagattcagtcatttgcaacaac

SEQ ID NO: 132189 - DNA, 25 bp, Probe Sequence
atgagagtagtcattgtcactgcca

SEQ ID NO: 132190 - DNA, 25 bp, Probe Sequence
atgagtgaatgtgggtgatctgctt

SEQ ID NO: 132191 - DNA, 25 bp, Probe Sequence
atgaggaggttggtgtggattctgt

SEQ ID NO: 132192 - DNA, 25 bp, Probe Sequence
atgatatgtgaattggttggtttta

SEQ ID NO: 132193 - DNA, 25 bp, Probe Sequence
atgtgatagaatttgttggccagtt

SEQ ID NO: 132194 - DNA, 25 bp, Probe Sequence
atgtatatagtcaagtaggagcagt

SEQ ID NO: 132195 - DNA, 25 bp, Probe Sequence
atggatctgcagatagtagagggcc

SEQ ID NO: 132196 - DNA, 25 bp, Probe Sequence
atgttgctggatcaggaagccgcca

SEQ ID NO: 132197 - DNA, 25 bp, Probe Sequence
atgttctgggtttaaaagccatctt

SEQ ID NO: 132198 - DNA, 25 bp, Probe Sequence
atgtcgtggtttcaaaactaattgt

SEQ ID NO: 132199 - DNA, 25 bp, Probe Sequence
atgtagaggggccaataaacatgaa

SEQ ID NO: 132200 - DNA, 25 bp, Probe Sequence
atgtggaggtggacgacccactgaa

SEQ ID NO: 132201 - DNA, 25 bp, Probe Sequence
atgatctgagcgagattaccaagta

SEQ ID NO: 132202 - DNA, 25 bp, Probe Sequence
atgatagactttgttccagattgac

SEQ ID NO: 132203 - DNA, 25 bp, Probe Sequence
atgttactcattgtaaagaccacat

SEQ ID NO: 132204 - DNA, 25 bp, Probe Sequence
atgtaaccatctgaaagcaactttt

SEQ ID NO: 132205 - DNA, 25 bp, Probe Sequence
atgatggacacacccaagtcaacct

SEQ ID NO: 132206 - DNA, 25 bp, Probe Sequence
atgatggagctccgaatgtgcttaa

SEQ ID NO: 132207 - DNA, 25 bp, Probe Sequence
atgtggacctggattcttgaaggca

SEQ ID NO: 132208 - DNA, 25 bp, Probe Sequence
atgtgtacgcggtgtttgaaacagc

SEQ ID NO: 132209 - DNA, 25 bp, Probe Sequence
atgttgacggctttgtgattgattc

SEQ ID NO: 132210 - DNA, 25 bp, Probe Sequence
atgttgacggctttgtgattgattc

SEQ ID NO: 132211 - DNA, 25 bp, Probe Sequence
atgttgactgcacaggtaatacaac

SEQ ID NO: 132212 - DNA, 25 bp, Probe Sequence
atgtcagacgcagccgtagacacca

SEQ ID NO: 132213 - DNA, 25 bp, Probe Sequence
atgatgcaactaacacttgcctccc

SEQ ID NO: 132214 - DNA, 25 bp, Probe Sequence
atgatgacccaaactggcactgctg

SEQ ID NO: 132215 - DNA, 25 bp, Probe Sequence
atgatgacgcaaaaaggcctctaca

SEQ ID NO: 132216 - DNA, 25 bp, Probe Sequence
atgagtgccaaaaatctgtcttgaa

SEQ ID NO: 132217 - DNA, 25 bp, Probe Sequence
atgatgagggacaacctctttgaaa

SEQ ID NO: 132218 - DNA, 25 bp, Probe Sequence
atgtcgggcagttcccattagattt

SEQ ID NO: 132219 - DNA, 25 bp, Probe Sequence
atgtcgcaggcattactaatctgaa

SEQ ID NO: 132220 - DNA, 25 bp, Probe Sequence
atgagtgctgcgttgactactgcta

SEQ ID NO: 132221 - DNA, 25 bp, Probe Sequence
atgatgatgcggttttgacagtaca

SEQ ID NO: 132222 - DNA, 25 bp, Probe Sequence
atgatgcatgggtcatttgtcttgg

SEQ ID NO: 132223 - DNA, 25 bp, Probe Sequence
atgatctggcagacttctttaagca

SEQ ID NO: 132224 - DNA, 25 bp, Probe Sequence
atgttccgtgctgctttaaatgctc

SEQ ID NO: 132225 - DNA, 25 bp, Probe Sequence
atgttcaaatacctttaaatccctg

SEQ ID NO: 132226 - DNA, 25 bp, Probe Sequence
agtgtctaacaaacttaaagctact

SEQ ID NO: 132227 - DNA, 25 bp, Probe Sequence
atgtgcccacaggaatgtataaagt

SEQ ID NO: 132228 - DNA, 25 bp, Probe Sequence
atgtccctcagtaacgttaagtgct

SEQ ID NO: 132229 - DNA, 25 bp, Probe Sequence
atgttcctccttaactatacttgct

SEQ ID NO: 132230 - DNA, 25 bp, Probe Sequence
atggaccccaagcagtacacttgct

SEQ ID NO: 132231 - DNA, 25 bp, Probe Sequence
atgagacccacaacaaatagccctt

SEQ ID NO: 132232 - DNA, 25 bp, Probe Sequence
atggccccaaactaaagccactaca

SEQ ID NO: 132233 - DNA, 25 bp, Probe Sequence
atggcctggaatgcaaaacgcctga

SEQ ID NO: 132234 - DNA, 25 bp, Probe Sequence
atggaagccctggaaaatcgcctga

SEQ ID NO: 132235 - DNA, 25 bp, Probe Sequence
atggaaccctggtggtccaccattg

SEQ ID NO: 132236 - DNA, 25 bp, Probe Sequence
atggcaactttgttggaccaaccat

SEQ ID NO: 132237 - DNA, 25 bp, Probe Sequence
atgtacagtttgttggctcctacaa

SEQ ID NO: 132238 - DNA, 25 bp, Probe Sequence
atgatcagcgtcatcgtggttatga

SEQ ID NO: 132239 - DNA, 25 bp, Probe Sequence
atgtacgtcctcctaggtgatggag

SEQ ID NO: 132240 - DNA, 25 bp, Probe Sequence
atggcccttcaaattggaatggaac

SEQ ID NO: 132241 - DNA, 25 bp, Probe Sequence
atgtcctttgcattgcttggaaggg

SEQ ID NO: 132242 - DNA, 25 bp, Probe Sequence
atgttcatcttattcttaggaagga

SEQ ID NO: 132243 - DNA, 25 bp, Probe Sequence
atgtatctcttatcaagtaggaatg

SEQ ID NO: 132244 - DNA, 25 bp, Probe Sequence
atgatgattttatgtttagtgagtg

SEQ ID NO: 132245 - DNA, 25 bp, Probe Sequence
atgagagtttagttatttgtatgtg

SEQ ID NO: 132246 - DNA, 25 bp, Probe Sequence
atgagatgctactaattgttttgga

SEQ ID NO: 132247 - DNA, 25 bp, Probe Sequence
atgatcatgtaatatctgtgctcta

SEQ ID NO: 132248 - DNA, 25 bp, Probe Sequence
atgatatcaaagactcattgcttaa

SEQ ID NO: 132249 - DNA, 25 bp, Probe Sequence
atgtcatgctaaggtatgtgttaca

SEQ ID NO: 132250 - DNA, 25 bp, Probe Sequence
atgttggcgatggatatgtggttca

SEQ ID NO: 132251 - DNA, 25 bp, Probe Sequence
atgatcgtggaggagtgtgggtgct

SEQ ID NO: 132252 - DNA, 25 bp, Probe Sequence
atgatcgtggaggagtgtgggtgct

SEQ ID NO: 132253 - DNA, 25 bp, Probe Sequence
atgatcttggatgggctgatgacca

SEQ ID NO: 132254 - DNA, 25 bp, Probe Sequence
atgatcagtatgaacctagcacccg

SEQ ID NO: 132255 - DNA, 25 bp, Probe Sequence
atgtcgaagaaccgagtccccgact

SEQ ID NO: 132256 - DNA, 25 bp, Probe Sequence
atgtggcaccaatgaaggcccccaa

SEQ ID NO: 132257 - DNA, 25 bp, Probe Sequence
atgtgcgaactatcaggaccaccac

SEQ ID NO: 132258 - DNA, 25 bp, Probe Sequence
atgaggactgtcaggtgacgccctc

SEQ ID NO: 132259 - DNA, 25 bp, Probe Sequence
atgaggacaggtcagtggccaaccc

SEQ ID NO: 132260 - DNA, 25 bp, Probe Sequence
atgaggtcagagggagctagcctgg

SEQ ID NO: 132261 - DNA, 25 bp, Probe Sequence
atgagggagcgtgggtagcctctgc

SEQ ID NO: 132262 - DNA, 25 bp, Probe Sequence
atgaggagcactgtggtgagccctg

SEQ ID NO: 132263 - DNA, 25 bp, Probe Sequence
atgtacagcttgggtgtggtcctgc

SEQ ID NO: 132264 - DNA, 25 bp, Probe Sequence
atgtatcggctgagtgccgtagctc

SEQ ID NO: 132265 - DNA, 25 bp, Probe Sequence
atgtcagcggatgtcacgagctcgt

SEQ ID NO: 132266 - DNA, 25 bp, Probe Sequence
atgtcagtggaaaacgtgtctcttt

SEQ ID NO: 132267 - DNA, 25 bp, Probe Sequence
atgtcactcatggtggacgcgttct

SEQ ID NO: 132268 - DNA, 25 bp, Probe Sequence
atgtcacacaggtaacaggctatga

SEQ ID NO: 132269 - DNA, 25 bp, Probe Sequence
atgtcacatagccaaaatttgaatt

SEQ ID NO: 132270 - DNA, 25 bp, Probe Sequence
atgtggtagggtaatcttgtttgaa

SEQ ID NO: 132271 - DNA, 25 bp, Probe Sequence
atgatggattgtggataactctgtt

SEQ ID NO: 132272 - DNA, 25 bp, Probe Sequence
atgaggttgtctaaaatctcgtgcc

SEQ ID NO: 132273 - DNA, 25 bp, Probe Sequence
atgaggttgcttgatacccagcctt

SEQ ID NO: 132274 - DNA, 25 bp, Probe Sequence
atgaggtatttcttcacatccgtgt

SEQ ID NO: 132275 - DNA, 25 bp, Probe Sequence
atgggctttaatagagacctggtga

SEQ ID NO: 132276 - DNA, 25 bp, Probe Sequence
atgaggttgtaaatgaagatccaga

SEQ ID NO: 132277 - DNA, 25 bp, Probe Sequence
atgatggattttaagcctgactata

SEQ ID NO: 132278 - DNA, 25 bp, Probe Sequence
atgttcttattatcatcatgactat

SEQ ID NO: 132279 - DNA, 25 bp, Probe Sequence
atgttcctgttggtatagactatgt

SEQ ID NO: 132280 - DNA, 25 bp, Probe Sequence
atgattccagtaggctctagcttat

SEQ ID NO: 132281 - DNA, 25 bp, Probe Sequence
atgatttcagtagcacaagttattt

SEQ ID NO: 132282 - DNA, 25 bp, Probe Sequence
atgatttcattatcacatgattata

SEQ ID NO: 132283 - DNA, 25 bp, Probe Sequence
atgtttcatgcttcagatattttac

SEQ ID NO: 132284 - DNA, 25 bp, Probe Sequence
atgatttcatattgatctttttatc

SEQ ID NO: 132285 - DNA, 25 bp, Probe Sequence
atgatttctttgtagcatttggtgc

SEQ ID NO: 132286 - DNA, 25 bp, Probe Sequence
atgtctatctttgcgcatgggttgt

SEQ ID NO: 132287 - DNA, 25 bp, Probe Sequence
atgatctacttggctgccttcaatt

SEQ ID NO: 132288 - DNA, 25 bp, Probe Sequence
atgtctactgttcacgaaatcctgt

SEQ ID NO: 132289 - DNA, 25 bp, Probe Sequence
atgtatttgtgacaccctatcttgt

SEQ ID NO: 132290 - DNA, 25 bp, Probe Sequence
atgtcaccgtggtgaccttcttctg

SEQ ID NO: 132291 - DNA, 25 bp, Probe Sequence
atgatcactggtgttgagctttttt

SEQ ID NO: 132292 - DNA, 25 bp, Probe Sequence
atgatcctggagctttgctttctat

SEQ ID NO: 132293 - DNA, 25 bp, Probe Sequence
atgtctttggaatttgctctactaa

SEQ ID NO: 132294 - DNA, 25 bp, Probe Sequence
atgtctgtggggtgactctactgtg

SEQ ID NO: 132295 - DNA, 25 bp, Probe Sequence
atgtcttgggaactgtcattggagt

SEQ ID NO: 132296 - DNA, 25 bp, Probe Sequence
atgtctatgccctgtacattgtagc

SEQ ID NO: 132297 - DNA, 25 bp, Probe Sequence
atgtcattccccatatgtgttggag

SEQ ID NO: 132298 - DNA, 25 bp, Probe Sequence
atgtcatttcactactggtgttctg

SEQ ID NO: 132299 - DNA, 25 bp, Probe Sequence
atgataatctcgggcattgtttgct

SEQ ID NO: 132300 - DNA, 25 bp, Probe Sequence
atgataatctcgggcattgtttgca

SEQ ID NO: 132301 - DNA, 25 bp, Probe Sequence
atgataatctcgggcattgtttgca

SEQ ID NO: 132302 - DNA, 25 bp, Probe Sequence
atgtaactgtggaaatgatgtatca

SEQ ID NO: 132303 - DNA, 25 bp, Probe Sequence
atgtagtctctgttaaggtcaagtt

SEQ ID NO: 132304 - DNA, 25 bp, Probe Sequence
atgatgggcctgtgaaggtagtggt

SEQ ID NO: 132305 - DNA, 25 bp, Probe Sequence
atgatgaccctattaatgaggttgg

SEQ ID NO: 132306 - DNA, 25 bp, Probe Sequence
atgatgtccctgtcttgtgggagat

SEQ ID NO: 132307 - DNA, 25 bp, Probe Sequence
atgtctccatctattgatgagggtc

SEQ ID NO: 132308 - DNA, 25 bp, Probe Sequence
atgtcccatctaaacagtcgtcatc

SEQ ID NO: 132309 - DNA, 25 bp, Probe Sequence
atgtcctcaatgaacggtgcggcat

SEQ ID NO: 132310 - DNA, 25 bp, Probe Sequence
atgatcccagataagtgtgtgtttt

SEQ ID NO: 132311 - DNA, 25 bp, Probe Sequence
atgatcccattccaactgtataatt

SEQ ID NO: 132312 - DNA, 25 bp, Probe Sequence
atgatcccaatccaagtgaataaac

SEQ ID NO: 132313 - DNA, 25 bp, Probe Sequence
atgatcacgttccatccaaataaac

SEQ ID NO: 132314 - DNA, 25 bp, Probe Sequence
atgatgcacgtgttttccaccattt

SEQ ID NO: 132315 - DNA, 25 bp, Probe Sequence
atgaggatgtcatcttccttcactt

SEQ ID NO: 132316 - DNA, 25 bp, Probe Sequence
atgaggatgtcatcttccttcactt

SEQ ID NO: 132317 - DNA, 25 bp, Probe Sequence
atgatggtgcaagttcctttctctt

SEQ ID NO: 132318 - DNA, 25 bp, Probe Sequence
atgatggtgtaatattttcatctta

SEQ ID NO: 132319 - DNA, 25 bp, Probe Sequence
atgatggtgctaaaattcttcctat

SEQ ID NO: 132320 - DNA, 25 bp, Probe Sequence
atgtagtcagaccaatactcccact

SEQ ID NO: 132321 - DNA, 25 bp, Probe Sequence
atgttccagaacctaaccaactata

SEQ ID NO: 132322 - DNA, 25 bp, Probe Sequence
atgttccaaatctgacctataataa

SEQ ID NO: 132323 - DNA, 25 bp, Probe Sequence
atgtcaaacacctgcaccttgagat

SEQ ID NO: 132324 - DNA, 25 bp, Probe Sequence
atgtcaaacccagggccaagtatgc

SEQ ID NO: 132325 - DNA, 25 bp, Probe Sequence
atgtaaacgtcaatgcacaaaatgg

SEQ ID NO: 132326 - DNA, 25 bp, Probe Sequence
atgtttacaccaatgccaaaaagca

SEQ ID NO: 132327 - DNA, 25 bp, Probe Sequence
atgtttatcccttccaagaatcatt

SEQ ID NO: 132328 - DNA, 25 bp, Probe Sequence
atgtttgaccgctccgaggtctatg

SEQ ID NO: 132329 - DNA, 25 bp, Probe Sequence
agatttggcctgggccagtgagact

SEQ ID NO: 132330 - DNA, 25 bp, Probe Sequence
atgattctgggctggactgtgggat

SEQ ID NO: 132331 - DNA, 25 bp, Probe Sequence
atgatccagggcggagacttcacca

SEQ ID NO: 132332 - DNA, 25 bp, Probe Sequence
atgttcagggccctgacttgcacag

SEQ ID NO: 132333 - DNA, 25 bp, Probe Sequence
atgtcgctcgggctgagattgcatc

SEQ ID NO: 132334 - DNA, 25 bp, Probe Sequence
atgtctccaaggtgcaatatgctgc

SEQ ID NO: 132335 - DNA, 25 bp, Probe Sequence
atgttccccagggtgatatgctgat

SEQ ID NO: 132336 - DNA, 25 bp, Probe Sequence
atgttcctgcaccctgtgaatgtgc

SEQ ID NO: 132337 - DNA, 25 bp, Probe Sequence
atgtttctgcacctgtagagatcac

SEQ ID NO: 132338 - DNA, 25 bp, Probe Sequence
atgttgatgctcttgcagaaggaac

SEQ ID NO: 132339 - DNA, 25 bp, Probe Sequence
atgattcactcattgtaagataaca

SEQ ID NO: 132340 - DNA, 25 bp, Probe Sequence
atgtgttctcattctatgagttccc

SEQ ID NO: 132341 - DNA, 25 bp, Probe Sequence
atgtcttttgataagccttctgctc

SEQ ID NO: 132342 - DNA, 25 bp, Probe Sequence
atgtcttttgataagccttctgctc

SEQ ID NO: 132343 - DNA, 25 bp, Probe Sequence
atgttgattgtactcatgctgttcc

SEQ ID NO: 132344 - DNA, 25 bp, Probe Sequence
atgattgcatagtatctcactgtat

SEQ ID NO: 132345 - DNA, 25 bp, Probe Sequence
atgttgccagtgtctgtctgcagat

SEQ ID NO: 132346 - DNA, 25 bp, Probe Sequence
atgtatcaggcatctgtgctgaatg

SEQ ID NO: 132347 - DNA, 25 bp, Probe Sequence
atgatggtggcatctggcaatcaat

SEQ ID NO: 132348 - DNA, 25 bp, Probe Sequence
atgatagtctgcgcggcatatgcac

SEQ ID NO: 132349 - DNA, 25 bp, Probe Sequence
atgatcgtagcagtcagcgcagtga

SEQ ID NO: 132350 - DNA, 25 bp, Probe Sequence
atgtcaataaacaacagctgaagca

SEQ ID NO: 132351 - DNA, 25 bp, Probe Sequence
atgtcctgcagatctacgctgaggc

SEQ ID NO: 132352 - DNA, 25 bp, Probe Sequence
atgtctgtgtgtcatgattgcggcc

SEQ ID NO: 132353 - DNA, 25 bp, Probe Sequence
atgtctgggatgcagcttgggcact

SEQ ID NO: 132354 - DNA, 25 bp, Probe Sequence
atgtcctggtttgcatggccagctt

SEQ ID NO: 132355 - DNA, 25 bp, Probe Sequence
atgtctcagatgcattccataaggc

SEQ ID NO: 132356 - DNA, 25 bp, Probe Sequence
atgatgccaacctcttacgtgcgcc

SEQ ID NO: 132357 - DNA, 25 bp, Probe Sequence
atgatgcctactttcttcaagacct

SEQ ID NO: 132358 - DNA, 25 bp, Probe Sequence
atgatgccatccgagttactcatga

SEQ ID NO: 132359 - DNA, 25 bp, Probe Sequence
atgaggcacctactgagatccaggt

SEQ ID NO: 132360 - DNA, 25 bp, Probe Sequence
atgattatcacatttgagaccctgt

SEQ ID NO: 132361 - DNA, 25 bp, Probe Sequence
atgatttactcattatcgccttttg

SEQ ID NO: 132362 - DNA, 25 bp, Probe Sequence
atgttgcctcgattttgcacttttt

SEQ ID NO: 132363 - DNA, 25 bp, Probe Sequence
atgttttccatgtttccttatgcat

SEQ ID NO: 132364 - DNA, 25 bp, Probe Sequence
atgtttctcacgcttacttgatcta

SEQ ID NO: 132365 - DNA, 25 bp, Probe Sequence
atgtttctcaagctcgtcaagaaaa

SEQ ID NO: 132366 - DNA, 25 bp, Probe Sequence
atgttcccaaccatcatcaaaaatg

SEQ ID NO: 132367 - DNA, 25 bp, Probe Sequence
atgttctccaactgctataagtaca

SEQ ID NO: 132368 - DNA, 25 bp, Probe Sequence
atgtccccaacatcaaaaggaatga

SEQ ID NO: 132369 - DNA, 25 bp, Probe Sequence
atgtaaccaacataatccaagcgga

SEQ ID NO: 132370 - DNA, 25 bp, Probe Sequence
atgtataccgtatctatctacccga

SEQ ID NO: 132371 - DNA, 25 bp, Probe Sequence
atgttaagtgtctttatcaccccca

SEQ ID NO: 132372 - DNA, 25 bp, Probe Sequence
atgtcttagttgctgttccctcagc

SEQ ID NO: 132373 - DNA, 25 bp, Probe Sequence
atgttccatttgaaactcacctcag

SEQ ID NO: 132374 - DNA, 25 bp, Probe Sequence
atgtcttctacgaacagtacctgac

SEQ ID NO: 132375 - DNA, 25 bp, Probe Sequence
atgtttttcaaagatatcactgtcc

SEQ ID NO: 132376 - DNA, 25 bp, Probe Sequence
atgttctttgactataattatggac

SEQ ID NO: 132377 - DNA, 25 bp, Probe Sequence
atgttttgctatgtaataatgggaa

SEQ ID NO: 132378 - DNA, 25 bp, Probe Sequence
atgtcttggctaaatagtcaagggg

SEQ ID NO: 132379 - DNA, 25 bp, Probe Sequence
atgtctgggcttaatactgaggtga

SEQ ID NO: 132380 - DNA, 25 bp, Probe Sequence
atgtagggctgcagtggtggccaga

SEQ ID NO: 132381 - DNA, 25 bp, Probe Sequence
atgtcagggtgattctggtggccct

SEQ ID NO: 132382 - DNA, 25 bp, Probe Sequence
atgtacaaggtaagcgtggcgttct

SEQ ID NO: 132383 - DNA, 25 bp, Probe Sequence
atgtaagagagtactggttccttca

SEQ ID NO: 132384 - DNA, 25 bp, Probe Sequence
atgtaagagagtactggttccttca

SEQ ID NO: 132385 - DNA, 25 bp, Probe Sequence
atgtaaataaccccattctttgctt

SEQ ID NO: 132386 - DNA, 25 bp, Probe Sequence
atgtgaaataaaccctgtttgcacc

SEQ ID NO: 132387 - DNA, 25 bp, Probe Sequence
atgtagaacaaacggctgtctgcca

SEQ ID NO: 132388 - DNA, 25 bp, Probe Sequence
atgataatctcaagacaccttccga

SEQ ID NO: 132389 - DNA, 25 bp, Probe Sequence
atgataatctcaagacacctcccga

SEQ ID NO: 132390 - DNA, 25 bp, Probe Sequence
atgataatatcaagacacctgccga

SEQ ID NO: 132391 - DNA, 25 bp, Probe Sequence
atgatttatctccacactagcagag

SEQ ID NO: 132392 - DNA, 25 bp, Probe Sequence
atgatttgattaaacctagacgcat

SEQ ID NO: 132393 - DNA, 25 bp, Probe Sequence
atgatcttattaaattacatccaga

SEQ ID NO: 132394 - DNA, 25 bp, Probe Sequence
atgtgtaattaacttagctacagag

SEQ ID NO: 132395 - DNA, 25 bp, Probe Sequence
atgttattctgttgtatcagataca

SEQ ID NO: 132396 - DNA, 25 bp, Probe Sequence
atgttattatgatgttcagtccaag

SEQ ID NO: 132397 - DNA, 25 bp, Probe Sequence
atgtacttagtatctactcccaatt

SEQ ID NO: 132398 - DNA, 25 bp, Probe Sequence
atgggtttgcttttacccacagcat

SEQ ID NO: 132399 - DNA, 25 bp, Probe Sequence
atgtcagtttgtcactcacccaaac

SEQ ID NO: 132400 - DNA, 25 bp, Probe Sequence
atgtcagtgttatatcctccaggaa

SEQ ID NO: 132401 - DNA, 25 bp, Probe Sequence
atgtcttttatctatcccagagtca

SEQ ID NO: 132402 - DNA, 25 bp, Probe Sequence
atgtctggcacattgcaatcctcaa

SEQ ID NO: 132403 - DNA, 25 bp, Probe Sequence
atgttgcccatagtacgccataggg

SEQ ID NO: 132404 - DNA, 25 bp, Probe Sequence
atgtggccgtggtacggatgaagcg

SEQ ID NO: 132405 - DNA, 25 bp, Probe Sequence
atggcagcttctacatacgaattaa

SEQ ID NO: 132406 - DNA, 25 bp, Probe Sequence
atggcagcttctacatacgaattaa

SEQ ID NO: 132407 - DNA, 25 bp, Probe Sequence
atgtcattgttccattaccttgaat

SEQ ID NO: 132408 - DNA, 25 bp, Probe Sequence
atgatctgtgtgaccttgaacttca

SEQ ID NO: 132409 - DNA, 25 bp, Probe Sequence
atgttgctgtgtggtaatactctga

SEQ ID NO: 132410 - DNA, 25 bp, Probe Sequence
atgttgttgattttctatctctgtg

SEQ ID NO: 132411 - DNA, 25 bp, Probe Sequence
atgttttgacttcctgactattaaa

SEQ ID NO: 132412 - DNA, 25 bp, Probe Sequence
atgttcagtgaaatccttttgttaa

SEQ ID NO: 132413 - DNA, 25 bp, Probe Sequence
atgtccattgaaccctgcttcaaaa

SEQ ID NO: 132414 - DNA, 25 bp, Probe Sequence
atgtttgtgataaccgtggcgaaag

SEQ ID NO: 132415 - DNA, 25 bp, Probe Sequence
atgtttttagagtaggaccataaga

SEQ ID NO: 132416 - DNA, 25 bp, Probe Sequence
atgtttagaaggtctggagctcaaa

SEQ ID NO: 132417 - DNA, 25 bp, Probe Sequence
atgtctaagaggctgcaggtcatta

SEQ ID NO: 132418 - DNA, 25 bp, Probe Sequence
atgattagaaggcaagtttctagct

SEQ ID NO: 132419 - DNA, 25 bp, Probe Sequence
atgtcctaggggtagtgttctcagt

SEQ ID NO: 132420 - DNA, 25 bp, Probe Sequence
atgtcctgtggggaagccatttcag

SEQ ID NO: 132421 - DNA, 25 bp, Probe Sequence
atgttgcgtgggctagacttatact

SEQ ID NO: 132422 - DNA, 25 bp, Probe Sequence
atgttggtcaggctggcctcgaact

SEQ ID NO: 132423 - DNA, 25 bp, Probe Sequence
atgttggtcaggctggtctcgaact

SEQ ID NO: 132424 - DNA, 25 bp, Probe Sequence
atgttggtcaggctggtctcgaact

SEQ ID NO: 132425 - DNA, 25 bp, Probe Sequence
atgttggccaggctggtctccaact

SEQ ID NO: 132426 - DNA, 25 bp, Probe Sequence
atgattggcaaatgttgtctctcat

SEQ ID NO: 132427 - DNA, 25 bp, Probe Sequence
atgttccatatatgttataccttgt

SEQ ID NO: 132428 - DNA, 25 bp, Probe Sequence
atgttcacattctttctaaccatgg

SEQ ID NO: 132429 - DNA, 25 bp, Probe Sequence
atgattccttgttcatatccactct

SEQ ID NO: 132430 - DNA, 25 bp, Probe Sequence
atgttcctgccttcaatcaatattt

SEQ ID NO: 132431 - DNA, 25 bp, Probe Sequence
atgttatgctcagaggcaaatattt

SEQ ID NO: 132432 - DNA, 25 bp, Probe Sequence
atgtttccagtggccagtatgtctt

SEQ ID NO: 132433 - DNA, 25 bp, Probe Sequence
atgtttccaatgtacctgatttttc

SEQ ID NO: 132434 - DNA, 25 bp, Probe Sequence
atgttccagattgaccatgaataaa

SEQ ID NO: 132435 - DNA, 25 bp, Probe Sequence
atggtccacctggcatagttaaaac

SEQ ID NO: 132436 - DNA, 25 bp, Probe Sequence
atgtgtcccatcgttaattcaccag

SEQ ID NO: 132437 - DNA, 25 bp, Probe Sequence
atgtgttccaggtttttcatcgact

SEQ ID NO: 132438 - DNA, 25 bp, Probe Sequence
atgtttctcgtgctttgtgatctgt

SEQ ID NO: 132439 - DNA, 25 bp, Probe Sequence
atgtaggcttagtttgtgtgttgtc

SEQ ID NO: 132440 - DNA, 25 bp, Probe Sequence
atgatacgtattttgttatgtctga

SEQ ID NO: 132441 - DNA, 25 bp, Probe Sequence
atgataagacattttgtttttactg

SEQ ID NO: 132442 - DNA, 25 bp, Probe Sequence
atgtagcagacattggttttgattg

SEQ ID NO: 132443 - DNA, 25 bp, Probe Sequence
atgtatctgaaacctcatcttggag

SEQ ID NO: 132444 - DNA, 25 bp, Probe Sequence
atgtttggagactgctcgggaagct

SEQ ID NO: 132445 - DNA, 25 bp, Probe Sequence
atgtttgctacctcacaacaaccat

SEQ ID NO: 132446 - DNA, 25 bp, Probe Sequence
atgtaatctactaccaaaaatggat

SEQ ID NO: 132447 - DNA, 25 bp, Probe Sequence
atgtctttaggtggaaattctggat

SEQ ID NO: 132448 - DNA, 25 bp, Probe Sequence
atgttttacttctaatttcttgtat

SEQ ID NO: 132449 - DNA, 25 bp, Probe Sequence
atgttttatttgtaagattctataa

SEQ ID NO: 132450 - DNA, 25 bp, Probe Sequence
atgtcgcataagctaaagatctaaa

SEQ ID NO: 132451 - DNA, 25 bp, Probe Sequence
atgtgaaaactggagaagatcttag

SEQ ID NO: 132452 - DNA, 25 bp, Probe Sequence
atgtcgtatccggaggagagctata

SEQ ID NO: 132453 - DNA, 25 bp, Probe Sequence
atgtcgtcaccgtggatgagctgcg

SEQ ID NO: 132454 - DNA, 25 bp, Probe Sequence
atgtggtcccagaataagcagcagc

SEQ ID NO: 132455 - DNA, 25 bp, Probe Sequence
atgttgatcgcgtttttggcagtac

SEQ ID NO: 132456 - DNA, 25 bp, Probe Sequence
atgatatggtgttttttagatggaa

SEQ ID NO: 132457 - DNA, 25 bp, Probe Sequence
atgattagtgtactgtttgaaacaa

SEQ ID NO: 132458 - DNA, 25 bp, Probe Sequence
atgtcaaatgcatcctctagaaaaa

SEQ ID NO: 132459 - DNA, 25 bp, Probe Sequence
atgtcaagagcatcactgttgttat

SEQ ID NO: 132460 - DNA, 25 bp, Probe Sequence
atgtttggcaacctttgtgttacag

SEQ ID NO: 132461 - DNA, 25 bp, Probe Sequence
atgtttatcacagtgctgtttgtaa

SEQ ID NO: 132462 - DNA, 25 bp, Probe Sequence
atgttgctctaagtgctgtttgtta

SEQ ID NO: 132463 - DNA, 25 bp, Probe Sequence
atgtctttattgccatgccatttta

SEQ ID NO: 132464 - DNA, 25 bp, Probe Sequence
atgtcattctgtgggcagcttttct

SEQ ID NO: 132465 - DNA, 25 bp, Probe Sequence
atgttttagcaggacttttctagga

SEQ ID NO: 132466 - DNA, 25 bp, Probe Sequence
atgttggaatgatagctttttggaa

SEQ ID NO: 132467 - DNA, 25 bp, Probe Sequence
atgttggagatggtggtctctttga

SEQ ID NO: 132468 - DNA, 25 bp, Probe Sequence
atgtattgagatttggcctctgaag

SEQ ID NO: 132469 - DNA, 25 bp, Probe Sequence
atgtcactgtgaatctggcttcagg

SEQ ID NO: 132470 - DNA, 25 bp, Probe Sequence
atgtagccgatttgcagctgtcatg

SEQ ID NO: 132471 - DNA, 25 bp, Probe Sequence
atgtaatcgctcaagcctgatctgg

SEQ ID NO: 132472 - DNA, 25 bp, Probe Sequence
atgataatcttgcacttgactgagt

SEQ ID NO: 132473 - DNA, 25 bp, Probe Sequence
atgtccatcttgcccgtattgggaa

SEQ ID NO: 132474 - DNA, 25 bp, Probe Sequence
atgtgacatctgaagctaggatttg

SEQ ID NO: 132475 - DNA, 25 bp, Probe Sequence
atgtgatatgatgctcggctgattt

SEQ ID NO: 132476 - DNA, 25 bp, Probe Sequence
atgtgatatgatgctcggctgattt

SEQ ID NO: 132477 - DNA, 25 bp, Probe Sequence
atgtcatatcagctcggtaatttta

SEQ ID NO: 132478 - DNA, 25 bp, Probe Sequence
atgtgcaaaatctgttatagcttta

SEQ ID NO: 132479 - DNA, 25 bp, Probe Sequence
atgtatcaaatctacgtaaactata

SEQ ID NO: 132480 - DNA, 25 bp, Probe Sequence
atgtcttaatcatagtctaccatca

SEQ ID NO: 132481 - DNA, 25 bp, Probe Sequence
atgtttgcacgctggcctatatatc

SEQ ID NO: 132482 - DNA, 25 bp, Probe Sequence
atgtactcctcatggcttggatctc

SEQ ID NO: 132483 - DNA, 25 bp, Probe Sequence
atgtagtccctcaacttggctaaag

SEQ ID NO: 132484 - DNA, 25 bp, Probe Sequence
atgtaccccacttactggtatcacg

SEQ ID NO: 132485 - DNA, 25 bp, Probe Sequence
atgtgatcatcatctcataactgag

SEQ ID NO: 132486 - DNA, 25 bp, Probe Sequence
atgtattcattggtcaagctgaact

SEQ ID NO: 132487 - DNA, 25 bp, Probe Sequence
atgttgtcatttgaagatcacacct

SEQ ID NO: 132488 - DNA, 25 bp, Probe Sequence
atgttcttctatcaaataccttatt

SEQ ID NO: 132489 - DNA, 25 bp, Probe Sequence
atgtatttcttcccaaacaattcat

SEQ ID NO: 132490 - DNA, 25 bp, Probe Sequence
atgtataatttcacagataatttac

SEQ ID NO: 132491 - DNA, 25 bp, Probe Sequence
atgtactatttgatgcgttttcttt

SEQ ID NO: 132492 - DNA, 25 bp, Probe Sequence
atgtactccttttgtgttttatctt

SEQ ID NO: 132493 - DNA, 25 bp, Probe Sequence
atgatacccaacagtttatttttat

SEQ ID NO: 132494 - DNA, 25 bp, Probe Sequence
agtaaccagactattttgtattttg

SEQ ID NO: 132495 - DNA, 25 bp, Probe Sequence
atgtgaactcaattaagtttttatt

SEQ ID NO: 132496 - DNA, 25 bp, Probe Sequence
atgtgaccttaatgagatttttatg

SEQ ID NO: 132497 - DNA, 25 bp, Probe Sequence
aggccagcttgaaggaattcctctt

SEQ ID NO: 132498 - DNA, 25 bp, Probe Sequence
aggccctgcaagatgaatacctcat

SEQ ID NO: 132499 - DNA, 25 bp, Probe Sequence
atgtgctgggcaagtcaaaactata

SEQ ID NO: 132500 - DNA, 25 bp, Probe Sequence
atgtcttgatctataaaatctctga

SEQ ID NO: 132501 - DNA, 25 bp, Probe Sequence
atgttgtctacagtgcaaaatccat

SEQ ID NO: 132502 - DNA, 25 bp, Probe Sequence
atgttgtctacaatgcatctaataa

SEQ ID NO: 132503 - DNA, 25 bp, Probe Sequence
atgtttctatcaactatatcatgac

SEQ ID NO: 132504 - DNA, 25 bp, Probe Sequence
atgtttcatgacgactattcttgca

SEQ ID NO: 132505 - DNA, 25 bp, Probe Sequence
atgttatcagcaggccatgcatcct

SEQ ID NO: 132506 - DNA, 25 bp, Probe Sequence
ttcttgctaaacgagcagagcttca

SEQ ID NO: 132507 - DNA, 25 bp, Probe Sequence
atgattcaagacggcctcatcttct

SEQ ID NO: 132508 - DNA, 25 bp, Probe Sequence
atggtcaagatcggggtcttctcca

SEQ ID NO: 132509 - DNA, 25 bp, Probe Sequence
atgtgtcaacacgatggggagctac

SEQ ID NO: 132510 - DNA, 25 bp, Probe Sequence
atgtggcccacgtgggtgtgaagct

SEQ ID NO: 132511 - DNA, 25 bp, Probe Sequence
atgtgtggtcggtgggtgtgatctt

SEQ ID NO: 132512 - DNA, 25 bp, Probe Sequence
atgtatctttggcgtgtgtgctact

SEQ ID NO: 132513 - DNA, 25 bp, Probe Sequence
atgtctctttggccggagccagatc

SEQ ID NO: 132514 - DNA, 25 bp, Probe Sequence
atgattatctaccgggacctcatca

SEQ ID NO: 132515 - DNA, 25 bp, Probe Sequence
atgattacaccacgggactctagcc

SEQ ID NO: 132516 - DNA, 25 bp, Probe Sequence
atgtttaccagagagcagttagccg

SEQ ID NO: 132517 - DNA, 25 bp, Probe Sequence
atgttgctaccatttaggatctatg

SEQ ID NO: 132518 - DNA, 25 bp, Probe Sequence
atgattcataccttattccctataa

SEQ ID NO: 132519 - DNA, 25 bp, Probe Sequence
atgattattccttgtctgtacttta

SEQ ID NO: 132520 - DNA, 25 bp, Probe Sequence
atgattatcccaactcttattatta

SEQ ID NO: 132521 - DNA, 25 bp, Probe Sequence
atgttacccagcatgctgttggcat

SEQ ID NO: 132522 - DNA, 25 bp, Probe Sequence
atgttacccagcatgctgttggcat

SEQ ID NO: 132523 - DNA, 25 bp, Probe Sequence
atgtaaccctgcatgacttgatcat

SEQ ID NO: 132524 - DNA, 25 bp, Probe Sequence
atgtatgacatcctgggtcctgatc

SEQ ID NO: 132525 - DNA, 25 bp, Probe Sequence
atgtcatcaatggcggttctcatgc

SEQ ID NO: 132526 - DNA, 25 bp, Probe Sequence
atgtctaattgcatattctcttcag

SEQ ID NO: 132527 - DNA, 25 bp, Probe Sequence
atgtcacctcctattagcatggcag

SEQ ID NO: 132528 - DNA, 25 bp, Probe Sequence
atgtccctgtcttgtgggagatgcg

SEQ ID NO: 132529 - DNA, 25 bp, Probe Sequence
atgtggccattttgatggaaatcca

SEQ ID NO: 132530 - DNA, 25 bp, Probe Sequence
atgtcccacatgtggaagaaccttt

SEQ ID NO: 132531 - DNA, 25 bp, Probe Sequence
atgtggcgccaagaacgaacctgtt

SEQ ID NO: 132532 - DNA, 25 bp, Probe Sequence
atgttgcctagacaagggttcttta

SEQ ID NO: 132533 - DNA, 25 bp, Probe Sequence
atgttaattgcccaattgagtgctt

SEQ ID NO: 132534 - DNA, 25 bp, Probe Sequence
agtctcagacggcctactgagctct

SEQ ID NO: 132535 - DNA, 25 bp, Probe Sequence
atgttcagcctgagctagtgagcta

SEQ ID NO: 132536 - DNA, 25 bp, Probe Sequence
atgtctaggctaagtatgcacctaa

SEQ ID NO: 132537 - DNA, 25 bp, Probe Sequence
atgtctggtgctttctatcacctct

SEQ ID NO: 132538 - DNA, 25 bp, Probe Sequence
atgtcagcttagaatcttcccctaa

SEQ ID NO: 132539 - DNA, 25 bp, Probe Sequence
atgtcctatgacaataatcctttta

SEQ ID NO: 132540 - DNA, 25 bp, Probe Sequence
atgtccctacaaacccatgattgtc

SEQ ID NO: 132541 - DNA, 25 bp, Probe Sequence
atgtccctacaaacccatgattgtc

SEQ ID NO: 132542 - DNA, 25 bp, Probe Sequence
atgtccccaaaaagccgtgagtcag

SEQ ID NO: 132543 - DNA, 25 bp, Probe Sequence
atgtccccaaaaagccgtgagtcag

SEQ ID NO: 132544 - DNA, 25 bp, Probe Sequence
atgtccccaaaaagccgtgagtcag

SEQ ID NO: 132545 - DNA, 25 bp, Probe Sequence
atggccgctaaatagctcacgttag

SEQ ID NO: 132546 - DNA, 25 bp, Probe Sequence
aggctctggaaaaggtccggaagca

SEQ ID NO: 132547 - DNA, 25 bp, Probe Sequence
aggcccgcaacaagttcgaggaggc

SEQ ID NO: 132548 - DNA, 25 bp, Probe Sequence
agagcctagcccaggcctaagggct

SEQ ID NO: 132549 - DNA, 25 bp, Probe Sequence
aggcctcacacccagagggtagggc

SEQ ID NO: 132550 - DNA, 25 bp, Probe Sequence
aggcttcaagaggagggcactaggg

SEQ ID NO: 132551 - DNA, 25 bp, Probe Sequence
atgtcctaaggcccaggccagggca

SEQ ID NO: 132552 - DNA, 25 bp, Probe Sequence
atgtctatcgaggctcgggcagcag

SEQ ID NO: 132553 - DNA, 25 bp, Probe Sequence
atgtgcaacagagctcggagaagtc

SEQ ID NO: 132554 - DNA, 25 bp, Probe Sequence
atgtaagctggactcctgggactgc

SEQ ID NO: 132555 - DNA, 25 bp, Probe Sequence
atgtaattgaggccctgcgcagggc

SEQ ID NO: 132556 - DNA, 25 bp, Probe Sequence
atgttcttgggtgctcagagtttca

SEQ ID NO: 132557 - DNA, 25 bp, Probe Sequence
atgtttatgggatttcaaggttggg

SEQ ID NO: 132558 - DNA, 25 bp, Probe Sequence
atgtctttgttgtattaatggggaa

SEQ ID NO: 132559 - DNA, 25 bp, Probe Sequence
atgtcttgtttggctggaaggtgtg

SEQ ID NO: 132560 - DNA, 25 bp, Probe Sequence
atgttgtgtgtgtgcgtgagtggtg

SEQ ID NO: 132561 - DNA, 25 bp, Probe Sequence
atgttgctgctccggcagacagagg

SEQ ID NO: 132562 - DNA, 25 bp, Probe Sequence
atgtttgtcagttcatgccgagatg

SEQ ID NO: 132563 - DNA, 25 bp, Probe Sequence
atgttgtaccatttgcactgtgagc

SEQ ID NO: 132564 - DNA, 25 bp, Probe Sequence
atgtttaacatccagcactgtaaga

SEQ ID NO: 132565 - DNA, 25 bp, Probe Sequence
atgttataaatgtcactctgcccga

SEQ ID NO: 132566 - DNA, 25 bp, Probe Sequence
atgtattacattaccattgccactg

SEQ ID NO: 132567 - DNA, 25 bp, Probe Sequence
atgtttacattgacacagtgtgcca

SEQ ID NO: 132568 - DNA, 25 bp, Probe Sequence
atgttgtcactaattaattgccatt

SEQ ID NO: 132569 - DNA, 25 bp, Probe Sequence
atgttatctgttacaaattgctatt

SEQ ID NO: 132570 - DNA, 25 bp, Probe Sequence
atgttgctttccaaagatgtatgtt

SEQ ID NO: 132571 - DNA, 25 bp, Probe Sequence
atgtaggtgtaaacgctggtgtctg

SEQ ID NO: 132572 - DNA, 25 bp, Probe Sequence
atgtgaggggcaaggctgccccctg

SEQ ID NO: 132573 - DNA, 25 bp, Probe Sequence
atgtgaggggcaaggctgccccctg

SEQ ID NO: 132574 - DNA, 25 bp, Probe Sequence
atgtgcagaggatacgcatggaacc

SEQ ID NO: 132575 - DNA, 25 bp, Probe Sequence
atgtaggcagactcctaaaaccagg

SEQ ID NO: 132576 - DNA, 25 bp, Probe Sequence
atgtgggaactatttaacagatagg

SEQ ID NO: 132577 - DNA, 25 bp, Probe Sequence
atgtggtataaatgcccatcagata

SEQ ID NO: 132578 - DNA, 25 bp, Probe Sequence
aggcagtaaatatgcagcagatcgt

SEQ ID NO: 132579 - DNA, 25 bp, Probe Sequence
atgtcacttaatctctcagatttct

SEQ ID NO: 132580 - DNA, 25 bp, Probe Sequence
atgttttcattgtttcagttatcta

SEQ ID NO: 132581 - DNA, 25 bp, Probe Sequence
atgttttcttatttcagctctggat

SEQ ID NO: 132582 - DNA, 25 bp, Probe Sequence
atgttgtacatattatcatcctata

SEQ ID NO: 132583 - DNA, 25 bp, Probe Sequence
atgtctgtatcttatattcaattgc

SEQ ID NO: 132584 - DNA, 25 bp, Probe Sequence
atgtgggacgtttctgcatttggac

SEQ ID NO: 132585 - DNA, 25 bp, Probe Sequence
atgttcggcttttcatgtatgtaga

SEQ ID NO: 132586 - DNA, 25 bp, Probe Sequence
atgttcgcgattatcttctatatct

SEQ ID NO: 132587 - DNA, 25 bp, Probe Sequence
atgtttcagtatatcattttcatac

SEQ ID NO: 132588 - DNA, 25 bp, Probe Sequence
atgttagcaataattactacttaca

SEQ ID NO: 132589 - DNA, 25 bp, Probe Sequence
atgttgacacattattactgctgtt

SEQ ID NO: 132590 - DNA, 25 bp, Probe Sequence
atgttgatctgcatatttctgtata

SEQ ID NO: 132591 - DNA, 25 bp, Probe Sequence
atgtgttcttaatttgcttttccct

SEQ ID NO: 132592 - DNA, 25 bp, Probe Sequence
agttagttgacctcttagttgcctc

SEQ ID NO: 132593 - DNA, 25 bp, Probe Sequence
atgttatttccctactctaattaca

SEQ ID NO: 132594 - DNA, 25 bp, Probe Sequence
atgtttttatcgtactctttggaga

SEQ ID NO: 132595 - DNA, 25 bp, Probe Sequence
atgtttttcattttctgttggggag

SEQ ID NO: 132596 - DNA, 25 bp, Probe Sequence
agtatcctaactgccggtggggaga

SEQ ID NO: 132597 - DNA, 25 bp, Probe Sequence
agttccgatacagcacaatggtggt

SEQ ID NO: 132598 - DNA, 25 bp, Probe Sequence
atgtctgacaaacccgatatggctg

SEQ ID NO: 132599 - DNA, 25 bp, Probe Sequence
atgtgctgaaaatccgaagtgccgc

SEQ ID NO: 132600 - DNA, 25 bp, Probe Sequence
atgtgcaaataatgtggacatccgc

SEQ ID NO: 132601 - DNA, 25 bp, Probe Sequence
atgtgacagcaaaggggcctacctg

SEQ ID NO: 132602 - DNA, 25 bp, Probe Sequence
atgtaatatgatcaggacccacctc

SEQ ID NO: 132603 - DNA, 25 bp, Probe Sequence
atgtaaataacaccatctgccacct

SEQ ID NO: 132604 - DNA, 25 bp, Probe Sequence
atgtgtgaaaacattccctcctttg

SEQ ID NO: 132605 - DNA, 25 bp, Probe Sequence
atgtgtgaaaacattccctcctttg

SEQ ID NO: 132606 - DNA, 25 bp, Probe Sequence
atggtgaaatcagtagtctcgctcc

SEQ ID NO: 132607 - DNA, 25 bp, Probe Sequence
atgtgtcaaccaccatttcagctat

SEQ ID NO: 132608 - DNA, 25 bp, Probe Sequence
atgttaacacattattcactgcttt

SEQ ID NO: 132609 - DNA, 25 bp, Probe Sequence
atgttatagccacaacattctcttg

SEQ ID NO: 132610 - DNA, 25 bp, Probe Sequence
atgtattagtaggtagttcctgttt

SEQ ID NO: 132611 - DNA, 25 bp, Probe Sequence
atgttaagataagtcagcttccctt

SEQ ID NO: 132612 - DNA, 25 bp, Probe Sequence
atgttaggaacagtagtattcaata

SEQ ID NO: 132613 - DNA, 25 bp, Probe Sequence
atgtaaggatcacctagtcttcact

SEQ ID NO: 132614 - DNA, 25 bp, Probe Sequence
atgtaatggtgactcttttctgatc

SEQ ID NO: 132615 - DNA, 25 bp, Probe Sequence
atgtacaaatgttcttattatcatc

SEQ ID NO: 132616 - DNA, 25 bp, Probe Sequence
atgtaggcacttttattttcattgt

SEQ ID NO: 132617 - DNA, 25 bp, Probe Sequence
atgttctaatactttgtttattgta

SEQ ID NO: 132618 - DNA, 25 bp, Probe Sequence
atgtattccaacctttaactctgta

SEQ ID NO: 132619 - DNA, 25 bp, Probe Sequence
atgtttactgacacttacatacttg

SEQ ID NO: 132620 - DNA, 25 bp, Probe Sequence
atgttatcctcactactttatttct

SEQ ID NO: 132621 - DNA, 25 bp, Probe Sequence
atgttataccttgtatgatagttat

SEQ ID NO: 132622 - DNA, 25 bp, Probe Sequence
atgttaacttcacttctttgtatat

SEQ ID NO: 132623 - DNA, 25 bp, Probe Sequence
atgtctatcttatcttttttattta

SEQ ID NO: 132624 - DNA, 25 bp, Probe Sequence
atgttactaacactcttattatttt

SEQ ID NO: 132625 - DNA, 25 bp, Probe Sequence
atgtttctgaactttacttactaat

SEQ ID NO: 132626 - DNA, 25 bp, Probe Sequence
atgttactgaactattgactgaaag

SEQ ID NO: 132627 - DNA, 25 bp, Probe Sequence
atgttactgatcatgcattgttgag

SEQ ID NO: 132628 - DNA, 25 bp, Probe Sequence
atggagactgagctgcatggtagtt

SEQ ID NO: 132629 - DNA, 25 bp, Probe Sequence
atgggacatgggacattgctccgct

SEQ ID NO: 132630 - DNA, 25 bp, Probe Sequence
atgtgtgaattccaataccggctat

SEQ ID NO: 132631 - DNA, 25 bp, Probe Sequence
atgtcagactgtaaaaccttgtgtg

SEQ ID NO: 132632 - DNA, 25 bp, Probe Sequence
atgtgatagtctcagaaacatttgt

SEQ ID NO: 132633 - DNA, 25 bp, Probe Sequence
atgtatggatctatgacccagttca

SEQ ID NO: 132634 - DNA, 25 bp, Probe Sequence
atgtatgcgagtgtactccgctggc

SEQ ID NO: 132635 - DNA, 25 bp, Probe Sequence
atgtacgttgctatccaggctgtgc

SEQ ID NO: 132636 - DNA, 25 bp, Probe Sequence
atgtcacttgtgtaccgagagcttg

SEQ ID NO: 132637 - DNA, 25 bp, Probe Sequence
atgtcactattttcactagggctga

SEQ ID NO: 132638 - DNA, 25 bp, Probe Sequence
atgtccgacctgtgatcgtggtaca

SEQ ID NO: 132639 - DNA, 25 bp, Probe Sequence
atgtcacgagctcgttagctgcgtt

SEQ ID NO: 132640 - DNA, 25 bp, Probe Sequence
atgtcactactggggaggtgttcct

SEQ ID NO: 132641 - DNA, 25 bp, Probe Sequence
atgtattaccagcagggtgttttta

SEQ ID NO: 132642 - DNA, 25 bp, Probe Sequence
atgtttaccagtttgatgatttctt

SEQ ID NO: 132643 - DNA, 25 bp, Probe Sequence
atgtttgaccacattagtgtcttta

SEQ ID NO: 132644 - DNA, 25 bp, Probe Sequence
atgtcactacggattaattatgtta

SEQ ID NO: 132645 - DNA, 25 bp, Probe Sequence
atgtacctagtttataaatgtttat

SEQ ID NO: 132646 - DNA, 25 bp, Probe Sequence
atgtaggtagttaataattctcttt

SEQ ID NO: 132647 - DNA, 25 bp, Probe Sequence
atgtaggtatgaagatgatttttct

SEQ ID NO: 132648 - DNA, 25 bp, Probe Sequence
atgtatgcctatatgtgtattgtat

SEQ ID NO: 132649 - DNA, 25 bp, Probe Sequence
atgtctcccttttgcagagctgtat

SEQ ID NO: 132650 - DNA, 25 bp, Probe Sequence
atgtcccctgccatgcagagcagga

SEQ ID NO: 132651 - DNA, 25 bp, Probe Sequence
atgtgccacctgactttcagatggg

SEQ ID NO: 132652 - DNA, 25 bp, Probe Sequence
atgtcctcgtacttgccatgatgag

SEQ ID NO: 132653 - DNA, 25 bp, Probe Sequence
atgtctgtcttatcatgcaatggaa

SEQ ID NO: 132654 - DNA, 25 bp, Probe Sequence
atgtttctggcatttgaagtcaaag

SEQ ID NO: 132655 - DNA, 25 bp, Probe Sequence
atgtatctggtatttaagtaatctg

SEQ ID NO: 132656 - DNA, 25 bp, Probe Sequence
atgttttgctcacttcatatgtaac

SEQ ID NO: 132657 - DNA, 25 bp, Probe Sequence
atgtatcttgttctctgatcataaa

SEQ ID NO: 132658 - DNA, 25 bp, Probe Sequence
atgtgtttgtctggtcagatctagt

SEQ ID NO: 132659 - DNA, 25 bp, Probe Sequence
atgttattgttgacatgaatctatg

SEQ ID NO: 132660 - DNA, 25 bp, Probe Sequence
atgtcattagtgcctcatgactgtg

SEQ ID NO: 132661 - DNA, 25 bp, Probe Sequence
atgtcactggtgcccaggtgtactt

SEQ ID NO: 132662 - DNA, 25 bp, Probe Sequence
atgtatgggtgggcacctccattct

SEQ ID NO: 132663 - DNA, 25 bp, Probe Sequence
atgtatggttgacccagcattattt

SEQ ID NO: 132664 - DNA, 25 bp, Probe Sequence
atgtatgcccatagcctagaatttt

SEQ ID NO: 132665 - DNA, 25 bp, Probe Sequence
atgtcatctcctattcattgctttt

SEQ ID NO: 132666 - DNA, 25 bp, Probe Sequence
atgtacagtctacttttgaactatt

SEQ ID NO: 132667 - DNA, 25 bp, Probe Sequence
atgtcaagccaattgtttgtactat

SEQ ID NO: 132668 - DNA, 25 bp, Probe Sequence
atgtaagccagatgacgtgatcctt

SEQ ID NO: 132669 - DNA, 25 bp, Probe Sequence
atgtcatacaatttacgagtgcctt

SEQ ID NO: 132670 - DNA, 25 bp, Probe Sequence
atgtctacaatgactctcgtgtctc

SEQ ID NO: 132671 - DNA, 25 bp, Probe Sequence
atgtgtgccaagttccagttcacgc

SEQ ID NO: 132672 - DNA, 25 bp, Probe Sequence
atgtgctgcttgaagagctcctatt

SEQ ID NO: 132673 - DNA, 25 bp, Probe Sequence
atgtttgtatatttctctttgtcag

SEQ ID NO: 132674 - DNA, 25 bp, Probe Sequence
atgtctcggcattaatccgtttatg

SEQ ID NO: 132675 - DNA, 25 bp, Probe Sequence
atgtctcgtctattatgttgttgat

SEQ ID NO: 132676 - DNA, 25 bp, Probe Sequence
atgtctcttgttgagttttatattt

SEQ ID NO: 132677 - DNA, 25 bp, Probe Sequence
atgtcctaagctggagttctgattt

SEQ ID NO: 132678 - DNA, 25 bp, Probe Sequence
atgtcccaggcattttctctgtatg

SEQ ID NO: 132679 - DNA, 25 bp, Probe Sequence
atgtcacacagttgttatttggaga

SEQ ID NO: 132680 - DNA, 25 bp, Probe Sequence
atgtaacatgtaggataatcttgga

SEQ ID NO: 132681 - DNA, 25 bp, Probe Sequence
atggataactagaataaccgatgca

SEQ ID NO: 132682 - DNA, 25 bp, Probe Sequence
aggatggacggaaacctcgacttgg

SEQ ID NO: 132683 - DNA, 25 bp, Probe Sequence
agtttgatctggcagacccgatcct

SEQ ID NO: 132684 - DNA, 25 bp, Probe Sequence
atgtctctagggcaacccaaactag

SEQ ID NO: 132685 - DNA, 25 bp, Probe Sequence
atgtctatacattggtcacctaaat

SEQ ID NO: 132686 - DNA, 25 bp, Probe Sequence
atgtcataattgttgtacctattga

SEQ ID NO: 132687 - DNA, 25 bp, Probe Sequence
atgtctacaatgtgttctccttatt

SEQ ID NO: 132688 - DNA, 25 bp, Probe Sequence
atgtctcacagaaagttctccgctc

SEQ ID NO: 132689 - DNA, 25 bp, Probe Sequence
atgtccgcatgaacttcttcggcct

SEQ ID NO: 132690 - DNA, 25 bp, Probe Sequence
atgtctctagcaatctatgtctggg

SEQ ID NO: 132691 - DNA, 25 bp, Probe Sequence
atgtcatctcaagtcaagtcactgg

SEQ ID NO: 132692 - DNA, 25 bp, Probe Sequence
atgtcaacaagttggatgccagtga

SEQ ID NO: 132693 - DNA, 25 bp, Probe Sequence
atgtacacaagatgcggaaatgatc

SEQ ID NO: 132694 - DNA, 25 bp, Probe Sequence
atgtccgaaaccctgaacaataact

SEQ ID NO: 132695 - DNA, 25 bp, Probe Sequence
atgtccgaaatctttgactctttca

SEQ ID NO: 132696 - DNA, 25 bp, Probe Sequence
atgtcacagaagactttaatccgtc

SEQ ID NO: 132697 - DNA, 25 bp, Probe Sequence
atgtctggacatacttcagaaccgt

SEQ ID NO: 132698 - DNA, 25 bp, Probe Sequence
atgtatgtgacaacagcccagaagt

SEQ ID NO: 132699 - DNA, 25 bp, Probe Sequence
atggatgatgacgacgtccccagct

SEQ ID NO: 132700 - DNA, 25 bp, Probe Sequence
atgtttcatcaaggcaccacatcct

SEQ ID NO: 132701 - DNA, 25 bp, Probe Sequence
atgtagccatcaactgcagcaagac

SEQ ID NO: 132702 - DNA, 25 bp, Probe Sequence
atgtcagcacatcccgaaagcagag

SEQ ID NO: 132703 - DNA, 25 bp, Probe Sequence
atgtcagtagtgccagaaagagaga

SEQ ID NO: 132704 - DNA, 25 bp, Probe Sequence
atgtaaagctgggatcagcagagag

SEQ ID NO: 132705 - DNA, 25 bp, Probe Sequence
agtaaactgagagtagagtgcttag

SEQ ID NO: 132706 - DNA, 25 bp, Probe Sequence
agtaagtgcgggtcataagcttgcg

SEQ ID NO: 132707 - DNA, 25 bp, Probe Sequence
atgtcaaatgcgtgacttcctgggc

SEQ ID NO: 132708 - DNA, 25 bp, Probe Sequence
atgtgacagccgttaagtccttgga

SEQ ID NO: 132709 - DNA, 25 bp, Probe Sequence
atgtgcacacctttgactacaactg

SEQ ID NO: 132710 - DNA, 25 bp, Probe Sequence
atgtgtgccctgcgactgtaatggc

SEQ ID NO: 132711 - DNA, 25 bp, Probe Sequence
agcgtaactgccacttaagcggcgg

SEQ ID NO: 132712 - DNA, 25 bp, Probe Sequence
atggtaggcttccagttaaagacgg

SEQ ID NO: 132713 - DNA, 25 bp, Probe Sequence
atgggagccctccagacataaggag

SEQ ID NO: 132714 - DNA, 25 bp, Probe Sequence
atgggtcttcccaacatatgagaaa

SEQ ID NO: 132715 - DNA, 25 bp, Probe Sequence
atgggactttcctactgcaagtaca

SEQ ID NO: 132716 - DNA, 25 bp, Probe Sequence
atggggcttaagtaccaatctctgc

SEQ ID NO: 132717 - DNA, 25 bp, Probe Sequence
atggggcaattgttagccttacatg

SEQ ID NO: 132718 - DNA, 25 bp, Probe Sequence
atgggctatagcaagtagctttaca

SEQ ID NO: 132719 - DNA, 25 bp, Probe Sequence
atgggtaagggctactatctcaagg

SEQ ID NO: 132720 - DNA, 25 bp, Probe Sequence
atgggtgcagaccgaggtatccacg

SEQ ID NO: 132721 - DNA, 25 bp, Probe Sequence
atgtggtctagccagaggttccagg

SEQ ID NO: 132722 - DNA, 25 bp, Probe Sequence
atgtgagagtaccaagcctgcaccg

SEQ ID NO: 132723 - DNA, 25 bp, Probe Sequence
atgtaagctgacctcagtctctctg

SEQ ID NO: 132724 - DNA, 25 bp, Probe Sequence
atgtcagactgattaatgtctactg

SEQ ID NO: 132725 - DNA, 25 bp, Probe Sequence
atgtatactatctttttatctgaag

SEQ ID NO: 132726 - DNA, 25 bp, Probe Sequence
atgtcaacaaatttttccagcaagc

SEQ ID NO: 132727 - DNA, 25 bp, Probe Sequence
atgtaatacgaattgtttcacaaac

SEQ ID NO: 132728 - DNA, 25 bp, Probe Sequence
atgtaaacagcagtcagtttctcag

SEQ ID NO: 132729 - DNA, 25 bp, Probe Sequence
atgtataagctactcacttatctga

SEQ ID NO: 132730 - DNA, 25 bp, Probe Sequence
atgtgatatatttcccctcttgaag

SEQ ID NO: 132731 - DNA, 25 bp, Probe Sequence
atgtatttcattccacttttgcata

SEQ ID NO: 132732 - DNA, 25 bp, Probe Sequence
atgtattacttatccatttctgaat

SEQ ID NO: 132733 - DNA, 25 bp, Probe Sequence
atgtttacttagagattgcttgaaa

SEQ ID NO: 132734 - DNA, 25 bp, Probe Sequence
atggttcaccgaagtgactctatga

SEQ ID NO: 132735 - DNA, 25 bp, Probe Sequence
atggatgccctaaaggactccgacc

SEQ ID NO: 132736 - DNA, 25 bp, Probe Sequence
atgtgatgcacaactcagagtaccc

SEQ ID NO: 132737 - DNA, 25 bp, Probe Sequence
atgtcaacatagtccagaacctgct

SEQ ID NO: 132738 - DNA, 25 bp, Probe Sequence
atgtatcatgatagtcacaaacgcc

SEQ ID NO: 132739 - DNA, 25 bp, Probe Sequence
atgtgtatgtcaacacagcacacct

SEQ ID NO: 132740 - DNA, 25 bp, Probe Sequence
atgtgttacatatggccaagtggaa

SEQ ID NO: 132741 - DNA, 25 bp, Probe Sequence
atgggtggataccgtcaagctggcc

SEQ ID NO: 132742 - DNA, 25 bp, Probe Sequence
atgggtggataccgtcaagctggcc

SEQ ID NO: 132743 - DNA, 25 bp, Probe Sequence
atgggtggataccgtcaagctggcc

SEQ ID NO: 132744 - DNA, 25 bp, Probe Sequence
agtggtgaagtcaggccagggcctt

SEQ ID NO: 132745 - DNA, 25 bp, Probe Sequence
atgtggtgtcagagggccagctgga

SEQ ID NO: 132746 - DNA, 25 bp, Probe Sequence
atgtcgctgtccaagagaaggctgt

SEQ ID NO: 132747 - DNA, 25 bp, Probe Sequence
atgtcgctgtccaagagaaggctgt

SEQ ID NO: 132748 - DNA, 25 bp, Probe Sequence
atgtcctgtctcatggaagcactgg

SEQ ID NO: 132749 - DNA, 25 bp, Probe Sequence
atgtactcacgctggatatcctgga

SEQ ID NO: 132750 - DNA, 25 bp, Probe Sequence
atgtctccacgaaggcgtcctggag

SEQ ID NO: 132751 - DNA, 25 bp, Probe Sequence
atgtctccaaagaacttgccaaaga

SEQ ID NO: 132752 - DNA, 25 bp, Probe Sequence
atgtccagacaagagctgagctcaa

SEQ ID NO: 132753 - DNA, 25 bp, Probe Sequence
atgtcaaggctctcactgggcaaat

SEQ ID NO: 132754 - DNA, 25 bp, Probe Sequence
atgtctgggttgacctaggccaatt

SEQ ID NO: 132755 - DNA, 25 bp, Probe Sequence
atgtggaagtatacctggcttttta

SEQ ID NO: 132756 - DNA, 25 bp, Probe Sequence
atggtggcacatttaatggcttttt

SEQ ID NO: 132757 - DNA, 25 bp, Probe Sequence
atgtttgcatattatagctctcttt

SEQ ID NO: 132758 - DNA, 25 bp, Probe Sequence
atgtttgataatgacttgattgtta

SEQ ID NO: 132759 - DNA, 25 bp, Probe Sequence
atgtttgtaatgaattgttctatta

SEQ ID NO: 132760 - DNA, 25 bp, Probe Sequence
atgtgtttatatctggttctatatt

SEQ ID NO: 132761 - DNA, 25 bp, Probe Sequence
atgtggttccatgtggttgcaagtt

SEQ ID NO: 132762 - DNA, 25 bp, Probe Sequence
atgtgatttcctgggttctcactgt

SEQ ID NO: 132763 - DNA, 25 bp, Probe Sequence
atgtatattccaacagatgtacctt

SEQ ID NO: 132764 - DNA, 25 bp, Probe Sequence
atgtggcttccaatcaagtttgtat

SEQ ID NO: 132765 - DNA, 25 bp, Probe Sequence
atgtggcaacacaacaaaattcttt

SEQ ID NO: 132766 - DNA, 25 bp, Probe Sequence
atgtgacctatttgaaactttctgt

SEQ ID NO: 132767 - DNA, 25 bp, Probe Sequence
atgtgaccttcttgaggtctttctc

SEQ ID NO: 132768 - DNA, 25 bp, Probe Sequence
atgtgtcacttctaaagttttgtct

SEQ ID NO: 132769 - DNA, 25 bp, Probe Sequence
atgtcaccagcctcaagtattttat

SEQ ID NO: 132770 - DNA, 25 bp, Probe Sequence
atgtccccacaggcaatctgatttt

SEQ ID NO: 132771 - DNA, 25 bp, Probe Sequence
atgtctcccatcagaaagattcatt

SEQ ID NO: 132772 - DNA, 25 bp, Probe Sequence
atgtccatccacagacgaatgtata

SEQ ID NO: 132773 - DNA, 25 bp, Probe Sequence
atgtgacgtgcaatggacgggtata

SEQ ID NO: 132774 - DNA, 25 bp, Probe Sequence
atgtgaagtgctagctgaaggatga

SEQ ID NO: 132775 - DNA, 25 bp, Probe Sequence
atgggcagatgctagtctcagggtc

SEQ ID NO: 132776 - DNA, 25 bp, Probe Sequence
atgtagcttccacctcatggattgc

SEQ ID NO: 132777 - DNA, 25 bp, Probe Sequence
atgtagcttgacaattcagtgactt

SEQ ID NO: 132778 - DNA, 25 bp, Probe Sequence
atgtatcttgtcaatactacctttc

SEQ ID NO: 132779 - DNA, 25 bp, Probe Sequence
atgtcattagtcataatagtgcttt

SEQ ID NO: 132780 - DNA, 25 bp, Probe Sequence
atgtatcgatgccttttagtttttc

SEQ ID NO: 132781 - DNA, 25 bp, Probe Sequence
atgtatgttggtctacacttttgcc

SEQ ID NO: 132782 - DNA, 25 bp, Probe Sequence
atgtcagttttgttacagttgtagc

SEQ ID NO: 132783 - DNA, 25 bp, Probe Sequence
atgtcaggtgatcattgaaatggat

SEQ ID NO: 132784 - DNA, 25 bp, Probe Sequence
atgtcagtggagcattaatactgtt

SEQ ID NO: 132785 - DNA, 25 bp, Probe Sequence
atgtgactggaggtgtggtttatct

SEQ ID NO: 132786 - DNA, 25 bp, Probe Sequence
atgggcgtggatagcggtttgactc

SEQ ID NO: 132787 - DNA, 25 bp, Probe Sequence
atgggcgtggatagcggtttgactc

SEQ ID NO: 132788 - DNA, 25 bp, Probe Sequence
atgggcgtggatagcggtttgactc

SEQ ID NO: 132789 - DNA, 25 bp, Probe Sequence
atgggcgtggatagcggtttgactc

SEQ ID NO: 132790 - DNA, 25 bp, Probe Sequence
atgggcgtggatagcggtttgactc

SEQ ID NO: 132791 - DNA, 25 bp, Probe Sequence
atgggcgtggatagcggtttgactc

SEQ ID NO: 132792 - DNA, 25 bp, Probe Sequence
atgggtgattaaagttcattacagc

SEQ ID NO: 132793 - DNA, 25 bp, Probe Sequence
atgggtacggcaaccacatgtccca

SEQ ID NO: 132794 - DNA, 25 bp, Probe Sequence
atggtggaaaattcaccgtcgccat

SEQ ID NO: 132795 - DNA, 25 bp, Probe Sequence
atgggtaacgatgaccacaccaatt

SEQ ID NO: 132796 - DNA, 25 bp, Probe Sequence
atgggcacaacggtagtacctttat

SEQ ID NO: 132797 - DNA, 25 bp, Probe Sequence
atgggaagcacggaatatagggtta

SEQ ID NO: 132798 - DNA, 25 bp, Probe Sequence
atgggaacactggacatgatatgta

SEQ ID NO: 132799 - DNA, 25 bp, Probe Sequence
atggagaagacctagaatttaaaga

SEQ ID NO: 132800 - DNA, 25 bp, Probe Sequence
atgtaaagtcctaattatataacaa

SEQ ID NO: 132801 - DNA, 25 bp, Probe Sequence
agtaggttccataaatgcccgacaa

SEQ ID NO: 132802 - DNA, 25 bp, Probe Sequence
atgtgggttccatataggtgcagaa

SEQ ID NO: 132803 - DNA, 25 bp, Probe Sequence
atgggagtacaattgcaaggatgag

SEQ ID NO: 132804 - DNA, 25 bp, Probe Sequence
atgggcgacccattacagtatgaga

SEQ ID NO: 132805 - DNA, 25 bp, Probe Sequence
atgtggcaaatcccttaatatgtga

SEQ ID NO: 132806 - DNA, 25 bp, Probe Sequence
atggtcgttctgttttattggaaca

SEQ ID NO: 132807 - DNA, 25 bp, Probe Sequence
atgtacgaactgtatgttactagaa

SEQ ID NO: 132808 - DNA, 25 bp, Probe Sequence
atgtcatagaccatacttagaagta

SEQ ID NO: 132809 - DNA, 25 bp, Probe Sequence
atgtaaagtctatctcttacgctag

SEQ ID NO: 132810 - DNA, 25 bp, Probe Sequence
atgtaacgtagatctgctttcactt

SEQ ID NO: 132811 - DNA, 25 bp, Probe Sequence
atgtaatttacatcctgttcaaaaa

SEQ ID NO: 132812 - DNA, 25 bp, Probe Sequence
atgtagattttagtctcgtgtgaca

SEQ ID NO: 132813 - DNA, 25 bp, Probe Sequence
atgtcagagtttcctcttgatccac

SEQ ID NO: 132814 - DNA, 25 bp, Probe Sequence
atgtcgtctttgactcaagtaccaa

SEQ ID NO: 132815 - DNA, 25 bp, Probe Sequence
atgtcagatctttgtacgtaattaa

SEQ ID NO: 132816 - DNA, 25 bp, Probe Sequence
atgtcagatctttgtacgtaattaa

SEQ ID NO: 132817 - DNA, 25 bp, Probe Sequence
atgtcatgtctgccagccacagaaa

SEQ ID NO: 132818 - DNA, 25 bp, Probe Sequence
atgtgagctggtccatcacagccaa

SEQ ID NO: 132819 - DNA, 25 bp, Probe Sequence
atgtgatcttggctcactgcagcct

SEQ ID NO: 132820 - DNA, 25 bp, Probe Sequence
atgtcatcaccaatgttctgcagcc

SEQ ID NO: 132821 - DNA, 25 bp, Probe Sequence
atgtgcacagctaatgattcaatgc

SEQ ID NO: 132822 - DNA, 25 bp, Probe Sequence
atgtcactgctcaaattacatttca

SEQ ID NO: 132823 - DNA, 25 bp, Probe Sequence
atgtcctgcggattttatttgcaaa

SEQ ID NO: 132824 - DNA, 25 bp, Probe Sequence
atgtctttagttcctcatgttaaca

SEQ ID NO: 132825 - DNA, 25 bp, Probe Sequence
atgtctgttagatttgcttggtcca

SEQ ID NO: 132826 - DNA, 25 bp, Probe Sequence
atgtcagtatgttattcttcagggc

SEQ ID NO: 132827 - DNA, 25 bp, Probe Sequence
atgtcacttgctattaccagccagc

SEQ ID NO: 132828 - DNA, 25 bp, Probe Sequence
atgtccatagtcattactcagtcaa

SEQ ID NO: 132829 - DNA, 25 bp, Probe Sequence
atggccacggctgcttccagctcct

SEQ ID NO: 132830 - DNA, 25 bp, Probe Sequence
atgtggccgaggactttgattgcac

SEQ ID NO: 132831 - DNA, 25 bp, Probe Sequence
atgtccagcagctggcctgtgatcc

SEQ ID NO: 132832 - DNA, 25 bp, Probe Sequence
atgtccagcagcctgttctggattt

SEQ ID NO: 132833 - DNA, 25 bp, Probe Sequence
atgtccacgtggaatggggtcatga

SEQ ID NO: 132834 - DNA, 25 bp, Probe Sequence
atgggcatcgtcaacggggccaagt

SEQ ID NO: 132835 - DNA, 25 bp, Probe Sequence
atggtacgtcctggggacctgacag

SEQ ID NO: 132836 - DNA, 25 bp, Probe Sequence
atgggacgtttgtagaacctgagta

SEQ ID NO: 132837 - DNA, 25 bp, Probe Sequence
atggaacgttctatgaatttcgtac

SEQ ID NO: 132838 - DNA, 25 bp, Probe Sequence
atgtggacggttatgactactcatg

SEQ ID NO: 132839 - DNA, 25 bp, Probe Sequence
atgtgcgagaggcttacctatgggc

SEQ ID NO: 132840 - DNA, 25 bp, Probe Sequence
atgtgaagaggcctttccaagagga

SEQ ID NO: 132841 - DNA, 25 bp, Probe Sequence
atgtggacatcgtcttctccaaagt

SEQ ID NO: 132842 - DNA, 25 bp, Probe Sequence
atgtgaactccttaactcatcaagt

SEQ ID NO: 132843 - DNA, 25 bp, Probe Sequence
atgtgtacacacccaagtcatcaag

SEQ ID NO: 132844 - DNA, 25 bp, Probe Sequence
atgtgtaactcattcaaccataaaa

SEQ ID NO: 132845 - DNA, 25 bp, Probe Sequence
atggcacccagattaactgttaaaa

SEQ ID NO: 132846 - DNA, 25 bp, Probe Sequence
atgtgcccttaaagactgttagaca

SEQ ID NO: 132847 - DNA, 25 bp, Probe Sequence
atgtggcctttctgaatgttatctc

SEQ ID NO: 132848 - DNA, 25 bp, Probe Sequence
atgggagctcctttgtgagtttccg

SEQ ID NO: 132849 - DNA, 25 bp, Probe Sequence
atggggctatactggaatattccaa

SEQ ID NO: 132850 - DNA, 25 bp, Probe Sequence
aggctgagctgacccaggagatgtc

SEQ ID NO: 132851 - DNA, 25 bp, Probe Sequence
atgtgccagtagaacaggccatctc

SEQ ID NO: 132852 - DNA, 25 bp, Probe Sequence
atgtgccagacggctcagagcttct

SEQ ID NO: 132853 - DNA, 25 bp, Probe Sequence
atggggcagatggctcagccttgct

SEQ ID NO: 132854 - DNA, 25 bp, Probe Sequence
atgtgttcagaagtcgctgtcctta

SEQ ID NO: 132855 - DNA, 25 bp, Probe Sequence
atgggatgagacggccttcagttac

SEQ ID NO: 132856 - DNA, 25 bp, Probe Sequence
atggggaaccaccccatgattcagt

SEQ ID NO: 132857 - DNA, 25 bp, Probe Sequence
atggagcgcaacaacgacacgcacc

SEQ ID NO: 132858 - DNA, 25 bp, Probe Sequence
atgtactggagcaatcagatcacac

SEQ ID NO: 132859 - DNA, 25 bp, Probe Sequence
atgtcctgcagagttcttcagatgc

SEQ ID NO: 132860 - DNA, 25 bp, Probe Sequence
atgtgcctatgcgtttgtatatgct

SEQ ID NO: 132861 - DNA, 25 bp, Probe Sequence
atgtgtcactgattttttagctcaa

SEQ ID NO: 132862 - DNA, 25 bp, Probe Sequence
atgtgtgggagcacgcttactacct

SEQ ID NO: 132863 - DNA, 25 bp, Probe Sequence
atgtgtgaggagagccctaccaacc

SEQ ID NO: 132864 - DNA, 25 bp, Probe Sequence
atgtgttggagaatgacatttaaat

SEQ ID NO: 132865 - DNA, 25 bp, Probe Sequence
atgtgatcttgggatacttatttat

SEQ ID NO: 132866 - DNA, 25 bp, Probe Sequence
atgtgacttagatactgctttttgg

SEQ ID NO: 132867 - DNA, 25 bp, Probe Sequence
atgtggcttagttttatgttttgat

SEQ ID NO: 132868 - DNA, 25 bp, Probe Sequence
atggtggatccttttcataccttat

SEQ ID NO: 132869 - DNA, 25 bp, Probe Sequence
atgggtaactttagaacctctgagt

SEQ ID NO: 132870 - DNA, 25 bp, Probe Sequence
gggcctgacaactcgaactattggt

SEQ ID NO: 132871 - DNA, 25 bp, Probe Sequence
cggcctaaccttgacctatgatgga

SEQ ID NO: 132872 - DNA, 25 bp, Probe Sequence
atgggtaacctagacttcagagaga

SEQ ID NO: 132873 - DNA, 25 bp, Probe Sequence
atggaatattcccctatctctagaa

SEQ ID NO: 132874 - DNA, 25 bp, Probe Sequence
atgggatttcatctgcaacctaaaa

SEQ ID NO: 132875 - DNA, 25 bp, Probe Sequence
atggcttgttctattggcctaaaaa

SEQ ID NO: 132876 - DNA, 25 bp, Probe Sequence
atgggcgtccaaatatggttataaa

SEQ ID NO: 132877 - DNA, 25 bp, Probe Sequence
atggtagtcccattaggtgtatatt

SEQ ID NO: 132878 - DNA, 25 bp, Probe Sequence
atgtctcgtccctttggagtagcat

SEQ ID NO: 132879 - DNA, 25 bp, Probe Sequence
atgtctcgttccttcttaatatgat

SEQ ID NO: 132880 - DNA, 25 bp, Probe Sequence
atgtctctgtctgtgtgctaaataa

SEQ ID NO: 132881 - DNA, 25 bp, Probe Sequence
atgtgtgcatttgtgttgagggaag

SEQ ID NO: 132882 - DNA, 25 bp, Probe Sequence
atggtgctttggatactcggatgga

SEQ ID NO: 132883 - DNA, 25 bp, Probe Sequence
atggagtttgcggtgactctggggc

SEQ ID NO: 132884 - DNA, 25 bp, Probe Sequence
atggtgattcgggttttggccaagt

SEQ ID NO: 132885 - DNA, 25 bp, Probe Sequence
atgggcatatcaagtttttgaccaa

SEQ ID NO: 132886 - DNA, 25 bp, Probe Sequence
atggacaaaaataattatgccccat

SEQ ID NO: 132887 - DNA, 25 bp, Probe Sequence
atggaaacggagacattgacccctc

SEQ ID NO: 132888 - DNA, 25 bp, Probe Sequence
atggaaactggacggaaccacctca

SEQ ID NO: 132889 - DNA, 25 bp, Probe Sequence
aggtgacgtgggcgtggtcacctca

SEQ ID NO: 132890 - DNA, 25 bp, Probe Sequence
atggagacggcgagactgcgtcaac

SEQ ID NO: 132891 - DNA, 25 bp, Probe Sequence
atgggatgagctctgggcatgccat

SEQ ID NO: 132892 - DNA, 25 bp, Probe Sequence
atgggaatgaatatgcgcacctcgt

SEQ ID NO: 132893 - DNA, 25 bp, Probe Sequence
atgggaataatgagcgtccctcccc

SEQ ID NO: 132894 - DNA, 25 bp, Probe Sequence
atgggaataatgagcgtccctcccc

SEQ ID NO: 132895 - DNA, 25 bp, Probe Sequence
atgggaaatttgctgagcccccacc

SEQ ID NO: 132896 - DNA, 25 bp, Probe Sequence
atgggatagtggaggagcgccggac

SEQ ID NO: 132897 - DNA, 25 bp, Probe Sequence
atggatgtagggcaggggcccgggc

SEQ ID NO: 132898 - DNA, 25 bp, Probe Sequence
atgtgaggaggtggagagacagccc

SEQ ID NO: 132899 - DNA, 25 bp, Probe Sequence
atgtggcgttgtgaggccaccccat

SEQ ID NO: 132900 - DNA, 25 bp, Probe Sequence
atgggacattgtgcggctcatccca

SEQ ID NO: 132901 - DNA, 25 bp, Probe Sequence
atgtgtagttgtagctcgagtccca

SEQ ID NO: 132902 - DNA, 25 bp, Probe Sequence
aggtaggcttagtggtcccaacttg

SEQ ID NO: 132903 - DNA, 25 bp, Probe Sequence
agcccaggcattttcgggaccaact

SEQ ID NO: 132904 - DNA, 25 bp, Probe Sequence
aggcgcttggttacgggatccagat

SEQ ID NO: 132905 - DNA, 25 bp, Probe Sequence
aggagctggaatgtgctgaggatcc

SEQ ID NO: 132906 - DNA, 25 bp, Probe Sequence
atgtgaccgaacactgcagctgtct

SEQ ID NO: 132907 - DNA, 25 bp, Probe Sequence
atggaccagacacagtaggacatct

SEQ ID NO: 132908 - DNA, 25 bp, Probe Sequence
atgtgaccagactgaatttcctcat

SEQ ID NO: 132909 - DNA, 25 bp, Probe Sequence
atggacgcgagcaaactgtcccttt

SEQ ID NO: 132910 - DNA, 25 bp, Probe Sequence
atggggctgaggaacatgctccctc

SEQ ID NO: 132911 - DNA, 25 bp, Probe Sequence
atgtgggctggaacaactccacctt

SEQ ID NO: 132912 - DNA, 25 bp, Probe Sequence
atgtgggcttgaagccttcccattg

SEQ ID NO: 132913 - DNA, 25 bp, Probe Sequence
atggtccttgatatttgcccagatg

SEQ ID NO: 132914 - DNA, 25 bp, Probe Sequence
aggttctgctgaatgtcctgacctt

SEQ ID NO: 132915 - DNA, 25 bp, Probe Sequence
atgtggtttgttactgtagcacttt

SEQ ID NO: 132916 - DNA, 25 bp, Probe Sequence
atgtggtttttatatatgcactttg

SEQ ID NO: 132917 - DNA, 25 bp, Probe Sequence
atggaggtttcctgaagcgctttgc

SEQ ID NO: 132918 - DNA, 25 bp, Probe Sequence
atggggttacaaagtgagagccttg

SEQ ID NO: 132919 - DNA, 25 bp, Probe Sequence
atggggttaccagtatgaagtattc

SEQ ID NO: 132920 - DNA, 25 bp, Probe Sequence
atgggagtataggcattggataaat

SEQ ID NO: 132921 - DNA, 25 bp, Probe Sequence
atgtggcaattattttggatctatc

SEQ ID NO: 132922 - DNA, 25 bp, Probe Sequence
atgtggcaattattttggatctatc

SEQ ID NO: 132923 - DNA, 25 bp, Probe Sequence
atgtcgactatatgagattgtatcc

SEQ ID NO: 132924 - DNA, 25 bp, Probe Sequence
atgtcgatgttgagaatggtatttc

SEQ ID NO: 132925 - DNA, 25 bp, Probe Sequence
atgtctagcttggtggtatttttat

SEQ ID NO: 132926 - DNA, 25 bp, Probe Sequence
atgtctattgccgtaaattgttaat

SEQ ID NO: 132927 - DNA, 25 bp, Probe Sequence
atgtgctatactgcatactttttaa

SEQ ID NO: 132928 - DNA, 25 bp, Probe Sequence
atgtctatagtgcaggctttttcca

SEQ ID NO: 132929 - DNA, 25 bp, Probe Sequence
atgtctatagttcctgagattttaa

SEQ ID NO: 132930 - DNA, 25 bp, Probe Sequence
atgtcttagtgacttagttcttaga

SEQ ID NO: 132931 - DNA, 25 bp, Probe Sequence
atgtcttatatgcattatcttttat

SEQ ID NO: 132932 - DNA, 25 bp, Probe Sequence
atgtcttagagcccgtctttatgtt

SEQ ID NO: 132933 - DNA, 25 bp, Probe Sequence
atgtcatcttgagctcttcatttat

SEQ ID NO: 132934 - DNA, 25 bp, Probe Sequence
atgtcactcaaagctatatggctat

SEQ ID NO: 132935 - DNA, 25 bp, Probe Sequence
atgtcaccaagagatgatggttatg

SEQ ID NO: 132936 - DNA, 25 bp, Probe Sequence
atgtccttgtcagcatgaggttatc

SEQ ID NO: 132937 - DNA, 25 bp, Probe Sequence
atgtcgttgctggctttgttgtact

SEQ ID NO: 132938 - DNA, 25 bp, Probe Sequence
atgtgcgtgtcgtcgctgtttagac

SEQ ID NO: 132939 - DNA, 25 bp, Probe Sequence
aggcgatgtcgggcatatcatttga

SEQ ID NO: 132940 - DNA, 25 bp, Probe Sequence
atgtcgaggcggggaatggtgagga

SEQ ID NO: 132941 - DNA, 25 bp, Probe Sequence
atgtgcgggccgtcatgaagcgggt

SEQ ID NO: 132942 - DNA, 25 bp, Probe Sequence
atgtggaggccaaccagatgctggg

SEQ ID NO: 132943 - DNA, 25 bp, Probe Sequence
atgtggtccgaatcagtggtgggaa

SEQ ID NO: 132944 - DNA, 25 bp, Probe Sequence
atgtgtgccggaatatcagcaggcg

SEQ ID NO: 132945 - DNA, 25 bp, Probe Sequence
atgtgtcctgagaatggatcttgtg

SEQ ID NO: 132946 - DNA, 25 bp, Probe Sequence
atgtgtcattggaagccatcccttt

SEQ ID NO: 132947 - DNA, 25 bp, Probe Sequence
atgtgaaatataagcctgcggcctt

SEQ ID NO: 132948 - DNA, 25 bp, Probe Sequence
atgtgaaagatgtatagctgcgaca

SEQ ID NO: 132949 - DNA, 25 bp, Probe Sequence
atgtggcatatattagacatgcaga

SEQ ID NO: 132950 - DNA, 25 bp, Probe Sequence
atggagcacaatgtaagacaaaagg

SEQ ID NO: 132951 - DNA, 25 bp, Probe Sequence
atggacctgttgaccagaaaaaggt

SEQ ID NO: 132952 - DNA, 25 bp, Probe Sequence
atgtgaggcatgatggtcagagaaa

SEQ ID NO: 132953 - DNA, 25 bp, Probe Sequence
atgggcgagacattgctgcaaagaa

SEQ ID NO: 132954 - DNA, 25 bp, Probe Sequence
atgtggggccagtgcacacagacag

SEQ ID NO: 132955 - DNA, 25 bp, Probe Sequence
atgtcggagaagtcaggccagagca

SEQ ID NO: 132956 - DNA, 25 bp, Probe Sequence
atgtctgtgggaagctcccagagtt

SEQ ID NO: 132957 - DNA, 25 bp, Probe Sequence
atgtggtctttagtgtccaggctct

SEQ ID NO: 132958 - DNA, 25 bp, Probe Sequence
atgggctaggtagttcaatcctctg

SEQ ID NO: 132959 - DNA, 25 bp, Probe Sequence
atgggtaaaagttcaggcagtctgt

SEQ ID NO: 132960 - DNA, 25 bp, Probe Sequence
atggtgttgcacaagtacgttttgt

SEQ ID NO: 132961 - DNA, 25 bp, Probe Sequence
atggttataaagctcctgttactca

SEQ ID NO: 132962 - DNA, 25 bp, Probe Sequence
atgggtttcaagccgttggtactgc

SEQ ID NO: 132963 - DNA, 25 bp, Probe Sequence
atgggcaaccaatctttggaagctg

SEQ ID NO: 132964 - DNA, 25 bp, Probe Sequence
atgggcaaccaatctttggaagctg

SEQ ID NO: 132965 - DNA, 25 bp, Probe Sequence
atgggcaaccaatctttggaagctg

SEQ ID NO: 132966 - DNA, 25 bp, Probe Sequence
atgtggaaccatatccgtggacctc

SEQ ID NO: 132967 - DNA, 25 bp, Probe Sequence
atgtggaaccatatccgtggacctc

SEQ ID NO: 132968 - DNA, 25 bp, Probe Sequence
atgtggagttccactgcgggagggc

SEQ ID NO: 132969 - DNA, 25 bp, Probe Sequence
atgtctcagttccccttggaaaggt

SEQ ID NO: 132970 - DNA, 25 bp, Probe Sequence
atgtctcaaccccctgtgagaagag

SEQ ID NO: 132971 - DNA, 25 bp, Probe Sequence
atgtgctcctcaacgtagtagaaag

SEQ ID NO: 132972 - DNA, 25 bp, Probe Sequence
atggtcctagaggtggcaagaagga

SEQ ID NO: 132973 - DNA, 25 bp, Probe Sequence
atgtgtcactagtgtctaatgaagc

SEQ ID NO: 132974 - DNA, 25 bp, Probe Sequence
atgtgtcattaagtgcagaaataac

SEQ ID NO: 132975 - DNA, 25 bp, Probe Sequence
atgtgtcattaagtgcagaaataac

SEQ ID NO: 132976 - DNA, 25 bp, Probe Sequence
atgtggactcaagtggaaagaaatg

SEQ ID NO: 132977 - DNA, 25 bp, Probe Sequence
atgtccaccatgactccaaaaatag

SEQ ID NO: 132978 - DNA, 25 bp, Probe Sequence
atgtccgcatcaacttgcagaaaga

SEQ ID NO: 132979 - DNA, 25 bp, Probe Sequence
atgtgcccatattttcagaacatgc

SEQ ID NO: 132980 - DNA, 25 bp, Probe Sequence
atgtcctcagtgtaccactacttag

SEQ ID NO: 132981 - DNA, 25 bp, Probe Sequence
atggcctacatggatgctgcctact

SEQ ID NO: 132982 - DNA, 25 bp, Probe Sequence
atgtgccatactaatgatgagcatt

SEQ ID NO: 132983 - DNA, 25 bp, Probe Sequence
atgtgcatattggagcagaacatta

SEQ ID NO: 132984 - DNA, 25 bp, Probe Sequence
atggtcatgctgccgcaggatgatc

SEQ ID NO: 132985 - DNA, 25 bp, Probe Sequence
aggagcgatgcgacaggcatgatgg

SEQ ID NO: 132986 - DNA, 25 bp, Probe Sequence
atggagcaatctcgcagtgcagtgg

SEQ ID NO: 132987 - DNA, 25 bp, Probe Sequence
atggagcaatctcgcagtgcagtgg

SEQ ID NO: 132988 - DNA, 25 bp, Probe Sequence
atgtgcgctacggagctgcaatggc

SEQ ID NO: 132989 - DNA, 25 bp, Probe Sequence
atgtcctacgagcagctgatgcagc

SEQ ID NO: 132990 - DNA, 25 bp, Probe Sequence
agtctctttggcaagattgcagcaa

SEQ ID NO: 132991 - DNA, 25 bp, Probe Sequence
atgtctggttgtgatgagtccacag

SEQ ID NO: 132992 - DNA, 25 bp, Probe Sequence
atgtctgcgggctggagatgccacc

SEQ ID NO: 132993 - DNA, 25 bp, Probe Sequence
atgtctgcgaggccatggaatacct

SEQ ID NO: 132994 - DNA, 25 bp, Probe Sequence
atgtcatagacgtagaaaacgcatc

SEQ ID NO: 132995 - DNA, 25 bp, Probe Sequence
aggccagactgtgacaaacccaggg

SEQ ID NO: 132996 - DNA, 25 bp, Probe Sequence
aggccaacagctgtgcaaagccaca

SEQ ID NO: 132997 - DNA, 25 bp, Probe Sequence
atgggcaaatgacatgagtaggcat

SEQ ID NO: 132998 - DNA, 25 bp, Probe Sequence
atgtgctcaacaaccagcagttcct

SEQ ID NO: 132999 - DNA, 25 bp, Probe Sequence
atgtgtaacaacagccgcttctgga

SEQ ID NO: 133000 - DNA, 25 bp, Probe Sequence
atgggaaagaatactggcttgtgaa

SEQ ID NO: 133001 - DNA, 25 bp, Probe Sequence
atgtgaggggatattgctgctttaa

SEQ ID NO: 133002 - DNA, 25 bp, Probe Sequence
atgggagggatggaatgcagctttt

SEQ ID NO: 133003 - DNA, 25 bp, Probe Sequence
atggggctgaatggcataggatttc

SEQ ID NO: 133004 - DNA, 25 bp, Probe Sequence
atggggcttacactatgatgtttga

SEQ ID NO: 133005 - DNA, 25 bp, Probe Sequence
atggtggcttcagggtagccaatta

SEQ ID NO: 133006 - DNA, 25 bp, Probe Sequence
atggtccttcagaaaaggcaataaa

SEQ ID NO: 133007 - DNA, 25 bp, Probe Sequence
atggtggcctcaagaaaggcccgga

SEQ ID NO: 133008 - DNA, 25 bp, Probe Sequence
atggtggcctcaagaaaggcccgga

SEQ ID NO: 133009 - DNA, 25 bp, Probe Sequence
atggtgggacttgtgtggcccaggc

SEQ ID NO: 133010 - DNA, 25 bp, Probe Sequence
atggtgaagattacggtaacggcca

SEQ ID NO: 133011 - DNA, 25 bp, Probe Sequence
atggtaaacgcccagaaacacagta

SEQ ID NO: 133012 - DNA, 25 bp, Probe Sequence
atggtgtcaatggcccgaaacacat

SEQ ID NO: 133013 - DNA, 25 bp, Probe Sequence
atggagttatggacaccaccacagc

SEQ ID NO: 133014 - DNA, 25 bp, Probe Sequence
atggtgctttggcctcctcaaagca

SEQ ID NO: 133015 - DNA, 25 bp, Probe Sequence
atgggctatttggctggtgagacac

SEQ ID NO: 133016 - DNA, 25 bp, Probe Sequence
aggacttttgggaatgaggctcgat

SEQ ID NO: 133017 - DNA, 25 bp, Probe Sequence
atggcgtttctgtgttcagagtagt

SEQ ID NO: 133018 - DNA, 25 bp, Probe Sequence
atgtgggttctgtgtgtggcactga

SEQ ID NO: 133019 - DNA, 25 bp, Probe Sequence
atgtgggttctgtgtgtggcactga

SEQ ID NO: 133020 - DNA, 25 bp, Probe Sequence
atgtgtggggtgtggtggcaggagc

SEQ ID NO: 133021 - DNA, 25 bp, Probe Sequence
atgtgtggggtgtggtggcaggagc

SEQ ID NO: 133022 - DNA, 25 bp, Probe Sequence
atgggggagctatggcttcatggga

SEQ ID NO: 133023 - DNA, 25 bp, Probe Sequence
atggagtgagcacaagatgccctgt

SEQ ID NO: 133024 - DNA, 25 bp, Probe Sequence
atggaggaaagaccacccatttggt

SEQ ID NO: 133025 - DNA, 25 bp, Probe Sequence
atggggaagagacgcccctgctaac

SEQ ID NO: 133026 - DNA, 25 bp, Probe Sequence
atgggagtaggcacttcctgaatcc

SEQ ID NO: 133027 - DNA, 25 bp, Probe Sequence
atgggcacaaggttcttccatggtc

SEQ ID NO: 133028 - DNA, 25 bp, Probe Sequence
atgtgcgcatgatcgactttgcaca

SEQ ID NO: 133029 - DNA, 25 bp, Probe Sequence
atgtgtggaacgactgctggatgaa

SEQ ID NO: 133030 - DNA, 25 bp, Probe Sequence
atgtgatgtattttatgcatgtcaa

SEQ ID NO: 133031 - DNA, 25 bp, Probe Sequence
atgtggttatgatttgcttctagga

SEQ ID NO: 133032 - DNA, 25 bp, Probe Sequence
atgtgaattcatgttgttgcccagt

SEQ ID NO: 133033 - DNA, 25 bp, Probe Sequence
atgtgacttcactttggtgccaatg

SEQ ID NO: 133034 - DNA, 25 bp, Probe Sequence
atgggcttcagaagtatctgcacaa

SEQ ID NO: 133035 - DNA, 25 bp, Probe Sequence
aggacttcacaaaatccaccaagga

SEQ ID NO: 133036 - DNA, 25 bp, Probe Sequence
aggaatttactaaggaccagaatga

SEQ ID NO: 133037 - DNA, 25 bp, Probe Sequence
agtcaatttactaagtcacaaaaga

SEQ ID NO: 133038 - DNA, 25 bp, Probe Sequence
agctactactattatccccaaaaag

SEQ ID NO: 133039 - DNA, 25 bp, Probe Sequence
accgccactgtcaccgaaaaaggtg

SEQ ID NO: 133040 - DNA, 25 bp, Probe Sequence
aggcccacttcttctcagaaaagag

SEQ ID NO: 133041 - DNA, 25 bp, Probe Sequence
aggcgccactgaaccgagaagggac

SEQ ID NO: 133042 - DNA, 25 bp, Probe Sequence
atgggaccgaggacgagagggctgt

SEQ ID NO: 133043 - DNA, 25 bp, Probe Sequence
atggagaccttgaacgaaggccggc

SEQ ID NO: 133044 - DNA, 25 bp, Probe Sequence
agggtcgcttaaggaatctgcccca

SEQ ID NO: 133045 - DNA, 25 bp, Probe Sequence
atgggtcttggatgaaactggcgaa

SEQ ID NO: 133046 - DNA, 25 bp, Probe Sequence
atgggtttgtgctgtaccggacaac

SEQ ID NO: 133047 - DNA, 25 bp, Probe Sequence
atgggttttggttaccatgaacaat

SEQ ID NO: 133048 - DNA, 25 bp, Probe Sequence
atgtgtgttatctgtaaccattaca

SEQ ID NO: 133049 - DNA, 25 bp, Probe Sequence
atgtgggtgatctgcttttatctaa

SEQ ID NO: 133050 - DNA, 25 bp, Probe Sequence
atgtgtcttgtctccatttggataa

SEQ ID NO: 133051 - DNA, 25 bp, Probe Sequence
atggatctttcatcttttactcaga

SEQ ID NO: 133052 - DNA, 25 bp, Probe Sequence
atggtcaggatatttggattagcca

SEQ ID NO: 133053 - DNA, 25 bp, Probe Sequence
atggtattctaaggtgttgacaccc

SEQ ID NO: 133054 - DNA, 25 bp, Probe Sequence
atggttttaacctgatgctccactg

SEQ ID NO: 133055 - DNA, 25 bp, Probe Sequence
atggttttgagaagccctctgccat

SEQ ID NO: 133056 - DNA, 25 bp, Probe Sequence
atgtgtcttaggggactctggcttc

SEQ ID NO: 133057 - DNA, 25 bp, Probe Sequence
atggtttgattttgactctggtccc

SEQ ID NO: 133058 - DNA, 25 bp, Probe Sequence
atgtgatttgcagttagacctgttc

SEQ ID NO: 133059 - DNA, 25 bp, Probe Sequence
atgtgttagcctcagacactactga

SEQ ID NO: 133060 - DNA, 25 bp, Probe Sequence
atgtgtgtacgctgaaagatacaga

SEQ ID NO: 133061 - DNA, 25 bp, Probe Sequence
atggctggaccatgtatgatgatga

SEQ ID NO: 133062 - DNA, 25 bp, Probe Sequence
atggtaaccacagtgcaaggcaact

SEQ ID NO: 133063 - DNA, 25 bp, Probe Sequence
atgtgtggacactgtaacctactct

SEQ ID NO: 133064 - DNA, 25 bp, Probe Sequence
atggtgggcacttgtagtcccagct

SEQ ID NO: 133065 - DNA, 25 bp, Probe Sequence
atggtgacacctatatgaacacagt

SEQ ID NO: 133066 - DNA, 25 bp, Probe Sequence
atgggattcctttctgaagcatcag

SEQ ID NO: 133067 - DNA, 25 bp, Probe Sequence
atggtatttgttttacagcatacat

SEQ ID NO: 133068 - DNA, 25 bp, Probe Sequence
atggtttgtggtacaacttcattct

SEQ ID NO: 133069 - DNA, 25 bp, Probe Sequence
atggtttcatttagcagactttact

SEQ ID NO: 133070 - DNA, 25 bp, Probe Sequence
atggtccatagtacccattaggact

SEQ ID NO: 133071 - DNA, 25 bp, Probe Sequence
atgtgttagcagaaaccagtgggtt

SEQ ID NO: 133072 - DNA, 25 bp, Probe Sequence
atgtggctagaccaaccagtgggaa

SEQ ID NO: 133073 - DNA, 25 bp, Probe Sequence
atggatgaaactccacaagtggaaa

SEQ ID NO: 133074 - DNA, 25 bp, Probe Sequence
atggttcaactccaatttgtgaaga

SEQ ID NO: 133075 - DNA, 25 bp, Probe Sequence
atgtgctaaccaaatttctgtgaag

SEQ ID NO: 133076 - DNA, 25 bp, Probe Sequence
atgtgtactccaaagttgtgatgta

SEQ ID NO: 133077 - DNA, 25 bp, Probe Sequence
atgtgtgtcttgtacagttagttat

SEQ ID NO: 133078 - DNA, 25 bp, Probe Sequence
atgtggattctatctttatgtagca

SEQ ID NO: 133079 - DNA, 25 bp, Probe Sequence
atgtgtgaacaaccttttgtaacct

SEQ ID NO: 133080 - DNA, 25 bp, Probe Sequence
atgtgcagaaccactttggtccaaa

SEQ ID NO: 133081 - DNA, 25 bp, Probe Sequence
atggagtgaccagctttgtgtccag

SEQ ID NO: 133082 - DNA, 25 bp, Probe Sequence
atgggtgaggtactttgggccagta

SEQ ID NO: 133083 - DNA, 25 bp, Probe Sequence
atgtgttgaaggaccattcccgctg

SEQ ID NO: 133084 - DNA, 25 bp, Probe Sequence
atgtgtataattaacaaacctgtgt

SEQ ID NO: 133085 - DNA, 25 bp, Probe Sequence
atgtgtatatattttcaaactttgt

SEQ ID NO: 133086 - DNA, 25 bp, Probe Sequence
atgtgtaagacactgtgcaaatttt

SEQ ID NO: 133087 - DNA, 25 bp, Probe Sequence
atgtgtaccatcttgtaaattcatt

SEQ ID NO: 133088 - DNA, 25 bp, Probe Sequence
atgtgcttcagcattcaaagatatc

SEQ ID NO: 133089 - DNA, 25 bp, Probe Sequence
atgtgtgtacatttcaagaatttgg

SEQ ID NO: 133090 - DNA, 25 bp, Probe Sequence
atggatggacatcttcagagagtgt

SEQ ID NO: 133091 - DNA, 25 bp, Probe Sequence
atggtgggccgcttgaatgagctgc

SEQ ID NO: 133092 - DNA, 25 bp, Probe Sequence
atggtgggccgcttgaatgagctgc

SEQ ID NO: 133093 - DNA, 25 bp, Probe Sequence
atgtgtgggcacatgttatggcaga

SEQ ID NO: 133094 - DNA, 25 bp, Probe Sequence
atgtgtatgtaaatcttcatgtgat

SEQ ID NO: 133095 - DNA, 25 bp, Probe Sequence
atgtgattgcatttggttctaatga

SEQ ID NO: 133096 - DNA, 25 bp, Probe Sequence
atggtgctgcatgttttcaactaca

SEQ ID NO: 133097 - DNA, 25 bp, Probe Sequence
atggacgtactttgtctgactacaa

SEQ ID NO: 133098 - DNA, 25 bp, Probe Sequence
atgtgacggatttttgcagattcaa

SEQ ID NO: 133099 - DNA, 25 bp, Probe Sequence
atgtgatctgtaatttctttgtgca

SEQ ID NO: 133100 - DNA, 25 bp, Probe Sequence
atgtgtttactcatgctttgtgata

SEQ ID NO: 133101 - DNA, 25 bp, Probe Sequence
atgtgatgttcatgcttgccattct

SEQ ID NO: 133102 - DNA, 25 bp, Probe Sequence
atggtgtctctagtgagcacatgta

SEQ ID NO: 133103 - DNA, 25 bp, Probe Sequence
atgtgttttcaccagcaagtatttg

SEQ ID NO: 133104 - DNA, 25 bp, Probe Sequence
atgtgtgttgatgcaaggacttttg

SEQ ID NO: 133105 - DNA, 25 bp, Probe Sequence
atgtgctgtagatctttgcctcatt

SEQ ID NO: 133106 - DNA, 25 bp, Probe Sequence
atgtgctgtgaatgttgcttttttt

SEQ ID NO: 133107 - DNA, 25 bp, Probe Sequence
atgtgcttgttggtatgttgctatt

SEQ ID NO: 133108 - DNA, 25 bp, Probe Sequence
atgtgcttgtacatagagtgctgta

SEQ ID NO: 133109 - DNA, 25 bp, Probe Sequence
atgtgctcttcaatatagtgctaaa

SEQ ID NO: 133110 - DNA, 25 bp, Probe Sequence
atgtgctttatggcaggcgcaaact

SEQ ID NO: 133111 - DNA, 25 bp, Probe Sequence
atgtgctattgagattccagtggtg

SEQ ID NO: 133112 - DNA, 25 bp, Probe Sequence
atggctgagctttgatacctggggt

SEQ ID NO: 133113 - DNA, 25 bp, Probe Sequence
agaggacgccgaactcgggcgttgg

SEQ ID NO: 133114 - DNA, 25 bp, Probe Sequence
agagaacaccctctaggggctttgg

SEQ ID NO: 133115 - DNA, 25 bp, Probe Sequence
aggaacagttccgtaagctctttat

SEQ ID NO: 133116 - DNA, 25 bp, Probe Sequence
agagccaagatttttaactggttat

SEQ ID NO: 133117 - DNA, 25 bp, Probe Sequence
aggccaaggtcttctgaaataataa

SEQ ID NO: 133118 - DNA, 25 bp, Probe Sequence
aggctaaagttgatctgaacaaaag

SEQ ID NO: 133119 - DNA, 25 bp, Probe Sequence
aggccacactgatgttctaaaaaaa

SEQ ID NO: 133120 - DNA, 25 bp, Probe Sequence
atggaatcctgcagctttaattaaa

SEQ ID NO: 133121 - DNA, 25 bp, Probe Sequence
atgtgaaactccgtctctactaaaa

SEQ ID NO: 133122 - DNA, 25 bp, Probe Sequence
atgtgaacaccatcatgcctttata

SEQ ID NO: 133123 - DNA, 25 bp, Probe Sequence
atgtgacatcatggccactggtgat

SEQ ID NO: 133124 - DNA, 25 bp, Probe Sequence
atgtgtctaggccatctgagtgtga

SEQ ID NO: 133125 - DNA, 25 bp, Probe Sequence
atgtgttgagtccaaagagctggaa

SEQ ID NO: 133126 - DNA, 25 bp, Probe Sequence
atgtgatctgaccacaaagaaagta

SEQ ID NO: 133127 - DNA, 25 bp, Probe Sequence
atgtgcattgcccatcataaaagat

SEQ ID NO: 133128 - DNA, 25 bp, Probe Sequence
atgtgcatcgttgccacaatagaat

SEQ ID NO: 133129 - DNA, 25 bp, Probe Sequence
atgtgactgctgctgccgaaaatat

SEQ ID NO: 133130 - DNA, 25 bp, Probe Sequence
atgtccttgcggtcgtaggtgatgc

SEQ ID NO: 133131 - DNA, 25 bp, Probe Sequence
atgtccttgagtttggagcctgagc

SEQ ID NO: 133132 - DNA, 25 bp, Probe Sequence
atgtgcgttagactttagccgttcc

SEQ ID NO: 133133 - DNA, 25 bp, Probe Sequence
atgtgccttcaattttggtatttcg

SEQ ID NO: 133134 - DNA, 25 bp, Probe Sequence
aggcctcctgacttattcatagtat

SEQ ID NO: 133135 - DNA, 25 bp, Probe Sequence
atgtgccttctactttataattata

SEQ ID NO: 133136 - DNA, 25 bp, Probe Sequence
atgtgccttcaactttataattata

SEQ ID NO: 133137 - DNA, 25 bp, Probe Sequence
atgtccatgtcatactattatgaat

SEQ ID NO: 133138 - DNA, 25 bp, Probe Sequence
atgtcctgcctgaaataccatgatt

SEQ ID NO: 133139 - DNA, 25 bp, Probe Sequence
atgtgttctctgagacccatgatca

SEQ ID NO: 133140 - DNA, 25 bp, Probe Sequence
atgtgtacctgaaagctcctggcaa

SEQ ID NO: 133141 - DNA, 25 bp, Probe Sequence
atgtgtgcacactttaccgtagcta

SEQ ID NO: 133142 - DNA, 25 bp, Probe Sequence
atgtgtctcacatctacacgtggct

SEQ ID NO: 133143 - DNA, 25 bp, Probe Sequence
atgtgaacacagcctagcaccaggg

SEQ ID NO: 133144 - DNA, 25 bp, Probe Sequence
atgtgaccaaggacatgacactgga

SEQ ID NO: 133145 - DNA, 25 bp, Probe Sequence
atgtgtccacaggccataacagggt

SEQ ID NO: 133146 - DNA, 25 bp, Probe Sequence
atggacgcaatggccgtagcgttta

SEQ ID NO: 133147 - DNA, 25 bp, Probe Sequence
atggacaccatctggcgaggtcatt

SEQ ID NO: 133148 - DNA, 25 bp, Probe Sequence
atggagccgctgtggacaggtttct

SEQ ID NO: 133149 - DNA, 25 bp, Probe Sequence
atgggcctgtgaaggtagtggtagc

SEQ ID NO: 133150 - DNA, 25 bp, Probe Sequence
atggtgacagtgttggcaaggaaac

SEQ ID NO: 133151 - DNA, 25 bp, Probe Sequence
atggtggcagtggggatggctataa

SEQ ID NO: 133152 - DNA, 25 bp, Probe Sequence
atggtggcagtggggatggctataa

SEQ ID NO: 133153 - DNA, 25 bp, Probe Sequence
atgtgtgaattcaatacaggctatg

SEQ ID NO: 133154 - DNA, 25 bp, Probe Sequence
atggggccctgtccaggtagaaaag

SEQ ID NO: 133155 - DNA, 25 bp, Probe Sequence
atgtggtcccttccatagtcaatac

SEQ ID NO: 133156 - DNA, 25 bp, Probe Sequence
atgtgaacagcttttacagtcatta

SEQ ID NO: 133157 - DNA, 25 bp, Probe Sequence
atgtgaactgcctatttcctatgct

SEQ ID NO: 133158 - DNA, 25 bp, Probe Sequence
atgtgcagaccctatatgcctgcat

SEQ ID NO: 133159 - DNA, 25 bp, Probe Sequence
atgtgagacccacagctgacatcat

SEQ ID NO: 133160 - DNA, 25 bp, Probe Sequence
atgtgtacgcgcagcatgctatact

SEQ ID NO: 133161 - DNA, 25 bp, Probe Sequence
atgtgtgatcccatcatgaattcat

SEQ ID NO: 133162 - DNA, 25 bp, Probe Sequence
atgtgatgtcatttcctaactcatt

SEQ ID NO: 133163 - DNA, 25 bp, Probe Sequence
atgtgcagaatggcctcataagctc

SEQ ID NO: 133164 - DNA, 25 bp, Probe Sequence
aggcatgaatgattctagacactaa

SEQ ID NO: 133165 - DNA, 25 bp, Probe Sequence
aggcatggtggcttacgcctgtaat

SEQ ID NO: 133166 - DNA, 25 bp, Probe Sequence
atgtgtggcggattactgggacaga

SEQ ID NO: 133167 - DNA, 25 bp, Probe Sequence
atgtgcggctggttttggacagcga

SEQ ID NO: 133168 - DNA, 25 bp, Probe Sequence
atgtggactggattaaggacaccat

SEQ ID NO: 133169 - DNA, 25 bp, Probe Sequence
atgtggactggattaaggacaccat

SEQ ID NO: 133170 - DNA, 25 bp, Probe Sequence
atgtggcctaaaaatgcaacttctt

SEQ ID NO: 133171 - DNA, 25 bp, Probe Sequence
atgtggcaattctatttctaatttt

SEQ ID NO: 133172 - DNA, 25 bp, Probe Sequence
atggtcaattttctgcatcaacttg

SEQ ID NO: 133173 - DNA, 25 bp, Probe Sequence
atggtgcactttttcgctatttaag

SEQ ID NO: 133174 - DNA, 25 bp, Probe Sequence
atggtacgttataacatcaattata

SEQ ID NO: 133175 - DNA, 25 bp, Probe Sequence
atgggacgcataatcattaccttaa

SEQ ID NO: 133176 - DNA, 25 bp, Probe Sequence
atggagatgccagttacaaccttaa

SEQ ID NO: 133177 - DNA, 25 bp, Probe Sequence
atgtggatatattcaaaactttcaa

SEQ ID NO: 133178 - DNA, 25 bp, Probe Sequence
atgggtattacatgaattttcattt

SEQ ID NO: 133179 - DNA, 25 bp, Probe Sequence
atgggtgaacaccaacttttatttg

SEQ ID NO: 133180 - DNA, 25 bp, Probe Sequence
atggttcaaccttaattatagcttc

SEQ ID NO: 133181 - DNA, 25 bp, Probe Sequence
atggggatcaaatgaagtaatgttc

SEQ ID NO: 133182 - DNA, 25 bp, Probe Sequence
atggggacaagctgcgggtactccc

SEQ ID NO: 133183 - DNA, 25 bp, Probe Sequence
atggagggcgacagggagtggtggg

SEQ ID NO: 133184 - DNA, 25 bp, Probe Sequence
atgggggggtggagaggggtgcaag

SEQ ID NO: 133185 - DNA, 25 bp, Probe Sequence
atgggggggtggagaggggtgcaag

SEQ ID NO: 133186 - DNA, 25 bp, Probe Sequence
aggcgggtggatcacgaggtcagga

SEQ ID NO: 133187 - DNA, 25 bp, Probe Sequence
aggctggcactgtacgagtgaggcc

SEQ ID NO: 133188 - DNA, 25 bp, Probe Sequence
atggcggcaagaccgagaactgcgc

SEQ ID NO: 133189 - DNA, 25 bp, Probe Sequence
agtagtgacaggggcgaacgccgcc

SEQ ID NO: 133190 - DNA, 25 bp, Probe Sequence
atggcgctgaaggtagcgaccgtcg

SEQ ID NO: 133191 - DNA, 25 bp, Probe Sequence
aggcctgacacctaggagtggtcca

SEQ ID NO: 133192 - DNA, 25 bp, Probe Sequence
atgggagagacctgggggtgctgca

SEQ ID NO: 133193 - DNA, 25 bp, Probe Sequence
atgtgcagagattttggggctgagg

SEQ ID NO: 133194 - DNA, 25 bp, Probe Sequence
atgtgatcatgctgtttgtgcctgt

SEQ ID NO: 133195 - DNA, 25 bp, Probe Sequence
atgtgttggtggcatgtgcactggc

SEQ ID NO: 133196 - DNA, 25 bp, Probe Sequence
atgtgttgatgtgcacagctaatga

SEQ ID NO: 133197 - DNA, 25 bp, Probe Sequence
atgtgttgttgccatggtaatcctg

SEQ ID NO: 133198 - DNA, 25 bp, Probe Sequence
atgtgtttaactggtttggctgcca

SEQ ID NO: 133199 - DNA, 25 bp, Probe Sequence
atgtggttaactggactgacctaaa

SEQ ID NO: 133200 - DNA, 25 bp, Probe Sequence
atggtgttaacctctcaattaaaat

SEQ ID NO: 133201 - DNA, 25 bp, Probe Sequence
atggtgtaaacactgtctctactaa

SEQ ID NO: 133202 - DNA, 25 bp, Probe Sequence
atggtgaaacctcatctctactaaa

SEQ ID NO: 133203 - DNA, 25 bp, Probe Sequence
atggtgaaaccttgtctctacaaaa

SEQ ID NO: 133204 - DNA, 25 bp, Probe Sequence
atgtgtgaaacatgttgtccaacaa

SEQ ID NO: 133205 - DNA, 25 bp, Probe Sequence
atgtgtgtaattttctgtgccagac

SEQ ID NO: 133206 - DNA, 25 bp, Probe Sequence
atgtgtgtaattttctgtgccagac

SEQ ID NO: 133207 - DNA, 25 bp, Probe Sequence
atgggtcagtctttattgcgctgct

SEQ ID NO: 133208 - DNA, 25 bp, Probe Sequence
atgggctttcactatattgccatgc

SEQ ID NO: 133209 - DNA, 25 bp, Probe Sequence
atgtggtgttccacatgtgcctgtt

SEQ ID NO: 133210 - DNA, 25 bp, Probe Sequence
atgtgggcaatcgggattactgttc

SEQ ID NO: 133211 - DNA, 25 bp, Probe Sequence
atgtggtgaagctgagtttctgtcc

SEQ ID NO: 133212 - DNA, 25 bp, Probe Sequence
atgtgggcaggctggcttgaattcc

SEQ ID NO: 133213 - DNA, 25 bp, Probe Sequence
atgtgaggaagctcctccaatcctc

SEQ ID NO: 133214 - DNA, 25 bp, Probe Sequence
atgtgaggaagctcctccaatcctc

SEQ ID NO: 133215 - DNA, 25 bp, Probe Sequence
atgggtgtagccgcatggcagaccc

SEQ ID NO: 133216 - DNA, 25 bp, Probe Sequence
aggctgtccaacgaatggaagctac

SEQ ID NO: 133217 - DNA, 25 bp, Probe Sequence
atggctgcaaaagcccagcaagtac

SEQ ID NO: 133218 - DNA, 25 bp, Probe Sequence
atgggccttatgttgtcacaagtaa

SEQ ID NO: 133219 - DNA, 25 bp, Probe Sequence
atggggcttgttaataataggatca

SEQ ID NO: 133220 - DNA, 25 bp, Probe Sequence
atggatggactaacctaatagaatc

SEQ ID NO: 133221 - DNA, 25 bp, Probe Sequence
atgtgttgactaatattaactgatt

SEQ ID NO: 133222 - DNA, 25 bp, Probe Sequence
atggttgaccatggttaactgagac

SEQ ID NO: 133223 - DNA, 25 bp, Probe Sequence
atggtaatcctgctcagtacgagag

SEQ ID NO: 133224 - DNA, 25 bp, Probe Sequence
atggctgaccctgtttcagaagcag

SEQ ID NO: 133225 - DNA, 25 bp, Probe Sequence
atgggacccactcagtcaagatcac

SEQ ID NO: 133226 - DNA, 25 bp, Probe Sequence
atgggaccttctaatctctcatgaa

SEQ ID NO: 133227 - DNA, 25 bp, Probe Sequence
atgtgtcatcacagcttttgtaaag

SEQ ID NO: 133228 - DNA, 25 bp, Probe Sequence
atgtggcatcgcagtctcttagaat

SEQ ID NO: 133229 - DNA, 25 bp, Probe Sequence
atgtggtggcttgtgcctgtaatcc

SEQ ID NO: 133230 - DNA, 25 bp, Probe Sequence
atggtggcgggcgcctataatccca

SEQ ID NO: 133231 - DNA, 25 bp, Probe Sequence
atggtggtgtacgcctgtaatccca

SEQ ID NO: 133232 - DNA, 25 bp, Probe Sequence
atggtggtgtacgcctgtaatccca

SEQ ID NO: 133233 - DNA, 25 bp, Probe Sequence
aggctgagttagtcccttagaaacg

SEQ ID NO: 133234 - DNA, 25 bp, Probe Sequence
aggccagttaactctggggactggg

SEQ ID NO: 133235 - DNA, 25 bp, Probe Sequence
aggggttcgcacccatatgggaatg

SEQ ID NO: 133236 - DNA, 25 bp, Probe Sequence
atgggcccaaactcatatgggaatt

SEQ ID NO: 133237 - DNA, 25 bp, Probe Sequence
atggcagccagcaaacttgatagtg

SEQ ID NO: 133238 - DNA, 25 bp, Probe Sequence
atggcagccagcaaacttgatagtg

SEQ ID NO: 133239 - DNA, 25 bp, Probe Sequence
atggaccatcatttccggaagccag

SEQ ID NO: 133240 - DNA, 25 bp, Probe Sequence
atggatcaatggtgccacggagcac

SEQ ID NO: 133241 - DNA, 25 bp, Probe Sequence
atgtgactaagaagcctggggagca

SEQ ID NO: 133242 - DNA, 25 bp, Probe Sequence
atgtggacaagaccgtggctggcca

SEQ ID NO: 133243 - DNA, 25 bp, Probe Sequence
atgtggagcaacttcgtgatgtggc

SEQ ID NO: 133244 - DNA, 25 bp, Probe Sequence
atggtagcatttccatgcttgtgac

SEQ ID NO: 133245 - DNA, 25 bp, Probe Sequence
atgggaactgcttcagctttaaggg

SEQ ID NO: 133246 - DNA, 25 bp, Probe Sequence
atggtagacagttcatgcagtatat

SEQ ID NO: 133247 - DNA, 25 bp, Probe Sequence
aggtagactttcaactattgttaga

SEQ ID NO: 133248 - DNA, 25 bp, Probe Sequence
atggaaaatgtcaacctttgtaaga

SEQ ID NO: 133249 - DNA, 25 bp, Probe Sequence
atggaaatgctatacgtttttgaca

SEQ ID NO: 133250 - DNA, 25 bp, Probe Sequence
atggattgtggataactctgtttgc

SEQ ID NO: 133251 - DNA, 25 bp, Probe Sequence
atggatgtttatcacagtgctgttt

SEQ ID NO: 133252 - DNA, 25 bp, Probe Sequence
atgtggtttgactatttctgtatgt

SEQ ID NO: 133253 - DNA, 25 bp, Probe Sequence
atgtggtatggctaatttcttatta

SEQ ID NO: 133254 - DNA, 25 bp, Probe Sequence
atgtggactgtaaatgttttatttg

SEQ ID NO: 133255 - DNA, 25 bp, Probe Sequence
atgggcccattgatgtttctgatct

SEQ ID NO: 133256 - DNA, 25 bp, Probe Sequence
atgtggtgccatagtttgtcatccc

SEQ ID NO: 133257 - DNA, 25 bp, Probe Sequence
atgggtcagctcctttgagaacccc

SEQ ID NO: 133258 - DNA, 25 bp, Probe Sequence
atgggacaccaggtccaataccacc

SEQ ID NO: 133259 - DNA, 25 bp, Probe Sequence
atgggaactctggccaagactctac

SEQ ID NO: 133260 - DNA, 25 bp, Probe Sequence
atggagaacttggcctcttatcgat

SEQ ID NO: 133261 - DNA, 25 bp, Probe Sequence
atgggaattggaggccctaaatcta

SEQ ID NO: 133262 - DNA, 25 bp, Probe Sequence
atggaactagaaggctgtttgaact

SEQ ID NO: 133263 - DNA, 25 bp, Probe Sequence
atggttccagaagcttccaaatcct

SEQ ID NO: 133264 - DNA, 25 bp, Probe Sequence
atggctttcgaaacatccagaacat

SEQ ID NO: 133265 - DNA, 25 bp, Probe Sequence
atggtcctgatgatacaccagagga

SEQ ID NO: 133266 - DNA, 25 bp, Probe Sequence
atgggcgtcatgaataacatgcgga

SEQ ID NO: 133267 - DNA, 25 bp, Probe Sequence
atgggagctctgttgttgagcgaga

SEQ ID NO: 133268 - DNA, 25 bp, Probe Sequence
atgtgtagtgtggtctgggcaggca

SEQ ID NO: 133269 - DNA, 25 bp, Probe Sequence
atgtgatgggtggggtggggaggga

SEQ ID NO: 133270 - DNA, 25 bp, Probe Sequence
atggaagcactggaggataagcggg

SEQ ID NO: 133271 - DNA, 25 bp, Probe Sequence
atggaggacatgggtcatcactgag

SEQ ID NO: 133272 - DNA, 25 bp, Probe Sequence
atgtgtgggatggaatctcattgtg

SEQ ID NO: 133273 - DNA, 25 bp, Probe Sequence
atgtgtacgtgggccagcatggtgg

SEQ ID NO: 133274 - DNA, 25 bp, Probe Sequence
atggcttttgtggccatcatttggc

SEQ ID NO: 133275 - DNA, 25 bp, Probe Sequence
atggactgatttgcactcttggttc

SEQ ID NO: 133276 - DNA, 25 bp, Probe Sequence
atggactgatttgcactcttggttc

SEQ ID NO: 133277 - DNA, 25 bp, Probe Sequence
atgggatgatctacagcttgcctgg

SEQ ID NO: 133278 - DNA, 25 bp, Probe Sequence
atgtggagagcgacagtaggctgca

SEQ ID NO: 133279 - DNA, 25 bp, Probe Sequence
atgtggattgcggcagcagaggctg

SEQ ID NO: 133280 - DNA, 25 bp, Probe Sequence
atgtggattctgctgatgcggagga

SEQ ID NO: 133281 - DNA, 25 bp, Probe Sequence
atgtgatatattctgatgtatgggt

SEQ ID NO: 133282 - DNA, 25 bp, Probe Sequence
atgtgtcatactcgtttatctgggt

SEQ ID NO: 133283 - DNA, 25 bp, Probe Sequence
atgtgatatcagttgtttgacgtgc

SEQ ID NO: 133284 - DNA, 25 bp, Probe Sequence
atgtggatcgaatttccctgtgcct

SEQ ID NO: 133285 - DNA, 25 bp, Probe Sequence
atgtggctgtgttttgcctttcact

SEQ ID NO: 133286 - DNA, 25 bp, Probe Sequence
atgtggcagtactttctgctttaat

SEQ ID NO: 133287 - DNA, 25 bp, Probe Sequence
atgtggcagctgattccatgtctgg

SEQ ID NO: 133288 - DNA, 25 bp, Probe Sequence
atgtggctggtaatactgtctgtga

SEQ ID NO: 133289 - DNA, 25 bp, Probe Sequence
atgtggttctgaatcatgttcgcaa

SEQ ID NO: 133290 - DNA, 25 bp, Probe Sequence
atgggctgttgaaatgacctccatt

SEQ ID NO: 133291 - DNA, 25 bp, Probe Sequence
atggggactatagtgcaacctattt

SEQ ID NO: 133292 - DNA, 25 bp, Probe Sequence
atggggttcaaggcagacatcattt

SEQ ID NO: 133293 - DNA, 25 bp, Probe Sequence
atgggaggatataaactgcatcatt

SEQ ID NO: 133294 - DNA, 25 bp, Probe Sequence
atggtcaggtagcatcagtatcacc

SEQ ID NO: 133295 - DNA, 25 bp, Probe Sequence
aggtaggtatggttgcaggcacctg

SEQ ID NO: 133296 - DNA, 25 bp, Probe Sequence
atggctgaggtcagagtggcacccg

SEQ ID NO: 133297 - DNA, 25 bp, Probe Sequence
atggatgatggattgtggataactc

SEQ ID NO: 133298 - DNA, 25 bp, Probe Sequence
atggatgctcagttgtcacatcaaa

SEQ ID NO: 133299 - DNA, 25 bp, Probe Sequence
atggcagctctggcccagacatgaa

SEQ ID NO: 133300 - DNA, 25 bp, Probe Sequence
atggcagctctggcccagacatgaa

SEQ ID NO: 133301 - DNA, 25 bp, Probe Sequence
atggcagctctggcccagacatgaa

SEQ ID NO: 133302 - DNA, 25 bp, Probe Sequence
atggagctcgaggccatgagcagat

SEQ ID NO: 133303 - DNA, 25 bp, Probe Sequence
atggcattcgcagtgcccagtgatg

SEQ ID NO: 133304 - DNA, 25 bp, Probe Sequence
aggctgccgagtggccatcgcagcc

SEQ ID NO: 133305 - DNA, 25 bp, Probe Sequence
atggtagccagtgactcagatcact

SEQ ID NO: 133306 - DNA, 25 bp, Probe Sequence
atggtagaatgctgcctatcacctc

SEQ ID NO: 133307 - DNA, 25 bp, Probe Sequence
atggtagaatgctgcctatcacctc

SEQ ID NO: 133308 - DNA, 25 bp, Probe Sequence
atggtagaatgctgcctatcacctc

SEQ ID NO: 133309 - DNA, 25 bp, Probe Sequence
atgtggcaaatgcacctgctatcct

SEQ ID NO: 133310 - DNA, 25 bp, Probe Sequence
atggtgtggtatagcatcctcaagg

SEQ ID NO: 133311 - DNA, 25 bp, Probe Sequence
atggtgctggtgaattgctctgctc

SEQ ID NO: 133312 - DNA, 25 bp, Probe Sequence
atggtgctggtgaattgctctgctc

SEQ ID NO: 133313 - DNA, 25 bp, Probe Sequence
atggtgctggtgaattgctctgctc

SEQ ID NO: 133314 - DNA, 25 bp, Probe Sequence
atggtttgagtcctgttgctgccat

SEQ ID NO: 133315 - DNA, 25 bp, Probe Sequence
atggcccgcgctggagtttcaatac

SEQ ID NO: 133316 - DNA, 25 bp, Probe Sequence
atggcaccacagatcgattatacag

SEQ ID NO: 133317 - DNA, 25 bp, Probe Sequence
atggagctccgaatgtgcttaagtg

SEQ ID NO: 133318 - DNA, 25 bp, Probe Sequence
aggagctcgccaatggaattcctga

SEQ ID NO: 133319 - DNA, 25 bp, Probe Sequence
atggcctagcacgtggaattcgcga

SEQ ID NO: 133320 - DNA, 25 bp, Probe Sequence
atggcgtgagcccgaaagttggagg

SEQ ID NO: 133321 - DNA, 25 bp, Probe Sequence
atgggaatggggaaagtgagaagta

SEQ ID NO: 133322 - DNA, 25 bp, Probe Sequence
aggcccaggggcccagtaaagtgca

SEQ ID NO: 133323 - DNA, 25 bp, Probe Sequence
agacccaggaggagggcaaattctg

SEQ ID NO: 133324 - DNA, 25 bp, Probe Sequence
agactccttgggaccgtgagttcct

SEQ ID NO: 133325 - DNA, 25 bp, Probe Sequence
agaccacgcttagcggtggcttctt

SEQ ID NO: 133326 - DNA, 25 bp, Probe Sequence
agaccacgcttagcggtggcttctt

SEQ ID NO: 133327 - DNA, 25 bp, Probe Sequence
aggccacagatttctgtttacccat

SEQ ID NO: 133328 - DNA, 25 bp, Probe Sequence
atgggcaagtcttttgggacaacaa

SEQ ID NO: 133329 - DNA, 25 bp, Probe Sequence
atggttcaactgtttgtgagacgaa

SEQ ID NO: 133330 - DNA, 25 bp, Probe Sequence
atgggtcaagtgttgtgctggttga

SEQ ID NO: 133331 - DNA, 25 bp, Probe Sequence
atggagccaagatatgtggactctc

SEQ ID NO: 133332 - DNA, 25 bp, Probe Sequence
atggagcccagaaatgtgatgaaaa

SEQ ID NO: 133333 - DNA, 25 bp, Probe Sequence
atgtggctacagcaactgatgagtt

SEQ ID NO: 133334 - DNA, 25 bp, Probe Sequence
atggggacaggttctatgaatttga

SEQ ID NO: 133335 - DNA, 25 bp, Probe Sequence
atggcaggagctgtactctaccgta

SEQ ID NO: 133336 - DNA, 25 bp, Probe Sequence
atggagatgactttcacacgacctg

SEQ ID NO: 133337 - DNA, 25 bp, Probe Sequence
atggatgatgatgattctcccccac

SEQ ID NO: 133338 - DNA, 25 bp, Probe Sequence
atggatgatgatgattctcccccac

SEQ ID NO: 133339 - DNA, 25 bp, Probe Sequence
atggagatgacctgctccatcacca

SEQ ID NO: 133340 - DNA, 25 bp, Probe Sequence
atggactgcatgaggctcttcacca

SEQ ID NO: 133341 - DNA, 25 bp, Probe Sequence
atggaccagaagtctctctgggcag

SEQ ID NO: 133342 - DNA, 25 bp, Probe Sequence
atggacaagggcttctgaggccagc

SEQ ID NO: 133343 - DNA, 25 bp, Probe Sequence
aggaatgacggctcggccgagaggc

SEQ ID NO: 133344 - DNA, 25 bp, Probe Sequence
aggaatgaggggcttcacgagaggc

SEQ ID NO: 133345 - DNA, 25 bp, Probe Sequence
atggaaggtgacgttcccggagagg

SEQ ID NO: 133346 - DNA, 25 bp, Probe Sequence
atggaagactcagctgtactcggga

SEQ ID NO: 133347 - DNA, 25 bp, Probe Sequence
atggaaactacttgaagccgcccat

SEQ ID NO: 133348 - DNA, 25 bp, Probe Sequence
atggagcaacgtgagtgaccgccca

SEQ ID NO: 133349 - DNA, 25 bp, Probe Sequence
atgggaaccctactgacaagcagcc

SEQ ID NO: 133350 - DNA, 25 bp, Probe Sequence
atggagatgagcctctgaggaaaca

SEQ ID NO: 133351 - DNA, 25 bp, Probe Sequence
atggcgctgacttctatggaaacca

SEQ ID NO: 133352 - DNA, 25 bp, Probe Sequence
atggcatctacttctgtcagcagaa

SEQ ID NO: 133353 - DNA, 25 bp, Probe Sequence
atgggtcatttcccagcatgaacag

SEQ ID NO: 133354 - DNA, 25 bp, Probe Sequence
atggcgtgatatgcacctgcaacgg

SEQ ID NO: 133355 - DNA, 25 bp, Probe Sequence
atgggctcattgtcaccaacgccca

SEQ ID NO: 133356 - DNA, 25 bp, Probe Sequence
atgggctcattgtcaccaacgccca

SEQ ID NO: 133357 - DNA, 25 bp, Probe Sequence
atgggctcattgtcaccaacgccca

SEQ ID NO: 133358 - DNA, 25 bp, Probe Sequence
atggtgctcattcactgcaaactcc

SEQ ID NO: 133359 - DNA, 25 bp, Probe Sequence
atggctttactagtgacacgtcccc

SEQ ID NO: 133360 - DNA, 25 bp, Probe Sequence
atggtacatacgttcactggtctct

SEQ ID NO: 133361 - DNA, 25 bp, Probe Sequence
atgggaagaccatcactgtcacttt

SEQ ID NO: 133362 - DNA, 25 bp, Probe Sequence
atgggagcaaacccctagccaatat

SEQ ID NO: 133363 - DNA, 25 bp, Probe Sequence
atgtggaagaacctttaatcagaga

SEQ ID NO: 133364 - DNA, 25 bp, Probe Sequence
atggaaagcataacttgtaagtaat

SEQ ID NO: 133365 - DNA, 25 bp, Probe Sequence
atggaaaaaacattgaagacgtcat

SEQ ID NO: 133366 - DNA, 25 bp, Probe Sequence
atggaatcagaaccagatgacacat

SEQ ID NO: 133367 - DNA, 25 bp, Probe Sequence
atggatgcatcacactcaaggacag

SEQ ID NO: 133368 - DNA, 25 bp, Probe Sequence
atggtgcaatgatctcggctcactg

SEQ ID NO: 133369 - DNA, 25 bp, Probe Sequence
atggaaatattctgtctgcactgtc

SEQ ID NO: 133370 - DNA, 25 bp, Probe Sequence
atgggaatcttcttgtcattctttt

SEQ ID NO: 133371 - DNA, 25 bp, Probe Sequence
atggaccctaagatattttattaca

SEQ ID NO: 133372 - DNA, 25 bp, Probe Sequence
atggaccctaataatcagtgcttac

SEQ ID NO: 133373 - DNA, 25 bp, Probe Sequence
atggacacttaagatgattccatat

SEQ ID NO: 133374 - DNA, 25 bp, Probe Sequence
atggaacttgctcgggttcaattaa

SEQ ID NO: 133375 - DNA, 25 bp, Probe Sequence
atggctacctgcagctgagctgcca

SEQ ID NO: 133376 - DNA, 25 bp, Probe Sequence
atggatacctctggcatgagacagt

SEQ ID NO: 133377 - DNA, 25 bp, Probe Sequence
atggtattcttcgagtgacagctga

SEQ ID NO: 133378 - DNA, 25 bp, Probe Sequence
atggattttgttgggcaccgaaatc

SEQ ID NO: 133379 - DNA, 25 bp, Probe Sequence
atggattgtgttcctgagacgcaaa

SEQ ID NO: 133380 - DNA, 25 bp, Probe Sequence
atggtagtgtggttgctcacgcaag

SEQ ID NO: 133381 - DNA, 25 bp, Probe Sequence
atggtgagctctggttgccaaggag

SEQ ID NO: 133382 - DNA, 25 bp, Probe Sequence
aggctggcctgtgtggatatggcac

SEQ ID NO: 133383 - DNA, 25 bp, Probe Sequence
atggcgagccagtgtggttgtagag

SEQ ID NO: 133384 - DNA, 25 bp, Probe Sequence
atggggcctgaaaggcatctgtcag

SEQ ID NO: 133385 - DNA, 25 bp, Probe Sequence
atgggcctctagtgacagatccaga

SEQ ID NO: 133386 - DNA, 25 bp, Probe Sequence
atggtgcgcctgctggaagatgccg

SEQ ID NO: 133387 - DNA, 25 bp, Probe Sequence
atggttgctctattggactaccgtg

SEQ ID NO: 133388 - DNA, 25 bp, Probe Sequence
atggcttgactcatgggctttcagt

SEQ ID NO: 133389 - DNA, 25 bp, Probe Sequence
atggtggactcagtgttttaatgct

SEQ ID NO: 133390 - DNA, 25 bp, Probe Sequence
atggggcacaacatttgctgcgatt

SEQ ID NO: 133391 - DNA, 25 bp, Probe Sequence
atggtagactatacatctgttgttt

SEQ ID NO: 133392 - DNA, 25 bp, Probe Sequence
atggctaagtttacttggtgcagtt

SEQ ID NO: 133393 - DNA, 25 bp, Probe Sequence
atggctaggataatccattttcatg

SEQ ID NO: 133394 - DNA, 25 bp, Probe Sequence
atgggcaggcaagccagtcttctgt

SEQ ID NO: 133395 - DNA, 25 bp, Probe Sequence
atggagacctagacctgtctttggg

SEQ ID NO: 133396 - DNA, 25 bp, Probe Sequence
atgggacctgatgacttcattgtgg

SEQ ID NO: 133397 - DNA, 25 bp, Probe Sequence
atgggcacctattatgctacatatc

SEQ ID NO: 133398 - DNA, 25 bp, Probe Sequence
atgggactgttacctacacatgcat

SEQ ID NO: 133399 - DNA, 25 bp, Probe Sequence
atgggagttggcttctgattctcat

SEQ ID NO: 133400 - DNA, 25 bp, Probe Sequence
atggggtgctcatcttgttcagcat

SEQ ID NO: 133401 - DNA, 25 bp, Probe Sequence
atggggaccatgacttgaagcgctg

SEQ ID NO: 133402 - DNA, 25 bp, Probe Sequence
atggggaccatgacttgaagcgctg

SEQ ID NO: 133403 - DNA, 25 bp, Probe Sequence
atggggaccatgacttgaagcgctg

SEQ ID NO: 133404 - DNA, 25 bp, Probe Sequence
atgggagaatagcttgaacctggga

SEQ ID NO: 133405 - DNA, 25 bp, Probe Sequence
atgtggagataccagtttgggtggg

SEQ ID NO: 133406 - DNA, 25 bp, Probe Sequence
atggggaatccgtgtgtgtgtgtgt

SEQ ID NO: 133407 - DNA, 25 bp, Probe Sequence
atggggaatccgtgtgtgtgtgtgt

SEQ ID NO: 133408 - DNA, 25 bp, Probe Sequence
atggggaatccgtgtgtgtgtgtgt

SEQ ID NO: 133409 - DNA, 25 bp, Probe Sequence
agtaaacatgcggctgggtgtggtg

SEQ ID NO: 133410 - DNA, 25 bp, Probe Sequence
aggccaccatcatcggcgagtgggt

SEQ ID NO: 133411 - DNA, 25 bp, Probe Sequence
atggaaccttggcaggcgtggtgtc

SEQ ID NO: 133412 - DNA, 25 bp, Probe Sequence
atgggaggcattgggagtagggttg

SEQ ID NO: 133413 - DNA, 25 bp, Probe Sequence
atgggatggtatgtgagctaggaga

SEQ ID NO: 133414 - DNA, 25 bp, Probe Sequence
atgggattcttggtcagtgaggatg

SEQ ID NO: 133415 - DNA, 25 bp, Probe Sequence
atgggaattgcagttagagagagta

SEQ ID NO: 133416 - DNA, 25 bp, Probe Sequence
atgggattgtcctatggagcaatgt

SEQ ID NO: 133417 - DNA, 25 bp, Probe Sequence
atgggctgggccaaatgaaatgatt

SEQ ID NO: 133418 - DNA, 25 bp, Probe Sequence
atggtcggcgtatatactatggcat

SEQ ID NO: 133419 - DNA, 25 bp, Probe Sequence
atgggcgttggatatcgtttgactc

SEQ ID NO: 133420 - DNA, 25 bp, Probe Sequence
atgggcgtggtatagcgtttgactc

SEQ ID NO: 133421 - DNA, 25 bp, Probe Sequence
atgggagggagtagaactttgactc

SEQ ID NO: 133422 - DNA, 25 bp, Probe Sequence
atgggtggaatgatgccacctggac

SEQ ID NO: 133423 - DNA, 25 bp, Probe Sequence
atgggtggcagtctggaggctggac

SEQ ID NO: 133424 - DNA, 25 bp, Probe Sequence
atgggtgaggtgcgcgatggcgtgg

SEQ ID NO: 133425 - DNA, 25 bp, Probe Sequence
atggctctgagatcgtggtggccgg

SEQ ID NO: 133426 - DNA, 25 bp, Probe Sequence
atggacatgttcagggatcgccagg

SEQ ID NO: 133427 - DNA, 25 bp, Probe Sequence
atggactgttaactgtccccagata

SEQ ID NO: 133428 - DNA, 25 bp, Probe Sequence
atggagtctggacatgctttcccat

SEQ ID NO: 133429 - DNA, 25 bp, Probe Sequence
atggagtctggaggctgttagctaa

SEQ ID NO: 133430 - DNA, 25 bp, Probe Sequence
atggaggcatcatgtctgttaggga

SEQ ID NO: 133431 - DNA, 25 bp, Probe Sequence
aggccgatcaggacttcaagggcca

SEQ ID NO: 133432 - DNA, 25 bp, Probe Sequence
atggcgcagacagatcccgaaacca

SEQ ID NO: 133433 - DNA, 25 bp, Probe Sequence
atggctggccaaactcaagtaccaa

SEQ ID NO: 133434 - DNA, 25 bp, Probe Sequence
atggtggctcatgtctataatccca

SEQ ID NO: 133435 - DNA, 25 bp, Probe Sequence
atggtggctcatgcctgttatctca

SEQ ID NO: 133436 - DNA, 25 bp, Probe Sequence
atggtggatacgctcttgatctcaa

SEQ ID NO: 133437 - DNA, 25 bp, Probe Sequence
atggtgagaccctatctctattaaa

SEQ ID NO: 133438 - DNA, 25 bp, Probe Sequence
atggatcaacatatgacttcattaa

SEQ ID NO: 133439 - DNA, 25 bp, Probe Sequence
atgggaagcatatgtcattccccat

SEQ ID NO: 133440 - DNA, 25 bp, Probe Sequence
atggctaaattcgtgatccgcccag

SEQ ID NO: 133441 - DNA, 25 bp, Probe Sequence
atggcggaaactggatcctggcagc

SEQ ID NO: 133442 - DNA, 25 bp, Probe Sequence
atggggagaggagacgctgccagat

SEQ ID NO: 133443 - DNA, 25 bp, Probe Sequence
atggagagagagcggaaagtgagta

SEQ ID NO: 133444 - DNA, 25 bp, Probe Sequence
atggggagggacgagtagatggtaa

SEQ ID NO: 133445 - DNA, 25 bp, Probe Sequence
atggggagaagatgagtacttgaaa

SEQ ID NO: 133446 - DNA, 25 bp, Probe Sequence
atggcacgagaacaactacgtgatg

SEQ ID NO: 133447 - DNA, 25 bp, Probe Sequence
atggacagacccaaacatagccgcg

SEQ ID NO: 133448 - DNA, 25 bp, Probe Sequence
atggacaggcgggaacatggccacc

SEQ ID NO: 133449 - DNA, 25 bp, Probe Sequence
atggaagggttatgtggtccgaatc

SEQ ID NO: 133450 - DNA, 25 bp, Probe Sequence
atgggagtttgtttgggcaccaaat

SEQ ID NO: 133451 - DNA, 25 bp, Probe Sequence
atgggagtttgtttctggcatccta

SEQ ID NO: 133452 - DNA, 25 bp, Probe Sequence
atgggagtttgttttggcacctatc

SEQ ID NO: 133453 - DNA, 25 bp, Probe Sequence
atggagagtttgttttgctaccaat

SEQ ID NO: 133454 - DNA, 25 bp, Probe Sequence
atggagtcttggtgtcctactctat

SEQ ID NO: 133455 - DNA, 25 bp, Probe Sequence
atggattctgggtggacacagcctt

SEQ ID NO: 133456 - DNA, 25 bp, Probe Sequence
atgggtggggagggtcagctccttc

SEQ ID NO: 133457 - DNA, 25 bp, Probe Sequence
atgggtggggagggtcagctccttc

SEQ ID NO: 133458 - DNA, 25 bp, Probe Sequence
atggtgtttggagccatggtccttc

SEQ ID NO: 133459 - DNA, 25 bp, Probe Sequence
atggtgtttagatttatggttgtta

SEQ ID NO: 133460 - DNA, 25 bp, Probe Sequence
atggatgattaaattttagtacatt

SEQ ID NO: 133461 - DNA, 25 bp, Probe Sequence
atggtgatgcggttttgtcagtaca

SEQ ID NO: 133462 - DNA, 25 bp, Probe Sequence
atggtgatgcggttttggcagtaca

SEQ ID NO: 133463 - DNA, 25 bp, Probe Sequence
atggtgatgcggttttggcagtaca

SEQ ID NO: 133464 - DNA, 25 bp, Probe Sequence
atggtgatgcggttttggcagtaca

SEQ ID NO: 133465 - DNA, 25 bp, Probe Sequence
atggtgatgcggttttggcagtaca

SEQ ID NO: 133466 - DNA, 25 bp, Probe Sequence
atggtgatgcggttttggcagtaca

SEQ ID NO: 133467 - DNA, 25 bp, Probe Sequence
atggtgatgcggttttggcagtaca

SEQ ID NO: 133468 - DNA, 25 bp, Probe Sequence
atggtgatgcggttttggcagtaca

SEQ ID NO: 133469 - DNA, 25 bp, Probe Sequence
atggtgatgcggttttggcagtaca

SEQ ID NO: 133470 - DNA, 25 bp, Probe Sequence
atggtgatgcggttttggcagtaca

SEQ ID NO: 133471 - DNA, 25 bp, Probe Sequence
atggtgatgcggttttggcagtaca

SEQ ID NO: 133472 - DNA, 25 bp, Probe Sequence
atggtgatgcggttttggcagtaca

SEQ ID NO: 133473 - DNA, 25 bp, Probe Sequence
atggtgatgcggttttggcagtaca

SEQ ID NO: 133474 - DNA, 25 bp, Probe Sequence
atggtgatgcggttttggcagtaca

SEQ ID NO: 133475 - DNA, 25 bp, Probe Sequence
atggtgatgcggttttggcagtaca

SEQ ID NO: 133476 - DNA, 25 bp, Probe Sequence
atggtgatgcggttttggcagtaca

SEQ ID NO: 133477 - DNA, 25 bp, Probe Sequence
atggtgatgcggttttggcagtaca

SEQ ID NO: 133478 - DNA, 25 bp, Probe Sequence
atggtgatgcggttttggcagtaca

SEQ ID NO: 133479 - DNA, 25 bp, Probe Sequence
atggtgatgcggttttggcagtaca

SEQ ID NO: 133480 - DNA, 25 bp, Probe Sequence
atggatagggtgctgtgccagggct

SEQ ID NO: 133481 - DNA, 25 bp, Probe Sequence
atggtaggagtcaatctgccacaga

SEQ ID NO: 133482 - DNA, 25 bp, Probe Sequence
atggtcaggccaagcctctctaaat

SEQ ID NO: 133483 - DNA, 25 bp, Probe Sequence
acggcaaccatccgatttctcaatc

SEQ ID NO: 133484 - DNA, 25 bp, Probe Sequence
acgccttccctggatttctaacagg

SEQ ID NO: 133485 - DNA, 25 bp, Probe Sequence
acgacctgtccagatggttaccatt

SEQ ID NO: 133486 - DNA, 25 bp, Probe Sequence
aggagagcttccgcaagtttgccat

SEQ ID NO: 133487 - DNA, 25 bp, Probe Sequence
aggccgtgtccaaagactttgcgta

SEQ ID NO: 133488 - DNA, 25 bp, Probe Sequence
aggccgtgtctctggacagacggat

SEQ ID NO: 133489 - DNA, 25 bp, Probe Sequence
agggggtcataaggatagacttgaa

SEQ ID NO: 133490 - DNA, 25 bp, Probe Sequence
aggcgggtgcatcacgaggttagga

SEQ ID NO: 133491 - DNA, 25 bp, Probe Sequence
aggcgggcagatcacaaggtcaaga

SEQ ID NO: 133492 - DNA, 25 bp, Probe Sequence
atgggcatggaaaccaaggctcaaa

SEQ ID NO: 133493 - DNA, 25 bp, Probe Sequence
agggatctgaaagatacgtggtatc

SEQ ID NO: 133494 - DNA, 25 bp, Probe Sequence
atgggcacaaaacatacttagaatg

SEQ ID NO: 133495 - DNA, 25 bp, Probe Sequence
aggcccaggaaatactcaacagcag

SEQ ID NO: 133496 - DNA, 25 bp, Probe Sequence
aggccggaaaggtcgcaccaagaga

SEQ ID NO: 133497 - DNA, 25 bp, Probe Sequence
aggccggggagagagcagcccgaga

SEQ ID NO: 133498 - DNA, 25 bp, Probe Sequence
atggtctgtggggttagagcccaga

SEQ ID NO: 133499 - DNA, 25 bp, Probe Sequence
atggtcttggcactattacacaaaa

SEQ ID NO: 133500 - DNA, 25 bp, Probe Sequence
atggtcataggccttctctgaaaat

SEQ ID NO: 133501 - DNA, 25 bp, Probe Sequence
atggccaagcaattcctctgaacaa

SEQ ID NO: 133502 - DNA, 25 bp, Probe Sequence
aggcctagcaacgcttgtaggactc

SEQ ID NO: 133503 - DNA, 25 bp, Probe Sequence
atgggtcacacaaacttggtggtcc

SEQ ID NO: 133504 - DNA, 25 bp, Probe Sequence
atggcttccacaaaccctgttggaa

SEQ ID NO: 133505 - DNA, 25 bp, Probe Sequence
atggctttaccatcttggctttagt

SEQ ID NO: 133506 - DNA, 25 bp, Probe Sequence
atggtgtataactctagagcttgaa

SEQ ID NO: 133507 - DNA, 25 bp, Probe Sequence
atggtgtgtacctgtaatctcagct

SEQ ID NO: 133508 - DNA, 25 bp, Probe Sequence
aggctggatacggttgacttcacgg

SEQ ID NO: 133509 - DNA, 25 bp, Probe Sequence
aggctataagtggtctacggctctg

SEQ ID NO: 133510 - DNA, 25 bp, Probe Sequence
aggccgaattggactacctcatgga

SEQ ID NO: 133511 - DNA, 25 bp, Probe Sequence
aggcctatttaggtgacactataga

SEQ ID NO: 133512 - DNA, 25 bp, Probe Sequence
aggcctatttaggtgacactataga

SEQ ID NO: 133513 - DNA, 25 bp, Probe Sequence
aggcctatttaggtgacactataga

SEQ ID NO: 133514 - DNA, 25 bp, Probe Sequence
aggcttggctttgagattctgtaac

SEQ ID NO: 133515 - DNA, 25 bp, Probe Sequence
atggattggttttcataatttaata

SEQ ID NO: 133516 - DNA, 25 bp, Probe Sequence
atggaatgtgatctagctaaaaaag

SEQ ID NO: 133517 - DNA, 25 bp, Probe Sequence
atggcaaggtccggacaagacaacc

SEQ ID NO: 133518 - DNA, 25 bp, Probe Sequence
atggcgaggtcattggcatcaacac

SEQ ID NO: 133519 - DNA, 25 bp, Probe Sequence
atggcatagttcttggagcagatac

SEQ ID NO: 133520 - DNA, 25 bp, Probe Sequence
atggattgttccaagtcagcaactg

SEQ ID NO: 133521 - DNA, 25 bp, Probe Sequence
atggactttgtcatggcactcatct

SEQ ID NO: 133522 - DNA, 25 bp, Probe Sequence
atggctctaaatatggtctataatt

SEQ ID NO: 133523 - DNA, 25 bp, Probe Sequence
atggctttgttgatcagtaatgact

SEQ ID NO: 133524 - DNA, 25 bp, Probe Sequence
aggcattatgcctggcaatataatt

SEQ ID NO: 133525 - DNA, 25 bp, Probe Sequence
aggctctagccaacatgcagttaca

SEQ ID NO: 133526 - DNA, 25 bp, Probe Sequence
aggcattcctagccgagtgtgacac

SEQ ID NO: 133527 - DNA, 25 bp, Probe Sequence
atggcccctgaggctgtgtgtaaca

SEQ ID NO: 133528 - DNA, 25 bp, Probe Sequence
atgggacggagcgagtgtggaacct

SEQ ID NO: 133529 - DNA, 25 bp, Probe Sequence
atgggattgtgaaggtgtggaaata

SEQ ID NO: 133530 - DNA, 25 bp, Probe Sequence
atggtggtgttgagctgattattaa

SEQ ID NO: 133531 - DNA, 25 bp, Probe Sequence
atgggaggcttgagccattattgct

SEQ ID NO: 133532 - DNA, 25 bp, Probe Sequence
atgggggcttgatagctgtggtccc

SEQ ID NO: 133533 - DNA, 25 bp, Probe Sequence
atgggtggttcagatggtggctaca

SEQ ID NO: 133534 - DNA, 25 bp, Probe Sequence
atgggtgggaatgataggacaggca

SEQ ID NO: 133535 - DNA, 25 bp, Probe Sequence
aggccgggactgagatggacagacc

SEQ ID NO: 133536 - DNA, 25 bp, Probe Sequence
aggttggtcatcaggatggccaccc

SEQ ID NO: 133537 - DNA, 25 bp, Probe Sequence
atggtgtggtggaggttgacgccgc

SEQ ID NO: 133538 - DNA, 25 bp, Probe Sequence
atggggagcaggaggtctgacaatg

SEQ ID NO: 133539 - DNA, 25 bp, Probe Sequence
atggtggatatggaaggtggagaag

SEQ ID NO: 133540 - DNA, 25 bp, Probe Sequence
atggctggcggtaaggctggaaagg

SEQ ID NO: 133541 - DNA, 25 bp, Probe Sequence
aggcggctgaaaaggctggagacaa

SEQ ID NO: 133542 - DNA, 25 bp, Probe Sequence
aggcgttggcagcagggttagaaca

SEQ ID NO: 133543 - DNA, 25 bp, Probe Sequence
aggcctgggaattggagtctcacca

SEQ ID NO: 133544 - DNA, 25 bp, Probe Sequence
aggttagccagtgtgactatgcacc

SEQ ID NO: 133545 - DNA, 25 bp, Probe Sequence
atggttcatgcctgtaatccagcac

SEQ ID NO: 133546 - DNA, 25 bp, Probe Sequence
atggatctctggtgtaaatatgact

SEQ ID NO: 133547 - DNA, 25 bp, Probe Sequence
atggtctggtgctgtgtttctagct

SEQ ID NO: 133548 - DNA, 25 bp, Probe Sequence
atggctcggtgcggatgtttgacct

SEQ ID NO: 133549 - DNA, 25 bp, Probe Sequence
atggtggtgtgggtgactggagcct

SEQ ID NO: 133550 - DNA, 25 bp, Probe Sequence
atggggatgagtgatgccttcagcc

SEQ ID NO: 133551 - DNA, 25 bp, Probe Sequence
atggtggcaagtggattattcggct

SEQ ID NO: 133552 - DNA, 25 bp, Probe Sequence
atggtgccgaattgtctttggtgct

SEQ ID NO: 133553 - DNA, 25 bp, Probe Sequence
atggagccgagatccagtcagggtg

SEQ ID NO: 133554 - DNA, 25 bp, Probe Sequence
atggagccgagatccagtcagggtg

SEQ ID NO: 133555 - DNA, 25 bp, Probe Sequence
atggagggcagatccttatcgccga

SEQ ID NO: 133556 - DNA, 25 bp, Probe Sequence
atggtgggcagttgctcttacatga

SEQ ID NO: 133557 - DNA, 25 bp, Probe Sequence
atggtgggcagttgctcttacatga

SEQ ID NO: 133558 - DNA, 25 bp, Probe Sequence
atggtggctatgtgcctggtcatga

SEQ ID NO: 133559 - DNA, 25 bp, Probe Sequence
atgggagtgatgttcacgcctctga

SEQ ID NO: 133560 - DNA, 25 bp, Probe Sequence
atggtgaattgaatcctgcagctct

SEQ ID NO: 133561 - DNA, 25 bp, Probe Sequence
aggctgagtgtgaagcctcctaccc

SEQ ID NO: 133562 - DNA, 25 bp, Probe Sequence
atggtttgtgtagcaggcttcctgc

SEQ ID NO: 133563 - DNA, 25 bp, Probe Sequence
aggctacgtgttgagcgtggcctac

SEQ ID NO: 133564 - DNA, 25 bp, Probe Sequence
aggctataggacgcagctgttgcca

SEQ ID NO: 133565 - DNA, 25 bp, Probe Sequence
aggctgaagccaacttgctttccag

SEQ ID NO: 133566 - DNA, 25 bp, Probe Sequence
atggctcatgatgcacgtgttttcc

SEQ ID NO: 133567 - DNA, 25 bp, Probe Sequence
atggaatgatgacttcatgttcttc

SEQ ID NO: 133568 - DNA, 25 bp, Probe Sequence
atgggattggtattgctgtgtgctt

SEQ ID NO: 133569 - DNA, 25 bp, Probe Sequence
atgggaggatggttttctcttcatg

SEQ ID NO: 133570 - DNA, 25 bp, Probe Sequence
atggcaggggagttgaatctttgag

SEQ ID NO: 133571 - DNA, 25 bp, Probe Sequence
atggcacctgtgattgtactcttat

SEQ ID NO: 133572 - DNA, 25 bp, Probe Sequence
aggcccagcagcttttattcatgtc

SEQ ID NO: 133573 - DNA, 25 bp, Probe Sequence
aggccacctctcattaatgtgcaga

SEQ ID NO: 133574 - DNA, 25 bp, Probe Sequence
aggccaggtatcctctgtttgaagg

SEQ ID NO: 133575 - DNA, 25 bp, Probe Sequence
aggctgtggatagcttggtgccaat

SEQ ID NO: 133576 - DNA, 25 bp, Probe Sequence
aggcgctggaagtcttctgtgacat

SEQ ID NO: 133577 - DNA, 25 bp, Probe Sequence
atggcctggatgttgctatcggtgt

SEQ ID NO: 133578 - DNA, 25 bp, Probe Sequence
aggctgaggtgaatggatcggttga

SEQ ID NO: 133579 - DNA, 25 bp, Probe Sequence
aggctgtggcaggagaatcgtttga

SEQ ID NO: 133580 - DNA, 25 bp, Probe Sequence
atggtattgtgccagacccttgatg

SEQ ID NO: 133581 - DNA, 25 bp, Probe Sequence
atggtatcactgttgacccttgtgg

SEQ ID NO: 133582 - DNA, 25 bp, Probe Sequence
atggatagagtcttgacacattctg

SEQ ID NO: 133583 - DNA, 25 bp, Probe Sequence
atggatgagatgataaatgtttgtt

SEQ ID NO: 133584 - DNA, 25 bp, Probe Sequence
atggcatcaatgctaaattctatga

SEQ ID NO: 133585 - DNA, 25 bp, Probe Sequence
atggatctatgattgacctcctagt

SEQ ID NO: 133586 - DNA, 25 bp, Probe Sequence
atggatctagcttgatgcttaataa

SEQ ID NO: 133587 - DNA, 25 bp, Probe Sequence
atggcatcatataatttgctagtca

SEQ ID NO: 133588 - DNA, 25 bp, Probe Sequence
atggagtatgttttgctatgtaata

SEQ ID NO: 133589 - DNA, 25 bp, Probe Sequence
atgggtgcatatgtgttactaaaac

SEQ ID NO: 133590 - DNA, 25 bp, Probe Sequence
atgggtctgatgtgatatgacaaga

SEQ ID NO: 133591 - DNA, 25 bp, Probe Sequence
atgggtgatatgcgaacagcaaacc

SEQ ID NO: 133592 - DNA, 25 bp, Probe Sequence
atggcggtggacaaaagcaacccta

SEQ ID NO: 133593 - DNA, 25 bp, Probe Sequence
aggcggtgcagaacgacagcaaccc

SEQ ID NO: 133594 - DNA, 25 bp, Probe Sequence
aggcgtgcaatatctgccagcagaa

SEQ ID NO: 133595 - DNA, 25 bp, Probe Sequence
atggcctcaatatgtgccgccagtg

SEQ ID NO: 133596 - DNA, 25 bp, Probe Sequence
atggggcaattactgggctcgtgca

SEQ ID NO: 133597 - DNA, 25 bp, Probe Sequence
atggagggtatactgaggggtctat

SEQ ID NO: 133598 - DNA, 25 bp, Probe Sequence
atgggggtgcatttgaggtctgttc

SEQ ID NO: 133599 - DNA, 25 bp, Probe Sequence
atggtgcgagtgatggaggtgttcc

SEQ ID NO: 133600 - DNA, 25 bp, Probe Sequence
atggtgctgagtcgggcagaggcct

SEQ ID NO: 133601 - DNA, 25 bp, Probe Sequence
atggtgatgatgccgaggacttcct

SEQ ID NO: 133602 - DNA, 25 bp, Probe Sequence
atggttgatcagtctaagcttccta

SEQ ID NO: 133603 - DNA, 25 bp, Probe Sequence
atggttgaatgtaaatcttgaagca

SEQ ID NO: 133604 - DNA, 25 bp, Probe Sequence
atggggcaattaagtcaaatagctt

SEQ ID NO: 133605 - DNA, 25 bp, Probe Sequence
agggccggtagttcgagaagctccg

SEQ ID NO: 133606 - DNA, 25 bp, Probe Sequence
cgcggaaggatcataacggagcccg

SEQ ID NO: 133607 - DNA, 25 bp, Probe Sequence
aggccaaggtccgagtgctggaccc

SEQ ID NO: 133608 - DNA, 25 bp, Probe Sequence
aggccaaggtcattactgaggaaac

SEQ ID NO: 133609 - DNA, 25 bp, Probe Sequence
agtccagtgcgttttccagaaatac

SEQ ID NO: 133610 - DNA, 25 bp, Probe Sequence
aggcctctgagaattcccagaaaaa

SEQ ID NO: 133611 - DNA, 25 bp, Probe Sequence
atggcaccatgtgtggtccagaaat

SEQ ID NO: 133612 - DNA, 25 bp, Probe Sequence
atggatgcctatatgagtactgaca

SEQ ID NO: 133613 - DNA, 25 bp, Probe Sequence
atggaactcatcaacagctcctaca

SEQ ID NO: 133614 - DNA, 25 bp, Probe Sequence
atggaatcccaatctatctaaattt

SEQ ID NO: 133615 - DNA, 25 bp, Probe Sequence
atggcacaactagaaactaatatgt

SEQ ID NO: 133616 - DNA, 25 bp, Probe Sequence
atggaaaccagatcaagcccaagat

SEQ ID NO: 133617 - DNA, 25 bp, Probe Sequence
atggagccaccatttcagaaccaaa

SEQ ID NO: 133618 - DNA, 25 bp, Probe Sequence
atggactgaaaaccagaaccacaga

SEQ ID NO: 133619 - DNA, 25 bp, Probe Sequence
atggcagctgacagagccaaacaaa

SEQ ID NO: 133620 - DNA, 25 bp, Probe Sequence
atggcaatgacaatgagaacaacag

SEQ ID NO: 133621 - DNA, 25 bp, Probe Sequence
atggctgctacaatgagaagcacag

SEQ ID NO: 133622 - DNA, 25 bp, Probe Sequence
atggtgctccaaggctatgccaggt

SEQ ID NO: 133623 - DNA, 25 bp, Probe Sequence
atggtctccacaagtatctgaagat

SEQ ID NO: 133624 - DNA, 25 bp, Probe Sequence
atggatgctcaattagttttaagat

SEQ ID NO: 133625 - DNA, 25 bp, Probe Sequence
atggagcttttcctgatgttccact

SEQ ID NO: 133626 - DNA, 25 bp, Probe Sequence
atggagtacttcaaatctgcccact

SEQ ID NO: 133627 - DNA, 25 bp, Probe Sequence
atggcagtaataaaagtctgcactt

SEQ ID NO: 133628 - DNA, 25 bp, Probe Sequence
aggcatgtttaacatccagcactgt

SEQ ID NO: 133629 - DNA, 25 bp, Probe Sequence
atggctgttattatacacagctctg

SEQ ID NO: 133630 - DNA, 25 bp, Probe Sequence
aggctgtagtgttgtaacctgctgc

SEQ ID NO: 133631 - DNA, 25 bp, Probe Sequence
aggcttagtggtcccaacttgttct

SEQ ID NO: 133632 - DNA, 25 bp, Probe Sequence
atggctatttgaatgccgcaacctg

SEQ ID NO: 133633 - DNA, 25 bp, Probe Sequence
atggctatttggatgacaaagctac

SEQ ID NO: 133634 - DNA, 25 bp, Probe Sequence
aggccatcacgtatgccaaaggatt

SEQ ID NO: 133635 - DNA, 25 bp, Probe Sequence
aggcctcattgtgtgcagaaactgt

SEQ ID NO: 133636 - DNA, 25 bp, Probe Sequence
atggcacaactgtccacgtaggcat

SEQ ID NO: 133637 - DNA, 25 bp, Probe Sequence
atggcaaatatggccaggcgaggtg

SEQ ID NO: 133638 - DNA, 25 bp, Probe Sequence
atggcaaatgaaaaggtagctgaga

SEQ ID NO: 133639 - DNA, 25 bp, Probe Sequence
atggcaacaagaagaagtcgggcaa

SEQ ID NO: 133640 - DNA, 25 bp, Probe Sequence
atggcaagcaagtcgcaaagctggg

SEQ ID NO: 133641 - DNA, 25 bp, Probe Sequence
atggcaagccactcataatgttgtc

SEQ ID NO: 133642 - DNA, 25 bp, Probe Sequence
atggttggctacgaaatgcttgctc

SEQ ID NO: 133643 - DNA, 25 bp, Probe Sequence
atggttgttaaaaatgtcatctcaa

SEQ ID NO: 133644 - DNA, 25 bp, Probe Sequence
atggcttttcaaatacatttcttaa

SEQ ID NO: 133645 - DNA, 25 bp, Probe Sequence
atggtttttatcaactgtctccaaa

SEQ ID NO: 133646 - DNA, 25 bp, Probe Sequence
atggtttttatcaactgtctccaaa

SEQ ID NO: 133647 - DNA, 25 bp, Probe Sequence
atggtttttattcctggcatccaga

SEQ ID NO: 133648 - DNA, 25 bp, Probe Sequence
atggattttgtattctctagacgga

SEQ ID NO: 133649 - DNA, 25 bp, Probe Sequence
atggtgcttattttcctaactccat

SEQ ID NO: 133650 - DNA, 25 bp, Probe Sequence
atggtgatcggtttgccagtacatc

SEQ ID NO: 133651 - DNA, 25 bp, Probe Sequence
atggtgatgcgttttgccagtacat

SEQ ID NO: 133652 - DNA, 25 bp, Probe Sequence
atggtgtggctaatctacatttatc

SEQ ID NO: 133653 - DNA, 25 bp, Probe Sequence
atggagtgttcagtgcccatttctc

SEQ ID NO: 133654 - DNA, 25 bp, Probe Sequence
atggagagtgtctgcggatacttcc

SEQ ID NO: 133655 - DNA, 25 bp, Probe Sequence
agtaagtgtaaggtgtacttggtat

SEQ ID NO: 133656 - DNA, 25 bp, Probe Sequence
aggcaacagatagagtgtccttggt

SEQ ID NO: 133657 - DNA, 25 bp, Probe Sequence
aggccacaggagagagtgccttgtg

SEQ ID NO: 133658 - DNA, 25 bp, Probe Sequence
atggccataggtgaggggcctctga

SEQ ID NO: 133659 - DNA, 25 bp, Probe Sequence
atggcgtagctttcgtggagttcta

SEQ ID NO: 133660 - DNA, 25 bp, Probe Sequence
atggcgtggatatcggtttgactca

SEQ ID NO: 133661 - DNA, 25 bp, Probe Sequence
atggcgtggataccggtttgactca

SEQ ID NO: 133662 - DNA, 25 bp, Probe Sequence
atggcgtggatacggtttgactcac

SEQ ID NO: 133663 - DNA, 25 bp, Probe Sequence
atggtgtggacaaggtcgtggcctg

SEQ ID NO: 133664 - DNA, 25 bp, Probe Sequence
atggtgggaatgcagtggtagagtt

SEQ ID NO: 133665 - DNA, 25 bp, Probe Sequence
atggctgaagaacaaccgcaggtcg

SEQ ID NO: 133666 - DNA, 25 bp, Probe Sequence
atggtgataaggctcaggcgctgga

SEQ ID NO: 133667 - DNA, 25 bp, Probe Sequence
atggtgctgaacgtgtcaggcccag

SEQ ID NO: 133668 - DNA, 25 bp, Probe Sequence
atggtgctggaggtgatcggagaat

SEQ ID NO: 133669 - DNA, 25 bp, Probe Sequence
atggagcttgcgattgaggagatgt

SEQ ID NO: 133670 - DNA, 25 bp, Probe Sequence
atggcatgtccgcattgcagaagaa

SEQ ID NO: 133671 - DNA, 25 bp, Probe Sequence
atggcactccagcctggcaagagaa

SEQ ID NO: 133672 - DNA, 25 bp, Probe Sequence
aggcctgtcgcagcagcaagagata

SEQ ID NO: 133673 - DNA, 25 bp, Probe Sequence
aggcctgtcagctgcgttgactgac

SEQ ID NO: 133674 - DNA, 25 bp, Probe Sequence
aggctttagcagctttgcatttcct

SEQ ID NO: 133675 - DNA, 25 bp, Probe Sequence
aggctgtttgcacctttaaggacca

SEQ ID NO: 133676 - DNA, 25 bp, Probe Sequence
aggaatttctccatgcccaggagga

SEQ ID NO: 133677 - DNA, 25 bp, Probe Sequence
agtccatggttcgggagccagggga

SEQ ID NO: 133678 - DNA, 25 bp, Probe Sequence
aggcctgaggtctgcggaaggtggg

SEQ ID NO: 133679 - DNA, 25 bp, Probe Sequence
aggcagcccagtttcgcgaaggctg

SEQ ID NO: 133680 - DNA, 25 bp, Probe Sequence
aggcctctcatgacccaggaaggcc

SEQ ID NO: 133681 - DNA, 25 bp, Probe Sequence
aggcccttgcctaagaaagcacctc

SEQ ID NO: 133682 - DNA, 25 bp, Probe Sequence
aggccaaccgcgagaagatgaccca

SEQ ID NO: 133683 - DNA, 25 bp, Probe Sequence
agtaccagacggtgaaggccctagc

SEQ ID NO: 133684 - DNA, 25 bp, Probe Sequence
agtagggcgggcttgaaggccctga

SEQ ID NO: 133685 - DNA, 25 bp, Probe Sequence
agctaatgggggtggtaggcctata

SEQ ID NO: 133686 - DNA, 25 bp, Probe Sequence
agtggaagagggtgcccaacccttg

SEQ ID NO: 133687 - DNA, 25 bp, Probe Sequence
aggcgggatgggacacccaacactt

SEQ ID NO: 133688 - DNA, 25 bp, Probe Sequence
atggccgtgaccttcatcggcaaca

SEQ ID NO: 133689 - DNA, 25 bp, Probe Sequence
atggctctgtagcaactgagtaaca

SEQ ID NO: 133690 - DNA, 25 bp, Probe Sequence
atggctcatgtagataaggtaggca

SEQ ID NO: 133691 - DNA, 25 bp, Probe Sequence
atggctttcaaaaccgtaagcccag

SEQ ID NO: 133692 - DNA, 25 bp, Probe Sequence
atggttctaagaactctacacacac

SEQ ID NO: 133693 - DNA, 25 bp, Probe Sequence
aggttctaagatataaagcctcaga

SEQ ID NO: 133694 - DNA, 25 bp, Probe Sequence
aggctttggcctataagacagtgga

SEQ ID NO: 133695 - DNA, 25 bp, Probe Sequence
aggcgttggttcaccaggacgtgat

SEQ ID NO: 133696 - DNA, 25 bp, Probe Sequence
agtggttcagttgaggccagaagtt

SEQ ID NO: 133697 - DNA, 25 bp, Probe Sequence
agtcttaccttgagggaacagtcat

SEQ ID NO: 133698 - DNA, 25 bp, Probe Sequence
agggagtccttgagcgaaacaatgt

SEQ ID NO: 133699 - DNA, 25 bp, Probe Sequence
aggctcgatcctgtcgagaaggaag

SEQ ID NO: 133700 - DNA, 25 bp, Probe Sequence
aggcatcaggccaagcccaaagaga

SEQ ID NO: 133701 - DNA, 25 bp, Probe Sequence
aggcgctggctcagtcaataaagga

SEQ ID NO: 133702 - DNA, 25 bp, Probe Sequence
atggctgtggccagtaccaagagtc

SEQ ID NO: 133703 - DNA, 25 bp, Probe Sequence
aggtctggcagaggtgtctaaggtt

SEQ ID NO: 133704 - DNA, 25 bp, Probe Sequence
aggttggggtggccataatggtttg

SEQ ID NO: 133705 - DNA, 25 bp, Probe Sequence
atggtagttttgttatacaggtatt

SEQ ID NO: 133706 - DNA, 25 bp, Probe Sequence
atggttttttcataactgcagtcct

SEQ ID NO: 133707 - DNA, 25 bp, Probe Sequence
aggcttgttttcttaatatgcttct

SEQ ID NO: 133708 - DNA, 25 bp, Probe Sequence
aggcttattttatacatacgtatta

SEQ ID NO: 133709 - DNA, 25 bp, Probe Sequence
aggttctttctgaaatcgccgtgtt

SEQ ID NO: 133710 - DNA, 25 bp, Probe Sequence
atggtttttatttctcgggtgcatt

SEQ ID NO: 133711 - DNA, 25 bp, Probe Sequence
atggaggtttattttgtgggacatt

SEQ ID NO: 133712 - DNA, 25 bp, Probe Sequence
atggatggaatttagtttgcgggaa

SEQ ID NO: 133713 - DNA, 25 bp, Probe Sequence
aggccctgcagttagtttgcgggaa

SEQ ID NO: 133714 - DNA, 25 bp, Probe Sequence
aggccctagatctgctgatggggag

SEQ ID NO: 133715 - DNA, 25 bp, Probe Sequence
aggcctcacaatgcacgtgggagat

SEQ ID NO: 133716 - DNA, 25 bp, Probe Sequence
aggccatcgattcccgggaagatcc

SEQ ID NO: 133717 - DNA, 25 bp, Probe Sequence
aggctgcccaggacgggaaagtcca

SEQ ID NO: 133718 - DNA, 25 bp, Probe Sequence
ggaaggccaaccagcgtaagttaat

SEQ ID NO: 133719 - DNA, 25 bp, Probe Sequence
aagggccacccgaggaagcagtatt

SEQ ID NO: 133720 - DNA, 25 bp, Probe Sequence
agggtgcccttctttggggcagtag

SEQ ID NO: 133721 - DNA, 25 bp, Probe Sequence
aggggccgcagtattgggagtggac

SEQ ID NO: 133722 - DNA, 25 bp, Probe Sequence
aggggtcggctaagtgggacattag

SEQ ID NO: 133723 - DNA, 25 bp, Probe Sequence
agaaggttggtcagaggggctccca

SEQ ID NO: 133724 - DNA, 25 bp, Probe Sequence
cggggttggttctggacattacaca

SEQ ID NO: 133725 - DNA, 25 bp, Probe Sequence
aggaattttttcagagtgctataaa

SEQ ID NO: 133726 - DNA, 25 bp, Probe Sequence
aggcagtttttgagaagtgaatgac

SEQ ID NO: 133727 - DNA, 25 bp, Probe Sequence
aggctttatttcaggctggagaact

SEQ ID NO: 133728 - DNA, 25 bp, Probe Sequence
aggctgccttggtctaggtgaaaaa

SEQ ID NO: 133729 - DNA, 25 bp, Probe Sequence
atggcatggttgctctattggacta

SEQ ID NO: 133730 - DNA, 25 bp, Probe Sequence
atggcagtgttgcttactgagtgtc

SEQ ID NO: 133731 - DNA, 25 bp, Probe Sequence
aggctggtctcgaacatctgacctc

SEQ ID NO: 133732 - DNA, 25 bp, Probe Sequence
aggctgcagatcagtggtctgaatt

SEQ ID NO: 133733 - DNA, 25 bp, Probe Sequence
aggcgatatctctgtgtgcgaatgg

SEQ ID NO: 133734 - DNA, 25 bp, Probe Sequence
aggcgatgtgctttatggcaggcgc

SEQ ID NO: 133735 - DNA, 25 bp, Probe Sequence
atggaggtcctccatgcagagagcc

SEQ ID NO: 133736 - DNA, 25 bp, Probe Sequence
atggactgtcctactggcagaacat

SEQ ID NO: 133737 - DNA, 25 bp, Probe Sequence
atggacttccttaccaattgcattg

SEQ ID NO: 133738 - DNA, 25 bp, Probe Sequence
atggtttacatgttccaatatgatt

SEQ ID NO: 133739 - DNA, 25 bp, Probe Sequence
atggtcttaaggaacatctctgctt

SEQ ID NO: 133740 - DNA, 25 bp, Probe Sequence
atggtcttaaggaacatctctgctt

SEQ ID NO: 133741 - DNA, 25 bp, Probe Sequence
aggtttgttggcagatgctcgttct

SEQ ID NO: 133742 - DNA, 25 bp, Probe Sequence
aggctttataagagatgggttcagt

SEQ ID NO: 133743 - DNA, 25 bp, Probe Sequence
aggcgtgtatgacgctgggcacgtt

SEQ ID NO: 133744 - DNA, 25 bp, Probe Sequence
aggcatgtgatatgatgctcggctg

SEQ ID NO: 133745 - DNA, 25 bp, Probe Sequence
atggcattgtatttctggtggattg

SEQ ID NO: 133746 - DNA, 25 bp, Probe Sequence
atggcattgtatttctggtggattg

SEQ ID NO: 133747 - DNA, 25 bp, Probe Sequence
atggcatttcattaaggcatctatg

SEQ ID NO: 133748 - DNA, 25 bp, Probe Sequence
atggctttatccaggcatctgatgt

SEQ ID NO: 133749 - DNA, 25 bp, Probe Sequence
atggctattgaggctggagctctgg

SEQ ID NO: 133750 - DNA, 25 bp, Probe Sequence
aggtgagctgagaggagttgggtag

SEQ ID NO: 133751 - DNA, 25 bp, Probe Sequence
aggctgaccacaagggctatgggac

SEQ ID NO: 133752 - DNA, 25 bp, Probe Sequence
aggctgtcagacaggctgggggcct

SEQ ID NO: 133753 - DNA, 25 bp, Probe Sequence
aggcgttgtacggtgggaggtctat

SEQ ID NO: 133754 - DNA, 25 bp, Probe Sequence
aggcctatttaggtgacccctatag

SEQ ID NO: 133755 - DNA, 25 bp, Probe Sequence
aggctaattttgaagaactcccata

SEQ ID NO: 133756 - DNA, 25 bp, Probe Sequence
aggctacttttgaagatccctctgc

SEQ ID NO: 133757 - DNA, 25 bp, Probe Sequence
aggaatccattcatgagaccccatc

SEQ ID NO: 133758 - DNA, 25 bp, Probe Sequence
atggaagccatgaattagaactaca

SEQ ID NO: 133759 - DNA, 25 bp, Probe Sequence
atggaagcctgttgctttgctctag

SEQ ID NO: 133760 - DNA, 25 bp, Probe Sequence
atggacagccagagctttctatgta

SEQ ID NO: 133761 - DNA, 25 bp, Probe Sequence
atggaatgccagacgctggggatgc

SEQ ID NO: 133762 - DNA, 25 bp, Probe Sequence
atggatacagatggctctggaaagc

SEQ ID NO: 133763 - DNA, 25 bp, Probe Sequence
atggtacagtcctagcagatgagag

SEQ ID NO: 133764 - DNA, 25 bp, Probe Sequence
atggtacctgcttctctgaagagtt

SEQ ID NO: 133765 - DNA, 25 bp, Probe Sequence
atggatacccttactgagcagaaat

SEQ ID NO: 133766 - DNA, 25 bp, Probe Sequence
atggtagcgtctcacatacagaaat

SEQ ID NO: 133767 - DNA, 25 bp, Probe Sequence
atggcctgcgttgacatcaacgagt

SEQ ID NO: 133768 - DNA, 25 bp, Probe Sequence
atggcctgcgttgacatcaacgagt

SEQ ID NO: 133769 - DNA, 25 bp, Probe Sequence
atggcacctggtgtacagatctgag

SEQ ID NO: 133770 - DNA, 25 bp, Probe Sequence
atggccctgtagttaggcctggctc

SEQ ID NO: 133771 - DNA, 25 bp, Probe Sequence
atggcctttcacttgaggagtactc

SEQ ID NO: 133772 - DNA, 25 bp, Probe Sequence
atggccaatgtacatggtggactat

SEQ ID NO: 133773 - DNA, 25 bp, Probe Sequence
atggccgtgtaggagactcaccaat

SEQ ID NO: 133774 - DNA, 25 bp, Probe Sequence
aggccagttagttaccagattaaat

SEQ ID NO: 133775 - DNA, 25 bp, Probe Sequence
atggccaatctattctcaaagttaa

SEQ ID NO: 133776 - DNA, 25 bp, Probe Sequence
atggcacagattgatgcgcaccagt

SEQ ID NO: 133777 - DNA, 25 bp, Probe Sequence
atggcaaagagagtcgcatctcagt

SEQ ID NO: 133778 - DNA, 25 bp, Probe Sequence
atggagacaatagcagatcctgtag

SEQ ID NO: 133779 - DNA, 25 bp, Probe Sequence
atggagacacaagcaccgaggagcc

SEQ ID NO: 133780 - DNA, 25 bp, Probe Sequence
aggctaacagagaccctgatgctgg

SEQ ID NO: 133781 - DNA, 25 bp, Probe Sequence
aggtcagcacgttgctgtcgattaa

SEQ ID NO: 133782 - DNA, 25 bp, Probe Sequence
atggtcacagtggttatggatttat

SEQ ID NO: 133783 - DNA, 25 bp, Probe Sequence
atggctaaggctactatacttggat

SEQ ID NO: 133784 - DNA, 25 bp, Probe Sequence
aggccagaggcccattagttgagaa

SEQ ID NO: 133785 - DNA, 25 bp, Probe Sequence
atggaaaggcgccatccagtgtgct

SEQ ID NO: 133786 - DNA, 25 bp, Probe Sequence
atggcgaaccggatcagtgcctttg

SEQ ID NO: 133787 - DNA, 25 bp, Probe Sequence
atggcgacatggtggtcagctgctc

SEQ ID NO: 133788 - DNA, 25 bp, Probe Sequence
atggagagtggtcggaaccaccaag

SEQ ID NO: 133789 - DNA, 25 bp, Probe Sequence
atggagagtggtcggcaccacctag

SEQ ID NO: 133790 - DNA, 25 bp, Probe Sequence
atggaggtggtagatgccacagaga

SEQ ID NO: 133791 - DNA, 25 bp, Probe Sequence
atggatgacttgacaacagccctgg

SEQ ID NO: 133792 - DNA, 25 bp, Probe Sequence
atggcagtcttttaagcctgggtca

SEQ ID NO: 133793 - DNA, 25 bp, Probe Sequence
aggagttcatttcgcatactgggca

SEQ ID NO: 133794 - DNA, 25 bp, Probe Sequence
atggaggtcgagaccagcctgacca

SEQ ID NO: 133795 - DNA, 25 bp, Probe Sequence
atggagattggaccttccagaccct

SEQ ID NO: 133796 - DNA, 25 bp, Probe Sequence
atggagactggaccttccagaccct

SEQ ID NO: 133797 - DNA, 25 bp, Probe Sequence
atggagagggaccgctacatgagcc

SEQ ID NO: 133798 - DNA, 25 bp, Probe Sequence
atggaggcaggacggtgtcattggc

SEQ ID NO: 133799 - DNA, 25 bp, Probe Sequence
atggagcagcagcttggcttctttg

SEQ ID NO: 133800 - DNA, 25 bp, Probe Sequence
atggagatgatcccttgctgactta

SEQ ID NO: 133801 - DNA, 25 bp, Probe Sequence
atggagatgatcccttgctgactta

SEQ ID NO: 133802 - DNA, 25 bp, Probe Sequence
atggcgtgaccagtcatgtactata

SEQ ID NO: 133803 - DNA, 25 bp, Probe Sequence
aggcatggtgccgcataactataat

SEQ ID NO: 133804 - DNA, 25 bp, Probe Sequence
atggcatcgtccctgaaacgtggat

SEQ ID NO: 133805 - DNA, 25 bp, Probe Sequence
atggcacttccaaaaacggcagcac

SEQ ID NO: 133806 - DNA, 25 bp, Probe Sequence
atggaagctccacaaagcagcagcc

SEQ ID NO: 133807 - DNA, 25 bp, Probe Sequence
atggcaactttgaaagatatcacca

SEQ ID NO: 133808 - DNA, 25 bp, Probe Sequence
atggctcagctcatcatacagacca

SEQ ID NO: 133809 - DNA, 25 bp, Probe Sequence
atggcgcattcaaaacagtctcagt

SEQ ID NO: 133810 - DNA, 25 bp, Probe Sequence
atggctgatttataagcagtacttg

SEQ ID NO: 133811 - DNA, 25 bp, Probe Sequence
atggcgagtttttaggcttgctcat

SEQ ID NO: 133812 - DNA, 25 bp, Probe Sequence
aggcagattttattactacgtactt

SEQ ID NO: 133813 - DNA, 25 bp, Probe Sequence
aggcaaattttctactacgctaacg

SEQ ID NO: 133814 - DNA, 25 bp, Probe Sequence
atggaaagtttccagtacactgaaa

SEQ ID NO: 133815 - DNA, 25 bp, Probe Sequence
atggaagagtttacaccaccttcta

SEQ ID NO: 133816 - DNA, 25 bp, Probe Sequence
aggacgatactctgaccgttttagt

SEQ ID NO: 133817 - DNA, 25 bp, Probe Sequence
aggacttagacatatcttttttggg

SEQ ID NO: 133818 - DNA, 25 bp, Probe Sequence
aggaattgagtataaatattgcttc

SEQ ID NO: 133819 - DNA, 25 bp, Probe Sequence
atggttacgtataaagtattctact

SEQ ID NO: 133820 - DNA, 25 bp, Probe Sequence
aggccaaagcaaacggtttctcctg

SEQ ID NO: 133821 - DNA, 25 bp, Probe Sequence
aggccaaattgcagagggtcctcca

SEQ ID NO: 133822 - DNA, 25 bp, Probe Sequence
atggccaacaggccggggtactcca

SEQ ID NO: 133823 - DNA, 25 bp, Probe Sequence
aggccaaccagatgctgggcgatct

SEQ ID NO: 133824 - DNA, 25 bp, Probe Sequence
aggctctacgagaagcggggtcagg

SEQ ID NO: 133825 - DNA, 25 bp, Probe Sequence
agtgccccgaggtgaggcggcgggg

SEQ ID NO: 133826 - DNA, 25 bp, Probe Sequence
aggcccggcgaggagaacggcaaag

SEQ ID NO: 133827 - DNA, 25 bp, Probe Sequence
aggtatggggcggcaaaacctatca

SEQ ID NO: 133828 - DNA, 25 bp, Probe Sequence
aggccaagacgggcaaaagtctgac

SEQ ID NO: 133829 - DNA, 25 bp, Probe Sequence
atggacctgacgcgggaggtgtgcc

SEQ ID NO: 133830 - DNA, 25 bp, Probe Sequence
aggcctctgacgagtgagcgggtga

SEQ ID NO: 133831 - DNA, 25 bp, Probe Sequence
aggcggtgcacgaggtggaggtggt

SEQ ID NO: 133832 - DNA, 25 bp, Probe Sequence
atggccgtgcagtttgacgggggcg

SEQ ID NO: 133833 - DNA, 25 bp, Probe Sequence
atggcttgtgtgtcctgaagtgggg

SEQ ID NO: 133834 - DNA, 25 bp, Probe Sequence
atggttgctgggctgtagggtgagt

SEQ ID NO: 133835 - DNA, 25 bp, Probe Sequence
atggttgtggcgtgtgagtcaggag

SEQ ID NO: 133836 - DNA, 25 bp, Probe Sequence
aggcctggaggctgacagttgggaa

SEQ ID NO: 133837 - DNA, 25 bp, Probe Sequence
aggcctgggtgcggaaactgaagtg

SEQ ID NO: 133838 - DNA, 25 bp, Probe Sequence
aggctagttgtgacagactcctgga

SEQ ID NO: 133839 - DNA, 25 bp, Probe Sequence
aggctgattctggaagttctgagga

SEQ ID NO: 133840 - DNA, 25 bp, Probe Sequence
aggaggctgctgccaagtactacga

SEQ ID NO: 133841 - DNA, 25 bp, Probe Sequence
aggagtgcctagtagtatcaagcta

SEQ ID NO: 133842 - DNA, 25 bp, Probe Sequence
aggcctccatcttagtatcaacata

SEQ ID NO: 133843 - DNA, 25 bp, Probe Sequence
atggctcttcataattctaagacta

SEQ ID NO: 133844 - DNA, 25 bp, Probe Sequence
atggctgttcagtgactaatgagag

SEQ ID NO: 133845 - DNA, 25 bp, Probe Sequence
atggctgttctactatttagatagt

SEQ ID NO: 133846 - DNA, 25 bp, Probe Sequence
aggcctatgcacaatttatagcaag

SEQ ID NO: 133847 - DNA, 25 bp, Probe Sequence
atggactcatccatttgtgaggagg

SEQ ID NO: 133848 - DNA, 25 bp, Probe Sequence
atggaaatacctacatgatgggccc

SEQ ID NO: 133849 - DNA, 25 bp, Probe Sequence
atggcgagattgggatcgggacccc

SEQ ID NO: 133850 - DNA, 25 bp, Probe Sequence
aggcgagttggtctgaaagcccccg

SEQ ID NO: 133851 - DNA, 25 bp, Probe Sequence
aggaagtcttgtcctagaacgccct

SEQ ID NO: 133852 - DNA, 25 bp, Probe Sequence
aggaggtctgtgggctgaactccga

SEQ ID NO: 133853 - DNA, 25 bp, Probe Sequence
aggcatgggtgcgcgaaaattctga

SEQ ID NO: 133854 - DNA, 25 bp, Probe Sequence
atggctgggcgagcattggagcttc

SEQ ID NO: 133855 - DNA, 25 bp, Probe Sequence
atggcatgagggacctctcgggatg

SEQ ID NO: 133856 - DNA, 25 bp, Probe Sequence
aggatggtgctgactttgccaagtg

SEQ ID NO: 133857 - DNA, 25 bp, Probe Sequence
atggatggatgttttgcatgctcaa

SEQ ID NO: 133858 - DNA, 25 bp, Probe Sequence
atggataagtctatgcatctataat

SEQ ID NO: 133859 - DNA, 25 bp, Probe Sequence
atggaatgacttgtctgcctcacat

SEQ ID NO: 133860 - DNA, 25 bp, Probe Sequence
atggactgaagtatccagcgctcat

SEQ ID NO: 133861 - DNA, 25 bp, Probe Sequence
atggaaaaggtgtcaatctgctctg

SEQ ID NO: 133862 - DNA, 25 bp, Probe Sequence
atggaacacatgtgccttccacaga

SEQ ID NO: 133863 - DNA, 25 bp, Probe Sequence
atggaaacagaagctcaccagaaca

SEQ ID NO: 133864 - DNA, 25 bp, Probe Sequence
atggaaagcttatctgcaccagaga

SEQ ID NO: 133865 - DNA, 25 bp, Probe Sequence
aggaaagttgcctgacctgagactc

SEQ ID NO: 133866 - DNA, 25 bp, Probe Sequence
aggaacgtttcctgcttgaaattat

SEQ ID NO: 133867 - DNA, 25 bp, Probe Sequence
acgcaagttttatactctaatattt

SEQ ID NO: 133868 - DNA, 25 bp, Probe Sequence
atggcctttcttatactctagaata

SEQ ID NO: 133869 - DNA, 25 bp, Probe Sequence
atggacttatctgcgaacttatgac

SEQ ID NO: 133870 - DNA, 25 bp, Probe Sequence
aggagggattccctgactttgacac

SEQ ID NO: 133871 - DNA, 25 bp, Probe Sequence
aggaattagggcctagattgtaagc

SEQ ID NO: 133872 - DNA, 25 bp, Probe Sequence
aggccatcttagacagttggtgtaa

SEQ ID NO: 133873 - DNA, 25 bp, Probe Sequence
atggctcattaaatcagttatggtt

SEQ ID NO: 133874 - DNA, 25 bp, Probe Sequence
aggtaggccatgacagttctggatg

SEQ ID NO: 133875 - DNA, 25 bp, Probe Sequence
atggatcaagctagatcagcattct

SEQ ID NO: 133876 - DNA, 25 bp, Probe Sequence
atggcaacagccacacagtcattgc

SEQ ID NO: 133877 - DNA, 25 bp, Probe Sequence
atggacagaccacgcacgtgatttg

SEQ ID NO: 133878 - DNA, 25 bp, Probe Sequence
atggaatgaccccaggctgaagctc

SEQ ID NO: 133879 - DNA, 25 bp, Probe Sequence
atggatcaggtgcggctgatgaaga

SEQ ID NO: 133880 - DNA, 25 bp, Probe Sequence
atggagaggcggcctcgtgccatga

SEQ ID NO: 133881 - DNA, 25 bp, Probe Sequence
atggagaagacaccttgtgctcatg

SEQ ID NO: 133882 - DNA, 25 bp, Probe Sequence
atggagagcagatgtatcttgtcaa

SEQ ID NO: 133883 - DNA, 25 bp, Probe Sequence
atggactgtgcctatgattcttaag

SEQ ID NO: 133884 - DNA, 25 bp, Probe Sequence
agtacatatgcagacactcttaact

SEQ ID NO: 133885 - DNA, 25 bp, Probe Sequence
aggtaatgcctatctcttggtctat

SEQ ID NO: 133886 - DNA, 25 bp, Probe Sequence
atggaaacacatctcattattttat

SEQ ID NO: 133887 - DNA, 25 bp, Probe Sequence
atggaagacaggaatcttttagtaa

SEQ ID NO: 133888 - DNA, 25 bp, Probe Sequence
atggcaaaagtaatcatgttttaat

SEQ ID NO: 133889 - DNA, 25 bp, Probe Sequence
atggaaagtttgtagcatttttcta

SEQ ID NO: 133890 - DNA, 25 bp, Probe Sequence
aggctagtttcttcagcttaattta

SEQ ID NO: 133891 - DNA, 25 bp, Probe Sequence
aggcgtgatctctgtcactttattt

SEQ ID NO: 133892 - DNA, 25 bp, Probe Sequence
atggcagatgtgtgttacttttatt

SEQ ID NO: 133893 - DNA, 25 bp, Probe Sequence
atggcagtgacatgtttgtcatttt

SEQ ID NO: 133894 - DNA, 25 bp, Probe Sequence
atggagctcatgtttttcttttctg

SEQ ID NO: 133895 - DNA, 25 bp, Probe Sequence
atggcagccaggggcttcatttctt

SEQ ID NO: 133896 - DNA, 25 bp, Probe Sequence
atggcagccaggggcttcatttctt

SEQ ID NO: 133897 - DNA, 25 bp, Probe Sequence
atggaggcgacagctacatcattct

SEQ ID NO: 133898 - DNA, 25 bp, Probe Sequence
atggaggaggagaccacacttttcc

SEQ ID NO: 133899 - DNA, 25 bp, Probe Sequence
atggagcggggcgccagtgaattaa

SEQ ID NO: 133900 - DNA, 25 bp, Probe Sequence
aggaagctaagcactcggagttata

SEQ ID NO: 133901 - DNA, 25 bp, Probe Sequence
aggaaccagaatgcttagagttcat

SEQ ID NO: 133902 - DNA, 25 bp, Probe Sequence
aggaattgcgggccttcaagttatt

SEQ ID NO: 133903 - DNA, 25 bp, Probe Sequence
aggaattcgtgtctcctagtgacct

SEQ ID NO: 133904 - DNA, 25 bp, Probe Sequence
aggacacctttatccagtttcctgg

SEQ ID NO: 133905 - DNA, 25 bp, Probe Sequence
aggctacccttagccaatatcctct

SEQ ID NO: 133906 - DNA, 25 bp, Probe Sequence
aggctttggctttgctcaaaatccc

SEQ ID NO: 133907 - DNA, 25 bp, Probe Sequence
aggttgcggttagccgagatcgcgc

SEQ ID NO: 133908 - DNA, 25 bp, Probe Sequence
aggctccacgtgagcccgagattgc

SEQ ID NO: 133909 - DNA, 25 bp, Probe Sequence
aggccaacgtgcagcggctgaagga

SEQ ID NO: 133910 - DNA, 25 bp, Probe Sequence
atggccaaatcgatgctgctgtaga

SEQ ID NO: 133911 - DNA, 25 bp, Probe Sequence
atggccaatgggatgctgtgatggt

SEQ ID NO: 133912 - DNA, 25 bp, Probe Sequence
atggccttggggatatgctgtgctg

SEQ ID NO: 133913 - DNA, 25 bp, Probe Sequence
atggctttgattggacttggtgtga

SEQ ID NO: 133914 - DNA, 25 bp, Probe Sequence
atggcttgtattgaacttttacatt

SEQ ID NO: 133915 - DNA, 25 bp, Probe Sequence
atggctgtgctgaatggaactgctc

SEQ ID NO: 133916 - DNA, 25 bp, Probe Sequence
atggagctggtcagactgtgctatg

SEQ ID NO: 133917 - DNA, 25 bp, Probe Sequence
atggagcttgcagagcacttctgaa

SEQ ID NO: 133918 - DNA, 25 bp, Probe Sequence
atggagtgtgcattacatttggaaa

SEQ ID NO: 133919 - DNA, 25 bp, Probe Sequence
atggacatgttcacttgggaaccaa

SEQ ID NO: 133920 - DNA, 25 bp, Probe Sequence
atggaatattgagcatagagtagaa

SEQ ID NO: 133921 - DNA, 25 bp, Probe Sequence
atggctaattgtcctatgatgctat

SEQ ID NO: 133922 - DNA, 25 bp, Probe Sequence
atggcatgcattagctcactttcat

SEQ ID NO: 133923 - DNA, 25 bp, Probe Sequence
atggctcttgccactgttatgtaca

SEQ ID NO: 133924 - DNA, 25 bp, Probe Sequence
atggcctgtggcatgatgtgatatt

SEQ ID NO: 133925 - DNA, 25 bp, Probe Sequence
aggctctgatgccttgaattggttt

SEQ ID NO: 133926 - DNA, 25 bp, Probe Sequence
aggccatgactctttaggtgtgtat

SEQ ID NO: 133927 - DNA, 25 bp, Probe Sequence
aggccatacgatttgtgctctgggt

SEQ ID NO: 133928 - DNA, 25 bp, Probe Sequence
aggccaagctggtctagcctgacat

SEQ ID NO: 133929 - DNA, 25 bp, Probe Sequence
aggcaaacttgtcacgcatgccaca

SEQ ID NO: 133930 - DNA, 25 bp, Probe Sequence
aggccagaactagcaggcactcaat

SEQ ID NO: 133931 - DNA, 25 bp, Probe Sequence
aggaaggcccatgaggcatgcattt

SEQ ID NO: 133932 - DNA, 25 bp, Probe Sequence
aggcggggcacagaggatgccgctc

SEQ ID NO: 133933 - DNA, 25 bp, Probe Sequence
aggcggtgagcagaagcttgtcctc

SEQ ID NO: 133934 - DNA, 25 bp, Probe Sequence
atggcgcggaagaaggtgcgtccgc

SEQ ID NO: 133935 - DNA, 25 bp, Probe Sequence
aggccggagaattgcttgagcctgg

SEQ ID NO: 133936 - DNA, 25 bp, Probe Sequence
aggcgggcagattacatgagaccag

SEQ ID NO: 133937 - DNA, 25 bp, Probe Sequence
atggcgtagatttacatatgaccta

SEQ ID NO: 133938 - DNA, 25 bp, Probe Sequence
atggcagtatgtttacatgtcagaa

SEQ ID NO: 133939 - DNA, 25 bp, Probe Sequence
atggaaatgtgttagcctcagacac

SEQ ID NO: 133940 - DNA, 25 bp, Probe Sequence
atggcaagagatcatatcctcagac

SEQ ID NO: 133941 - DNA, 25 bp, Probe Sequence
atggcaacactggattcagtgcagg

SEQ ID NO: 133942 - DNA, 25 bp, Probe Sequence
aggcattgctgcgcagatttgcagg

SEQ ID NO: 133943 - DNA, 25 bp, Probe Sequence
atggcatcctgagacagttgcacag

SEQ ID NO: 133944 - DNA, 25 bp, Probe Sequence
atggagcatggatacctctggcatg

SEQ ID NO: 133945 - DNA, 25 bp, Probe Sequence
atggctgcaggagacatcggcgagc

SEQ ID NO: 133946 - DNA, 25 bp, Probe Sequence
atggcgggacaaccatggctggcat

SEQ ID NO: 133947 - DNA, 25 bp, Probe Sequence
atggccaggacaacacatgtgagga

SEQ ID NO: 133948 - DNA, 25 bp, Probe Sequence
aggctgagtgtgaagcctcctaccc

SEQ ID NO: 133949 - DNA, 25 bp, Probe Sequence
aggctgagtgtaaagcctcctgccc

SEQ ID NO: 133950 - DNA, 25 bp, Probe Sequence
aggcatcatgtgcatggaccacctg

SEQ ID NO: 133951 - DNA, 25 bp, Probe Sequence
aggctgctgtgaaagaggctggcta

SEQ ID NO: 133952 - DNA, 25 bp, Probe Sequence
atggctgagtgcacaggtgccgcca

SEQ ID NO: 133953 - DNA, 25 bp, Probe Sequence
atggcgtcccactgtggatcatcat

SEQ ID NO: 133954 - DNA, 25 bp, Probe Sequence
atggcttaagcctgtgtataaaaaa

SEQ ID NO: 133955 - DNA, 25 bp, Probe Sequence
atggctgtaaggcgtttacggtgga

SEQ ID NO: 133956 - DNA, 25 bp, Probe Sequence
atggccggtaggcgtgtacggtggg

SEQ ID NO: 133957 - DNA, 25 bp, Probe Sequence
atggccggtagggcgtgtacggtgc

SEQ ID NO: 133958 - DNA, 25 bp, Probe Sequence
aggcatggagttgggcgttaggggc

SEQ ID NO: 133959 - DNA, 25 bp, Probe Sequence
aggcagaagctagggcctggggggt

SEQ ID NO: 133960 - DNA, 25 bp, Probe Sequence
aggccaggcttgggaatgggttggg

SEQ ID NO: 133961 - DNA, 25 bp, Probe Sequence
atggccaggccatgttatgggatct

SEQ ID NO: 133962 - DNA, 25 bp, Probe Sequence
aggccagtgtcagggtcggagtggc

SEQ ID NO: 133963 - DNA, 25 bp, Probe Sequence
aggcctggctcgaaggcagggaggc

SEQ ID NO: 133964 - DNA, 25 bp, Probe Sequence
aggccttgtccacagggggacttga

SEQ ID NO: 133965 - DNA, 25 bp, Probe Sequence
aggcctagattacttgcacgggact

SEQ ID NO: 133966 - DNA, 25 bp, Probe Sequence
aggcctagtacaatcttgggaacag

SEQ ID NO: 133967 - DNA, 25 bp, Probe Sequence
atggctaaaacaattctgagaggaa

SEQ ID NO: 133968 - DNA, 25 bp, Probe Sequence
aggctgtataaactctctggaccaa

SEQ ID NO: 133969 - DNA, 25 bp, Probe Sequence
aggagtaagacccctggaccaccag

SEQ ID NO: 133970 - DNA, 25 bp, Probe Sequence
agggtccgacctggaggaccacagg

SEQ ID NO: 133971 - DNA, 25 bp, Probe Sequence
aggtcctggacccgaagtccaagtg

SEQ ID NO: 133972 - DNA, 25 bp, Probe Sequence
aggcccaaagccacaagattttatg

SEQ ID NO: 133973 - DNA, 25 bp, Probe Sequence
aaatccaacctacaagttctttgag

SEQ ID NO: 133974 - DNA, 25 bp, Probe Sequence
agacaaaaaccacatactaatttga

SEQ ID NO: 133975 - DNA, 25 bp, Probe Sequence
agacagaaaaatggaaacccttcag

SEQ ID NO: 133976 - DNA, 25 bp, Probe Sequence
atggaaataacggacacgccctcca

SEQ ID NO: 133977 - DNA, 25 bp, Probe Sequence
atggaaaaatctctcttgctcccca

SEQ ID NO: 133978 - DNA, 25 bp, Probe Sequence
atggaaacagatttcttcaccccca

SEQ ID NO: 133979 - DNA, 25 bp, Probe Sequence
atggaaaagtgttgcctgccaccac

SEQ ID NO: 133980 - DNA, 25 bp, Probe Sequence
atggaaaagtgttgcctgccaccac

SEQ ID NO: 133981 - DNA, 25 bp, Probe Sequence
atggcaaaagacttggtgcgcaccc

SEQ ID NO: 133982 - DNA, 25 bp, Probe Sequence
atggcatcagagatttttccacctc

SEQ ID NO: 133983 - DNA, 25 bp, Probe Sequence
atggcaataacttcttccaactcct

SEQ ID NO: 133984 - DNA, 25 bp, Probe Sequence
aggcaataaacggcccaactagtgc

SEQ ID NO: 133985 - DNA, 25 bp, Probe Sequence
aggaaaacaccatctcaactttgcc

SEQ ID NO: 133986 - DNA, 25 bp, Probe Sequence
aggaacaaccaacattgacttgcca

SEQ ID NO: 133987 - DNA, 25 bp, Probe Sequence
atggaagaaccatctctatgactag

SEQ ID NO: 133988 - DNA, 25 bp, Probe Sequence
atggaagacacttacctaacaagta

SEQ ID NO: 133989 - DNA, 25 bp, Probe Sequence
aggaatgtgccataccgaatccgtg

SEQ ID NO: 133990 - DNA, 25 bp, Probe Sequence
aggaaaccattgaccgcgagacttc

SEQ ID NO: 133991 - DNA, 25 bp, Probe Sequence
aggaaagtctagacactgtaagtgt

SEQ ID NO: 133992 - DNA, 25 bp, Probe Sequence
atggcaaggtcaacatctgctgtaa

SEQ ID NO: 133993 - DNA, 25 bp, Probe Sequence
atggcaaggtcaacatctgctgtaa

SEQ ID NO: 133994 - DNA, 25 bp, Probe Sequence
atggccacaccaaattgcatgtgaa

SEQ ID NO: 133995 - DNA, 25 bp, Probe Sequence
atggcacataacactccaatgatag

SEQ ID NO: 133996 - DNA, 25 bp, Probe Sequence
atggcctcataagctcacagaaagt

SEQ ID NO: 133997 - DNA, 25 bp, Probe Sequence
atggcacttactgtgcaccaaacaa

SEQ ID NO: 133998 - DNA, 25 bp, Probe Sequence
aggccttccagttcactgacaaaca

SEQ ID NO: 133999 - DNA, 25 bp, Probe Sequence
aggctttcaccaacacttcaaatat

SEQ ID NO: 134000 - DNA, 25 bp, Probe Sequence
aggtggtcacacccaaatcaattat

SEQ ID NO: 134001 - DNA, 25 bp, Probe Sequence
agctggaaaccgacgtagcaaatta

SEQ ID NO: 134002 - DNA, 25 bp, Probe Sequence
atggaataacacctttaaaatgctg

SEQ ID NO: 134003 - DNA, 25 bp, Probe Sequence
atggaaaccatccttgaaaattgtt

SEQ ID NO: 134004 - DNA, 25 bp, Probe Sequence
atggaaacactccagggtcaggttt

SEQ ID NO: 134005 - DNA, 25 bp, Probe Sequence
atggcacaaccttaggagtagcagt

SEQ ID NO: 134006 - DNA, 25 bp, Probe Sequence
atggaagaatcctggacttggctag

SEQ ID NO: 134007 - DNA, 25 bp, Probe Sequence
atggccaaattctggcctgctgtgt

SEQ ID NO: 134008 - DNA, 25 bp, Probe Sequence
atggcgaaattatccccatctgtcc

SEQ ID NO: 134009 - DNA, 25 bp, Probe Sequence
atggcaaaattagtcgccttcgtcg

SEQ ID NO: 134010 - DNA, 25 bp, Probe Sequence
atggcagacaatttttcgctccatg

SEQ ID NO: 134011 - DNA, 25 bp, Probe Sequence
atggcacacaatttaagacttatga

SEQ ID NO: 134012 - DNA, 25 bp, Probe Sequence
atggaacattcatatagtctctgtg

SEQ ID NO: 134013 - DNA, 25 bp, Probe Sequence
atggaagctacatagtgtctcactt

SEQ ID NO: 134014 - DNA, 25 bp, Probe Sequence
atggcaaccactagtgtgctcatcc

SEQ ID NO: 134015 - DNA, 25 bp, Probe Sequence
atggcatacaaaaagatggcatctg

SEQ ID NO: 134016 - DNA, 25 bp, Probe Sequence
aggcttcaaatctaagaactgaatt

SEQ ID NO: 134017 - DNA, 25 bp, Probe Sequence
atggcccaggattcaagaactgtac

SEQ ID NO: 134018 - DNA, 25 bp, Probe Sequence
aggccaaggatgtcattgaagagta

SEQ ID NO: 134019 - DNA, 25 bp, Probe Sequence
aggccatcggctttgtcaaggatgt

SEQ ID NO: 134020 - DNA, 25 bp, Probe Sequence
aggcctgggcgctgatgaaggagat

SEQ ID NO: 134021 - DNA, 25 bp, Probe Sequence
aggcctgcggcaggaggcacaagaa

SEQ ID NO: 134022 - DNA, 25 bp, Probe Sequence
atggcagcgggacgctggatctgga

SEQ ID NO: 134023 - DNA, 25 bp, Probe Sequence
aggccaggggagggcatctggacca

SEQ ID NO: 134024 - DNA, 25 bp, Probe Sequence
aggccgaaggagagatatgcttcct

SEQ ID NO: 134025 - DNA, 25 bp, Probe Sequence
aggccttggaagggactctttctgc

SEQ ID NO: 134026 - DNA, 25 bp, Probe Sequence
aggcactttgtgagggtctttatac

SEQ ID NO: 134027 - DNA, 25 bp, Probe Sequence
aggccgattcacaggaggacttctt

SEQ ID NO: 134028 - DNA, 25 bp, Probe Sequence
aggccccaactttgatggcacattt

SEQ ID NO: 134029 - DNA, 25 bp, Probe Sequence
aggccagcagagacttagggatttt

SEQ ID NO: 134030 - DNA, 25 bp, Probe Sequence
atggccgggaaatgctggacatctt

SEQ ID NO: 134031 - DNA, 25 bp, Probe Sequence
aggcgaggaaaacccatggctgctt

SEQ ID NO: 134032 - DNA, 25 bp, Probe Sequence
aggctaggaatcaaacttgggtttg

SEQ ID NO: 134033 - DNA, 25 bp, Probe Sequence
aggaagtaactttagaggaggatct

SEQ ID NO: 134034 - DNA, 25 bp, Probe Sequence
atggcaactaccattaatatgagga

SEQ ID NO: 134035 - DNA, 25 bp, Probe Sequence
atggccactattattaaagagctgt

SEQ ID NO: 134036 - DNA, 25 bp, Probe Sequence
atggctgatctactctgttaccaat

SEQ ID NO: 134037 - DNA, 25 bp, Probe Sequence
atggctatattcttgtgtattctgt

SEQ ID NO: 134038 - DNA, 25 bp, Probe Sequence
atggcaatttagattcactgatgtc

SEQ ID NO: 134039 - DNA, 25 bp, Probe Sequence
atggaagcttctttgtcactggctc

SEQ ID NO: 134040 - DNA, 25 bp, Probe Sequence
aggcaggttaccatcactggatctg

SEQ ID NO: 134041 - DNA, 25 bp, Probe Sequence
atggcggtaggcgtgtacggtggga

SEQ ID NO: 134042 - DNA, 25 bp, Probe Sequence
atggcggtaggcgtgtacggtggga

SEQ ID NO: 134043 - DNA, 25 bp, Probe Sequence
atggcggtaggcgtgtacggtggga

SEQ ID NO: 134044 - DNA, 25 bp, Probe Sequence
atggccgtagcgtttacgtggaggt

SEQ ID NO: 134045 - DNA, 25 bp, Probe Sequence
aggccagtcacgtttaggtggggcg

SEQ ID NO: 134046 - DNA, 25 bp, Probe Sequence
aggcctggagcctgtagggctggac

SEQ ID NO: 134047 - DNA, 25 bp, Probe Sequence
agtaatggaccagtgaaggtgtggg

SEQ ID NO: 134048 - DNA, 25 bp, Probe Sequence
agcaactggaaggaacggatgggcc

SEQ ID NO: 134049 - DNA, 25 bp, Probe Sequence
aggcctggaaggagcgcgtggggca

SEQ ID NO: 134050 - DNA, 25 bp, Probe Sequence
agtccaaaatccagcagggcggtca

SEQ ID NO: 134051 - DNA, 25 bp, Probe Sequence
aggccaagtaccaatgttggctgtt

SEQ ID NO: 134052 - DNA, 25 bp, Probe Sequence
aggccaatcgccactttggcatggc

SEQ ID NO: 134053 - DNA, 25 bp, Probe Sequence
aggccaataccacagttgataacgt

SEQ ID NO: 134054 - DNA, 25 bp, Probe Sequence
aggcctaaccattagtacttactgt

SEQ ID NO: 134055 - DNA, 25 bp, Probe Sequence
aggcctgaggcctcaacatttatct

SEQ ID NO: 134056 - DNA, 25 bp, Probe Sequence
aggcctggagtctacaccaaggtct

SEQ ID NO: 134057 - DNA, 25 bp, Probe Sequence
aggcctggagtctacaccaaggtct

SEQ ID NO: 134058 - DNA, 25 bp, Probe Sequence
aggcctggagtctacaccaaggtct

SEQ ID NO: 134059 - DNA, 25 bp, Probe Sequence
atggccgtgggcctcaacaagggcc

SEQ ID NO: 134060 - DNA, 25 bp, Probe Sequence
acccggggattctctagagatccag

SEQ ID NO: 134061 - DNA, 25 bp, Probe Sequence
aggccgaaggtttccattggacctg

SEQ ID NO: 134062 - DNA, 25 bp, Probe Sequence
agctgtctaagggttaggggaactg

SEQ ID NO: 134063 - DNA, 25 bp, Probe Sequence
aggtcgccaggcgttatggggattt

SEQ ID NO: 134064 - DNA, 25 bp, Probe Sequence
aggatcgccatccggatcacggcaa

SEQ ID NO: 134065 - DNA, 25 bp, Probe Sequence
aggatcgccatccggatcacggcaa

SEQ ID NO: 134066 - DNA, 25 bp, Probe Sequence
aggttccagtgcctgacttgggata

SEQ ID NO: 134067 - DNA, 25 bp, Probe Sequence
aggcgttcactccagactgggaaag

SEQ ID NO: 134068 - DNA, 25 bp, Probe Sequence
atggcttatcttatgatctgggatc

SEQ ID NO: 134069 - DNA, 25 bp, Probe Sequence
aggcaacactttagcttgggtccac

SEQ ID NO: 134070 - DNA, 25 bp, Probe Sequence
aggccgacttttctgggatgtcaac

SEQ ID NO: 134071 - DNA, 25 bp, Probe Sequence
aggccccttagtctgtatggatgcc

SEQ ID NO: 134072 - DNA, 25 bp, Probe Sequence
atggcagcctcttagtgctattcat

SEQ ID NO: 134073 - DNA, 25 bp, Probe Sequence
atggcaggtcatagagtcctctcaa

SEQ ID NO: 134074 - DNA, 25 bp, Probe Sequence
atggcaagaccatggactatgctga

SEQ ID NO: 134075 - DNA, 25 bp, Probe Sequence
atggctagcatatgggcactttaca

SEQ ID NO: 134076 - DNA, 25 bp, Probe Sequence
atggcacctatactggcttttagaa

SEQ ID NO: 134077 - DNA, 25 bp, Probe Sequence
atggcaagtaaacctttcatatgaa

SEQ ID NO: 134078 - DNA, 25 bp, Probe Sequence
aggcgagacaatacacattccaact

SEQ ID NO: 134079 - DNA, 25 bp, Probe Sequence
aggccagtagagaattctgcccact

SEQ ID NO: 134080 - DNA, 25 bp, Probe Sequence
aggccagtagagaattctgcccact

SEQ ID NO: 134081 - DNA, 25 bp, Probe Sequence
aggaggtagaggagacccttcagaa

SEQ ID NO: 134082 - DNA, 25 bp, Probe Sequence
aggaggagggtgaagtcccagccag

SEQ ID NO: 134083 - DNA, 25 bp, Probe Sequence
aggaggagggtgaagtcccagccag

SEQ ID NO: 134084 - DNA, 25 bp, Probe Sequence
aggctggagggtagaggcatgggga

SEQ ID NO: 134085 - DNA, 25 bp, Probe Sequence
aggcggagcggccaggagagagggg

SEQ ID NO: 134086 - DNA, 25 bp, Probe Sequence
atggccgagcggcagtggctcgtgt

SEQ ID NO: 134087 - DNA, 25 bp, Probe Sequence
atggcctggaggcaggtgcttgctc

SEQ ID NO: 134088 - DNA, 25 bp, Probe Sequence
atggcatctgagcgagaaggctctg

SEQ ID NO: 134089 - DNA, 25 bp, Probe Sequence
aggccagatctgagaatggctctcc

SEQ ID NO: 134090 - DNA, 25 bp, Probe Sequence
aggcctgtctgcagaatcgacacca

SEQ ID NO: 134091 - DNA, 25 bp, Probe Sequence
aggcctgtctgcagaatcgacacca

SEQ ID NO: 134092 - DNA, 25 bp, Probe Sequence
aggctttgctgggacataacatcca

SEQ ID NO: 134093 - DNA, 25 bp, Probe Sequence
aggccgtgctggaaaaggcagccac

SEQ ID NO: 134094 - DNA, 25 bp, Probe Sequence
aggcctggtggaaggaggcgcactt

SEQ ID NO: 134095 - DNA, 25 bp, Probe Sequence
aggcctggtggaaggaggcgcactt

SEQ ID NO: 134096 - DNA, 25 bp, Probe Sequence
aggcctttgaagatacgctgcagtt

SEQ ID NO: 134097 - DNA, 25 bp, Probe Sequence
aggcgtcccaggcaagcctggctgt

SEQ ID NO: 134098 - DNA, 25 bp, Probe Sequence
acaggaaagggtcacgtggtcccat

SEQ ID NO: 134099 - DNA, 25 bp, Probe Sequence
aaaaccagtgtgagacccgaaccat

SEQ ID NO: 134100 - DNA, 25 bp, Probe Sequence
aggaaccgagggcacacgggactct

SEQ ID NO: 134101 - DNA, 25 bp, Probe Sequence
atggcacatccgtggaggacggcca

SEQ ID NO: 134102 - DNA, 25 bp, Probe Sequence
atggcacagcggctggatggggccc

SEQ ID NO: 134103 - DNA, 25 bp, Probe Sequence
aggccacggagaacacgggccctat

SEQ ID NO: 134104 - DNA, 25 bp, Probe Sequence
caggccaaggtagaaacgccctccg

SEQ ID NO: 134105 - DNA, 25 bp, Probe Sequence
aggccgtggtagacaaactctcctt

SEQ ID NO: 134106 - DNA, 25 bp, Probe Sequence
aggcctgtttatctacactgctgcc

SEQ ID NO: 134107 - DNA, 25 bp, Probe Sequence
atggccagtagtggtggacttgccc

SEQ ID NO: 134108 - DNA, 25 bp, Probe Sequence
aggccagtcggactgcgacatagcc

SEQ ID NO: 134109 - DNA, 25 bp, Probe Sequence
aggccagtgggagtgaggtgagcag

SEQ ID NO: 134110 - DNA, 25 bp, Probe Sequence
atggcgcagtggtagctgcaagggc

SEQ ID NO: 134111 - DNA, 25 bp, Probe Sequence
atggcagaaggatcacagaggtctc

SEQ ID NO: 134112 - DNA, 25 bp, Probe Sequence
atggctgtggggtcaagtacatccc

SEQ ID NO: 134113 - DNA, 25 bp, Probe Sequence
atggctgtcgggagctgtatcacct

SEQ ID NO: 134114 - DNA, 25 bp, Probe Sequence
aggctgtctgtacttgtgaaacatt

SEQ ID NO: 134115 - DNA, 25 bp, Probe Sequence
aggcctttcacatctagaagctctg

SEQ ID NO: 134116 - DNA, 25 bp, Probe Sequence
aggcgtctgacagtcctgagaatta

SEQ ID NO: 134117 - DNA, 25 bp, Probe Sequence
aggcgagctgacattctgcagcctg

SEQ ID NO: 134118 - DNA, 25 bp, Probe Sequence
aggccactgtgtttctagcactggc

SEQ ID NO: 134119 - DNA, 25 bp, Probe Sequence
atggccagtggtttcatcaatcatg

SEQ ID NO: 134120 - DNA, 25 bp, Probe Sequence
aggccagagtgatggcaccatcata

SEQ ID NO: 134121 - DNA, 25 bp, Probe Sequence
aggccatcagccttagcaaactaac

SEQ ID NO: 134122 - DNA, 25 bp, Probe Sequence
aggccctccttagaatatgagacag

SEQ ID NO: 134123 - DNA, 25 bp, Probe Sequence
aggccttctctgaaaatgtatgaac

SEQ ID NO: 134124 - DNA, 25 bp, Probe Sequence
aggcgtcgcttggaactgtggtgcc

SEQ ID NO: 134125 - DNA, 25 bp, Probe Sequence
aggccattttgcaacctgtgttggc

SEQ ID NO: 134126 - DNA, 25 bp, Probe Sequence
aggcaagtcttcatgctcggtgatg

SEQ ID NO: 134127 - DNA, 25 bp, Probe Sequence
atggctcactttcactgaggatgct

SEQ ID NO: 134128 - DNA, 25 bp, Probe Sequence
atggctttgcggcatgcagaggtat

SEQ ID NO: 134129 - DNA, 25 bp, Probe Sequence
atggctttaatgcagcaaggcttgc

SEQ ID NO: 134130 - DNA, 25 bp, Probe Sequence
aggctcttgaaccaaactgcctgag

SEQ ID NO: 134131 - DNA, 25 bp, Probe Sequence
aggccattggacacagaatccgagt

SEQ ID NO: 134132 - DNA, 25 bp, Probe Sequence
aggccaagaacccagagccacagaa

SEQ ID NO: 134133 - DNA, 25 bp, Probe Sequence
atggccaagtccaagaaccacacca

SEQ ID NO: 134134 - DNA, 25 bp, Probe Sequence
aggccaaggccaaggatcaaaccaa

SEQ ID NO: 134135 - DNA, 25 bp, Probe Sequence
aggccaaggccaaggccaaggccaa

SEQ ID NO: 134136 - DNA, 25 bp, Probe Sequence
aggcctatgtggaggccaaccagat

SEQ ID NO: 134137 - DNA, 25 bp, Probe Sequence
aggcctctgtgattggacaaaaaga

SEQ ID NO: 134138 - DNA, 25 bp, Probe Sequence
aggcagctaggatgacacgtcaaag

SEQ ID NO: 134139 - DNA, 25 bp, Probe Sequence
atggcagcaaagaaacacctggaga

SEQ ID NO: 134140 - DNA, 25 bp, Probe Sequence
atggccagagagagaacttttgcac

SEQ ID NO: 134141 - DNA, 25 bp, Probe Sequence
atggcccatcgatgagcatttttac

SEQ ID NO: 134142 - DNA, 25 bp, Probe Sequence
atggcccatcgatgagcatttttaa

SEQ ID NO: 134143 - DNA, 25 bp, Probe Sequence
atggcccagaactgcatttgattaa

SEQ ID NO: 134144 - DNA, 25 bp, Probe Sequence
aggcctatagcccgcagggattaaa

SEQ ID NO: 134145 - DNA, 25 bp, Probe Sequence
aggctcttagtacaggaatattgac

SEQ ID NO: 134146 - DNA, 25 bp, Probe Sequence
aggctgccataatctctgtgaattt

SEQ ID NO: 134147 - DNA, 25 bp, Probe Sequence
atggctgccaactattttgaggatg

SEQ ID NO: 134148 - DNA, 25 bp, Probe Sequence
aggctgctgcagaattttaaggtta

SEQ ID NO: 134149 - DNA, 25 bp, Probe Sequence
aggccaagtagaatgtgaaggttat

SEQ ID NO: 134150 - DNA, 25 bp, Probe Sequence
aggccaagtggaggtgactggtgat

SEQ ID NO: 134151 - DNA, 25 bp, Probe Sequence
aggccaatatgggtgttctgtgata

SEQ ID NO: 134152 - DNA, 25 bp, Probe Sequence
atggcctgcctgccaagtttgtgat

SEQ ID NO: 134153 - DNA, 25 bp, Probe Sequence
aggcttgctctgggacttttatgct

SEQ ID NO: 134154 - DNA, 25 bp, Probe Sequence
aggaatcctagaccatattttcaag

SEQ ID NO: 134155 - DNA, 25 bp, Probe Sequence
aggaatctccacacaaatgtcccac

SEQ ID NO: 134156 - DNA, 25 bp, Probe Sequence
aggccagtcctaaaagagctcctga

SEQ ID NO: 134157 - DNA, 25 bp, Probe Sequence
aggcggtctctttagaggatcctgt

SEQ ID NO: 134158 - DNA, 25 bp, Probe Sequence
aggcttttcatgtatgcaggatgac

SEQ ID NO: 134159 - DNA, 25 bp, Probe Sequence
aggcctttcgcttgagtcatcagcc

SEQ ID NO: 134160 - DNA, 25 bp, Probe Sequence
aggccttgaacttcatggcatatca

SEQ ID NO: 134161 - DNA, 25 bp, Probe Sequence
aggccttgggcttcaaaatcctggg

SEQ ID NO: 134162 - DNA, 25 bp, Probe Sequence
aggcgctggagaccacacaatacct

SEQ ID NO: 134163 - DNA, 25 bp, Probe Sequence
aggcgctggagaccacacaatacct

SEQ ID NO: 134164 - DNA, 25 bp, Probe Sequence
aggcccagaagttcctgatgaccgc

SEQ ID NO: 134165 - DNA, 25 bp, Probe Sequence
aggcccaaaattagcgtgacactta

SEQ ID NO: 134166 - DNA, 25 bp, Probe Sequence
aggccctatattatggtgacaccta

SEQ ID NO: 134167 - DNA, 25 bp, Probe Sequence
aggacatctcagaggtggtcacccc

SEQ ID NO: 134168 - DNA, 25 bp, Probe Sequence
aggaacgtgaagatgagtcttcctc

SEQ ID NO: 134169 - DNA, 25 bp, Probe Sequence
aggaagagtgggagattttattcaa

SEQ ID NO: 134170 - DNA, 25 bp, Probe Sequence
aggcaagagggcgaccactgttact

SEQ ID NO: 134171 - DNA, 25 bp, Probe Sequence
cggaataggtatgaaatgtctacgt

SEQ ID NO: 134172 - DNA, 25 bp, Probe Sequence
agtagtcaggaaaaagcgtcttggt

SEQ ID NO: 134173 - DNA, 25 bp, Probe Sequence
agctagccaggcaaagggggcaatg

SEQ ID NO: 134174 - DNA, 25 bp, Probe Sequence
aggaccaggtcaagggacgttctgt

SEQ ID NO: 134175 - DNA, 25 bp, Probe Sequence
aggactctgggctgggaagccctgt

SEQ ID NO: 134176 - DNA, 25 bp, Probe Sequence
atggccgctggggggtgagggcggt

SEQ ID NO: 134177 - DNA, 25 bp, Probe Sequence
atggccgtggcattggggagtggca

SEQ ID NO: 134178 - DNA, 25 bp, Probe Sequence
aggccgtggcatgcggggatggcca

SEQ ID NO: 134179 - DNA, 25 bp, Probe Sequence
aggccctgcgtgtggatggtgacac

SEQ ID NO: 134180 - DNA, 25 bp, Probe Sequence
agtccgtgtgcggggaggtaacaag

SEQ ID NO: 134181 - DNA, 25 bp, Probe Sequence
aggccagtgggaacgaattcaaaag

SEQ ID NO: 134182 - DNA, 25 bp, Probe Sequence
aggccagtgggtaccatcttctaaa

SEQ ID NO: 134183 - DNA, 25 bp, Probe Sequence
aggcctgcatggattccatgttcat

SEQ ID NO: 134184 - DNA, 25 bp, Probe Sequence
aggctcttggacacacagtgtcttc

SEQ ID NO: 134185 - DNA, 25 bp, Probe Sequence
aggctcgggcagagcagctttctac

SEQ ID NO: 134186 - DNA, 25 bp, Probe Sequence
aggctaaggatgaggctgcttcgcc

SEQ ID NO: 134187 - DNA, 25 bp, Probe Sequence
atggctggcatgcatgttggcatga

SEQ ID NO: 134188 - DNA, 25 bp, Probe Sequence
atggctcgatgttttgcagctacct

SEQ ID NO: 134189 - DNA, 25 bp, Probe Sequence
atggctggttgatcatgtcttcact

SEQ ID NO: 134190 - DNA, 25 bp, Probe Sequence
atggctggttgatcatgtcttcact

SEQ ID NO: 134191 - DNA, 25 bp, Probe Sequence
aggctactatatgatatttgcatgc

SEQ ID NO: 134192 - DNA, 25 bp, Probe Sequence
aggctgcctagtaaatggtgctggt

SEQ ID NO: 134193 - DNA, 25 bp, Probe Sequence
aggccgcagagaagactatgttggt

SEQ ID NO: 134194 - DNA, 25 bp, Probe Sequence
aggcctgaattatgctcttatgtga

SEQ ID NO: 134195 - DNA, 25 bp, Probe Sequence
aggccatccttatgccttgcaaagc

SEQ ID NO: 134196 - DNA, 25 bp, Probe Sequence
aggaagctcagttcagtaccataac

SEQ ID NO: 134197 - DNA, 25 bp, Probe Sequence
aggaaacacgctagtgaccattagg

SEQ ID NO: 134198 - DNA, 25 bp, Probe Sequence
aggaaaagaccttgacatattcctg

SEQ ID NO: 134199 - DNA, 25 bp, Probe Sequence
agtgcaaataaacacctaaccttct

SEQ ID NO: 134200 - DNA, 25 bp, Probe Sequence
aggcaaagaatacacgctcaccagc

SEQ ID NO: 134201 - DNA, 25 bp, Probe Sequence
aggcagagctaaactaaccccagtg

SEQ ID NO: 134202 - DNA, 25 bp, Probe Sequence
aggcattgtaaaaatccctgtcctg

SEQ ID NO: 134203 - DNA, 25 bp, Probe Sequence
aggcaaagaagaacattccttacta

SEQ ID NO: 134204 - DNA, 25 bp, Probe Sequence
aggccaaggattattctctctgact

SEQ ID NO: 134205 - DNA, 25 bp, Probe Sequence
aggcctattttcatgatttctttgt

SEQ ID NO: 134206 - DNA, 25 bp, Probe Sequence
aggccatttgttacagtttcttcat

SEQ ID NO: 134207 - DNA, 25 bp, Probe Sequence
aggccatttgcaactatctttttaa

SEQ ID NO: 134208 - DNA, 25 bp, Probe Sequence
aggctgctgtggtaattctatttgt

SEQ ID NO: 134209 - DNA, 25 bp, Probe Sequence
atggccagtggattttatgtcttgt

SEQ ID NO: 134210 - DNA, 25 bp, Probe Sequence
aggccttggatttatattgcacttc

SEQ ID NO: 134211 - DNA, 25 bp, Probe Sequence
aggcctctggttttttgtaatctca

SEQ ID NO: 134212 - DNA, 25 bp, Probe Sequence
aggccactgtctccttttatatatt

SEQ ID NO: 134213 - DNA, 25 bp, Probe Sequence
aggcccagcattgctggttctattt

SEQ ID NO: 134214 - DNA, 25 bp, Probe Sequence
agagcactagttgtgaatttagggt

SEQ ID NO: 134215 - DNA, 25 bp, Probe Sequence
aggcaggcagaaggtgacaattgac

SEQ ID NO: 134216 - DNA, 25 bp, Probe Sequence
aggcagagtccagggaccttgaccc

SEQ ID NO: 134217 - DNA, 25 bp, Probe Sequence
aggcacagatcctaggaagtctgtt

SEQ ID NO: 134218 - DNA, 25 bp, Probe Sequence
aggccactcaaagagcgcatgcgta

SEQ ID NO: 134219 - DNA, 25 bp, Probe Sequence
atggccccaaagacacatcagtgga

SEQ ID NO: 134220 - DNA, 25 bp, Probe Sequence
aggcccagtaagacactcatgtggc

SEQ ID NO: 134221 - DNA, 25 bp, Probe Sequence
atggcccaggtaatcctcttagaca

SEQ ID NO: 134222 - DNA, 25 bp, Probe Sequence
aggcctcggtcaactatctgaagac

SEQ ID NO: 134223 - DNA, 25 bp, Probe Sequence
aggcagttggtacctttcaagatac

SEQ ID NO: 134224 - DNA, 25 bp, Probe Sequence
aggcagtggggaccttattgatgaa

SEQ ID NO: 134225 - DNA, 25 bp, Probe Sequence
aggcagttggagtctctacattatt

SEQ ID NO: 134226 - DNA, 25 bp, Probe Sequence
aggcagtatacattcctctgacttt

SEQ ID NO: 134227 - DNA, 25 bp, Probe Sequence
aggccatatatattgcctccttatc

SEQ ID NO: 134228 - DNA, 25 bp, Probe Sequence
aggccaatgatttgactcacagtct

SEQ ID NO: 134229 - DNA, 25 bp, Probe Sequence
aggccatatgtgagacccacagctg

SEQ ID NO: 134230 - DNA, 25 bp, Probe Sequence
aggccagagctgagcactcagcccg

SEQ ID NO: 134231 - DNA, 25 bp, Probe Sequence
aggccagtgagcaggtcaggcccat

SEQ ID NO: 134232 - DNA, 25 bp, Probe Sequence
aggcaagtaggccgccagagtgcct

SEQ ID NO: 134233 - DNA, 25 bp, Probe Sequence
aggccagccagagtggggatggtct

SEQ ID NO: 134234 - DNA, 25 bp, Probe Sequence
aggccacaagtaaggctatggctct

SEQ ID NO: 134235 - DNA, 25 bp, Probe Sequence
aggcccagttaatgctagtctttca

SEQ ID NO: 134236 - DNA, 25 bp, Probe Sequence
aggcccagtataaatgccacctcct

SEQ ID NO: 134237 - DNA, 25 bp, Probe Sequence
aggccatcagtgtggagccagcctc

SEQ ID NO: 134238 - DNA, 25 bp, Probe Sequence
aggcccagagcaagagaggcatcct

SEQ ID NO: 134239 - DNA, 25 bp, Probe Sequence
aggccctggctattgattgatgttg

SEQ ID NO: 134240 - DNA, 25 bp, Probe Sequence
aggcctgtggcttatacttgtgtat

SEQ ID NO: 134241 - DNA, 25 bp, Probe Sequence
atggcctgaaggtaacattggcagt

SEQ ID NO: 134242 - DNA, 25 bp, Probe Sequence
aggcactgacattgataaaacgggt

SEQ ID NO: 134243 - DNA, 25 bp, Probe Sequence
aggacccactgaggagatccgggcc

SEQ ID NO: 134244 - DNA, 25 bp, Probe Sequence
agggcaacctgctcaactagggccc

SEQ ID NO: 134245 - DNA, 25 bp, Probe Sequence
aggcgagacgccgctgaaagtggcc

SEQ ID NO: 134246 - DNA, 25 bp, Probe Sequence
aggcgcagacgggttaggggagcca

SEQ ID NO: 134247 - DNA, 25 bp, Probe Sequence
aggccgagtgatgcttggggagacc

SEQ ID NO: 134248 - DNA, 25 bp, Probe Sequence
aggccagggatggccggagggctgc

SEQ ID NO: 134249 - DNA, 25 bp, Probe Sequence
aggccattgcgttggtggagaaggc

SEQ ID NO: 134250 - DNA, 25 bp, Probe Sequence
aggccaggcctgtgggagaatgagc

SEQ ID NO: 134251 - DNA, 25 bp, Probe Sequence
aggaagccaccacatgtagagatgg

SEQ ID NO: 134252 - DNA, 25 bp, Probe Sequence
aggccagccaccaacagattgtgtg

SEQ ID NO: 134253 - DNA, 25 bp, Probe Sequence
aggccaacttcaaagaccagtgaga

SEQ ID NO: 134254 - DNA, 25 bp, Probe Sequence
aggcctcattctccaaggccaggag

SEQ ID NO: 134255 - DNA, 25 bp, Probe Sequence
aggcccaggcaagtagatgcaagga

SEQ ID NO: 134256 - DNA, 25 bp, Probe Sequence
atggccctgacaagtatgatcatac

SEQ ID NO: 134257 - DNA, 25 bp, Probe Sequence
aggcccatatggcaagatgcacatc

SEQ ID NO: 134258 - DNA, 25 bp, Probe Sequence
aggccgcattgacaagaagatcgag

SEQ ID NO: 134259 - DNA, 25 bp, Probe Sequence
aggccagctatgtgatattagagga

SEQ ID NO: 134260 - DNA, 25 bp, Probe Sequence
aggcgatgcacaacagattatacgg

SEQ ID NO: 134261 - DNA, 25 bp, Probe Sequence
aggcaatgccaccatgatacagggg

SEQ ID NO: 134262 - DNA, 25 bp, Probe Sequence
aggctgagcaacagaaaaaggcggc

SEQ ID NO: 134263 - DNA, 25 bp, Probe Sequence
aggctgacatgaggcgcaaaaaaat

SEQ ID NO: 134264 - DNA, 25 bp, Probe Sequence
aggctgggaccataacacaagcatg

SEQ ID NO: 134265 - DNA, 25 bp, Probe Sequence
aggctgggcacgagaatcacttgag

SEQ ID NO: 134266 - DNA, 25 bp, Probe Sequence
aggctgaggcgggtggatcacctga

SEQ ID NO: 134267 - DNA, 25 bp, Probe Sequence
aggctgaggcgggtggatcacctga

SEQ ID NO: 134268 - DNA, 25 bp, Probe Sequence
aggctgaggcgggaggatcacttga

SEQ ID NO: 134269 - DNA, 25 bp, Probe Sequence
aggccagagtgggaggattgcttga

SEQ ID NO: 134270 - DNA, 25 bp, Probe Sequence
aggcctgcaggggatggaaccttcc

SEQ ID NO: 134271 - DNA, 25 bp, Probe Sequence
aggcctgcaggggatggaaccttcc

SEQ ID NO: 134272 - DNA, 25 bp, Probe Sequence
aggcctgcaggggatggaaccttcc

SEQ ID NO: 134273 - DNA, 25 bp, Probe Sequence
aggcctgcaggggatggaaccttcc

SEQ ID NO: 134274 - DNA, 25 bp, Probe Sequence
aggcctgcaggggatggaaccttcc

SEQ ID NO: 134275 - DNA, 25 bp, Probe Sequence
aggccgagcgagtcatggagtggct

SEQ ID NO: 134276 - DNA, 25 bp, Probe Sequence
aggccagacatagcatcttgtggct

SEQ ID NO: 134277 - DNA, 25 bp, Probe Sequence
aggccatccagagatacgtgcagct

SEQ ID NO: 134278 - DNA, 25 bp, Probe Sequence
aggacattcagaacatgatcgtgga

SEQ ID NO: 134279 - DNA, 25 bp, Probe Sequence
aggacattcagaacatgatcgtgga

SEQ ID NO: 134280 - DNA, 25 bp, Probe Sequence
aggcaaaggaactatcgcattgata

SEQ ID NO: 134281 - DNA, 25 bp, Probe Sequence
aggcagaagtctacagtgagtctga

SEQ ID NO: 134282 - DNA, 25 bp, Probe Sequence
aggccgaactattatcagctctgat

SEQ ID NO: 134283 - DNA, 25 bp, Probe Sequence
aggactatttattccagctttcagc

SEQ ID NO: 134284 - DNA, 25 bp, Probe Sequence
aggagtgttacacactgcttaccct

SEQ ID NO: 134285 - DNA, 25 bp, Probe Sequence
agtgggctacccgggcatgaagccc

SEQ ID NO: 134286 - DNA, 25 bp, Probe Sequence
aggagtgaactcaaggccatgaact

SEQ ID NO: 134287 - DNA, 25 bp, Probe Sequence
agttggtactagagccagtatcctt

SEQ ID NO: 134288 - DNA, 25 bp, Probe Sequence
aggttatagtagaacaaggcacctt

SEQ ID NO: 134289 - DNA, 25 bp, Probe Sequence
aggcagtaaatagggaagacacgtt

SEQ ID NO: 134290 - DNA, 25 bp, Probe Sequence
aggcatgacaagtaaagaaagacag

SEQ ID NO: 134291 - DNA, 25 bp, Probe Sequence
aggcatatataccaaggacttacag

SEQ ID NO: 134292 - DNA, 25 bp, Probe Sequence
aggaaataccaaatgagttagccca

SEQ ID NO: 134293 - DNA, 25 bp, Probe Sequence
aggacaaaacagtgttattgcctca

SEQ ID NO: 134294 - DNA, 25 bp, Probe Sequence
aggacaacgaaaggcttttcatgta

SEQ ID NO: 134295 - DNA, 25 bp, Probe Sequence
aggcagcggctgtaaaggtctttgt

SEQ ID NO: 134296 - DNA, 25 bp, Probe Sequence
aggccggtctaaagtgagctctatg

SEQ ID NO: 134297 - DNA, 25 bp, Probe Sequence
aggcctttcaggtggatgttcatgt

SEQ ID NO: 134298 - DNA, 25 bp, Probe Sequence
aggcgtgtacggtgtgaggtctata

SEQ ID NO: 134299 - DNA, 25 bp, Probe Sequence
aggcgtgtacggtgggagtctatat

SEQ ID NO: 134300 - DNA, 25 bp, Probe Sequence
aggcgtgtacggtgggaggtcctat

SEQ ID NO: 134301 - DNA, 25 bp, Probe Sequence
aggcgtgtacggtgggaggtcttat

SEQ ID NO: 134302 - DNA, 25 bp, Probe Sequence
aggcgtgtacggtgggaggtcttat

SEQ ID NO: 134303 - DNA, 25 bp, Probe Sequence
aggcgtgtacggtgggaggtctata

SEQ ID NO: 134304 - DNA, 25 bp, Probe Sequence
aggcgtgtacggtgggaggtctata

SEQ ID NO: 134305 - DNA, 25 bp, Probe Sequence
aggcgtgtacggtgggaggtctata

SEQ ID NO: 134306 - DNA, 25 bp, Probe Sequence
aggcgtgtacggtgggaggtctata

SEQ ID NO: 134307 - DNA, 25 bp, Probe Sequence
aggcgtgtacggtgggaggtctata

SEQ ID NO: 134308 - DNA, 25 bp, Probe Sequence
aggcgtgtacggtgggaggtctata

SEQ ID NO: 134309 - DNA, 25 bp, Probe Sequence
aggcgtgtacggtgggaggtctata

SEQ ID NO: 134310 - DNA, 25 bp, Probe Sequence
aggcgtgtacggtgggaggtctata

SEQ ID NO: 134311 - DNA, 25 bp, Probe Sequence
aggcgtgtacggtgggaggtctata

SEQ ID NO: 134312 - DNA, 25 bp, Probe Sequence
aggcgtgtacggtgggaggtctata

SEQ ID NO: 134313 - DNA, 25 bp, Probe Sequence
aggcgtgtacggtgggaggtctata

SEQ ID NO: 134314 - DNA, 25 bp, Probe Sequence
aggcgtgtacggtgggaggtctata

SEQ ID NO: 134315 - DNA, 25 bp, Probe Sequence
aggcgtgtacggtgggaggtctata

SEQ ID NO: 134316 - DNA, 25 bp, Probe Sequence
aggcgtgtacggtgggaggtctata

SEQ ID NO: 134317 - DNA, 25 bp, Probe Sequence
aggcgtgtacggtgggaggtctata

SEQ ID NO: 134318 - DNA, 25 bp, Probe Sequence
aggcgtgtacggtgggaggtctata

SEQ ID NO: 134319 - DNA, 25 bp, Probe Sequence
aggcgtgtacggtgggaggtctata

SEQ ID NO: 134320 - DNA, 25 bp, Probe Sequence
aggcgtgtacggtgggaggtctata

SEQ ID NO: 134321 - DNA, 25 bp, Probe Sequence
aggcgtgtacggtgggaggtctata

SEQ ID NO: 134322 - DNA, 25 bp, Probe Sequence
aggcgtgtacggtgggaggtctata

SEQ ID NO: 134323 - DNA, 25 bp, Probe Sequence
aggcgtgtacggtgggaggtctata

SEQ ID NO: 134324 - DNA, 25 bp, Probe Sequence
aggcgtgtacggtgggaggtctata

SEQ ID NO: 134325 - DNA, 25 bp, Probe Sequence
aggcgtgtacggtgggaggtctata

SEQ ID NO: 134326 - DNA, 25 bp, Probe Sequence
aggcgtgtacggtgggaggtctata

SEQ ID NO: 134327 - DNA, 25 bp, Probe Sequence
aggcgtgtacggtgggaggtctata

SEQ ID NO: 134328 - DNA, 25 bp, Probe Sequence
aggcgtgtacggtgggaggtctata

SEQ ID NO: 134329 - DNA, 25 bp, Probe Sequence
aggcgtgtacggtgggaggtctata

SEQ ID NO: 134330 - DNA, 25 bp, Probe Sequence
aggcgtgtacggtgggaggtctata

SEQ ID NO: 134331 - DNA, 25 bp, Probe Sequence
aggcgtgtacggtgggaggtctata

SEQ ID NO: 134332 - DNA, 25 bp, Probe Sequence
aggcgtgtacggtgggaggtctata

SEQ ID NO: 134333 - DNA, 25 bp, Probe Sequence
aggcgtgtacggtgggaggtctata

SEQ ID NO: 134334 - DNA, 25 bp, Probe Sequence
aggcgtgtacggtgggaggtctata

SEQ ID NO: 134335 - DNA, 25 bp, Probe Sequence
aggcgtgtacggtgggaggtctata

SEQ ID NO: 134336 - DNA, 25 bp, Probe Sequence
aggcgtgtacggtgggaggtctata

SEQ ID NO: 134337 - DNA, 25 bp, Probe Sequence
aggcgtgtacggtgggaggtctata

SEQ ID NO: 134338 - DNA, 25 bp, Probe Sequence
aggcgtgtacggtgggaggtctata

SEQ ID NO: 134339 - DNA, 25 bp, Probe Sequence
aggcgtgtacggtgggaggtctata

SEQ ID NO: 134340 - DNA, 25 bp, Probe Sequence
aggcgtgtacggtgggaggtctata

SEQ ID NO: 134341 - DNA, 25 bp, Probe Sequence
aggcgtgtacggtgggaggtctata

SEQ ID NO: 134342 - DNA, 25 bp, Probe Sequence
aggcgtgtacggtgggaggtctata

SEQ ID NO: 134343 - DNA, 25 bp, Probe Sequence
aggcgtgtacggtgggaggtctata

SEQ ID NO: 134344 - DNA, 25 bp, Probe Sequence
aggcgtgtacggtgggaggtctata

SEQ ID NO: 134345 - DNA, 25 bp, Probe Sequence
aggcgtgtacggtgggaggtctata

SEQ ID NO: 134346 - DNA, 25 bp, Probe Sequence
aggcgtgtacggtgggaggtctata

SEQ ID NO: 134347 - DNA, 25 bp, Probe Sequence
aggcgtgtacggtgggaggtctata

SEQ ID NO: 134348 - DNA, 25 bp, Probe Sequence
aggcgtgtacggtgggaggtctata

SEQ ID NO: 134349 - DNA, 25 bp, Probe Sequence
aggcgtgtacggtgggaggtctata

SEQ ID NO: 134350 - DNA, 25 bp, Probe Sequence
aggcgtgtacggtgggaggtctata

SEQ ID NO: 134351 - DNA, 25 bp, Probe Sequence
aggcgtgtacggtgggaggtctata

SEQ ID NO: 134352 - DNA, 25 bp, Probe Sequence
aggcgtgtacggtgggaggtctata

SEQ ID NO: 134353 - DNA, 25 bp, Probe Sequence
aggcgtgtacggtgggaggtctata

SEQ ID NO: 134354 - DNA, 25 bp, Probe Sequence
aggcgtgtacggtgggaggtctata

SEQ ID NO: 134355 - DNA, 25 bp, Probe Sequence
aggcgtgtacggtgggaggtctata

SEQ ID NO: 134356 - DNA, 25 bp, Probe Sequence
aggcgtgtacggtgggaggtctata

SEQ ID NO: 134357 - DNA, 25 bp, Probe Sequence
aggcgtgtacggtgggaggtctata

SEQ ID NO: 134358 - DNA, 25 bp, Probe Sequence
aggcgtgtacggtgggaggtctata

SEQ ID NO: 134359 - DNA, 25 bp, Probe Sequence
aggcgtgtacggtgggaggtctata

SEQ ID NO: 134360 - DNA, 25 bp, Probe Sequence
aggcgtgtacggtgggaggtctata

SEQ ID NO: 134361 - DNA, 25 bp, Probe Sequence
aggcgtgtacggtgggaggtctata

SEQ ID NO: 134362 - DNA, 25 bp, Probe Sequence
aggcgtgtacggtgggaggtctata

SEQ ID NO: 134363 - DNA, 25 bp, Probe Sequence
aggcgtgtacggtgggaggtctata

SEQ ID NO: 134364 - DNA, 25 bp, Probe Sequence
aggcgtgtacggtgggaggtctata

SEQ ID NO: 134365 - DNA, 25 bp, Probe Sequence
aggcgtgtacggtgggaggtctata

SEQ ID NO: 134366 - DNA, 25 bp, Probe Sequence
aggcgtgtacggtgggaggtctata

SEQ ID NO: 134367 - DNA, 25 bp, Probe Sequence
aggcgtgtacggtgggaggtctata

SEQ ID NO: 134368 - DNA, 25 bp, Probe Sequence
aggcgtgtacggtgggaggtctata

SEQ ID NO: 134369 - DNA, 25 bp, Probe Sequence
aggcgtgtacggtgggaggtctata

SEQ ID NO: 134370 - DNA, 25 bp, Probe Sequence
aggcgtgtacggtgggaggtctata

SEQ ID NO: 134371 - DNA, 25 bp, Probe Sequence
aggcgtgtacggtgggaggtctata

SEQ ID NO: 134372 - DNA, 25 bp, Probe Sequence
aggcgtgtacggtgggaggtctata

SEQ ID NO: 134373 - DNA, 25 bp, Probe Sequence
aggcgtgtacggtgggaggtctata

SEQ ID NO: 134374 - DNA, 25 bp, Probe Sequence
aggcgtgtacggtgggaggtctata

SEQ ID NO: 134375 - DNA, 25 bp, Probe Sequence
aggcgtgtacggtgggaggtctata

SEQ ID NO: 134376 - DNA, 25 bp, Probe Sequence
aggcgtgtacggtgggaggtctata

SEQ ID NO: 134377 - DNA, 25 bp, Probe Sequence
aggcgtgtacggtgggaggtctata

SEQ ID NO: 134378 - DNA, 25 bp, Probe Sequence
aggcgtgtacggtgggaggtctata

SEQ ID NO: 134379 - DNA, 25 bp, Probe Sequence
aggcgtgtacggtgggaggtctata

SEQ ID NO: 134380 - DNA, 25 bp, Probe Sequence
aggcgtgtacggtgggaggtctata

SEQ ID NO: 134381 - DNA, 25 bp, Probe Sequence
aggcgtgtacggtgggaggtctata

SEQ ID NO: 134382 - DNA, 25 bp, Probe Sequence
aggcgtgtacggtgggaggtctata

SEQ ID NO: 134383 - DNA, 25 bp, Probe Sequence
aggcgtgtacggtgggaggtctata

SEQ ID NO: 134384 - DNA, 25 bp, Probe Sequence
aggcgtgtacggtgggaggtctata

SEQ ID NO: 134385 - DNA, 25 bp, Probe Sequence
aggcgtgtacggtgggaggtctata

SEQ ID NO: 134386 - DNA, 25 bp, Probe Sequence
aggcgtgtacggtgggaggtctata

SEQ ID NO: 134387 - DNA, 25 bp, Probe Sequence
aggcgtgtacggtgggaggtctata

SEQ ID NO: 134388 - DNA, 25 bp, Probe Sequence
aggcgtgtacggtgggaggtctata

SEQ ID NO: 134389 - DNA, 25 bp, Probe Sequence
aggcgtgtacggtgggaggtctata

SEQ ID NO: 134390 - DNA, 25 bp, Probe Sequence
aggcgtgtacggtgggaggtctata

SEQ ID NO: 134391 - DNA, 25 bp, Probe Sequence
aggcgtgtacggtggtgaggtctat

SEQ ID NO: 134392 - DNA, 25 bp, Probe Sequence
aggaagaactggcacgtagcctctt

SEQ ID NO: 134393 - DNA, 25 bp, Probe Sequence
aggaagaacatgcgatatacacagc

SEQ ID NO: 134394 - DNA, 25 bp, Probe Sequence
acgtacctcaggtaataccagcttt

SEQ ID NO: 134395 - DNA, 25 bp, Probe Sequence
aggtaactcaagtgtcacctccttg

SEQ ID NO: 134396 - DNA, 25 bp, Probe Sequence
aggataaacttatgtgacccacttg

SEQ ID NO: 134397 - DNA, 25 bp, Probe Sequence
agtgaaccgttcaggattcgccttt

SEQ ID NO: 134398 - DNA, 25 bp, Probe Sequence
aggaacctcttcagaaagtgtgctt

SEQ ID NO: 134399 - DNA, 25 bp, Probe Sequence
aggagaccttcctggcaatcaagta

SEQ ID NO: 134400 - DNA, 25 bp, Probe Sequence
agtgatagcctttcagggaaaacct

SEQ ID NO: 134401 - DNA, 25 bp, Probe Sequence
aggtaaataacagagattacagcct

SEQ ID NO: 134402 - DNA, 25 bp, Probe Sequence
agtgtatcatatgccccaagtacgc

SEQ ID NO: 134403 - DNA, 25 bp, Probe Sequence
aggctgactatctcctgggatacag

SEQ ID NO: 134404 - DNA, 25 bp, Probe Sequence
aggctgactcccaggggaagagggg

SEQ ID NO: 134405 - DNA, 25 bp, Probe Sequence
aggccctccagcaggaggacagagt

SEQ ID NO: 134406 - DNA, 25 bp, Probe Sequence
aggcccagccgcaggaaggcagaat

SEQ ID NO: 134407 - DNA, 25 bp, Probe Sequence
aggcacgcagccttcgagaatgtga

SEQ ID NO: 134408 - DNA, 25 bp, Probe Sequence
aggccgcagctctgtataaggtctc

SEQ ID NO: 134409 - DNA, 25 bp, Probe Sequence
aggcctgttctccatagagagttcc

SEQ ID NO: 134410 - DNA, 25 bp, Probe Sequence
aggctgcatggtgccaaggctatct

SEQ ID NO: 134411 - DNA, 25 bp, Probe Sequence
aggcgcgagacacagagagcttctt

SEQ ID NO: 134412 - DNA, 25 bp, Probe Sequence
aggcctcccgaaggatgtatctgtg

SEQ ID NO: 134413 - DNA, 25 bp, Probe Sequence
aggccttacagaaaattgttgtgct

SEQ ID NO: 134414 - DNA, 25 bp, Probe Sequence
aggcagcttccaaaatatatttatc

SEQ ID NO: 134415 - DNA, 25 bp, Probe Sequence
aggcagcttccaaaatatatttatc

SEQ ID NO: 134416 - DNA, 25 bp, Probe Sequence
aggaatctgataaacactaaatatg

SEQ ID NO: 134417 - DNA, 25 bp, Probe Sequence
aggaatcttttcaacaacaggcatg

SEQ ID NO: 134418 - DNA, 25 bp, Probe Sequence
aggcttttggtcccagagctggggt

SEQ ID NO: 134419 - DNA, 25 bp, Probe Sequence
aggcccttggacacagaatccgagt

SEQ ID NO: 134420 - DNA, 25 bp, Probe Sequence
aggaacttgaccatcgatacgtact

SEQ ID NO: 134421 - DNA, 25 bp, Probe Sequence
aggcaactgcagctttcagcaacgt

SEQ ID NO: 134422 - DNA, 25 bp, Probe Sequence
aggcacagctctcctattgaaactt

SEQ ID NO: 134423 - DNA, 25 bp, Probe Sequence
aggcacaagcccatatagatcgtta

SEQ ID NO: 134424 - DNA, 25 bp, Probe Sequence
aggcacaagccaaaatagatcgtta

SEQ ID NO: 134425 - DNA, 25 bp, Probe Sequence
aggctgcccaaaggtactcctttat

SEQ ID NO: 134426 - DNA, 25 bp, Probe Sequence
aggactccttgggatacaggtttat

SEQ ID NO: 134427 - DNA, 25 bp, Probe Sequence
aggtcctgggcaggaccggttctca

SEQ ID NO: 134428 - DNA, 25 bp, Probe Sequence
aggggcggtgcaaaccagtgaacac

SEQ ID NO: 134429 - DNA, 25 bp, Probe Sequence
aggagcccgtcaaagccgaagaaag

SEQ ID NO: 134430 - DNA, 25 bp, Probe Sequence
aggcaccgtgccaaagactggatgc

SEQ ID NO: 134431 - DNA, 25 bp, Probe Sequence
aggacttctggcgaatgatctggga

SEQ ID NO: 134432 - DNA, 25 bp, Probe Sequence
aggactgcatcggtggacactggta

SEQ ID NO: 134433 - DNA, 25 bp, Probe Sequence
aggaagtagcctgactctgagatca

SEQ ID NO: 134434 - DNA, 25 bp, Probe Sequence
aggaaggggcatcacttgaaccagg

SEQ ID NO: 134435 - DNA, 25 bp, Probe Sequence
aggacgggtcaggaaggaaggagag

SEQ ID NO: 134436 - DNA, 25 bp, Probe Sequence
aggcccggtgggaaggagagcgtcg

SEQ ID NO: 134437 - DNA, 25 bp, Probe Sequence
aggccctgggtgtctacaataggct

SEQ ID NO: 134438 - DNA, 25 bp, Probe Sequence
aggcccaggactgtcacacaaggct

SEQ ID NO: 134439 - DNA, 25 bp, Probe Sequence
aggaaggaactgttctacaaggctg

SEQ ID NO: 134440 - DNA, 25 bp, Probe Sequence
aggaagccgacgatccaaatgccgt

SEQ ID NO: 134441 - DNA, 25 bp, Probe Sequence
aggatacacgggacccagaatccac

SEQ ID NO: 134442 - DNA, 25 bp, Probe Sequence
aggaaccaatgagtccctggaacgc

SEQ ID NO: 134443 - DNA, 25 bp, Probe Sequence
aggacaccaaaatcacgtgtgagga

SEQ ID NO: 134444 - DNA, 25 bp, Probe Sequence
aggcacacccaaaacacaagtctgt

SEQ ID NO: 134445 - DNA, 25 bp, Probe Sequence
aggcaagcccaatatttaccatttg

SEQ ID NO: 134446 - DNA, 25 bp, Probe Sequence
aggcttgcccagtacatttaaattt

SEQ ID NO: 134447 - DNA, 25 bp, Probe Sequence
aggcactgccaagacattcaaacaa

SEQ ID NO: 134448 - DNA, 25 bp, Probe Sequence
aggcctctaagaaatatgtctccaa

SEQ ID NO: 134449 - DNA, 25 bp, Probe Sequence
aggcccttatgaatgaggcttcaca

SEQ ID NO: 134450 - DNA, 25 bp, Probe Sequence
aggcagaattgagttggagtcccaa

SEQ ID NO: 134451 - DNA, 25 bp, Probe Sequence
aggcaagtggcaatcagccttcacc

SEQ ID NO: 134452 - DNA, 25 bp, Probe Sequence
aggaatttcattcacttcagccact

SEQ ID NO: 134453 - DNA, 25 bp, Probe Sequence
aggaatgagcttgagccttcctcct

SEQ ID NO: 134454 - DNA, 25 bp, Probe Sequence
aggaaggttctaggctctcttctta

SEQ ID NO: 134455 - DNA, 25 bp, Probe Sequence
aggagccctcatcatagctccttca

SEQ ID NO: 134456 - DNA, 25 bp, Probe Sequence
aggaatcctgatcctcagaacttct

SEQ ID NO: 134457 - DNA, 25 bp, Probe Sequence
aggtcatccgtagcgaatattcccc

SEQ ID NO: 134458 - DNA, 25 bp, Probe Sequence
aggaccggtatgagatcaattccct

SEQ ID NO: 134459 - DNA, 25 bp, Probe Sequence
aggaacttgtagggctcattttggt

SEQ ID NO: 134460 - DNA, 25 bp, Probe Sequence
aggcaagccagtcgggtttcctgga

SEQ ID NO: 134461 - DNA, 25 bp, Probe Sequence
aggcccacagcatggggcttggctc

SEQ ID NO: 134462 - DNA, 25 bp, Probe Sequence
aggctgccacgctggagtttaatcc

SEQ ID NO: 134463 - DNA, 25 bp, Probe Sequence
aggtccccatggggtttgggtgcag

SEQ ID NO: 134464 - DNA, 25 bp, Probe Sequence
aggaccccatcagaaggggaggcag

SEQ ID NO: 134465 - DNA, 25 bp, Probe Sequence
aggagtccgtcagcaagaaggggag

SEQ ID NO: 134466 - DNA, 25 bp, Probe Sequence
aggaagctcacctcaaaagcctaga

SEQ ID NO: 134467 - DNA, 25 bp, Probe Sequence
agtgacggccgtgcacaaggccaac

SEQ ID NO: 134468 - DNA, 25 bp, Probe Sequence
aggctgggccgggatcagatgggaa

SEQ ID NO: 134469 - DNA, 25 bp, Probe Sequence
aggctgggccgtgagcaggtgggcc

SEQ ID NO: 134470 - DNA, 25 bp, Probe Sequence
aggaagggcaggcccacaggggcca

SEQ ID NO: 134471 - DNA, 25 bp, Probe Sequence
aggaagggcaggcccacaggggcca

SEQ ID NO: 134472 - DNA, 25 bp, Probe Sequence
aggcaaggatgccgggaagcagggc

SEQ ID NO: 134473 - DNA, 25 bp, Probe Sequence
aggctaaggcgaggggatcacgagg

SEQ ID NO: 134474 - DNA, 25 bp, Probe Sequence
aggccgaagtgggtggatcatctga

SEQ ID NO: 134475 - DNA, 25 bp, Probe Sequence
aggccgaggtgggcggatcacaagg

SEQ ID NO: 134476 - DNA, 25 bp, Probe Sequence
aggacgaggtggacgtgggcgtggt

SEQ ID NO: 134477 - DNA, 25 bp, Probe Sequence
aggcccagggagacgggatggagac

SEQ ID NO: 134478 - DNA, 25 bp, Probe Sequence
aggcccaagcccagggcaggaacct

SEQ ID NO: 134479 - DNA, 25 bp, Probe Sequence
aggcccagaccacgtgggacagaac

SEQ ID NO: 134480 - DNA, 25 bp, Probe Sequence
aggcccacagccttggaaacagacc

SEQ ID NO: 134481 - DNA, 25 bp, Probe Sequence
aggcttcacgtttggaaatctgaga

SEQ ID NO: 134482 - DNA, 25 bp, Probe Sequence
aggctgtactatctgcgaaatggag

SEQ ID NO: 134483 - DNA, 25 bp, Probe Sequence
aggctgtaccagtaggcaagatggc

SEQ ID NO: 134484 - DNA, 25 bp, Probe Sequence
aggctggagcccatggctagtggct

SEQ ID NO: 134485 - DNA, 25 bp, Probe Sequence
aggcttgagccattattgctaaggc

SEQ ID NO: 134486 - DNA, 25 bp, Probe Sequence
aggctgtgagcccttcatgggagac

SEQ ID NO: 134487 - DNA, 25 bp, Probe Sequence
aggatatgttccatcagccgtaccg

SEQ ID NO: 134488 - DNA, 25 bp, Probe Sequence
aggcttgtgttatttcgcgtaagca

SEQ ID NO: 134489 - DNA, 25 bp, Probe Sequence
aggctggatttatttaggtctcaac

SEQ ID NO: 134490 - DNA, 25 bp, Probe Sequence
aggcaggttattagaagagtcccat

SEQ ID NO: 134491 - DNA, 25 bp, Probe Sequence
aggcaggttctctgaaaggctccct

SEQ ID NO: 134492 - DNA, 25 bp, Probe Sequence
aggcagcttttgctctaaggtcact

SEQ ID NO: 134493 - DNA, 25 bp, Probe Sequence
aggcatttgttgctatcggggacta

SEQ ID NO: 134494 - DNA, 25 bp, Probe Sequence
aggcatttgctactgtgtctggtta

SEQ ID NO: 134495 - DNA, 25 bp, Probe Sequence
aggcatctgtgctgaatgtcttata

SEQ ID NO: 134496 - DNA, 25 bp, Probe Sequence
aggcatcggtgccacgcatcttcat

SEQ ID NO: 134497 - DNA, 25 bp, Probe Sequence
aggcattgatctacacacactcatc

SEQ ID NO: 134498 - DNA, 25 bp, Probe Sequence
aggcatctagttgcagcacatccct

SEQ ID NO: 134499 - DNA, 25 bp, Probe Sequence
aggcaattgaaggacgatccctccc

SEQ ID NO: 134500 - DNA, 25 bp, Probe Sequence
aggcaaagaaggcaacggttgctcc

SEQ ID NO: 134501 - DNA, 25 bp, Probe Sequence
aggaattgtagtcaacggtcagctt

SEQ ID NO: 134502 - DNA, 25 bp, Probe Sequence
aggaaaggtgttcagccagtcgttt

SEQ ID NO: 134503 - DNA, 25 bp, Probe Sequence
aggaaaggtgttcagccagtcgttt

SEQ ID NO: 134504 - DNA, 25 bp, Probe Sequence
aggaaaggtgttcagccagtcgttt

SEQ ID NO: 134505 - DNA, 25 bp, Probe Sequence
aggaaagtttaattacagttgctct

SEQ ID NO: 134506 - DNA, 25 bp, Probe Sequence
aggaaaatttcatagatcatgtatt

SEQ ID NO: 134507 - DNA, 25 bp, Probe Sequence
aggacaaaattcttagtaatgagta

SEQ ID NO: 134508 - DNA, 25 bp, Probe Sequence
aggaaagcaaccttactactgaaat

SEQ ID NO: 134509 - DNA, 25 bp, Probe Sequence
aggaaatcggcctctatttgaagat

SEQ ID NO: 134510 - DNA, 25 bp, Probe Sequence
aggcagaagaggacttttgggaaga

SEQ ID NO: 134511 - DNA, 25 bp, Probe Sequence
agtgacccgtccattgtgggtagca

SEQ ID NO: 134512 - DNA, 25 bp, Probe Sequence
agtgggaggtccactggggcaacag

SEQ ID NO: 134513 - DNA, 25 bp, Probe Sequence
agtgtatgagttgttgttgggaaag

SEQ ID NO: 134514 - DNA, 25 bp, Probe Sequence
aggcttgaatctgtattacccagaa

SEQ ID NO: 134515 - DNA, 25 bp, Probe Sequence
aggcatctacctgagttgacgctaa

SEQ ID NO: 134516 - DNA, 25 bp, Probe Sequence
aggacatggccgggctgctgaagcc

SEQ ID NO: 134517 - DNA, 25 bp, Probe Sequence
aggacatggcagccttcatgaaagg

SEQ ID NO: 134518 - DNA, 25 bp, Probe Sequence
aggcatcataggtttctgaaagaga

SEQ ID NO: 134519 - DNA, 25 bp, Probe Sequence
aggcataaggttcgggaagaggttg

SEQ ID NO: 134520 - DNA, 25 bp, Probe Sequence
aggaaggggttgctgtccagtgttg

SEQ ID NO: 134521 - DNA, 25 bp, Probe Sequence
aggaagagggtaatctggaagagtt

SEQ ID NO: 134522 - DNA, 25 bp, Probe Sequence
agaactgtggcctaattggaaagtg

SEQ ID NO: 134523 - DNA, 25 bp, Probe Sequence
aggtttatgcctacatttattcagt

SEQ ID NO: 134524 - DNA, 25 bp, Probe Sequence
aggcattaacgcttctttagatctg

SEQ ID NO: 134525 - DNA, 25 bp, Probe Sequence
aggctgtgaagtttgctttggacat

SEQ ID NO: 134526 - DNA, 25 bp, Probe Sequence
aggcaggaagtgtttttgctaccgt

SEQ ID NO: 134527 - DNA, 25 bp, Probe Sequence
aggaagtatgtttgtttcttagtgt

SEQ ID NO: 134528 - DNA, 25 bp, Probe Sequence
aggaagctggtcagttttacagtga

SEQ ID NO: 134529 - DNA, 25 bp, Probe Sequence
aggctggtggtaacttttgaattat

SEQ ID NO: 134530 - DNA, 25 bp, Probe Sequence
aggggtattgctatcatttgaacta

SEQ ID NO: 134531 - DNA, 25 bp, Probe Sequence
aggttgaaacatatctcttatctta

SEQ ID NO: 134532 - DNA, 25 bp, Probe Sequence
aggaatggcacattttcactgattt

SEQ ID NO: 134533 - DNA, 25 bp, Probe Sequence
aggctctacaagtatgatcacaact

SEQ ID NO: 134534 - DNA, 25 bp, Probe Sequence
aggctccacagccagtgatagctat

SEQ ID NO: 134535 - DNA, 25 bp, Probe Sequence
aggctggcagtgccagtggcatcat

SEQ ID NO: 134536 - DNA, 25 bp, Probe Sequence
aggcagctgctgcagcagcggcact

SEQ ID NO: 134537 - DNA, 25 bp, Probe Sequence
aggcagctgctgcagcagcggcact

SEQ ID NO: 134538 - DNA, 25 bp, Probe Sequence
aggcacctagagtgtccttggagtt

SEQ ID NO: 134539 - DNA, 25 bp, Probe Sequence
aggacctgggtctaccaaggagttg

SEQ ID NO: 134540 - DNA, 25 bp, Probe Sequence
aggacactggtagcctagaggaaaa

SEQ ID NO: 134541 - DNA, 25 bp, Probe Sequence
aggaacggatgggcctctagtgaca

SEQ ID NO: 134542 - DNA, 25 bp, Probe Sequence
aggatgaagtttgcctgctactacc

SEQ ID NO: 134543 - DNA, 25 bp, Probe Sequence
aggatgaagtttgcctgctactacc

SEQ ID NO: 134544 - DNA, 25 bp, Probe Sequence
aggatgaagtttgcctgctactacc

SEQ ID NO: 134545 - DNA, 25 bp, Probe Sequence
aggagaacgttcttccaagctcctc

SEQ ID NO: 134546 - DNA, 25 bp, Probe Sequence
aggaaacggtcgcccagatcaaggc

SEQ ID NO: 134547 - DNA, 25 bp, Probe Sequence
aggaataggacccccagtgaggatg

SEQ ID NO: 134548 - DNA, 25 bp, Probe Sequence
aggaattgcgacttgtcaagctagc

SEQ ID NO: 134549 - DNA, 25 bp, Probe Sequence
aggcaaatgggattgtccccgcact

SEQ ID NO: 134550 - DNA, 25 bp, Probe Sequence
aggcatcctgggtttcaccagtgac

SEQ ID NO: 134551 - DNA, 25 bp, Probe Sequence
aggctaagtcctatcagccatggaa

SEQ ID NO: 134552 - DNA, 25 bp, Probe Sequence
aggcttaatctctttcagctctgaa

SEQ ID NO: 134553 - DNA, 25 bp, Probe Sequence
aggctgtgtttcctaagctctgagt

SEQ ID NO: 134554 - DNA, 25 bp, Probe Sequence
aggcagttggccagagagcctggtg

SEQ ID NO: 134555 - DNA, 25 bp, Probe Sequence
aggactctgggctgctggaatagga

SEQ ID NO: 134556 - DNA, 25 bp, Probe Sequence
aggaagtgccaaacatggaaaggaa

SEQ ID NO: 134557 - DNA, 25 bp, Probe Sequence
aggaagtgtcaccctaggaagtgaa

SEQ ID NO: 134558 - DNA, 25 bp, Probe Sequence
aggaagttcccagcagagcaaactg

SEQ ID NO: 134559 - DNA, 25 bp, Probe Sequence
aggaatttggccccatgatgaagcc

SEQ ID NO: 134560 - DNA, 25 bp, Probe Sequence
aggaattttctctctataagtttct

SEQ ID NO: 134561 - DNA, 25 bp, Probe Sequence
aggacttactcctgctaaagtctcc

SEQ ID NO: 134562 - DNA, 25 bp, Probe Sequence
aggactgtacttgatgaaaatgcca

SEQ ID NO: 134563 - DNA, 25 bp, Probe Sequence
aggaatgaacttgttacttgcagca

SEQ ID NO: 134564 - DNA, 25 bp, Probe Sequence
aggaatgacctgttcttgttctaca

SEQ ID NO: 134565 - DNA, 25 bp, Probe Sequence
aggaaacgatttgggcctctgtcag

SEQ ID NO: 134566 - DNA, 25 bp, Probe Sequence
aggaacaggtgtttgctctcctaag

SEQ ID NO: 134567 - DNA, 25 bp, Probe Sequence
aggaaagcggctgttgctccataac

SEQ ID NO: 134568 - DNA, 25 bp, Probe Sequence
aggaaggaaccctgtcacattgctc

SEQ ID NO: 134569 - DNA, 25 bp, Probe Sequence
aggaagtggacctatagcctttgcc

SEQ ID NO: 134570 - DNA, 25 bp, Probe Sequence
aggaaggccactttgatgccgatgg

SEQ ID NO: 134571 - DNA, 25 bp, Probe Sequence
aggaaggaagtcagcatgcctctag

SEQ ID NO: 134572 - DNA, 25 bp, Probe Sequence
aggcatggtgtggtatagcatcctc

SEQ ID NO: 134573 - DNA, 25 bp, Probe Sequence
aggctgcgatagatgaactcaccgg

SEQ ID NO: 134574 - DNA, 25 bp, Probe Sequence
agggctatatggcaagcaagtcgca

SEQ ID NO: 134575 - DNA, 25 bp, Probe Sequence
aggctgctgaggggtagcaggtcca

SEQ ID NO: 134576 - DNA, 25 bp, Probe Sequence
aggctggagtgcagtggtgcagtct

SEQ ID NO: 134577 - DNA, 25 bp, Probe Sequence
aggctgaggatcagcaggcgcgcgt

SEQ ID NO: 134578 - DNA, 25 bp, Probe Sequence
aggcaagctgctatgatggccgcgg

SEQ ID NO: 134579 - DNA, 25 bp, Probe Sequence
aggaagactatgatcgactgcggcc

SEQ ID NO: 134580 - DNA, 25 bp, Probe Sequence
aggctagcctggagctcaccaggcc

SEQ ID NO: 134581 - DNA, 25 bp, Probe Sequence
aggctcagcgtgcagagccgacggc

SEQ ID NO: 134582 - DNA, 25 bp, Probe Sequence
aggaccctgaagcccgagggcaaca

SEQ ID NO: 134583 - DNA, 25 bp, Probe Sequence
aggaagcctgaacccgggtgatggc

SEQ ID NO: 134584 - DNA, 25 bp, Probe Sequence
aggaagtggctatgctgggggggcc

SEQ ID NO: 134585 - DNA, 25 bp, Probe Sequence
aggcaagtgacttcagttgagggca

SEQ ID NO: 134586 - DNA, 25 bp, Probe Sequence
aggcatcaagagtgtcagtgtccca

SEQ ID NO: 134587 - DNA, 25 bp, Probe Sequence
aggtaaggttgggctggtgctcaca

SEQ ID NO: 134588 - DNA, 25 bp, Probe Sequence
aggctaaggtgtgcagatcactgca

SEQ ID NO: 134589 - DNA, 25 bp, Probe Sequence
aggctcacatgggagttgtcctcac

SEQ ID NO: 134590 - DNA, 25 bp, Probe Sequence
aggctcagatctgcatgttggccca

SEQ ID NO: 134591 - DNA, 25 bp, Probe Sequence
aggcagacattccatttggctaatg

SEQ ID NO: 134592 - DNA, 25 bp, Probe Sequence
agggctttccatgacgtcaatgggt

SEQ ID NO: 134593 - DNA, 25 bp, Probe Sequence
aggagcttttacatattactgggat

SEQ ID NO: 134594 - DNA, 25 bp, Probe Sequence
aggaattttattttgctgagttgtt

SEQ ID NO: 134595 - DNA, 25 bp, Probe Sequence
aggaatttcctgtttgtgatctatt

SEQ ID NO: 134596 - DNA, 25 bp, Probe Sequence
aggaatagactccttcgtgatctgg

SEQ ID NO: 134597 - DNA, 25 bp, Probe Sequence
aggaaagtcctagcggatctggcca

SEQ ID NO: 134598 - DNA, 25 bp, Probe Sequence
aggaacgtcctagagctgattgagt

SEQ ID NO: 134599 - DNA, 25 bp, Probe Sequence
aggacagttcacaatctagtaatag

SEQ ID NO: 134600 - DNA, 25 bp, Probe Sequence
aggctcaaccaatataggatatagt

SEQ ID NO: 134601 - DNA, 25 bp, Probe Sequence
aggcatcatgtctgttagggaaagc

SEQ ID NO: 134602 - DNA, 25 bp, Probe Sequence
agatgactgatgtggtagggtaatc

SEQ ID NO: 134603 - DNA, 25 bp, Probe Sequence
aggcactgtggtggtacctgtagtc

SEQ ID NO: 134604 - DNA, 25 bp, Probe Sequence
aggactgggtatggatcgctgggcc

SEQ ID NO: 134605 - DNA, 25 bp, Probe Sequence
aggcttggagagtatgacctgcggc

SEQ ID NO: 134606 - DNA, 25 bp, Probe Sequence
aggctggacaagttcgtcctgccta

SEQ ID NO: 134607 - DNA, 25 bp, Probe Sequence
aggcggaggagtgcgggatcctgga

SEQ ID NO: 134608 - DNA, 25 bp, Probe Sequence
aggcggaggagtgcgggatcctgga

SEQ ID NO: 134609 - DNA, 25 bp, Probe Sequence
aggctcaaggaaggcgggtcacgag

SEQ ID NO: 134610 - DNA, 25 bp, Probe Sequence
aggctgcaaggagcggggtcgtgac

SEQ ID NO: 134611 - DNA, 25 bp, Probe Sequence
aggtgcataaccggtacagtttact

SEQ ID NO: 134612 - DNA, 25 bp, Probe Sequence
aggctgaaaaccatgacaccttcct

SEQ ID NO: 134613 - DNA, 25 bp, Probe Sequence
aggcaaaacacttagaacagttcct

SEQ ID NO: 134614 - DNA, 25 bp, Probe Sequence
aggaataatcacaatagaaggtctt

SEQ ID NO: 134615 - DNA, 25 bp, Probe Sequence
aggaatactcatcttacaggggaat

SEQ ID NO: 134616 - DNA, 25 bp, Probe Sequence
aggaattcacagcttaatagggaca

SEQ ID NO: 134617 - DNA, 25 bp, Probe Sequence
aggaaaaagcgattgaagtggaacg

SEQ ID NO: 134618 - DNA, 25 bp, Probe Sequence
aggaggaaaggtcaggggccagctg

SEQ ID NO: 134619 - DNA, 25 bp, Probe Sequence
aggagtagaaggatgggccccgtgg

SEQ ID NO: 134620 - DNA, 25 bp, Probe Sequence
aggactatgacagcctggcgcaacc

SEQ ID NO: 134621 - DNA, 25 bp, Probe Sequence
aggactatgacagcctggcgcaacc

SEQ ID NO: 134622 - DNA, 25 bp, Probe Sequence
aggcacaacacagctaacacaaggc

SEQ ID NO: 134623 - DNA, 25 bp, Probe Sequence
aggacaaatcaccttaaaacatgtt

SEQ ID NO: 134624 - DNA, 25 bp, Probe Sequence
aggacagaccacagtagctaccact

SEQ ID NO: 134625 - DNA, 25 bp, Probe Sequence
agtgtcagttacacagggagccgct

SEQ ID NO: 134626 - DNA, 25 bp, Probe Sequence
aggatagtacacacaggaggcttct

SEQ ID NO: 134627 - DNA, 25 bp, Probe Sequence
aggcagattacaccacggattcctt

SEQ ID NO: 134628 - DNA, 25 bp, Probe Sequence
aggaatctaccctgcagatattcta

SEQ ID NO: 134629 - DNA, 25 bp, Probe Sequence
aggaaatgcccctcaatgttgctga

SEQ ID NO: 134630 - DNA, 25 bp, Probe Sequence
aggaaagccacttccttgaatggag

SEQ ID NO: 134631 - DNA, 25 bp, Probe Sequence
aggataagcacatcaccctgaagga

SEQ ID NO: 134632 - DNA, 25 bp, Probe Sequence
aggctgccaccatcacaggtgagag

SEQ ID NO: 134633 - DNA, 25 bp, Probe Sequence
aggctcgagatcttcgcgggaagaa

SEQ ID NO: 134634 - DNA, 25 bp, Probe Sequence
aggttgaaccctcggatacgataga

SEQ ID NO: 134635 - DNA, 25 bp, Probe Sequence
agtgcaggaaccggaggaaggaact

SEQ ID NO: 134636 - DNA, 25 bp, Probe Sequence
aggcaggtatcactagaggtcaaga

SEQ ID NO: 134637 - DNA, 25 bp, Probe Sequence
agagggtatctatgcagggaagggg

SEQ ID NO: 134638 - DNA, 25 bp, Probe Sequence
aggggtgacaagtggtcaaggagct

SEQ ID NO: 134639 - DNA, 25 bp, Probe Sequence
agggccacaaagtgaccaagaacgt

SEQ ID NO: 134640 - DNA, 25 bp, Probe Sequence
acccccaagactcatccaaaaagat

SEQ ID NO: 134641 - DNA, 25 bp, Probe Sequence
accacctggaactgaccaattaaca

SEQ ID NO: 134642 - DNA, 25 bp, Probe Sequence
aggcaccgaacagcgttgaattaac

SEQ ID NO: 134643 - DNA, 25 bp, Probe Sequence
aggacctgacttcagtgtaatatta

SEQ ID NO: 134644 - DNA, 25 bp, Probe Sequence
aggaacatacctcaatataataaag

SEQ ID NO: 134645 - DNA, 25 bp, Probe Sequence
aggacagacaccttcaatttgtgaa

SEQ ID NO: 134646 - DNA, 25 bp, Probe Sequence
aggacaagcacttatcacctttgaa

SEQ ID NO: 134647 - DNA, 25 bp, Probe Sequence
aggaacagataaaaccattagaaga

SEQ ID NO: 134648 - DNA, 25 bp, Probe Sequence
aggaataggatatacactccagaaa

SEQ ID NO: 134649 - DNA, 25 bp, Probe Sequence
aggcacaaggccaagaactcctggc

SEQ ID NO: 134650 - DNA, 25 bp, Probe Sequence
aggacattgcccataatcacactgt

SEQ ID NO: 134651 - DNA, 25 bp, Probe Sequence
aggaatacccagagattgctgctgt

SEQ ID NO: 134652 - DNA, 25 bp, Probe Sequence
aggagttcctggtgatgtgcacgct

SEQ ID NO: 134653 - DNA, 25 bp, Probe Sequence
aggaattcgcaagatggcgccgtcc

SEQ ID NO: 134654 - DNA, 25 bp, Probe Sequence
aggaattgacggaagcgcactcctc

SEQ ID NO: 134655 - DNA, 25 bp, Probe Sequence
aggaatgtaaggacatgctgaattc

SEQ ID NO: 134656 - DNA, 25 bp, Probe Sequence
aggacccaaggcatacagattcaca

SEQ ID NO: 134657 - DNA, 25 bp, Probe Sequence
aggacgccaaggagatcatgcagca

SEQ ID NO: 134658 - DNA, 25 bp, Probe Sequence
aggacgaagcggagagagccaagac

SEQ ID NO: 134659 - DNA, 25 bp, Probe Sequence
agggtgagacggagccggaagttat

SEQ ID NO: 134660 - DNA, 25 bp, Probe Sequence
aggagggcaaggcccagccgaagtt

SEQ ID NO: 134661 - DNA, 25 bp, Probe Sequence
aggagggcaaggcccagccgaagtt

SEQ ID NO: 134662 - DNA, 25 bp, Probe Sequence
aggaggccaaggtgcaacttccttc

SEQ ID NO: 134663 - DNA, 25 bp, Probe Sequence
agtgacgccaatagggactttccat

SEQ ID NO: 134664 - DNA, 25 bp, Probe Sequence
aggagcgtcagtgagggttttcata

SEQ ID NO: 134665 - DNA, 25 bp, Probe Sequence
aggacgtagcccaaggtattctctc

SEQ ID NO: 134666 - DNA, 25 bp, Probe Sequence
aggactacacccaggtggactactt

SEQ ID NO: 134667 - DNA, 25 bp, Probe Sequence
aggacgctgactcggaggggagctt

SEQ ID NO: 134668 - DNA, 25 bp, Probe Sequence
aggcatcgtgggaaggtgaagagct

SEQ ID NO: 134669 - DNA, 25 bp, Probe Sequence
aggctgttagctaacttgcacaggg

SEQ ID NO: 134670 - DNA, 25 bp, Probe Sequence
aggctcttaatttcactacggtggg

SEQ ID NO: 134671 - DNA, 25 bp, Probe Sequence
aggtattaatgtgccaaggagccgt

SEQ ID NO: 134672 - DNA, 25 bp, Probe Sequence
aggcaattaggattgcccaggagtc

SEQ ID NO: 134673 - DNA, 25 bp, Probe Sequence
aggaactatgtctggaaggctgtgg

SEQ ID NO: 134674 - DNA, 25 bp, Probe Sequence
aggacctagttgctactggttcagc

SEQ ID NO: 134675 - DNA, 25 bp, Probe Sequence
aggaaatacttgcattctgccctac

SEQ ID NO: 134676 - DNA, 25 bp, Probe Sequence
aggaacttattgatcattctccgaa

SEQ ID NO: 134677 - DNA, 25 bp, Probe Sequence
aggaagtggcttatcattccccaga

SEQ ID NO: 134678 - DNA, 25 bp, Probe Sequence
aggcaggtaaactcttccagcctga

SEQ ID NO: 134679 - DNA, 25 bp, Probe Sequence
aggcaagaaagcttccttcaacctg

SEQ ID NO: 134680 - DNA, 25 bp, Probe Sequence
aggaagcttagctctctacatacct

SEQ ID NO: 134681 - DNA, 25 bp, Probe Sequence
aggacacttagcttattcaacattg

SEQ ID NO: 134682 - DNA, 25 bp, Probe Sequence
aggagcctttgatctcattaaagag

SEQ ID NO: 134683 - DNA, 25 bp, Probe Sequence
aggaacttcgaaccatggaccaggc

SEQ ID NO: 134684 - DNA, 25 bp, Probe Sequence
aggaggcttggacagagggccggcg

SEQ ID NO: 134685 - DNA, 25 bp, Probe Sequence
aggcaaggcccacagagggcatccc

SEQ ID NO: 134686 - DNA, 25 bp, Probe Sequence
aggaagggcgagtaggggcacctgg

SEQ ID NO: 134687 - DNA, 25 bp, Probe Sequence
aggaaggaagcgtagccggattatg

SEQ ID NO: 134688 - DNA, 25 bp, Probe Sequence
aggaataaagcctgcgtggcaggtg

SEQ ID NO: 134689 - DNA, 25 bp, Probe Sequence
aggaaagaaggctgctgttggtgtt

SEQ ID NO: 134690 - DNA, 25 bp, Probe Sequence
aggcaagatcgaccttttctgtttt

SEQ ID NO: 134691 - DNA, 25 bp, Probe Sequence
aggaaccaagccctttatttatctg

SEQ ID NO: 134692 - DNA, 25 bp, Probe Sequence
aggaatctaagctgtctgttttatt

SEQ ID NO: 134693 - DNA, 25 bp, Probe Sequence
aggaagcacaactgtgcctttttct

SEQ ID NO: 134694 - DNA, 25 bp, Probe Sequence
aggaaaggatgtgctgacttttttc

SEQ ID NO: 134695 - DNA, 25 bp, Probe Sequence
aggaaaggatgcaccacgggctttt

SEQ ID NO: 134696 - DNA, 25 bp, Probe Sequence
aggaagttgatcaatcccgaggctg

SEQ ID NO: 134697 - DNA, 25 bp, Probe Sequence
aggacagcatggacattcccttgga

SEQ ID NO: 134698 - DNA, 25 bp, Probe Sequence
aggacagcatggacattcccttgga

SEQ ID NO: 134699 - DNA, 25 bp, Probe Sequence
aggacagcaggaaccatctgccttg

SEQ ID NO: 134700 - DNA, 25 bp, Probe Sequence
aggcacacgagacacttggtttcac

SEQ ID NO: 134701 - DNA, 25 bp, Probe Sequence
aggtcactacgatcttgggtggagt

SEQ ID NO: 134702 - DNA, 25 bp, Probe Sequence
aggcacctacgatgccaaggtgaag

SEQ ID NO: 134703 - DNA, 25 bp, Probe Sequence
aggctccttcagtgagcaaggcatc

SEQ ID NO: 134704 - DNA, 25 bp, Probe Sequence
aggcttctgcctactgagcaaggtt

SEQ ID NO: 134705 - DNA, 25 bp, Probe Sequence
aggctgcttcgccagtgaagggata

SEQ ID NO: 134706 - DNA, 25 bp, Probe Sequence
aggcagccacacgttacaggagaag

SEQ ID NO: 134707 - DNA, 25 bp, Probe Sequence
aggaaaatgctttggcagggcaaga

SEQ ID NO: 134708 - DNA, 25 bp, Probe Sequence
aggaagactgatgttcatgggtaaa

SEQ ID NO: 134709 - DNA, 25 bp, Probe Sequence
aggacatccactatttggtgaaacc

SEQ ID NO: 134710 - DNA, 25 bp, Probe Sequence
aggcagttactgactttccatcaaa

SEQ ID NO: 134711 - DNA, 25 bp, Probe Sequence
aggaggtgactgcatcctccagcat

SEQ ID NO: 134712 - DNA, 25 bp, Probe Sequence
aggaagagcagcagtgcctcgagtc

SEQ ID NO: 134713 - DNA, 25 bp, Probe Sequence
aggaagtcagcatgcctctagaggc

SEQ ID NO: 134714 - DNA, 25 bp, Probe Sequence
aggaagtcagaagcttaagtgacca

SEQ ID NO: 134715 - DNA, 25 bp, Probe Sequence
aggaaatagatcgttatgccagtga

SEQ ID NO: 134716 - DNA, 25 bp, Probe Sequence
aggatagacagtcctttctagatac

SEQ ID NO: 134717 - DNA, 25 bp, Probe Sequence
aggaattcaggcatctctctaacac

SEQ ID NO: 134718 - DNA, 25 bp, Probe Sequence
aggacaatgcaagattccatcccac

SEQ ID NO: 134719 - DNA, 25 bp, Probe Sequence
aggcaaagaagtatgtctccaacat

SEQ ID NO: 134720 - DNA, 25 bp, Probe Sequence
aggctgaaagggaagccacaccact

SEQ ID NO: 134721 - DNA, 25 bp, Probe Sequence
agggaacgcggaaggatcataacgg

SEQ ID NO: 134722 - DNA, 25 bp, Probe Sequence
agggacgacgggagctgcatgaaag

SEQ ID NO: 134723 - DNA, 25 bp, Probe Sequence
aggctgacgcaggcggatcacttga

SEQ ID NO: 134724 - DNA, 25 bp, Probe Sequence
aggctgaggcaggaggatcgcttaa

SEQ ID NO: 134725 - DNA, 25 bp, Probe Sequence
aggctgcggaggagactgcttttgt

SEQ ID NO: 134726 - DNA, 25 bp, Probe Sequence
aggcatcaggatgggtgggtttctg

SEQ ID NO: 134727 - DNA, 25 bp, Probe Sequence
aggtcaggattctgtggatatggat

SEQ ID NO: 134728 - DNA, 25 bp, Probe Sequence
aggtgcatcgtttctagtgatagga

SEQ ID NO: 134729 - DNA, 25 bp, Probe Sequence
aggcatccacttactggtggaggaa

SEQ ID NO: 134730 - DNA, 25 bp, Probe Sequence
aggctacttaacaaaggaggacctg

SEQ ID NO: 134731 - DNA, 25 bp, Probe Sequence
aggctacatctgccctagggaggtc

SEQ ID NO: 134732 - DNA, 25 bp, Probe Sequence
aggttcattcgcataggtgtgagct

SEQ ID NO: 134733 - DNA, 25 bp, Probe Sequence
aggttccctgagtcgaggtgactgg

SEQ ID NO: 134734 - DNA, 25 bp, Probe Sequence
aggctttaagaacattgctgaggct

SEQ ID NO: 134735 - DNA, 25 bp, Probe Sequence
aggttccccgagaactcggcatgct

SEQ ID NO: 134736 - DNA, 25 bp, Probe Sequence
aggagtccaacgatcacgtgtgtct

SEQ ID NO: 134737 - DNA, 25 bp, Probe Sequence
aggactcataatagttacagtcggc

SEQ ID NO: 134738 - DNA, 25 bp, Probe Sequence
aggaacttaggttcacactgctgcc

SEQ ID NO: 134739 - DNA, 25 bp, Probe Sequence
aggcaacctcagttgatgccttccc

SEQ ID NO: 134740 - DNA, 25 bp, Probe Sequence
aggcagaaggcagctatggcgtccc

SEQ ID NO: 134741 - DNA, 25 bp, Probe Sequence
aggcaaatggaggcgcctggtgccc

SEQ ID NO: 134742 - DNA, 25 bp, Probe Sequence
aggaatatgtgagcctgggcgccct

SEQ ID NO: 134743 - DNA, 25 bp, Probe Sequence
aggaatggaaaccatagagcccacg

SEQ ID NO: 134744 - DNA, 25 bp, Probe Sequence
aggaagtgttgacctcagacgctca

SEQ ID NO: 134745 - DNA, 25 bp, Probe Sequence
aggaaatgttgagggcaagccacca

SEQ ID NO: 134746 - DNA, 25 bp, Probe Sequence
aggaagattctgagacatttcgcct

SEQ ID NO: 134747 - DNA, 25 bp, Probe Sequence
agtaacgccataggacttttccttg

SEQ ID NO: 134748 - DNA, 25 bp, Probe Sequence
aggaaggcacaagacgttctcctct

SEQ ID NO: 134749 - DNA, 25 bp, Probe Sequence
aggaaattaagctcatgttctacac

SEQ ID NO: 134750 - DNA, 25 bp, Probe Sequence
agagaactaaatcacagtactcaac

SEQ ID NO: 134751 - DNA, 25 bp, Probe Sequence
aggagactaagttcagttactcggg

SEQ ID NO: 134752 - DNA, 25 bp, Probe Sequence
aggaactgacagcagtgcttacatc

SEQ ID NO: 134753 - DNA, 25 bp, Probe Sequence
aggacatctagccagagttccagtc

SEQ ID NO: 134754 - DNA, 25 bp, Probe Sequence
aggagctctggctattgttaatgca

SEQ ID NO: 134755 - DNA, 25 bp, Probe Sequence
aggaatctgcactattttggaggac

SEQ ID NO: 134756 - DNA, 25 bp, Probe Sequence
aggaatctgaccattttacgtctct

SEQ ID NO: 134757 - DNA, 25 bp, Probe Sequence
aggacaagctctatttttcagccct

SEQ ID NO: 134758 - DNA, 25 bp, Probe Sequence
aggacagaatataagatttaaccat

SEQ ID NO: 134759 - DNA, 25 bp, Probe Sequence
aggactacatagaggctttttcagc

SEQ ID NO: 134760 - DNA, 25 bp, Probe Sequence
aggcaccacttttggttcttgccaa

SEQ ID NO: 134761 - DNA, 25 bp, Probe Sequence
aggaccactggttagttcagatgct

SEQ ID NO: 134762 - DNA, 25 bp, Probe Sequence
aggagcccatggcatcatagttgtg

SEQ ID NO: 134763 - DNA, 25 bp, Probe Sequence
aggcagcacttttagatcctttgtg

SEQ ID NO: 134764 - DNA, 25 bp, Probe Sequence
aggcaacttcatttggcttgtgtgc

SEQ ID NO: 134765 - DNA, 25 bp, Probe Sequence
aggaacatatctgtcttggtggccc

SEQ ID NO: 134766 - DNA, 25 bp, Probe Sequence
aggaggtgcatgtgaccagggtccc

SEQ ID NO: 134767 - DNA, 25 bp, Probe Sequence
aggcttgggaggaccatggggcaca

SEQ ID NO: 134768 - DNA, 25 bp, Probe Sequence
aggatttggaggacctgtcagagga

SEQ ID NO: 134769 - DNA, 25 bp, Probe Sequence
aggcttctggatctctggtcagagt

SEQ ID NO: 134770 - DNA, 25 bp, Probe Sequence
aggcttcaggtgcccagagatcagg

SEQ ID NO: 134771 - DNA, 25 bp, Probe Sequence
aggcatgccagaggtcgctggcagc

SEQ ID NO: 134772 - DNA, 25 bp, Probe Sequence
aggcatggagctgttcgtgcagcgg

SEQ ID NO: 134773 - DNA, 25 bp, Probe Sequence
aggcaggcatgtgttggcaaaggct

SEQ ID NO: 134774 - DNA, 25 bp, Probe Sequence
aggcagtagttctggaaaagccact

SEQ ID NO: 134775 - DNA, 25 bp, Probe Sequence
agggttgcttcagagtaacggactc

SEQ ID NO: 134776 - DNA, 25 bp, Probe Sequence
aggagttcaagagtactcaaagtac

SEQ ID NO: 134777 - DNA, 25 bp, Probe Sequence
agtgaatgtggatctaacgaaatca

SEQ ID NO: 134778 - DNA, 25 bp, Probe Sequence
aggacagggacccatcactgaggac

SEQ ID NO: 134779 - DNA, 25 bp, Probe Sequence
aggacagtatgaaccgcacttcgac

SEQ ID NO: 134780 - DNA, 25 bp, Probe Sequence
aggaacatatgaaaacacctagatg

SEQ ID NO: 134781 - DNA, 25 bp, Probe Sequence
aggcaccagaaccaacaagattgag

SEQ ID NO: 134782 - DNA, 25 bp, Probe Sequence
aggcttcagcatcagcaaaaattac

SEQ ID NO: 134783 - DNA, 25 bp, Probe Sequence
aggattgcacattggaaaagtaaac

SEQ ID NO: 134784 - DNA, 25 bp, Probe Sequence
aggcatgctcataaggaaaggttaa

SEQ ID NO: 134785 - DNA, 25 bp, Probe Sequence
aggcatgctcataaggaaaggttaa

SEQ ID NO: 134786 - DNA, 25 bp, Probe Sequence
aggcagctgctgtgtatatgggatt

SEQ ID NO: 134787 - DNA, 25 bp, Probe Sequence
aggcagcagtgtttatctctggcca

SEQ ID NO: 134788 - DNA, 25 bp, Probe Sequence
aggcagcaagcagctgccgcaggcc

SEQ ID NO: 134789 - DNA, 25 bp, Probe Sequence
aggcaaagcagacctgtgcatgtgc

SEQ ID NO: 134790 - DNA, 25 bp, Probe Sequence
aggcaaggtgaccgtgttcaatgct

SEQ ID NO: 134791 - DNA, 25 bp, Probe Sequence
aggcattcgatgcgtgtttaatgat

SEQ ID NO: 134792 - DNA, 25 bp, Probe Sequence
aggcaatcgtggatgtctctgacaa

SEQ ID NO: 134793 - DNA, 25 bp, Probe Sequence
aggaatctctggtcactcattgaca

SEQ ID NO: 134794 - DNA, 25 bp, Probe Sequence
aggcaactgcgtaaccagtggatat

SEQ ID NO: 134795 - DNA, 25 bp, Probe Sequence
aggcagtctccttaggaggtgttct

SEQ ID NO: 134796 - DNA, 25 bp, Probe Sequence
aggcagtcttcttagcatggtgagc

SEQ ID NO: 134797 - DNA, 25 bp, Probe Sequence
aggcagtcagatctgaggatctgag

SEQ ID NO: 134798 - DNA, 25 bp, Probe Sequence
aggagtatgatcatgatagtgacat

SEQ ID NO: 134799 - DNA, 25 bp, Probe Sequence
aggaatatctcttgatatagaattt

SEQ ID NO: 134800 - DNA, 25 bp, Probe Sequence
aggcagatactctagatgctttatg

SEQ ID NO: 134801 - DNA, 25 bp, Probe Sequence
aggcagtcatattatcaccctatcc

SEQ ID NO: 134802 - DNA, 25 bp, Probe Sequence
aggcagtgcaaatcaccctgtggaa

SEQ ID NO: 134803 - DNA, 25 bp, Probe Sequence
aggcttgctaatctcccagaggaag

SEQ ID NO: 134804 - DNA, 25 bp, Probe Sequence
aggatttaagttgcactgacaaaaa

SEQ ID NO: 134805 - DNA, 25 bp, Probe Sequence
aggttaaagccgagccagccaaaat

SEQ ID NO: 134806 - DNA, 25 bp, Probe Sequence
aggtaataccagctttagccaactt

SEQ ID NO: 134807 - DNA, 25 bp, Probe Sequence
aggataacaccgcttttgttctcgc

SEQ ID NO: 134808 - DNA, 25 bp, Probe Sequence
aggaaaccctagactctgtgtcact

SEQ ID NO: 134809 - DNA, 25 bp, Probe Sequence
aggacgaacctgatctcttatacta

SEQ ID NO: 134810 - DNA, 25 bp, Probe Sequence
agtgggaacgtcttacggtagctga

SEQ ID NO: 134811 - DNA, 25 bp, Probe Sequence
agtacgagaccctgtcggatagtga

SEQ ID NO: 134812 - DNA, 25 bp, Probe Sequence
agtacgacttcgtggaggtgcgcag

SEQ ID NO: 134813 - DNA, 25 bp, Probe Sequence
aggacaccgtggtgcatgagggcca

SEQ ID NO: 134814 - DNA, 25 bp, Probe Sequence
aggaaccggtgaggtgcgatggctc

SEQ ID NO: 134815 - DNA, 25 bp, Probe Sequence
aggaaccaggatacatccgggctcc

SEQ ID NO: 134816 - DNA, 25 bp, Probe Sequence
aggcaagggaacaacaggggctcct

SEQ ID NO: 134817 - DNA, 25 bp, Probe Sequence
aggaactgggacatcagggcccttc

SEQ ID NO: 134818 - DNA, 25 bp, Probe Sequence
agtaactgtgggcaacgtcaccgtc

SEQ ID NO: 134819 - DNA, 25 bp, Probe Sequence
aggagactttggttactgtcctcgt

SEQ ID NO: 134820 - DNA, 25 bp, Probe Sequence
aggaacattgtttctccttagccgt

SEQ ID NO: 134821 - DNA, 25 bp, Probe Sequence
aggcttcatagtatatctctgtccc

SEQ ID NO: 134822 - DNA, 25 bp, Probe Sequence
aggcttctggatttcatcttttccc

SEQ ID NO: 134823 - DNA, 25 bp, Probe Sequence
aggatgtgggtttactctttgcccg

SEQ ID NO: 134824 - DNA, 25 bp, Probe Sequence
aggatgtgggtttactctttgcccg

SEQ ID NO: 134825 - DNA, 25 bp, Probe Sequence
aggcatttggtctgtatctttgctc

SEQ ID NO: 134826 - DNA, 25 bp, Probe Sequence
aggactattgctttgctgaccttgc

SEQ ID NO: 134827 - DNA, 25 bp, Probe Sequence
aggtgcttaccagtggaccttctgg

SEQ ID NO: 134828 - DNA, 25 bp, Probe Sequence
aggcatgttaattctggttctatct

SEQ ID NO: 134829 - DNA, 25 bp, Probe Sequence
aggcatttcagcgctgtgtgactct

SEQ ID NO: 134830 - DNA, 25 bp, Probe Sequence
aggactccagtatttgtggcctgta

SEQ ID NO: 134831 - DNA, 25 bp, Probe Sequence
aggactctagtgttcttgggtgtat

SEQ ID NO: 134832 - DNA, 25 bp, Probe Sequence
aggcactgctcattaatcctgggag

SEQ ID NO: 134833 - DNA, 25 bp, Probe Sequence
aggcactccaaggtcctgtgcaaat

SEQ ID NO: 134834 - DNA, 25 bp, Probe Sequence
aggacaccacttccaaggcaattca

SEQ ID NO: 134835 - DNA, 25 bp, Probe Sequence
aggaaatcaattctgggccatcaga

SEQ ID NO: 134836 - DNA, 25 bp, Probe Sequence
aggaaccagaccttagtgccacata

SEQ ID NO: 134837 - DNA, 25 bp, Probe Sequence
aggaacacagacctgtagtctactt

SEQ ID NO: 134838 - DNA, 25 bp, Probe Sequence
aggcagacagagacctttgcttcct

SEQ ID NO: 134839 - DNA, 25 bp, Probe Sequence
aggagacataaggtatccgtccatg

SEQ ID NO: 134840 - DNA, 25 bp, Probe Sequence
aggcaagaaggactaccctgcactg

SEQ ID NO: 134841 - DNA, 25 bp, Probe Sequence
aggaagaagcgagacatccccgact

SEQ ID NO: 134842 - DNA, 25 bp, Probe Sequence
aggcaaaagatttagacctcggtct

SEQ ID NO: 134843 - DNA, 25 bp, Probe Sequence
aggaagaagtaaagccgcctggctg

SEQ ID NO: 134844 - DNA, 25 bp, Probe Sequence
aggaaaactcagtgcagtccagtgc

SEQ ID NO: 134845 - DNA, 25 bp, Probe Sequence
aggaattagtcgtacttgcctgtgc

SEQ ID NO: 134846 - DNA, 25 bp, Probe Sequence
aggagcagtggaaatggttccttgc

SEQ ID NO: 134847 - DNA, 25 bp, Probe Sequence
aggagcagggaatgttgtatctttg

SEQ ID NO: 134848 - DNA, 25 bp, Probe Sequence
aggagcagggcaatcgtctgttcgt

SEQ ID NO: 134849 - DNA, 25 bp, Probe Sequence
aggaagtggcatcattgtttcagtt

SEQ ID NO: 134850 - DNA, 25 bp, Probe Sequence
aggaatctgtgcacatttggtattt

SEQ ID NO: 134851 - DNA, 25 bp, Probe Sequence
aggaatgtgtcaaatgggagccatt

SEQ ID NO: 134852 - DNA, 25 bp, Probe Sequence
aggaattgtctcctggggctatggc

SEQ ID NO: 134853 - DNA, 25 bp, Probe Sequence
aggaactgtctcaaaaggatggtgg

SEQ ID NO: 134854 - DNA, 25 bp, Probe Sequence
aggaagattctcaccactgaagggc

SEQ ID NO: 134855 - DNA, 25 bp, Probe Sequence
aggaaatcttcagcaacgtcagttg

SEQ ID NO: 134856 - DNA, 25 bp, Probe Sequence
aggacaacttatgactcagctcttt

SEQ ID NO: 134857 - DNA, 25 bp, Probe Sequence
aggagagtctctggtactagctgct

SEQ ID NO: 134858 - DNA, 25 bp, Probe Sequence
aggaatgaattggtcactgcatctt

SEQ ID NO: 134859 - DNA, 25 bp, Probe Sequence
aggcagatgagctggtcatttcgcc

SEQ ID NO: 134860 - DNA, 25 bp, Probe Sequence
aggagaccattgcatcattggccgc

SEQ ID NO: 134861 - DNA, 25 bp, Probe Sequence
aggagctactagacacattccggcc

SEQ ID NO: 134862 - DNA, 25 bp, Probe Sequence
aggagcctgtagaagcagcgccggc

SEQ ID NO: 134863 - DNA, 25 bp, Probe Sequence
aggacgtgtgaggagcaccagctct

SEQ ID NO: 134864 - DNA, 25 bp, Probe Sequence
aggcagtttggtggcatgctacttg

SEQ ID NO: 134865 - DNA, 25 bp, Probe Sequence
aggactttgattgcacattgttgtt

SEQ ID NO: 134866 - DNA, 25 bp, Probe Sequence
aggcagctgcaacattccagtgttt

SEQ ID NO: 134867 - DNA, 25 bp, Probe Sequence
aggcagccaagctacatccagaatt

SEQ ID NO: 134868 - DNA, 25 bp, Probe Sequence
aggcatgccaagcagcatgctcagt

SEQ ID NO: 134869 - DNA, 25 bp, Probe Sequence
aggcaggatacaagatgcatcagta

SEQ ID NO: 134870 - DNA, 25 bp, Probe Sequence
aggaaatacaagtctcagatttttt

SEQ ID NO: 134871 - DNA, 25 bp, Probe Sequence
aggactcaacagcatctcagatgtc

SEQ ID NO: 134872 - DNA, 25 bp, Probe Sequence
aggagtgccaatggaccgatgcctg

SEQ ID NO: 134873 - DNA, 25 bp, Probe Sequence
aggagtgccaatggaccgatgcctg

SEQ ID NO: 134874 - DNA, 25 bp, Probe Sequence
aggagcccatagccatgaggagcct

SEQ ID NO: 134875 - DNA, 25 bp, Probe Sequence
aggagatcgcggccagcaagtgccg

SEQ ID NO: 134876 - DNA, 25 bp, Probe Sequence
aggcagagagcgaccagcaggctcc

SEQ ID NO: 134877 - DNA, 25 bp, Probe Sequence
aggcaaggcgtcagcaggcatcgcc

SEQ ID NO: 134878 - DNA, 25 bp, Probe Sequence
aggcactatttcatgactgaccctc

SEQ ID NO: 134879 - DNA, 25 bp, Probe Sequence
aggaccatagcgatactagcccttt

SEQ ID NO: 134880 - DNA, 25 bp, Probe Sequence
aggacctcaccaaaagatccagcct

SEQ ID NO: 134881 - DNA, 25 bp, Probe Sequence
aggactctaacaataacttctgtca

SEQ ID NO: 134882 - DNA, 25 bp, Probe Sequence
aggattcggatcatcacctacttca

SEQ ID NO: 134883 - DNA, 25 bp, Probe Sequence
aggatactgtgtgactactgacgga

SEQ ID NO: 134884 - DNA, 25 bp, Probe Sequence
aggaaagggctcatgagctggggaa

SEQ ID NO: 134885 - DNA, 25 bp, Probe Sequence
aggacaagtggtatgaccagtgata

SEQ ID NO: 134886 - DNA, 25 bp, Probe Sequence
aggaaatgggtcaggagttgtattg

SEQ ID NO: 134887 - DNA, 25 bp, Probe Sequence
aggaaagcggtgtaggtgttgtgag

SEQ ID NO: 134888 - DNA, 25 bp, Probe Sequence
aggaacagctggagtggagttgagg

SEQ ID NO: 134889 - DNA, 25 bp, Probe Sequence
aggaagccgcagaacaggatgttga

SEQ ID NO: 134890 - DNA, 25 bp, Probe Sequence
aggaagccgcactcagttatggctt

SEQ ID NO: 134891 - DNA, 25 bp, Probe Sequence
aggaacctgccatagatttgcactg

SEQ ID NO: 134892 - DNA, 25 bp, Probe Sequence
aggcaattacgatatatgctataag

SEQ ID NO: 134893 - DNA, 25 bp, Probe Sequence
aggcaaagattgttagatcagataa

SEQ ID NO: 134894 - DNA, 25 bp, Probe Sequence
aggaacgatattctcatcatcatca

SEQ ID NO: 134895 - DNA, 25 bp, Probe Sequence
aggaatctggaccttcagcagaaaa

SEQ ID NO: 134896 - DNA, 25 bp, Probe Sequence
aggaaagtgaggaacagcaacaatt

SEQ ID NO: 134897 - DNA, 25 bp, Probe Sequence
aggagaaaaggaactatacagcata

SEQ ID NO: 134898 - DNA, 25 bp, Probe Sequence
aggaggaaaagaccttgacatattc

SEQ ID NO: 134899 - DNA, 25 bp, Probe Sequence
aggagagtacaattacattgcagca

SEQ ID NO: 134900 - DNA, 25 bp, Probe Sequence
agggagctagaagaaatacagggat

SEQ ID NO: 134901 - DNA, 25 bp, Probe Sequence
aggtgacgggcagaattattgggta

SEQ ID NO: 134902 - DNA, 25 bp, Probe Sequence
aggaaagggcaccatcttcatgggg

SEQ ID NO: 134903 - DNA, 25 bp, Probe Sequence
caggaaagtcccttcttccaagtgg

SEQ ID NO: 134904 - DNA, 25 bp, Probe Sequence
aggaaaagccatttttgcctcaggg

SEQ ID NO: 134905 - DNA, 25 bp, Probe Sequence
aggaaataggcttttggctcgcaga

SEQ ID NO: 134906 - DNA, 25 bp, Probe Sequence
aggaaaatggctccgtatccagcag

SEQ ID NO: 134907 - DNA, 25 bp, Probe Sequence
aggaaaatggctccgtatccagcag

SEQ ID NO: 134908 - DNA, 25 bp, Probe Sequence
aggaaaatgtgctattgagattcca

SEQ ID NO: 134909 - DNA, 25 bp, Probe Sequence
aggaaaaggtataggcttgccttgc

SEQ ID NO: 134910 - DNA, 25 bp, Probe Sequence
aggacagaaggactggtgcgacccc

SEQ ID NO: 134911 - DNA, 25 bp, Probe Sequence
aggagaagaggccacgtggacctgc

SEQ ID NO: 134912 - DNA, 25 bp, Probe Sequence
aggaagggggcaaggactcctgcca

SEQ ID NO: 134913 - DNA, 25 bp, Probe Sequence
aggaagggtggctcagagaccgcct

SEQ ID NO: 134914 - DNA, 25 bp, Probe Sequence
aggaaggggccacataccttcctgg

SEQ ID NO: 134915 - DNA, 25 bp, Probe Sequence
aggaagggcctacagcccatttctc

SEQ ID NO: 134916 - DNA, 25 bp, Probe Sequence
aggacactggctcagtagtgccttt

SEQ ID NO: 134917 - DNA, 25 bp, Probe Sequence
aggagcactggactagtcgtcacta

SEQ ID NO: 134918 - DNA, 25 bp, Probe Sequence
aggagcagcggacttaccgccatat

SEQ ID NO: 134919 - DNA, 25 bp, Probe Sequence
aggacagcagtattatgggcgaaat

SEQ ID NO: 134920 - DNA, 25 bp, Probe Sequence
aggacggtttatgagcacacaatta

SEQ ID NO: 134921 - DNA, 25 bp, Probe Sequence
aggagctagtttacaggcttactgt

SEQ ID NO: 134922 - DNA, 25 bp, Probe Sequence
aggactgtgtcactgtggtcttaca

SEQ ID NO: 134923 - DNA, 25 bp, Probe Sequence
aggattttcacccatgtgcatggaa

SEQ ID NO: 134924 - DNA, 25 bp, Probe Sequence
aggagcttactggcaaacatgaaaa

SEQ ID NO: 134925 - DNA, 25 bp, Probe Sequence
agggttactgtatactgaaggtctg

SEQ ID NO: 134926 - DNA, 25 bp, Probe Sequence
aggtttacgcaatagcgacgcgctg

SEQ ID NO: 134927 - DNA, 25 bp, Probe Sequence
aggagttaggaatggcaggccacgc

SEQ ID NO: 134928 - DNA, 25 bp, Probe Sequence
aggacacattctggaaggggaccac

SEQ ID NO: 134929 - DNA, 25 bp, Probe Sequence
aggaatttgctggacgtttgaactc

SEQ ID NO: 134930 - DNA, 25 bp, Probe Sequence
aggacagtgactgcacagttgtgaa

SEQ ID NO: 134931 - DNA, 25 bp, Probe Sequence
aggactgaatatgagcggttgcaat

SEQ ID NO: 134932 - DNA, 25 bp, Probe Sequence
aggactacaacgttgctgttcgcat

SEQ ID NO: 134933 - DNA, 25 bp, Probe Sequence
aggaaaatattgctgtgtcttcatt

SEQ ID NO: 134934 - DNA, 25 bp, Probe Sequence
aggaaaatatcaacatgttctcatt

SEQ ID NO: 134935 - DNA, 25 bp, Probe Sequence
aggaaaatcctattggcatctagta

SEQ ID NO: 134936 - DNA, 25 bp, Probe Sequence
aggcaaaaatcgttgtcacatcagt

SEQ ID NO: 134937 - DNA, 25 bp, Probe Sequence
aggacatatttcggcttcagcacag

SEQ ID NO: 134938 - DNA, 25 bp, Probe Sequence
aggacatcatgttagccaatcagcc

SEQ ID NO: 134939 - DNA, 25 bp, Probe Sequence
aggcaatcatggtgctcagagcagt

SEQ ID NO: 134940 - DNA, 25 bp, Probe Sequence
aggaatgtctggtcacaggcagggc

SEQ ID NO: 134941 - DNA, 25 bp, Probe Sequence
aggaatatgtgggagggctgggcta

SEQ ID NO: 134942 - DNA, 25 bp, Probe Sequence
aggagctgttgggtcgtgtagttga

SEQ ID NO: 134943 - DNA, 25 bp, Probe Sequence
agaggccctgggtgtctacaatagg

SEQ ID NO: 134944 - DNA, 25 bp, Probe Sequence
agactccctgaaaggcgctacattg

SEQ ID NO: 134945 - DNA, 25 bp, Probe Sequence
aggactcctgcaagggggacagtgg

SEQ ID NO: 134946 - DNA, 25 bp, Probe Sequence
aggagctccaaccagggaagactgg

SEQ ID NO: 134947 - DNA, 25 bp, Probe Sequence
aggagctcccaggagtgtgcaatga

SEQ ID NO: 134948 - DNA, 25 bp, Probe Sequence
aggaacctgcagaatgtggacatga

SEQ ID NO: 134949 - DNA, 25 bp, Probe Sequence
aggaagctctgcaacagatgtgatc

SEQ ID NO: 134950 - DNA, 25 bp, Probe Sequence
aggaatgcattcaaagtggctttat

SEQ ID NO: 134951 - DNA, 25 bp, Probe Sequence
aggaggttccataggcagttcttac

SEQ ID NO: 134952 - DNA, 25 bp, Probe Sequence
aggagagtttcaatggagttatagg

SEQ ID NO: 134953 - DNA, 25 bp, Probe Sequence
aggatcagtttccggaggtctacgt

SEQ ID NO: 134954 - DNA, 25 bp, Probe Sequence
aggacagttgaactgatggtttttt

SEQ ID NO: 134955 - DNA, 25 bp, Probe Sequence
aggaatgaagaactgtggcctaatt

SEQ ID NO: 134956 - DNA, 25 bp, Probe Sequence
aggatgtgaacaaggtcgcctactg

SEQ ID NO: 134957 - DNA, 25 bp, Probe Sequence
aggagctcacaatgggcagggcctg

SEQ ID NO: 134958 - DNA, 25 bp, Probe Sequence
aggagctcacaatgggcagggcctg

SEQ ID NO: 134959 - DNA, 25 bp, Probe Sequence
aggagccactatgaggagggccctg

SEQ ID NO: 134960 - DNA, 25 bp, Probe Sequence
aggagggtgatgaaggggagccaag

SEQ ID NO: 134961 - DNA, 25 bp, Probe Sequence
aggagctggaggcggaggagtgcgg

SEQ ID NO: 134962 - DNA, 25 bp, Probe Sequence
aggacaggagtggggagtggtacct

SEQ ID NO: 134963 - DNA, 25 bp, Probe Sequence
aggagggagtgcgggaggtgtttga

SEQ ID NO: 134964 - DNA, 25 bp, Probe Sequence
aggagggagtgcgggaggtgtttga

SEQ ID NO: 134965 - DNA, 25 bp, Probe Sequence
aggtagtggtagcagagaattttga

SEQ ID NO: 134966 - DNA, 25 bp, Probe Sequence
aggatagtggctacccagagacgct

SEQ ID NO: 134967 - DNA, 25 bp, Probe Sequence
aggaaatagctcaccatactccttt

SEQ ID NO: 134968 - DNA, 25 bp, Probe Sequence
aggaggcaagtcaatcttttttatt

SEQ ID NO: 134969 - DNA, 25 bp, Probe Sequence
aggaaattgctcataatctggttat

SEQ ID NO: 134970 - DNA, 25 bp, Probe Sequence
aggaaaacttgtcatctggctttgc

SEQ ID NO: 134971 - DNA, 25 bp, Probe Sequence
aggaaattttgtctcacctgtgaaa

SEQ ID NO: 134972 - DNA, 25 bp, Probe Sequence
aggtggttctttctatcctagtaca

SEQ ID NO: 134973 - DNA, 25 bp, Probe Sequence
aggtggttgtttattatatagtaat

SEQ ID NO: 134974 - DNA, 25 bp, Probe Sequence
agcggtgtatttcttgaagtttaat

SEQ ID NO: 134975 - DNA, 25 bp, Probe Sequence
aggggaagtcatctaaattcttttg

SEQ ID NO: 134976 - DNA, 25 bp, Probe Sequence
aggggatatttttcaacctcttgct

SEQ ID NO: 134977 - DNA, 25 bp, Probe Sequence
aggagaatgttttgtggaccacttt

SEQ ID NO: 134978 - DNA, 25 bp, Probe Sequence
aggagaatgttttgtggaccacttt

SEQ ID NO: 134979 - DNA, 25 bp, Probe Sequence
aggagaatgttttgtggaccacttt

SEQ ID NO: 134980 - DNA, 25 bp, Probe Sequence
aggagaatgttttgtggaccacttt

SEQ ID NO: 134981 - DNA, 25 bp, Probe Sequence
aggaatattcttttacaccaattct

SEQ ID NO: 134982 - DNA, 25 bp, Probe Sequence
aggactattctttatctattcaatg

SEQ ID NO: 134983 - DNA, 25 bp, Probe Sequence
aggacttttctaacatatgtctata

SEQ ID NO: 134984 - DNA, 25 bp, Probe Sequence
aggaccttctatttatatactgtga

SEQ ID NO: 134985 - DNA, 25 bp, Probe Sequence
aggaccggcctaataaacatgtgtg

SEQ ID NO: 134986 - DNA, 25 bp, Probe Sequence
aggaccggcacttcttaatgtttgt

SEQ ID NO: 134987 - DNA, 25 bp, Probe Sequence
aggaatcaggccagactcaattttg

SEQ ID NO: 134988 - DNA, 25 bp, Probe Sequence
aggaaatgtggtagcctcactttta

SEQ ID NO: 134989 - DNA, 25 bp, Probe Sequence
aggacaagtgagaccctacttctcc

SEQ ID NO: 134990 - DNA, 25 bp, Probe Sequence
aggaatgggaccttctaatctctca

SEQ ID NO: 134991 - DNA, 25 bp, Probe Sequence
aggacacagggctttcaaatctcca

SEQ ID NO: 134992 - DNA, 25 bp, Probe Sequence
aggtcacaaggccgaacattttcag

SEQ ID NO: 134993 - DNA, 25 bp, Probe Sequence
aggacaaactgtcagccagtttctg

SEQ ID NO: 134994 - DNA, 25 bp, Probe Sequence
aggaccaagatggcggccgcaaact

SEQ ID NO: 134995 - DNA, 25 bp, Probe Sequence
aggaagaggatgtctgagctggaga

SEQ ID NO: 134996 - DNA, 25 bp, Probe Sequence
aggagtatgccattctgcacttagg

SEQ ID NO: 134997 - DNA, 25 bp, Probe Sequence
aggacttccatgactcaatgggtgg

SEQ ID NO: 134998 - DNA, 25 bp, Probe Sequence
aggaattctaggacagtgggagctg

SEQ ID NO: 134999 - DNA, 25 bp, Probe Sequence
aggagggcaggggcattgggaatgg

SEQ ID NO: 135000 - DNA, 25 bp, Probe Sequence
aggagggcaggggcattgggaatgg

SEQ ID NO: 135001 - DNA, 25 bp, Probe Sequence
aggagggactggattgggcagtggg

SEQ ID NO: 135002 - DNA, 25 bp, Probe Sequence
aggaccgagtggataagagcgctgt

SEQ ID NO: 135003 - DNA, 25 bp, Probe Sequence
aggaacgagtagatcagacctcttg

SEQ ID NO: 135004 - DNA, 25 bp, Probe Sequence
aggacacgagtatgtacccactatg

SEQ ID NO: 135005 - DNA, 25 bp, Probe Sequence
aggaacaggtagactttcaactatt

SEQ ID NO: 135006 - DNA, 25 bp, Probe Sequence
aggagacaggcacgttcttcgagcc

SEQ ID NO: 135007 - DNA, 25 bp, Probe Sequence
aggaggagcacacgttgcacattct

SEQ ID NO: 135008 - DNA, 25 bp, Probe Sequence
aggacaaggacactctgacattcgg

SEQ ID NO: 135009 - DNA, 25 bp, Probe Sequence
aggaaagggagtaggcaggcatgtg

SEQ ID NO: 135010 - DNA, 25 bp, Probe Sequence
aggacacggagcttgggattgctga

SEQ ID NO: 135011 - DNA, 25 bp, Probe Sequence
aggacacctggatgctgagttggat

SEQ ID NO: 135012 - DNA, 25 bp, Probe Sequence
aggacacccaggccatgaaggagat

SEQ ID NO: 135013 - DNA, 25 bp, Probe Sequence
aggaagctcccggaaagagcagagg

SEQ ID NO: 135014 - DNA, 25 bp, Probe Sequence
aggaactgctcgtagaaggaagaag

SEQ ID NO: 135015 - DNA, 25 bp, Probe Sequence
aggactgcgtagtaaagtgctgagg

SEQ ID NO: 135016 - DNA, 25 bp, Probe Sequence
aggacatgacactggaaggtgacga

SEQ ID NO: 135017 - DNA, 25 bp, Probe Sequence
aggacgatcagctgaaggttcatgg

SEQ ID NO: 135018 - DNA, 25 bp, Probe Sequence
aggacgagctgtagagaggcctgcc

SEQ ID NO: 135019 - DNA, 25 bp, Probe Sequence
aggacgagagtaagaactcccacta

SEQ ID NO: 135020 - DNA, 25 bp, Probe Sequence
aggacaggaaaaccacgtgctccac

SEQ ID NO: 135021 - DNA, 25 bp, Probe Sequence
aggaaggggagacattgcctgccac

SEQ ID NO: 135022 - DNA, 25 bp, Probe Sequence
aggaaggtggcattccgtgcttgcc

SEQ ID NO: 135023 - DNA, 25 bp, Probe Sequence
aggagaggcaggtgctcctgtaccc

SEQ ID NO: 135024 - DNA, 25 bp, Probe Sequence
aggagaggcaggtgctcctgtaccc

SEQ ID NO: 135025 - DNA, 25 bp, Probe Sequence
aggaaacagctatgaccattaggcc

SEQ ID NO: 135026 - DNA, 25 bp, Probe Sequence
aggaaacagctatgagccatagcct

SEQ ID NO: 135027 - DNA, 25 bp, Probe Sequence
aggacagcaccaagtgattcatgag

SEQ ID NO: 135028 - DNA, 25 bp, Probe Sequence
aggattcacgcaagtttcagtgtca

SEQ ID NO: 135029 - DNA, 25 bp, Probe Sequence
aggattgctccaggtttgagatggt

SEQ ID NO: 135030 - DNA, 25 bp, Probe Sequence
aggattgcccaggagtccaacgatc

SEQ ID NO: 135031 - DNA, 25 bp, Probe Sequence
aggaaaaagggtgcagacgtctggt

SEQ ID NO: 135032 - DNA, 25 bp, Probe Sequence
aggaaaaagaggtgccagcagtctt

SEQ ID NO: 135033 - DNA, 25 bp, Probe Sequence
aggaaacaaagcgttctgcgcgtct

SEQ ID NO: 135034 - DNA, 25 bp, Probe Sequence
agggatacaaatcactacagttctc

SEQ ID NO: 135035 - DNA, 25 bp, Probe Sequence
aggaacaaatatcagctccacctct

SEQ ID NO: 135036 - DNA, 25 bp, Probe Sequence
aggagaccactttagaacacacctc

SEQ ID NO: 135037 - DNA, 25 bp, Probe Sequence
aggaaactctcctgatcaagaccca

SEQ ID NO: 135038 - DNA, 25 bp, Probe Sequence
aggtgaatccccagtacgatagcac

SEQ ID NO: 135039 - DNA, 25 bp, Probe Sequence
agggaaactgccagcaacgcaggcc

SEQ ID NO: 135040 - DNA, 25 bp, Probe Sequence
aggaaatgagcccggaacgcaggcc

SEQ ID NO: 135041 - DNA, 25 bp, Probe Sequence
aggaaggcagacctggtactagaca

SEQ ID NO: 135042 - DNA, 25 bp, Probe Sequence
aggaatgtctgtggggtgactctac

SEQ ID NO: 135043 - DNA, 25 bp, Probe Sequence
aggaagccagggcgcatgagctcca

SEQ ID NO: 135044 - DNA, 25 bp, Probe Sequence
aggagaggcaggtgtcagaggcaga

SEQ ID NO: 135045 - DNA, 25 bp, Probe Sequence
aggaagcagcaggagtacgaggaac

SEQ ID NO: 135046 - DNA, 25 bp, Probe Sequence
aggaaggtcaactcgaggagcacat

SEQ ID NO: 135047 - DNA, 25 bp, Probe Sequence
aggaggcttcaagaggagggcacta

SEQ ID NO: 135048 - DNA, 25 bp, Probe Sequence
aggagctgttcaacgaggatgtgga

SEQ ID NO: 135049 - DNA, 25 bp, Probe Sequence
aggagcttaccaagaggcatttgat

SEQ ID NO: 135050 - DNA, 25 bp, Probe Sequence
aggagtacaccagaagcacttcatg

SEQ ID NO: 135051 - DNA, 25 bp, Probe Sequence
aggacttccacccaagactgttggg

SEQ ID NO: 135052 - DNA, 25 bp, Probe Sequence
aggactgtctcatcgaaatctgctg

SEQ ID NO: 135053 - DNA, 25 bp, Probe Sequence
aggactgtctcatcgaaatctgctg

SEQ ID NO: 135054 - DNA, 25 bp, Probe Sequence
aggagctgtgtcactgcaaactcac

SEQ ID NO: 135055 - DNA, 25 bp, Probe Sequence
aggagctgctactgtgcaacaaccg

SEQ ID NO: 135056 - DNA, 25 bp, Probe Sequence
aggactgccacagctacagagaggg

SEQ ID NO: 135057 - DNA, 25 bp, Probe Sequence
aggacctctcagactattcagggcc

SEQ ID NO: 135058 - DNA, 25 bp, Probe Sequence
aggacactcaagacttttgactgcc

SEQ ID NO: 135059 - DNA, 25 bp, Probe Sequence
aggagaccaagtcctggctacatcc

SEQ ID NO: 135060 - DNA, 25 bp, Probe Sequence
aggagagctctgtgattggcatccc

SEQ ID NO: 135061 - DNA, 25 bp, Probe Sequence
aggagcagacattaatatccatgcc

SEQ ID NO: 135062 - DNA, 25 bp, Probe Sequence
aggacagaccatgaatcctccttga

SEQ ID NO: 135063 - DNA, 25 bp, Probe Sequence
aggactgcaagaactgatccccttt

SEQ ID NO: 135064 - DNA, 25 bp, Probe Sequence
aggactgccagtgtgaacgtctctt

SEQ ID NO: 135065 - DNA, 25 bp, Probe Sequence
aggagccctgagagaccagttcttt

SEQ ID NO: 135066 - DNA, 25 bp, Probe Sequence
aggacccggcttcacagtgtgaatt

SEQ ID NO: 135067 - DNA, 25 bp, Probe Sequence
aggacccgtgtcacatcgtgaatat

SEQ ID NO: 135068 - DNA, 25 bp, Probe Sequence
aggaccttcttcacaagatgacttg

SEQ ID NO: 135069 - DNA, 25 bp, Probe Sequence
aggaactttgtcacatctaagctgt

SEQ ID NO: 135070 - DNA, 25 bp, Probe Sequence
aggaagtttgtcgctgatggcatct

SEQ ID NO: 135071 - DNA, 25 bp, Probe Sequence
aggaaaatcccttctaggcatctcc

SEQ ID NO: 135072 - DNA, 25 bp, Probe Sequence
aggaaaaggcctgcgagcagccggc

SEQ ID NO: 135073 - DNA, 25 bp, Probe Sequence
aggagaagggacacgagggggcagc

SEQ ID NO: 135074 - DNA, 25 bp, Probe Sequence
aggtagagaggggactgggggactg

SEQ ID NO: 135075 - DNA, 25 bp, Probe Sequence
aggtagaggggcaccatcaggggct

SEQ ID NO: 135076 - DNA, 25 bp, Probe Sequence
aggtaatgggtcacacaaacttggt

SEQ ID NO: 135077 - DNA, 25 bp, Probe Sequence
aggtacaatttatctaaactgaatt

SEQ ID NO: 135078 - DNA, 25 bp, Probe Sequence
aggttcaactcttatcaaacacagt

SEQ ID NO: 135079 - DNA, 25 bp, Probe Sequence
agtgattctgtccctccaaagaaat

SEQ ID NO: 135080 - DNA, 25 bp, Probe Sequence
aggagactgtccctctgactggaaa

SEQ ID NO: 135081 - DNA, 25 bp, Probe Sequence
aggagattccaacctacttcagcaa

SEQ ID NO: 135082 - DNA, 25 bp, Probe Sequence
aggacttcgcagatgtcacattgcc

SEQ ID NO: 135083 - DNA, 25 bp, Probe Sequence
aggactgaagccactacatacctac

SEQ ID NO: 135084 - DNA, 25 bp, Probe Sequence
aggactgccagaaaccaaatcacat

SEQ ID NO: 135085 - DNA, 25 bp, Probe Sequence
aggacccagagccaccagaaaaaga

SEQ ID NO: 135086 - DNA, 25 bp, Probe Sequence
aggaccacagaacagaaacaagaga

SEQ ID NO: 135087 - DNA, 25 bp, Probe Sequence
aggaccctgaagacatttatcaaga

SEQ ID NO: 135088 - DNA, 25 bp, Probe Sequence
aggaccatctagttagttccacaaa

SEQ ID NO: 135089 - DNA, 25 bp, Probe Sequence
aggacccaagtactttccaatctca

SEQ ID NO: 135090 - DNA, 25 bp, Probe Sequence
aggaagccaaagttttcaaatctgc

SEQ ID NO: 135091 - DNA, 25 bp, Probe Sequence
aggaggcaaagctgtttcaatggtg

SEQ ID NO: 135092 - DNA, 25 bp, Probe Sequence
aggagagcagattttctttgggagt

SEQ ID NO: 135093 - DNA, 25 bp, Probe Sequence
aggagcgcattaactgcctggaagg

SEQ ID NO: 135094 - DNA, 25 bp, Probe Sequence
aggaggctcatagtctcctggaggg

SEQ ID NO: 135095 - DNA, 25 bp, Probe Sequence
aggggctcaaacactctacgtgccc

SEQ ID NO: 135096 - DNA, 25 bp, Probe Sequence
aggtggctccttgttttctgccacc

SEQ ID NO: 135097 - DNA, 25 bp, Probe Sequence
aggtcctcctcggactatttatgac

SEQ ID NO: 135098 - DNA, 25 bp, Probe Sequence
aggacccacggggcattatcttgtc

SEQ ID NO: 135099 - DNA, 25 bp, Probe Sequence
aggttccctagggtacacttgctct

SEQ ID NO: 135100 - DNA, 25 bp, Probe Sequence
acgtcccgggcggtatacagttgct

SEQ ID NO: 135101 - DNA, 25 bp, Probe Sequence
agggaccgcggcggtaactgtggct

SEQ ID NO: 135102 - DNA, 25 bp, Probe Sequence
aggtggccgtggtggagacagaggt

SEQ ID NO: 135103 - DNA, 25 bp, Probe Sequence
aggtggccgtggtggagacagaggt

SEQ ID NO: 135104 - DNA, 25 bp, Probe Sequence
aggtggcccagctcaaacagaaggt

SEQ ID NO: 135105 - DNA, 25 bp, Probe Sequence
aggagagccacctcatcaaatgaaa

SEQ ID NO: 135106 - DNA, 25 bp, Probe Sequence
aggaagatctaccaatcaaatgcaa

SEQ ID NO: 135107 - DNA, 25 bp, Probe Sequence
aggatggatctctcaagcagagcat

SEQ ID NO: 135108 - DNA, 25 bp, Probe Sequence
aggattgtgctctgactgtggttgc

SEQ ID NO: 135109 - DNA, 25 bp, Probe Sequence
agagagattgtgtgggggtagaagc

SEQ ID NO: 135110 - DNA, 25 bp, Probe Sequence
agaaaggggggggtcacagcaacat

SEQ ID NO: 135111 - DNA, 25 bp, Probe Sequence
aggacggagtggggggacagagact

SEQ ID NO: 135112 - DNA, 25 bp, Probe Sequence
aggactggggttttagcaaacacag

SEQ ID NO: 135113 - DNA, 25 bp, Probe Sequence
aggacttggttttgtgcagatatca

SEQ ID NO: 135114 - DNA, 25 bp, Probe Sequence
aggaaatgactcgggtgctgttgca

SEQ ID NO: 135115 - DNA, 25 bp, Probe Sequence
aggatagatgcaggcgggtgagctg

SEQ ID NO: 135116 - DNA, 25 bp, Probe Sequence
aggacgtgcagactcgagtggctgg

SEQ ID NO: 135117 - DNA, 25 bp, Probe Sequence
aggaagacacctgctatggcgatgc

SEQ ID NO: 135118 - DNA, 25 bp, Probe Sequence
aggaagacacctgctatggcgatgc

SEQ ID NO: 135119 - DNA, 25 bp, Probe Sequence
agtgaagaccttgtacagaatgtgt

SEQ ID NO: 135120 - DNA, 25 bp, Probe Sequence
agtgataacttcgaagccatagggt

SEQ ID NO: 135121 - DNA, 25 bp, Probe Sequence
aggacacagttcgaggccaggagga

SEQ ID NO: 135122 - DNA, 25 bp, Probe Sequence
aggaacagctctttggacactagga

SEQ ID NO: 135123 - DNA, 25 bp, Probe Sequence
aggagaagctccactacacaaggca

SEQ ID NO: 135124 - DNA, 25 bp, Probe Sequence
aggagggccgaaatatcgaggtgat

SEQ ID NO: 135125 - DNA, 25 bp, Probe Sequence
aggagagttccagttgacgtggtgt

SEQ ID NO: 135126 - DNA, 25 bp, Probe Sequence
aggggttccagaataggcttcctgc

SEQ ID NO: 135127 - DNA, 25 bp, Probe Sequence
aggggattccaataagcttgctcgc

SEQ ID NO: 135128 - DNA, 25 bp, Probe Sequence
aggagagactcccatgaagcctttt

SEQ ID NO: 135129 - DNA, 25 bp, Probe Sequence
aggacagtcaccagaacctcatatc

SEQ ID NO: 135130 - DNA, 25 bp, Probe Sequence
aggacatctcacataaacatctata

SEQ ID NO: 135131 - DNA, 25 bp, Probe Sequence
agtgaactcctgaaacctcaaacag

SEQ ID NO: 135132 - DNA, 25 bp, Probe Sequence
aggaactcaagcgggtctcagagca

SEQ ID NO: 135133 - DNA, 25 bp, Probe Sequence
aggagacatcggcgagctgctagtg

SEQ ID NO: 135134 - DNA, 25 bp, Probe Sequence
aggagatgctgcggactcagtccgt

SEQ ID NO: 135135 - DNA, 25 bp, Probe Sequence
aggagtagagctaccagtctatgat

SEQ ID NO: 135136 - DNA, 25 bp, Probe Sequence
aggagctcaatgtcaccgtggtgac

SEQ ID NO: 135137 - DNA, 25 bp, Probe Sequence
aggactcagatgacttcgaggccct

SEQ ID NO: 135138 - DNA, 25 bp, Probe Sequence
aggagctcagagatctaagctgctt

SEQ ID NO: 135139 - DNA, 25 bp, Probe Sequence
aggactcagaagttcaagctaaata

SEQ ID NO: 135140 - DNA, 25 bp, Probe Sequence
aggactcggagctcaagttcaatga

SEQ ID NO: 135141 - DNA, 25 bp, Probe Sequence
aggactgaggaagaggtaccagagt

SEQ ID NO: 135142 - DNA, 25 bp, Probe Sequence
aggaaagcgagggagcttgcaccca

SEQ ID NO: 135143 - DNA, 25 bp, Probe Sequence
aggacattgaggctctcattggccc

SEQ ID NO: 135144 - DNA, 25 bp, Probe Sequence
aggtctgaaggcctccatttgtacc

SEQ ID NO: 135145 - DNA, 25 bp, Probe Sequence
aggatcgacgcgcttctgtatgggc

SEQ ID NO: 135146 - DNA, 25 bp, Probe Sequence
aggacaagctcacctgtttgtgtgg

SEQ ID NO: 135147 - DNA, 25 bp, Probe Sequence
aggacatatggactagttggttata

SEQ ID NO: 135148 - DNA, 25 bp, Probe Sequence
agacttaggagttttgtttagagca

SEQ ID NO: 135149 - DNA, 25 bp, Probe Sequence
agtcttgggggcttttttcatacag

SEQ ID NO: 135150 - DNA, 25 bp, Probe Sequence
agatccccgactggtttttgaacag

SEQ ID NO: 135151 - DNA, 25 bp, Probe Sequence
agttcctcgactattttaagacaga

SEQ ID NO: 135152 - DNA, 25 bp, Probe Sequence
aggttcctgacctggttaagagaat

SEQ ID NO: 135153 - DNA, 25 bp, Probe Sequence
aggtttcctacctgtctgatataaa

SEQ ID NO: 135154 - DNA, 25 bp, Probe Sequence
agaggttcctaactcagggaccagg

SEQ ID NO: 135155 - DNA, 25 bp, Probe Sequence
aggaaatccttgttgggagaacagg

SEQ ID NO: 135156 - DNA, 25 bp, Probe Sequence
agggaacttctggaactgagaacca

SEQ ID NO: 135157 - DNA, 25 bp, Probe Sequence
aggtggaaggggagctgagaagcca

SEQ ID NO: 135158 - DNA, 25 bp, Probe Sequence
aggttgtggtgtctgggaaactccg

SEQ ID NO: 135159 - DNA, 25 bp, Probe Sequence
aggacgcggtgatggggcaggatct

SEQ ID NO: 135160 - DNA, 25 bp, Probe Sequence
aggaccggttcatttggcggactgt

SEQ ID NO: 135161 - DNA, 25 bp, Probe Sequence
aggacctagttctgtagaagacatt

SEQ ID NO: 135162 - DNA, 25 bp, Probe Sequence
aggatcctgtgtgtgttcaaactca

SEQ ID NO: 135163 - DNA, 25 bp, Probe Sequence
aggactatagtgatttaaactcatc

SEQ ID NO: 135164 - DNA, 25 bp, Probe Sequence
agggcttaggcagctgtagaacccc

SEQ ID NO: 135165 - DNA, 25 bp, Probe Sequence
aggtttcactgcgtgcttatgacca

SEQ ID NO: 135166 - DNA, 25 bp, Probe Sequence
aggtattttttcctcagttcaagat

SEQ ID NO: 135167 - DNA, 25 bp, Probe Sequence
aggtgtacaggttctccagttaata

SEQ ID NO: 135168 - DNA, 25 bp, Probe Sequence
aggtaacaggtttcttgtacacaga

SEQ ID NO: 135169 - DNA, 25 bp, Probe Sequence
agtgtatcacagctttccttaggaa

SEQ ID NO: 135170 - DNA, 25 bp, Probe Sequence
agtgtatcacagctttccttaggaa

SEQ ID NO: 135171 - DNA, 25 bp, Probe Sequence
aggtatccacagagttccttcagag

SEQ ID NO: 135172 - DNA, 25 bp, Probe Sequence
aggacataagaaagtcctctctaga

SEQ ID NO: 135173 - DNA, 25 bp, Probe Sequence
agatgagctcaagaaggtccttaac

SEQ ID NO: 135174 - DNA, 25 bp, Probe Sequence
aggactacacaaaggtgcccatcaa

SEQ ID NO: 135175 - DNA, 25 bp, Probe Sequence
aggactctgaaaatggccatcaata

SEQ ID NO: 135176 - DNA, 25 bp, Probe Sequence
aggacctggaataggcgccaagacc

SEQ ID NO: 135177 - DNA, 25 bp, Probe Sequence
aggaccgagcagtggccaaggaagc

SEQ ID NO: 135178 - DNA, 25 bp, Probe Sequence
aggatgggacgatgtgcccagggag

SEQ ID NO: 135179 - DNA, 25 bp, Probe Sequence
aggtcaggcaagtgagcaccgggga

SEQ ID NO: 135180 - DNA, 25 bp, Probe Sequence
aggtcaagacactgtcaaaggccgt

SEQ ID NO: 135181 - DNA, 25 bp, Probe Sequence
agttcaattctaggccaggaacggt

SEQ ID NO: 135182 - DNA, 25 bp, Probe Sequence
aggagaatggcttctccaccaacgg

SEQ ID NO: 135183 - DNA, 25 bp, Probe Sequence
aggagaatggctactcatcacacgc

SEQ ID NO: 135184 - DNA, 25 bp, Probe Sequence
aggagaagctgtgctacgtcgccct

SEQ ID NO: 135185 - DNA, 25 bp, Probe Sequence
aggaaagtgtcccctttgcatattt

SEQ ID NO: 135186 - DNA, 25 bp, Probe Sequence
aggatttgttcccttcagtgacttg

SEQ ID NO: 135187 - DNA, 25 bp, Probe Sequence
aggatatggttcaatttacgactgc

SEQ ID NO: 135188 - DNA, 25 bp, Probe Sequence
aggttggcattaattaccagcctcc

SEQ ID NO: 135189 - DNA, 25 bp, Probe Sequence
aggttatcctgaattatcccagccc

SEQ ID NO: 135190 - DNA, 25 bp, Probe Sequence
aggttgcgtctttgtatccaagtcc

SEQ ID NO: 135191 - DNA, 25 bp, Probe Sequence
aggttgttgtagttgtcctggtgcc

SEQ ID NO: 135192 - DNA, 25 bp, Probe Sequence
aggttttgctgcttagtcctgagga

SEQ ID NO: 135193 - DNA, 25 bp, Probe Sequence
aggtttctgcgatgcagcaccagac

SEQ ID NO: 135194 - DNA, 25 bp, Probe Sequence
aggtcattctgaaggccaaggactt

SEQ ID NO: 135195 - DNA, 25 bp, Probe Sequence
aggatcacttgagcccaggagttgg

SEQ ID NO: 135196 - DNA, 25 bp, Probe Sequence
aggatcacttgagcccaggagatca

SEQ ID NO: 135197 - DNA, 25 bp, Probe Sequence
aggactcttgaacatctgagcagtt

SEQ ID NO: 135198 - DNA, 25 bp, Probe Sequence
aggactctacacttatcatgcagtt

SEQ ID NO: 135199 - DNA, 25 bp, Probe Sequence
aggactctaccagtcagtggttctg

SEQ ID NO: 135200 - DNA, 25 bp, Probe Sequence
aggactctaccagtcagtggttctg

SEQ ID NO: 135201 - DNA, 25 bp, Probe Sequence
aggactctaccagtcagtggttctg

SEQ ID NO: 135202 - DNA, 25 bp, Probe Sequence
aggactctaccagtcagtggttctg

SEQ ID NO: 135203 - DNA, 25 bp, Probe Sequence
aggactgctaatctcagttcgctct

SEQ ID NO: 135204 - DNA, 25 bp, Probe Sequence
aggactctgctaaactgtcttgctt

SEQ ID NO: 135205 - DNA, 25 bp, Probe Sequence
aggaccagctgagcgtgcgctgggt

SEQ ID NO: 135206 - DNA, 25 bp, Probe Sequence
aggacagcagcaactcggaggatgg

SEQ ID NO: 135207 - DNA, 25 bp, Probe Sequence
aggagcagctgcaagacatgggcct

SEQ ID NO: 135208 - DNA, 25 bp, Probe Sequence
aggagcactcaattgcagagatttg

SEQ ID NO: 135209 - DNA, 25 bp, Probe Sequence
aggactccagcgtcaggatgttgcc

SEQ ID NO: 135210 - DNA, 25 bp, Probe Sequence
aggatgtaactctggtttcccttat

SEQ ID NO: 135211 - DNA, 25 bp, Probe Sequence
aggagtaatcattgggtcattcgtc

SEQ ID NO: 135212 - DNA, 25 bp, Probe Sequence
aggagtataaagttgtcacccatca

SEQ ID NO: 135213 - DNA, 25 bp, Probe Sequence
aggagtataaagttgtcgcccatca

SEQ ID NO: 135214 - DNA, 25 bp, Probe Sequence
aggagtaagtcagctgctctgtccc

SEQ ID NO: 135215 - DNA, 25 bp, Probe Sequence
aggagcatcacgggaggtctggcct

SEQ ID NO: 135216 - DNA, 25 bp, Probe Sequence
aggagatcgagcagatgaggcggcc

SEQ ID NO: 135217 - DNA, 25 bp, Probe Sequence
aggtacaatgtcgtgagggcgccag

SEQ ID NO: 135218 - DNA, 25 bp, Probe Sequence
aggtcagaatggcggcagcggagca

SEQ ID NO: 135219 - DNA, 25 bp, Probe Sequence
aggtcagaatggcggcagcggagca

SEQ ID NO: 135220 - DNA, 25 bp, Probe Sequence
aggataaatctgtagcagagcagag

SEQ ID NO: 135221 - DNA, 25 bp, Probe Sequence
aggacaacatgcagccaggcacagt

SEQ ID NO: 135222 - DNA, 25 bp, Probe Sequence
aggatcagacctagaatggcacaga

SEQ ID NO: 135223 - DNA, 25 bp, Probe Sequence
aggaaaggattagtgtgagcagagc

SEQ ID NO: 135224 - DNA, 25 bp, Probe Sequence
aggtaagatgcccactaggcagccc

SEQ ID NO: 135225 - DNA, 25 bp, Probe Sequence
aggtcagaatgcttacgggtgttat

SEQ ID NO: 135226 - DNA, 25 bp, Probe Sequence
aggtatagtctctaggagttttatt

SEQ ID NO: 135227 - DNA, 25 bp, Probe Sequence
aggattattctctctgacttttatt

SEQ ID NO: 135228 - DNA, 25 bp, Probe Sequence
aggtaaatctgacctgacctctttc

SEQ ID NO: 135229 - DNA, 25 bp, Probe Sequence
acgttattttttggccttgttcatg

SEQ ID NO: 135230 - DNA, 25 bp, Probe Sequence
agggtttcttttggtctagtgccat

SEQ ID NO: 135231 - DNA, 25 bp, Probe Sequence
agggtttttcctgccacaggatata

SEQ ID NO: 135232 - DNA, 25 bp, Probe Sequence
aggtttttgtactccagcatagctt

SEQ ID NO: 135233 - DNA, 25 bp, Probe Sequence
aggttttcttgagagcctgtagatt

SEQ ID NO: 135234 - DNA, 25 bp, Probe Sequence
aggtatggttgcaggcacctgtaat

SEQ ID NO: 135235 - DNA, 25 bp, Probe Sequence
aggttgtttgttaagcttgtactgc

SEQ ID NO: 135236 - DNA, 25 bp, Probe Sequence
aggttctctgacaaaagttatactt

SEQ ID NO: 135237 - DNA, 25 bp, Probe Sequence
aggatttccacatcttggtgaagtt

SEQ ID NO: 135238 - DNA, 25 bp, Probe Sequence
aggatttccacatcttggtgaagtt

SEQ ID NO: 135239 - DNA, 25 bp, Probe Sequence
agagatttgaacttgtttggaactt

SEQ ID NO: 135240 - DNA, 25 bp, Probe Sequence
aggattctacagtgatttgtgggtt

SEQ ID NO: 135241 - DNA, 25 bp, Probe Sequence
aggactctgtatgatatttgtggca

SEQ ID NO: 135242 - DNA, 25 bp, Probe Sequence
aggacgctggatacatatttatatg

SEQ ID NO: 135243 - DNA, 25 bp, Probe Sequence
aggacgcttgagccagaatctcagg

SEQ ID NO: 135244 - DNA, 25 bp, Probe Sequence
aggatgccctaaatgagaccaggga

SEQ ID NO: 135245 - DNA, 25 bp, Probe Sequence
aggatgctgaaaatgggccacgggc

SEQ ID NO: 135246 - DNA, 25 bp, Probe Sequence
aggattggaattagcaggactcggc

SEQ ID NO: 135247 - DNA, 25 bp, Probe Sequence
aggacagggttctaggagctcctgg

SEQ ID NO: 135248 - DNA, 25 bp, Probe Sequence
aggataggggctttggagtcccaca

SEQ ID NO: 135249 - DNA, 25 bp, Probe Sequence
aggttggaggcatctctgacaccaa

SEQ ID NO: 135250 - DNA, 25 bp, Probe Sequence
aggttggtggctgtcatcccaacac

SEQ ID NO: 135251 - DNA, 25 bp, Probe Sequence
aggaggaatgactttcaggcataaa

SEQ ID NO: 135252 - DNA, 25 bp, Probe Sequence
aggattgagcccttaaacatacata

SEQ ID NO: 135253 - DNA, 25 bp, Probe Sequence
aggagcagactcagataacaataaa

SEQ ID NO: 135254 - DNA, 25 bp, Probe Sequence
aggagcagactcagataacaataaa

SEQ ID NO: 135255 - DNA, 25 bp, Probe Sequence
aggagcagactcagataacaataaa

SEQ ID NO: 135256 - DNA, 25 bp, Probe Sequence
aggactactcagctaatcattacaa

SEQ ID NO: 135257 - DNA, 25 bp, Probe Sequence
aggactactagagttcattgaacac

SEQ ID NO: 135258 - DNA, 25 bp, Probe Sequence
aggacacccagatttatgagaagca

SEQ ID NO: 135259 - DNA, 25 bp, Probe Sequence
aggacatccacatctgttggaagac

SEQ ID NO: 135260 - DNA, 25 bp, Probe Sequence
aggagaacatcatctgggccaacct

SEQ ID NO: 135261 - DNA, 25 bp, Probe Sequence
aggagaacatcatctgggccaacct

SEQ ID NO: 135262 - DNA, 25 bp, Probe Sequence
aggagaacatcatctgggccaacct

SEQ ID NO: 135263 - DNA, 25 bp, Probe Sequence
aggagaacatcatctgggccaacct

SEQ ID NO: 135264 - DNA, 25 bp, Probe Sequence
aggagcaaacttggggtcgtctctc

SEQ ID NO: 135265 - DNA, 25 bp, Probe Sequence
aggagccaactggacttttgctgtt

SEQ ID NO: 135266 - DNA, 25 bp, Probe Sequence
aggtctgcaagggaattcttgtgtg

SEQ ID NO: 135267 - DNA, 25 bp, Probe Sequence
aggttaggggaaacactggtgatgg

SEQ ID NO: 135268 - DNA, 25 bp, Probe Sequence
aggtaactgacgatgccctggtgta

SEQ ID NO: 135269 - DNA, 25 bp, Probe Sequence
aggagaccgaagggcaccgagttat

SEQ ID NO: 135270 - DNA, 25 bp, Probe Sequence
agggacctgaaaggatccagaaatg

SEQ ID NO: 135271 - DNA, 25 bp, Probe Sequence
aggttcagtgaatcctcctaatctg

SEQ ID NO: 135272 - DNA, 25 bp, Probe Sequence
aggtcggaaacaactaataatatga

SEQ ID NO: 135273 - DNA, 25 bp, Probe Sequence
aggatcagaaaacaatattctcaag

SEQ ID NO: 135274 - DNA, 25 bp, Probe Sequence
aggttccagaacaaatgcagtgata

SEQ ID NO: 135275 - DNA, 25 bp, Probe Sequence
aggtggtagataataagtggtagac

SEQ ID NO: 135276 - DNA, 25 bp, Probe Sequence
aggaggatgccttctacagttggga

SEQ ID NO: 135277 - DNA, 25 bp, Probe Sequence
aggagagacctgtcctagatgttgg

SEQ ID NO: 135278 - DNA, 25 bp, Probe Sequence
aggaggccttgacctagtataggaa

SEQ ID NO: 135279 - DNA, 25 bp, Probe Sequence
agtcccgtccatctggtatgagtaa

SEQ ID NO: 135280 - DNA, 25 bp, Probe Sequence
agtctcctgaaatgggtctgaaaaa

SEQ ID NO: 135281 - DNA, 25 bp, Probe Sequence
agtcctgcttagagcccttaaaaag

SEQ ID NO: 135282 - DNA, 25 bp, Probe Sequence
aggtatttgacttgcacctataaaa

SEQ ID NO: 135283 - DNA, 25 bp, Probe Sequence
aggattctctgttgatgaccttgga

SEQ ID NO: 135284 - DNA, 25 bp, Probe Sequence
aggacatatcttggaacttctgaca

SEQ ID NO: 135285 - DNA, 25 bp, Probe Sequence
aggacatcattgtgaaccctgacgc

SEQ ID NO: 135286 - DNA, 25 bp, Probe Sequence
aggatatcagtgtgaacccagggag

SEQ ID NO: 135287 - DNA, 25 bp, Probe Sequence
aggagaattgcttgaacccaggagg

SEQ ID NO: 135288 - DNA, 25 bp, Probe Sequence
aggagaattgcttcagcctgacagg

SEQ ID NO: 135289 - DNA, 25 bp, Probe Sequence
aggagaatatgcagcgccagagccg

SEQ ID NO: 135290 - DNA, 25 bp, Probe Sequence
aggatgaatctcaggaaggcaagca

SEQ ID NO: 135291 - DNA, 25 bp, Probe Sequence
aggagcatttcaaggtggccagaga

SEQ ID NO: 135292 - DNA, 25 bp, Probe Sequence
aggaggatggcaaagagagtcgcat

SEQ ID NO: 135293 - DNA, 25 bp, Probe Sequence
aggatggctacaggatgaagtttgc

SEQ ID NO: 135294 - DNA, 25 bp, Probe Sequence
aggagcctgccaggctgacgtgcat

SEQ ID NO: 135295 - DNA, 25 bp, Probe Sequence
aggagacatccccgcacatgatgtc

SEQ ID NO: 135296 - DNA, 25 bp, Probe Sequence
aggagacaaccttggagagacatga

SEQ ID NO: 135297 - DNA, 25 bp, Probe Sequence
aggactgcagaccaaggagcgagct

SEQ ID NO: 135298 - DNA, 25 bp, Probe Sequence
aggagatcgccgaggagctgttcac

SEQ ID NO: 135299 - DNA, 25 bp, Probe Sequence
aggagaccaggaaggggtgagacaa

SEQ ID NO: 135300 - DNA, 25 bp, Probe Sequence
aggataaagatgaggggggcctgtc

SEQ ID NO: 135301 - DNA, 25 bp, Probe Sequence
aggagaaaaaggcggctgccctgct

SEQ ID NO: 135302 - DNA, 25 bp, Probe Sequence
aggagtcagaactcggattcccagc

SEQ ID NO: 135303 - DNA, 25 bp, Probe Sequence
agtgaacaaacctgctgttcctcct

SEQ ID NO: 135304 - DNA, 25 bp, Probe Sequence
aggagtacaacctggtctgagcgcc

SEQ ID NO: 135305 - DNA, 25 bp, Probe Sequence
aggacaggaacctggaatgcagctc

SEQ ID NO: 135306 - DNA, 25 bp, Probe Sequence
aggacatgggacttgcgtggacagt

SEQ ID NO: 135307 - DNA, 25 bp, Probe Sequence
aggacatggagatcagcgtgaagga

SEQ ID NO: 135308 - DNA, 25 bp, Probe Sequence
aggtctgctggatccgctaagggat

SEQ ID NO: 135309 - DNA, 25 bp, Probe Sequence
aggtgcgtcggaccgagaagaagct

SEQ ID NO: 135310 - DNA, 25 bp, Probe Sequence
aggtcttcggacgcaagaagacagc

SEQ ID NO: 135311 - DNA, 25 bp, Probe Sequence
aggtcattactgaggaaacagcaga

SEQ ID NO: 135312 - DNA, 25 bp, Probe Sequence
aggacctcactcagaaagactaaag

SEQ ID NO: 135313 - DNA, 25 bp, Probe Sequence
aggacctcactcagaaagactaaag

SEQ ID NO: 135314 - DNA, 25 bp, Probe Sequence
aggacttcatggctgaaacaccaaa

SEQ ID NO: 135315 - DNA, 25 bp, Probe Sequence
agtgagtttgtgttcaataacccaa

SEQ ID NO: 135316 - DNA, 25 bp, Probe Sequence
aggagtcttcgtccgataccaataa

SEQ ID NO: 135317 - DNA, 25 bp, Probe Sequence
aggaggttgggggtcaccaaggcat

SEQ ID NO: 135318 - DNA, 25 bp, Probe Sequence
agcgaggttgggcggccagaagtga

SEQ ID NO: 135319 - DNA, 25 bp, Probe Sequence
aggagagttggctgttcacatgatt

SEQ ID NO: 135320 - DNA, 25 bp, Probe Sequence
aggagccattggaggtcactctgct

SEQ ID NO: 135321 - DNA, 25 bp, Probe Sequence
aggatccattggagggcaagtctgg

SEQ ID NO: 135322 - DNA, 25 bp, Probe Sequence
aggatccattggagggcaagtctgg

SEQ ID NO: 135323 - DNA, 25 bp, Probe Sequence
aggatcagaggctggggccaactgg

SEQ ID NO: 135324 - DNA, 25 bp, Probe Sequence
aggatcagggggtgggcaactggta

SEQ ID NO: 135325 - DNA, 25 bp, Probe Sequence
aggatgggcgggaggggatctgtgt

SEQ ID NO: 135326 - DNA, 25 bp, Probe Sequence
aggtggctagggtggatggatcgct

SEQ ID NO: 135327 - DNA, 25 bp, Probe Sequence
aggggcaaagtgcctgttgggcttt

SEQ ID NO: 135328 - DNA, 25 bp, Probe Sequence
aggtggcttttgctttatagtttgg

SEQ ID NO: 135329 - DNA, 25 bp, Probe Sequence
aggggctttgaatcttttgcattgt

SEQ ID NO: 135330 - DNA, 25 bp, Probe Sequence
aggatgtgccttcaactttataatt

SEQ ID NO: 135331 - DNA, 25 bp, Probe Sequence
aggatgtgccttctactttataatt

SEQ ID NO: 135332 - DNA, 25 bp, Probe Sequence
aggagtccttgcatcaatttttctt

SEQ ID NO: 135333 - DNA, 25 bp, Probe Sequence
aggagggctctgagccaaccttgct

SEQ ID NO: 135334 - DNA, 25 bp, Probe Sequence
aggagcagactggttcctaactctc

SEQ ID NO: 135335 - DNA, 25 bp, Probe Sequence
aggatctgacatgttcttccttttc

SEQ ID NO: 135336 - DNA, 25 bp, Probe Sequence
aggactgatgatgcattttagcttt

SEQ ID NO: 135337 - DNA, 25 bp, Probe Sequence
aggactcagtgtcctctctgagtat

SEQ ID NO: 135338 - DNA, 25 bp, Probe Sequence
aggactgagattgcctctgacttcc

SEQ ID NO: 135339 - DNA, 25 bp, Probe Sequence
aggactgagattgcctctgacttcc

SEQ ID NO: 135340 - DNA, 25 bp, Probe Sequence
aggactctttgagcatgctacttaa

SEQ ID NO: 135341 - DNA, 25 bp, Probe Sequence
aggattcttgctaagactaagtcaa

SEQ ID NO: 135342 - DNA, 25 bp, Probe Sequence
aggttttccaatacacaagtgctag

SEQ ID NO: 135343 - DNA, 25 bp, Probe Sequence
aggttgaggcaagtgtagaagttac

SEQ ID NO: 135344 - DNA, 25 bp, Probe Sequence
aggagctcaagcaacttcgaagcca

SEQ ID NO: 135345 - DNA, 25 bp, Probe Sequence
agggccaaccagatgaggagctcaa

SEQ ID NO: 135346 - DNA, 25 bp, Probe Sequence
aggacgcaattcctttggcgctaaa

SEQ ID NO: 135347 - DNA, 25 bp, Probe Sequence
aggacgcaaatcttcaggacagtaa

SEQ ID NO: 135348 - DNA, 25 bp, Probe Sequence
aggagcagaaatttgaagtcgaaaa

SEQ ID NO: 135349 - DNA, 25 bp, Probe Sequence
aggagcagtgaagccaagccaggaa

SEQ ID NO: 135350 - DNA, 25 bp, Probe Sequence
aggagcttgaacatgccctggagaa

SEQ ID NO: 135351 - DNA, 25 bp, Probe Sequence
aggagcttgaagcctcacttgggaa

SEQ ID NO: 135352 - DNA, 25 bp, Probe Sequence
aggacctagagtacctataggacaa

SEQ ID NO: 135353 - DNA, 25 bp, Probe Sequence
aggaccttatttggcatataaaatt

SEQ ID NO: 135354 - DNA, 25 bp, Probe Sequence
aggaccaacttctctgatcaaaatt

SEQ ID NO: 135355 - DNA, 25 bp, Probe Sequence
aggaccagatctgctatctcagaaa

SEQ ID NO: 135356 - DNA, 25 bp, Probe Sequence
aggtcaacatctgctgtaagaaaca

SEQ ID NO: 135357 - DNA, 25 bp, Probe Sequence
aggagcaactcagctctttgcaaga

SEQ ID NO: 135358 - DNA, 25 bp, Probe Sequence
aggagcaagtgtattgtcccgactg

SEQ ID NO: 135359 - DNA, 25 bp, Probe Sequence
aggagcaagtgtgctggtctcttca

SEQ ID NO: 135360 - DNA, 25 bp, Probe Sequence
aggagacagttccagttcctgtacc

SEQ ID NO: 135361 - DNA, 25 bp, Probe Sequence
aggagatgatgacccagttcctcta

SEQ ID NO: 135362 - DNA, 25 bp, Probe Sequence
aggagacatcagcccagaattctat

SEQ ID NO: 135363 - DNA, 25 bp, Probe Sequence
aggtcaatcagcctcatgactttat

SEQ ID NO: 135364 - DNA, 25 bp, Probe Sequence
aggtaccagccttggatactccatg

SEQ ID NO: 135365 - DNA, 25 bp, Probe Sequence
aggtaccagccttggatactccatg

SEQ ID NO: 135366 - DNA, 25 bp, Probe Sequence
aggtcctggtgttggatagatgcca

SEQ ID NO: 135367 - DNA, 25 bp, Probe Sequence
aggatccaggtcttggggagctcag

SEQ ID NO: 135368 - DNA, 25 bp, Probe Sequence
aggagccggagccggagcaagtccc

SEQ ID NO: 135369 - DNA, 25 bp, Probe Sequence
aggagccggagccggagcaagtccc

SEQ ID NO: 135370 - DNA, 25 bp, Probe Sequence
aggaccaggagcccctggagttctc

SEQ ID NO: 135371 - DNA, 25 bp, Probe Sequence
aggaccagggagactatgggactgt

SEQ ID NO: 135372 - DNA, 25 bp, Probe Sequence
aggtcaagaaggcctatgtggaggc

SEQ ID NO: 135373 - DNA, 25 bp, Probe Sequence
aggattggcctgctgctaggggcca

SEQ ID NO: 135374 - DNA, 25 bp, Probe Sequence
aggttcaccagggcatcaagggaat

SEQ ID NO: 135375 - DNA, 25 bp, Probe Sequence
aggtctcacaaaggatcaactcgga

SEQ ID NO: 135376 - DNA, 25 bp, Probe Sequence
aggaggccaagagaaaccgcacctt

SEQ ID NO: 135377 - DNA, 25 bp, Probe Sequence
aggagaccaggaggatagccccaag

SEQ ID NO: 135378 - DNA, 25 bp, Probe Sequence
aggagacagtactgagtgccctcaa

SEQ ID NO: 135379 - DNA, 25 bp, Probe Sequence
aggagactgtactgagtgccctcaa

SEQ ID NO: 135380 - DNA, 25 bp, Probe Sequence
aggagactgtactgagtgccctcaa

SEQ ID NO: 135381 - DNA, 25 bp, Probe Sequence
aggggcttacacgatatcccatacc

SEQ ID NO: 135382 - DNA, 25 bp, Probe Sequence
aggtagttctactatcatgcccatt

SEQ ID NO: 135383 - DNA, 25 bp, Probe Sequence
aggtcaatttatctagtccatgtac

SEQ ID NO: 135384 - DNA, 25 bp, Probe Sequence
aggtaagtattctaagctctctgca

SEQ ID NO: 135385 - DNA, 25 bp, Probe Sequence
aggtagtgaaatggagcccttccct

SEQ ID NO: 135386 - DNA, 25 bp, Probe Sequence
aggtagtgaaatggagcccttccct

SEQ ID NO: 135387 - DNA, 25 bp, Probe Sequence
aggttggaaagagcctctgacctcc

SEQ ID NO: 135388 - DNA, 25 bp, Probe Sequence
agagtggggtaagcacccctacctg

SEQ ID NO: 135389 - DNA, 25 bp, Probe Sequence
caagttatttaacacccctgagctt

SEQ ID NO: 135390 - DNA, 25 bp, Probe Sequence
aggttattagaagagtcccatgaaa

SEQ ID NO: 135391 - DNA, 25 bp, Probe Sequence
aggtatttgaaatatctcaccaaaa

SEQ ID NO: 135392 - DNA, 25 bp, Probe Sequence
aggtatttgaaatatctcaccaaaa

SEQ ID NO: 135393 - DNA, 25 bp, Probe Sequence
aggttaataattcatgccaaaaata

SEQ ID NO: 135394 - DNA, 25 bp, Probe Sequence
aggattaattttcattcatcaacct

SEQ ID NO: 135395 - DNA, 25 bp, Probe Sequence
aggagtaattgtttttggcaccagt

SEQ ID NO: 135396 - DNA, 25 bp, Probe Sequence
aggagttctacttgtcttgacacca

SEQ ID NO: 135397 - DNA, 25 bp, Probe Sequence
aggagcttcaatgatttgtaactga

SEQ ID NO: 135398 - DNA, 25 bp, Probe Sequence
aggatgcccacatactgtctaatta

SEQ ID NO: 135399 - DNA, 25 bp, Probe Sequence
aggatgcccacatactgtctaatta

SEQ ID NO: 135400 - DNA, 25 bp, Probe Sequence
aggagctgccagtagacatcatctt

SEQ ID NO: 135401 - DNA, 25 bp, Probe Sequence
aggagcatgccatacaagatttatt

SEQ ID NO: 135402 - DNA, 25 bp, Probe Sequence
aggagcagcatttgagtagatttct

SEQ ID NO: 135403 - DNA, 25 bp, Probe Sequence
aggatacttatgctcgttggcttcc

SEQ ID NO: 135404 - DNA, 25 bp, Probe Sequence
aggacctggataatcgaggcttgtc

SEQ ID NO: 135405 - DNA, 25 bp, Probe Sequence
agggaatggtggacgatggctctga

SEQ ID NO: 135406 - DNA, 25 bp, Probe Sequence
aggtgggcgaggactgagcctcggt

SEQ ID NO: 135407 - DNA, 25 bp, Probe Sequence
aggtgagggggtgagcctggacctg

SEQ ID NO: 135408 - DNA, 25 bp, Probe Sequence
aggttggtgggtctacaggagcctc

SEQ ID NO: 135409 - DNA, 25 bp, Probe Sequence
aggagtcggggtctcagcagaaccc

SEQ ID NO: 135410 - DNA, 25 bp, Probe Sequence
aggagacgggttctcatgtgagatc

SEQ ID NO: 135411 - DNA, 25 bp, Probe Sequence
aggattcgggttaggatgaggtgac

SEQ ID NO: 135412 - DNA, 25 bp, Probe Sequence
agggtctgcctgttggaaagtgtac

SEQ ID NO: 135413 - DNA, 25 bp, Probe Sequence
aggagtctcttgtgggaggtgcttc

SEQ ID NO: 135414 - DNA, 25 bp, Probe Sequence
aggtatcactagaggtcaagagttc

SEQ ID NO: 135415 - DNA, 25 bp, Probe Sequence
aggatgttcgacagcgtcacagata

SEQ ID NO: 135416 - DNA, 25 bp, Probe Sequence
aggagggcgacttcagacacaagtc

SEQ ID NO: 135417 - DNA, 25 bp, Probe Sequence
aggaggaggtcttcgacagcatcgt

SEQ ID NO: 135418 - DNA, 25 bp, Probe Sequence
aggagacagagtcaccatcacttgt

SEQ ID NO: 135419 - DNA, 25 bp, Probe Sequence
aggagccagatgcgatcctcaggct

SEQ ID NO: 135420 - DNA, 25 bp, Probe Sequence
aggagcatcagtgaggcttcagcct

SEQ ID NO: 135421 - DNA, 25 bp, Probe Sequence
aggtcgcagcaaatggcttcagcct

SEQ ID NO: 135422 - DNA, 25 bp, Probe Sequence
aggatctgccgaaagctgtggagct

SEQ ID NO: 135423 - DNA, 25 bp, Probe Sequence
aggttgcactggccagcatgggcct

SEQ ID NO: 135424 - DNA, 25 bp, Probe Sequence
aggagatcaaggctgcagtgagtta

SEQ ID NO: 135425 - DNA, 25 bp, Probe Sequence
aggagatcgagaccatcctggctaa

SEQ ID NO: 135426 - DNA, 25 bp, Probe Sequence
aggagatcgagaccatcctggctaa

SEQ ID NO: 135427 - DNA, 25 bp, Probe Sequence
aggagatcgagaccatcctggctaa

SEQ ID NO: 135428 - DNA, 25 bp, Probe Sequence
aggagatcaagaccatcctggccaa

SEQ ID NO: 135429 - DNA, 25 bp, Probe Sequence
aggagacgtgaggcaactgtggcag

SEQ ID NO: 135430 - DNA, 25 bp, Probe Sequence
aggagacgtctggagcttatgagaa

SEQ ID NO: 135431 - DNA, 25 bp, Probe Sequence
aggagagtcgtgaagcagttgagaa

SEQ ID NO: 135432 - DNA, 25 bp, Probe Sequence
aggaggctctcttatcaattggaaa

SEQ ID NO: 135433 - DNA, 25 bp, Probe Sequence
aggagtccctcatggcagtgagaaa

SEQ ID NO: 135434 - DNA, 25 bp, Probe Sequence
aggagttcgctcaagatccaagaaa

SEQ ID NO: 135435 - DNA, 25 bp, Probe Sequence
aggagaaagctcgagtcatcactga

SEQ ID NO: 135436 - DNA, 25 bp, Probe Sequence
aggagaaagctcgagtcatcactga

SEQ ID NO: 135437 - DNA, 25 bp, Probe Sequence
aggagaacagccattccacatgtgt

SEQ ID NO: 135438 - DNA, 25 bp, Probe Sequence
aggagaagcctcatcattgaatgga

SEQ ID NO: 135439 - DNA, 25 bp, Probe Sequence
aggagaggaatcactggcagtctga

SEQ ID NO: 135440 - DNA, 25 bp, Probe Sequence
aggatttcaacgtggctgtcagaat

SEQ ID NO: 135441 - DNA, 25 bp, Probe Sequence
aggattgtaatccaagcctgggaaa

SEQ ID NO: 135442 - DNA, 25 bp, Probe Sequence
aggatatctaatgtgatgcccggaa

SEQ ID NO: 135443 - DNA, 25 bp, Probe Sequence
aggtcattaagcttgggccctgact

SEQ ID NO: 135444 - DNA, 25 bp, Probe Sequence
aggtcattaagatgttgatcacaca

SEQ ID NO: 135445 - DNA, 25 bp, Probe Sequence
gagtgtacaccgagttgtccaatta

SEQ ID NO: 135446 - DNA, 25 bp, Probe Sequence
aggaccaccaatggattgtggaaaa

SEQ ID NO: 135447 - DNA, 25 bp, Probe Sequence
aggagccaaaatattgtgtatacat

SEQ ID NO: 135448 - DNA, 25 bp, Probe Sequence
aggaggcaatcaatgacctggtgaa

SEQ ID NO: 135449 - DNA, 25 bp, Probe Sequence
aggagcgcaacaaaagtgcccacat

SEQ ID NO: 135450 - DNA, 25 bp, Probe Sequence
agtagctggaatacaagggcccaca

SEQ ID NO: 135451 - DNA, 25 bp, Probe Sequence
aggagctctggatacaagctcccca

SEQ ID NO: 135452 - DNA, 25 bp, Probe Sequence
aggagctgggcattacagcaccacc

SEQ ID NO: 135453 - DNA, 25 bp, Probe Sequence
aggaggcgtgcaatatctgccagca

SEQ ID NO: 135454 - DNA, 25 bp, Probe Sequence
aggaggcgtgcaaagctgcagcaga

SEQ ID NO: 135455 - DNA, 25 bp, Probe Sequence
aggaggcgtgcaaagctgcagcaga

SEQ ID NO: 135456 - DNA, 25 bp, Probe Sequence
aggagaggagccaagagcaggcaaa

SEQ ID NO: 135457 - DNA, 25 bp, Probe Sequence
aggatgacacagtctacatgggcaa

SEQ ID NO: 135458 - DNA, 25 bp, Probe Sequence
aggatgcacttgtccaatcctcaat

SEQ ID NO: 135459 - DNA, 25 bp, Probe Sequence
aggagcacattctccatgctccttt

SEQ ID NO: 135460 - DNA, 25 bp, Probe Sequence
aggatcaatctatgtttctctttct

SEQ ID NO: 135461 - DNA, 25 bp, Probe Sequence
aggagcaaggttgatttctttcatt

SEQ ID NO: 135462 - DNA, 25 bp, Probe Sequence
aggagcgagactctagtttttcctc

SEQ ID NO: 135463 - DNA, 25 bp, Probe Sequence
aggatgggactggtcgtgtttgtgc

SEQ ID NO: 135464 - DNA, 25 bp, Probe Sequence
aggagtggactggagcgtaactgcc

SEQ ID NO: 135465 - DNA, 25 bp, Probe Sequence
agggtgtgaggccaggatactccgc

SEQ ID NO: 135466 - DNA, 25 bp, Probe Sequence
aggatgttggcagctgggattcctc

SEQ ID NO: 135467 - DNA, 25 bp, Probe Sequence
aggagttgagagctgatggaactgt

SEQ ID NO: 135468 - DNA, 25 bp, Probe Sequence
aggatttgataacgatagggctgat

SEQ ID NO: 135469 - DNA, 25 bp, Probe Sequence
aggtcatcgaaaaccgggccatgaa

SEQ ID NO: 135470 - DNA, 25 bp, Probe Sequence
aggtcatcgaaaaccgggccatgaa

SEQ ID NO: 135471 - DNA, 25 bp, Probe Sequence
aggttcgcaagaacctgatggacat

SEQ ID NO: 135472 - DNA, 25 bp, Probe Sequence
aggttctcacaggacacagggacat

SEQ ID NO: 135473 - DNA, 25 bp, Probe Sequence
aggttgctcaactgcaggtggagat

SEQ ID NO: 135474 - DNA, 25 bp, Probe Sequence
aggttgacaagatgcaagacgagtt

SEQ ID NO: 135475 - DNA, 25 bp, Probe Sequence
aggagtgaaacatctatgatggatg

SEQ ID NO: 135476 - DNA, 25 bp, Probe Sequence
aggagtatgtggtgcttgtggctgc

SEQ ID NO: 135477 - DNA, 25 bp, Probe Sequence
aggagatgagttttttgcagatgtc

SEQ ID NO: 135478 - DNA, 25 bp, Probe Sequence
aggagatggaattccttcaggccgg

SEQ ID NO: 135479 - DNA, 25 bp, Probe Sequence
aggaggagaagcagcattcgcagcc

SEQ ID NO: 135480 - DNA, 25 bp, Probe Sequence
aggagagaaacaaccgcacacgcct

SEQ ID NO: 135481 - DNA, 25 bp, Probe Sequence
aggataaagtcatccccaaggctcc

SEQ ID NO: 135482 - DNA, 25 bp, Probe Sequence
aggatgagcaacttgttcccaaagc

SEQ ID NO: 135483 - DNA, 25 bp, Probe Sequence
aggagacaagcttacatccccaatc

SEQ ID NO: 135484 - DNA, 25 bp, Probe Sequence
aggagatttcattacttcacctgaa

SEQ ID NO: 135485 - DNA, 25 bp, Probe Sequence
aggagatctacacgcacttcacgtg

SEQ ID NO: 135486 - DNA, 25 bp, Probe Sequence
aggagtgcgacaagcagttcctcgg

SEQ ID NO: 135487 - DNA, 25 bp, Probe Sequence
aggatcaaaatccctacctcagggt

SEQ ID NO: 135488 - DNA, 25 bp, Probe Sequence
aggtcccattttcacattagggctt

SEQ ID NO: 135489 - DNA, 25 bp, Probe Sequence
aggtttttatttcattttggctctg

SEQ ID NO: 135490 - DNA, 25 bp, Probe Sequence
aggtttttcctgaggtatgtggcct

SEQ ID NO: 135491 - DNA, 25 bp, Probe Sequence
aggagttgtctcctggggtgatggc

SEQ ID NO: 135492 - DNA, 25 bp, Probe Sequence
aggagttgtctgcgagattgtaggt

SEQ ID NO: 135493 - DNA, 25 bp, Probe Sequence
aggatgtgttctctgagacccatga

SEQ ID NO: 135494 - DNA, 25 bp, Probe Sequence
aggatgattctggtgaacgccctat

SEQ ID NO: 135495 - DNA, 25 bp, Probe Sequence
aggagttttgtgagctcctctcatg

SEQ ID NO: 135496 - DNA, 25 bp, Probe Sequence
aggagtagttgcatagtcacacatc

SEQ ID NO: 135497 - DNA, 25 bp, Probe Sequence
aggatgaagatcctctagctgccac

SEQ ID NO: 135498 - DNA, 25 bp, Probe Sequence
aggagaggacttccctgcagcacgt

SEQ ID NO: 135499 - DNA, 25 bp, Probe Sequence
aggatgaaagttcccccatcagttc

SEQ ID NO: 135500 - DNA, 25 bp, Probe Sequence
aggaggaggattaagcccacctgtc

SEQ ID NO: 135501 - DNA, 25 bp, Probe Sequence
aggaggaggacgacatcctgacctg

SEQ ID NO: 135502 - DNA, 25 bp, Probe Sequence
aggaggttgaggccacagtgaatta

SEQ ID NO: 135503 - DNA, 25 bp, Probe Sequence
aggatccttgagggcaactgtctgt

SEQ ID NO: 135504 - DNA, 25 bp, Probe Sequence
aggtcactggaatcaactcctgggc

SEQ ID NO: 135505 - DNA, 25 bp, Probe Sequence
aggatcacagaggtctcaaccctcc

SEQ ID NO: 135506 - DNA, 25 bp, Probe Sequence
aggagcagaggggctcacatctccc

SEQ ID NO: 135507 - DNA, 25 bp, Probe Sequence
aggagcagaggggctcacatctccc

SEQ ID NO: 135508 - DNA, 25 bp, Probe Sequence
aggagagagatgggaccctcctcct

SEQ ID NO: 135509 - DNA, 25 bp, Probe Sequence
aggttggatgcagtggctcactcct

SEQ ID NO: 135510 - DNA, 25 bp, Probe Sequence
aggttgcagtgagccaagatcacag

SEQ ID NO: 135511 - DNA, 25 bp, Probe Sequence
aggttgctatgaggcctggatggca

SEQ ID NO: 135512 - DNA, 25 bp, Probe Sequence
aggatgacttgaacgcaggaggctg

SEQ ID NO: 135513 - DNA, 25 bp, Probe Sequence
aggagagctggctctgcagtggggg

SEQ ID NO: 135514 - DNA, 25 bp, Probe Sequence
aggaggctggctgtaaactgcgcat

SEQ ID NO: 135515 - DNA, 25 bp, Probe Sequence
aggagagctgcgcttgggattgtgc

SEQ ID NO: 135516 - DNA, 25 bp, Probe Sequence
aggaggttggtgtggattctgttga

SEQ ID NO: 135517 - DNA, 25 bp, Probe Sequence
agggagttggtgtgctatttttgaa

SEQ ID NO: 135518 - DNA, 25 bp, Probe Sequence
agagatcgtacgggactttcccaga

SEQ ID NO: 135519 - DNA, 25 bp, Probe Sequence
aggttggagctaagaatttactaat

SEQ ID NO: 135520 - DNA, 25 bp, Probe Sequence
aggttaactatttacatcattctaa

SEQ ID NO: 135521 - DNA, 25 bp, Probe Sequence
aggtttagtccttacatcacttcta

SEQ ID NO: 135522 - DNA, 25 bp, Probe Sequence
aggtcattagttctagtcacccata

SEQ ID NO: 135523 - DNA, 25 bp, Probe Sequence
aggatgtctatttttggccactcca

SEQ ID NO: 135524 - DNA, 25 bp, Probe Sequence
aggaggctattgagggcacctacat

SEQ ID NO: 135525 - DNA, 25 bp, Probe Sequence
aggaggctagcgaagcgtacctggt

SEQ ID NO: 135526 - DNA, 25 bp, Probe Sequence
aggagagctgggcacatgtcccaag

SEQ ID NO: 135527 - DNA, 25 bp, Probe Sequence
aggaggctgggtccttttaagcact

SEQ ID NO: 135528 - DNA, 25 bp, Probe Sequence
aggaggagggatacgtttccacgat

SEQ ID NO: 135529 - DNA, 25 bp, Probe Sequence
aggagcacaagccacaagtcttcca

SEQ ID NO: 135530 - DNA, 25 bp, Probe Sequence
aggagactgagcggctgcagtctac

SEQ ID NO: 135531 - DNA, 25 bp, Probe Sequence
aggatgccagaggcagcgcacacaa

SEQ ID NO: 135532 - DNA, 25 bp, Probe Sequence
aggatgccagcatgtgccaatgact

SEQ ID NO: 135533 - DNA, 25 bp, Probe Sequence
aggatgcacgagctggcaggcatgc

SEQ ID NO: 135534 - DNA, 25 bp, Probe Sequence
aggatgacgagctgacgggctttta

SEQ ID NO: 135535 - DNA, 25 bp, Probe Sequence
aggagactgagatgggaggatccct

SEQ ID NO: 135536 - DNA, 25 bp, Probe Sequence
aggagagcgaaaggtctgcagattc

SEQ ID NO: 135537 - DNA, 25 bp, Probe Sequence
aggagtctgtaaggtcatgtgcttc

SEQ ID NO: 135538 - DNA, 25 bp, Probe Sequence
aggatttcataattgtcattgtcac

SEQ ID NO: 135539 - DNA, 25 bp, Probe Sequence
aggagaactatgacgtgctttcacg

SEQ ID NO: 135540 - DNA, 25 bp, Probe Sequence
aggagaactatgacgtgctttcacg

SEQ ID NO: 135541 - DNA, 25 bp, Probe Sequence
aggagaactgagactctgccttacc

SEQ ID NO: 135542 - DNA, 25 bp, Probe Sequence
aggagaagctgacggctgcatctgt

SEQ ID NO: 135543 - DNA, 25 bp, Probe Sequence
aggagaagctgactttctctctgcg

SEQ ID NO: 135544 - DNA, 25 bp, Probe Sequence
aggatacagtttgttcctcgtggcg

SEQ ID NO: 135545 - DNA, 25 bp, Probe Sequence
aggtaagttctaagttctctatgga

SEQ ID NO: 135546 - DNA, 25 bp, Probe Sequence
aggagaactctcacgttcttgggtg

SEQ ID NO: 135547 - DNA, 25 bp, Probe Sequence
aggagaaccgctatgtggtccggct

SEQ ID NO: 135548 - DNA, 25 bp, Probe Sequence
aggaggcccgaaaggagctccaggc

SEQ ID NO: 135549 - DNA, 25 bp, Probe Sequence
aggagaacatcacacgggctctcat

SEQ ID NO: 135550 - DNA, 25 bp, Probe Sequence
aggagaaactggtggagctgcgccg

SEQ ID NO: 135551 - DNA, 25 bp, Probe Sequence
aggaggaatgctggactggaggccc

SEQ ID NO: 135552 - DNA, 25 bp, Probe Sequence
aggagagagtgccttgtggagcgct

SEQ ID NO: 135553 - DNA, 25 bp, Probe Sequence
aggagaggtgcactttacaggtccc

SEQ ID NO: 135554 - DNA, 25 bp, Probe Sequence
aggagggctcactcaaagcctcctg

SEQ ID NO: 135555 - DNA, 25 bp, Probe Sequence
aggagtggtacttaagctcccctgc

SEQ ID NO: 135556 - DNA, 25 bp, Probe Sequence
aggagaggtggccaaacctcactct

SEQ ID NO: 135557 - DNA, 25 bp, Probe Sequence
aggagagagatggaccctcctcctc

SEQ ID NO: 135558 - DNA, 25 bp, Probe Sequence
agggcagagtgtttgcccaccagct

SEQ ID NO: 135559 - DNA, 25 bp, Probe Sequence
agggcatagttaggacccggcttca

SEQ ID NO: 135560 - DNA, 25 bp, Probe Sequence
aggagtatgtcaagcgagccctggc

SEQ ID NO: 135561 - DNA, 25 bp, Probe Sequence
aggagtatgtcaagcgagccctggc

SEQ ID NO: 135562 - DNA, 25 bp, Probe Sequence
aggagtatgtcaagcgagccctggc

SEQ ID NO: 135563 - DNA, 25 bp, Probe Sequence
aggagttgaagtccagcctaagcaa

SEQ ID NO: 135564 - DNA, 25 bp, Probe Sequence
aggtttgaagtccacctgagccaac

SEQ ID NO: 135565 - DNA, 25 bp, Probe Sequence
aggagttcaagaccagcctggccaa

SEQ ID NO: 135566 - DNA, 25 bp, Probe Sequence
aggagttcaaagacaagcctgacca

SEQ ID NO: 135567 - DNA, 25 bp, Probe Sequence
aggagattagagaaatatgctatga

SEQ ID NO: 135568 - DNA, 25 bp, Probe Sequence
aggattatagtgctgcattgtctga

SEQ ID NO: 135569 - DNA, 25 bp, Probe Sequence
aggagtatgtgtccaatgctgcctt

SEQ ID NO: 135570 - DNA, 25 bp, Probe Sequence
aggagtgattgaacctgctcatctc

SEQ ID NO: 135571 - DNA, 25 bp, Probe Sequence
aggagtctatgaactggccactttt

SEQ ID NO: 135572 - DNA, 25 bp, Probe Sequence
aggagttagtctggcttcatgtttt

SEQ ID NO: 135573 - DNA, 25 bp, Probe Sequence
agggtaagcacttgttcagaatgtt

SEQ ID NO: 135574 - DNA, 25 bp, Probe Sequence
aggtgtaaattctttatgattaatt

SEQ ID NO: 135575 - DNA, 25 bp, Probe Sequence
aggatgcttgtcttttacaaaacag

SEQ ID NO: 135576 - DNA, 25 bp, Probe Sequence
aggttgctgtgctatttgacaaact

SEQ ID NO: 135577 - DNA, 25 bp, Probe Sequence
aggatatctgtatgtggaaggatta

SEQ ID NO: 135578 - DNA, 25 bp, Probe Sequence
aggatattctcatggggatgattat

SEQ ID NO: 135579 - DNA, 25 bp, Probe Sequence
aggtatgtctagggggcagtgtctc

SEQ ID NO: 135580 - DNA, 25 bp, Probe Sequence
aggtatttcagcaccgctgtgtcgc

SEQ ID NO: 135581 - DNA, 25 bp, Probe Sequence
aggtcttctaagagtctgtgaggct

SEQ ID NO: 135582 - DNA, 25 bp, Probe Sequence
aggtcagtctaacagtttgcctgct

SEQ ID NO: 135583 - DNA, 25 bp, Probe Sequence
aggggtctacctaggtatgcctggt

SEQ ID NO: 135584 - DNA, 25 bp, Probe Sequence
agggtcctgcaaaaggctagctcgg

SEQ ID NO: 135585 - DNA, 25 bp, Probe Sequence
aggttctataataagccatgagctt

SEQ ID NO: 135586 - DNA, 25 bp, Probe Sequence
agtgcgttctttagaccaatgcatt

SEQ ID NO: 135587 - DNA, 25 bp, Probe Sequence
agggcttgcttaagagtttgccttc

SEQ ID NO: 135588 - DNA, 25 bp, Probe Sequence
aggatgcttcttaggtttctgtctt

SEQ ID NO: 135589 - DNA, 25 bp, Probe Sequence
aggatgggctttcttagttctgctc

SEQ ID NO: 135590 - DNA, 25 bp, Probe Sequence
aggtcaggctccactatggtgggct

SEQ ID NO: 135591 - DNA, 25 bp, Probe Sequence
aggtagtttcgagtatggtgccagt

SEQ ID NO: 135592 - DNA, 25 bp, Probe Sequence
aggtgagtttagttctttgcttgct

SEQ ID NO: 135593 - DNA, 25 bp, Probe Sequence
agggacatgcttagcagtccccttc

SEQ ID NO: 135594 - DNA, 25 bp, Probe Sequence
aggtcagcattgaggtcacctgctt

SEQ ID NO: 135595 - DNA, 25 bp, Probe Sequence
aggtgcagagatgaggtccttctgg

SEQ ID NO: 135596 - DNA, 25 bp, Probe Sequence
aggtcacagctggaatctcctttgc

SEQ ID NO: 135597 - DNA, 25 bp, Probe Sequence
agggcatatctggaatctgaagttg

SEQ ID NO: 135598 - DNA, 25 bp, Probe Sequence
agggaagtggaagtataagtgaatg

SEQ ID NO: 135599 - DNA, 25 bp, Probe Sequence
aggtgaaggcagagactagagtgat

SEQ ID NO: 135600 - DNA, 25 bp, Probe Sequence
aggtagcaggacagagctaggacat

SEQ ID NO: 135601 - DNA, 25 bp, Probe Sequence
aggaggggacttagccatggacttg

SEQ ID NO: 135602 - DNA, 25 bp, Probe Sequence
aggatggggaatttagcatggatct

SEQ ID NO: 135603 - DNA, 25 bp, Probe Sequence
aggtcggagtagttagatctttagc

SEQ ID NO: 135604 - DNA, 25 bp, Probe Sequence
aggtagctggttgtacatctttccc

SEQ ID NO: 135605 - DNA, 25 bp, Probe Sequence
aggtccatggttaatacccactcgc

SEQ ID NO: 135606 - DNA, 25 bp, Probe Sequence
agggccagtgtcgttattatccttg

SEQ ID NO: 135607 - DNA, 25 bp, Probe Sequence
aggaggtgctgagttttgtatcttt

SEQ ID NO: 135608 - DNA, 25 bp, Probe Sequence
aggagggaggtgcttctagttctgc

SEQ ID NO: 135609 - DNA, 25 bp, Probe Sequence
aggagggctggtctacaagttctag

SEQ ID NO: 135610 - DNA, 25 bp, Probe Sequence
aggtgggtggatcacttggggtcag

SEQ ID NO: 135611 - DNA, 25 bp, Probe Sequence
aggtgggtggatcacttggggtcag

SEQ ID NO: 135612 - DNA, 25 bp, Probe Sequence
aggtgggtggatcactggagtttga

SEQ ID NO: 135613 - DNA, 25 bp, Probe Sequence
aggtgggtggatcactggagtttga

SEQ ID NO: 135614 - DNA, 25 bp, Probe Sequence
aggttggaaatgcactgaactctgg

SEQ ID NO: 135615 - DNA, 25 bp, Probe Sequence
aggttggacaagctgcatactctgc

SEQ ID NO: 135616 - DNA, 25 bp, Probe Sequence
aggtttagattcctgcaagcctcca

SEQ ID NO: 135617 - DNA, 25 bp, Probe Sequence
aggttcttgttggtgcacagcacaa

SEQ ID NO: 135618 - DNA, 25 bp, Probe Sequence
aggggtgctggggatgcatccaaag

SEQ ID NO: 135619 - DNA, 25 bp, Probe Sequence
aggagagggtagtcagcatctccaa

SEQ ID NO: 135620 - DNA, 25 bp, Probe Sequence
aggattctggtattccacatccaat

SEQ ID NO: 135621 - DNA, 25 bp, Probe Sequence
aggatttgggatttaatgctatgta

SEQ ID NO: 135622 - DNA, 25 bp, Probe Sequence
aggtttgctcagtatatctatcttt

SEQ ID NO: 135623 - DNA, 25 bp, Probe Sequence
aggttctgcctgtaattgagcctct

SEQ ID NO: 135624 - DNA, 25 bp, Probe Sequence
aggttcacgtgcttttgagatgatt

SEQ ID NO: 135625 - DNA, 25 bp, Probe Sequence
agggtcgggcaggttgacatattta

SEQ ID NO: 135626 - DNA, 25 bp, Probe Sequence
agggaaggggacagatgtttctcat

SEQ ID NO: 135627 - DNA, 25 bp, Probe Sequence
aggtacatgtgttccaggtttttca

SEQ ID NO: 135628 - DNA, 25 bp, Probe Sequence
aggtaatgtgactctagttctccgc

SEQ ID NO: 135629 - DNA, 25 bp, Probe Sequence
aggatgcaatgtgcatgcctaaatg

SEQ ID NO: 135630 - DNA, 25 bp, Probe Sequence
aggtcacataacagctgcatcattg

SEQ ID NO: 135631 - DNA, 25 bp, Probe Sequence
aggatccaaatgtggctgcgttcat

SEQ ID NO: 135632 - DNA, 25 bp, Probe Sequence
aggtccaagtaaaccgctagcttgt

SEQ ID NO: 135633 - DNA, 25 bp, Probe Sequence
aggtccagagatatatccagagagg

SEQ ID NO: 135634 - DNA, 25 bp, Probe Sequence
aggtctagcagagttgtgtcagggg

SEQ ID NO: 135635 - DNA, 25 bp, Probe Sequence
aggtctacaactatgtggactggat

SEQ ID NO: 135636 - DNA, 25 bp, Probe Sequence
aggttattacctaatggagatccat

SEQ ID NO: 135637 - DNA, 25 bp, Probe Sequence
aggttctttacatggcagaatacat

SEQ ID NO: 135638 - DNA, 25 bp, Probe Sequence
aggtacttgaactggcaggaaatgc

SEQ ID NO: 135639 - DNA, 25 bp, Probe Sequence
aggatgaggtaggtaggcaggaaaa

SEQ ID NO: 135640 - DNA, 25 bp, Probe Sequence
aggagggaaggtggaccagaatgaa

SEQ ID NO: 135641 - DNA, 25 bp, Probe Sequence
aggagggggagtggaggggcatagc

SEQ ID NO: 135642 - DNA, 25 bp, Probe Sequence
aggaggaggacaaggaggcggcaca

SEQ ID NO: 135643 - DNA, 25 bp, Probe Sequence
aggaggtggagaggtaccggcttct

SEQ ID NO: 135644 - DNA, 25 bp, Probe Sequence
aggaggtggaggtttcagcgagctg

SEQ ID NO: 135645 - DNA, 25 bp, Probe Sequence
aggaggtggaggtttcagcgagctg

SEQ ID NO: 135646 - DNA, 25 bp, Probe Sequence
aggatttagggtcacatgctgcagg

SEQ ID NO: 135647 - DNA, 25 bp, Probe Sequence
aggattatgaggaggttggtgtgga

SEQ ID NO: 135648 - DNA, 25 bp, Probe Sequence
aggattcagacgagtgtcgctgcgt

SEQ ID NO: 135649 - DNA, 25 bp, Probe Sequence
aggattcagcacaacactggggagt

SEQ ID NO: 135650 - DNA, 25 bp, Probe Sequence
aggtccatctcagcagcgtgagggt

SEQ ID NO: 135651 - DNA, 25 bp, Probe Sequence
aggtccgcaaccagatagggagatg

SEQ ID NO: 135652 - DNA, 25 bp, Probe Sequence
aggatcacgccacagaaatgaagag

SEQ ID NO: 135653 - DNA, 25 bp, Probe Sequence
aggtctggaatgcaaagtcaaggag

SEQ ID NO: 135654 - DNA, 25 bp, Probe Sequence
aggtcaggatcacgatgaaaccccg

SEQ ID NO: 135655 - DNA, 25 bp, Probe Sequence
aggtcagagcagcgagataccccac

SEQ ID NO: 135656 - DNA, 25 bp, Probe Sequence
aggtcaggagttcgagaccaccctg

SEQ ID NO: 135657 - DNA, 25 bp, Probe Sequence
aggtggctggtttgaagccccaggt

SEQ ID NO: 135658 - DNA, 25 bp, Probe Sequence
agggggcactaagatgccagccacg

SEQ ID NO: 135659 - DNA, 25 bp, Probe Sequence
aggagggatcatgagttgccaccac

SEQ ID NO: 135660 - DNA, 25 bp, Probe Sequence
aggggagccagattgttgtcctgac

SEQ ID NO: 135661 - DNA, 25 bp, Probe Sequence
aggatggaggggtggtcctgactca

SEQ ID NO: 135662 - DNA, 25 bp, Probe Sequence
aggggagagggatcgtcctcattca

SEQ ID NO: 135663 - DNA, 25 bp, Probe Sequence
aggagggagggagcacattcctggc

SEQ ID NO: 135664 - DNA, 25 bp, Probe Sequence
agggacggctgaacagacttcccgc

SEQ ID NO: 135665 - DNA, 25 bp, Probe Sequence
aggtgacggccttagatctctcgcc

SEQ ID NO: 135666 - DNA, 25 bp, Probe Sequence
aggtaccagagttccatgtgctgcc

SEQ ID NO: 135667 - DNA, 25 bp, Probe Sequence
aggatgcccagactgcattttgcag

SEQ ID NO: 135668 - DNA, 25 bp, Probe Sequence
aggatgccgcagaccattatctggc

SEQ ID NO: 135669 - DNA, 25 bp, Probe Sequence
aggattctgggcggattctgcagct

SEQ ID NO: 135670 - DNA, 25 bp, Probe Sequence
aggataaggagtggatgcccgtcac

SEQ ID NO: 135671 - DNA, 25 bp, Probe Sequence
aggataaagaaggcatccctcccga

SEQ ID NO: 135672 - DNA, 25 bp, Probe Sequence
aggataaggaaggaattcctcctga

SEQ ID NO: 135673 - DNA, 25 bp, Probe Sequence
aggtaattgaagccaatcctctccc

SEQ ID NO: 135674 - DNA, 25 bp, Probe Sequence
agggacatgtaacaagcacaccggc

SEQ ID NO: 135675 - DNA, 25 bp, Probe Sequence
agggtcaatacccagagacagccac

SEQ ID NO: 135676 - DNA, 25 bp, Probe Sequence
agggtaaaccgatcaaccacagagt

SEQ ID NO: 135677 - DNA, 25 bp, Probe Sequence
agggaagaacccttcaagaccagat

SEQ ID NO: 135678 - DNA, 25 bp, Probe Sequence
agggaaacctctgccagcgaaagat

SEQ ID NO: 135679 - DNA, 25 bp, Probe Sequence
aggggaaactcttgtgggaggagca

SEQ ID NO: 135680 - DNA, 25 bp, Probe Sequence
aggggaagactggtggtacatggga

SEQ ID NO: 135681 - DNA, 25 bp, Probe Sequence
aggggccagccgtcaggaatctggc

SEQ ID NO: 135682 - DNA, 25 bp, Probe Sequence
agggacacccagtactgggcaggct

SEQ ID NO: 135683 - DNA, 25 bp, Probe Sequence
aggggacagacgtttttcagcagct

SEQ ID NO: 135684 - DNA, 25 bp, Probe Sequence
aggggacagacgtttttcagcagct

SEQ ID NO: 135685 - DNA, 25 bp, Probe Sequence
agggtacaaggatttcagggcaatt

SEQ ID NO: 135686 - DNA, 25 bp, Probe Sequence
aggaggacatgggacttgcgtggac

SEQ ID NO: 135687 - DNA, 25 bp, Probe Sequence
aggaggagctggagttctgtgaaaa

SEQ ID NO: 135688 - DNA, 25 bp, Probe Sequence
aggtggaggagcagtacgaagaaga

SEQ ID NO: 135689 - DNA, 25 bp, Probe Sequence
agtggcggaagccgtacaaagtggc

SEQ ID NO: 135690 - DNA, 25 bp, Probe Sequence
aggggcgagcacggaacaatggggc

SEQ ID NO: 135691 - DNA, 25 bp, Probe Sequence
aggagggacccagacatggagctgc

SEQ ID NO: 135692 - DNA, 25 bp, Probe Sequence
aggaggaacgctgcacagagaggcc

SEQ ID NO: 135693 - DNA, 25 bp, Probe Sequence
aggaggcaactgatccaagaccctg

SEQ ID NO: 135694 - DNA, 25 bp, Probe Sequence
aggatgtgaagccggccaagaccgt

SEQ ID NO: 135695 - DNA, 25 bp, Probe Sequence
aggaggacagcttgggccagacctc

SEQ ID NO: 135696 - DNA, 25 bp, Probe Sequence
aggaggtcgaggctgccatgagcca

SEQ ID NO: 135697 - DNA, 25 bp, Probe Sequence
aggaggtcaaggctgcagtggcaca

SEQ ID NO: 135698 - DNA, 25 bp, Probe Sequence
aggaggtcaaggctggtagattgct

SEQ ID NO: 135699 - DNA, 25 bp, Probe Sequence
aggatggttttgggactagaggctc

SEQ ID NO: 135700 - DNA, 25 bp, Probe Sequence
agggagattttagcctcgcaggaca

SEQ ID NO: 135701 - DNA, 25 bp, Probe Sequence
agtgaaaatgttgaagtccagagac

SEQ ID NO: 135702 - DNA, 25 bp, Probe Sequence
aggaggcaattaggattgcccagga

SEQ ID NO: 135703 - DNA, 25 bp, Probe Sequence
aggaggagtataatgtatgcactac

SEQ ID NO: 135704 - DNA, 25 bp, Probe Sequence
aggaggagttacagatgcagccaca

SEQ ID NO: 135705 - DNA, 25 bp, Probe Sequence
aggggcgatatcctctgacgtatca

SEQ ID NO: 135706 - DNA, 25 bp, Probe Sequence
aggaggcactatttcatgactgacc

SEQ ID NO: 135707 - DNA, 25 bp, Probe Sequence
aggaggaattctatgcctgacgcgg

SEQ ID NO: 135708 - DNA, 25 bp, Probe Sequence
aggaggatgttctcttctgaccagt

SEQ ID NO: 135709 - DNA, 25 bp, Probe Sequence
aggttgatttgctctctaaacttcc

SEQ ID NO: 135710 - DNA, 25 bp, Probe Sequence
aggtatgtgcattgcccatcataaa

SEQ ID NO: 135711 - DNA, 25 bp, Probe Sequence
aggtttgagtccctccaaagggcag

SEQ ID NO: 135712 - DNA, 25 bp, Probe Sequence
aggtttgagtccctccaaagggcag

SEQ ID NO: 135713 - DNA, 25 bp, Probe Sequence
aggtttgagtccctccaaagggcag

SEQ ID NO: 135714 - DNA, 25 bp, Probe Sequence
aggtcttggctccaaccaaaacgct

SEQ ID NO: 135715 - DNA, 25 bp, Probe Sequence
agtgttcgcccacaccatagaaaga

SEQ ID NO: 135716 - DNA, 25 bp, Probe Sequence
aggttaccaacaatcctgaaaatga

SEQ ID NO: 135717 - DNA, 25 bp, Probe Sequence
aggttatcaccaatctagtgaaaat

SEQ ID NO: 135718 - DNA, 25 bp, Probe Sequence
aggttctaccctccatgtgagaata

SEQ ID NO: 135719 - DNA, 25 bp, Probe Sequence
aggtttcaccttccagtgtgcagaa

SEQ ID NO: 135720 - DNA, 25 bp, Probe Sequence
aggtttcaccttccagtgtgcagaa

SEQ ID NO: 135721 - DNA, 25 bp, Probe Sequence
aggatttccctgctattggcatatt

SEQ ID NO: 135722 - DNA, 25 bp, Probe Sequence
aggatttatcggaagaactctattt

SEQ ID NO: 135723 - DNA, 25 bp, Probe Sequence
aggttaatctaggaatgactcgttt

SEQ ID NO: 135724 - DNA, 25 bp, Probe Sequence
aggataacacggcgatgaacgtctt

SEQ ID NO: 135725 - DNA, 25 bp, Probe Sequence
tagtccaagctttgtggatccctcc

SEQ ID NO: 135726 - DNA, 25 bp, Probe Sequence
aggtcacagacaaatagtttagaga

SEQ ID NO: 135727 - DNA, 25 bp, Probe Sequence
aggataggcctttgagtgttagaga

SEQ ID NO: 135728 - DNA, 25 bp, Probe Sequence
aggaggccacactgatgttctaaaa

SEQ ID NO: 135729 - DNA, 25 bp, Probe Sequence
agagggccaactgtatttaggataa

SEQ ID NO: 135730 - DNA, 25 bp, Probe Sequence
aggggaatagatgatttatgggtat

SEQ ID NO: 135731 - DNA, 25 bp, Probe Sequence
agggtacacatgagccttcggaggt

SEQ ID NO: 135732 - DNA, 25 bp, Probe Sequence
agggccaaataacctgctagctagg

SEQ ID NO: 135733 - DNA, 25 bp, Probe Sequence
agggccagaaagtcggtatcttggt

SEQ ID NO: 135734 - DNA, 25 bp, Probe Sequence
aggtgccgccattggcggttctgct

SEQ ID NO: 135735 - DNA, 25 bp, Probe Sequence
aggtgtggtttggcaggtatctcat

SEQ ID NO: 135736 - DNA, 25 bp, Probe Sequence
aggatgctaaattccgtctgattct

SEQ ID NO: 135737 - DNA, 25 bp, Probe Sequence
aggtacaaatgaggcctccatctcg

SEQ ID NO: 135738 - DNA, 25 bp, Probe Sequence
aggataaacatgtccatcttgcccg

SEQ ID NO: 135739 - DNA, 25 bp, Probe Sequence
aggatgggtctggcaatttccctgg

SEQ ID NO: 135740 - DNA, 25 bp, Probe Sequence
aggatgagcccagcaactcatggcc

SEQ ID NO: 135741 - DNA, 25 bp, Probe Sequence
aggatggccctgacaagtatgatca

SEQ ID NO: 135742 - DNA, 25 bp, Probe Sequence
aggatggcaccggcacatctaacat

SEQ ID NO: 135743 - DNA, 25 bp, Probe Sequence
aggatggactcttgcacatcactac

SEQ ID NO: 135744 - DNA, 25 bp, Probe Sequence
aggatggactcttgcacatcactac

SEQ ID NO: 135745 - DNA, 25 bp, Probe Sequence
aggatggactcttgcacatcactac

SEQ ID NO: 135746 - DNA, 25 bp, Probe Sequence
aggatgtggctgatgcacttctaca

SEQ ID NO: 135747 - DNA, 25 bp, Probe Sequence
aggatgagttgcacattgttgaagc

SEQ ID NO: 135748 - DNA, 25 bp, Probe Sequence
aggtgaggtcccagcttgaagagaa

SEQ ID NO: 135749 - DNA, 25 bp, Probe Sequence
agggaagaggccagcgtgaaggacc

SEQ ID NO: 135750 - DNA, 25 bp, Probe Sequence
agaggcataaggttcgggaagaggt

SEQ ID NO: 135751 - DNA, 25 bp, Probe Sequence
aggtatgtatatttagggaagagac

SEQ ID NO: 135752 - DNA, 25 bp, Probe Sequence
aggtggttatcactaggctaaaact

SEQ ID NO: 135753 - DNA, 25 bp, Probe Sequence
aggtggcttgagttcaggagttcaa

SEQ ID NO: 135754 - DNA, 25 bp, Probe Sequence
aggaggcggagcttgcagtgagccg

SEQ ID NO: 135755 - DNA, 25 bp, Probe Sequence
aggaggccagaggctgcaaggagcg

SEQ ID NO: 135756 - DNA, 25 bp, Probe Sequence
aggaggcacgagagaaggcgcaggc

SEQ ID NO: 135757 - DNA, 25 bp, Probe Sequence
aggaggcccagatgacggaagtgtg

SEQ ID NO: 135758 - DNA, 25 bp, Probe Sequence
aggggaccgacaacaggagaggaat

SEQ ID NO: 135759 - DNA, 25 bp, Probe Sequence
aggggacataaaccacgagagtgac

SEQ ID NO: 135760 - DNA, 25 bp, Probe Sequence
aggggaatctaagcacaatgcattc

SEQ ID NO: 135761 - DNA, 25 bp, Probe Sequence
agggaggtcccagcatcaaagctgc

SEQ ID NO: 135762 - DNA, 25 bp, Probe Sequence
agggaaccagccatctgaatgagct

SEQ ID NO: 135763 - DNA, 25 bp, Probe Sequence
agggaaccgcctggggaatgctggc

SEQ ID NO: 135764 - DNA, 25 bp, Probe Sequence
agggatcagcccccaaagaaatggg

SEQ ID NO: 135765 - DNA, 25 bp, Probe Sequence
aggggcaatcctcaaatgcggggtg

SEQ ID NO: 135766 - DNA, 25 bp, Probe Sequence
aggggatttcgctaacagatgggag

SEQ ID NO: 135767 - DNA, 25 bp, Probe Sequence
aggtgagttacttaaggctaggagt

SEQ ID NO: 135768 - DNA, 25 bp, Probe Sequence
aggtaattggctaaccagccaagat

SEQ ID NO: 135769 - DNA, 25 bp, Probe Sequence
aggtgacttgtgttgaccccaagca

SEQ ID NO: 135770 - DNA, 25 bp, Probe Sequence
aggatactattgccagagctctgcc

SEQ ID NO: 135771 - DNA, 25 bp, Probe Sequence
aggtcaatattagtgagctgcctga

SEQ ID NO: 135772 - DNA, 25 bp, Probe Sequence
aggtcgtcaatgatgagtcctctct

SEQ ID NO: 135773 - DNA, 25 bp, Probe Sequence
aggatggcaaagagagtcgcatctc

SEQ ID NO: 135774 - DNA, 25 bp, Probe Sequence
aggttcaaggcatttgttgctatcg

SEQ ID NO: 135775 - DNA, 25 bp, Probe Sequence
aggttcaagagattctcctgcctca

SEQ ID NO: 135776 - DNA, 25 bp, Probe Sequence
aggatggaaatactttgctgccctt

SEQ ID NO: 135777 - DNA, 25 bp, Probe Sequence
aggtagctactactattatccccaa

SEQ ID NO: 135778 - DNA, 25 bp, Probe Sequence
aggtagggcaacaactgttcctcaa

SEQ ID NO: 135779 - DNA, 25 bp, Probe Sequence
aggtttggaagcagctgtccctagg

SEQ ID NO: 135780 - DNA, 25 bp, Probe Sequence
aggtttggaagcagctgtccctagg

SEQ ID NO: 135781 - DNA, 25 bp, Probe Sequence
aggtttggataatcttgccccagat

SEQ ID NO: 135782 - DNA, 25 bp, Probe Sequence
aggtctatcaatctacattttccca

SEQ ID NO: 135783 - DNA, 25 bp, Probe Sequence
aggttacaagactactacttcccat

SEQ ID NO: 135784 - DNA, 25 bp, Probe Sequence
aggtatagaacctcttgttgggcat

SEQ ID NO: 135785 - DNA, 25 bp, Probe Sequence
agggataaacacacttgttacctat

SEQ ID NO: 135786 - DNA, 25 bp, Probe Sequence
agggataaacacacttgttacctat

SEQ ID NO: 135787 - DNA, 25 bp, Probe Sequence
aggttgtatcacacttttctacctt

SEQ ID NO: 135788 - DNA, 25 bp, Probe Sequence
aggttgcaagaacattcctctactt

SEQ ID NO: 135789 - DNA, 25 bp, Probe Sequence
aggtctaagaagtcatctccttcaa

SEQ ID NO: 135790 - DNA, 25 bp, Probe Sequence
aggttccataaatgcccgacaagta

SEQ ID NO: 135791 - DNA, 25 bp, Probe Sequence
aggtttcacaacttctgccagagaa

SEQ ID NO: 135792 - DNA, 25 bp, Probe Sequence
aggtctgtcaaaggtcttggaaaag

SEQ ID NO: 135793 - DNA, 25 bp, Probe Sequence
aggtcttctaatgtctggaaagcaa

SEQ ID NO: 135794 - DNA, 25 bp, Probe Sequence
aggtgtaccacggttgtaaagcaat

SEQ ID NO: 135795 - DNA, 25 bp, Probe Sequence
aggtctaccgaggggctcaaacact

SEQ ID NO: 135796 - DNA, 25 bp, Probe Sequence
agtgtttcgggcatgggcaaagcct

SEQ ID NO: 135797 - DNA, 25 bp, Probe Sequence
aggttagcaggacgtgggcacaggc

SEQ ID NO: 135798 - DNA, 25 bp, Probe Sequence
aggtgaacggtgcctgggtgcaggc

SEQ ID NO: 135799 - DNA, 25 bp, Probe Sequence
aggtaccagtgtctgtgacgagctc

SEQ ID NO: 135800 - DNA, 25 bp, Probe Sequence
agggacacagttattgacaagctaa

SEQ ID NO: 135801 - DNA, 25 bp, Probe Sequence
aggttcatctctatttaaaggaacg

SEQ ID NO: 135802 - DNA, 25 bp, Probe Sequence
aggtgtctgcctatgcttaaagcca

SEQ ID NO: 135803 - DNA, 25 bp, Probe Sequence
aggtttgatctcagtgtaacgacat

SEQ ID NO: 135804 - DNA, 25 bp, Probe Sequence
aggtttgaatgcggtgtagaaatgt

SEQ ID NO: 135805 - DNA, 25 bp, Probe Sequence
aggtttcaaggaagtcatataatca

SEQ ID NO: 135806 - DNA, 25 bp, Probe Sequence
aggtcgtcattgtcttacatatact

SEQ ID NO: 135807 - DNA, 25 bp, Probe Sequence
aggttggcatggattacagaagctg

SEQ ID NO: 135808 - DNA, 25 bp, Probe Sequence
aggtagctggtgatttgcataaggc

SEQ ID NO: 135809 - DNA, 25 bp, Probe Sequence
aggtgagcgacgaccttacagagcg

SEQ ID NO: 135810 - DNA, 25 bp, Probe Sequence
aggatgatcgaggttgtttgcaacg

SEQ ID NO: 135811 - DNA, 25 bp, Probe Sequence
aggatgtcatgagatccctggcttc

SEQ ID NO: 135812 - DNA, 25 bp, Probe Sequence
aggatgtcaataaccctgggctcag

SEQ ID NO: 135813 - DNA, 25 bp, Probe Sequence
aggtgtaattagtctgctgagccag

SEQ ID NO: 135814 - DNA, 25 bp, Probe Sequence
agggttatgtggtccgaatcagtgg

SEQ ID NO: 135815 - DNA, 25 bp, Probe Sequence
aggatttgagctcataggaacaggt

SEQ ID NO: 135816 - DNA, 25 bp, Probe Sequence
aggatcctgagcacagagtccgggt

SEQ ID NO: 135817 - DNA, 25 bp, Probe Sequence
aggtggtgattctagatgtccgggt

SEQ ID NO: 135818 - DNA, 25 bp, Probe Sequence
aggtcgatttaagtagaagtgcgtt

SEQ ID NO: 135819 - DNA, 25 bp, Probe Sequence
aggtgttttaggtgtgagatgtttc

SEQ ID NO: 135820 - DNA, 25 bp, Probe Sequence
aggtattcctagcttctagatgttt

SEQ ID NO: 135821 - DNA, 25 bp, Probe Sequence
aggtttgcctattatcttgcaagtg

SEQ ID NO: 135822 - DNA, 25 bp, Probe Sequence
aggatttcagtacatcttgccgtgc

SEQ ID NO: 135823 - DNA, 25 bp, Probe Sequence
aggataggagttcacttcatcttct

SEQ ID NO: 135824 - DNA, 25 bp, Probe Sequence
aggttgtggattaatctttatttgc

SEQ ID NO: 135825 - DNA, 25 bp, Probe Sequence
aggattgccgttacagtctttttct

SEQ ID NO: 135826 - DNA, 25 bp, Probe Sequence
aggttgcttcttacagactgtttct

SEQ ID NO: 135827 - DNA, 25 bp, Probe Sequence
aggtttccatttagatcttcatatc

SEQ ID NO: 135828 - DNA, 25 bp, Probe Sequence
aggtggtctcctctgacttcaacag

SEQ ID NO: 135829 - DNA, 25 bp, Probe Sequence
aggggtccacgttgaattctgaatc

SEQ ID NO: 135830 - DNA, 25 bp, Probe Sequence
agggattccttccaatagttagatc

SEQ ID NO: 135831 - DNA, 25 bp, Probe Sequence
aggtgaactgttccagatacattaa

SEQ ID NO: 135832 - DNA, 25 bp, Probe Sequence
aggtgagatcttcgacacagaaaaa

SEQ ID NO: 135833 - DNA, 25 bp, Probe Sequence
aggtgtttacgcccgagatgaaaca

SEQ ID NO: 135834 - DNA, 25 bp, Probe Sequence
aggttttaaccgcacatgcacacac

SEQ ID NO: 135835 - DNA, 25 bp, Probe Sequence
aggttttctatttgggcatcacttc

SEQ ID NO: 135836 - DNA, 25 bp, Probe Sequence
aggttcttcatattccagagtcacc

SEQ ID NO: 135837 - DNA, 25 bp, Probe Sequence
aggtcttttaatctgatgttctcag

SEQ ID NO: 135838 - DNA, 25 bp, Probe Sequence
aggatttcaggagcgaggatttcag

SEQ ID NO: 135839 - DNA, 25 bp, Probe Sequence
aggtattcctgaggccttgatttca

SEQ ID NO: 135840 - DNA, 25 bp, Probe Sequence
aggtatgtacataagcccagttata

SEQ ID NO: 135841 - DNA, 25 bp, Probe Sequence
aggtcagttgagaatagccagtgtt

SEQ ID NO: 135842 - DNA, 25 bp, Probe Sequence
aggtcatgtgcttagaagtcaaggt

SEQ ID NO: 135843 - DNA, 25 bp, Probe Sequence
aggtcatcagtgtcatgagtgtggg

SEQ ID NO: 135844 - DNA, 25 bp, Probe Sequence
aggtctgcagattcaagcttgaatg

SEQ ID NO: 135845 - DNA, 25 bp, Probe Sequence
aggtatgtgtgaaagttgagacttc

SEQ ID NO: 135846 - DNA, 25 bp, Probe Sequence
aggtgatgggaatgttaattgctcc

SEQ ID NO: 135847 - DNA, 25 bp, Probe Sequence
aggttgggggcagtgttgtggccct

SEQ ID NO: 135848 - DNA, 25 bp, Probe Sequence
aggttgggtgcttcatttgtgttca

SEQ ID NO: 135849 - DNA, 25 bp, Probe Sequence
aggttggtgtggattctgttgaagg

SEQ ID NO: 135850 - DNA, 25 bp, Probe Sequence
aggtttgtttgaatgcctctaaagc

SEQ ID NO: 135851 - DNA, 25 bp, Probe Sequence
aggtttgtcagtttcacatcaaaac

SEQ ID NO: 135852 - DNA, 25 bp, Probe Sequence
aggtttggatgcatctgctcagact

SEQ ID NO: 135853 - DNA, 25 bp, Probe Sequence
aggtcagatggaggttctcagagcc

SEQ ID NO: 135854 - DNA, 25 bp, Probe Sequence
aggtgaatggcacctggctgcaggc

SEQ ID NO: 135855 - DNA, 25 bp, Probe Sequence
aggtgaatggcacctggctgcaggc

SEQ ID NO: 135856 - DNA, 25 bp, Probe Sequence
aggtgcagctgagctctgcgaggac

SEQ ID NO: 135857 - DNA, 25 bp, Probe Sequence
aggtcatgcagatgatctgagcgag

SEQ ID NO: 135858 - DNA, 25 bp, Probe Sequence
aggtctggatcatgctatgctgctg

SEQ ID NO: 135859 - DNA, 25 bp, Probe Sequence
aggtcattgactcatcatctgtcag

SEQ ID NO: 135860 - DNA, 25 bp, Probe Sequence
aggatattacatttgcactgctcag

SEQ ID NO: 135861 - DNA, 25 bp, Probe Sequence
aggtaacacttccgctgctgcggca

SEQ ID NO: 135862 - DNA, 25 bp, Probe Sequence
aggtctcagatctatgggagtcgtc

SEQ ID NO: 135863 - DNA, 25 bp, Probe Sequence
aggggcaggcagagggcctttgcta

SEQ ID NO: 135864 - DNA, 25 bp, Probe Sequence
aggtggaggcacaggacgcggtgat

SEQ ID NO: 135865 - DNA, 25 bp, Probe Sequence
aggttgagatccatggagccaggtc

SEQ ID NO: 135866 - DNA, 25 bp, Probe Sequence
aggttcagatcagttgcaggcctct

SEQ ID NO: 135867 - DNA, 25 bp, Probe Sequence
aggttcaccagttgagggacatttg

SEQ ID NO: 135868 - DNA, 25 bp, Probe Sequence
aggtccctttggaggatattgatgg

SEQ ID NO: 135869 - DNA, 25 bp, Probe Sequence
agggtcctgattgcttgtattttaa

SEQ ID NO: 135870 - DNA, 25 bp, Probe Sequence
agggtccgtgtctttgtatattcaa

SEQ ID NO: 135871 - DNA, 25 bp, Probe Sequence
agggtgctccttttgttttacagag

SEQ ID NO: 135872 - DNA, 25 bp, Probe Sequence
agtgtagtgcggtgtgcttttacgt

SEQ ID NO: 135873 - DNA, 25 bp, Probe Sequence
agtgtagtgcggtgtgcttttacgt

SEQ ID NO: 135874 - DNA, 25 bp, Probe Sequence
aggttagctttcctgcttttatctt

SEQ ID NO: 135875 - DNA, 25 bp, Probe Sequence
aggtaatgctttcctgcatttttgc

SEQ ID NO: 135876 - DNA, 25 bp, Probe Sequence
aggttatctattactctttcatgcc

SEQ ID NO: 135877 - DNA, 25 bp, Probe Sequence
aggttattcaaagttttcagctctt

SEQ ID NO: 135878 - DNA, 25 bp, Probe Sequence
aggttactcagcagtttgtgcctcc

SEQ ID NO: 135879 - DNA, 25 bp, Probe Sequence
aggttactctggtatttatctcttc

SEQ ID NO: 135880 - DNA, 25 bp, Probe Sequence
aggttactgcataatgatttcattt

SEQ ID NO: 135881 - DNA, 25 bp, Probe Sequence
aggtttgcatgtagctatagtcact

SEQ ID NO: 135882 - DNA, 25 bp, Probe Sequence
aggtcctgtgctataattactggta

SEQ ID NO: 135883 - DNA, 25 bp, Probe Sequence
aggatactttacaaaacatctggct

SEQ ID NO: 135884 - DNA, 25 bp, Probe Sequence
aggatatcctgaactggaagttggc

SEQ ID NO: 135885 - DNA, 25 bp, Probe Sequence
aggtggctcaattctgagaagttcc

SEQ ID NO: 135886 - DNA, 25 bp, Probe Sequence
agggcagtaaaccgaatgtctccaa

SEQ ID NO: 135887 - DNA, 25 bp, Probe Sequence
agggagtagaactttgactctaaga

SEQ ID NO: 135888 - DNA, 25 bp, Probe Sequence
acggggtgaagctattccccacact

SEQ ID NO: 135889 - DNA, 25 bp, Probe Sequence
actggggctaaatccgcagcaaact

SEQ ID NO: 135890 - DNA, 25 bp, Probe Sequence
ctgggggcggactccagaacaacca

SEQ ID NO: 135891 - DNA, 25 bp, Probe Sequence
cggcccgggtcatcatagaaaagta

SEQ ID NO: 135892 - DNA, 25 bp, Probe Sequence
agtgcccagcggaggtaaagaacca

SEQ ID NO: 135893 - DNA, 25 bp, Probe Sequence
agtgtccaggggcttggagagacct

SEQ ID NO: 135894 - DNA, 25 bp, Probe Sequence
aggtccaggggtattgcaggcaaca

SEQ ID NO: 135895 - DNA, 25 bp, Probe Sequence
aggtctcaggggtattgctaagcca

SEQ ID NO: 135896 - DNA, 25 bp, Probe Sequence
agtgtcaatatcctggtgttaacct

SEQ ID NO: 135897 - DNA, 25 bp, Probe Sequence
aggtcaaatagcaatgtgtatgcac

SEQ ID NO: 135898 - DNA, 25 bp, Probe Sequence
aggtaaatacaattcttatctagtg

SEQ ID NO: 135899 - DNA, 25 bp, Probe Sequence
aggtaaacccatgtttctgagatgc

SEQ ID NO: 135900 - DNA, 25 bp, Probe Sequence
agtgtaaaacctcttctgcaaatcg

SEQ ID NO: 135901 - DNA, 25 bp, Probe Sequence
aggtaaaacttgcctactgatcagt

SEQ ID NO: 135902 - DNA, 25 bp, Probe Sequence
aggtcaatgacctgggatgctgatc

SEQ ID NO: 135903 - DNA, 25 bp, Probe Sequence
aggtcactacactgtatcctatgga

SEQ ID NO: 135904 - DNA, 25 bp, Probe Sequence
aggtgataacactgtaactagctga

SEQ ID NO: 135905 - DNA, 25 bp, Probe Sequence
aggtctgagacctctacagtagcta

SEQ ID NO: 135906 - DNA, 25 bp, Probe Sequence
aggtatgaggcctccgagatagctg

SEQ ID NO: 135907 - DNA, 25 bp, Probe Sequence
aggtataggcttgccttgctgagag

SEQ ID NO: 135908 - DNA, 25 bp, Probe Sequence
agtggaaatggttccttgcaaactt

SEQ ID NO: 135909 - DNA, 25 bp, Probe Sequence
agggaacatatttcctccacaactc

SEQ ID NO: 135910 - DNA, 25 bp, Probe Sequence
aggtcaagaataacacttcaaagtc

SEQ ID NO: 135911 - DNA, 25 bp, Probe Sequence
agggagaagaagccacattccaaat

SEQ ID NO: 135912 - DNA, 25 bp, Probe Sequence
agggagacagaaacaacctcaaggt

SEQ ID NO: 135913 - DNA, 25 bp, Probe Sequence
aggggacagaaatcaggtattggca

SEQ ID NO: 135914 - DNA, 25 bp, Probe Sequence
aggggacagaaatcaggtattggca

SEQ ID NO: 135915 - DNA, 25 bp, Probe Sequence
aggggacagaaatcaggtattggca

SEQ ID NO: 135916 - DNA, 25 bp, Probe Sequence
aggggaagaagaaagtgtcactgga

SEQ ID NO: 135917 - DNA, 25 bp, Probe Sequence
agctggggaagtaacgtttgcggat

SEQ ID NO: 135918 - DNA, 25 bp, Probe Sequence
agctggggaagtaacgtttgcggat

SEQ ID NO: 135919 - DNA, 25 bp, Probe Sequence
agtacgtggagtcaccttacagata

SEQ ID NO: 135920 - DNA, 25 bp, Probe Sequence
aggtagtggagttgcccgtgacaga

SEQ ID NO: 135921 - DNA, 25 bp, Probe Sequence
aggtgggcggaacacgatgtcagga

SEQ ID NO: 135922 - DNA, 25 bp, Probe Sequence
agggctggggaacactgtgaaagtt

SEQ ID NO: 135923 - DNA, 25 bp, Probe Sequence
agaggcggtggagcaccggatccgt

SEQ ID NO: 135924 - DNA, 25 bp, Probe Sequence
aggtctggtagagtcacacagtgcc

SEQ ID NO: 135925 - DNA, 25 bp, Probe Sequence
aggtaagctacaggcaacaccactt

SEQ ID NO: 135926 - DNA, 25 bp, Probe Sequence
aggtccactggggcaacagacactg

SEQ ID NO: 135927 - DNA, 25 bp, Probe Sequence
aggtccactggggcaacagacactg

SEQ ID NO: 135928 - DNA, 25 bp, Probe Sequence
aggttatctgtctgatactgagcag

SEQ ID NO: 135929 - DNA, 25 bp, Probe Sequence
aggtctattcactgcatcccagtga

SEQ ID NO: 135930 - DNA, 25 bp, Probe Sequence
aggtggtgagcattgaggcccagta

SEQ ID NO: 135931 - DNA, 25 bp, Probe Sequence
catactggtgaacaacccgtaatga

SEQ ID NO: 135932 - DNA, 25 bp, Probe Sequence
agtctggtgccagcagccgcggtaa

SEQ ID NO: 135933 - DNA, 25 bp, Probe Sequence
agattggcccatggtgccaggttag

SEQ ID NO: 135934 - DNA, 25 bp, Probe Sequence
agatatggcccgcgctggagtttca

SEQ ID NO: 135935 - DNA, 25 bp, Probe Sequence
agtatggctccgagggcaggttcac

SEQ ID NO: 135936 - DNA, 25 bp, Probe Sequence
agtgagccctggaggggttggcctt

SEQ ID NO: 135937 - DNA, 25 bp, Probe Sequence
aggtgcccatggagcgcgtgtttga

SEQ ID NO: 135938 - DNA, 25 bp, Probe Sequence
aggtcatgaaggaggcgtttgggcc

SEQ ID NO: 135939 - DNA, 25 bp, Probe Sequence
agtgttcaaagcaggcccgagccgc

SEQ ID NO: 135940 - DNA, 25 bp, Probe Sequence
agtgttcaaagcaggcccgagccgc

SEQ ID NO: 135941 - DNA, 25 bp, Probe Sequence
aggtcaagaagcaggtctcgatccc

SEQ ID NO: 135942 - DNA, 25 bp, Probe Sequence
aggtcaagaagcaggtctcgatccc

SEQ ID NO: 135943 - DNA, 25 bp, Probe Sequence
aggtcaagaagcaggtctcgatccc

SEQ ID NO: 135944 - DNA, 25 bp, Probe Sequence
aggtcactggatacaggttgtacca

SEQ ID NO: 135945 - DNA, 25 bp, Probe Sequence
aggtcctaaatcactcatctggcct

SEQ ID NO: 135946 - DNA, 25 bp, Probe Sequence
aggtcctgaagatcgccaaggtctt

SEQ ID NO: 135947 - DNA, 25 bp, Probe Sequence
aggtccatgggatcgagtacatttt

SEQ ID NO: 135948 - DNA, 25 bp, Probe Sequence
aggtcatcgggaaccagagcctggt

SEQ ID NO: 135949 - DNA, 25 bp, Probe Sequence
aggtcagcgaggagcacaacctgct

SEQ ID NO: 135950 - DNA, 25 bp, Probe Sequence
aggtcaggagctcgagaccagcctg

SEQ ID NO: 135951 - DNA, 25 bp, Probe Sequence
aggtcaagatctagcgataatgacg

SEQ ID NO: 135952 - DNA, 25 bp, Probe Sequence
aggtactttgggaaatgactccatt

SEQ ID NO: 135953 - DNA, 25 bp, Probe Sequence
aggggctgggggcaaattacactgt

SEQ ID NO: 135954 - DNA, 25 bp, Probe Sequence
agggggtctggctggtgttaacaga

SEQ ID NO: 135955 - DNA, 25 bp, Probe Sequence
agggtggggtgatgtggcttaacaa

SEQ ID NO: 135956 - DNA, 25 bp, Probe Sequence
agcggtggggacaggacacgaatga

SEQ ID NO: 135957 - DNA, 25 bp, Probe Sequence
aggggatggcgagaaggcacataat

SEQ ID NO: 135958 - DNA, 25 bp, Probe Sequence
agtagtgcatgtggagaaagaatct

SEQ ID NO: 135959 - DNA, 25 bp, Probe Sequence
agtgacgtgtgaggcagaagcgcac

SEQ ID NO: 135960 - DNA, 25 bp, Probe Sequence
agtcacgtgggggaagacctcagcc

SEQ ID NO: 135961 - DNA, 25 bp, Probe Sequence
aggttgggaggtggaggcccagcat

SEQ ID NO: 135962 - DNA, 25 bp, Probe Sequence
aggttgcagtgagctggggtcgcac

SEQ ID NO: 135963 - DNA, 25 bp, Probe Sequence
agtgttggtgtcatgggttggcctg

SEQ ID NO: 135964 - DNA, 25 bp, Probe Sequence
aggtgttggacaggggattggcgcc

SEQ ID NO: 135965 - DNA, 25 bp, Probe Sequence
aggtttgcagagtgtgtgcttggct

SEQ ID NO: 135966 - DNA, 25 bp, Probe Sequence
aggtttgaggttgtgtgtgtgtgtg

SEQ ID NO: 135967 - DNA, 25 bp, Probe Sequence
agtgttagagtttggattagtgggc

SEQ ID NO: 135968 - DNA, 25 bp, Probe Sequence
aggtgtagacttttcaggagtgaag

SEQ ID NO: 135969 - DNA, 25 bp, Probe Sequence
aggggaatctgtttgagaaggaagt

SEQ ID NO: 135970 - DNA, 25 bp, Probe Sequence
agggaacttgcctgaggtggacttc

SEQ ID NO: 135971 - DNA, 25 bp, Probe Sequence
agggggttgccgcaaagtcttatct

SEQ ID NO: 135972 - DNA, 25 bp, Probe Sequence
agggcggtatgccgccaaacgcttc

SEQ ID NO: 135973 - DNA, 25 bp, Probe Sequence
agggaggatctgcctacaaactggt

SEQ ID NO: 135974 - DNA, 25 bp, Probe Sequence
agggatggaaccatcaacctctctg

SEQ ID NO: 135975 - DNA, 25 bp, Probe Sequence
aggggtggagacctccaccttctct

SEQ ID NO: 135976 - DNA, 25 bp, Probe Sequence
aggggcaggtgacttgcaacccctt

SEQ ID NO: 135977 - DNA, 25 bp, Probe Sequence
aggttgcagttacttaactgtcctt

SEQ ID NO: 135978 - DNA, 25 bp, Probe Sequence
aggttcagttcatagatgccttcct

SEQ ID NO: 135979 - DNA, 25 bp, Probe Sequence
aggttctgttctcaatgttgctgcc

SEQ ID NO: 135980 - DNA, 25 bp, Probe Sequence
aggtttctgtcttaagcatcttggg

SEQ ID NO: 135981 - DNA, 25 bp, Probe Sequence
aggttttgtccatagcatcagttga

SEQ ID NO: 135982 - DNA, 25 bp, Probe Sequence
agaggacttccctgcagcacgtcgc

SEQ ID NO: 135983 - DNA, 25 bp, Probe Sequence
agggctgtacctttagcactggccc

SEQ ID NO: 135984 - DNA, 25 bp, Probe Sequence
aggtggagaccaacatggccttttc

SEQ ID NO: 135985 - DNA, 25 bp, Probe Sequence
aggtgtgaaatacaggcctccactc

SEQ ID NO: 135986 - DNA, 25 bp, Probe Sequence
aggtgtgaaaagagaggctccaccc

SEQ ID NO: 135987 - DNA, 25 bp, Probe Sequence
aggggaagcccaagaggatgaactc

SEQ ID NO: 135988 - DNA, 25 bp, Probe Sequence
aggggagaacagtgtgcagctaact

SEQ ID NO: 135989 - DNA, 25 bp, Probe Sequence
aggtgtgaaacgatctgcagcggag

SEQ ID NO: 135990 - DNA, 25 bp, Probe Sequence
agtggtgaagacgcacctgcgggac

SEQ ID NO: 135991 - DNA, 25 bp, Probe Sequence
agtgggacaatcgccagagggtggg

SEQ ID NO: 135992 - DNA, 25 bp, Probe Sequence
aggggaaatggggtgaacggtgctg

SEQ ID NO: 135993 - DNA, 25 bp, Probe Sequence
aggtgcgaccatctcctaaaggaat

SEQ ID NO: 135994 - DNA, 25 bp, Probe Sequence
aggtgcgaccatcatcaggatcaaa

SEQ ID NO: 135995 - DNA, 25 bp, Probe Sequence
aggtgctaccattattttgccacag

SEQ ID NO: 135996 - DNA, 25 bp, Probe Sequence
aggtgtggaatttctgtctcccaag

SEQ ID NO: 135997 - DNA, 25 bp, Probe Sequence
aggtgcaggtgacagccttcactaa

SEQ ID NO: 135998 - DNA, 25 bp, Probe Sequence
aggtgctattgttactcttacgaat

SEQ ID NO: 135999 - DNA, 25 bp, Probe Sequence
aggtgctgactgacaagcatgcccc

SEQ ID NO: 136000 - DNA, 25 bp, Probe Sequence
aggtgcagatctacaacacctgcca

SEQ ID NO: 136001 - DNA, 25 bp, Probe Sequence
aggtgagagctgcatagatccagta

SEQ ID NO: 136002 - DNA, 25 bp, Probe Sequence
aggtgacaggcctagctatagttag

SEQ ID NO: 136003 - DNA, 25 bp, Probe Sequence
aggtgacaggcctagctatagttag

SEQ ID NO: 136004 - DNA, 25 bp, Probe Sequence
aggtgacaggcctagctatagttag

SEQ ID NO: 136005 - DNA, 25 bp, Probe Sequence
aggtgacaggtctaaagagagaaga

SEQ ID NO: 136006 - DNA, 25 bp, Probe Sequence
agggacgttctgtgggcagtagccc

SEQ ID NO: 136007 - DNA, 25 bp, Probe Sequence
agggacgttctgtgggcagtagccc

SEQ ID NO: 136008 - DNA, 25 bp, Probe Sequence
agggccaggacctgcgggataggcc

SEQ ID NO: 136009 - DNA, 25 bp, Probe Sequence
agggctacggttacgggcatgagag

SEQ ID NO: 136010 - DNA, 25 bp, Probe Sequence
agggcaagtggtgtcgatggagtcg

SEQ ID NO: 136011 - DNA, 25 bp, Probe Sequence
aggtgaggtgtgagggaggagacgt

SEQ ID NO: 136012 - DNA, 25 bp, Probe Sequence
aggtgaagatgggcaggaaggctga

SEQ ID NO: 136013 - DNA, 25 bp, Probe Sequence
aggtacaaaatcttgcataagctga

SEQ ID NO: 136014 - DNA, 25 bp, Probe Sequence
aggtacaaaatcttgcataagctga

SEQ ID NO: 136015 - DNA, 25 bp, Probe Sequence
aggtgaccacagacatttacgctac

SEQ ID NO: 136016 - DNA, 25 bp, Probe Sequence
aggtgatgtcaccatttctacctgc

SEQ ID NO: 136017 - DNA, 25 bp, Probe Sequence
aggtcagctcttctagtatcgtgca

SEQ ID NO: 136018 - DNA, 25 bp, Probe Sequence
aggtgcgttctagatgtcatcctaa

SEQ ID NO: 136019 - DNA, 25 bp, Probe Sequence
aggtgagtgtcttagcatattttaa

SEQ ID NO: 136020 - DNA, 25 bp, Probe Sequence
agggcagggctctgatattccatga

SEQ ID NO: 136021 - DNA, 25 bp, Probe Sequence
agggcactcctaaaacacctggaag

SEQ ID NO: 136022 - DNA, 25 bp, Probe Sequence
agggcttgtattaaaccactgaaca

SEQ ID NO: 136023 - DNA, 25 bp, Probe Sequence
aggtctatcttaagaagccctggcc

SEQ ID NO: 136024 - DNA, 25 bp, Probe Sequence
aggtgtaaggtccgatgccttggcc

SEQ ID NO: 136025 - DNA, 25 bp, Probe Sequence
aggtgtggagcgacatcccgcttgc

SEQ ID NO: 136026 - DNA, 25 bp, Probe Sequence
agggtggaggtggcacctgcatcac

SEQ ID NO: 136027 - DNA, 25 bp, Probe Sequence
agggtgatgagtcagccacttactg

SEQ ID NO: 136028 - DNA, 25 bp, Probe Sequence
agataggaaggagcagacattaata

SEQ ID NO: 136029 - DNA, 25 bp, Probe Sequence
agtcaagtaggagcagtggaaatgg

SEQ ID NO: 136030 - DNA, 25 bp, Probe Sequence
agtccagtttggggtgcagacaagt

SEQ ID NO: 136031 - DNA, 25 bp, Probe Sequence
aggtctttcttaggtcaaagagctg

SEQ ID NO: 136032 - DNA, 25 bp, Probe Sequence
agtgttcattttaagtaacgtgctc

SEQ ID NO: 136033 - DNA, 25 bp, Probe Sequence
aggggcctctgaacggaacagtgtc

SEQ ID NO: 136034 - DNA, 25 bp, Probe Sequence
aggggccatagtataacacctctct

SEQ ID NO: 136035 - DNA, 25 bp, Probe Sequence
aggtggccttggataagggctgctc

SEQ ID NO: 136036 - DNA, 25 bp, Probe Sequence
aggtcagcacaacattaaggacaga

SEQ ID NO: 136037 - DNA, 25 bp, Probe Sequence
aggtctcaacagctctggagaagaa

SEQ ID NO: 136038 - DNA, 25 bp, Probe Sequence
aggtctccagaggatcttcagtaaa

SEQ ID NO: 136039 - DNA, 25 bp, Probe Sequence
aggtcatccatgacaactttggtat

SEQ ID NO: 136040 - DNA, 25 bp, Probe Sequence
aggtagcctgaactttgattttatt

SEQ ID NO: 136041 - DNA, 25 bp, Probe Sequence
aggtactctcaactctggatgagtt

SEQ ID NO: 136042 - DNA, 25 bp, Probe Sequence
aggtactggctattctggtcaacat

SEQ ID NO: 136043 - DNA, 25 bp, Probe Sequence
aggtcattgagctgttgagtggaca

SEQ ID NO: 136044 - DNA, 25 bp, Probe Sequence
agtgggggaggttggtggaccatgg

SEQ ID NO: 136045 - DNA, 25 bp, Probe Sequence
aggtggggattgtgagctggggcat

SEQ ID NO: 136046 - DNA, 25 bp, Probe Sequence
aggtggggagtcaccttgtggcatc

SEQ ID NO: 136047 - DNA, 25 bp, Probe Sequence
agggcggggtcaagacacgggatga

SEQ ID NO: 136048 - DNA, 25 bp, Probe Sequence
agtggagtgggtgaaagggatgcag

SEQ ID NO: 136049 - DNA, 25 bp, Probe Sequence
agtggttgtgttgtagggttgcagg

SEQ ID NO: 136050 - DNA, 25 bp, Probe Sequence
cgtagttttgagagggtggatgggt

SEQ ID NO: 136051 - DNA, 25 bp, Probe Sequence
agggttttgagcaggttggggtatg

SEQ ID NO: 136052 - DNA, 25 bp, Probe Sequence
aggtgttttgtgagttaaggttgca

SEQ ID NO: 136053 - DNA, 25 bp, Probe Sequence
agtggtttagtcagcttacccttgc

SEQ ID NO: 136054 - DNA, 25 bp, Probe Sequence
agtggtttagttgctagaagtcatg

SEQ ID NO: 136055 - DNA, 25 bp, Probe Sequence
agtggcttttgttgctgcgcaaagt

SEQ ID NO: 136056 - DNA, 25 bp, Probe Sequence
agggcatcatcaatttcgagcagaa

SEQ ID NO: 136057 - DNA, 25 bp, Probe Sequence
aggggatctatttctagtgaaccac

SEQ ID NO: 136058 - DNA, 25 bp, Probe Sequence
aggggctgaaagtctctgaagacct

SEQ ID NO: 136059 - DNA, 25 bp, Probe Sequence
aggtgtgccaaagcttgaggcctct

SEQ ID NO: 136060 - DNA, 25 bp, Probe Sequence
aggtggccaggaagctggtgatcct

SEQ ID NO: 136061 - DNA, 25 bp, Probe Sequence
aggtggccaggaagctggtgatcct

SEQ ID NO: 136062 - DNA, 25 bp, Probe Sequence
aggtggaagctatgctggttccctg

SEQ ID NO: 136063 - DNA, 25 bp, Probe Sequence
aggggtaggaaggtgctgtgggctg

SEQ ID NO: 136064 - DNA, 25 bp, Probe Sequence
aggggtaggaaggtgctgtgggctg

SEQ ID NO: 136065 - DNA, 25 bp, Probe Sequence
aggtggtcagcgtgtttacggagga

SEQ ID NO: 136066 - DNA, 25 bp, Probe Sequence
aggtagatgaagtcctttacgaaga

SEQ ID NO: 136067 - DNA, 25 bp, Probe Sequence
aggtagaggagacccttcagaagga

SEQ ID NO: 136068 - DNA, 25 bp, Probe Sequence
aggtggaccaacaatttcagagagt

SEQ ID NO: 136069 - DNA, 25 bp, Probe Sequence
agggggctgaactgtgaacaagtca

SEQ ID NO: 136070 - DNA, 25 bp, Probe Sequence
agtggcaggccatatttaacaagtt

SEQ ID NO: 136071 - DNA, 25 bp, Probe Sequence
aggtggcgccttatagtatcaattt

SEQ ID NO: 136072 - DNA, 25 bp, Probe Sequence
aggtggggcttggatcagtaagtct

SEQ ID NO: 136073 - DNA, 25 bp, Probe Sequence
aggtgagggcttaggcagctgtaga

SEQ ID NO: 136074 - DNA, 25 bp, Probe Sequence
aggggaactttgccagcattgatga

SEQ ID NO: 136075 - DNA, 25 bp, Probe Sequence
aggggagacattcaagcaagatttc

SEQ ID NO: 136076 - DNA, 25 bp, Probe Sequence
aggggccaatttatgaaggtctcat

SEQ ID NO: 136077 - DNA, 25 bp, Probe Sequence
aggtgggaattttggaagtatctgc

SEQ ID NO: 136078 - DNA, 25 bp, Probe Sequence
agggggagaccatggaggtgattga

SEQ ID NO: 136079 - DNA, 25 bp, Probe Sequence
aggggacaagtctaggaggtctctg

SEQ ID NO: 136080 - DNA, 25 bp, Probe Sequence
aggtggaaatcctacagcgcgtcat

SEQ ID NO: 136081 - DNA, 25 bp, Probe Sequence
aggtacaaattgtctagctcctttg

SEQ ID NO: 136082 - DNA, 25 bp, Probe Sequence
aggtcatatattttttgctactttt

SEQ ID NO: 136083 - DNA, 25 bp, Probe Sequence
aggtcaacctcacatagcatacttt

SEQ ID NO: 136084 - DNA, 25 bp, Probe Sequence
agggcaaccattctaaatccttggt

SEQ ID NO: 136085 - DNA, 25 bp, Probe Sequence
agggcaaaagctctccatatcccat

SEQ ID NO: 136086 - DNA, 25 bp, Probe Sequence
agggcagcaaacatccttgttctga

SEQ ID NO: 136087 - DNA, 25 bp, Probe Sequence
agggcacaaaatattggtctgagaa

SEQ ID NO: 136088 - DNA, 25 bp, Probe Sequence
agggctgaggatttttggtccgcac

SEQ ID NO: 136089 - DNA, 25 bp, Probe Sequence
aggggagaaacctgagtctcagagc

SEQ ID NO: 136090 - DNA, 25 bp, Probe Sequence
aggggagggaccagcaaatctgaga

SEQ ID NO: 136091 - DNA, 25 bp, Probe Sequence
agggtacgagaacttgccaatggga

SEQ ID NO: 136092 - DNA, 25 bp, Probe Sequence
agaggtagtggagcttccaccgtca

SEQ ID NO: 136093 - DNA, 25 bp, Probe Sequence
agtcgtgagggaggcgtcgacggcg

SEQ ID NO: 136094 - DNA, 25 bp, Probe Sequence
aggtgtgagggaggagacgtgaggc

SEQ ID NO: 136095 - DNA, 25 bp, Probe Sequence
aggtgctgacggacacgtcgtacac

SEQ ID NO: 136096 - DNA, 25 bp, Probe Sequence
aggtgagattgccatccgtgtgttc

SEQ ID NO: 136097 - DNA, 25 bp, Probe Sequence
aggtgcaggtcagcacgttgctgtc

SEQ ID NO: 136098 - DNA, 25 bp, Probe Sequence
aggtcacagatagagccttctgtgt

SEQ ID NO: 136099 - DNA, 25 bp, Probe Sequence
agtaacagtgcagattccacgttct

SEQ ID NO: 136100 - DNA, 25 bp, Probe Sequence
agtgaaggctcagactgctccaaac

SEQ ID NO: 136101 - DNA, 25 bp, Probe Sequence
agggaggctgcagaggtcactccac

SEQ ID NO: 136102 - DNA, 25 bp, Probe Sequence
agtgtgagcttagacgtcaacccta

SEQ ID NO: 136103 - DNA, 25 bp, Probe Sequence
aggtgatgtgtaggaagcccagccc

SEQ ID NO: 136104 - DNA, 25 bp, Probe Sequence
agtggtgttagggggcacacctgtg

SEQ ID NO: 136105 - DNA, 25 bp, Probe Sequence
agggcatttagaggaagaaggctga

SEQ ID NO: 136106 - DNA, 25 bp, Probe Sequence
aggtgttataagcaatctagagatg

SEQ ID NO: 136107 - DNA, 25 bp, Probe Sequence
agggtacatgggcaacattgtgcag

SEQ ID NO: 136108 - DNA, 25 bp, Probe Sequence
agggaacgggaatcaggctgggact

SEQ ID NO: 136109 - DNA, 25 bp, Probe Sequence
agggtctgcagggaaatggtcggga

SEQ ID NO: 136110 - DNA, 25 bp, Probe Sequence
aggtgtctcggatagtgggctctgt

SEQ ID NO: 136111 - DNA, 25 bp, Probe Sequence
aggtgtttgcgattaagctttgttg

SEQ ID NO: 136112 - DNA, 25 bp, Probe Sequence
aggtctttgaaatatgcatgtactt

SEQ ID NO: 136113 - DNA, 25 bp, Probe Sequence
aggtctttgaaatatgcatgtactt

SEQ ID NO: 136114 - DNA, 25 bp, Probe Sequence
agggctttacaataatggctcgtct

SEQ ID NO: 136115 - DNA, 25 bp, Probe Sequence
aggggttgaggtgactggccagtat

SEQ ID NO: 136116 - DNA, 25 bp, Probe Sequence
aggggtatgaaggccagccccaggt

SEQ ID NO: 136117 - DNA, 25 bp, Probe Sequence
agtgggaaacaggcactggctccag

SEQ ID NO: 136118 - DNA, 25 bp, Probe Sequence
aggtgaatttatagcactgaatgcc

SEQ ID NO: 136119 - DNA, 25 bp, Probe Sequence
aggtaactgtgctcacgaacagccc

SEQ ID NO: 136120 - DNA, 25 bp, Probe Sequence
aggtgacctgcttggatctagacag

SEQ ID NO: 136121 - DNA, 25 bp, Probe Sequence
aggtgacaagcacgatgacctccag

SEQ ID NO: 136122 - DNA, 25 bp, Probe Sequence
aggtgaacagcaagcaacgctatgc

SEQ ID NO: 136123 - DNA, 25 bp, Probe Sequence
aggtgcatcgccagcatttcgatcc

SEQ ID NO: 136124 - DNA, 25 bp, Probe Sequence
agggatcgcgattgcgaatcctccg

SEQ ID NO: 136125 - DNA, 25 bp, Probe Sequence
aggtagcaggattgcaggaccctct

SEQ ID NO: 136126 - DNA, 25 bp, Probe Sequence
aggtcacagatcaacaggatcccaa

SEQ ID NO: 136127 - DNA, 25 bp, Probe Sequence
aggtccagcagctacatttacacat

SEQ ID NO: 136128 - DNA, 25 bp, Probe Sequence
agtgctgatgagctccttctaactg

SEQ ID NO: 136129 - DNA, 25 bp, Probe Sequence
aggtgaatttccatgtcaacatagt

SEQ ID NO: 136130 - DNA, 25 bp, Probe Sequence
aggtggatttgggctgtaacttctt

SEQ ID NO: 136131 - DNA, 25 bp, Probe Sequence
aggtggtgttgggtgagtacaacct

SEQ ID NO: 136132 - DNA, 25 bp, Probe Sequence
agggtgttgtccctgacaaccatcc

SEQ ID NO: 136133 - DNA, 25 bp, Probe Sequence
aggtgctttactgttcacctgcatc

SEQ ID NO: 136134 - DNA, 25 bp, Probe Sequence
aggtgcatttaatcagacctgcatt

SEQ ID NO: 136135 - DNA, 25 bp, Probe Sequence
aggtgttctaagggatctcatctaa

SEQ ID NO: 136136 - DNA, 25 bp, Probe Sequence
aggtgattcatgttgggcatgtact

SEQ ID NO: 136137 - DNA, 25 bp, Probe Sequence
aggtgaagagtgcgacattgacata

SEQ ID NO: 136138 - DNA, 25 bp, Probe Sequence
agggaagctggacactagaacacgc

SEQ ID NO: 136139 - DNA, 25 bp, Probe Sequence
agtggacagtgggaattaactctcc

SEQ ID NO: 136140 - DNA, 25 bp, Probe Sequence
agtgggttggctgattccattcttc

SEQ ID NO: 136141 - DNA, 25 bp, Probe Sequence
aggtggactggagcaattcttcttc

SEQ ID NO: 136142 - DNA, 25 bp, Probe Sequence
aggtggactggagcaattcttcttc

SEQ ID NO: 136143 - DNA, 25 bp, Probe Sequence
aggtcacactgacagaatttctggt

SEQ ID NO: 136144 - DNA, 25 bp, Probe Sequence
aggtccttgacttgatgaatttggt

SEQ ID NO: 136145 - DNA, 25 bp, Probe Sequence
aggtcacaggcagcgtacatacggt

SEQ ID NO: 136146 - DNA, 25 bp, Probe Sequence
agggatgctagtgagtccaagtggt

SEQ ID NO: 136147 - DNA, 25 bp, Probe Sequence
aggtgtctgagatggtgcacaaagc

SEQ ID NO: 136148 - DNA, 25 bp, Probe Sequence
aggtgtcatggactgttgccaccat

SEQ ID NO: 136149 - DNA, 25 bp, Probe Sequence
aggtgtgtgtgaactgggcacagat

SEQ ID NO: 136150 - DNA, 25 bp, Probe Sequence
aggtgtgggcagttgggcaagcacc

SEQ ID NO: 136151 - DNA, 25 bp, Probe Sequence
agggagcaggctatgggaagacgga

SEQ ID NO: 136152 - DNA, 25 bp, Probe Sequence
agggagggtatgctaacgacagaac

SEQ ID NO: 136153 - DNA, 25 bp, Probe Sequence
agggacaggtttctccctggatact

SEQ ID NO: 136154 - DNA, 25 bp, Probe Sequence
agggagtggtttcttgagctgttat

SEQ ID NO: 136155 - DNA, 25 bp, Probe Sequence
agtggacttgggatttgtggtgtaa

SEQ ID NO: 136156 - DNA, 25 bp, Probe Sequence
aggtctcattcggtgttttgggaag

SEQ ID NO: 136157 - DNA, 25 bp, Probe Sequence
aggtcgtgtctgatgtatttgagga

SEQ ID NO: 136158 - DNA, 25 bp, Probe Sequence
aggtcatgttccatatatgttatac

SEQ ID NO: 136159 - DNA, 25 bp, Probe Sequence
agggattccctaatatgtatactat

SEQ ID NO: 136160 - DNA, 25 bp, Probe Sequence
aggtcatcccttactaatcattata

SEQ ID NO: 136161 - DNA, 25 bp, Probe Sequence
aggtcaagacataaagcaatcattt

SEQ ID NO: 136162 - DNA, 25 bp, Probe Sequence
agtacaggaaccagcctcatttgat

SEQ ID NO: 136163 - DNA, 25 bp, Probe Sequence
agtgatagtcaacagggtcttcgtg

SEQ ID NO: 136164 - DNA, 25 bp, Probe Sequence
agtgtgagtgggaatgtggttttgg

SEQ ID NO: 136165 - DNA, 25 bp, Probe Sequence
agatggcttgggagttgttgggttc

SEQ ID NO: 136166 - DNA, 25 bp, Probe Sequence
agtgactgggagtgtttccgtcgct

SEQ ID NO: 136167 - DNA, 25 bp, Probe Sequence
agcggcggaagaaacttgccgaact

SEQ ID NO: 136168 - DNA, 25 bp, Probe Sequence
acgatgcctggagttactgtaaaag

SEQ ID NO: 136169 - DNA, 25 bp, Probe Sequence
aggtgctctgaagtgtcctaaatat

SEQ ID NO: 136170 - DNA, 25 bp, Probe Sequence
agggagtgcacagtgctccagaaat

SEQ ID NO: 136171 - DNA, 25 bp, Probe Sequence
aggtgatccacaaggctcagataag

SEQ ID NO: 136172 - DNA, 25 bp, Probe Sequence
aggtgccagccaaagacagcagcat

SEQ ID NO: 136173 - DNA, 25 bp, Probe Sequence
aggtcacccaattgacaggtttctc

SEQ ID NO: 136174 - DNA, 25 bp, Probe Sequence
aggtgacactatagaacaagtttgt

SEQ ID NO: 136175 - DNA, 25 bp, Probe Sequence
aggtgacactatagaacaagtttgt

SEQ ID NO: 136176 - DNA, 25 bp, Probe Sequence
aggtgacactatagatactaagttt

SEQ ID NO: 136177 - DNA, 25 bp, Probe Sequence
aggtgaactgtgcatcctgagacct

SEQ ID NO: 136178 - DNA, 25 bp, Probe Sequence
agtgtaaatctgtatctcaaaccca

SEQ ID NO: 136179 - DNA, 25 bp, Probe Sequence
agggaaatcttattgcgttatcata

SEQ ID NO: 136180 - DNA, 25 bp, Probe Sequence
aggtgacagcttcatgtgtgttatt

SEQ ID NO: 136181 - DNA, 25 bp, Probe Sequence
agtgtaagctgcatagttgtactgt

SEQ ID NO: 136182 - DNA, 25 bp, Probe Sequence
agtagagacggggtttcactgtggt

SEQ ID NO: 136183 - DNA, 25 bp, Probe Sequence
actaaattggccggttgccgtggct

SEQ ID NO: 136184 - DNA, 25 bp, Probe Sequence
agtaactcgtggtgttgccatggcg

SEQ ID NO: 136185 - DNA, 25 bp, Probe Sequence
agtaacacgctgaaggggcttggtg

SEQ ID NO: 136186 - DNA, 25 bp, Probe Sequence
agggaccctggatggatgtagggca

SEQ ID NO: 136187 - DNA, 25 bp, Probe Sequence
agggcagagcctgataggttgtgcg

SEQ ID NO: 136188 - DNA, 25 bp, Probe Sequence
aggtgagccctcatagggagatcca

SEQ ID NO: 136189 - DNA, 25 bp, Probe Sequence
aggtcaccctagctgagcaggaccc

SEQ ID NO: 136190 - DNA, 25 bp, Probe Sequence
agggacgtgcttttgagcaggaccc

SEQ ID NO: 136191 - DNA, 25 bp, Probe Sequence
agggcaggtttctggagactccctt

SEQ ID NO: 136192 - DNA, 25 bp, Probe Sequence
aggggatgtagtttgtacccaccat

SEQ ID NO: 136193 - DNA, 25 bp, Probe Sequence
agggggtcagttatcatgtccctga

SEQ ID NO: 136194 - DNA, 25 bp, Probe Sequence
agggctgtgggataatttaccatga

SEQ ID NO: 136195 - DNA, 25 bp, Probe Sequence
aggtgagggtctccacatttactta

SEQ ID NO: 136196 - DNA, 25 bp, Probe Sequence
agggcagaggcctgcagtttggctt

SEQ ID NO: 136197 - DNA, 25 bp, Probe Sequence
aggtgctagtgtatgagttgttgtt

SEQ ID NO: 136198 - DNA, 25 bp, Probe Sequence
aggtctcagtggatgagggctggct

SEQ ID NO: 136199 - DNA, 25 bp, Probe Sequence
agtgatcttggtagtatccctggct

SEQ ID NO: 136200 - DNA, 25 bp, Probe Sequence
agtgatcttggtagtatccctggct

SEQ ID NO: 136201 - DNA, 25 bp, Probe Sequence
agcttttggctacagcctcatcgaa

SEQ ID NO: 136202 - DNA, 25 bp, Probe Sequence
agtgtttgtcgacagttcccaacag

SEQ ID NO: 136203 - DNA, 25 bp, Probe Sequence
agtcttccacaataattcccaactc

SEQ ID NO: 136204 - DNA, 25 bp, Probe Sequence
aggtctccatcaaaaactgccacca

SEQ ID NO: 136205 - DNA, 25 bp, Probe Sequence
aggtctctgaggacaaactcactca

SEQ ID NO: 136206 - DNA, 25 bp, Probe Sequence
aggtcttaggggtgtcatgctgttt

SEQ ID NO: 136207 - DNA, 25 bp, Probe Sequence
aggtctatgatagagccgagctcgt

SEQ ID NO: 136208 - DNA, 25 bp, Probe Sequence
aggtctatataagcggagctcgctt

SEQ ID NO: 136209 - DNA, 25 bp, Probe Sequence
aggtgtaacaaagcgactcttgcat

SEQ ID NO: 136210 - DNA, 25 bp, Probe Sequence
agggtgttaggagagagctttgcat

SEQ ID NO: 136211 - DNA, 25 bp, Probe Sequence
agggattacagtgggggcatttctt

SEQ ID NO: 136212 - DNA, 25 bp, Probe Sequence
agggaaaaatcacgctgtgttcttt

SEQ ID NO: 136213 - DNA, 25 bp, Probe Sequence
agggaacaaatgtgatctgaccaca

SEQ ID NO: 136214 - DNA, 25 bp, Probe Sequence
agggaagagatttctgattatacag

SEQ ID NO: 136215 - DNA, 25 bp, Probe Sequence
agggtcgaaggtggatttagcagta

SEQ ID NO: 136216 - DNA, 25 bp, Probe Sequence
agggatggtaggatgctctttgact

SEQ ID NO: 136217 - DNA, 25 bp, Probe Sequence
aggtgggtaggcccattgattcagc

SEQ ID NO: 136218 - DNA, 25 bp, Probe Sequence
aggtgcgttatctcagcttcttcag

SEQ ID NO: 136219 - DNA, 25 bp, Probe Sequence
agggcttgacaaagagttattagca

SEQ ID NO: 136220 - DNA, 25 bp, Probe Sequence
aggggtcactatggagttcaaagga

SEQ ID NO: 136221 - DNA, 25 bp, Probe Sequence
agtgtgtgtactgcagggaaaagga

SEQ ID NO: 136222 - DNA, 25 bp, Probe Sequence
agtggttcactcccagggaatttga

SEQ ID NO: 136223 - DNA, 25 bp, Probe Sequence
agtggtttcatcaatcatgcctatt

SEQ ID NO: 136224 - DNA, 25 bp, Probe Sequence
aggtgttatacttactgcatatttc

SEQ ID NO: 136225 - DNA, 25 bp, Probe Sequence
aggtgctatttttttcagtgcttac

SEQ ID NO: 136226 - DNA, 25 bp, Probe Sequence
aggtgctatttttttcagtgcttac

SEQ ID NO: 136227 - DNA, 25 bp, Probe Sequence
aggtgctatttttttcagtgcttac

SEQ ID NO: 136228 - DNA, 25 bp, Probe Sequence
aggtgcttgctttttttgtcagtaa

SEQ ID NO: 136229 - DNA, 25 bp, Probe Sequence
aggtgttgcattttttggagcaaaa

SEQ ID NO: 136230 - DNA, 25 bp, Probe Sequence
aggtgactattgttttgtacatcta

SEQ ID NO: 136231 - DNA, 25 bp, Probe Sequence
agggcctatttaggtgacactatag

SEQ ID NO: 136232 - DNA, 25 bp, Probe Sequence
agggcagtacctgagggtctgtagg

SEQ ID NO: 136233 - DNA, 25 bp, Probe Sequence
agtgcctgaagccctagagttttag

SEQ ID NO: 136234 - DNA, 25 bp, Probe Sequence
aggtctgaagccttagagtgtgtgt

SEQ ID NO: 136235 - DNA, 25 bp, Probe Sequence
aggtctgagagtctgggtgtgtgga

SEQ ID NO: 136236 - DNA, 25 bp, Probe Sequence
aggtgtgaggtccagggttgctagg

SEQ ID NO: 136237 - DNA, 25 bp, Probe Sequence
aggtggctgaggcaccagggctaag

SEQ ID NO: 136238 - DNA, 25 bp, Probe Sequence
aggtgggaggatcgcttgagcctaa

SEQ ID NO: 136239 - DNA, 25 bp, Probe Sequence
aggtgggagggtcatgacgcagcga

SEQ ID NO: 136240 - DNA, 25 bp, Probe Sequence
aggtgtgggtgtacacaggcgcgtc

SEQ ID NO: 136241 - DNA, 25 bp, Probe Sequence
aggtgcatggtgggatactggggct

SEQ ID NO: 136242 - DNA, 25 bp, Probe Sequence
agggagctgctgggaaatgtggacc

SEQ ID NO: 136243 - DNA, 25 bp, Probe Sequence
aggtgtgatgctggttatactggac

SEQ ID NO: 136244 - DNA, 25 bp, Probe Sequence
aggtctgagttttaacatcacttct

SEQ ID NO: 136245 - DNA, 25 bp, Probe Sequence
agggctctttcttatacacactgcc

SEQ ID NO: 136246 - DNA, 25 bp, Probe Sequence
agggcactcagggacatgaacagta

SEQ ID NO: 136247 - DNA, 25 bp, Probe Sequence
agtgacccagggcctgacaaaaata

SEQ ID NO: 136248 - DNA, 25 bp, Probe Sequence
agtaaccatggacgtcagaagacta

SEQ ID NO: 136249 - DNA, 25 bp, Probe Sequence
agtaaccatggacacggcaaagctg

SEQ ID NO: 136250 - DNA, 25 bp, Probe Sequence
agttggcctatacccggcaaattat

SEQ ID NO: 136251 - DNA, 25 bp, Probe Sequence
agaaggcctatgtggaggccaacca

SEQ ID NO: 136252 - DNA, 25 bp, Probe Sequence
aggggccttgctgagtggcgcaagg

SEQ ID NO: 136253 - DNA, 25 bp, Probe Sequence
agggcagcaactgcgagctggctaa

SEQ ID NO: 136254 - DNA, 25 bp, Probe Sequence
aggtgccatatggccatgactaccc

SEQ ID NO: 136255 - DNA, 25 bp, Probe Sequence
agggcacatctggagttcttctcca

SEQ ID NO: 136256 - DNA, 25 bp, Probe Sequence
agggcacatctggagttcttctcca

SEQ ID NO: 136257 - DNA, 25 bp, Probe Sequence
agggcacatctggagttcttctcca

SEQ ID NO: 136258 - DNA, 25 bp, Probe Sequence
agggcatttgtatttccctcacaat

SEQ ID NO: 136259 - DNA, 25 bp, Probe Sequence
aggtgattttgatccacaataacat

SEQ ID NO: 136260 - DNA, 25 bp, Probe Sequence
agggactttgcaacctacagactct

SEQ ID NO: 136261 - DNA, 25 bp, Probe Sequence
aggtgactagctatactccaacttt

SEQ ID NO: 136262 - DNA, 25 bp, Probe Sequence
agggagaagagttactgaagacttt

SEQ ID NO: 136263 - DNA, 25 bp, Probe Sequence
agggataaggccttctgtactttgc

SEQ ID NO: 136264 - DNA, 25 bp, Probe Sequence
aggtgtgcagggtcactctgtgact

SEQ ID NO: 136265 - DNA, 25 bp, Probe Sequence
aggtgtcaatggacttgtgctacta

SEQ ID NO: 136266 - DNA, 25 bp, Probe Sequence
aggtgtttggcatcgatgctctcac

SEQ ID NO: 136267 - DNA, 25 bp, Probe Sequence
aggtgacttccatcaagctatacat

SEQ ID NO: 136268 - DNA, 25 bp, Probe Sequence
aggtgattcgaattgcacagctcat

SEQ ID NO: 136269 - DNA, 25 bp, Probe Sequence
agggtaccagcaggcagagccttgc

SEQ ID NO: 136270 - DNA, 25 bp, Probe Sequence
aggtcccagagaagcgagccttgtc

SEQ ID NO: 136271 - DNA, 25 bp, Probe Sequence
agtgtcccagcacttatagcctaac

SEQ ID NO: 136272 - DNA, 25 bp, Probe Sequence
agggcccagagcctacatggccaaa

SEQ ID NO: 136273 - DNA, 25 bp, Probe Sequence
agagtgcaaccagtgtaaggcccca

SEQ ID NO: 136274 - DNA, 25 bp, Probe Sequence
agagtgcaaccagtgtaaggcccca

SEQ ID NO: 136275 - DNA, 25 bp, Probe Sequence
agagtatcactgggaataggccccc

SEQ ID NO: 136276 - DNA, 25 bp, Probe Sequence
agtgtatcaatgccaagtacgcccc

SEQ ID NO: 136277 - DNA, 25 bp, Probe Sequence
agggacagtgcctttaaccaagcga

SEQ ID NO: 136278 - DNA, 25 bp, Probe Sequence
agggctcgaccacttcaacaaagcc

SEQ ID NO: 136279 - DNA, 25 bp, Probe Sequence
agggcctgaggacaggtcacagcag

SEQ ID NO: 136280 - DNA, 25 bp, Probe Sequence
agggcgcaagagtagcggtccaagc

SEQ ID NO: 136281 - DNA, 25 bp, Probe Sequence
agggcgcatatggaacggctctcag

SEQ ID NO: 136282 - DNA, 25 bp, Probe Sequence
aggggaaggagacgctgcttcacct

SEQ ID NO: 136283 - DNA, 25 bp, Probe Sequence
aggggagggcagaggcctgcagttt

SEQ ID NO: 136284 - DNA, 25 bp, Probe Sequence
aggggaacggggacatctcatgttt

SEQ ID NO: 136285 - DNA, 25 bp, Probe Sequence
aggggcagtggtggttttctgttct

SEQ ID NO: 136286 - DNA, 25 bp, Probe Sequence
aggggcagccgtgcttatattttta

SEQ ID NO: 136287 - DNA, 25 bp, Probe Sequence
aggtggagactaacttattttgatt

SEQ ID NO: 136288 - DNA, 25 bp, Probe Sequence
aggtggtccataaggtcgtgtctga

SEQ ID NO: 136289 - DNA, 25 bp, Probe Sequence
aggtcctagccaatggtctggacaa

SEQ ID NO: 136290 - DNA, 25 bp, Probe Sequence
aggtcctgcaggaagaaatcggcaa

SEQ ID NO: 136291 - DNA, 25 bp, Probe Sequence
aggtcccattacaaagcatggtgaa

SEQ ID NO: 136292 - DNA, 25 bp, Probe Sequence
aggtccggaagcaaatcgagtccat

SEQ ID NO: 136293 - DNA, 25 bp, Probe Sequence
aggtccggaagcaaatcgagtccat

SEQ ID NO: 136294 - DNA, 25 bp, Probe Sequence
aggtggggatagaacatctttcaca

SEQ ID NO: 136295 - DNA, 25 bp, Probe Sequence
aggtggggacacaactcttaccagt

SEQ ID NO: 136296 - DNA, 25 bp, Probe Sequence
aggtggggaacaatccttgccagag

SEQ ID NO: 136297 - DNA, 25 bp, Probe Sequence
aggtggggaacaatccttgccagag

SEQ ID NO: 136298 - DNA, 25 bp, Probe Sequence
aggtggggaacaatccttgccagag

SEQ ID NO: 136299 - DNA, 25 bp, Probe Sequence
aggtggggaacaatccttgccagag

SEQ ID NO: 136300 - DNA, 25 bp, Probe Sequence
aggtgtgggaaaaacttgatctgaa

SEQ ID NO: 136301 - DNA, 25 bp, Probe Sequence
agtggtgggaaacccttatcttgca

SEQ ID NO: 136302 - DNA, 25 bp, Probe Sequence
agggtgggaagcttgctggcttctg

SEQ ID NO: 136303 - DNA, 25 bp, Probe Sequence
agggagatggaggcatcatgtctgt

SEQ ID NO: 136304 - DNA, 25 bp, Probe Sequence
aggtgaatgaagcttttgctcccca

SEQ ID NO: 136305 - DNA, 25 bp, Probe Sequence
aggtgttgtgagcttttgctgtaag

SEQ ID NO: 136306 - DNA, 25 bp, Probe Sequence
aggtgtggatagccatttctgctca

SEQ ID NO: 136307 - DNA, 25 bp, Probe Sequence
agggatcggagccatcatcgcgcca

SEQ ID NO: 136308 - DNA, 25 bp, Probe Sequence
agggatcggagccatcatcgcgcca

SEQ ID NO: 136309 - DNA, 25 bp, Probe Sequence
agggacggaaacatcagcaccaaag

SEQ ID NO: 136310 - DNA, 25 bp, Probe Sequence
agggccggaaggatagcctcagcgt

SEQ ID NO: 136311 - DNA, 25 bp, Probe Sequence
aggtgccagctgagcggaaccagcc

SEQ ID NO: 136312 - DNA, 25 bp, Probe Sequence
agggccagatcggggcgcccatgcc

SEQ ID NO: 136313 - DNA, 25 bp, Probe Sequence
agggctcaaggtggtaggctatgct

SEQ ID NO: 136314 - DNA, 25 bp, Probe Sequence
aggtgatcaattcacaaggccatct

SEQ ID NO: 136315 - DNA, 25 bp, Probe Sequence
aggtggcaatgcccgagaggccatc

SEQ ID NO: 136316 - DNA, 25 bp, Probe Sequence
aggtgagcaatgcccatagacctga

SEQ ID NO: 136317 - DNA, 25 bp, Probe Sequence
aggtggaatccgaagtcctgggact

SEQ ID NO: 136318 - DNA, 25 bp, Probe Sequence
aggggagatcatcggaggccgggag

SEQ ID NO: 136319 - DNA, 25 bp, Probe Sequence
aggggactgcatgggaagcacggaa

SEQ ID NO: 136320 - DNA, 25 bp, Probe Sequence
aggtggagcctgcaaacagcaggga

SEQ ID NO: 136321 - DNA, 25 bp, Probe Sequence
agggtgaccaggaaactcagctaga

SEQ ID NO: 136322 - DNA, 25 bp, Probe Sequence
agatcgtacgggactttcccagatg

SEQ ID NO: 136323 - DNA, 25 bp, Probe Sequence
agtcgatatcctggttttggtagtt

SEQ ID NO: 136324 - DNA, 25 bp, Probe Sequence
agtgtcaccttgcgtttgtgaaatt

SEQ ID NO: 136325 - DNA, 25 bp, Probe Sequence
aggtgcaagatctggtgtagtacaa

SEQ ID NO: 136326 - DNA, 25 bp, Probe Sequence
agggcaggcacatgggcataggtaa

SEQ ID NO: 136327 - DNA, 25 bp, Probe Sequence
aggggaggcaagagcatcaagtaaa

SEQ ID NO: 136328 - DNA, 25 bp, Probe Sequence
agggagggagacaagcacaagctga

SEQ ID NO: 136329 - DNA, 25 bp, Probe Sequence
aggggggaacattagctagccagcc

SEQ ID NO: 136330 - DNA, 25 bp, Probe Sequence
agggctcggaggatgagctaccccc

SEQ ID NO: 136331 - DNA, 25 bp, Probe Sequence
aggtggcgggtgatgagctgactgg

SEQ ID NO: 136332 - DNA, 25 bp, Probe Sequence
aggtggggagtgcagcagtcctgcc

SEQ ID NO: 136333 - DNA, 25 bp, Probe Sequence
agagggaagttgggagatgccccca

SEQ ID NO: 136334 - DNA, 25 bp, Probe Sequence
agggtacaggtttgcagattccgcc

SEQ ID NO: 136335 - DNA, 25 bp, Probe Sequence
agggtacagaatagagcgtgtgctg

SEQ ID NO: 136336 - DNA, 25 bp, Probe Sequence
agggtagagagacgctgggtgacct

SEQ ID NO: 136337 - DNA, 25 bp, Probe Sequence
aggggatgtaggcccatgggcacct

SEQ ID NO: 136338 - DNA, 25 bp, Probe Sequence
aggggcatgtattggcctggaggtg

SEQ ID NO: 136339 - DNA, 25 bp, Probe Sequence
agtgggaattttctggaagatggtc

SEQ ID NO: 136340 - DNA, 25 bp, Probe Sequence
agtgcggaatgttgtgtttgcggtg

SEQ ID NO: 136341 - DNA, 25 bp, Probe Sequence
aggtggaagctgttgagttggaggc

SEQ ID NO: 136342 - DNA, 25 bp, Probe Sequence
aggtgagaatgatatggtgcggaat

SEQ ID NO: 136343 - DNA, 25 bp, Probe Sequence
aggtgggatgcagatcttcgtgaag

SEQ ID NO: 136344 - DNA, 25 bp, Probe Sequence
aggtgtggatgctctctatttagcg

SEQ ID NO: 136345 - DNA, 25 bp, Probe Sequence
aggtgtggatgctctctatttagcg

SEQ ID NO: 136346 - DNA, 25 bp, Probe Sequence
aggtgtgcaggatctctttaacagt

SEQ ID NO: 136347 - DNA, 25 bp, Probe Sequence
aggtgtcgagatttgctttgaactt

SEQ ID NO: 136348 - DNA, 25 bp, Probe Sequence
agggtgagaatccttttgaaattca

SEQ ID NO: 136349 - DNA, 25 bp, Probe Sequence
agggctagacagctcagttcaccat

SEQ ID NO: 136350 - DNA, 25 bp, Probe Sequence
agggctgaaagcacaggtggcatat

SEQ ID NO: 136351 - DNA, 25 bp, Probe Sequence
agggctgataccaggggtcctggca

SEQ ID NO: 136352 - DNA, 25 bp, Probe Sequence
agggctatcctgggggtgaacttga

SEQ ID NO: 136353 - DNA, 25 bp, Probe Sequence
agggcttgccatgaaaatgcaactt

SEQ ID NO: 136354 - DNA, 25 bp, Probe Sequence
agggctgtcagatataagtaactta

SEQ ID NO: 136355 - DNA, 25 bp, Probe Sequence
agggctgtcagatataagtaactta

SEQ ID NO: 136356 - DNA, 25 bp, Probe Sequence
agggcagctagctgtagaaagagct

SEQ ID NO: 136357 - DNA, 25 bp, Probe Sequence
aggtgcagtcaccgaaagagagcgc

SEQ ID NO: 136358 - DNA, 25 bp, Probe Sequence
aggtgttcatcctataagaagcagg

SEQ ID NO: 136359 - DNA, 25 bp, Probe Sequence
aggtgattcacctgttcaagatttc

SEQ ID NO: 136360 - DNA, 25 bp, Probe Sequence
aggtgattcacctgttcaagatatt

SEQ ID NO: 136361 - DNA, 25 bp, Probe Sequence
aggtgtctaccatgattattttttt

SEQ ID NO: 136362 - DNA, 25 bp, Probe Sequence
aggtgatctcgcaaagttattcttc

SEQ ID NO: 136363 - DNA, 25 bp, Probe Sequence
agtgatttcctacagtgttgttccc

SEQ ID NO: 136364 - DNA, 25 bp, Probe Sequence
agtgtttgtctagcatgtttgttta

SEQ ID NO: 136365 - DNA, 25 bp, Probe Sequence
agtcaaggcttctcaatttgtactt

SEQ ID NO: 136366 - DNA, 25 bp, Probe Sequence
agggcaccatctaccaactggtagc

SEQ ID NO: 136367 - DNA, 25 bp, Probe Sequence
agggtactttcttatgctggatcag

SEQ ID NO: 136368 - DNA, 25 bp, Probe Sequence
aggtgtgaatcaacttcttgggcct

SEQ ID NO: 136369 - DNA, 25 bp, Probe Sequence
aggtgaagatcatgctgccctggga

SEQ ID NO: 136370 - DNA, 25 bp, Probe Sequence
agggaagatcatcccagccattgcc

SEQ ID NO: 136371 - DNA, 25 bp, Probe Sequence
agggtgagatcattccaacttcctt

SEQ ID NO: 136372 - DNA, 25 bp, Probe Sequence
aggtgatggtgcaccaggatctccc

SEQ ID NO: 136373 - DNA, 25 bp, Probe Sequence
agggtgaggtcttcatgagtctcct

SEQ ID NO: 136374 - DNA, 25 bp, Probe Sequence
aggtgtagcattacctggtgctcct

SEQ ID NO: 136375 - DNA, 25 bp, Probe Sequence
aggtgtcaatctgctctgaatctct

SEQ ID NO: 136376 - DNA, 25 bp, Probe Sequence
aggtgtaatctgacctgcagacttc

SEQ ID NO: 136377 - DNA, 25 bp, Probe Sequence
agggtaatctggaagagtttcctga

SEQ ID NO: 136378 - DNA, 25 bp, Probe Sequence
agggtaattttgatattgtctctgg

SEQ ID NO: 136379 - DNA, 25 bp, Probe Sequence
agggacacctttgtgaatgcctctc

SEQ ID NO: 136380 - DNA, 25 bp, Probe Sequence
aggggcaccacttttgagtgttctc

SEQ ID NO: 136381 - DNA, 25 bp, Probe Sequence
aggtggatgcattttttgtctgttt

SEQ ID NO: 136382 - DNA, 25 bp, Probe Sequence
aggtggtcatgattacctgcatgct

SEQ ID NO: 136383 - DNA, 25 bp, Probe Sequence
aggtggtcatgattacctgcatgct

SEQ ID NO: 136384 - DNA, 25 bp, Probe Sequence
agtgtgagtgcatgcatggcccatc

SEQ ID NO: 136385 - DNA, 25 bp, Probe Sequence
agtctgatgctaagatactgcctgc

SEQ ID NO: 136386 - DNA, 25 bp, Probe Sequence
aggtgatgatcaagtgatcttctgc

SEQ ID NO: 136387 - DNA, 25 bp, Probe Sequence
agggaacaggctactgtccttccct

SEQ ID NO: 136388 - DNA, 25 bp, Probe Sequence
agggaacaggctactgtccttccct

SEQ ID NO: 136389 - DNA, 25 bp, Probe Sequence
aaggaacattggagtcacgacccct

SEQ ID NO: 136390 - DNA, 25 bp, Probe Sequence
agggcgacctggaagtccaactact

SEQ ID NO: 136391 - DNA, 25 bp, Probe Sequence
aggggaagatgggagagcgatacat

SEQ ID NO: 136392 - DNA, 25 bp, Probe Sequence
aggggaatggcggagaccacactgg

SEQ ID NO: 136393 - DNA, 25 bp, Probe Sequence
aggggatatgggcagagacagtctc

SEQ ID NO: 136394 - DNA, 25 bp, Probe Sequence
aggggacatgtccaacgtgcagact

SEQ ID NO: 136395 - DNA, 25 bp, Probe Sequence
agggacaaataaatgggcaggtctg

SEQ ID NO: 136396 - DNA, 25 bp, Probe Sequence
agggacagaagtgatccgcgggctg

SEQ ID NO: 136397 - DNA, 25 bp, Probe Sequence
agggcaagaaagactcctgccaggg

SEQ ID NO: 136398 - DNA, 25 bp, Probe Sequence
agggaagaaaagcctgtgtgcaggg

SEQ ID NO: 136399 - DNA, 25 bp, Probe Sequence
agggaagatctttgcctttgacctg

SEQ ID NO: 136400 - DNA, 25 bp, Probe Sequence
agggaagatctttgcctttgacctg

SEQ ID NO: 136401 - DNA, 25 bp, Probe Sequence
agggaagatctttgcctttgacctg

SEQ ID NO: 136402 - DNA, 25 bp, Probe Sequence
agggaacttctacagtgctacgctg

SEQ ID NO: 136403 - DNA, 25 bp, Probe Sequence
aggggcagccttcagaggtactgat

SEQ ID NO: 136404 - DNA, 25 bp, Probe Sequence
agggagcagttacaagggcctgcat

SEQ ID NO: 136405 - DNA, 25 bp, Probe Sequence
agggagtttatctgaggatggctca

SEQ ID NO: 136406 - DNA, 25 bp, Probe Sequence
agtggcactttatagccacggctgc

SEQ ID NO: 136407 - DNA, 25 bp, Probe Sequence
agggcctgggactaccaggcctgca

SEQ ID NO: 136408 - DNA, 25 bp, Probe Sequence
agggctcttggagcagccagaccat

SEQ ID NO: 136409 - DNA, 25 bp, Probe Sequence
agggcatgttctgcaagctcaacca

SEQ ID NO: 136410 - DNA, 25 bp, Probe Sequence
agggctgactgagaactccaggcac

SEQ ID NO: 136411 - DNA, 25 bp, Probe Sequence
agggccaggagtgggtctgcaggcc

SEQ ID NO: 136412 - DNA, 25 bp, Probe Sequence
agggctgaaggtgtgcttcggcatc

SEQ ID NO: 136413 - DNA, 25 bp, Probe Sequence
aggggaaggagtccctgcagtcatc

SEQ ID NO: 136414 - DNA, 25 bp, Probe Sequence
agggtgaatgaggtgaactggtctc

SEQ ID NO: 136415 - DNA, 25 bp, Probe Sequence
aggtggtgagcggtttgcagtgtcc

SEQ ID NO: 136416 - DNA, 25 bp, Probe Sequence
aggtgtggtggcgttatggcagccc

SEQ ID NO: 136417 - DNA, 25 bp, Probe Sequence
agtgtggttgaggtcatctgcgagc

SEQ ID NO: 136418 - DNA, 25 bp, Probe Sequence
aggtgtatgtgtgtactctgcacgt

SEQ ID NO: 136419 - DNA, 25 bp, Probe Sequence
agtggtttggaaacctgccgtcgtg

SEQ ID NO: 136420 - DNA, 25 bp, Probe Sequence
agtggtctttgaagcacctgtggtg

SEQ ID NO: 136421 - DNA, 25 bp, Probe Sequence
agtgtgtctttcagcaccaagtcat

SEQ ID NO: 136422 - DNA, 25 bp, Probe Sequence
aggtgtacttgcctgcgtaagtgag

SEQ ID NO: 136423 - DNA, 25 bp, Probe Sequence
agggagacattcttggaatccaatg

SEQ ID NO: 136424 - DNA, 25 bp, Probe Sequence
aggggcagttcctgaattcaaataa

SEQ ID NO: 136425 - DNA, 25 bp, Probe Sequence
aggggaatcctgattagtcaaaata

SEQ ID NO: 136426 - DNA, 25 bp, Probe Sequence
aggtgttgatagggttcagtaaaat

SEQ ID NO: 136427 - DNA, 25 bp, Probe Sequence
agtggtgtaaagtttctgttcaaga

SEQ ID NO: 136428 - DNA, 25 bp, Probe Sequence
agctttttaactatccagtcaactt

SEQ ID NO: 136429 - DNA, 25 bp, Probe Sequence
aggtgtattgaagtcctccagacaa

SEQ ID NO: 136430 - DNA, 25 bp, Probe Sequence
aggtgtatgtaggttattgcaggaa

SEQ ID NO: 136431 - DNA, 25 bp, Probe Sequence
aggggatgtcagtttcctatggaag

SEQ ID NO: 136432 - DNA, 25 bp, Probe Sequence
aggggatgtcagtttcctatggaag

SEQ ID NO: 136433 - DNA, 25 bp, Probe Sequence
agggtctgacaagttctgctatgaa

SEQ ID NO: 136434 - DNA, 25 bp, Probe Sequence
agggagcacacagctcttcttaaaa

SEQ ID NO: 136435 - DNA, 25 bp, Probe Sequence
agggagcagagcttttccctagcac

SEQ ID NO: 136436 - DNA, 25 bp, Probe Sequence
aggggaagcattttctcctggactc

SEQ ID NO: 136437 - DNA, 25 bp, Probe Sequence
agggagaagtctcattcgtggttga

SEQ ID NO: 136438 - DNA, 25 bp, Probe Sequence
aggggaagcctggatctgtgtgtat

SEQ ID NO: 136439 - DNA, 25 bp, Probe Sequence
aggggatcgcaacatctggatcgtg

SEQ ID NO: 136440 - DNA, 25 bp, Probe Sequence
aggggtccaagcatcaggagcaggc

SEQ ID NO: 136441 - DNA, 25 bp, Probe Sequence
agggtgcatctcctggtcaggaggg

SEQ ID NO: 136442 - DNA, 25 bp, Probe Sequence
agggtatgctgcctctgtaaattca

SEQ ID NO: 136443 - DNA, 25 bp, Probe Sequence
agtggttcagagcctggttatacat

SEQ ID NO: 136444 - DNA, 25 bp, Probe Sequence
agtggttcagagcctggttatacat

SEQ ID NO: 136445 - DNA, 25 bp, Probe Sequence
agggggatgagcatgctgtttatga

SEQ ID NO: 136446 - DNA, 25 bp, Probe Sequence
agggacagttgcatttgttgagact

SEQ ID NO: 136447 - DNA, 25 bp, Probe Sequence
agggagatgttggtcactgggtgaa

SEQ ID NO: 136448 - DNA, 25 bp, Probe Sequence
agggatcttgttgcattgggagcag

SEQ ID NO: 136449 - DNA, 25 bp, Probe Sequence
agggtcatatttgctttctaggagg

SEQ ID NO: 136450 - DNA, 25 bp, Probe Sequence
agtggttgtttcccttgcatgggac

SEQ ID NO: 136451 - DNA, 25 bp, Probe Sequence
agtggtggttatggtcctagaggtg

SEQ ID NO: 136452 - DNA, 25 bp, Probe Sequence
agtggtgtcttatgctaaacggtgg

SEQ ID NO: 136453 - DNA, 25 bp, Probe Sequence
aggtgtgtattatgatgaaagctgc

SEQ ID NO: 136454 - DNA, 25 bp, Probe Sequence
aggtggctattatctgcagctcact

SEQ ID NO: 136455 - DNA, 25 bp, Probe Sequence
aggtggctgaccagcagagcacact

SEQ ID NO: 136456 - DNA, 25 bp, Probe Sequence
agtgtgagcatttaagaagcatcct

SEQ ID NO: 136457 - DNA, 25 bp, Probe Sequence
agggatgtttacgagagcctctgtc

SEQ ID NO: 136458 - DNA, 25 bp, Probe Sequence
agggactcttaggagagcccgtgtg

SEQ ID NO: 136459 - DNA, 25 bp, Probe Sequence
agggtctcaagacagtgccctgtgg

SEQ ID NO: 136460 - DNA, 25 bp, Probe Sequence
agggtatctgcatgaaggctcctgt

SEQ ID NO: 136461 - DNA, 25 bp, Probe Sequence
aggtggcagatgttaacgcccttcc

SEQ ID NO: 136462 - DNA, 25 bp, Probe Sequence
aggtgtgcagggtgactgtcgttcc

SEQ ID NO: 136463 - DNA, 25 bp, Probe Sequence
aggtgtggccagtagaagctctttc

SEQ ID NO: 136464 - DNA, 25 bp, Probe Sequence
aggggcccagtaaagtgcatttgac

SEQ ID NO: 136465 - DNA, 25 bp, Probe Sequence
aggggctccagaaagaatcttacac

SEQ ID NO: 136466 - DNA, 25 bp, Probe Sequence
aggggctgctgagctagaattccca

SEQ ID NO: 136467 - DNA, 25 bp, Probe Sequence
agtggagcctgcggcttaatttgac

SEQ ID NO: 136468 - DNA, 25 bp, Probe Sequence
agtggagcctttctgacaattgcca

SEQ ID NO: 136469 - DNA, 25 bp, Probe Sequence
aggggagctgtactgcgaaacccac

SEQ ID NO: 136470 - DNA, 25 bp, Probe Sequence
aggggacctgtaggcagaactgccc

SEQ ID NO: 136471 - DNA, 25 bp, Probe Sequence
aggggacgaggagcgaacactgcac

SEQ ID NO: 136472 - DNA, 25 bp, Probe Sequence
aggggacgaggagcgaacactgcac

SEQ ID NO: 136473 - DNA, 25 bp, Probe Sequence
aggtggacgtgaaaagaaatctcac

SEQ ID NO: 136474 - DNA, 25 bp, Probe Sequence
aggtggagtatagaagaatatcctt

SEQ ID NO: 136475 - DNA, 25 bp, Probe Sequence
agtggaatgttaataaatttcagtt

SEQ ID NO: 136476 - DNA, 25 bp, Probe Sequence
agggttgattatgctgcaatttagc

SEQ ID NO: 136477 - DNA, 25 bp, Probe Sequence
agggtgtattatgcctgctctgaac

SEQ ID NO: 136478 - DNA, 25 bp, Probe Sequence
agggtgaatttgacctctctgactg

SEQ ID NO: 136479 - DNA, 25 bp, Probe Sequence
agtggtttatgtaccatcccatctc

SEQ ID NO: 136480 - DNA, 25 bp, Probe Sequence
agggctgtggagaaactccctcatg

SEQ ID NO: 136481 - DNA, 25 bp, Probe Sequence
aggggtgtggcaacactcattcttc

SEQ ID NO: 136482 - DNA, 25 bp, Probe Sequence
aggtggatgatgccagagctctcct

SEQ ID NO: 136483 - DNA, 25 bp, Probe Sequence
aggggatatctcttgctcttatcca

SEQ ID NO: 136484 - DNA, 25 bp, Probe Sequence
agggggcagtcttgctttattcatc

SEQ ID NO: 136485 - DNA, 25 bp, Probe Sequence
agtcctggagtcacgttgataccga

SEQ ID NO: 136486 - DNA, 25 bp, Probe Sequence
agtgccgggttggcagttaactctt

SEQ ID NO: 136487 - DNA, 25 bp, Probe Sequence
agtggaggtttgtgttatgagaatt

SEQ ID NO: 136488 - DNA, 25 bp, Probe Sequence
agggaggatttgagctcataggaac

SEQ ID NO: 136489 - DNA, 25 bp, Probe Sequence
aggggagttgatagtctcataaaac

SEQ ID NO: 136490 - DNA, 25 bp, Probe Sequence
agggatattgtgtcaggcctgaaat

SEQ ID NO: 136491 - DNA, 25 bp, Probe Sequence
aggggattgtgacttgcctgaattc

SEQ ID NO: 136492 - DNA, 25 bp, Probe Sequence
aggtggagtatgcctttccagtatc

SEQ ID NO: 136493 - DNA, 25 bp, Probe Sequence
agggagcagttgctcactcttgtcc

SEQ ID NO: 136494 - DNA, 25 bp, Probe Sequence
agggagagattcctgcactatgcgt

SEQ ID NO: 136495 - DNA, 25 bp, Probe Sequence
agggctgcaattcaaccatgatttg

SEQ ID NO: 136496 - DNA, 25 bp, Probe Sequence
agggcagaacactaacctgaccgtg

SEQ ID NO: 136497 - DNA, 25 bp, Probe Sequence
agggagaacctaatgctcagaccta

SEQ ID NO: 136498 - DNA, 25 bp, Probe Sequence
agtgtagcaaccatctgctcacagc

SEQ ID NO: 136499 - DNA, 25 bp, Probe Sequence
agtgataaaccatctgctcatcgta

SEQ ID NO: 136500 - DNA, 25 bp, Probe Sequence
agggatcatatccacaagtgctcgt

SEQ ID NO: 136501 - DNA, 25 bp, Probe Sequence
agtggacatacggaggaggtggcct

SEQ ID NO: 136502 - DNA, 25 bp, Probe Sequence
agtgtaaaccgcatggatgggcttc

SEQ ID NO: 136503 - DNA, 25 bp, Probe Sequence
agtgatgaaaacctaacagggtggc

SEQ ID NO: 136504 - DNA, 25 bp, Probe Sequence
agtgtaaaaagcttgacctggggca

SEQ ID NO: 136505 - DNA, 25 bp, Probe Sequence
agtataaaatgcgtgaacccgggag

SEQ ID NO: 136506 - DNA, 25 bp, Probe Sequence
agtgtacaaatctggggcaaagctg

SEQ ID NO: 136507 - DNA, 25 bp, Probe Sequence
agtggataattttgtggccttagct

SEQ ID NO: 136508 - DNA, 25 bp, Probe Sequence
agtggggcatctgttggactttcca

SEQ ID NO: 136509 - DNA, 25 bp, Probe Sequence
agtggggcatctgttggactttcca

SEQ ID NO: 136510 - DNA, 25 bp, Probe Sequence
agtggggcatctgttggactttcca

SEQ ID NO: 136511 - DNA, 25 bp, Probe Sequence
agtggggctggtttttcatttccat

SEQ ID NO: 136512 - DNA, 25 bp, Probe Sequence
aggggggagatttttatatatatat

SEQ ID NO: 136513 - DNA, 25 bp, Probe Sequence
agggagaggaagacattttgaattt

SEQ ID NO: 136514 - DNA, 25 bp, Probe Sequence
aggggagtagagccagttaacattt

SEQ ID NO: 136515 - DNA, 25 bp, Probe Sequence
agggcgagtacagcagcctggagca

SEQ ID NO: 136516 - DNA, 25 bp, Probe Sequence
aggtggagtactagagcctggccaa

SEQ ID NO: 136517 - DNA, 25 bp, Probe Sequence
agtgttaatactagttgtgacctta

SEQ ID NO: 136518 - DNA, 25 bp, Probe Sequence
agtttgcctcttatggtgacttaaa

SEQ ID NO: 136519 - DNA, 25 bp, Probe Sequence
agtttgcctcttatggtgacttaaa

SEQ ID NO: 136520 - DNA, 25 bp, Probe Sequence
agtttgcctcttatggtgacttaaa

SEQ ID NO: 136521 - DNA, 25 bp, Probe Sequence
agtgcaatccttacttgagaacttt

SEQ ID NO: 136522 - DNA, 25 bp, Probe Sequence
agtgtacagttggggagtacattct

SEQ ID NO: 136523 - DNA, 25 bp, Probe Sequence
agtgtccacttgtgacatatttctt

SEQ ID NO: 136524 - DNA, 25 bp, Probe Sequence
agtggtatcagttttcatttttcta

SEQ ID NO: 136525 - DNA, 25 bp, Probe Sequence
agggttcagtaaaatatgtcttata

SEQ ID NO: 136526 - DNA, 25 bp, Probe Sequence
agtggtttgtaaaagaagctcttct

SEQ ID NO: 136527 - DNA, 25 bp, Probe Sequence
agtggttcttcaagtcaaccctctt

SEQ ID NO: 136528 - DNA, 25 bp, Probe Sequence
agtggtctccgaattcaagacaata

SEQ ID NO: 136529 - DNA, 25 bp, Probe Sequence
caggcaccccttttaagtcgataag

SEQ ID NO: 136530 - DNA, 25 bp, Probe Sequence
agtccccaattctgataggctgacc

SEQ ID NO: 136531 - DNA, 25 bp, Probe Sequence
agattcccagttaaaaggctccaga

SEQ ID NO: 136532 - DNA, 25 bp, Probe Sequence
agtaacttgggaaaaggccgcatga

SEQ ID NO: 136533 - DNA, 25 bp, Probe Sequence
agtgacacccggaaatgaggaccat

SEQ ID NO: 136534 - DNA, 25 bp, Probe Sequence
agtgtcacctccttggagaagcctt

SEQ ID NO: 136535 - DNA, 25 bp, Probe Sequence
agtgtcctacagctgactgaagcct

SEQ ID NO: 136536 - DNA, 25 bp, Probe Sequence
agtgggcttcagatttaaggctgac

SEQ ID NO: 136537 - DNA, 25 bp, Probe Sequence
agtggactgtatctctgtgaaaaac

SEQ ID NO: 136538 - DNA, 25 bp, Probe Sequence
agtggaatataaactgtacacataa

SEQ ID NO: 136539 - DNA, 25 bp, Probe Sequence
agtggacataagcattgggccatag

SEQ ID NO: 136540 - DNA, 25 bp, Probe Sequence
agggacaagcagagggcagcgcatc

SEQ ID NO: 136541 - DNA, 25 bp, Probe Sequence
aggggcaagcaggagctagcagccg

SEQ ID NO: 136542 - DNA, 25 bp, Probe Sequence
aggggccatgcaggagcttgaagca

SEQ ID NO: 136543 - DNA, 25 bp, Probe Sequence
agtggagtgagctgaccgaggcaga

SEQ ID NO: 136544 - DNA, 25 bp, Probe Sequence
agggaggagcaaccttcaggtggcc

SEQ ID NO: 136545 - DNA, 25 bp, Probe Sequence
agtgcaaggagctccatttccgagc

SEQ ID NO: 136546 - DNA, 25 bp, Probe Sequence
agtgagagcttcctgagctttctcc

SEQ ID NO: 136547 - DNA, 25 bp, Probe Sequence
acataacatttgcactttcgtccct

SEQ ID NO: 136548 - DNA, 25 bp, Probe Sequence
agtggacaatcagtgtagtgtttac

SEQ ID NO: 136549 - DNA, 25 bp, Probe Sequence
agtggaaagactgaggcttctgcct

SEQ ID NO: 136550 - DNA, 25 bp, Probe Sequence
agggagaagcacggaaagattcctc

SEQ ID NO: 136551 - DNA, 25 bp, Probe Sequence
agggtggcacaagtacacagtagcc

SEQ ID NO: 136552 - DNA, 25 bp, Probe Sequence
agggtggcacaagtacacagtagcc

SEQ ID NO: 136553 - DNA, 25 bp, Probe Sequence
agggtggcacaagtacacagtagcc

SEQ ID NO: 136554 - DNA, 25 bp, Probe Sequence
agtggaggaacaagaccgtggctgc

SEQ ID NO: 136555 - DNA, 25 bp, Probe Sequence
agtggtggacctgacctgccgtcta

SEQ ID NO: 136556 - DNA, 25 bp, Probe Sequence
agtggggagagtactcctgcgtctt

SEQ ID NO: 136557 - DNA, 25 bp, Probe Sequence
aggggagagttaacctgctggctgt

SEQ ID NO: 136558 - DNA, 25 bp, Probe Sequence
aggggaggtagagcactgatgggtg

SEQ ID NO: 136559 - DNA, 25 bp, Probe Sequence
agggctgagtgtggagccctggggg

SEQ ID NO: 136560 - DNA, 25 bp, Probe Sequence
agggtggagatgctccagctgctgg

SEQ ID NO: 136561 - DNA, 25 bp, Probe Sequence
aggggagagtcggctcaatctggtg

SEQ ID NO: 136562 - DNA, 25 bp, Probe Sequence
agtgtggagacaggcctgaagctgg

SEQ ID NO: 136563 - DNA, 25 bp, Probe Sequence
agtgtgctaagggctcgagggagtg

SEQ ID NO: 136564 - DNA, 25 bp, Probe Sequence
agggcaacagccactgggtgagctg

SEQ ID NO: 136565 - DNA, 25 bp, Probe Sequence
agtcatgaacctccctggggatcaa

SEQ ID NO: 136566 - DNA, 25 bp, Probe Sequence
agtcgcaaatcttacagccggtcaa

SEQ ID NO: 136567 - DNA, 25 bp, Probe Sequence
taacttgatttaaaactggtcaaat

SEQ ID NO: 136568 - DNA, 25 bp, Probe Sequence
agagctcgtttagtgaaccgtcaga

SEQ ID NO: 136569 - DNA, 25 bp, Probe Sequence
agtgtggtttatggactgaggtcaa

SEQ ID NO: 136570 - DNA, 25 bp, Probe Sequence
agtgggcttaatgagagggatcttt

SEQ ID NO: 136571 - DNA, 25 bp, Probe Sequence
agggatgtgttatagacaagtttta

SEQ ID NO: 136572 - DNA, 25 bp, Probe Sequence
agtggtgtgatttggggatattttt

SEQ ID NO: 136573 - DNA, 25 bp, Probe Sequence
aggggtctgtggaggtgcttatgtt

SEQ ID NO: 136574 - DNA, 25 bp, Probe Sequence
aggggagtgtggaggtcttggccct

SEQ ID NO: 136575 - DNA, 25 bp, Probe Sequence
aggggaagtggtatgtggtaggcct

SEQ ID NO: 136576 - DNA, 25 bp, Probe Sequence
aggggcagagtgtgcttggagtcag

SEQ ID NO: 136577 - DNA, 25 bp, Probe Sequence
agggaagggaccatggagctccgaa

SEQ ID NO: 136578 - DNA, 25 bp, Probe Sequence
agttggcgggactttcagagatccg

SEQ ID NO: 136579 - DNA, 25 bp, Probe Sequence
agtcaagaagtattttgtcacatcc

SEQ ID NO: 136580 - DNA, 25 bp, Probe Sequence
agtggacagagacctttgtaaccaa

SEQ ID NO: 136581 - DNA, 25 bp, Probe Sequence
agggcaaggattctctgtacgccca

SEQ ID NO: 136582 - DNA, 25 bp, Probe Sequence
agggtaggagtcctctagacagcct

SEQ ID NO: 136583 - DNA, 25 bp, Probe Sequence
aggggagggatcctgaagaaatcat

SEQ ID NO: 136584 - DNA, 25 bp, Probe Sequence
agggtgaccgatctgaggactttgg

SEQ ID NO: 136585 - DNA, 25 bp, Probe Sequence
agggtcacctagggaagcacttgct

SEQ ID NO: 136586 - DNA, 25 bp, Probe Sequence
agggaccactgggaaatgccccttg

SEQ ID NO: 136587 - DNA, 25 bp, Probe Sequence
agggaccactgggaaatgccccttg

SEQ ID NO: 136588 - DNA, 25 bp, Probe Sequence
agggacaactgggaggatgagcccc

SEQ ID NO: 136589 - DNA, 25 bp, Probe Sequence
agggagtggtgggggcaaggctcct

SEQ ID NO: 136590 - DNA, 25 bp, Probe Sequence
agggggagtggaggggcatagcctt

SEQ ID NO: 136591 - DNA, 25 bp, Probe Sequence
agggagggttaacagctcagatcct

SEQ ID NO: 136592 - DNA, 25 bp, Probe Sequence
agtgggggtgctcagaaccacacgt

SEQ ID NO: 136593 - DNA, 25 bp, Probe Sequence
agtaggagacttcaataccccactt

SEQ ID NO: 136594 - DNA, 25 bp, Probe Sequence
agtgaccatactaattataccccct

SEQ ID NO: 136595 - DNA, 25 bp, Probe Sequence
agtgactctggaaaaactccctcct

SEQ ID NO: 136596 - DNA, 25 bp, Probe Sequence
agtgactctggaaaaactccctcct

SEQ ID NO: 136597 - DNA, 25 bp, Probe Sequence
agtgaggcttgggaagaccgccctg

SEQ ID NO: 136598 - DNA, 25 bp, Probe Sequence
agggaggtggtaggcaggacctctg

SEQ ID NO: 136599 - DNA, 25 bp, Probe Sequence
agggaggagacgtgaggcaactgtg

SEQ ID NO: 136600 - DNA, 25 bp, Probe Sequence
agggggagatcctgaggaccgagca

SEQ ID NO: 136601 - DNA, 25 bp, Probe Sequence
agggcgggaggattgagaagggaca

SEQ ID NO: 136602 - DNA, 25 bp, Probe Sequence
agtgtgtcgggaagggatagtggaa

SEQ ID NO: 136603 - DNA, 25 bp, Probe Sequence
agggtgcgtagaagagtatacagtc

SEQ ID NO: 136604 - DNA, 25 bp, Probe Sequence
agggatgttgagaggctgaagaggc

SEQ ID NO: 136605 - DNA, 25 bp, Probe Sequence
agggtatctatgcagggaagggggc

SEQ ID NO: 136606 - DNA, 25 bp, Probe Sequence
agggctacttcatggaggatgggag

SEQ ID NO: 136607 - DNA, 25 bp, Probe Sequence
aggggagctggtgggaggattggat

SEQ ID NO: 136608 - DNA, 25 bp, Probe Sequence
agggtggatcacttaaggtcaggag

SEQ ID NO: 136609 - DNA, 25 bp, Probe Sequence
agggaggtccttcagaatctgtgga

SEQ ID NO: 136610 - DNA, 25 bp, Probe Sequence
agggtggtctcttccagaattggaa

SEQ ID NO: 136611 - DNA, 25 bp, Probe Sequence
agggtgtggcccttaaatctgtcac

SEQ ID NO: 136612 - DNA, 25 bp, Probe Sequence
agtttgaggacctggaataggcgcc

SEQ ID NO: 136613 - DNA, 25 bp, Probe Sequence
actttggggacttgtagggatgcct

SEQ ID NO: 136614 - DNA, 25 bp, Probe Sequence
agtaaagtagccatgaagggctcct

SEQ ID NO: 136615 - DNA, 25 bp, Probe Sequence
agtgaagtggcccaaaaggctgccc

SEQ ID NO: 136616 - DNA, 25 bp, Probe Sequence
agggcagtggccaggaaggatgttc

SEQ ID NO: 136617 - DNA, 25 bp, Probe Sequence
agggctgtgcagtttgagggggtaa

SEQ ID NO: 136618 - DNA, 25 bp, Probe Sequence
agggtcttcctttggcatgggatgg

SEQ ID NO: 136619 - DNA, 25 bp, Probe Sequence
agggctctttgtatagcagaggatc

SEQ ID NO: 136620 - DNA, 25 bp, Probe Sequence
agcgactcggcgtgtccgaggatgg

SEQ ID NO: 136621 - DNA, 25 bp, Probe Sequence
agggcgggagaactcactgaggatg

SEQ ID NO: 136622 - DNA, 25 bp, Probe Sequence
agggctgggaagagaatgcatggag

SEQ ID NO: 136623 - DNA, 25 bp, Probe Sequence
agggtgggcaaatgagtgtgtgtga

SEQ ID NO: 136624 - DNA, 25 bp, Probe Sequence
agtggggctaaatgaagtgtgttaa

SEQ ID NO: 136625 - DNA, 25 bp, Probe Sequence
agggaggtagactctgagggcttcc

SEQ ID NO: 136626 - DNA, 25 bp, Probe Sequence
agggaggaaatcatgtggcggtgtc

SEQ ID NO: 136627 - DNA, 25 bp, Probe Sequence
agggggaatgctgtcgggactgagc

SEQ ID NO: 136628 - DNA, 25 bp, Probe Sequence
agggggagtgggactgagcgtccgc

SEQ ID NO: 136629 - DNA, 25 bp, Probe Sequence
agtgggcgagtgagttgacggcctc

SEQ ID NO: 136630 - DNA, 25 bp, Probe Sequence
agtgtgccgactccgtggaggaagt

SEQ ID NO: 136631 - DNA, 25 bp, Probe Sequence
agggagcagatcactttagccacag

SEQ ID NO: 136632 - DNA, 25 bp, Probe Sequence
agtgggaggatcacttcagcccagg

SEQ ID NO: 136633 - DNA, 25 bp, Probe Sequence
agtggctgaggaattcttgtacgca

SEQ ID NO: 136634 - DNA, 25 bp, Probe Sequence
agtggctgaggaattcttgtacgca

SEQ ID NO: 136635 - DNA, 25 bp, Probe Sequence
agggtgttgagttcactgtgccagc

SEQ ID NO: 136636 - DNA, 25 bp, Probe Sequence
agggtatgagagagcacgtgtcact

SEQ ID NO: 136637 - DNA, 25 bp, Probe Sequence
agggaatgaagaagctctcctacat

SEQ ID NO: 136638 - DNA, 25 bp, Probe Sequence
agggaggcaaggattcctgccagcg

SEQ ID NO: 136639 - DNA, 25 bp, Probe Sequence
agtgggccaaggttgtgccactgca

SEQ ID NO: 136640 - DNA, 25 bp, Probe Sequence
agggagcccagactgatggcagacc

SEQ ID NO: 136641 - DNA, 25 bp, Probe Sequence
agggattgtcaatgaggcagatcag

SEQ ID NO: 136642 - DNA, 25 bp, Probe Sequence
agggatcctgcaagcaaaagatcaa

SEQ ID NO: 136643 - DNA, 25 bp, Probe Sequence
agtgcgagcgctgcagcaagacgct

SEQ ID NO: 136644 - DNA, 25 bp, Probe Sequence
agtggtgcgttgccaagtggtcaga

SEQ ID NO: 136645 - DNA, 25 bp, Probe Sequence
agggatcgggactatgatgaggatg

SEQ ID NO: 136646 - DNA, 25 bp, Probe Sequence
agggcatcgtatcctatggacggtc

SEQ ID NO: 136647 - DNA, 25 bp, Probe Sequence
agggagcgtatgttggtgagttgtg

SEQ ID NO: 136648 - DNA, 25 bp, Probe Sequence
agggcagcagcttattggtggtctt

SEQ ID NO: 136649 - DNA, 25 bp, Probe Sequence
agggctcacatatttttgaggcttt

SEQ ID NO: 136650 - DNA, 25 bp, Probe Sequence
agtggccacatcatttccacgtttt

SEQ ID NO: 136651 - DNA, 25 bp, Probe Sequence
agggctacatctgtgtatactgtcc

SEQ ID NO: 136652 - DNA, 25 bp, Probe Sequence
agtggagacacttatggatacattg

SEQ ID NO: 136653 - DNA, 25 bp, Probe Sequence
agtgaaacgtaattgtacaagcagt

SEQ ID NO: 136654 - DNA, 25 bp, Probe Sequence
agggcaacgatggagctctatcaaa

SEQ ID NO: 136655 - DNA, 25 bp, Probe Sequence
agggaatctccgcatttcaatgaaa

SEQ ID NO: 136656 - DNA, 25 bp, Probe Sequence
agggcttttcccattgaatagaagc

SEQ ID NO: 136657 - DNA, 25 bp, Probe Sequence
agggctatttctccaatgtacaata

SEQ ID NO: 136658 - DNA, 25 bp, Probe Sequence
agggctaatatccagaatctacaat

SEQ ID NO: 136659 - DNA, 25 bp, Probe Sequence
agtggctcgactgcagatcactgac

SEQ ID NO: 136660 - DNA, 25 bp, Probe Sequence
agggcttacctgtacactgacttga

SEQ ID NO: 136661 - DNA, 25 bp, Probe Sequence
agtggttgaccttacacttactcct

SEQ ID NO: 136662 - DNA, 25 bp, Probe Sequence
agtggcttttcctccattaatacat

SEQ ID NO: 136663 - DNA, 25 bp, Probe Sequence
agtcctttaacctcactgaattgct

SEQ ID NO: 136664 - DNA, 25 bp, Probe Sequence
agtcctttaaggatgcaaatttaat

SEQ ID NO: 136665 - DNA, 25 bp, Probe Sequence
agtccttttaggagggagacatcca

SEQ ID NO: 136666 - DNA, 25 bp, Probe Sequence
agtccctcattctgcgttgggagtc

SEQ ID NO: 136667 - DNA, 25 bp, Probe Sequence
agtcctccttaccgatggttgtgac

SEQ ID NO: 136668 - DNA, 25 bp, Probe Sequence
agtctactttacctaagggctgtca

SEQ ID NO: 136669 - DNA, 25 bp, Probe Sequence
agtctactttacctaagggctgtca

SEQ ID NO: 136670 - DNA, 25 bp, Probe Sequence
agtggaccttgagctaatagatctt

SEQ ID NO: 136671 - DNA, 25 bp, Probe Sequence
agggcagtcttatctgagtgaacat

SEQ ID NO: 136672 - DNA, 25 bp, Probe Sequence
agggcagtagctcagtgtggaagaa

SEQ ID NO: 136673 - DNA, 25 bp, Probe Sequence
agtggcactagtcaccttaagtaga

SEQ ID NO: 136674 - DNA, 25 bp, Probe Sequence
agtgctactagagttccttaagggc

SEQ ID NO: 136675 - DNA, 25 bp, Probe Sequence
agggacttggtgttgcttggaaggc

SEQ ID NO: 136676 - DNA, 25 bp, Probe Sequence
agggattccttgttgttgtgttgag

SEQ ID NO: 136677 - DNA, 25 bp, Probe Sequence
agtgtcattgccgattttggctata

SEQ ID NO: 136678 - DNA, 25 bp, Probe Sequence
agtgtattgccaactttgttaagtg

SEQ ID NO: 136679 - DNA, 25 bp, Probe Sequence
agatggttgccgggtcatgttaatt

SEQ ID NO: 136680 - DNA, 25 bp, Probe Sequence
agggtggggttgtcagttatctcat

SEQ ID NO: 136681 - DNA, 25 bp, Probe Sequence
agggtggggtagtccatggccacat

SEQ ID NO: 136682 - DNA, 25 bp, Probe Sequence
agggatggaggctttacggccactt

SEQ ID NO: 136683 - DNA, 25 bp, Probe Sequence
agggttggtcaatttcgtgccagcc

SEQ ID NO: 136684 - DNA, 25 bp, Probe Sequence
agggtatggtaatgcttgtagaatc

SEQ ID NO: 136685 - DNA, 25 bp, Probe Sequence
agggtagaggaattgctgactagaa

SEQ ID NO: 136686 - DNA, 25 bp, Probe Sequence
agggtagcctgaattgctttctgct

SEQ ID NO: 136687 - DNA, 25 bp, Probe Sequence
agggtatcttgaactcctttcttct

SEQ ID NO: 136688 - DNA, 25 bp, Probe Sequence
agtgtgtataaaccttcttcttctt

SEQ ID NO: 136689 - DNA, 25 bp, Probe Sequence
agtgaattaataaggccttttcgct

SEQ ID NO: 136690 - DNA, 25 bp, Probe Sequence
agtggcattcttctgggtggttcac

SEQ ID NO: 136691 - DNA, 25 bp, Probe Sequence
agtggcaatttctttagatgagtga

SEQ ID NO: 136692 - DNA, 25 bp, Probe Sequence
agtggagatcagtcattataaatgc

SEQ ID NO: 136693 - DNA, 25 bp, Probe Sequence
agtggactggagcgtaactgccact

SEQ ID NO: 136694 - DNA, 25 bp, Probe Sequence
agggagctaggcagccgtgctccct

SEQ ID NO: 136695 - DNA, 25 bp, Probe Sequence
agggagctaggcagccgtgctccct

SEQ ID NO: 136696 - DNA, 25 bp, Probe Sequence
agggagaagctggcacctgtaccct

SEQ ID NO: 136697 - DNA, 25 bp, Probe Sequence
agggttagctgcaatccagcttccc

SEQ ID NO: 136698 - DNA, 25 bp, Probe Sequence
agcggttccgctgccctgaggcact

SEQ ID NO: 136699 - DNA, 25 bp, Probe Sequence
agtggtgtccgagaagtcaggcacg

SEQ ID NO: 136700 - DNA, 25 bp, Probe Sequence
agtggttatgggcaattcaggacag

SEQ ID NO: 136701 - DNA, 25 bp, Probe Sequence
agggtccagaggcctttcagaagga

SEQ ID NO: 136702 - DNA, 25 bp, Probe Sequence
agtgcggtgcacagttttcgaagga

SEQ ID NO: 136703 - DNA, 25 bp, Probe Sequence
agtggggccactgctttggaattaa

SEQ ID NO: 136704 - DNA, 25 bp, Probe Sequence
agggattgacaagcttatggagaaa

SEQ ID NO: 136705 - DNA, 25 bp, Probe Sequence
agggcatctgccttactgattaaaa

SEQ ID NO: 136706 - DNA, 25 bp, Probe Sequence
agggcatgatatctcatcatattca

SEQ ID NO: 136707 - DNA, 25 bp, Probe Sequence
agggctggatcttatcactgccctg

SEQ ID NO: 136708 - DNA, 25 bp, Probe Sequence
agggcgggcttgaaggccctgatgg

SEQ ID NO: 136709 - DNA, 25 bp, Probe Sequence
agggagtgctttgaggcaggtgatg

SEQ ID NO: 136710 - DNA, 25 bp, Probe Sequence
agggagcactgattcctggaggtgg

SEQ ID NO: 136711 - DNA, 25 bp, Probe Sequence
agggctgttatttccagaggtgcgc

SEQ ID NO: 136712 - DNA, 25 bp, Probe Sequence
agtggtgttcactaggagacgtgga

SEQ ID NO: 136713 - DNA, 25 bp, Probe Sequence
agtgggctacatcagggtgcgattc

SEQ ID NO: 136714 - DNA, 25 bp, Probe Sequence
agtgggctacatcagggtgcgattc

SEQ ID NO: 136715 - DNA, 25 bp, Probe Sequence
agtgggctacatcagggtgcgattc

SEQ ID NO: 136716 - DNA, 25 bp, Probe Sequence
agggaattcttgtgtgctgctttcc

SEQ ID NO: 136717 - DNA, 25 bp, Probe Sequence
agggaatcctggagcacttgttccg

SEQ ID NO: 136718 - DNA, 25 bp, Probe Sequence
agggagataccgatacatcttctgc

SEQ ID NO: 136719 - DNA, 25 bp, Probe Sequence
agtggctgaacagactcagtctacc

SEQ ID NO: 136720 - DNA, 25 bp, Probe Sequence
agggatgagacactatgctctgcct

SEQ ID NO: 136721 - DNA, 25 bp, Probe Sequence
agggagcagaagctgcagctgccac

SEQ ID NO: 136722 - DNA, 25 bp, Probe Sequence
agggcacagaaccctgtgccccacc

SEQ ID NO: 136723 - DNA, 25 bp, Probe Sequence
agtgagcaacaagcctgggtttccc

SEQ ID NO: 136724 - DNA, 25 bp, Probe Sequence
agtgcagccacagacttgtattttg

SEQ ID NO: 136725 - DNA, 25 bp, Probe Sequence
agtggctagtagtttcttcatttga

SEQ ID NO: 136726 - DNA, 25 bp, Probe Sequence
agtggtaatagacattttaggccag

SEQ ID NO: 136727 - DNA, 25 bp, Probe Sequence
agtggtaggagacagcttgaaagca

SEQ ID NO: 136728 - DNA, 25 bp, Probe Sequence
agtcctgagcgggaagctgtgaatg

SEQ ID NO: 136729 - DNA, 25 bp, Probe Sequence
agtgcttacaggtacagctagtatg

SEQ ID NO: 136730 - DNA, 25 bp, Probe Sequence
agtgcttggatttccgtctgtagat

SEQ ID NO: 136731 - DNA, 25 bp, Probe Sequence
agtgccgcgataacagtacgtgtgc

SEQ ID NO: 136732 - DNA, 25 bp, Probe Sequence
agtgtccgatcaatagctcacgcag

SEQ ID NO: 136733 - DNA, 25 bp, Probe Sequence
agatatgccgaccatggctgcacac

SEQ ID NO: 136734 - DNA, 25 bp, Probe Sequence
agatcgacagacctgaagccatcag

SEQ ID NO: 136735 - DNA, 25 bp, Probe Sequence
agatcgacagacctgaagccatcag

SEQ ID NO: 136736 - DNA, 25 bp, Probe Sequence
agatcgagctacctaagaacagcta

SEQ ID NO: 136737 - DNA, 25 bp, Probe Sequence
agtgtatgtcacgtgcaggaacagt

SEQ ID NO: 136738 - DNA, 25 bp, Probe Sequence
agtgaatctcaggcgcagcgcctcg

SEQ ID NO: 136739 - DNA, 25 bp, Probe Sequence
agtgaacttgaccaacaccctatgg

SEQ ID NO: 136740 - DNA, 25 bp, Probe Sequence
agtgatactatcattaacccatttt

SEQ ID NO: 136741 - DNA, 25 bp, Probe Sequence
agtgttaacattggagacttgcttt

SEQ ID NO: 136742 - DNA, 25 bp, Probe Sequence
agggatcaaatttgacctggtgtta

SEQ ID NO: 136743 - DNA, 25 bp, Probe Sequence
agggatgcagaggatcagaaccggt

SEQ ID NO: 136744 - DNA, 25 bp, Probe Sequence
agggatcagggagtgtggctcggtg

SEQ ID NO: 136745 - DNA, 25 bp, Probe Sequence
agggagacagtgctgtcctcttgtg

SEQ ID NO: 136746 - DNA, 25 bp, Probe Sequence
agtggagagagtgcttgcctcttat

SEQ ID NO: 136747 - DNA, 25 bp, Probe Sequence
agggctcatgaatctcattctctta

SEQ ID NO: 136748 - DNA, 25 bp, Probe Sequence
agggccatcaaactcattgtcactg

SEQ ID NO: 136749 - DNA, 25 bp, Probe Sequence
agggaccatgatgtctcagtcactc

SEQ ID NO: 136750 - DNA, 25 bp, Probe Sequence
agtgggcgagatctcatcagcccca

SEQ ID NO: 136751 - DNA, 25 bp, Probe Sequence
agtggagtgagacctccactcccag

SEQ ID NO: 136752 - DNA, 25 bp, Probe Sequence
agtggaatgaatttggacatgcccc

SEQ ID NO: 136753 - DNA, 25 bp, Probe Sequence
agtggatgatctgagggggaccccg

SEQ ID NO: 136754 - DNA, 25 bp, Probe Sequence
agtggatgatctgagggggaccccg

SEQ ID NO: 136755 - DNA, 25 bp, Probe Sequence
agtggtatcatatgcccagtacgcc

SEQ ID NO: 136756 - DNA, 25 bp, Probe Sequence
agtgggaaatacacatttgctgctc

SEQ ID NO: 136757 - DNA, 25 bp, Probe Sequence
agtggggacgacatcagtgtgctct

SEQ ID NO: 136758 - DNA, 25 bp, Probe Sequence
agggagtgaggagccttgctgctca

SEQ ID NO: 136759 - DNA, 25 bp, Probe Sequence
agggagcgtggctcgatgtcagtct

SEQ ID NO: 136760 - DNA, 25 bp, Probe Sequence
agtggaggattacttcatgcgcaat

SEQ ID NO: 136761 - DNA, 25 bp, Probe Sequence
agggagtatttcagaggccagcgta

SEQ ID NO: 136762 - DNA, 25 bp, Probe Sequence
agggcactattgggtgggcctggat

SEQ ID NO: 136763 - DNA, 25 bp, Probe Sequence
agggactgttggcatgcagtgccct

SEQ ID NO: 136764 - DNA, 25 bp, Probe Sequence
agtggatgtgtgctgggaagccgct

SEQ ID NO: 136765 - DNA, 25 bp, Probe Sequence
agggttgctaatcagatacctgctg

SEQ ID NO: 136766 - DNA, 25 bp, Probe Sequence
agggaatcagaatcaaaccagtgta

SEQ ID NO: 136767 - DNA, 25 bp, Probe Sequence
agggaaatgacagggcaaagcaatt

SEQ ID NO: 136768 - DNA, 25 bp, Probe Sequence
agtggacaagaaggctgctggagct

SEQ ID NO: 136769 - DNA, 25 bp, Probe Sequence
agtggacaagaaggctgctggagct

SEQ ID NO: 136770 - DNA, 25 bp, Probe Sequence
agtggacaagaaggctgctggagct

SEQ ID NO: 136771 - DNA, 25 bp, Probe Sequence
agtggacaagaaggctgctggagct

SEQ ID NO: 136772 - DNA, 25 bp, Probe Sequence
agtggccagggagcgtggcacttac

SEQ ID NO: 136773 - DNA, 25 bp, Probe Sequence
agtcggggcagagagtggccgctac

SEQ ID NO: 136774 - DNA, 25 bp, Probe Sequence
agtcggggcagagagtggccgctac

SEQ ID NO: 136775 - DNA, 25 bp, Probe Sequence
agtccgggagtgcagtcatcacgtt

SEQ ID NO: 136776 - DNA, 25 bp, Probe Sequence
agctgaccggaccggtcatgcccgt

SEQ ID NO: 136777 - DNA, 25 bp, Probe Sequence
agctgaccggaccggtcatgcccgt

SEQ ID NO: 136778 - DNA, 25 bp, Probe Sequence
agtggtcagggccatggctgacacc

SEQ ID NO: 136779 - DNA, 25 bp, Probe Sequence
agggccagagccatgtctatgccct

SEQ ID NO: 136780 - DNA, 25 bp, Probe Sequence
agtggcgaagcactttgttgccctg

SEQ ID NO: 136781 - DNA, 25 bp, Probe Sequence
agtgtggagaggttctgcctgacat

SEQ ID NO: 136782 - DNA, 25 bp, Probe Sequence
agtgtggagaggttctgcctgacat

SEQ ID NO: 136783 - DNA, 25 bp, Probe Sequence
agtggaggggcatttggaacatctg

SEQ ID NO: 136784 - DNA, 25 bp, Probe Sequence
agttgaggggtgctgaaaccagact

SEQ ID NO: 136785 - DNA, 25 bp, Probe Sequence
agtggaggaggtctgtgggctgaac

SEQ ID NO: 136786 - DNA, 25 bp, Probe Sequence
agggcagggacactgtggatggctg

SEQ ID NO: 136787 - DNA, 25 bp, Probe Sequence
agggcagtgggatttatgatgtgtt

SEQ ID NO: 136788 - DNA, 25 bp, Probe Sequence
agggcttgccaagtgtgcatgcatt

SEQ ID NO: 136789 - DNA, 25 bp, Probe Sequence
agggctgctcacaagatggctttag

SEQ ID NO: 136790 - DNA, 25 bp, Probe Sequence
agtgtgctattgaatggcttttagt

SEQ ID NO: 136791 - DNA, 25 bp, Probe Sequence
agggctcttccagtcttgaaatgca

SEQ ID NO: 136792 - DNA, 25 bp, Probe Sequence
agtgagtcttgctgatttgcagaat

SEQ ID NO: 136793 - DNA, 25 bp, Probe Sequence
agtgtgatcagtttgattctgtaat

SEQ ID NO: 136794 - DNA, 25 bp, Probe Sequence
agtgcatgcatatactgtctctgtt

SEQ ID NO: 136795 - DNA, 25 bp, Probe Sequence
agtcatggcccattgatatgctgtc

SEQ ID NO: 136796 - DNA, 25 bp, Probe Sequence
agtgcattgaggatagatgcaggcg

SEQ ID NO: 136797 - DNA, 25 bp, Probe Sequence
agtcaaggggtaatatgggcctgtt

SEQ ID NO: 136798 - DNA, 25 bp, Probe Sequence
agtaacagggattataggcgcgtgc

SEQ ID NO: 136799 - DNA, 25 bp, Probe Sequence
agggaagaagattcatacgcctcta

SEQ ID NO: 136800 - DNA, 25 bp, Probe Sequence
agggcaagtaattcacaccaggcca

SEQ ID NO: 136801 - DNA, 25 bp, Probe Sequence
agggcatagctaataacaaccacac

SEQ ID NO: 136802 - DNA, 25 bp, Probe Sequence
agggaatacacatacaaacacacaa

SEQ ID NO: 136803 - DNA, 25 bp, Probe Sequence
agatggttacactgttagaacacta

SEQ ID NO: 136804 - DNA, 25 bp, Probe Sequence
agatggttacactgttagaacacta

SEQ ID NO: 136805 - DNA, 25 bp, Probe Sequence
agtgtattgaaatggtaaagcctgc

SEQ ID NO: 136806 - DNA, 25 bp, Probe Sequence
agtgtagctaacatgataaaactaa

SEQ ID NO: 136807 - DNA, 25 bp, Probe Sequence
agtggatccaacaatgtacaagtgt

SEQ ID NO: 136808 - DNA, 25 bp, Probe Sequence
agtgtgatccacattgttaggtgct

SEQ ID NO: 136809 - DNA, 25 bp, Probe Sequence
agtgtacccgtcattatcagcacat

SEQ ID NO: 136810 - DNA, 25 bp, Probe Sequence
agtgaaagctcgattttccacagcc

SEQ ID NO: 136811 - DNA, 25 bp, Probe Sequence
agtgctgaacttatttttcaaccat

SEQ ID NO: 136812 - DNA, 25 bp, Probe Sequence
agtcacacccttagttttgtaccat

SEQ ID NO: 136813 - DNA, 25 bp, Probe Sequence
agtgcacaagccttactttggttac

SEQ ID NO: 136814 - DNA, 25 bp, Probe Sequence
agtccaagccctggataatgcttta

SEQ ID NO: 136815 - DNA, 25 bp, Probe Sequence
agtcaaattccagagggccattact

SEQ ID NO: 136816 - DNA, 25 bp, Probe Sequence
agtagaacctctgactgccaatttc

SEQ ID NO: 136817 - DNA, 25 bp, Probe Sequence
agataaaactctgagagactactta

SEQ ID NO: 136818 - DNA, 25 bp, Probe Sequence
agtacctcaccgcagaggtacttga

SEQ ID NO: 136819 - DNA, 25 bp, Probe Sequence
agtacccatgcctgaattttttgag

SEQ ID NO: 136820 - DNA, 25 bp, Probe Sequence
agatcccctggcttgcagaaaatcc

SEQ ID NO: 136821 - DNA, 25 bp, Probe Sequence
agatgcccggtggtcaaaagttgca

SEQ ID NO: 136822 - DNA, 25 bp, Probe Sequence
agtaccgtgtggccaagaggtggac

SEQ ID NO: 136823 - DNA, 25 bp, Probe Sequence
agtgagggtgttcagagggaggcac

SEQ ID NO: 136824 - DNA, 25 bp, Probe Sequence
agtggttgcgtttcatgagtcgggc

SEQ ID NO: 136825 - DNA, 25 bp, Probe Sequence
agtgggagtgtttctgttgttggct

SEQ ID NO: 136826 - DNA, 25 bp, Probe Sequence
agtggtggtgtatcttgtttctaat

SEQ ID NO: 136827 - DNA, 25 bp, Probe Sequence
acgcgaaggatatcggtttcattaa

SEQ ID NO: 136828 - DNA, 25 bp, Probe Sequence
agggagcagtgaaaaggtcttaata

SEQ ID NO: 136829 - DNA, 25 bp, Probe Sequence
agtggacttcatcaagagtcatgga

SEQ ID NO: 136830 - DNA, 25 bp, Probe Sequence
agggagcttgctctcaagggtgaca

SEQ ID NO: 136831 - DNA, 25 bp, Probe Sequence
agtgggcctgatttagcaggtggtc

SEQ ID NO: 136832 - DNA, 25 bp, Probe Sequence
agtgtgcggttttcagaggcagctt

SEQ ID NO: 136833 - DNA, 25 bp, Probe Sequence
agtgtgagggtagggatgccatgga

SEQ ID NO: 136834 - DNA, 25 bp, Probe Sequence
agtgaagctggcaaagagttatggc

SEQ ID NO: 136835 - DNA, 25 bp, Probe Sequence
agtgctcactactcagtgatttgga

SEQ ID NO: 136836 - DNA, 25 bp, Probe Sequence
agtgctccttatgtgaatttcaaac

SEQ ID NO: 136837 - DNA, 25 bp, Probe Sequence
agttactaagtccaaattcaagccg

SEQ ID NO: 136838 - DNA, 25 bp, Probe Sequence
agcactactagagggaagtaccagt

SEQ ID NO: 136839 - DNA, 25 bp, Probe Sequence
agtctacatgggcaaagtgaccttc

SEQ ID NO: 136840 - DNA, 25 bp, Probe Sequence
agtgtaagtgttcagggtccatgta

SEQ ID NO: 136841 - DNA, 25 bp, Probe Sequence
agtgcttagttgaacagggccctga

SEQ ID NO: 136842 - DNA, 25 bp, Probe Sequence
agtgtgatgacttgaacgggcctgc

SEQ ID NO: 136843 - DNA, 25 bp, Probe Sequence
agtggatacaagtgggtcctgcagt

SEQ ID NO: 136844 - DNA, 25 bp, Probe Sequence
agtggaacacattgggggtctcatt

SEQ ID NO: 136845 - DNA, 25 bp, Probe Sequence
agtggaagcacgggcggatcatcct

SEQ ID NO: 136846 - DNA, 25 bp, Probe Sequence
agtggaagcacgggcggatcatcct

SEQ ID NO: 136847 - DNA, 25 bp, Probe Sequence
agtggaaacgcgtcagaatcgcctg

SEQ ID NO: 136848 - DNA, 25 bp, Probe Sequence
agggaagttgcgtgaacactgcagt

SEQ ID NO: 136849 - DNA, 25 bp, Probe Sequence
agggaatttggctcaacttcagttg

SEQ ID NO: 136850 - DNA, 25 bp, Probe Sequence
agggccttgtgtgccagactaaggg

SEQ ID NO: 136851 - DNA, 25 bp, Probe Sequence
agggctatttaggacaacttatgac

SEQ ID NO: 136852 - DNA, 25 bp, Probe Sequence
agggctggtctacaagttctagagt

SEQ ID NO: 136853 - DNA, 25 bp, Probe Sequence
agggctgggctaggaatggccttgg

SEQ ID NO: 136854 - DNA, 25 bp, Probe Sequence
agggcttggtcagcagcatggagtt

SEQ ID NO: 136855 - DNA, 25 bp, Probe Sequence
agggcttctatagatcagtgtgtta

SEQ ID NO: 136856 - DNA, 25 bp, Probe Sequence
agggcatcctgactgaactgtgtct

SEQ ID NO: 136857 - DNA, 25 bp, Probe Sequence
agggcatctctattagatctttagg

SEQ ID NO: 136858 - DNA, 25 bp, Probe Sequence
agggcaagctcatagcacatgtttt

SEQ ID NO: 136859 - DNA, 25 bp, Probe Sequence
agtggaagagcagcacctgcggact

SEQ ID NO: 136860 - DNA, 25 bp, Probe Sequence
agtggaagtatctgctatgggacta

SEQ ID NO: 136861 - DNA, 25 bp, Probe Sequence
agtgaaagttcccatataccaataa

SEQ ID NO: 136862 - DNA, 25 bp, Probe Sequence
agtgcagaaataactaagacacaaa

SEQ ID NO: 136863 - DNA, 25 bp, Probe Sequence
agtgacatttgtctaatagcctaat

SEQ ID NO: 136864 - DNA, 25 bp, Probe Sequence
agtgaagtagtgacggaagcctgat

SEQ ID NO: 136865 - DNA, 25 bp, Probe Sequence
agtgagcttttgactggtacagtga

SEQ ID NO: 136866 - DNA, 25 bp, Probe Sequence
agggctttgctcgagctgtgcggaa

SEQ ID NO: 136867 - DNA, 25 bp, Probe Sequence
agggctctgagagtacaggggaagc

SEQ ID NO: 136868 - DNA, 25 bp, Probe Sequence
agggcactgaggggcaacagggacc

SEQ ID NO: 136869 - DNA, 25 bp, Probe Sequence
agggctctgggcctgaagcaagagc

SEQ ID NO: 136870 - DNA, 25 bp, Probe Sequence
agggcttgcaggctgcagtacagca

SEQ ID NO: 136871 - DNA, 25 bp, Probe Sequence
agggcttgcaggctgcagtacagca

SEQ ID NO: 136872 - DNA, 25 bp, Probe Sequence
agggctgctgcagatgtatcccagc

SEQ ID NO: 136873 - DNA, 25 bp, Probe Sequence
agtgttgtgctggttgacgtagacg

SEQ ID NO: 136874 - DNA, 25 bp, Probe Sequence
agtgtctggtgctgtgcaggacaaa

SEQ ID NO: 136875 - DNA, 25 bp, Probe Sequence
agtgcccagtgacttatggccaatg

SEQ ID NO: 136876 - DNA, 25 bp, Probe Sequence
agggccctgaggaaggcacacttgc

SEQ ID NO: 136877 - DNA, 25 bp, Probe Sequence
agtgtgccctagcagaggaaaatgc

SEQ ID NO: 136878 - DNA, 25 bp, Probe Sequence
agtgaccttgaacacgaagagatga

SEQ ID NO: 136879 - DNA, 25 bp, Probe Sequence
agtgaaccaaactctggagccagac

SEQ ID NO: 136880 - DNA, 25 bp, Probe Sequence
agtggtccgcaagatgggagacaag

SEQ ID NO: 136881 - DNA, 25 bp, Probe Sequence
agtggccgccatactacgggaacta

SEQ ID NO: 136882 - DNA, 25 bp, Probe Sequence
agtggccgccatactacgggaacta

SEQ ID NO: 136883 - DNA, 25 bp, Probe Sequence
agtggccgccatactacgggaacta

SEQ ID NO: 136884 - DNA, 25 bp, Probe Sequence
agtccctggctggcatactgggaac

SEQ ID NO: 136885 - DNA, 25 bp, Probe Sequence
agtggtcttgctgtggctaggccac

SEQ ID NO: 136886 - DNA, 25 bp, Probe Sequence
agtggtctatttctgtagcagctca

SEQ ID NO: 136887 - DNA, 25 bp, Probe Sequence
agtgggcttttgtttatggctgctt

SEQ ID NO: 136888 - DNA, 25 bp, Probe Sequence
agtgtgtttctttctaaattgctgt

SEQ ID NO: 136889 - DNA, 25 bp, Probe Sequence
agtgtgtttctttctaaattgctgt

SEQ ID NO: 136890 - DNA, 25 bp, Probe Sequence
agtgttgtcttattcctaattcctg

SEQ ID NO: 136891 - DNA, 25 bp, Probe Sequence
agtgtggtcagtattccaaactctc

SEQ ID NO: 136892 - DNA, 25 bp, Probe Sequence
agtagcagtagaatgtgacaaaacc

SEQ ID NO: 136893 - DNA, 25 bp, Probe Sequence
agggcagtcgccagaagtagacctg

SEQ ID NO: 136894 - DNA, 25 bp, Probe Sequence
agggcggccgcaggaagaagaactc

SEQ ID NO: 136895 - DNA, 25 bp, Probe Sequence
agggccagggcttgattgtaaatct

SEQ ID NO: 136896 - DNA, 25 bp, Probe Sequence
agtggccgtggcaatttctcgaaat

SEQ ID NO: 136897 - DNA, 25 bp, Probe Sequence
agggccggacaaaagctcgagaaag

SEQ ID NO: 136898 - DNA, 25 bp, Probe Sequence
agtgccttggaaaaactcaggaaag

SEQ ID NO: 136899 - DNA, 25 bp, Probe Sequence
agtggttggcagagtcctcattgaa

SEQ ID NO: 136900 - DNA, 25 bp, Probe Sequence
agtgctttagtgagtcctcagccac

SEQ ID NO: 136901 - DNA, 25 bp, Probe Sequence
agtgctgttcaggtcctctatcagc

SEQ ID NO: 136902 - DNA, 25 bp, Probe Sequence
agtgatcttcatgcgaacttcagtg

SEQ ID NO: 136903 - DNA, 25 bp, Probe Sequence
agtgcagtaagcaggacgtgctgtg

SEQ ID NO: 136904 - DNA, 25 bp, Probe Sequence
agtgcattataggcggtgggttctg

SEQ ID NO: 136905 - DNA, 25 bp, Probe Sequence
agtgcttcaacgatgtgactgccat

SEQ ID NO: 136906 - DNA, 25 bp, Probe Sequence
agtgcttcaacgatgtgactgccat

SEQ ID NO: 136907 - DNA, 25 bp, Probe Sequence
agtgttgaatggagtgaatgctatt

SEQ ID NO: 136908 - DNA, 25 bp, Probe Sequence
agtggtgcagtgctttaacatacat

SEQ ID NO: 136909 - DNA, 25 bp, Probe Sequence
agtggtggctgaaattccacacact

SEQ ID NO: 136910 - DNA, 25 bp, Probe Sequence
agtggtggcgacaactgcgcgccac

SEQ ID NO: 136911 - DNA, 25 bp, Probe Sequence
agggctgccagacatacgctggagc

SEQ ID NO: 136912 - DNA, 25 bp, Probe Sequence
agggccagcagtggaagcctcaagc

SEQ ID NO: 136913 - DNA, 25 bp, Probe Sequence
agggccagcagtggtctttgaagca

SEQ ID NO: 136914 - DNA, 25 bp, Probe Sequence
agtgggacagtgatcttcagacaga

SEQ ID NO: 136915 - DNA, 25 bp, Probe Sequence
agtggtgacatgtgctcttctccac

SEQ ID NO: 136916 - DNA, 25 bp, Probe Sequence
agtgggatgctgtgtctagtgatta

SEQ ID NO: 136917 - DNA, 25 bp, Probe Sequence
agtgtggtgtcttttatatttgaat

SEQ ID NO: 136918 - DNA, 25 bp, Probe Sequence
agtgagagaacttaattatttgcaa

SEQ ID NO: 136919 - DNA, 25 bp, Probe Sequence
agtgataaactatttgccttctgga

SEQ ID NO: 136920 - DNA, 25 bp, Probe Sequence
agtgtacatatcattaagcattggc

SEQ ID NO: 136921 - DNA, 25 bp, Probe Sequence
agtgtatacacataaagcaggtctt

SEQ ID NO: 136922 - DNA, 25 bp, Probe Sequence
agtgtctatgactccatcagcatgg

SEQ ID NO: 136923 - DNA, 25 bp, Probe Sequence
agtgatctatcctgccaggaggcct

SEQ ID NO: 136924 - DNA, 25 bp, Probe Sequence
agtactcacgccccatgggggatct

SEQ ID NO: 136925 - DNA, 25 bp, Probe Sequence
agggctgcatctgcaaaggggcgtc

SEQ ID NO: 136926 - DNA, 25 bp, Probe Sequence
agtggctctcagacgaagaggcgag

SEQ ID NO: 136927 - DNA, 25 bp, Probe Sequence
agggcatctcaatggcatgggtggg

SEQ ID NO: 136928 - DNA, 25 bp, Probe Sequence
agggcttccagtcctggatgtggcg

SEQ ID NO: 136929 - DNA, 25 bp, Probe Sequence
agggctattacttaggatctgtggc

SEQ ID NO: 136930 - DNA, 25 bp, Probe Sequence
agggctaggactgacccttgtggtg

SEQ ID NO: 136931 - DNA, 25 bp, Probe Sequence
agtggctagtgaaggacgccttttt

SEQ ID NO: 136932 - DNA, 25 bp, Probe Sequence
agtgactgatgtaaaacggttttct

SEQ ID NO: 136933 - DNA, 25 bp, Probe Sequence
agtgaatgaatacatattgctttgt

SEQ ID NO: 136934 - DNA, 25 bp, Probe Sequence
agtgcattaatagggcattttgtgt

SEQ ID NO: 136935 - DNA, 25 bp, Probe Sequence
agtgtttgtgagctttttgttccct

SEQ ID NO: 136936 - DNA, 25 bp, Probe Sequence
agtgtctggtaactcttttgctttc

SEQ ID NO: 136937 - DNA, 25 bp, Probe Sequence
agggcttggaaggcatctttctccc

SEQ ID NO: 136938 - DNA, 25 bp, Probe Sequence
agtgagttggaaagctcgtcctctg

SEQ ID NO: 136939 - DNA, 25 bp, Probe Sequence
agtgaatgggcatggcttggcctcg

SEQ ID NO: 136940 - DNA, 25 bp, Probe Sequence
agtggtggtagatgttgtgcctcgg

SEQ ID NO: 136941 - DNA, 25 bp, Probe Sequence
agtgtgctcagtaaagtcttccatc

SEQ ID NO: 136942 - DNA, 25 bp, Probe Sequence
agtgccaagtggacagtctggccac

SEQ ID NO: 136943 - DNA, 25 bp, Probe Sequence
agtggcaatggagctgtggaggaca

SEQ ID NO: 136944 - DNA, 25 bp, Probe Sequence
agtggcaatggaagactggttacat

SEQ ID NO: 136945 - DNA, 25 bp, Probe Sequence
agtggagcattcagacttgtctttc

SEQ ID NO: 136946 - DNA, 25 bp, Probe Sequence
agtggacatcttggagaatactgca

SEQ ID NO: 136947 - DNA, 25 bp, Probe Sequence
agtgaaccatggctgcactactgca

SEQ ID NO: 136948 - DNA, 25 bp, Probe Sequence
agtgtcccagtggtgacatctcagt

SEQ ID NO: 136949 - DNA, 25 bp, Probe Sequence
agtcctccgctgagaattcagggat

SEQ ID NO: 136950 - DNA, 25 bp, Probe Sequence
agtacctcctggcaactatgggaac

SEQ ID NO: 136951 - DNA, 25 bp, Probe Sequence
agtaggcccagtgcaagtatttgaa

SEQ ID NO: 136952 - DNA, 25 bp, Probe Sequence
agtgaccaccgtgaagtgcctatga

SEQ ID NO: 136953 - DNA, 25 bp, Probe Sequence
agtcaccacctagaactgggtattc

SEQ ID NO: 136954 - DNA, 25 bp, Probe Sequence
agtgcccctttccatacagggattt

SEQ ID NO: 136955 - DNA, 25 bp, Probe Sequence
agtaccacatgtaaaagggaatttg

SEQ ID NO: 136956 - DNA, 25 bp, Probe Sequence
agtccccagctaactagggaaggct

SEQ ID NO: 136957 - DNA, 25 bp, Probe Sequence
agtgccgaaggctgtaccagtaggc

SEQ ID NO: 136958 - DNA, 25 bp, Probe Sequence
agtgcgcgatgccgggatcaaagtc

SEQ ID NO: 136959 - DNA, 25 bp, Probe Sequence
agtgagcaggctcagaacaaatgca

SEQ ID NO: 136960 - DNA, 25 bp, Probe Sequence
agggcatcgtgcaagacccattgcc

SEQ ID NO: 136961 - DNA, 25 bp, Probe Sequence
agtggtgagctggaggctacttccg

SEQ ID NO: 136962 - DNA, 25 bp, Probe Sequence
agtgaggagtgcggggagcttctcc

SEQ ID NO: 136963 - DNA, 25 bp, Probe Sequence
agtgagaggtctgaaggctggcttc

SEQ ID NO: 136964 - DNA, 25 bp, Probe Sequence
agtgaggcctgtgagagctgtgtcc

SEQ ID NO: 136965 - DNA, 25 bp, Probe Sequence
agggctgccgatcagagctgtgagt

SEQ ID NO: 136966 - DNA, 25 bp, Probe Sequence
agggccctgatttgctgggcagttt

SEQ ID NO: 136967 - DNA, 25 bp, Probe Sequence
agggccacatagctgtgagtgcagc

SEQ ID NO: 136968 - DNA, 25 bp, Probe Sequence
agtggcaccactaggtgcctgctgc

SEQ ID NO: 136969 - DNA, 25 bp, Probe Sequence
agtgtcccactcatggacgtggggg

SEQ ID NO: 136970 - DNA, 25 bp, Probe Sequence
agcttacaactcaaaccgggctggg

SEQ ID NO: 136971 - DNA, 25 bp, Probe Sequence
agctgaagtactacaactccgacgt

SEQ ID NO: 136972 - DNA, 25 bp, Probe Sequence
agtgttggtgattccagtggactgt

SEQ ID NO: 136973 - DNA, 25 bp, Probe Sequence
agtggtgttcactagatgtggaatt

SEQ ID NO: 136974 - DNA, 25 bp, Probe Sequence
agtggatgccccttgatgggaacat

SEQ ID NO: 136975 - DNA, 25 bp, Probe Sequence
agtgctggccctcatattaggaata

SEQ ID NO: 136976 - DNA, 25 bp, Probe Sequence
agtcgtcaccatcatgtattggaaa

SEQ ID NO: 136977 - DNA, 25 bp, Probe Sequence
agtcatggaaatgttgtcggaaacc

SEQ ID NO: 136978 - DNA, 25 bp, Probe Sequence
agctagatacaagacctgggcaaac

SEQ ID NO: 136979 - DNA, 25 bp, Probe Sequence
accaaataaagagctggccggccag

SEQ ID NO: 136980 - DNA, 25 bp, Probe Sequence
accactgaaaactcctgtagcctag

SEQ ID NO: 136981 - DNA, 25 bp, Probe Sequence
accctggttacaactctgaacctat

SEQ ID NO: 136982 - DNA, 25 bp, Probe Sequence
agtcctggggacattcgatacatct

SEQ ID NO: 136983 - DNA, 25 bp, Probe Sequence
agggctggtagccagtatcttccac

SEQ ID NO: 136984 - DNA, 25 bp, Probe Sequence
agggctgtttggttagcatctcatc

SEQ ID NO: 136985 - DNA, 25 bp, Probe Sequence
agtggcactgttctaatcattcacc

SEQ ID NO: 136986 - DNA, 25 bp, Probe Sequence
agtctgcctttggattaaagcacca

SEQ ID NO: 136987 - DNA, 25 bp, Probe Sequence
agtccactcatacaggataacacct

SEQ ID NO: 136988 - DNA, 25 bp, Probe Sequence
agatccagataagagttaaaacctt

SEQ ID NO: 136989 - DNA, 25 bp, Probe Sequence
agtccacattcctgtttgtaatcct

SEQ ID NO: 136990 - DNA, 25 bp, Probe Sequence
agtccagtatcatagtttgtcttcc

SEQ ID NO: 136991 - DNA, 25 bp, Probe Sequence
agtcccattgtaagtgttgtttcta

SEQ ID NO: 136992 - DNA, 25 bp, Probe Sequence
agtgccctgtgtagaatttttttca

SEQ ID NO: 136993 - DNA, 25 bp, Probe Sequence
agtgcagcaggttaagaattttttc

SEQ ID NO: 136994 - DNA, 25 bp, Probe Sequence
agtgcagggtctacaaaatatcttg

SEQ ID NO: 136995 - DNA, 25 bp, Probe Sequence
agtggctagccattaaaggtgttgc

SEQ ID NO: 136996 - DNA, 25 bp, Probe Sequence
agtggctatcctaaactggtttatc

SEQ ID NO: 136997 - DNA, 25 bp, Probe Sequence
agtggcaattccatacatattttag

SEQ ID NO: 136998 - DNA, 25 bp, Probe Sequence
agtgccatacatttctaaaatccca

SEQ ID NO: 136999 - DNA, 25 bp, Probe Sequence
agtcctgtatgaaccataacctgct

SEQ ID NO: 137000 - DNA, 25 bp, Probe Sequence
agtgccaggtgcatccaagactttc

SEQ ID NO: 137001 - DNA, 25 bp, Probe Sequence
agtgctggggcaaacaaagcaaccc

SEQ ID NO: 137002 - DNA, 25 bp, Probe Sequence
agtgtggttgctcacgcaagtaatc

SEQ ID NO: 137003 - DNA, 25 bp, Probe Sequence
agtggtgtattgtcacagtagctta

SEQ ID NO: 137004 - DNA, 25 bp, Probe Sequence
agtgtgattatgggcaatgtcctgc

SEQ ID NO: 137005 - DNA, 25 bp, Probe Sequence
agtggttatgctgaagttccttcct

SEQ ID NO: 137006 - DNA, 25 bp, Probe Sequence
agtggtcctgtcgaagtatttatca

SEQ ID NO: 137007 - DNA, 25 bp, Probe Sequence
agtggtctttcctgttgatcatgat

SEQ ID NO: 137008 - DNA, 25 bp, Probe Sequence
agtgtctcttccagggggaattctc

SEQ ID NO: 137009 - DNA, 25 bp, Probe Sequence
agtgatctgcttttactttgtaatt

SEQ ID NO: 137010 - DNA, 25 bp, Probe Sequence
agtgatctgcttttactttgtaatt

SEQ ID NO: 137011 - DNA, 25 bp, Probe Sequence
agtttcctggaagttgtgtcaactg

SEQ ID NO: 137012 - DNA, 25 bp, Probe Sequence
agtcttcctctatgtttgacgaata

SEQ ID NO: 137013 - DNA, 25 bp, Probe Sequence
agattatccttgtactttgaggaga

SEQ ID NO: 137014 - DNA, 25 bp, Probe Sequence
agtggatctcattgaagtttcaggc

SEQ ID NO: 137015 - DNA, 25 bp, Probe Sequence
agtggatctcattgaagtttcaggc

SEQ ID NO: 137016 - DNA, 25 bp, Probe Sequence
agtggatctcatcacctttgatacc

SEQ ID NO: 137017 - DNA, 25 bp, Probe Sequence
agtggtcctctgagcttactataca

SEQ ID NO: 137018 - DNA, 25 bp, Probe Sequence
agtgcctcctttaattcctaagact

SEQ ID NO: 137019 - DNA, 25 bp, Probe Sequence
agtgtaacttatacatggcctaaaa

SEQ ID NO: 137020 - DNA, 25 bp, Probe Sequence
agtgtccctgtaaaggccaggtgaa

SEQ ID NO: 137021 - DNA, 25 bp, Probe Sequence
agatggacatttgagagttaggtaa

SEQ ID NO: 137022 - DNA, 25 bp, Probe Sequence
agtgatggaattcaagcctaggcta

SEQ ID NO: 137023 - DNA, 25 bp, Probe Sequence
agtggtacatcaagtgaccgaggtt

SEQ ID NO: 137024 - DNA, 25 bp, Probe Sequence
agtgggacagcaggtgactccatgg

SEQ ID NO: 137025 - DNA, 25 bp, Probe Sequence
agtggaacgcaggctgagaacgcag

SEQ ID NO: 137026 - DNA, 25 bp, Probe Sequence
agtgctgaacagtggaggaagaggg

SEQ ID NO: 137027 - DNA, 25 bp, Probe Sequence
agtggactcgagtgagctgcaggag

SEQ ID NO: 137028 - DNA, 25 bp, Probe Sequence
agtggacttctgtgagattgtagtt

SEQ ID NO: 137029 - DNA, 25 bp, Probe Sequence
agtcaatatttgttagtttcgtttg

SEQ ID NO: 137030 - DNA, 25 bp, Probe Sequence
agtcaaattggctgatctttccgtt

SEQ ID NO: 137031 - DNA, 25 bp, Probe Sequence
agtgccaaagttgtgcatttcctgg

SEQ ID NO: 137032 - DNA, 25 bp, Probe Sequence
agtgccaaagttgtgcatttcctgg

SEQ ID NO: 137033 - DNA, 25 bp, Probe Sequence
agtgccagtcactttggggacctgg

SEQ ID NO: 137034 - DNA, 25 bp, Probe Sequence
agtgctcagtccctactgagtactc

SEQ ID NO: 137035 - DNA, 25 bp, Probe Sequence
agtgtcttgcccagtagatacaaga

SEQ ID NO: 137036 - DNA, 25 bp, Probe Sequence
agtggacatcccagaaatacatgag

SEQ ID NO: 137037 - DNA, 25 bp, Probe Sequence
agtggctctcccaactattaatgag

SEQ ID NO: 137038 - DNA, 25 bp, Probe Sequence
agtggtgtctgaaatcatattaaat

SEQ ID NO: 137039 - DNA, 25 bp, Probe Sequence
agtgggggcatttctttatatcacc

SEQ ID NO: 137040 - DNA, 25 bp, Probe Sequence
agtgggggatgtttctggaggcagc

SEQ ID NO: 137041 - DNA, 25 bp, Probe Sequence
agtggagagggtgtcatctagcgca

SEQ ID NO: 137042 - DNA, 25 bp, Probe Sequence
agtggagatgggcgtcactactgct

SEQ ID NO: 137043 - DNA, 25 bp, Probe Sequence
agtggagatgggcgtcactactgct

SEQ ID NO: 137044 - DNA, 25 bp, Probe Sequence
agtggagatgggcgtcactactgct

SEQ ID NO: 137045 - DNA, 25 bp, Probe Sequence
agtggcagttatgtgtcctgcaccc

SEQ ID NO: 137046 - DNA, 25 bp, Probe Sequence
agtgatgattttgggtcctgccgta

SEQ ID NO: 137047 - DNA, 25 bp, Probe Sequence
agtggtattctgtatactctcctta

SEQ ID NO: 137048 - DNA, 25 bp, Probe Sequence
agtgagtttcgatgactagcctggc

SEQ ID NO: 137049 - DNA, 25 bp, Probe Sequence
agtgaccttcacagcagttgttgga

SEQ ID NO: 137050 - DNA, 25 bp, Probe Sequence
agtgattttagcttcgttttggcag

SEQ ID NO: 137051 - DNA, 25 bp, Probe Sequence
agtgaatgtttatctatctttgtgg

SEQ ID NO: 137052 - DNA, 25 bp, Probe Sequence
agtggtgacttcactgatatttagt

SEQ ID NO: 137053 - DNA, 25 bp, Probe Sequence
agtggtgacttcactgatatttagt

SEQ ID NO: 137054 - DNA, 25 bp, Probe Sequence
agtgttttatgctcttagttcagta

SEQ ID NO: 137055 - DNA, 25 bp, Probe Sequence
agtgttttgaagattagttggataa

SEQ ID NO: 137056 - DNA, 25 bp, Probe Sequence
agctttgcttgagaacttttgtaac

SEQ ID NO: 137057 - DNA, 25 bp, Probe Sequence
agttgccatgtagaccccttgaaga

SEQ ID NO: 137058 - DNA, 25 bp, Probe Sequence
agttgccatgtagaccccttgaaga

SEQ ID NO: 137059 - DNA, 25 bp, Probe Sequence
agtaggttgaggtccctgggaagca

SEQ ID NO: 137060 - DNA, 25 bp, Probe Sequence
agtcggggaaaggcctgggagcagt

SEQ ID NO: 137061 - DNA, 25 bp, Probe Sequence
agtcaccaaagaaggcctggaactt

SEQ ID NO: 137062 - DNA, 25 bp, Probe Sequence
agtgcaagcaaacacctttgaattt

SEQ ID NO: 137063 - DNA, 25 bp, Probe Sequence
agtgttggaactgcctcttatttta

SEQ ID NO: 137064 - DNA, 25 bp, Probe Sequence
agtactaaaattgcattctttttct

SEQ ID NO: 137065 - DNA, 25 bp, Probe Sequence
agtaataactgcttgttttttgtgt

SEQ ID NO: 137066 - DNA, 25 bp, Probe Sequence
agtgcccaactgttataggttgttg

SEQ ID NO: 137067 - DNA, 25 bp, Probe Sequence
agtccagaacgtagtgagccttgat

SEQ ID NO: 137068 - DNA, 25 bp, Probe Sequence
agtacgaccgtgctgtgaaggaggg

SEQ ID NO: 137069 - DNA, 25 bp, Probe Sequence
agtacaaccttgctgtgaaggaggg

SEQ ID NO: 137070 - DNA, 25 bp, Probe Sequence
agtagaggcctaccttgaattaagg

SEQ ID NO: 137071 - DNA, 25 bp, Probe Sequence
agaagaaccgaggcttctaaaagag

SEQ ID NO: 137072 - DNA, 25 bp, Probe Sequence
agtgaggtcccagtagtctaaaaca

SEQ ID NO: 137073 - DNA, 25 bp, Probe Sequence
agcggggcgccagtgaattaataag

SEQ ID NO: 137074 - DNA, 25 bp, Probe Sequence
agctgagggtcctgtctgttagaag

SEQ ID NO: 137075 - DNA, 25 bp, Probe Sequence
agtgacggttctagatctgagtaaa

SEQ ID NO: 137076 - DNA, 25 bp, Probe Sequence
agtgagggactgtgttgactgacga

SEQ ID NO: 137077 - DNA, 25 bp, Probe Sequence
agtgagaaaggactttgtgctgaca

SEQ ID NO: 137078 - DNA, 25 bp, Probe Sequence
agtgagctgtagtcacaccagcctg

SEQ ID NO: 137079 - DNA, 25 bp, Probe Sequence
agtgactctgcagggaaagactggc

SEQ ID NO: 137080 - DNA, 25 bp, Probe Sequence
agtgcccgcagagatgagcaccggc

SEQ ID NO: 137081 - DNA, 25 bp, Probe Sequence
agtgcccgcagagatgagcaccggc

SEQ ID NO: 137082 - DNA, 25 bp, Probe Sequence
agtcccagcattgatgacagcgcct

SEQ ID NO: 137083 - DNA, 25 bp, Probe Sequence
agtgtaagatctgtgcaagcccata

SEQ ID NO: 137084 - DNA, 25 bp, Probe Sequence
agtgtgataactgagcggtcgcatg

SEQ ID NO: 137085 - DNA, 25 bp, Probe Sequence
agtggtcagactgaagtcaccagct

SEQ ID NO: 137086 - DNA, 25 bp, Probe Sequence
agtggttcatgcctgtaatcccagc

SEQ ID NO: 137087 - DNA, 25 bp, Probe Sequence
agtgatggctctgtgcaatatccca

SEQ ID NO: 137088 - DNA, 25 bp, Probe Sequence
agtgagtgagctgtatagtgcctgc

SEQ ID NO: 137089 - DNA, 25 bp, Probe Sequence
agtgatctagccatgcagcaatcct

SEQ ID NO: 137090 - DNA, 25 bp, Probe Sequence
agtgctcatacatgctaaactctgc

SEQ ID NO: 137091 - DNA, 25 bp, Probe Sequence
agtgatcatgtctagtaaatttgtg

SEQ ID NO: 137092 - DNA, 25 bp, Probe Sequence
agtgatgatgtcgagatcggaatgg

SEQ ID NO: 137093 - DNA, 25 bp, Probe Sequence
agtgatatatgtgggtgtgagagtg

SEQ ID NO: 137094 - DNA, 25 bp, Probe Sequence
agtgatgaagattcgggaaattaag

SEQ ID NO: 137095 - DNA, 25 bp, Probe Sequence
agtggacgcatgtcagggtgactct

SEQ ID NO: 137096 - DNA, 25 bp, Probe Sequence
agtggaccaatagggctgagctctc

SEQ ID NO: 137097 - DNA, 25 bp, Probe Sequence
agttggacacagacggcaactcctt

SEQ ID NO: 137098 - DNA, 25 bp, Probe Sequence
agtctggaagggtgcaactcctctt

SEQ ID NO: 137099 - DNA, 25 bp, Probe Sequence
agtcttaggcggtgcatgaccacgc

SEQ ID NO: 137100 - DNA, 25 bp, Probe Sequence
agtcttaggcgatgcgtgaccacgc

SEQ ID NO: 137101 - DNA, 25 bp, Probe Sequence
agtgttagggattccttccaatagt

SEQ ID NO: 137102 - DNA, 25 bp, Probe Sequence
agtgttagtggcatccatttctgat

SEQ ID NO: 137103 - DNA, 25 bp, Probe Sequence
agtgtgtatattatctcttgctcta

SEQ ID NO: 137104 - DNA, 25 bp, Probe Sequence
agtgagtagatagctctttcttgag

SEQ ID NO: 137105 - DNA, 25 bp, Probe Sequence
agtgcctatggatcatgcttcctta

SEQ ID NO: 137106 - DNA, 25 bp, Probe Sequence
agtggtgtggatgcagactcttctt

SEQ ID NO: 137107 - DNA, 25 bp, Probe Sequence
agtggagaggactgatgctcttctt

SEQ ID NO: 137108 - DNA, 25 bp, Probe Sequence
agtgctacatgtgcagagctgtctt

SEQ ID NO: 137109 - DNA, 25 bp, Probe Sequence
agtgccagagttagcagtcttttag

SEQ ID NO: 137110 - DNA, 25 bp, Probe Sequence
agtgtgcggaacagttttgtagact

SEQ ID NO: 137111 - DNA, 25 bp, Probe Sequence
agtattggacagaggttcttcagcc

SEQ ID NO: 137112 - DNA, 25 bp, Probe Sequence
agtcactggaaagagtgccagtcag

SEQ ID NO: 137113 - DNA, 25 bp, Probe Sequence
agataggggaaggggccgagcaggg

SEQ ID NO: 137114 - DNA, 25 bp, Probe Sequence
agtgaggggaactggcctgtgatgc

SEQ ID NO: 137115 - DNA, 25 bp, Probe Sequence
agtgggtcgacattttcctggacac

SEQ ID NO: 137116 - DNA, 25 bp, Probe Sequence
agtgagtgtgctgactttttaacat

SEQ ID NO: 137117 - DNA, 25 bp, Probe Sequence
agtgcagtggtgcagtcttggctca

SEQ ID NO: 137118 - DNA, 25 bp, Probe Sequence
agtgcagtgggatgctctatgatca

SEQ ID NO: 137119 - DNA, 25 bp, Probe Sequence
agtgagctgagatcgtgctactgca

SEQ ID NO: 137120 - DNA, 25 bp, Probe Sequence
agtgctgcgagatcgctggcagaga

SEQ ID NO: 137121 - DNA, 25 bp, Probe Sequence
agtgccatgcgttcgctgaaaggca

SEQ ID NO: 137122 - DNA, 25 bp, Probe Sequence
agatcctcgaacggaaagccaaatc

SEQ ID NO: 137123 - DNA, 25 bp, Probe Sequence
agtcctgggacacgtgaagcacaaa

SEQ ID NO: 137124 - DNA, 25 bp, Probe Sequence
agtattcgagaacccatagccaata

SEQ ID NO: 137125 - DNA, 25 bp, Probe Sequence
agtgtgcctggcaaccaaatcgaat

SEQ ID NO: 137126 - DNA, 25 bp, Probe Sequence
agtgacatgtcagaacagtccagac

SEQ ID NO: 137127 - DNA, 25 bp, Probe Sequence
agtggttagccatagatcattcctt

SEQ ID NO: 137128 - DNA, 25 bp, Probe Sequence
agtattccaacgtgatattccttga

SEQ ID NO: 137129 - DNA, 25 bp, Probe Sequence
cttcgttctacgtgaacccgtcaga

SEQ ID NO: 137130 - DNA, 25 bp, Probe Sequence
agtctcgtttagtgaacccgtcaga

SEQ ID NO: 137131 - DNA, 25 bp, Probe Sequence
agttcaggacggagatcccgggaga

SEQ ID NO: 137132 - DNA, 25 bp, Probe Sequence
acttactgaaggagccccgagatgt

SEQ ID NO: 137133 - DNA, 25 bp, Probe Sequence
agatctacgagataaccccaagttt

SEQ ID NO: 137134 - DNA, 25 bp, Probe Sequence
agatccagggactgaagccaaagtt

SEQ ID NO: 137135 - DNA, 25 bp, Probe Sequence
agatccaaggccacaagtaaggcta

SEQ ID NO: 137136 - DNA, 25 bp, Probe Sequence
agtccacagtgtattcagaaatcca

SEQ ID NO: 137137 - DNA, 25 bp, Probe Sequence
agtcctgcacttcaccaaggatgtc

SEQ ID NO: 137138 - DNA, 25 bp, Probe Sequence
agtgttgctgtcatcaggcaaaagt

SEQ ID NO: 137139 - DNA, 25 bp, Probe Sequence
agtgcttcgtgcctcgattgaaggt

SEQ ID NO: 137140 - DNA, 25 bp, Probe Sequence
agtggtgcccgtgggctgaaggcga

SEQ ID NO: 137141 - DNA, 25 bp, Probe Sequence
agtggtggaccaggccacagaggcg

SEQ ID NO: 137142 - DNA, 25 bp, Probe Sequence
agtgtgtggacagcgagcgcaggcc

SEQ ID NO: 137143 - DNA, 25 bp, Probe Sequence
agtgttgtaacctgctgcacggata

SEQ ID NO: 137144 - DNA, 25 bp, Probe Sequence
agtgtttaacaggaggccttgacct

SEQ ID NO: 137145 - DNA, 25 bp, Probe Sequence
agtgttctttattagtgcctctcac

SEQ ID NO: 137146 - DNA, 25 bp, Probe Sequence
agtgatttttaacttgcgtgtctgc

SEQ ID NO: 137147 - DNA, 25 bp, Probe Sequence
agtggtcgcttactttgagtgatcc

SEQ ID NO: 137148 - DNA, 25 bp, Probe Sequence
agtgttcgttcaagtctgactaccc

SEQ ID NO: 137149 - DNA, 25 bp, Probe Sequence
agtgttcgttcaagcctagcaatcc

SEQ ID NO: 137150 - DNA, 25 bp, Probe Sequence
agtgtgggcaacaagagccaaaact

SEQ ID NO: 137151 - DNA, 25 bp, Probe Sequence
agtcggtcaccaaactagtaactag

SEQ ID NO: 137152 - DNA, 25 bp, Probe Sequence
agtcacgtcccaaaacaggaactct

SEQ ID NO: 137153 - DNA, 25 bp, Probe Sequence
agtacagtttccgcaaggacatctt

SEQ ID NO: 137154 - DNA, 25 bp, Probe Sequence
agtacatgtttctgctaaagataaa

SEQ ID NO: 137155 - DNA, 25 bp, Probe Sequence
agtactgatactggagttagaaata

SEQ ID NO: 137156 - DNA, 25 bp, Probe Sequence
agtgcctcatagtctacttagaaag

SEQ ID NO: 137157 - DNA, 25 bp, Probe Sequence
agtcctagatttttgtagccaagca

SEQ ID NO: 137158 - DNA, 25 bp, Probe Sequence
agtgctcaaattatggtaggcaact

SEQ ID NO: 137159 - DNA, 25 bp, Probe Sequence
agtgacccagctagagggcaggccc

SEQ ID NO: 137160 - DNA, 25 bp, Probe Sequence
agtgacctcagctaagactgggtcc

SEQ ID NO: 137161 - DNA, 25 bp, Probe Sequence
agtgtcactaagaagcagctggggg

SEQ ID NO: 137162 - DNA, 25 bp, Probe Sequence
agtgtccttcaggaggtggctgtgc

SEQ ID NO: 137163 - DNA, 25 bp, Probe Sequence
agtgggtgtcagtatggatgtgtct

SEQ ID NO: 137164 - DNA, 25 bp, Probe Sequence
agtgggtgctgacagtggcgatctg

SEQ ID NO: 137165 - DNA, 25 bp, Probe Sequence
agtgaagtgctataggtgtggtgaa

SEQ ID NO: 137166 - DNA, 25 bp, Probe Sequence
agtaatgagtatgaggagaagtatg

SEQ ID NO: 137167 - DNA, 25 bp, Probe Sequence
agtgtgggtcagaggtgccagtagt

SEQ ID NO: 137168 - DNA, 25 bp, Probe Sequence
agtgggcagtcagggtgctaagctg

SEQ ID NO: 137169 - DNA, 25 bp, Probe Sequence
agtgaacagacacgggtgaatgctg

SEQ ID NO: 137170 - DNA, 25 bp, Probe Sequence
agtgcaacaacacctcggaggtcta

SEQ ID NO: 137171 - DNA, 25 bp, Probe Sequence
agtgcaaacagcaccgtgaggcctc

SEQ ID NO: 137172 - DNA, 25 bp, Probe Sequence
agtgcagagtcagagtcctgggacc

SEQ ID NO: 137173 - DNA, 25 bp, Probe Sequence
agtgcagaaatgtggcttttgcccc

SEQ ID NO: 137174 - DNA, 25 bp, Probe Sequence
agtgagaatgttactgctgattttc

SEQ ID NO: 137175 - DNA, 25 bp, Probe Sequence
agtgaccaagtcagaatttctattt

SEQ ID NO: 137176 - DNA, 25 bp, Probe Sequence
agtacagacagcatggatatttcct

SEQ ID NO: 137177 - DNA, 25 bp, Probe Sequence
agtccaaccttattatattctccat

SEQ ID NO: 137178 - DNA, 25 bp, Probe Sequence
agtgaagaggctgagttagtccctt

SEQ ID NO: 137179 - DNA, 25 bp, Probe Sequence
agtaggagcagtggaaatggttcct

SEQ ID NO: 137180 - DNA, 25 bp, Probe Sequence
agtgaggatcagatcaaacaggtct

SEQ ID NO: 137181 - DNA, 25 bp, Probe Sequence
agtgaagtgatgctctaccagacca

SEQ ID NO: 137182 - DNA, 25 bp, Probe Sequence
agtgaatgtgaactgcttccgtgcc

SEQ ID NO: 137183 - DNA, 25 bp, Probe Sequence
agctgaaggactcttgccgtagatt

SEQ ID NO: 137184 - DNA, 25 bp, Probe Sequence
agtgaacgtcagatcgcctggagac

SEQ ID NO: 137185 - DNA, 25 bp, Probe Sequence
agtgacacggagacatcctctccat

SEQ ID NO: 137186 - DNA, 25 bp, Probe Sequence
agtgtcagggtggacgcctgcacac

SEQ ID NO: 137187 - DNA, 25 bp, Probe Sequence
agttcaaggtggactccgacgacca

SEQ ID NO: 137188 - DNA, 25 bp, Probe Sequence
agtccagggtggctcacaaagacca

SEQ ID NO: 137189 - DNA, 25 bp, Probe Sequence
agtctaggcagaagcctcctataac

SEQ ID NO: 137190 - DNA, 25 bp, Probe Sequence
agtctcaggacaacttagcctccag

SEQ ID NO: 137191 - DNA, 25 bp, Probe Sequence
agtgcccgagccatatagcaggcac

SEQ ID NO: 137192 - DNA, 25 bp, Probe Sequence
agtccccagctcctagtagtgagct

SEQ ID NO: 137193 - DNA, 25 bp, Probe Sequence
agtccccagctcctagtagtgagct

SEQ ID NO: 137194 - DNA, 25 bp, Probe Sequence
agtggtccaccaacagctgtggagc

SEQ ID NO: 137195 - DNA, 25 bp, Probe Sequence
agtcgcccctcagagcatgatggga

SEQ ID NO: 137196 - DNA, 25 bp, Probe Sequence
agtgccttcctaggacacaggggac

SEQ ID NO: 137197 - DNA, 25 bp, Probe Sequence
agtcactggatcaggatccagggga

SEQ ID NO: 137198 - DNA, 25 bp, Probe Sequence
agtgcctgtgacaccggaggggatt

SEQ ID NO: 137199 - DNA, 25 bp, Probe Sequence
agtccagcttcctcggaggtgttta

SEQ ID NO: 137200 - DNA, 25 bp, Probe Sequence
agtcggcttggggggagagtgttct

SEQ ID NO: 137201 - DNA, 25 bp, Probe Sequence
agtgcgagcttagcgctgtgatgag

SEQ ID NO: 137202 - DNA, 25 bp, Probe Sequence
agtgctgacgtaggctttgatgctc

SEQ ID NO: 137203 - DNA, 25 bp, Probe Sequence
agtgatgggttggctggtgtgccca

SEQ ID NO: 137204 - DNA, 25 bp, Probe Sequence
agtgcagcggtatgctgttcgacca

SEQ ID NO: 137205 - DNA, 25 bp, Probe Sequence
agtccaatgtaactatttagccctg

SEQ ID NO: 137206 - DNA, 25 bp, Probe Sequence
agtcccaggggcatgtattggcctg

SEQ ID NO: 137207 - DNA, 25 bp, Probe Sequence
agtgcccagggaattgtctactcat

SEQ ID NO: 137208 - DNA, 25 bp, Probe Sequence
agtgtccaggcacattgtgtacccc

SEQ ID NO: 137209 - DNA, 25 bp, Probe Sequence
agtaacatccggatggcaacccaca

SEQ ID NO: 137210 - DNA, 25 bp, Probe Sequence
agtaaatgtcggagccaacctcagc

SEQ ID NO: 137211 - DNA, 25 bp, Probe Sequence
agtaagtggggttgcaaccactgca

SEQ ID NO: 137212 - DNA, 25 bp, Probe Sequence
agtttgtggggtgggtactctgcca

SEQ ID NO: 137213 - DNA, 25 bp, Probe Sequence
agtgtgttctctgatggttacctgc

SEQ ID NO: 137214 - DNA, 25 bp, Probe Sequence
agtgtgttctctgatggttacctgc

SEQ ID NO: 137215 - DNA, 25 bp, Probe Sequence
agtgtgttctctgatggttacctgc

SEQ ID NO: 137216 - DNA, 25 bp, Probe Sequence
agtcttcaatctgttttgagcttgg

SEQ ID NO: 137217 - DNA, 25 bp, Probe Sequence
agtctccggtggttattgaggctgg

SEQ ID NO: 137218 - DNA, 25 bp, Probe Sequence
agtctggaggctgttagctaacttg

SEQ ID NO: 137219 - DNA, 25 bp, Probe Sequence
agtctaattgcccattgccataaat

SEQ ID NO: 137220 - DNA, 25 bp, Probe Sequence
agtgataagtgtcagatcaataaca

SEQ ID NO: 137221 - DNA, 25 bp, Probe Sequence
agtgaacatggggagtattaaaatt

SEQ ID NO: 137222 - DNA, 25 bp, Probe Sequence
agaaacggttcacattccattattt

SEQ ID NO: 137223 - DNA, 25 bp, Probe Sequence
agtaacgttcattggttcctttgat

SEQ ID NO: 137224 - DNA, 25 bp, Probe Sequence
agtgaaatgttatggtctcccctct

SEQ ID NO: 137225 - DNA, 25 bp, Probe Sequence
agtgaaggttgctgaggctctgacc

SEQ ID NO: 137226 - DNA, 25 bp, Probe Sequence
agtcacaggtagtgggtctgctgcc

SEQ ID NO: 137227 - DNA, 25 bp, Probe Sequence
agtgcacggatcacagggtcatccc

SEQ ID NO: 137228 - DNA, 25 bp, Probe Sequence
agtgggggctcctgagtgcagcccc

SEQ ID NO: 137229 - DNA, 25 bp, Probe Sequence
agtcggggtctcagcagaaccccac

SEQ ID NO: 137230 - DNA, 25 bp, Probe Sequence
agtctggggaccagcgaagaccacc

SEQ ID NO: 137231 - DNA, 25 bp, Probe Sequence
agtcttcggaaatgccacagaggcc

SEQ ID NO: 137232 - DNA, 25 bp, Probe Sequence
agtgccttggcatagggctcgacac

SEQ ID NO: 137233 - DNA, 25 bp, Probe Sequence
agtgccataggcagaggggtatagg

SEQ ID NO: 137234 - DNA, 25 bp, Probe Sequence
agtcctcactcttgcaggggtagac

SEQ ID NO: 137235 - DNA, 25 bp, Probe Sequence
agttccagctggtcggagtaaggcc

SEQ ID NO: 137236 - DNA, 25 bp, Probe Sequence
agtcagggcggctggattccaggac

SEQ ID NO: 137237 - DNA, 25 bp, Probe Sequence
agtaggggccactcatattctgggc

SEQ ID NO: 137238 - DNA, 25 bp, Probe Sequence
agtgagtggagttgcccaagtctgg

SEQ ID NO: 137239 - DNA, 25 bp, Probe Sequence
agtgggaggggcccaagatctctgc

SEQ ID NO: 137240 - DNA, 25 bp, Probe Sequence
agtgttgaggacccgcagagacatt

SEQ ID NO: 137241 - DNA, 25 bp, Probe Sequence
agtcttggttctccagctaatggtg

SEQ ID NO: 137242 - DNA, 25 bp, Probe Sequence
agttgggttcttggcatagagttgc

SEQ ID NO: 137243 - DNA, 25 bp, Probe Sequence
agtcaggaactttccaaagtcagcc

SEQ ID NO: 137244 - DNA, 25 bp, Probe Sequence
agtaagacactttggaagaggagtc

SEQ ID NO: 137245 - DNA, 25 bp, Probe Sequence
agtcatcttcacattgggagggatt

SEQ ID NO: 137246 - DNA, 25 bp, Probe Sequence
agtcctttcagtgatgagggaattg

SEQ ID NO: 137247 - DNA, 25 bp, Probe Sequence
agtgcatctttgggtaatggaatgt

SEQ ID NO: 137248 - DNA, 25 bp, Probe Sequence
agtgatcttctgtttatcggttgaa

SEQ ID NO: 137249 - DNA, 25 bp, Probe Sequence
agtgtctacagattttcattgtcag

SEQ ID NO: 137250 - DNA, 25 bp, Probe Sequence
agtgtttcagtcagttcttgcaggt

SEQ ID NO: 137251 - DNA, 25 bp, Probe Sequence
agtctgtaggacgtggccttcagtt

SEQ ID NO: 137252 - DNA, 25 bp, Probe Sequence
agtcgtagtgacaggggcttgatta

SEQ ID NO: 137253 - DNA, 25 bp, Probe Sequence
agtctggagggcagtatgagctttt

SEQ ID NO: 137254 - DNA, 25 bp, Probe Sequence
agctcgaggtactgttggcttttcc

SEQ ID NO: 137255 - DNA, 25 bp, Probe Sequence
agaccgagaactgcgcggtcctgtc

SEQ ID NO: 137256 - DNA, 25 bp, Probe Sequence
agtccagaccagaactcggtccttc

SEQ ID NO: 137257 - DNA, 25 bp, Probe Sequence
agtgcgtgaacgtgtcggtggtgtc

SEQ ID NO: 137258 - DNA, 25 bp, Probe Sequence
agtgttagactgtgtgcgtgtgcgt

SEQ ID NO: 137259 - DNA, 25 bp, Probe Sequence
agtgttggactgttgccacagtgca

SEQ ID NO: 137260 - DNA, 25 bp, Probe Sequence
agtgttggatatctcatatactgca

SEQ ID NO: 137261 - DNA, 25 bp, Probe Sequence
agtgttgggattacaggcgtgagcc

SEQ ID NO: 137262 - DNA, 25 bp, Probe Sequence
agtgtctgggtttcttgagtgtggg

SEQ ID NO: 137263 - DNA, 25 bp, Probe Sequence
agttcgtggtcatcttgggggactc

SEQ ID NO: 137264 - DNA, 25 bp, Probe Sequence
agtgtcgtcgtatcggtgggtagtg

SEQ ID NO: 137265 - DNA, 25 bp, Probe Sequence
agttgcgtaggatcctgtttgtaat

SEQ ID NO: 137266 - DNA, 25 bp, Probe Sequence
agtgtgcgtgcaaaatccgcttcct

SEQ ID NO: 137267 - DNA, 25 bp, Probe Sequence
agtgatccataatcactccttctgt

SEQ ID NO: 137268 - DNA, 25 bp, Probe Sequence
agtgacagccagagaatgcccactg

SEQ ID NO: 137269 - DNA, 25 bp, Probe Sequence
agtctcagtcagcaaatggccactg

SEQ ID NO: 137270 - DNA, 25 bp, Probe Sequence
agtctagcacactgcagtgaggcca

SEQ ID NO: 137271 - DNA, 25 bp, Probe Sequence
agtgataccatcaagcctgatgtcc

SEQ ID NO: 137272 - DNA, 25 bp, Probe Sequence
agtgatttgatcaatgtcacatggt

SEQ ID NO: 137273 - DNA, 25 bp, Probe Sequence
agtgtgtcagtgactgcacattggt

SEQ ID NO: 137274 - DNA, 25 bp, Probe Sequence
agtgttcagtgttcacatagccttt

SEQ ID NO: 137275 - DNA, 25 bp, Probe Sequence
agtgcatccctgttgcaaagtctgt

SEQ ID NO: 137276 - DNA, 25 bp, Probe Sequence
agtgtccttgtagatagactgccga

SEQ ID NO: 137277 - DNA, 25 bp, Probe Sequence
agtgatctcttggacacagagcccc

SEQ ID NO: 137278 - DNA, 25 bp, Probe Sequence
agtgatgcgcagctgatcaagacgg

SEQ ID NO: 137279 - DNA, 25 bp, Probe Sequence
agtgatctgcacacacaaatataga

SEQ ID NO: 137280 - DNA, 25 bp, Probe Sequence
agtgtcagatcaataacagattaat

SEQ ID NO: 137281 - DNA, 25 bp, Probe Sequence
agtgatcaggcaattcggtcaattg

SEQ ID NO: 137282 - DNA, 25 bp, Probe Sequence
agtgaatggcaatcctaaatatgcc

SEQ ID NO: 137283 - DNA, 25 bp, Probe Sequence
agtgtatacatgcacctgaaaagac

SEQ ID NO: 137284 - DNA, 25 bp, Probe Sequence
agtccatactgagtgtcatcaacaa

SEQ ID NO: 137285 - DNA, 25 bp, Probe Sequence
agtcgccgtcaagtgcattaagaac

SEQ ID NO: 137286 - DNA, 25 bp, Probe Sequence
agtgcaacgccatagcaaatataaa

SEQ ID NO: 137287 - DNA, 25 bp, Probe Sequence
agtgcatagttgtagacaaagtaca

SEQ ID NO: 137288 - DNA, 25 bp, Probe Sequence
agtgtctgttcatgccaaagtatac

SEQ ID NO: 137289 - DNA, 25 bp, Probe Sequence
agtgtgctgtgatcaaaacctctac

SEQ ID NO: 137290 - DNA, 25 bp, Probe Sequence
agtgacttattctaagcctcatcta

SEQ ID NO: 137291 - DNA, 25 bp, Probe Sequence
agtgagttcattgaccagtcacgcc

SEQ ID NO: 137292 - DNA, 25 bp, Probe Sequence
agtaatcttttagcaaccccagtat

SEQ ID NO: 137293 - DNA, 25 bp, Probe Sequence
agatcctttttctcccttaatggat

SEQ ID NO: 137294 - DNA, 25 bp, Probe Sequence
agacttttgttggtcgccctaatag

SEQ ID NO: 137295 - DNA, 25 bp, Probe Sequence
agttttggttagtgccacaaggaat

SEQ ID NO: 137296 - DNA, 25 bp, Probe Sequence
agttttggtaagtggcccatgcacg

SEQ ID NO: 137297 - DNA, 25 bp, Probe Sequence
agtcttgtgagggagatctggggga

SEQ ID NO: 137298 - DNA, 25 bp, Probe Sequence
agtctctgctttgagtcaaggggct

SEQ ID NO: 137299 - DNA, 25 bp, Probe Sequence
agtctgcctgtttagtaagtggcaa

SEQ ID NO: 137300 - DNA, 25 bp, Probe Sequence
agtgcatcccttgttgcaagtggca

SEQ ID NO: 137301 - DNA, 25 bp, Probe Sequence
agtctcgccttctttgcaggaaaaa

SEQ ID NO: 137302 - DNA, 25 bp, Probe Sequence
agtcaacatagtggttaggaaaaca

SEQ ID NO: 137303 - DNA, 25 bp, Probe Sequence
agtgcaacattgagtcggtggagga

SEQ ID NO: 137304 - DNA, 25 bp, Probe Sequence
agtgcaaatgccatgtgggctagag

SEQ ID NO: 137305 - DNA, 25 bp, Probe Sequence
agtgaatattaaagtgtgctggaca

SEQ ID NO: 137306 - DNA, 25 bp, Probe Sequence
agtgagtttttccgtgctgtgtagg

SEQ ID NO: 137307 - DNA, 25 bp, Probe Sequence
agtgcacgtgtttctggtgctgctg

SEQ ID NO: 137308 - DNA, 25 bp, Probe Sequence
agtgctctgtgtatgcggatgattt

SEQ ID NO: 137309 - DNA, 25 bp, Probe Sequence
agtgactctgtgcttgtctgtttag

SEQ ID NO: 137310 - DNA, 25 bp, Probe Sequence
agtgaaggtggcttttgctttatag

SEQ ID NO: 137311 - DNA, 25 bp, Probe Sequence
agtgaatgtgggtgatctgctttta

SEQ ID NO: 137312 - DNA, 25 bp, Probe Sequence
agtgagaggggcctgagcttcagct

SEQ ID NO: 137313 - DNA, 25 bp, Probe Sequence
agtgcaaggtggccaactactgccg

SEQ ID NO: 137314 - DNA, 25 bp, Probe Sequence
agtcagggatggcccttactcaggt

SEQ ID NO: 137315 - DNA, 25 bp, Probe Sequence
agtcgggcatgggtgctggagaaga

SEQ ID NO: 137316 - DNA, 25 bp, Probe Sequence
agtgtactgtgggtctggtgaagct

SEQ ID NO: 137317 - DNA, 25 bp, Probe Sequence
agtgttgtcttcactggctacagtg

SEQ ID NO: 137318 - DNA, 25 bp, Probe Sequence
agtgttttgtctttagcttttctat

SEQ ID NO: 137319 - DNA, 25 bp, Probe Sequence
agtgctatttactgaagttatttat

SEQ ID NO: 137320 - DNA, 25 bp, Probe Sequence
agtgatctgtattcttagtttcatt

SEQ ID NO: 137321 - DNA, 25 bp, Probe Sequence
agtgtcattattatagactatatgt

SEQ ID NO: 137322 - DNA, 25 bp, Probe Sequence
agtgctcagacctttagactcattg

SEQ ID NO: 137323 - DNA, 25 bp, Probe Sequence
agtgccaaggcaggtggatcacctg

SEQ ID NO: 137324 - DNA, 25 bp, Probe Sequence
agtaccaggcacctgacatcgacgt

SEQ ID NO: 137325 - DNA, 25 bp, Probe Sequence
agtaccaagcctacaaggacctcaa

SEQ ID NO: 137326 - DNA, 25 bp, Probe Sequence
agtgactaaaccattgtgcattcta

SEQ ID NO: 137327 - DNA, 25 bp, Probe Sequence
agtgcacttaatattagcttgctta

SEQ ID NO: 137328 - DNA, 25 bp, Probe Sequence
agacattttcatgcttccaggtaaa

SEQ ID NO: 137329 - DNA, 25 bp, Probe Sequence
agaagcttttggctctacaggaaga

SEQ ID NO: 137330 - DNA, 25 bp, Probe Sequence
agtaccttgaggatgttctggaaga

SEQ ID NO: 137331 - DNA, 25 bp, Probe Sequence
agtacacactgcctgggttagtaag

SEQ ID NO: 137332 - DNA, 25 bp, Probe Sequence
agtccgcaccatgctggttaggaag

SEQ ID NO: 137333 - DNA, 25 bp, Probe Sequence
agctccggccaggccttgtaggaaa

SEQ ID NO: 137334 - DNA, 25 bp, Probe Sequence
agctccggccaggccttgtaggaaa

SEQ ID NO: 137335 - DNA, 25 bp, Probe Sequence
agtctgcgtccaacactgtgtagga

SEQ ID NO: 137336 - DNA, 25 bp, Probe Sequence
agtccttgcaagacgctgatgctca

SEQ ID NO: 137337 - DNA, 25 bp, Probe Sequence
agtacgtcaagaagccgatcatcct

SEQ ID NO: 137338 - DNA, 25 bp, Probe Sequence
agtgacgccaacttggagctcatca

SEQ ID NO: 137339 - DNA, 25 bp, Probe Sequence
agtgaagcgcagtatcttagctcta

SEQ ID NO: 137340 - DNA, 25 bp, Probe Sequence
agtgcaagcgagtacctatggtatg

SEQ ID NO: 137341 - DNA, 25 bp, Probe Sequence
agtgagcagcgatacctagggcgga

SEQ ID NO: 137342 - DNA, 25 bp, Probe Sequence
agtgagggaaagatgcagcaggtgg

SEQ ID NO: 137343 - DNA, 25 bp, Probe Sequence
agtgaggctgaggggtgccagcgtg

SEQ ID NO: 137344 - DNA, 25 bp, Probe Sequence
agtgaggcttctgggtgcataccag

SEQ ID NO: 137345 - DNA, 25 bp, Probe Sequence
agtgacgcaaatggcggctaggcgt

SEQ ID NO: 137346 - DNA, 25 bp, Probe Sequence
agtagacacatatgatggccgaggt

SEQ ID NO: 137347 - DNA, 25 bp, Probe Sequence
agtaatcacctactagtctagttgc

SEQ ID NO: 137348 - DNA, 25 bp, Probe Sequence
agtaaccctcagaatagcatgttta

SEQ ID NO: 137349 - DNA, 25 bp, Probe Sequence
agtaaaccacgatcgttatgctgat

SEQ ID NO: 137350 - DNA, 25 bp, Probe Sequence
agtaaaggggggtctctgcagtgta

SEQ ID NO: 137351 - DNA, 25 bp, Probe Sequence
agtccagggaggtcgaggctgcagt

SEQ ID NO: 137352 - DNA, 25 bp, Probe Sequence
agtccagagcatcagacctggccgc

SEQ ID NO: 137353 - DNA, 25 bp, Probe Sequence
agtcgcaatgattcagctcgctgag

SEQ ID NO: 137354 - DNA, 25 bp, Probe Sequence
agtcagcagtcatgcacgctgataa

SEQ ID NO: 137355 - DNA, 25 bp, Probe Sequence
agtgagcagagcgtgccgctacact

SEQ ID NO: 137356 - DNA, 25 bp, Probe Sequence
agtgagctcagcagcatgtgctaat

SEQ ID NO: 137357 - DNA, 25 bp, Probe Sequence
agtgcatgctcagccatgtacactg

SEQ ID NO: 137358 - DNA, 25 bp, Probe Sequence
agtgctgtcattgcatttcttccat

SEQ ID NO: 137359 - DNA, 25 bp, Probe Sequence
agtgctgtcattgcatttcttccat

SEQ ID NO: 137360 - DNA, 25 bp, Probe Sequence
agtgttcatttatcctgtcacatgt

SEQ ID NO: 137361 - DNA, 25 bp, Probe Sequence
agtgctcagatctaaagcctctgca

SEQ ID NO: 137362 - DNA, 25 bp, Probe Sequence
agtgctcgccagaaacccagagcta

SEQ ID NO: 137363 - DNA, 25 bp, Probe Sequence
agtgatcttaaaagctccaggcaga

SEQ ID NO: 137364 - DNA, 25 bp, Probe Sequence
agtgatcttgtaaactcagcaaagt

SEQ ID NO: 137365 - DNA, 25 bp, Probe Sequence
agtgactggtatatcttcatcagtg

SEQ ID NO: 137366 - DNA, 25 bp, Probe Sequence
agtgcacgtccgttatttcagtgac

SEQ ID NO: 137367 - DNA, 25 bp, Probe Sequence
agtgctttccggaagttagatgaat

SEQ ID NO: 137368 - DNA, 25 bp, Probe Sequence
agtctattcgggagtctgagtatag

SEQ ID NO: 137369 - DNA, 25 bp, Probe Sequence
agttagtctgttgttatagtagagc

SEQ ID NO: 137370 - DNA, 25 bp, Probe Sequence
agttcagtagttgcttccctaactg

SEQ ID NO: 137371 - DNA, 25 bp, Probe Sequence
agtaagaaggaagactcctctgacg

SEQ ID NO: 137372 - DNA, 25 bp, Probe Sequence
agtccaaagagaacctttctgtgac

SEQ ID NO: 137373 - DNA, 25 bp, Probe Sequence
gggcctagggagccgcaccttgtca

SEQ ID NO: 137374 - DNA, 25 bp, Probe Sequence
agtcccagctggtggaccttgtagc

SEQ ID NO: 137375 - DNA, 25 bp, Probe Sequence
agtgacccagaatttgaccttgata

SEQ ID NO: 137376 - DNA, 25 bp, Probe Sequence
agtgatcccagatcatggccactgt

SEQ ID NO: 137377 - DNA, 25 bp, Probe Sequence
agtgagcaacaaccatgtcctcatt

SEQ ID NO: 137378 - DNA, 25 bp, Probe Sequence
agtgcgcaggacacattcctcaatg

SEQ ID NO: 137379 - DNA, 25 bp, Probe Sequence
agtgccatccacacttgcagtgaat

SEQ ID NO: 137380 - DNA, 25 bp, Probe Sequence
agtcgtcatcagatgcttgcggcaa

SEQ ID NO: 137381 - DNA, 25 bp, Probe Sequence
agtctgttgcagatcatgaaccaaa

SEQ ID NO: 137382 - DNA, 25 bp, Probe Sequence
agtgctggatgaatctctgctcacg

SEQ ID NO: 137383 - DNA, 25 bp, Probe Sequence
agtgctgggattacaggcatgagcg

SEQ ID NO: 137384 - DNA, 25 bp, Probe Sequence
agtgctgggattacaggcgtgagcc

SEQ ID NO: 137385 - DNA, 25 bp, Probe Sequence
agtgctgggattacaggcgtgagcc

SEQ ID NO: 137386 - DNA, 25 bp, Probe Sequence
agtgctgggattacaggcgtgagcc

SEQ ID NO: 137387 - DNA, 25 bp, Probe Sequence
agtgctgggattacaggcatgggcc

SEQ ID NO: 137388 - DNA, 25 bp, Probe Sequence
agtcatgtgtgatacttctaggcct

SEQ ID NO: 137389 - DNA, 25 bp, Probe Sequence
agtgagacgatggacctggagcgcc

SEQ ID NO: 137390 - DNA, 25 bp, Probe Sequence
agtgagatcattggacactggacac

SEQ ID NO: 137391 - DNA, 25 bp, Probe Sequence
agtgcagtgatgtgatcttggctca

SEQ ID NO: 137392 - DNA, 25 bp, Probe Sequence
agtcagatgattccattctccgatt

SEQ ID NO: 137393 - DNA, 25 bp, Probe Sequence
agtgcatggatccctttcaagaacc

SEQ ID NO: 137394 - DNA, 25 bp, Probe Sequence
agtgcagtgtcatcttatcgaggag

SEQ ID NO: 137395 - DNA, 25 bp, Probe Sequence
agtgagtgcctactgtatgcaggta

SEQ ID NO: 137396 - DNA, 25 bp, Probe Sequence
agtgagctgcctgatgagatagaca

SEQ ID NO: 137397 - DNA, 25 bp, Probe Sequence
agtgactctctaaaaatgacatctg

SEQ ID NO: 137398 - DNA, 25 bp, Probe Sequence
agtcctctgctaaaacaacacgatt

SEQ ID NO: 137399 - DNA, 25 bp, Probe Sequence
agtcaccttgctcacagcaaagcca

SEQ ID NO: 137400 - DNA, 25 bp, Probe Sequence
agtccacgctgatgacgcagaagac

SEQ ID NO: 137401 - DNA, 25 bp, Probe Sequence
agtgcacacagttggtgccacataa

SEQ ID NO: 137402 - DNA, 25 bp, Probe Sequence
agtacatcagaacttgcccacatga

SEQ ID NO: 137403 - DNA, 25 bp, Probe Sequence
agtgactaaagcagccaagcagccc

SEQ ID NO: 137404 - DNA, 25 bp, Probe Sequence
agtcactattttggctcaaaccctc

SEQ ID NO: 137405 - DNA, 25 bp, Probe Sequence
agtcacaatattacttctttccttc

SEQ ID NO: 137406 - DNA, 25 bp, Probe Sequence
agtcagaatgactcgacctgtcctt

SEQ ID NO: 137407 - DNA, 25 bp, Probe Sequence
agtctttacatcgcactttcagttc

SEQ ID NO: 137408 - DNA, 25 bp, Probe Sequence
agtgctttacctgcagctcagatag

SEQ ID NO: 137409 - DNA, 25 bp, Probe Sequence
agtgattttcactgctgtcagtaga

SEQ ID NO: 137410 - DNA, 25 bp, Probe Sequence
agtttttccgtgctgtgtaggggct

SEQ ID NO: 137411 - DNA, 25 bp, Probe Sequence
agttcccctttgctttaggagtgca

SEQ ID NO: 137412 - DNA, 25 bp, Probe Sequence
agtctctccactgtggtttcagctg

SEQ ID NO: 137413 - DNA, 25 bp, Probe Sequence
agtcctccaccctgttataagagac

SEQ ID NO: 137414 - DNA, 25 bp, Probe Sequence
agtcgctgaacggcgtgcattatca

SEQ ID NO: 137415 - DNA, 25 bp, Probe Sequence
agtgctggagacgtcgtaaatattt

SEQ ID NO: 137416 - DNA, 25 bp, Probe Sequence
agtctgtacatcttggttaatatct

SEQ ID NO: 137417 - DNA, 25 bp, Probe Sequence
agtgagcccatcttgtgtttataaa

SEQ ID NO: 137418 - DNA, 25 bp, Probe Sequence
agtgacctatgacagtttgtcaaaa

SEQ ID NO: 137419 - DNA, 25 bp, Probe Sequence
agtgacacttggatttctgatcagt

SEQ ID NO: 137420 - DNA, 25 bp, Probe Sequence
agtgacctgcgcaatgtttatatgc

SEQ ID NO: 137421 - DNA, 25 bp, Probe Sequence
agtgatgcttctccatgggcatttc

SEQ ID NO: 137422 - DNA, 25 bp, Probe Sequence
agtgcatcttctgaggtcaattaaa

SEQ ID NO: 137423 - DNA, 25 bp, Probe Sequence
agtgctgtttgccagctgtatatta

SEQ ID NO: 137424 - DNA, 25 bp, Probe Sequence
agtgcatgcatgttggggtttcctt

SEQ ID NO: 137425 - DNA, 25 bp, Probe Sequence
agtgcattggtgggtctcaatcctt

SEQ ID NO: 137426 - DNA, 25 bp, Probe Sequence
agtgatttgctggtgctctattctc

SEQ ID NO: 137427 - DNA, 25 bp, Probe Sequence
agtgcttctggcgatgacatttcta

SEQ ID NO: 137428 - DNA, 25 bp, Probe Sequence
agtgctctcggcggaagtgatcgct

SEQ ID NO: 137429 - DNA, 25 bp, Probe Sequence
agtgcgctggtcggaagattgctgg

SEQ ID NO: 137430 - DNA, 25 bp, Probe Sequence
agtgccgtgactgagagagggcagt

SEQ ID NO: 137431 - DNA, 25 bp, Probe Sequence
agtgcctgtgacaacgtagagcgcg

SEQ ID NO: 137432 - DNA, 25 bp, Probe Sequence
agtctcggaaacacagagccaggaa

SEQ ID NO: 137433 - DNA, 25 bp, Probe Sequence
agttcgaaaataccaagcccagctg

SEQ ID NO: 137434 - DNA, 25 bp, Probe Sequence
agtgctcgagacaacaccatcaacc

SEQ ID NO: 137435 - DNA, 25 bp, Probe Sequence
agtgctagaatagagctatgaaagc

SEQ ID NO: 137436 - DNA, 25 bp, Probe Sequence
agtgaatgctcaaccaggagaaagc

SEQ ID NO: 137437 - DNA, 25 bp, Probe Sequence
agtgcttctcaaacgtgaataagcc

SEQ ID NO: 137438 - DNA, 25 bp, Probe Sequence
agtgcttgtcagttgttgaataaaa

SEQ ID NO: 137439 - DNA, 25 bp, Probe Sequence
agtgcctgtggaatttaaatgaata

SEQ ID NO: 137440 - DNA, 25 bp, Probe Sequence
agtgccgtcaatttgagataatgat

SEQ ID NO: 137441 - DNA, 25 bp, Probe Sequence
agtgccagtccttatgtgataaact

SEQ ID NO: 137442 - DNA, 25 bp, Probe Sequence
agtgctatgttcttggctgttcaac

SEQ ID NO: 137443 - DNA, 25 bp, Probe Sequence
agtgctcatttcttgtcttataata

SEQ ID NO: 137444 - DNA, 25 bp, Probe Sequence
agtgccaattaatttatcagactaa

SEQ ID NO: 137445 - DNA, 25 bp, Probe Sequence
agtgctccaccagactagaacttaa

SEQ ID NO: 137446 - DNA, 25 bp, Probe Sequence
agaccccacagcactagttattcat

SEQ ID NO: 137447 - DNA, 25 bp, Probe Sequence
agatccgaacacagcggtcgacatt

SEQ ID NO: 137448 - DNA, 25 bp, Probe Sequence
agtcggccaccacagattcagactt

SEQ ID NO: 137449 - DNA, 25 bp, Probe Sequence
agtcggccaccacagattcagactt

SEQ ID NO: 137450 - DNA, 25 bp, Probe Sequence
agtagtccaccttcatttaactctt

SEQ ID NO: 137451 - DNA, 25 bp, Probe Sequence
agtaacacagccattttaatttagc

SEQ ID NO: 137452 - DNA, 25 bp, Probe Sequence
agtgagacacagacatatttagaat

SEQ ID NO: 137453 - DNA, 25 bp, Probe Sequence
agtgagaagagaactttagagaaaa

SEQ ID NO: 137454 - DNA, 25 bp, Probe Sequence
agtatcagtggctccctaggaaaag

SEQ ID NO: 137455 - DNA, 25 bp, Probe Sequence
agtcattgcgggaccgcgtggaaga

SEQ ID NO: 137456 - DNA, 25 bp, Probe Sequence
agttccgggtccgggcagcagagaa

SEQ ID NO: 137457 - DNA, 25 bp, Probe Sequence
agtcccaggtgtcgggtctggagaa

SEQ ID NO: 137458 - DNA, 25 bp, Probe Sequence
agtctctaggttctgagctctggct

SEQ ID NO: 137459 - DNA, 25 bp, Probe Sequence
agtttagcgttaagcacctttatct

SEQ ID NO: 137460 - DNA, 25 bp, Probe Sequence
agtttaggttgacacgtatagaatc

SEQ ID NO: 137461 - DNA, 25 bp, Probe Sequence
agatgcttctgggaacaaggttaaa

SEQ ID NO: 137462 - DNA, 25 bp, Probe Sequence
agagctcgccacgaactagggtaag

SEQ ID NO: 137463 - DNA, 25 bp, Probe Sequence
agtctggccactgtcaaggcaggga

SEQ ID NO: 137464 - DNA, 25 bp, Probe Sequence
agtgctgcgccttattcaggatgca

SEQ ID NO: 137465 - DNA, 25 bp, Probe Sequence
agtgcaggcctgttctgaggcaata

SEQ ID NO: 137466 - DNA, 25 bp, Probe Sequence
agtgcattccagtgaagctgcaata

SEQ ID NO: 137467 - DNA, 25 bp, Probe Sequence
agtgcttatcagcataatgagctaa

SEQ ID NO: 137468 - DNA, 25 bp, Probe Sequence
agtctgttttatttgcagtaaaccg

SEQ ID NO: 137469 - DNA, 25 bp, Probe Sequence
agttgttttgcacctaaatcgacgg

SEQ ID NO: 137470 - DNA, 25 bp, Probe Sequence
agatttatttgaggaaaactacaca

SEQ ID NO: 137471 - DNA, 25 bp, Probe Sequence
agtcattttgcggtgaaaacataat

SEQ ID NO: 137472 - DNA, 25 bp, Probe Sequence
agtctattatgggcaaccaatcttt

SEQ ID NO: 137473 - DNA, 25 bp, Probe Sequence
agtgcttctgtgggagaccatatcc

SEQ ID NO: 137474 - DNA, 25 bp, Probe Sequence
agtttggtgcgaacgccattctggg

SEQ ID NO: 137475 - DNA, 25 bp, Probe Sequence
agtctttgagcgagcccattttgtg

SEQ ID NO: 137476 - DNA, 25 bp, Probe Sequence
agtcgttactgtgtccattattgga

SEQ ID NO: 137477 - DNA, 25 bp, Probe Sequence
agtcgtgtgattggcctcaagcgat

SEQ ID NO: 137478 - DNA, 25 bp, Probe Sequence
agtatgagatgtttgcccagaccct

SEQ ID NO: 137479 - DNA, 25 bp, Probe Sequence
agtgcatacatctaagcctgaaccc

SEQ ID NO: 137480 - DNA, 25 bp, Probe Sequence
agtgcagacatctgacccaagagct

SEQ ID NO: 137481 - DNA, 25 bp, Probe Sequence
agtgcatgcaaaaagccaccaaatg

SEQ ID NO: 137482 - DNA, 25 bp, Probe Sequence
agtgagccaagattgcgccactgca

SEQ ID NO: 137483 - DNA, 25 bp, Probe Sequence
agtgagccatgatagcgccactgca

SEQ ID NO: 137484 - DNA, 25 bp, Probe Sequence
agtgagctatgatcacgccgctata

SEQ ID NO: 137485 - DNA, 25 bp, Probe Sequence
agtgccatcagacaagatcagttga

SEQ ID NO: 137486 - DNA, 25 bp, Probe Sequence
agtgcatcatgccaaaacaggttat

SEQ ID NO: 137487 - DNA, 25 bp, Probe Sequence
agagattgatgctcacataggttgt

SEQ ID NO: 137488 - DNA, 25 bp, Probe Sequence
agtgcatctgatgaccatactgttt

SEQ ID NO: 137489 - DNA, 25 bp, Probe Sequence
agtgctctgatgtaaaacttctcat

SEQ ID NO: 137490 - DNA, 25 bp, Probe Sequence
agtgacaagtgagcagaattctgat

SEQ ID NO: 137491 - DNA, 25 bp, Probe Sequence
agtgactctggaccagcaattctga

SEQ ID NO: 137492 - DNA, 25 bp, Probe Sequence
agtgagccgagatcgtgtcactgca

SEQ ID NO: 137493 - DNA, 25 bp, Probe Sequence
agtgagccgagatcgtgtcactgca

SEQ ID NO: 137494 - DNA, 25 bp, Probe Sequence
agtgagccaagatcacaccactgca

SEQ ID NO: 137495 - DNA, 25 bp, Probe Sequence
agtgagccaagatcatgcctactgc

SEQ ID NO: 137496 - DNA, 25 bp, Probe Sequence
agtgacatagcacttcagcctagcc

SEQ ID NO: 137497 - DNA, 25 bp, Probe Sequence
agtgagctgtcattgtgccactatc

SEQ ID NO: 137498 - DNA, 25 bp, Probe Sequence
agtgagctgtatagtgcctgctgac

SEQ ID NO: 137499 - DNA, 25 bp, Probe Sequence
agtgactgaatattgcctctgaggg

SEQ ID NO: 137500 - DNA, 25 bp, Probe Sequence
agtgagctgagatcatgccatggca

SEQ ID NO: 137501 - DNA, 25 bp, Probe Sequence
agtgagctgagatcatgccatggca

SEQ ID NO: 137502 - DNA, 25 bp, Probe Sequence
agtgcatgaagtgcatgtcatacac

SEQ ID NO: 137503 - DNA, 25 bp, Probe Sequence
agtcagatgctttcatttacacaga

SEQ ID NO: 137504 - DNA, 25 bp, Probe Sequence
agtgcagctttatttatctccagga

SEQ ID NO: 137505 - DNA, 25 bp, Probe Sequence
agtgccttactagtattctcagaac

SEQ ID NO: 137506 - DNA, 25 bp, Probe Sequence
agtgccttactagtattctcagaac

SEQ ID NO: 137507 - DNA, 25 bp, Probe Sequence
agtgactctcagcagtgtttaaagc

SEQ ID NO: 137508 - DNA, 25 bp, Probe Sequence
agtgactcagatcactggtataaat

SEQ ID NO: 137509 - DNA, 25 bp, Probe Sequence
agtgcaccatgtcactgtgctatcc

SEQ ID NO: 137510 - DNA, 25 bp, Probe Sequence
agtgaccatcccgagctgaatatcg

SEQ ID NO: 137511 - DNA, 25 bp, Probe Sequence
agtcccaccaccagagagatcggtg

SEQ ID NO: 137512 - DNA, 25 bp, Probe Sequence
agtcccctcaccatagaagatgaga

SEQ ID NO: 137513 - DNA, 25 bp, Probe Sequence
agtgaaaccaacatagaagctagta

SEQ ID NO: 137514 - DNA, 25 bp, Probe Sequence
agtgaacaccccatgtgacaaaaga

SEQ ID NO: 137515 - DNA, 25 bp, Probe Sequence
agtacacaagactctggactacagg

SEQ ID NO: 137516 - DNA, 25 bp, Probe Sequence
agtagacgattcctctgggtcaatc

SEQ ID NO: 137517 - DNA, 25 bp, Probe Sequence
agttgacgccttcccagagtcaacc

SEQ ID NO: 137518 - DNA, 25 bp, Probe Sequence
agtctcactgccgttaagattcaga

SEQ ID NO: 137519 - DNA, 25 bp, Probe Sequence
agtccacatttcttgaagtccacag

SEQ ID NO: 137520 - DNA, 25 bp, Probe Sequence
agtccactttattctggggcactgt

SEQ ID NO: 137521 - DNA, 25 bp, Probe Sequence
agtccctcttattcatgtgggatat

SEQ ID NO: 137522 - DNA, 25 bp, Probe Sequence
agtccattttgcatctgttggtaat

SEQ ID NO: 137523 - DNA, 25 bp, Probe Sequence
agatcgtttctcatctctaagtgcc

SEQ ID NO: 137524 - DNA, 25 bp, Probe Sequence
agtctgtctgcatcttctaaagctc

SEQ ID NO: 137525 - DNA, 25 bp, Probe Sequence
agtctgtccaggacctcacagatct

SEQ ID NO: 137526 - DNA, 25 bp, Probe Sequence
agtctggcagcagtgtcacatccaa

SEQ ID NO: 137527 - DNA, 25 bp, Probe Sequence
agtctctgcatgtttccaagagcaa

SEQ ID NO: 137528 - DNA, 25 bp, Probe Sequence
agtgcagtgaccttcataaagcata

SEQ ID NO: 137529 - DNA, 25 bp, Probe Sequence
agtgcagtactggtccacagagaag

SEQ ID NO: 137530 - DNA, 25 bp, Probe Sequence
agtcagcccatggtctatagtatac

SEQ ID NO: 137531 - DNA, 25 bp, Probe Sequence
agtcatgcacctgtttacatggaca

SEQ ID NO: 137532 - DNA, 25 bp, Probe Sequence
agtgcatctcttgttggacataggc

SEQ ID NO: 137533 - DNA, 25 bp, Probe Sequence
agtgcaacttgaattgtcaatgagt

SEQ ID NO: 137534 - DNA, 25 bp, Probe Sequence
agtgcaactgaaacttttgcattac

SEQ ID NO: 137535 - DNA, 25 bp, Probe Sequence
agtgccctgcaggctgtttatatgt

SEQ ID NO: 137536 - DNA, 25 bp, Probe Sequence
agtgacatgtgaggcagtattaaat

SEQ ID NO: 137537 - DNA, 25 bp, Probe Sequence
agtacttggcctgtatataatggca

SEQ ID NO: 137538 - DNA, 25 bp, Probe Sequence
agtcatttggctccttggggatggc

SEQ ID NO: 137539 - DNA, 25 bp, Probe Sequence
agtgctaaggtaatgctggaggatg

SEQ ID NO: 137540 - DNA, 25 bp, Probe Sequence
agtcatagaatgtttgttagctgtg

SEQ ID NO: 137541 - DNA, 25 bp, Probe Sequence
agtgcaataatgtaagctgaatctt

SEQ ID NO: 137542 - DNA, 25 bp, Probe Sequence
agtgcaataatgtaagctgaatctt

SEQ ID NO: 137543 - DNA, 25 bp, Probe Sequence
agtccttcatgatcagcgcagacat

SEQ ID NO: 137544 - DNA, 25 bp, Probe Sequence
agtcctagtcagcagctcagagctc

SEQ ID NO: 137545 - DNA, 25 bp, Probe Sequence
agtaatcacaagcagcatccgtttt

SEQ ID NO: 137546 - DNA, 25 bp, Probe Sequence
agtgaatcatccagactcctcatgg

SEQ ID NO: 137547 - DNA, 25 bp, Probe Sequence
agtcagtccgcaagatatttatgga

SEQ ID NO: 137548 - DNA, 25 bp, Probe Sequence
agtgaagccaataatccatataaga

SEQ ID NO: 137549 - DNA, 25 bp, Probe Sequence
agtgaagccatgattgccttcctca

SEQ ID NO: 137550 - DNA, 25 bp, Probe Sequence
agtcgggcatgagtctgtttcccaa

SEQ ID NO: 137551 - DNA, 25 bp, Probe Sequence
agtgcagagtgcttggctgtttcct

SEQ ID NO: 137552 - DNA, 25 bp, Probe Sequence
agtgaagtggtgccattttctctct

SEQ ID NO: 137553 - DNA, 25 bp, Probe Sequence
agtgcatatgatgtgacatttttct

SEQ ID NO: 137554 - DNA, 25 bp, Probe Sequence
agtgcattatttagtttgagctctg

SEQ ID NO: 137555 - DNA, 25 bp, Probe Sequence
agtgcattatttagtttgagctctg

SEQ ID NO: 137556 - DNA, 25 bp, Probe Sequence
agtgccttagcatgtgttgcagctg

SEQ ID NO: 137557 - DNA, 25 bp, Probe Sequence
agtgccattgcctgtttgggagaca

SEQ ID NO: 137558 - DNA, 25 bp, Probe Sequence
agtgccgcatccaggtgagcgaaga

SEQ ID NO: 137559 - DNA, 25 bp, Probe Sequence
agtgcctgacttgggataggactga

SEQ ID NO: 137560 - DNA, 25 bp, Probe Sequence
agtgcctgactgggaatggggatgg

SEQ ID NO: 137561 - DNA, 25 bp, Probe Sequence
agtcacgcatgcagtgttggggatg

SEQ ID NO: 137562 - DNA, 25 bp, Probe Sequence
agtccttcaaagctggagtctgtcc

SEQ ID NO: 137563 - DNA, 25 bp, Probe Sequence
agtcacttgcaaccgtggaggagcc

SEQ ID NO: 137564 - DNA, 25 bp, Probe Sequence
agttcttcaaggaatggggggccag

SEQ ID NO: 137565 - DNA, 25 bp, Probe Sequence
agttctattggacattggtggttta

SEQ ID NO: 137566 - DNA, 25 bp, Probe Sequence
agtctcttttcatactggctgttgg

SEQ ID NO: 137567 - DNA, 25 bp, Probe Sequence
agtgctcaattttaatttggttcag

SEQ ID NO: 137568 - DNA, 25 bp, Probe Sequence
agtgctaatatttgatctttattgt

SEQ ID NO: 137569 - DNA, 25 bp, Probe Sequence
agtgctttatatttgtctgatttta

SEQ ID NO: 137570 - DNA, 25 bp, Probe Sequence
agtgctctttgattaccttttctat

SEQ ID NO: 137571 - DNA, 25 bp, Probe Sequence
agtgccattttatactttctctctg

SEQ ID NO: 137572 - DNA, 25 bp, Probe Sequence
agtcctgttcgaaaccaagcatcct

SEQ ID NO: 137573 - DNA, 25 bp, Probe Sequence
agtcctgtgggaagcattcaggctc

SEQ ID NO: 137574 - DNA, 25 bp, Probe Sequence
agtcctgcggaaatgtgtcttgtct

SEQ ID NO: 137575 - DNA, 25 bp, Probe Sequence
agtccctgaaaaggtgcatttcttc

SEQ ID NO: 137576 - DNA, 25 bp, Probe Sequence
agtccctggagaaggcatgttccca

SEQ ID NO: 137577 - DNA, 25 bp, Probe Sequence
agtccctgtgtcaggatggtacaga

SEQ ID NO: 137578 - DNA, 25 bp, Probe Sequence
agtacctggatcagcggctgaaagg

SEQ ID NO: 137579 - DNA, 25 bp, Probe Sequence
agtccacatggcctcctgtggatat

SEQ ID NO: 137580 - DNA, 25 bp, Probe Sequence
agtcgcacacatctccagcgataaa

SEQ ID NO: 137581 - DNA, 25 bp, Probe Sequence
agtgccacaatgggtcagctgtacc

SEQ ID NO: 137582 - DNA, 25 bp, Probe Sequence
agtgcccatgattctgtcagtaaat

SEQ ID NO: 137583 - DNA, 25 bp, Probe Sequence
agtgcccatgaaggtcagactgagg

SEQ ID NO: 137584 - DNA, 25 bp, Probe Sequence
agtcccacaaaggcagtctagtccc

SEQ ID NO: 137585 - DNA, 25 bp, Probe Sequence
agtgctcccaaagagacctttgctc

SEQ ID NO: 137586 - DNA, 25 bp, Probe Sequence
agtcaccgaaagagagcgcctatct

SEQ ID NO: 137587 - DNA, 25 bp, Probe Sequence
agtccttcaaagatgaccaccatat

SEQ ID NO: 137588 - DNA, 25 bp, Probe Sequence
agtccactggcgtcttcaccaccat

SEQ ID NO: 137589 - DNA, 25 bp, Probe Sequence
agtccctgagtctgaaacatcatct

SEQ ID NO: 137590 - DNA, 25 bp, Probe Sequence
agtccctggctataagatctggatt

SEQ ID NO: 137591 - DNA, 25 bp, Probe Sequence
agtgcctggttgtaaacctgtgatg

SEQ ID NO: 137592 - DNA, 25 bp, Probe Sequence
agtcctgaggagagaaccggtgcgt

SEQ ID NO: 137593 - DNA, 25 bp, Probe Sequence
agtcctggcgtgtggcacacgcctg

SEQ ID NO: 137594 - DNA, 25 bp, Probe Sequence
agtccattgccttaacacaagcctg

SEQ ID NO: 137595 - DNA, 25 bp, Probe Sequence
agtccaagacctagccaatggcaac

SEQ ID NO: 137596 - DNA, 25 bp, Probe Sequence
agttccagcccaacacagtgaacac

SEQ ID NO: 137597 - DNA, 25 bp, Probe Sequence
agttactgcccagaggctgggcccc

SEQ ID NO: 137598 - DNA, 25 bp, Probe Sequence
agtcatcagcgccatcagcgaggcg

SEQ ID NO: 137599 - DNA, 25 bp, Probe Sequence
agtgccatgcagccaacatggtggg

SEQ ID NO: 137600 - DNA, 25 bp, Probe Sequence
agtagcgagtgatctggcggggggc

SEQ ID NO: 137601 - DNA, 25 bp, Probe Sequence
agtcccagatgatgtgtgcggagga

SEQ ID NO: 137602 - DNA, 25 bp, Probe Sequence
agtccatcagatttgctctgggccg

SEQ ID NO: 137603 - DNA, 25 bp, Probe Sequence
agtccatcagatttgctctgggccg

SEQ ID NO: 137604 - DNA, 25 bp, Probe Sequence
agtacagcaattacgtgcggcccat

SEQ ID NO: 137605 - DNA, 25 bp, Probe Sequence
agtacagaatttcagccagcagccc

SEQ ID NO: 137606 - DNA, 25 bp, Probe Sequence
agtacaaagaaatctcagcccccac

SEQ ID NO: 137607 - DNA, 25 bp, Probe Sequence
agtataaagaaatccgccaggcgcg

SEQ ID NO: 137608 - DNA, 25 bp, Probe Sequence
tagtataaagaattactggtcgggt

SEQ ID NO: 137609 - DNA, 25 bp, Probe Sequence
gagttaataaagtgtggtagtgcct

SEQ ID NO: 137610 - DNA, 25 bp, Probe Sequence
gagttaacacaacagggtcctggcc

SEQ ID NO: 137611 - DNA, 25 bp, Probe Sequence
agtttaaaacttatgctatctgcgg

SEQ ID NO: 137612 - DNA, 25 bp, Probe Sequence
agtttacaatcactccttcaaccac

SEQ ID NO: 137613 - DNA, 25 bp, Probe Sequence
agtaatgaaatcccttccacagacg

SEQ ID NO: 137614 - DNA, 25 bp, Probe Sequence
agtccatgactaaatcttccgcaga

SEQ ID NO: 137615 - DNA, 25 bp, Probe Sequence
agtcatcaactatgaccttcccacc

SEQ ID NO: 137616 - DNA, 25 bp, Probe Sequence
agtccaagaagatcctgacacccgc

SEQ ID NO: 137617 - DNA, 25 bp, Probe Sequence
agtcctggaaaatctgatgagccac

SEQ ID NO: 137618 - DNA, 25 bp, Probe Sequence
agtgcctgggaatcttgagtcaatc

SEQ ID NO: 137619 - DNA, 25 bp, Probe Sequence
agtgcctgtgtggatttttgtgaaa

SEQ ID NO: 137620 - DNA, 25 bp, Probe Sequence
agtgcctgtgatggcatctttcatc

SEQ ID NO: 137621 - DNA, 25 bp, Probe Sequence
agtgcctgtgatggcatctttcatc

SEQ ID NO: 137622 - DNA, 25 bp, Probe Sequence
agtctctgatcaagcagattccacg

SEQ ID NO: 137623 - DNA, 25 bp, Probe Sequence
agtctctgctgcacgatggcagccc

SEQ ID NO: 137624 - DNA, 25 bp, Probe Sequence
agtgctagctgaaggatgagcagca

SEQ ID NO: 137625 - DNA, 25 bp, Probe Sequence
agtcatcattgactgtgatatcata

SEQ ID NO: 137626 - DNA, 25 bp, Probe Sequence
agtcacagctggttaatcatcagag

SEQ ID NO: 137627 - DNA, 25 bp, Probe Sequence
agtcacagctcagacttcatagagc

SEQ ID NO: 137628 - DNA, 25 bp, Probe Sequence
agtcagccacttactgtctaatgat

SEQ ID NO: 137629 - DNA, 25 bp, Probe Sequence
agtcaggactctatgttcaatattt

SEQ ID NO: 137630 - DNA, 25 bp, Probe Sequence
agtcagaggccttatttgatatttt

SEQ ID NO: 137631 - DNA, 25 bp, Probe Sequence
agtcgatggacttcctgatattgtt

SEQ ID NO: 137632 - DNA, 25 bp, Probe Sequence
agtccttggcttgccatttttcaaa

SEQ ID NO: 137633 - DNA, 25 bp, Probe Sequence
agtgccagatgtattccatttttaa

SEQ ID NO: 137634 - DNA, 25 bp, Probe Sequence
agtctgtgatgtattaataatgcct

SEQ ID NO: 137635 - DNA, 25 bp, Probe Sequence
agtctgtgttgtgtcctgacacctc

SEQ ID NO: 137636 - DNA, 25 bp, Probe Sequence
agtgcctgttgttctcattacaacc

SEQ ID NO: 137637 - DNA, 25 bp, Probe Sequence
agtgctctgcatagtttactgaaac

SEQ ID NO: 137638 - DNA, 25 bp, Probe Sequence
agttgccatggttaccgaggaccct

SEQ ID NO: 137639 - DNA, 25 bp, Probe Sequence
agtattggggaaccttgtacccatg

SEQ ID NO: 137640 - DNA, 25 bp, Probe Sequence
agttttggggcacctcttaattcat

SEQ ID NO: 137641 - DNA, 25 bp, Probe Sequence
agtttgtccggctgcttggaagcct

SEQ ID NO: 137642 - DNA, 25 bp, Probe Sequence
agttgtttatactgtatggtaccat

SEQ ID NO: 137643 - DNA, 25 bp, Probe Sequence
agtatttttgcctgttagtgattgt

SEQ ID NO: 137644 - DNA, 25 bp, Probe Sequence
agtttttcctacgcgtgatattgac

SEQ ID NO: 137645 - DNA, 25 bp, Probe Sequence
agtctcttgtccaagcaggtgtact

SEQ ID NO: 137646 - DNA, 25 bp, Probe Sequence
agtgctctctgtatagggccataat

SEQ ID NO: 137647 - DNA, 25 bp, Probe Sequence
agtgctcttgtggtaggtggataac

SEQ ID NO: 137648 - DNA, 25 bp, Probe Sequence
agtctcttgtgggaggtgcttcagg

SEQ ID NO: 137649 - DNA, 25 bp, Probe Sequence
agtctctctgggcaggtgtagtggt

SEQ ID NO: 137650 - DNA, 25 bp, Probe Sequence
agtgcctgctgacttaggtggcgtg

SEQ ID NO: 137651 - DNA, 25 bp, Probe Sequence
agtgcatttgaacttggtacctgtg

SEQ ID NO: 137652 - DNA, 25 bp, Probe Sequence
agtgcatttaaatcattagaagctt

SEQ ID NO: 137653 - DNA, 25 bp, Probe Sequence
agtgctttactttttgcacaatttt

SEQ ID NO: 137654 - DNA, 25 bp, Probe Sequence
agtcatttacttcttctctttatat

SEQ ID NO: 137655 - DNA, 25 bp, Probe Sequence
agtcagtttccaccaacactttaga

SEQ ID NO: 137656 - DNA, 25 bp, Probe Sequence
agtaatttgaatgaaccttgctgaa

SEQ ID NO: 137657 - DNA, 25 bp, Probe Sequence
agtacctgtaatgagaaacagtaaa

SEQ ID NO: 137658 - DNA, 25 bp, Probe Sequence
agttagctttgtaagaaacagtcaa

SEQ ID NO: 137659 - DNA, 25 bp, Probe Sequence
agtctgagtatagagagaatggctt

SEQ ID NO: 137660 - DNA, 25 bp, Probe Sequence
agtcggtgatgattgggactgctct

SEQ ID NO: 137661 - DNA, 25 bp, Probe Sequence
agtgctgggatgacaggcatgaatc

SEQ ID NO: 137662 - DNA, 25 bp, Probe Sequence
agtgctgggatgacaggcatgaatc

SEQ ID NO: 137663 - DNA, 25 bp, Probe Sequence
agtgccagtcagcagtcatgcacgc

SEQ ID NO: 137664 - DNA, 25 bp, Probe Sequence
agtctcaggatgcaccatcaagcat

SEQ ID NO: 137665 - DNA, 25 bp, Probe Sequence
agtctgagatggcaccactagcact

SEQ ID NO: 137666 - DNA, 25 bp, Probe Sequence
agtcgagatggtgccactgcattcc

SEQ ID NO: 137667 - DNA, 25 bp, Probe Sequence
agtcaagggttcactgcatttctcc

SEQ ID NO: 137668 - DNA, 25 bp, Probe Sequence
agtcaagggttcactgcatttctcc

SEQ ID NO: 137669 - DNA, 25 bp, Probe Sequence
agtcaacgagagccttcgctgactc

SEQ ID NO: 137670 - DNA, 25 bp, Probe Sequence
agtcaacgagagccttcgctgactc

SEQ ID NO: 137671 - DNA, 25 bp, Probe Sequence
agtcacaagtcagcattcgctacaa

SEQ ID NO: 137672 - DNA, 25 bp, Probe Sequence
agtcagagagtatacttctataaat

SEQ ID NO: 137673 - DNA, 25 bp, Probe Sequence
agtcactcctctcatttctaaaata

SEQ ID NO: 137674 - DNA, 25 bp, Probe Sequence
agtacctgctctcaaattgaaaaaa

SEQ ID NO: 137675 - DNA, 25 bp, Probe Sequence
agttccttgccttaataaatatgta

SEQ ID NO: 137676 - DNA, 25 bp, Probe Sequence
agttcacttcagtgggaagattgta

SEQ ID NO: 137677 - DNA, 25 bp, Probe Sequence
agttctaacagataggaatgaccta

SEQ ID NO: 137678 - DNA, 25 bp, Probe Sequence
agtactagtagatagcccagtttta

SEQ ID NO: 137679 - DNA, 25 bp, Probe Sequence
agacaaacggatgcacccgtcttta

SEQ ID NO: 137680 - DNA, 25 bp, Probe Sequence
agagagaaggttgtcccgctttatg

SEQ ID NO: 137681 - DNA, 25 bp, Probe Sequence
agagaataccttggtctcacctatc

SEQ ID NO: 137682 - DNA, 25 bp, Probe Sequence
agtaaagccttggtcttctcgacac

SEQ ID NO: 137683 - DNA, 25 bp, Probe Sequence
agtaaaccgagaccatttgcaggag

SEQ ID NO: 137684 - DNA, 25 bp, Probe Sequence
agataccccgaagccatggcaagca

SEQ ID NO: 137685 - DNA, 25 bp, Probe Sequence
aatacgcccccgaaattcaagattg

SEQ ID NO: 137686 - DNA, 25 bp, Probe Sequence
agtttccaccaacactttagattgc

SEQ ID NO: 137687 - DNA, 25 bp, Probe Sequence
agttttcttccactacattgttgaa

SEQ ID NO: 137688 - DNA, 25 bp, Probe Sequence
agtactgtcttccagctattttagt

SEQ ID NO: 137689 - DNA, 25 bp, Probe Sequence
agtcgttgcttcagtgttctgtggt

SEQ ID NO: 137690 - DNA, 25 bp, Probe Sequence
agtccttctgctgcttttttgggat

SEQ ID NO: 137691 - DNA, 25 bp, Probe Sequence
agtccttttgagttgatttctggaa

SEQ ID NO: 137692 - DNA, 25 bp, Probe Sequence
agtcctgcttaaattcacatggtgt

SEQ ID NO: 137693 - DNA, 25 bp, Probe Sequence
agtccagttgcataagcactgttat

SEQ ID NO: 137694 - DNA, 25 bp, Probe Sequence
agtctcagtgtctttcagagtttga

SEQ ID NO: 137695 - DNA, 25 bp, Probe Sequence
agtcaagtcactggtctgtttgcat

SEQ ID NO: 137696 - DNA, 25 bp, Probe Sequence
agtcagggagtagctgctgcttcac

SEQ ID NO: 137697 - DNA, 25 bp, Probe Sequence
agtcagtcggatttgcagcttctgc

SEQ ID NO: 137698 - DNA, 25 bp, Probe Sequence
agtcagactaatttccttctttcct

SEQ ID NO: 137699 - DNA, 25 bp, Probe Sequence
agtagtttatttctgctctaattaa

SEQ ID NO: 137700 - DNA, 25 bp, Probe Sequence
agtaccaataaatttgtcaaactca

SEQ ID NO: 137701 - DNA, 25 bp, Probe Sequence
agtacataagactttaaagaagctg

SEQ ID NO: 137702 - DNA, 25 bp, Probe Sequence
agtccacaacacgtgtaaactcctg

SEQ ID NO: 137703 - DNA, 25 bp, Probe Sequence
agtccaccttcatttaactctttga

SEQ ID NO: 137704 - DNA, 25 bp, Probe Sequence
agtccccattcttctggaattggat

SEQ ID NO: 137705 - DNA, 25 bp, Probe Sequence
agtcccaacctcggggatgtgtgca

SEQ ID NO: 137706 - DNA, 25 bp, Probe Sequence
agtactcccacaattggccagggca

SEQ ID NO: 137707 - DNA, 25 bp, Probe Sequence
agtactacatgggcttggccgaaga

SEQ ID NO: 137708 - DNA, 25 bp, Probe Sequence
agtacccagggtacatgtgggagat

SEQ ID NO: 137709 - DNA, 25 bp, Probe Sequence
agtccaccagtgattctgtaaagag

SEQ ID NO: 137710 - DNA, 25 bp, Probe Sequence
agtacccaaatcctggtgaatagag

SEQ ID NO: 137711 - DNA, 25 bp, Probe Sequence
agtccctaatttctgctgctataga

SEQ ID NO: 137712 - DNA, 25 bp, Probe Sequence
agtcgcctttgatcttcactatata

SEQ ID NO: 137713 - DNA, 25 bp, Probe Sequence
agtcgcctttgatcttcactatata

SEQ ID NO: 137714 - DNA, 25 bp, Probe Sequence
agtcccagctgtaggcttgtaaata

SEQ ID NO: 137715 - DNA, 25 bp, Probe Sequence
agtcccagtatacctcatttttcat

SEQ ID NO: 137716 - DNA, 25 bp, Probe Sequence
agtcctattcaacctagctttcgaa

SEQ ID NO: 137717 - DNA, 25 bp, Probe Sequence
agtcactgagtccgtatctgtttcg

SEQ ID NO: 137718 - DNA, 25 bp, Probe Sequence
agtcactgaggccattcctgtatca

SEQ ID NO: 137719 - DNA, 25 bp, Probe Sequence
agtcctattctattgcagttataga

SEQ ID NO: 137720 - DNA, 25 bp, Probe Sequence
agtacaaatacttagcaccatagat

SEQ ID NO: 137721 - DNA, 25 bp, Probe Sequence
agtaccaacagcacagaggcagaaa

SEQ ID NO: 137722 - DNA, 25 bp, Probe Sequence
agtccgccactcacggacaagagct

SEQ ID NO: 137723 - DNA, 25 bp, Probe Sequence
agttaccaccaaggataccaggatg

SEQ ID NO: 137724 - DNA, 25 bp, Probe Sequence
agatttccctttagacccagcaggg

SEQ ID NO: 137725 - DNA, 25 bp, Probe Sequence
agtcatgctacctgtagagcctgca

SEQ ID NO: 137726 - DNA, 25 bp, Probe Sequence
agtcatggaatcttgctgcaggccc

SEQ ID NO: 137727 - DNA, 25 bp, Probe Sequence
agtccagcagactgtgcatgctcct

SEQ ID NO: 137728 - DNA, 25 bp, Probe Sequence
agtccatgtgaagtcacttcctggg

SEQ ID NO: 137729 - DNA, 25 bp, Probe Sequence
agtgccttgagagtttcacctgggc

SEQ ID NO: 137730 - DNA, 25 bp, Probe Sequence
agtgcgatcaaagttctacgtgcga

SEQ ID NO: 137731 - DNA, 25 bp, Probe Sequence
agtcctagcatagtactaagttaat

SEQ ID NO: 137732 - DNA, 25 bp, Probe Sequence
agtccttgaagctttacagttaatt

SEQ ID NO: 137733 - DNA, 25 bp, Probe Sequence
agtccttcaactgttcatatctact

SEQ ID NO: 137734 - DNA, 25 bp, Probe Sequence
agtgccttcaatactttgcattttg

SEQ ID NO: 137735 - DNA, 25 bp, Probe Sequence
agtcctgtgaatttcttcactgttg

SEQ ID NO: 137736 - DNA, 25 bp, Probe Sequence
agtcctataagcttttccacttgat

SEQ ID NO: 137737 - DNA, 25 bp, Probe Sequence
agttctgtgaactggtccaaggagg

SEQ ID NO: 137738 - DNA, 25 bp, Probe Sequence
agtctttgagacgggtgcccggcac

SEQ ID NO: 137739 - DNA, 25 bp, Probe Sequence
agttgttgcagataatttccagaga

SEQ ID NO: 137740 - DNA, 25 bp, Probe Sequence
agttggtgttgagcatattcctggg

SEQ ID NO: 137741 - DNA, 25 bp, Probe Sequence
agttcagtttagcacatgttcaaat

SEQ ID NO: 137742 - DNA, 25 bp, Probe Sequence
agatatggtatagatgaagttagac

SEQ ID NO: 137743 - DNA, 25 bp, Probe Sequence
agtacctgaatcctgaatcttagac

SEQ ID NO: 137744 - DNA, 25 bp, Probe Sequence
agtactgaaatcccaccttatgtga

SEQ ID NO: 137745 - DNA, 25 bp, Probe Sequence
agtaataaataaaccatgatcttga

SEQ ID NO: 137746 - DNA, 25 bp, Probe Sequence
agtctatgaccattaggcctattta

SEQ ID NO: 137747 - DNA, 25 bp, Probe Sequence
agtctcatagtataccagctttggt

SEQ ID NO: 137748 - DNA, 25 bp, Probe Sequence
agtctggcgtgatcaacattttgtt

SEQ ID NO: 137749 - DNA, 25 bp, Probe Sequence
agtcatgtcgattagctgttcttct

SEQ ID NO: 137750 - DNA, 25 bp, Probe Sequence
agtctcttcaaggcattatctcctg

SEQ ID NO: 137751 - DNA, 25 bp, Probe Sequence
agtctctgaagacctgatgacccag

SEQ ID NO: 137752 - DNA, 25 bp, Probe Sequence
agtcctgctcagaactagacctaag

SEQ ID NO: 137753 - DNA, 25 bp, Probe Sequence
agtgcctctcacaaaagatcctgga

SEQ ID NO: 137754 - DNA, 25 bp, Probe Sequence
agtgcctctcccagaaactgagaca

SEQ ID NO: 137755 - DNA, 25 bp, Probe Sequence
agtacccacacatgcaaaataaatg

SEQ ID NO: 137756 - DNA, 25 bp, Probe Sequence
agtacagccgcaagaaagaaaaaat

SEQ ID NO: 137757 - DNA, 25 bp, Probe Sequence
agtagagctcaaaaacagtagttca

SEQ ID NO: 137758 - DNA, 25 bp, Probe Sequence
agtcacgcaaacacacactaattcc

SEQ ID NO: 137759 - DNA, 25 bp, Probe Sequence
agtcccagaaatgcccagtaatcac

SEQ ID NO: 137760 - DNA, 25 bp, Probe Sequence
agtcccagagcctcctaaaattcta

SEQ ID NO: 137761 - DNA, 25 bp, Probe Sequence
agttccaggcacacttaagtaccca

SEQ ID NO: 137762 - DNA, 25 bp, Probe Sequence
cagttccggaccattcaggagaagg

SEQ ID NO: 137763 - DNA, 25 bp, Probe Sequence
cagtcccggtcacctttaggactag

SEQ ID NO: 137764 - DNA, 25 bp, Probe Sequence
agtcatcttcatcgaccggaagcgc

SEQ ID NO: 137765 - DNA, 25 bp, Probe Sequence
agtcctctccaacagaatatgctcc

SEQ ID NO: 137766 - DNA, 25 bp, Probe Sequence
agtcattgcccacggcaaagaccac

SEQ ID NO: 137767 - DNA, 25 bp, Probe Sequence
agtcttcccggacaaaatgaggact

SEQ ID NO: 137768 - DNA, 25 bp, Probe Sequence
agtttttcgagacagcctacggcac

SEQ ID NO: 137769 - DNA, 25 bp, Probe Sequence
agtcttctttgacaacccatgggct

SEQ ID NO: 137770 - DNA, 25 bp, Probe Sequence
accttcttcagtgaaacgggtgctg

SEQ ID NO: 137771 - DNA, 25 bp, Probe Sequence
agtagtttcaaacaacgcggtcatg

SEQ ID NO: 137772 - DNA, 25 bp, Probe Sequence
agatcgttacactcaacagggtttt

SEQ ID NO: 137773 - DNA, 25 bp, Probe Sequence
agtcacgaacactgaagtgggtcaa

SEQ ID NO: 137774 - DNA, 25 bp, Probe Sequence
agtcccagagactataactaggcca

SEQ ID NO: 137775 - DNA, 25 bp, Probe Sequence
agtcctgcataacaacactgggcct

SEQ ID NO: 137776 - DNA, 25 bp, Probe Sequence
agtccatgctattaaaagtgtggcc

SEQ ID NO: 137777 - DNA, 25 bp, Probe Sequence
agtcctgctgatgggcaaagaaggt

SEQ ID NO: 137778 - DNA, 25 bp, Probe Sequence
agtccgcgccaggaagagagcaacg

SEQ ID NO: 137779 - DNA, 25 bp, Probe Sequence
agattgtcggcagaaacagcccagg

SEQ ID NO: 137780 - DNA, 25 bp, Probe Sequence
agttgaaatgcctagaaacacacaa

SEQ ID NO: 137781 - DNA, 25 bp, Probe Sequence
agtcatgctaaccagaaaatccact

SEQ ID NO: 137782 - DNA, 25 bp, Probe Sequence
agtctgtaacaatcaacctcagtac

SEQ ID NO: 137783 - DNA, 25 bp, Probe Sequence
agttgtaccaaaacatccacttaag

SEQ ID NO: 137784 - DNA, 25 bp, Probe Sequence
agtctttacaaaatagccagttata

SEQ ID NO: 137785 - DNA, 25 bp, Probe Sequence
agtcattcatagcactatatcgagt

SEQ ID NO: 137786 - DNA, 25 bp, Probe Sequence
agtcttggaggattaatagcagatt

SEQ ID NO: 137787 - DNA, 25 bp, Probe Sequence
agtcttctgtaattcattgagcagt

SEQ ID NO: 137788 - DNA, 25 bp, Probe Sequence
agtcattccaaatatgagatgcatt

SEQ ID NO: 137789 - DNA, 25 bp, Probe Sequence
agtcattccaaatatgagatgcatt

SEQ ID NO: 137790 - DNA, 25 bp, Probe Sequence
agtctttcaaatacgagataactgc

SEQ ID NO: 137791 - DNA, 25 bp, Probe Sequence
agctctggtccaaatcaataaaagt

SEQ ID NO: 137792 - DNA, 25 bp, Probe Sequence
agtcttgtctcttgtctagaaagaa

SEQ ID NO: 137793 - DNA, 25 bp, Probe Sequence
agtcacatttgcacatcttaagaga

SEQ ID NO: 137794 - DNA, 25 bp, Probe Sequence
agtccagcattctcaactatatcaa

SEQ ID NO: 137795 - DNA, 25 bp, Probe Sequence
agtcaagatctcaaaagtctacaga

SEQ ID NO: 137796 - DNA, 25 bp, Probe Sequence
agtcatcaatcataagagttacata

SEQ ID NO: 137797 - DNA, 25 bp, Probe Sequence
agtccaccatggcaagctctgaata

SEQ ID NO: 137798 - DNA, 25 bp, Probe Sequence
agtccacctggaggagttgagtctg

SEQ ID NO: 137799 - DNA, 25 bp, Probe Sequence
agtccctctgaggagtgggactgtg

SEQ ID NO: 137800 - DNA, 25 bp, Probe Sequence
agtcccagctactagggaggctgag

SEQ ID NO: 137801 - DNA, 25 bp, Probe Sequence
agtcccagctagttgggaggctgag

SEQ ID NO: 137802 - DNA, 25 bp, Probe Sequence
agtcccagctacttgggaggctgag

SEQ ID NO: 137803 - DNA, 25 bp, Probe Sequence
agtcccagctacttgggaggctgag

SEQ ID NO: 137804 - DNA, 25 bp, Probe Sequence
agtcccagctacttgggaggctgag

SEQ ID NO: 137805 - DNA, 25 bp, Probe Sequence
agtcccagctacttgggaggctgag

SEQ ID NO: 137806 - DNA, 25 bp, Probe Sequence
agtcccagctacttgggaggctgag

SEQ ID NO: 137807 - DNA, 25 bp, Probe Sequence
agtcccagctactcaggaagctgag

SEQ ID NO: 137808 - DNA, 25 bp, Probe Sequence
agtcccagctactcaggagactgag

SEQ ID NO: 137809 - DNA, 25 bp, Probe Sequence
agtacaatgatagtgccgggttggc

SEQ ID NO: 137810 - DNA, 25 bp, Probe Sequence
agtagaataagatgccatgagggcc

SEQ ID NO: 137811 - DNA, 25 bp, Probe Sequence
agtactcacaggggctctgggtgcc

SEQ ID NO: 137812 - DNA, 25 bp, Probe Sequence
agtcaaccattgttgccatctttcc

SEQ ID NO: 137813 - DNA, 25 bp, Probe Sequence
agtcaacctcatgtgacaccttacc

SEQ ID NO: 137814 - DNA, 25 bp, Probe Sequence
agtaagtcttagcaagctcttcccc

SEQ ID NO: 137815 - DNA, 25 bp, Probe Sequence
agtagagacttgagaagaccttctg

SEQ ID NO: 137816 - DNA, 25 bp, Probe Sequence
agtaaatctcatgaaaatgcccttc

SEQ ID NO: 137817 - DNA, 25 bp, Probe Sequence
agtagaatgcttgagttttcctttt

SEQ ID NO: 137818 - DNA, 25 bp, Probe Sequence
agtaactgcagtgatgaacattttg

SEQ ID NO: 137819 - DNA, 25 bp, Probe Sequence
agtacagatgagggttcactatgtt

SEQ ID NO: 137820 - DNA, 25 bp, Probe Sequence
agtaatgctagcagtggcactttat

SEQ ID NO: 137821 - DNA, 25 bp, Probe Sequence
agtaattggctacgtgctcttgttt

SEQ ID NO: 137822 - DNA, 25 bp, Probe Sequence
agtacactggtgtctagctgttgtg

SEQ ID NO: 137823 - DNA, 25 bp, Probe Sequence
agtcagcaaggtttactattatatg

SEQ ID NO: 137824 - DNA, 25 bp, Probe Sequence
agtcaacaggaacaccatctatagc

SEQ ID NO: 137825 - DNA, 25 bp, Probe Sequence
agttcacggaggcacatgtcgacgc

SEQ ID NO: 137826 - DNA, 25 bp, Probe Sequence
agttccaggaccacatgtcggagcc

SEQ ID NO: 137827 - DNA, 25 bp, Probe Sequence
agtccagaggactctcatgggagac

SEQ ID NO: 137828 - DNA, 25 bp, Probe Sequence
agtcctgagaattattgatggtaag

SEQ ID NO: 137829 - DNA, 25 bp, Probe Sequence
agtcctgatgacatgtttcgtagat

SEQ ID NO: 137830 - DNA, 25 bp, Probe Sequence
agtcctgctcacagtgttctgtgcc

SEQ ID NO: 137831 - DNA, 25 bp, Probe Sequence
agtccatcatcccagtggtcatggc

SEQ ID NO: 137832 - DNA, 25 bp, Probe Sequence
agtcaaatcccagtggtgtgtgtcc

SEQ ID NO: 137833 - DNA, 25 bp, Probe Sequence
agacgagattacaggtggctgcccg

SEQ ID NO: 137834 - DNA, 25 bp, Probe Sequence
agactggttacatggaggggattga

SEQ ID NO: 137835 - DNA, 25 bp, Probe Sequence
agtcaggtgcagacaagtgggcggt

SEQ ID NO: 137836 - DNA, 25 bp, Probe Sequence
agtcaaggcagtgggatgggcggct

SEQ ID NO: 137837 - DNA, 25 bp, Probe Sequence
agtcctgttgctgtgagggagtgct

SEQ ID NO: 137838 - DNA, 25 bp, Probe Sequence
agtcccttgttcaacagagagcttt

SEQ ID NO: 137839 - DNA, 25 bp, Probe Sequence
agtccttgttcttttgaagcttgtg

SEQ ID NO: 137840 - DNA, 25 bp, Probe Sequence
agtcccagttattcactgaagtggg

SEQ ID NO: 137841 - DNA, 25 bp, Probe Sequence
agtcccagttattcagtaacctgag

SEQ ID NO: 137842 - DNA, 25 bp, Probe Sequence
agtcctggtataagagtctcccaga

SEQ ID NO: 137843 - DNA, 25 bp, Probe Sequence
agtctctgagtatacatatccccag

SEQ ID NO: 137844 - DNA, 25 bp, Probe Sequence
agtcctgcagtttgactgtttgcct

SEQ ID NO: 137845 - DNA, 25 bp, Probe Sequence
agtatgtcattttgaagttggcaca

SEQ ID NO: 137846 - DNA, 25 bp, Probe Sequence
agtctgtaaggtcatgtgcttccac

SEQ ID NO: 137847 - DNA, 25 bp, Probe Sequence
agtctgtggaggtttgacattcacc

SEQ ID NO: 137848 - DNA, 25 bp, Probe Sequence
agtcactggaggttatgtctatcgt

SEQ ID NO: 137849 - DNA, 25 bp, Probe Sequence
agtcaggtggtggtcatgtttccct

SEQ ID NO: 137850 - DNA, 25 bp, Probe Sequence
agtcatgggccggttgatgttcttc

SEQ ID NO: 137851 - DNA, 25 bp, Probe Sequence
agtcgttgagcctttgagaacttct

SEQ ID NO: 137852 - DNA, 25 bp, Probe Sequence
agtcagcttcccttatgtaactgct

SEQ ID NO: 137853 - DNA, 25 bp, Probe Sequence
agtcacttgctttggaattactcgc

SEQ ID NO: 137854 - DNA, 25 bp, Probe Sequence
agtacttgatgtatggttatcctga

SEQ ID NO: 137855 - DNA, 25 bp, Probe Sequence
agtctttggtacaagtttacatgat

SEQ ID NO: 137856 - DNA, 25 bp, Probe Sequence
agtctaatcgtcataggttactgct

SEQ ID NO: 137857 - DNA, 25 bp, Probe Sequence
agttcaattcacctagtttacctag

SEQ ID NO: 137858 - DNA, 25 bp, Probe Sequence
agattattgtaacctttcaacctga

SEQ ID NO: 137859 - DNA, 25 bp, Probe Sequence
agtaatggtatcactgttgaccctt

SEQ ID NO: 137860 - DNA, 25 bp, Probe Sequence
agtagtcgctttactgttacctgtt

SEQ ID NO: 137861 - DNA, 25 bp, Probe Sequence
agtaatactttgcctttttcactgt

SEQ ID NO: 137862 - DNA, 25 bp, Probe Sequence
agtaaatcgttgtgatcttttcttt

SEQ ID NO: 137863 - DNA, 25 bp, Probe Sequence
agaaaccattggtgctcttaccttg

SEQ ID NO: 137864 - DNA, 25 bp, Probe Sequence
agttcccattggtgttgttgcctat

SEQ ID NO: 137865 - DNA, 25 bp, Probe Sequence
agttccctcattcttattaccagaa

SEQ ID NO: 137866 - DNA, 25 bp, Probe Sequence
agttacgtctagcttgttgactcaa

SEQ ID NO: 137867 - DNA, 25 bp, Probe Sequence
agttgacctaaacatgtaaccatgc

SEQ ID NO: 137868 - DNA, 25 bp, Probe Sequence
agtctacccaacagcttaacaagcc

SEQ ID NO: 137869 - DNA, 25 bp, Probe Sequence
agtctgacaccaacaaacaaacaac

SEQ ID NO: 137870 - DNA, 25 bp, Probe Sequence
agtctacccactgaggcacgaaaaa

SEQ ID NO: 137871 - DNA, 25 bp, Probe Sequence
agttgacccagcgtcgggagcaaag

SEQ ID NO: 137872 - DNA, 25 bp, Probe Sequence
agtcatcccccagtggcagaaggat

SEQ ID NO: 137873 - DNA, 25 bp, Probe Sequence
agtcacccaggccttgcagataaat

SEQ ID NO: 137874 - DNA, 25 bp, Probe Sequence
agtacccagtccatgttcaaatgtc

SEQ ID NO: 137875 - DNA, 25 bp, Probe Sequence
agtaactggtatatgtgcacaagca

SEQ ID NO: 137876 - DNA, 25 bp, Probe Sequence
agtaagcaggtaaatgaatgaagca

SEQ ID NO: 137877 - DNA, 25 bp, Probe Sequence
agttaagggagagtcaatgggcaga

SEQ ID NO: 137878 - DNA, 25 bp, Probe Sequence
agtcttgaggccgaccaagagccag

SEQ ID NO: 137879 - DNA, 25 bp, Probe Sequence
agtcaaggtcgcgatccaagaggcc

SEQ ID NO: 137880 - DNA, 25 bp, Probe Sequence
agtagcagatgccgttcaaaaggtc

SEQ ID NO: 137881 - DNA, 25 bp, Probe Sequence
agtcctgagcgacctacaaagagac

SEQ ID NO: 137882 - DNA, 25 bp, Probe Sequence
agtagtagcggtggtcagacatgga

SEQ ID NO: 137883 - DNA, 25 bp, Probe Sequence
agtagtagcggtggtcagacatgga

SEQ ID NO: 137884 - DNA, 25 bp, Probe Sequence
agtacttggagtctgcaggtgcgag

SEQ ID NO: 137885 - DNA, 25 bp, Probe Sequence
agtcagtttggggccaggcgtggtg

SEQ ID NO: 137886 - DNA, 25 bp, Probe Sequence
agtcagtttggggccaggcgtggtg

SEQ ID NO: 137887 - DNA, 25 bp, Probe Sequence
agttgttcaggttgcctgggcaggg

SEQ ID NO: 137888 - DNA, 25 bp, Probe Sequence
agttcttcagacaggtgtggaggtt

SEQ ID NO: 137889 - DNA, 25 bp, Probe Sequence
agttgtccaagttgggctgggtctt

SEQ ID NO: 137890 - DNA, 25 bp, Probe Sequence
agttaagaagtcgtggctaggtgtt

SEQ ID NO: 137891 - DNA, 25 bp, Probe Sequence
agttcaagtactatggtgatttgcc

SEQ ID NO: 137892 - DNA, 25 bp, Probe Sequence
agtcatacgtacacttgaatcttca

SEQ ID NO: 137893 - DNA, 25 bp, Probe Sequence
agtaactaactctttggatctccct

SEQ ID NO: 137894 - DNA, 25 bp, Probe Sequence
agtacaccatatgcactctggtacc

SEQ ID NO: 137895 - DNA, 25 bp, Probe Sequence
agcttaccagagtacctggtgggct

SEQ ID NO: 137896 - DNA, 25 bp, Probe Sequence
agtctaccatggggcccaggagttg

SEQ ID NO: 137897 - DNA, 25 bp, Probe Sequence
agtctatcttagcgtcctgtgaatt

SEQ ID NO: 137898 - DNA, 25 bp, Probe Sequence
agtctcagcttagacatcatctctc

SEQ ID NO: 137899 - DNA, 25 bp, Probe Sequence
agtcatcgcgtagtagccatggtga

SEQ ID NO: 137900 - DNA, 25 bp, Probe Sequence
agtcatctgctagttaccatggtga

SEQ ID NO: 137901 - DNA, 25 bp, Probe Sequence
agtcatcgctattaaccatggtgat

SEQ ID NO: 137902 - DNA, 25 bp, Probe Sequence
agtcatcgctattaaccatggtgat

SEQ ID NO: 137903 - DNA, 25 bp, Probe Sequence
agtcatcgctattaaccatggtgat

SEQ ID NO: 137904 - DNA, 25 bp, Probe Sequence
agtcatcgctattaccactggtgat

SEQ ID NO: 137905 - DNA, 25 bp, Probe Sequence
agtcatcgctattaccatggtgatc

SEQ ID NO: 137906 - DNA, 25 bp, Probe Sequence
agtcatcgctattaccatggtgatc

SEQ ID NO: 137907 - DNA, 25 bp, Probe Sequence
agtcatcgctattaccatggtgatc

SEQ ID NO: 137908 - DNA, 25 bp, Probe Sequence
agtcatcgctattaccatggtgatc

SEQ ID NO: 137909 - DNA, 25 bp, Probe Sequence
agtcatcgctattaccatggtgatc

SEQ ID NO: 137910 - DNA, 25 bp, Probe Sequence
agtcatcgctattaccatggtgatc

SEQ ID NO: 137911 - DNA, 25 bp, Probe Sequence
agtcatcgctattaccatggtgatc

SEQ ID NO: 137912 - DNA, 25 bp, Probe Sequence
agtcatcgctattaccatggtgatc

SEQ ID NO: 137913 - DNA, 25 bp, Probe Sequence
agtcatcgctattaccatggtgatc

SEQ ID NO: 137914 - DNA, 25 bp, Probe Sequence
agtcatcgctattaccatggtgatc

SEQ ID NO: 137915 - DNA, 25 bp, Probe Sequence
agtcatcgctattaccatggtgatc

SEQ ID NO: 137916 - DNA, 25 bp, Probe Sequence
agtcatcgctattaccatggtgatc

SEQ ID NO: 137917 - DNA, 25 bp, Probe Sequence
agtcatcgctattacctgtgatcgg

SEQ ID NO: 137918 - DNA, 25 bp, Probe Sequence
agtctcgctattaccatgtgatcgc

SEQ ID NO: 137919 - DNA, 25 bp, Probe Sequence
agtctctgtgacacgcagtgcaaca

SEQ ID NO: 137920 - DNA, 25 bp, Probe Sequence
agtctctgaccaagccattagcaga

SEQ ID NO: 137921 - DNA, 25 bp, Probe Sequence
agtctcagaaattgtcttaagcaac

SEQ ID NO: 137922 - DNA, 25 bp, Probe Sequence
agtctcaccaacttctcagaaaacc

SEQ ID NO: 137923 - DNA, 25 bp, Probe Sequence
agtctcaccaacttctcagaaaacc

SEQ ID NO: 137924 - DNA, 25 bp, Probe Sequence
agtcatacctaatgctgcaggaaac

SEQ ID NO: 137925 - DNA, 25 bp, Probe Sequence
agtaacttaaagcaagtcatccttt

SEQ ID NO: 137926 - DNA, 25 bp, Probe Sequence
agttacttcaaaccaatgtgacaag

SEQ ID NO: 137927 - DNA, 25 bp, Probe Sequence
agttgcaattgcactcgcaatttaa

SEQ ID NO: 137928 - DNA, 25 bp, Probe Sequence
agtcagaatacaaatcagcacagat

SEQ ID NO: 137929 - DNA, 25 bp, Probe Sequence
agtagaatcaggcactgctcgcaga

SEQ ID NO: 137930 - DNA, 25 bp, Probe Sequence
agtataatcggtccccagagaccct

SEQ ID NO: 137931 - DNA, 25 bp, Probe Sequence
cggaaatggtttcccgcagaacctg

SEQ ID NO: 137932 - DNA, 25 bp, Probe Sequence
gcgggtatagacacccccaaatagg

SEQ ID NO: 137933 - DNA, 25 bp, Probe Sequence
ggggaatagtacacccaccaacgag

SEQ ID NO: 137934 - DNA, 25 bp, Probe Sequence
ggggtaagtaggaggatccacagga

SEQ ID NO: 137935 - DNA, 25 bp, Probe Sequence
agttttcgaaggaggatgccctgga

SEQ ID NO: 137936 - DNA, 25 bp, Probe Sequence
agtttcgcgaaggctgtcggcgcgc

SEQ ID NO: 137937 - DNA, 25 bp, Probe Sequence
agtctaggctatggtcgtggggcac

SEQ ID NO: 137938 - DNA, 25 bp, Probe Sequence
agtctgcagtctccgagacggggac

SEQ ID NO: 137939 - DNA, 25 bp, Probe Sequence
agtctgcctctcggagcagggagct

SEQ ID NO: 137940 - DNA, 25 bp, Probe Sequence
agtctgcctatgtggcaggagaaaa

SEQ ID NO: 137941 - DNA, 25 bp, Probe Sequence
agtctcgccatgttgaagtcagaat

SEQ ID NO: 137942 - DNA, 25 bp, Probe Sequence
agtcttcatcatctgggcatcagaa

SEQ ID NO: 137943 - DNA, 25 bp, Probe Sequence
agtctgtgacatcttgtgatgctgt

SEQ ID NO: 137944 - DNA, 25 bp, Probe Sequence
agtctgttctggcggcattgtgggc

SEQ ID NO: 137945 - DNA, 25 bp, Probe Sequence
agtctgcttcagaacatggtcttgt

SEQ ID NO: 137946 - DNA, 25 bp, Probe Sequence
agtctcattgagagcggtgcgatga

SEQ ID NO: 137947 - DNA, 25 bp, Probe Sequence
agtcatcttggagcgtatggaggac

SEQ ID NO: 137948 - DNA, 25 bp, Probe Sequence
agttcttctgcagagtctgggagtc

SEQ ID NO: 137949 - DNA, 25 bp, Probe Sequence
agtcatttgcactggttggagttgt

SEQ ID NO: 137950 - DNA, 25 bp, Probe Sequence
agatgctattggtggtcgtcggttt

SEQ ID NO: 137951 - DNA, 25 bp, Probe Sequence
agtaaatggttggctctacgggctt

SEQ ID NO: 137952 - DNA, 25 bp, Probe Sequence
agtagaactttgactctaagagttt

SEQ ID NO: 137953 - DNA, 25 bp, Probe Sequence
agtcaggccgttttagaagagcttt

SEQ ID NO: 137954 - DNA, 25 bp, Probe Sequence
agtcagaggctgattcttgtagaat

SEQ ID NO: 137955 - DNA, 25 bp, Probe Sequence
agtaggagcattttccctacaataa

SEQ ID NO: 137956 - DNA, 25 bp, Probe Sequence
agtagtgtatcctgcacctacttta

SEQ ID NO: 137957 - DNA, 25 bp, Probe Sequence
agtctgtcttccagaagctactttt

SEQ ID NO: 137958 - DNA, 25 bp, Probe Sequence
agttttcccatttcgagacatcttt

SEQ ID NO: 137959 - DNA, 25 bp, Probe Sequence
agttttgcctagaatcctgttttct

SEQ ID NO: 137960 - DNA, 25 bp, Probe Sequence
agtctctgtctctagatatgcaagt

SEQ ID NO: 137961 - DNA, 25 bp, Probe Sequence
agtctgcttcactgagatgctacct

SEQ ID NO: 137962 - DNA, 25 bp, Probe Sequence
agtcatggataactacattacctgt

SEQ ID NO: 137963 - DNA, 25 bp, Probe Sequence
agtaccataactacagaacctgtca

SEQ ID NO: 137964 - DNA, 25 bp, Probe Sequence
agtactaaactatagcccattctct

SEQ ID NO: 137965 - DNA, 25 bp, Probe Sequence
agtcaaaatactttactctttcact

SEQ ID NO: 137966 - DNA, 25 bp, Probe Sequence
agtcattaaatcattacttttacat

SEQ ID NO: 137967 - DNA, 25 bp, Probe Sequence
agtcatcatgattttttattttaaa

SEQ ID NO: 137968 - DNA, 25 bp, Probe Sequence
agtcaacatgattccttgttcatat

SEQ ID NO: 137969 - DNA, 25 bp, Probe Sequence
agtcagcacaactcttggacatttc

SEQ ID NO: 137970 - DNA, 25 bp, Probe Sequence
agttgccttttattggacttatcat

SEQ ID NO: 137971 - DNA, 25 bp, Probe Sequence
agtcgtcttcttttaatgtaatcat

SEQ ID NO: 137972 - DNA, 25 bp, Probe Sequence
agtcttctgcttcctaaatgttaat

SEQ ID NO: 137973 - DNA, 25 bp, Probe Sequence
agtctcattcttccctggagttaat

SEQ ID NO: 137974 - DNA, 25 bp, Probe Sequence
agtaattgttccttgtgcatgttaa

SEQ ID NO: 137975 - DNA, 25 bp, Probe Sequence
agtaatgttatttgctctgtgtgtt

SEQ ID NO: 137976 - DNA, 25 bp, Probe Sequence
agtaatcatctgcaaccatgtgtgt

SEQ ID NO: 137977 - DNA, 25 bp, Probe Sequence
agtcaagagctcgagaccagcctgg

SEQ ID NO: 137978 - DNA, 25 bp, Probe Sequence
agtcatgggtgctgcaccagctgtg

SEQ ID NO: 137979 - DNA, 25 bp, Probe Sequence
agtatggatagcagcattatgtgga

SEQ ID NO: 137980 - DNA, 25 bp, Probe Sequence
agtaggggacagttgatgtggagtc

SEQ ID NO: 137981 - DNA, 25 bp, Probe Sequence
agtctgcgtgggcatcgtgggcagt

SEQ ID NO: 137982 - DNA, 25 bp, Probe Sequence
agtcatggtggccaacagaggtgag

SEQ ID NO: 137983 - DNA, 25 bp, Probe Sequence
agtctggcaactcggacgtgtatga

SEQ ID NO: 137984 - DNA, 25 bp, Probe Sequence
agtcagagaacaaggacgctggtgt

SEQ ID NO: 137985 - DNA, 25 bp, Probe Sequence
agtaagactaagtattgctgaattt

SEQ ID NO: 137986 - DNA, 25 bp, Probe Sequence
agtaagtatccagaattgatattaa

SEQ ID NO: 137987 - DNA, 25 bp, Probe Sequence
agtaactcccaaacacttatgtaga

SEQ ID NO: 137988 - DNA, 25 bp, Probe Sequence
agtaacaggaaatgactctttagca

SEQ ID NO: 137989 - DNA, 25 bp, Probe Sequence
agtaacaggaaatgactctttagca

SEQ ID NO: 137990 - DNA, 25 bp, Probe Sequence
actgaaacggaatgccttccttgcg

SEQ ID NO: 137991 - DNA, 25 bp, Probe Sequence
acggtgggaagatgccttacgtctg

SEQ ID NO: 137992 - DNA, 25 bp, Probe Sequence
taagggcttaaatctcaaactttgt

SEQ ID NO: 137993 - DNA, 25 bp, Probe Sequence
agaggcagattctccctcaaagtcc

SEQ ID NO: 137994 - DNA, 25 bp, Probe Sequence
agtctgcattctttcaccataaaac

SEQ ID NO: 137995 - DNA, 25 bp, Probe Sequence
agtctgtgcgcttctacacagagaa

SEQ ID NO: 137996 - DNA, 25 bp, Probe Sequence
agtcttcctgtcaccataggcaata

SEQ ID NO: 137997 - DNA, 25 bp, Probe Sequence
acgtctactgtaaacatcaagccta

SEQ ID NO: 137998 - DNA, 25 bp, Probe Sequence
agtttagcttcacacatgaaattga

SEQ ID NO: 137999 - DNA, 25 bp, Probe Sequence
agtttgactatctgactccaaggaa

SEQ ID NO: 138000 - DNA, 25 bp, Probe Sequence
agttagaccattagccccaagatgc

SEQ ID NO: 138001 - DNA, 25 bp, Probe Sequence
agtcatataatcagagtcccaagat

SEQ ID NO: 138002 - DNA, 25 bp, Probe Sequence
agtcattcaacaaatcccataagta

SEQ ID NO: 138003 - DNA, 25 bp, Probe Sequence
agtagcttacataactcacacggta

SEQ ID NO: 138004 - DNA, 25 bp, Probe Sequence
agtcatcaagacaccatcacacgga

SEQ ID NO: 138005 - DNA, 25 bp, Probe Sequence
agtatctagcaatcacaacactggc

SEQ ID NO: 138006 - DNA, 25 bp, Probe Sequence
agttttcaactctcccagtgaggat

SEQ ID NO: 138007 - DNA, 25 bp, Probe Sequence
agttttgaactggccctgaggaaat

SEQ ID NO: 138008 - DNA, 25 bp, Probe Sequence
agtctttaaacactcctcaaaactg

SEQ ID NO: 138009 - DNA, 25 bp, Probe Sequence
agtatattagaaacacccaaaccag

SEQ ID NO: 138010 - DNA, 25 bp, Probe Sequence
agtaattaacataccacactcggcc

SEQ ID NO: 138011 - DNA, 25 bp, Probe Sequence
agtattttgaagaccatcaagtcca

SEQ ID NO: 138012 - DNA, 25 bp, Probe Sequence
agtcatacctgaaacaatcaattaa

SEQ ID NO: 138013 - DNA, 25 bp, Probe Sequence
agttacctggaaatactgatgataa

SEQ ID NO: 138014 - DNA, 25 bp, Probe Sequence
agttacctggaaatactgatgataa

SEQ ID NO: 138015 - DNA, 25 bp, Probe Sequence
agttcacgggagactttatctgaca

SEQ ID NO: 138016 - DNA, 25 bp, Probe Sequence
agtatgacagggaacttgccctgca

SEQ ID NO: 138017 - DNA, 25 bp, Probe Sequence
agtctgacaccaaactctggtctct

SEQ ID NO: 138018 - DNA, 25 bp, Probe Sequence
agtctgagtccatatttgtagctct

SEQ ID NO: 138019 - DNA, 25 bp, Probe Sequence
agtctttcctaaatactccatctgt

SEQ ID NO: 138020 - DNA, 25 bp, Probe Sequence
agtctctatccttctcaacttgact

SEQ ID NO: 138021 - DNA, 25 bp, Probe Sequence
agtctctatttcaatcccttactaa

SEQ ID NO: 138022 - DNA, 25 bp, Probe Sequence
agtctgctttttagtctttatcatt

SEQ ID NO: 138023 - DNA, 25 bp, Probe Sequence
agtcatttatcatttgtttaactaa

SEQ ID NO: 138024 - DNA, 25 bp, Probe Sequence
agtcttcaatccttactaaccataa

SEQ ID NO: 138025 - DNA, 25 bp, Probe Sequence
agtcttaattccacataatccactt

SEQ ID NO: 138026 - DNA, 25 bp, Probe Sequence
agtcttagtaaaacttattgctctg

SEQ ID NO: 138027 - DNA, 25 bp, Probe Sequence
agtattagtctatcgcttacttcgc

SEQ ID NO: 138028 - DNA, 25 bp, Probe Sequence
agtattattctagcacctggttcca

SEQ ID NO: 138029 - DNA, 25 bp, Probe Sequence
agtagcttatttgaacttgagacca

SEQ ID NO: 138030 - DNA, 25 bp, Probe Sequence
agtacttttctcatatcttaaccac

SEQ ID NO: 138031 - DNA, 25 bp, Probe Sequence
agttattatttgctatctttcccac

SEQ ID NO: 138032 - DNA, 25 bp, Probe Sequence
agtacttatttattggctttccaag

SEQ ID NO: 138033 - DNA, 25 bp, Probe Sequence
agtacttgccttttgctggaaacat

SEQ ID NO: 138034 - DNA, 25 bp, Probe Sequence
agtaacgtcagttgatgctggaaca

SEQ ID NO: 138035 - DNA, 25 bp, Probe Sequence
agtaacagtggatgagcgaacaaga

SEQ ID NO: 138036 - DNA, 25 bp, Probe Sequence
agtcacaccttataccacatcaaag

SEQ ID NO: 138037 - DNA, 25 bp, Probe Sequence
agtcaacctgattcactaacacaca

SEQ ID NO: 138038 - DNA, 25 bp, Probe Sequence
agtcacacctttgctgaaacacagt

SEQ ID NO: 138039 - DNA, 25 bp, Probe Sequence
agtcagacatgcctctttgactacc

SEQ ID NO: 138040 - DNA, 25 bp, Probe Sequence
agtcaagatgccctatgtacctgtc

SEQ ID NO: 138041 - DNA, 25 bp, Probe Sequence
agtacagtgacactctggtgcccat

SEQ ID NO: 138042 - DNA, 25 bp, Probe Sequence
agtactggattctggtgcaccaatc

SEQ ID NO: 138043 - DNA, 25 bp, Probe Sequence
agtacatggaagggacgcaccattt

SEQ ID NO: 138044 - DNA, 25 bp, Probe Sequence
agtaatcccaaggaagcagcctgtt

SEQ ID NO: 138045 - DNA, 25 bp, Probe Sequence
agtaatcttatatacaagctttgat

SEQ ID NO: 138046 - DNA, 25 bp, Probe Sequence
agtctatgcatctataataaactat

SEQ ID NO: 138047 - DNA, 25 bp, Probe Sequence
agtctagatctcagttaatgcttat

SEQ ID NO: 138048 - DNA, 25 bp, Probe Sequence
agtcttcagcacagttgttttaagg

SEQ ID NO: 138049 - DNA, 25 bp, Probe Sequence
agttatctccccatttgtcaaagtt

SEQ ID NO: 138050 - DNA, 25 bp, Probe Sequence
agttatctccccatttgtcaaagtt

SEQ ID NO: 138051 - DNA, 25 bp, Probe Sequence
agtataacacctctctttatagaga

SEQ ID NO: 138052 - DNA, 25 bp, Probe Sequence
agtcataaaacaccatcattaagaa

SEQ ID NO: 138053 - DNA, 25 bp, Probe Sequence
agtaaagcctgctgatcttaagaag

SEQ ID NO: 138054 - DNA, 25 bp, Probe Sequence
agttaagccagccttctgagaggtg

SEQ ID NO: 138055 - DNA, 25 bp, Probe Sequence
agtagcaggccgcatgcttggaggt

SEQ ID NO: 138056 - DNA, 25 bp, Probe Sequence
agtacagtggctcgatttcagatca

SEQ ID NO: 138057 - DNA, 25 bp, Probe Sequence
agtcagcagtcagctgtttccatgc

SEQ ID NO: 138058 - DNA, 25 bp, Probe Sequence
agtacattctcattgttgtccagcc

SEQ ID NO: 138059 - DNA, 25 bp, Probe Sequence
agtacttcttttattgcacattcag

SEQ ID NO: 138060 - DNA, 25 bp, Probe Sequence
agtcacttttgacattgatgccaat

SEQ ID NO: 138061 - DNA, 25 bp, Probe Sequence
agtcttcttgtaaatatatctaatt

SEQ ID NO: 138062 - DNA, 25 bp, Probe Sequence
agtattttcagctagagaactcact

SEQ ID NO: 138063 - DNA, 25 bp, Probe Sequence
agtagtttacattaaattgccttat

SEQ ID NO: 138064 - DNA, 25 bp, Probe Sequence
agtacttctacttccgttattggat

SEQ ID NO: 138065 - DNA, 25 bp, Probe Sequence
agtttgtcacagtaacgttcattgg

SEQ ID NO: 138066 - DNA, 25 bp, Probe Sequence
agatctgtaccgtgacgggctgggg

SEQ ID NO: 138067 - DNA, 25 bp, Probe Sequence
agtcttccatccaaaaggggcaggg

SEQ ID NO: 138068 - DNA, 25 bp, Probe Sequence
agtttgtaccaaaaaagcacggctg

SEQ ID NO: 138069 - DNA, 25 bp, Probe Sequence
agtttgtacaaaaaagcaggctggt

SEQ ID NO: 138070 - DNA, 25 bp, Probe Sequence
agtttgtacaaaaaagcaggctggt

SEQ ID NO: 138071 - DNA, 25 bp, Probe Sequence
agtttgtacaaaaaagcaggctggt

SEQ ID NO: 138072 - DNA, 25 bp, Probe Sequence
agtttgtacaaaaaagcaggctggt

SEQ ID NO: 138073 - DNA, 25 bp, Probe Sequence
agtttgtacaaaaaagcaggctggt

SEQ ID NO: 138074 - DNA, 25 bp, Probe Sequence
agtttgtacaaaaaagcaggctggt

SEQ ID NO: 138075 - DNA, 25 bp, Probe Sequence
agtttgtacaaaaaagcaggctggt

SEQ ID NO: 138076 - DNA, 25 bp, Probe Sequence
agtttgtacaaaaaagcaggctggt

SEQ ID NO: 138077 - DNA, 25 bp, Probe Sequence
agtttgtacaaaaaagcaggctggt

SEQ ID NO: 138078 - DNA, 25 bp, Probe Sequence
agtttgtacaaaaaagcaggctggt

SEQ ID NO: 138079 - DNA, 25 bp, Probe Sequence
agtttgtacaaaaaagcaggctggt

SEQ ID NO: 138080 - DNA, 25 bp, Probe Sequence
agttatggaaaacaccagtatagaa

SEQ ID NO: 138081 - DNA, 25 bp, Probe Sequence
agtttgttttggcacgcgaaagtca

SEQ ID NO: 138082 - DNA, 25 bp, Probe Sequence
agtttgttaatctcaactaacgcct

SEQ ID NO: 138083 - DNA, 25 bp, Probe Sequence
agtcttctcatagcattaactaatc

SEQ ID NO: 138084 - DNA, 25 bp, Probe Sequence
agtctttagaccttaatgtacataa

SEQ ID NO: 138085 - DNA, 25 bp, Probe Sequence
aattttaactcctgtcccatagata

SEQ ID NO: 138086 - DNA, 25 bp, Probe Sequence
gtagttgtaactgctaataaaacca

SEQ ID NO: 138087 - DNA, 25 bp, Probe Sequence
gggttccaccgtgaagaaaaccatg

SEQ ID NO: 138088 - DNA, 25 bp, Probe Sequence
cagcgttcccactgtaaaaaactct

SEQ ID NO: 138089 - DNA, 25 bp, Probe Sequence
agagaggccaaatgttacaatgaac

SEQ ID NO: 138090 - DNA, 25 bp, Probe Sequence
agtaatggccaatgttagaatcaga

SEQ ID NO: 138091 - DNA, 25 bp, Probe Sequence
agtcaaaggcattcgccacgacatc

SEQ ID NO: 138092 - DNA, 25 bp, Probe Sequence
agtcacggtcattaccacagactct

SEQ ID NO: 138093 - DNA, 25 bp, Probe Sequence
agtcagttgctattatacaccacct

SEQ ID NO: 138094 - DNA, 25 bp, Probe Sequence
agtagatttgtgtaaacagcatcac

SEQ ID NO: 138095 - DNA, 25 bp, Probe Sequence
agtagctttttatgcaaatacatgc

SEQ ID NO: 138096 - DNA, 25 bp, Probe Sequence
agtacttgatgcttaaggactacac

SEQ ID NO: 138097 - DNA, 25 bp, Probe Sequence
agtatttggctttaaatctaccatt

SEQ ID NO: 138098 - DNA, 25 bp, Probe Sequence
agtcattttgttttactcttaatat

SEQ ID NO: 138099 - DNA, 25 bp, Probe Sequence
agtcttttgtcttctgagtgttgga

SEQ ID NO: 138100 - DNA, 25 bp, Probe Sequence
agtcttttctacctatgagcctgta

SEQ ID NO: 138101 - DNA, 25 bp, Probe Sequence
agatcattccttttacaggcacgtg

SEQ ID NO: 138102 - DNA, 25 bp, Probe Sequence
agttgtgcacttttacaagccgcaa

SEQ ID NO: 138103 - DNA, 25 bp, Probe Sequence
agtagtctctacttacctgtgagag

SEQ ID NO: 138104 - DNA, 25 bp, Probe Sequence
agtaacccataatctgcttggcaat

SEQ ID NO: 138105 - DNA, 25 bp, Probe Sequence
agtcaacactgattaaagcctggaa

SEQ ID NO: 138106 - DNA, 25 bp, Probe Sequence
agtcatatcctgttgaaagcctgga

SEQ ID NO: 138107 - DNA, 25 bp, Probe Sequence
agtcttcctacccatgaacatggaa

SEQ ID NO: 138108 - DNA, 25 bp, Probe Sequence
agtttcttggcgatgaacagagacc

SEQ ID NO: 138109 - DNA, 25 bp, Probe Sequence
agtttgtggcttcatggaaactccc

SEQ ID NO: 138110 - DNA, 25 bp, Probe Sequence
agtttgaactcacaggcatacctcc

SEQ ID NO: 138111 - DNA, 25 bp, Probe Sequence
agtttggatctcagaacaacctttc

SEQ ID NO: 138112 - DNA, 25 bp, Probe Sequence
agttttgcatccagtgacgtctgct

SEQ ID NO: 138113 - DNA, 25 bp, Probe Sequence
agtatcttcccaatagcactttcat

SEQ ID NO: 138114 - DNA, 25 bp, Probe Sequence
agtacatatactgacagctcattta

SEQ ID NO: 138115 - DNA, 25 bp, Probe Sequence
agtacttactccccaatgatgatga

SEQ ID NO: 138116 - DNA, 25 bp, Probe Sequence
agtacttagttgccacactcatgct

SEQ ID NO: 138117 - DNA, 25 bp, Probe Sequence
agtaattatgttccagattgaccat

SEQ ID NO: 138118 - DNA, 25 bp, Probe Sequence
agtaacatatttcagcattggctct

SEQ ID NO: 138119 - DNA, 25 bp, Probe Sequence
agtcaaaattgacagatgggatcta

SEQ ID NO: 138120 - DNA, 25 bp, Probe Sequence
agtcaaatattacctgcagggattc

SEQ ID NO: 138121 - DNA, 25 bp, Probe Sequence
agtaatatttcagttgggtatcttt

SEQ ID NO: 138122 - DNA, 25 bp, Probe Sequence
agtagtatttacgtggttagtcatc

SEQ ID NO: 138123 - DNA, 25 bp, Probe Sequence
agtagctttgtagtgggttttctgt

SEQ ID NO: 138124 - DNA, 25 bp, Probe Sequence
agtagatgttaagtgtctttatcac

SEQ ID NO: 138125 - DNA, 25 bp, Probe Sequence
agtaatgttacctatccttgatacc

SEQ ID NO: 138126 - DNA, 25 bp, Probe Sequence
agtaattaacagcatcctcttccac

SEQ ID NO: 138127 - DNA, 25 bp, Probe Sequence
agtaattaacagcatcctcttccac

SEQ ID NO: 138128 - DNA, 25 bp, Probe Sequence
agtcaattaaacctcttttcttcat

SEQ ID NO: 138129 - DNA, 25 bp, Probe Sequence
agtacattggaagcttttgtttata

SEQ ID NO: 138130 - DNA, 25 bp, Probe Sequence
agtcaacggtcagcttgttggtgcc

SEQ ID NO: 138131 - DNA, 25 bp, Probe Sequence
agtaacgtgctcactgtgtatagga

SEQ ID NO: 138132 - DNA, 25 bp, Probe Sequence
agtaactgtgtaatttgttcaagat

SEQ ID NO: 138133 - DNA, 25 bp, Probe Sequence
agataagttgtattttaccatggaa

SEQ ID NO: 138134 - DNA, 25 bp, Probe Sequence
agtacatattgaaattggacccgat

SEQ ID NO: 138135 - DNA, 25 bp, Probe Sequence
agtacaatttacattagcatcccac

SEQ ID NO: 138136 - DNA, 25 bp, Probe Sequence
agtaaacttcatattggccaacacc

SEQ ID NO: 138137 - DNA, 25 bp, Probe Sequence
agtaatagctatttgggaccagaca

SEQ ID NO: 138138 - DNA, 25 bp, Probe Sequence
agtactaatcattgtagtggcctaa

SEQ ID NO: 138139 - DNA, 25 bp, Probe Sequence
agtactcaaattcaatgattcttcc

SEQ ID NO: 138140 - DNA, 25 bp, Probe Sequence
agtaatcagtcaatccaatatcccc

SEQ ID NO: 138141 - DNA, 25 bp, Probe Sequence
agtagtgcttctaccaacatgtccc

SEQ ID NO: 138142 - DNA, 25 bp, Probe Sequence
agtagtgttcttctctcactaccat

SEQ ID NO: 138143 - DNA, 25 bp, Probe Sequence
agtaatttcttttatcactacctca

SEQ ID NO: 138144 - DNA, 25 bp, Probe Sequence
agtactgtttacctaactacctcat

SEQ ID NO: 138145 - DNA, 25 bp, Probe Sequence
agtactgtttacctaactacctcat

SEQ ID NO: 138146 - DNA, 25 bp, Probe Sequence
agtactgagtcttctgtaacttcac

SEQ ID NO: 138147 - DNA, 25 bp, Probe Sequence
agtatagtgttcttgatatagccta

SEQ ID NO: 138148 - DNA, 25 bp, Probe Sequence
agtcacgtatgcttggtatatgcct

SEQ ID NO: 138149 - DNA, 25 bp, Probe Sequence
agtcagctgctcaacggaatggcct

SEQ ID NO: 138150 - DNA, 25 bp, Probe Sequence
agtacagctccaatggcaagtggta

SEQ ID NO: 138151 - DNA, 25 bp, Probe Sequence
agtacaactatattgcatagaatgt

SEQ ID NO: 138152 - DNA, 25 bp, Probe Sequence
agtaacatcgtcatgctgaggatgc

SEQ ID NO: 138153 - DNA, 25 bp, Probe Sequence
agtaatctggccatgcaggacacca

SEQ ID NO: 138154 - DNA, 25 bp, Probe Sequence
agtcaatgtgacttctgcgataaac

SEQ ID NO: 138155 - DNA, 25 bp, Probe Sequence
agtcaattgccttcctatatatcag

SEQ ID NO: 138156 - DNA, 25 bp, Probe Sequence
agtaaatctcctctatgcatgtcag

SEQ ID NO: 138157 - DNA, 25 bp, Probe Sequence
agtagctactcccaaattgtcagcc

SEQ ID NO: 138158 - DNA, 25 bp, Probe Sequence
agtacaacagctccaagtattcacc

SEQ ID NO: 138159 - DNA, 25 bp, Probe Sequence
agtatccagattcactgtgttcagc

SEQ ID NO: 138160 - DNA, 25 bp, Probe Sequence
agtacatcctggagcagtttctgca

SEQ ID NO: 138161 - DNA, 25 bp, Probe Sequence
agtagcatcttgccgggttgtggct

SEQ ID NO: 138162 - DNA, 25 bp, Probe Sequence
agtactcggtgtggatcggtggctc

SEQ ID NO: 138163 - DNA, 25 bp, Probe Sequence
agtactcgaacaacatccggcagct

SEQ ID NO: 138164 - DNA, 25 bp, Probe Sequence
agctactcagcacagaacctagccc

SEQ ID NO: 138165 - DNA, 25 bp, Probe Sequence
agttctcatgcacagaattcctcca

SEQ ID NO: 138166 - DNA, 25 bp, Probe Sequence
agttttccagatcattcctacaaag

SEQ ID NO: 138167 - DNA, 25 bp, Probe Sequence
agttttacaggccactagtataaga

SEQ ID NO: 138168 - DNA, 25 bp, Probe Sequence
agtatttacgtggttagtcatcgcg

SEQ ID NO: 138169 - DNA, 25 bp, Probe Sequence
agtcaccttccaagttgttccatgg

SEQ ID NO: 138170 - DNA, 25 bp, Probe Sequence
agtcaccttccaagttgttccatgg

SEQ ID NO: 138171 - DNA, 25 bp, Probe Sequence
agtagacttcttagtggtatccagc

SEQ ID NO: 138172 - DNA, 25 bp, Probe Sequence
agtagatcttcattttattgcatta

SEQ ID NO: 138173 - DNA, 25 bp, Probe Sequence
agtagcatcaatcttatactgagat

SEQ ID NO: 138174 - DNA, 25 bp, Probe Sequence
agtacatcattgaactcaaccacat

SEQ ID NO: 138175 - DNA, 25 bp, Probe Sequence
agtactcattgtctatgcacaccag

SEQ ID NO: 138176 - DNA, 25 bp, Probe Sequence
agtaatattggacatggcacactgg

SEQ ID NO: 138177 - DNA, 25 bp, Probe Sequence
agttcatatgtacactagccagtgg

SEQ ID NO: 138178 - DNA, 25 bp, Probe Sequence
agttctgttaggcctacatcgtgga

SEQ ID NO: 138179 - DNA, 25 bp, Probe Sequence
agtttgaccagggctctgacgagga

SEQ ID NO: 138180 - DNA, 25 bp, Probe Sequence
agtaatgactcaagcctctggctat

SEQ ID NO: 138181 - DNA, 25 bp, Probe Sequence
agtattactacaatgctcagagcca

SEQ ID NO: 138182 - DNA, 25 bp, Probe Sequence
agtcactactagtcatgtacagctc

SEQ ID NO: 138183 - DNA, 25 bp, Probe Sequence
agtaccactatgtaggaggtttcta

SEQ ID NO: 138184 - DNA, 25 bp, Probe Sequence
agtaattattgctgtggtctttcta

SEQ ID NO: 138185 - DNA, 25 bp, Probe Sequence
agtaattctgctcttggtcatgtga

SEQ ID NO: 138186 - DNA, 25 bp, Probe Sequence
agtagatcactttttactctgtgtt

SEQ ID NO: 138187 - DNA, 25 bp, Probe Sequence
agttatccatcttggtgcatcctga

SEQ ID NO: 138188 - DNA, 25 bp, Probe Sequence
agtttccatatgccgatgccgtaaa

SEQ ID NO: 138189 - DNA, 25 bp, Probe Sequence
agttctcacttgccaatatagtaaa

SEQ ID NO: 138190 - DNA, 25 bp, Probe Sequence
agatactagctgtgaatcaatgttc

SEQ ID NO: 138191 - DNA, 25 bp, Probe Sequence
agttctgagctgtaatttcgcctta

SEQ ID NO: 138192 - DNA, 25 bp, Probe Sequence
agttctgagctgtaatttcgcctta

SEQ ID NO: 138193 - DNA, 25 bp, Probe Sequence
agtaccactgtattgattagcctgt

SEQ ID NO: 138194 - DNA, 25 bp, Probe Sequence
agtacatttgtcacattcagctttg

SEQ ID NO: 138195 - DNA, 25 bp, Probe Sequence
agtacattctacgtattaagtcatc

SEQ ID NO: 138196 - DNA, 25 bp, Probe Sequence
agtcacatgtctcagttcagaaatc

SEQ ID NO: 138197 - DNA, 25 bp, Probe Sequence
agtacgctttggactgagaagcatc

SEQ ID NO: 138198 - DNA, 25 bp, Probe Sequence
agtaccgctgggtggagcagcacct

SEQ ID NO: 138199 - DNA, 25 bp, Probe Sequence
agtaccgctgggtggagcagcacct

SEQ ID NO: 138200 - DNA, 25 bp, Probe Sequence
agtactacgaggtgctggaccactg

SEQ ID NO: 138201 - DNA, 25 bp, Probe Sequence
agtatcttcaaggtttggaaactgc

SEQ ID NO: 138202 - DNA, 25 bp, Probe Sequence
agtatcttcaaggtttggaaactgc

SEQ ID NO: 138203 - DNA, 25 bp, Probe Sequence
agtatcttcaaggtttggaaactgc

SEQ ID NO: 138204 - DNA, 25 bp, Probe Sequence
agattcttcagccctttggtaactg

SEQ ID NO: 138205 - DNA, 25 bp, Probe Sequence
agttttactgccaaatagtactcta

SEQ ID NO: 138206 - DNA, 25 bp, Probe Sequence
aattgttaacgtctatttcctattg

SEQ ID NO: 138207 - DNA, 25 bp, Probe Sequence
agtattctacactttaatttcctga

SEQ ID NO: 138208 - DNA, 25 bp, Probe Sequence
agtttcttttttctttgctctgaat

SEQ ID NO: 138209 - DNA, 25 bp, Probe Sequence
agtttttatacatcctttcattgaa

SEQ ID NO: 138210 - DNA, 25 bp, Probe Sequence
agagtttgtacatactggttcaata

SEQ ID NO: 138211 - DNA, 25 bp, Probe Sequence
agtttgggaccaactgggatccaga

SEQ ID NO: 138212 - DNA, 25 bp, Probe Sequence
agtttgaggaactactacgaacaat

SEQ ID NO: 138213 - DNA, 25 bp, Probe Sequence
agttttggaaccatactcactcact

SEQ ID NO: 138214 - DNA, 25 bp, Probe Sequence
agtacttccaacagttgctgactca

SEQ ID NO: 138215 - DNA, 25 bp, Probe Sequence
agtacattccaagggtgatcataat

SEQ ID NO: 138216 - DNA, 25 bp, Probe Sequence
agttcagtggcattgtggttgaaat

SEQ ID NO: 138217 - DNA, 25 bp, Probe Sequence
agtacactaagatcgttgaagagca

SEQ ID NO: 138218 - DNA, 25 bp, Probe Sequence
agtacatctataggaagtgaagagg

SEQ ID NO: 138219 - DNA, 25 bp, Probe Sequence
agtacatcaatgggcgtggatagcg

SEQ ID NO: 138220 - DNA, 25 bp, Probe Sequence
agatcaccagaggtcgggaggttga

SEQ ID NO: 138221 - DNA, 25 bp, Probe Sequence
agatcccaaagggtgtcagccgcaa

SEQ ID NO: 138222 - DNA, 25 bp, Probe Sequence
agatttacaggtgcagtcaccgaaa

SEQ ID NO: 138223 - DNA, 25 bp, Probe Sequence
agagtccaagggagcagccacgtta

SEQ ID NO: 138224 - DNA, 25 bp, Probe Sequence
agttccagagggctgaccctctctg

SEQ ID NO: 138225 - DNA, 25 bp, Probe Sequence
agttcttagaagctcacgccttagt

SEQ ID NO: 138226 - DNA, 25 bp, Probe Sequence
agtttggggacattcaccaggtggt

SEQ ID NO: 138227 - DNA, 25 bp, Probe Sequence
agtttcggtaagaaacatgctgttt

SEQ ID NO: 138228 - DNA, 25 bp, Probe Sequence
agtttgcaggcaaaacaaatgtaat

SEQ ID NO: 138229 - DNA, 25 bp, Probe Sequence
agtaccacagcaaaacaacttcagt

SEQ ID NO: 138230 - DNA, 25 bp, Probe Sequence
agtaccccattctatcatcaacggg

SEQ ID NO: 138231 - DNA, 25 bp, Probe Sequence
agtaccccattctatcatcaacggg

SEQ ID NO: 138232 - DNA, 25 bp, Probe Sequence
agtacttctcataaacactagggtt

SEQ ID NO: 138233 - DNA, 25 bp, Probe Sequence
agtacaatgctagtcaggagtggga

SEQ ID NO: 138234 - DNA, 25 bp, Probe Sequence
agttcagagttctaggagtggaaga

SEQ ID NO: 138235 - DNA, 25 bp, Probe Sequence
agattaatgttctagggccgggcac

SEQ ID NO: 138236 - DNA, 25 bp, Probe Sequence
agttacagtcaatgggccgtggaaa

SEQ ID NO: 138237 - DNA, 25 bp, Probe Sequence
agtttcaggcaatggatgtggggta

SEQ ID NO: 138238 - DNA, 25 bp, Probe Sequence
agtttcaggcaatggatgtggggta

SEQ ID NO: 138239 - DNA, 25 bp, Probe Sequence
agtttcaggcaatggatgtggggta

SEQ ID NO: 138240 - DNA, 25 bp, Probe Sequence
agtttcgcaacatggagacggcgag

SEQ ID NO: 138241 - DNA, 25 bp, Probe Sequence
agtttcttactcgggagctggctga

SEQ ID NO: 138242 - DNA, 25 bp, Probe Sequence
agtattcagctcttcacagggggta

SEQ ID NO: 138243 - DNA, 25 bp, Probe Sequence
agtacagcaccgtcatcgggatggt

SEQ ID NO: 138244 - DNA, 25 bp, Probe Sequence
agttcagatccgtatcactttcgat

SEQ ID NO: 138245 - DNA, 25 bp, Probe Sequence
agtacaatagcgtcttcttccagca

SEQ ID NO: 138246 - DNA, 25 bp, Probe Sequence
agtacatctacgtattagtcatcgc

SEQ ID NO: 138247 - DNA, 25 bp, Probe Sequence
agtacatctacgtattagtcatcgc

SEQ ID NO: 138248 - DNA, 25 bp, Probe Sequence
agtaactacagttagggctcctatt

SEQ ID NO: 138249 - DNA, 25 bp, Probe Sequence
agatttcccagttactgctgcttct

SEQ ID NO: 138250 - DNA, 25 bp, Probe Sequence
agtttcctatttggctgcattctag

SEQ ID NO: 138251 - DNA, 25 bp, Probe Sequence
agtatgatgcgtttttggcctcaga

SEQ ID NO: 138252 - DNA, 25 bp, Probe Sequence
agtatgcagcctttattaccaagcc

SEQ ID NO: 138253 - DNA, 25 bp, Probe Sequence
agtatgacctattggtcctgccacc

SEQ ID NO: 138254 - DNA, 25 bp, Probe Sequence
agtaaccatacggtctgagctctcc

SEQ ID NO: 138255 - DNA, 25 bp, Probe Sequence
agtcaaacagactcctagctctgcc

SEQ ID NO: 138256 - DNA, 25 bp, Probe Sequence
agtcaaatgccaaacactagctctg

SEQ ID NO: 138257 - DNA, 25 bp, Probe Sequence
agtaagtggcaattccatacatatt

SEQ ID NO: 138258 - DNA, 25 bp, Probe Sequence
agtcaactcagccttcagattgtat

SEQ ID NO: 138259 - DNA, 25 bp, Probe Sequence
agtcaatatcaccatcatagacaga

SEQ ID NO: 138260 - DNA, 25 bp, Probe Sequence
agatcttgataccgaaacagaacaa

SEQ ID NO: 138261 - DNA, 25 bp, Probe Sequence
agttggagaccgtcaaccttcaagt

SEQ ID NO: 138262 - DNA, 25 bp, Probe Sequence
agttatggaccgctagcatctgtca

SEQ ID NO: 138263 - DNA, 25 bp, Probe Sequence
agttcgcagcatttgtaagatctta

SEQ ID NO: 138264 - DNA, 25 bp, Probe Sequence
agtacagagatccagataagagtta

SEQ ID NO: 138265 - DNA, 25 bp, Probe Sequence
agtacaggactgacacaatattatt

SEQ ID NO: 138266 - DNA, 25 bp, Probe Sequence
agttcaggtctaatcaggtttcttt

SEQ ID NO: 138267 - DNA, 25 bp, Probe Sequence
agattagaatccaggtttttttcag

SEQ ID NO: 138268 - DNA, 25 bp, Probe Sequence
agttcagaagtcaccttctttcgtg

SEQ ID NO: 138269 - DNA, 25 bp, Probe Sequence
agttcagccattattacttttggta

SEQ ID NO: 138270 - DNA, 25 bp, Probe Sequence
agaaccccagtttcctatttggatg

SEQ ID NO: 138271 - DNA, 25 bp, Probe Sequence
agtacacttagtattctgtcttgaa

SEQ ID NO: 138272 - DNA, 25 bp, Probe Sequence
agtaaactatttttattcattgaat

SEQ ID NO: 138273 - DNA, 25 bp, Probe Sequence
agtatgagtcttctgtaattcattg

SEQ ID NO: 138274 - DNA, 25 bp, Probe Sequence
agttatgtcatccctcttattaatc

SEQ ID NO: 138275 - DNA, 25 bp, Probe Sequence
agtatctgtctgccttcgatgaaga

SEQ ID NO: 138276 - DNA, 25 bp, Probe Sequence
agtatcatctttcaggcatgaatga

SEQ ID NO: 138277 - DNA, 25 bp, Probe Sequence
agttcctatttcagcataaagaggc

SEQ ID NO: 138278 - DNA, 25 bp, Probe Sequence
agttcctatttcagcataaagaggc

SEQ ID NO: 138279 - DNA, 25 bp, Probe Sequence
agtttatatttcactagaactgtgt

SEQ ID NO: 138280 - DNA, 25 bp, Probe Sequence
agttgcttttacagttaacaatgga

SEQ ID NO: 138281 - DNA, 25 bp, Probe Sequence
agttttttgactatcttaatgcatg

SEQ ID NO: 138282 - DNA, 25 bp, Probe Sequence
agttttattttaatcgtcattgaga

SEQ ID NO: 138283 - DNA, 25 bp, Probe Sequence
agttgatttttgtgtctacagctaa

SEQ ID NO: 138284 - DNA, 25 bp, Probe Sequence
agttcaaatttaagtgcaaagcttc

SEQ ID NO: 138285 - DNA, 25 bp, Probe Sequence
agttcaaatggtacgttataacatc

SEQ ID NO: 138286 - DNA, 25 bp, Probe Sequence
agtacgatggtgaacgttctaattt

SEQ ID NO: 138287 - DNA, 25 bp, Probe Sequence
agatagggtggctttgttctttgtt

SEQ ID NO: 138288 - DNA, 25 bp, Probe Sequence
agtacctatggtatgttctctttta

SEQ ID NO: 138289 - DNA, 25 bp, Probe Sequence
agtactgctgtaggggatatctctt

SEQ ID NO: 138290 - DNA, 25 bp, Probe Sequence
agtattctgtacacagatccctgtg

SEQ ID NO: 138291 - DNA, 25 bp, Probe Sequence
agtatctcttcgaaaggctcactct

SEQ ID NO: 138292 - DNA, 25 bp, Probe Sequence
agtttttgcttcaagtgttttggtg

SEQ ID NO: 138293 - DNA, 25 bp, Probe Sequence
agtttttgcttcaagtgttttggtg

SEQ ID NO: 138294 - DNA, 25 bp, Probe Sequence
agtttttcttcgttactttgctgct

SEQ ID NO: 138295 - DNA, 25 bp, Probe Sequence
agttatttattgggaacccctgcag

SEQ ID NO: 138296 - DNA, 25 bp, Probe Sequence
agttagtttgcgggaactcagctcc

SEQ ID NO: 138297 - DNA, 25 bp, Probe Sequence
agtaattttgcacagacatctcctc

SEQ ID NO: 138298 - DNA, 25 bp, Probe Sequence
agataatctttctggaattccgaga

SEQ ID NO: 138299 - DNA, 25 bp, Probe Sequence
agatgttatcatgagggaattccgg

SEQ ID NO: 138300 - DNA, 25 bp, Probe Sequence
agatgggcagcagaggcaactcccg

SEQ ID NO: 138301 - DNA, 25 bp, Probe Sequence
agtagagcaaaatcaccagccctgc

SEQ ID NO: 138302 - DNA, 25 bp, Probe Sequence
agtagagcaaaatcaccagccctgc

SEQ ID NO: 138303 - DNA, 25 bp, Probe Sequence
agtagagaagggccatccagccgtg

SEQ ID NO: 138304 - DNA, 25 bp, Probe Sequence
agtagatgagaagtcttcacgggga

SEQ ID NO: 138305 - DNA, 25 bp, Probe Sequence
agtacatgagtgctcttctgcaggc

SEQ ID NO: 138306 - DNA, 25 bp, Probe Sequence
agtaatgagtgtgtgcctcatgcct

SEQ ID NO: 138307 - DNA, 25 bp, Probe Sequence
agtagagatggtgtttccccacgtt

SEQ ID NO: 138308 - DNA, 25 bp, Probe Sequence
agtaatgatggcagcgtgtcccacc

SEQ ID NO: 138309 - DNA, 25 bp, Probe Sequence
agtaaagcctcaggaatgcccacgc

SEQ ID NO: 138310 - DNA, 25 bp, Probe Sequence
agtaagagccaaagcagcacctccc

SEQ ID NO: 138311 - DNA, 25 bp, Probe Sequence
agtacatggccaatggctgcctcct

SEQ ID NO: 138312 - DNA, 25 bp, Probe Sequence
agtacagtcctgattgcatcataat

SEQ ID NO: 138313 - DNA, 25 bp, Probe Sequence
agtacactccacacatgcataaagg

SEQ ID NO: 138314 - DNA, 25 bp, Probe Sequence
agtatcagagccaaacacataaatg

SEQ ID NO: 138315 - DNA, 25 bp, Probe Sequence
agttcggccaaattgtcaacacgct

SEQ ID NO: 138316 - DNA, 25 bp, Probe Sequence
agttcagagctatcaagacagacat

SEQ ID NO: 138317 - DNA, 25 bp, Probe Sequence
agttcagacttatcaccattcttat

SEQ ID NO: 138318 - DNA, 25 bp, Probe Sequence
agttatgaattactccttccagtag

SEQ ID NO: 138319 - DNA, 25 bp, Probe Sequence
agtaatggatttctttggatgctga

SEQ ID NO: 138320 - DNA, 25 bp, Probe Sequence
agtaatggcatgcggtttaagctcc

SEQ ID NO: 138321 - DNA, 25 bp, Probe Sequence
agtaaatccgggtctctaggatgcc

SEQ ID NO: 138322 - DNA, 25 bp, Probe Sequence
agtaaaccagaccactctagaatct

SEQ ID NO: 138323 - DNA, 25 bp, Probe Sequence
agatgaaacctactccattgataac

SEQ ID NO: 138324 - DNA, 25 bp, Probe Sequence
cgtgttacctttctctattacagct

SEQ ID NO: 138325 - DNA, 25 bp, Probe Sequence
agtttaacttggatctatcaacagt

SEQ ID NO: 138326 - DNA, 25 bp, Probe Sequence
agtttggtttcgatcttcataacgg

SEQ ID NO: 138327 - DNA, 25 bp, Probe Sequence
agtttgagctcttaggtttattgga

SEQ ID NO: 138328 - DNA, 25 bp, Probe Sequence
agtttgagctcttaggtttattgga

SEQ ID NO: 138329 - DNA, 25 bp, Probe Sequence
agtttttctgagtagtttctgagga

SEQ ID NO: 138330 - DNA, 25 bp, Probe Sequence
agttctgtttggttagtattggcat

SEQ ID NO: 138331 - DNA, 25 bp, Probe Sequence
agttcagtttaaccactgattgcct

SEQ ID NO: 138332 - DNA, 25 bp, Probe Sequence
agttcagttcattatccatctttcc

SEQ ID NO: 138333 - DNA, 25 bp, Probe Sequence
agtatcgcctattaccattgtgatg

SEQ ID NO: 138334 - DNA, 25 bp, Probe Sequence
agtatgtcttaatcgcagctgtgat

SEQ ID NO: 138335 - DNA, 25 bp, Probe Sequence
agtagctcttgaaagcagctttgag

SEQ ID NO: 138336 - DNA, 25 bp, Probe Sequence
agtagtctagatctcagttaatgct

SEQ ID NO: 138337 - DNA, 25 bp, Probe Sequence
agtagttagatttcacctgcatata

SEQ ID NO: 138338 - DNA, 25 bp, Probe Sequence
agtattcaatcaccaacttgcaaac

SEQ ID NO: 138339 - DNA, 25 bp, Probe Sequence
agtttaagagctcccattgtacagc

SEQ ID NO: 138340 - DNA, 25 bp, Probe Sequence
agttaaagaccattacttctcagtg

SEQ ID NO: 138341 - DNA, 25 bp, Probe Sequence
agtaaaaccttgtacttctctattg

SEQ ID NO: 138342 - DNA, 25 bp, Probe Sequence
agctagaaagtctgaacattttatt

SEQ ID NO: 138343 - DNA, 25 bp, Probe Sequence
agtttaaagttgcacatgattgtat

SEQ ID NO: 138344 - DNA, 25 bp, Probe Sequence
agtacattcaagtgtatcatattgc

SEQ ID NO: 138345 - DNA, 25 bp, Probe Sequence
agtatgatccaactcacttcatcct

SEQ ID NO: 138346 - DNA, 25 bp, Probe Sequence
agtagtgccaaattttatcagttcc

SEQ ID NO: 138347 - DNA, 25 bp, Probe Sequence
agtaggaactgattctctacctttc

SEQ ID NO: 138348 - DNA, 25 bp, Probe Sequence
agtagtgaacaatctgtgccctcag

SEQ ID NO: 138349 - DNA, 25 bp, Probe Sequence
agtatgagaacacagttgtcctctc

SEQ ID NO: 138350 - DNA, 25 bp, Probe Sequence
agtatgcaataagagatgccctgta

SEQ ID NO: 138351 - DNA, 25 bp, Probe Sequence
agtactgtgatagagctgtcctata

SEQ ID NO: 138352 - DNA, 25 bp, Probe Sequence
agtactgcatgttgtcacttacatt

SEQ ID NO: 138353 - DNA, 25 bp, Probe Sequence
agtactcagccggcagcataatgaa

SEQ ID NO: 138354 - DNA, 25 bp, Probe Sequence
agtagtgtccaggcacattgtgtac

SEQ ID NO: 138355 - DNA, 25 bp, Probe Sequence
agtaggtgacctgcagctgtgatga

SEQ ID NO: 138356 - DNA, 25 bp, Probe Sequence
agtagtgctgtttgccagctgtata

SEQ ID NO: 138357 - DNA, 25 bp, Probe Sequence
agtactattccactcagattgatga

SEQ ID NO: 138358 - DNA, 25 bp, Probe Sequence
agtactgaccaacatatctcatgaa

SEQ ID NO: 138359 - DNA, 25 bp, Probe Sequence
agtacttccagtcgaatgctgaacc

SEQ ID NO: 138360 - DNA, 25 bp, Probe Sequence
agtttacctgtgcaacaaatctgcc

SEQ ID NO: 138361 - DNA, 25 bp, Probe Sequence
agtttacctagaccaaaagcctgca

SEQ ID NO: 138362 - DNA, 25 bp, Probe Sequence
agtatttcctgggctacaacagagt

SEQ ID NO: 138363 - DNA, 25 bp, Probe Sequence
agtatcttcactaatgcaacaccag

SEQ ID NO: 138364 - DNA, 25 bp, Probe Sequence
agtactgtgtcaacatgcaaggcca

SEQ ID NO: 138365 - DNA, 25 bp, Probe Sequence
agtacaggagcatgagcacgcgcac

SEQ ID NO: 138366 - DNA, 25 bp, Probe Sequence
agtacatggtgactgaacgcgccac

SEQ ID NO: 138367 - DNA, 25 bp, Probe Sequence
acaagcatgggtcaccaacgaccac

SEQ ID NO: 138368 - DNA, 25 bp, Probe Sequence
agagaaaggacttccacggacacca

SEQ ID NO: 138369 - DNA, 25 bp, Probe Sequence
agagcaaataaagacctgagaacct

SEQ ID NO: 138370 - DNA, 25 bp, Probe Sequence
agtatagaagaatatccttggaagt

SEQ ID NO: 138371 - DNA, 25 bp, Probe Sequence
agtttgaaggcatacttttgcatag

SEQ ID NO: 138372 - DNA, 25 bp, Probe Sequence
agtatgtacagtctacttttgaact

SEQ ID NO: 138373 - DNA, 25 bp, Probe Sequence
agttttgcagtttgactttacgtct

SEQ ID NO: 138374 - DNA, 25 bp, Probe Sequence
agtttagcaatatgacattcttggt

SEQ ID NO: 138375 - DNA, 25 bp, Probe Sequence
agtttacaataagttattatgccat

SEQ ID NO: 138376 - DNA, 25 bp, Probe Sequence
agtatttccaacttgtcacttgcca

SEQ ID NO: 138377 - DNA, 25 bp, Probe Sequence
agttttccaaaagacactgacatgt

SEQ ID NO: 138378 - DNA, 25 bp, Probe Sequence
agtttgctacgaacaaaacgcagcg

SEQ ID NO: 138379 - DNA, 25 bp, Probe Sequence
agttctgctttgagctgaaaccagt

SEQ ID NO: 138380 - DNA, 25 bp, Probe Sequence
agtattgtattatgtgacaaccatg

SEQ ID NO: 138381 - DNA, 25 bp, Probe Sequence
agtattcatgactatggataaacta

SEQ ID NO: 138382 - DNA, 25 bp, Probe Sequence
agtatccagacctgatcgctgagct

SEQ ID NO: 138383 - DNA, 25 bp, Probe Sequence
agattctagaactcccatatgctgg

SEQ ID NO: 138384 - DNA, 25 bp, Probe Sequence
agatttaaaaaggcctatgagaagt

SEQ ID NO: 138385 - DNA, 25 bp, Probe Sequence
agttttatcaactcactttgttttg

SEQ ID NO: 138386 - DNA, 25 bp, Probe Sequence
agttccgtaagctctttattggtgg

SEQ ID NO: 138387 - DNA, 25 bp, Probe Sequence
cagttccgtaagctctttattggtg

SEQ ID NO: 138388 - DNA, 25 bp, Probe Sequence
agttcctgtggatgttttgtgtagt

SEQ ID NO: 138389 - DNA, 25 bp, Probe Sequence
agtttggtggcatgctacttgccta

SEQ ID NO: 138390 - DNA, 25 bp, Probe Sequence
agttcttgaggtttacttctcaaat

SEQ ID NO: 138391 - DNA, 25 bp, Probe Sequence
agttttgcggcagacactttaccaa

SEQ ID NO: 138392 - DNA, 25 bp, Probe Sequence
cagttttcaactgacctctggacgc

SEQ ID NO: 138393 - DNA, 25 bp, Probe Sequence
agtttgtcaaaaagtctgctgtacc

SEQ ID NO: 138394 - DNA, 25 bp, Probe Sequence
agttcaccaaaaagctgacttactt

SEQ ID NO: 138395 - DNA, 25 bp, Probe Sequence
agttaggcaaacaaatggttgattt

SEQ ID NO: 138396 - DNA, 25 bp, Probe Sequence
agataagggaactacaggattgtac

SEQ ID NO: 138397 - DNA, 25 bp, Probe Sequence
agatacaagtgaaaacgcagatggt

SEQ ID NO: 138398 - DNA, 25 bp, Probe Sequence
agtacacagggaaatctcagataga

SEQ ID NO: 138399 - DNA, 25 bp, Probe Sequence
agtaccaggccttattcagcatgga

SEQ ID NO: 138400 - DNA, 25 bp, Probe Sequence
agtacgtggactggattctggagaa

SEQ ID NO: 138401 - DNA, 25 bp, Probe Sequence
agtacagtgtgttgcaatttaggac

SEQ ID NO: 138402 - DNA, 25 bp, Probe Sequence
agtttgtacaaaaaagcaggctggt

SEQ ID NO: 138403 - DNA, 25 bp, Probe Sequence
agtttgtacaaaaaagcaggctggt

SEQ ID NO: 138404 - DNA, 25 bp, Probe Sequence
agtttgtacaaaaaagcaggctggt

SEQ ID NO: 138405 - DNA, 25 bp, Probe Sequence
agtttgtacaaaaaagcaggctggt

SEQ ID NO: 138406 - DNA, 25 bp, Probe Sequence
agtttgtacaaaaaagcaggctggt

SEQ ID NO: 138407 - DNA, 25 bp, Probe Sequence
agtttgtacaaaaaagcaggctggt

SEQ ID NO: 138408 - DNA, 25 bp, Probe Sequence
agtttgtacaaaaaagcaggctggt

SEQ ID NO: 138409 - DNA, 25 bp, Probe Sequence
agtttgtacaaaaaagcaggctggt

SEQ ID NO: 138410 - DNA, 25 bp, Probe Sequence
agtttgtacaaaaaagcaggctggt

SEQ ID NO: 138411 - DNA, 25 bp, Probe Sequence
agtttgtacaaaaaagcaggctggt

SEQ ID NO: 138412 - DNA, 25 bp, Probe Sequence
agtttgtacaaaaaagcaggctggt

SEQ ID NO: 138413 - DNA, 25 bp, Probe Sequence
agtttgtacaaaaaagcaggctggt

SEQ ID NO: 138414 - DNA, 25 bp, Probe Sequence
agtttgtacaaaaaagcaggctggt

SEQ ID NO: 138415 - DNA, 25 bp, Probe Sequence
agtttgtacaaaaaagcaggctggt

SEQ ID NO: 138416 - DNA, 25 bp, Probe Sequence
agtttgtacaaaaaagcaggctggt

SEQ ID NO: 138417 - DNA, 25 bp, Probe Sequence
agtttgtacaaaaaagcaggctggt

SEQ ID NO: 138418 - DNA, 25 bp, Probe Sequence
agtttgtacaaaaaagcaggctggt

SEQ ID NO: 138419 - DNA, 25 bp, Probe Sequence
agtttgtacaaaaaagcaggctggt

SEQ ID NO: 138420 - DNA, 25 bp, Probe Sequence
agtttgtacaaaaaagcaggctggt

SEQ ID NO: 138421 - DNA, 25 bp, Probe Sequence
agtttgtacaaaaaagcaggctggt

SEQ ID NO: 138422 - DNA, 25 bp, Probe Sequence
agtttgtacaaaaaagcaggctggt

SEQ ID NO: 138423 - DNA, 25 bp, Probe Sequence
agtttgtacaaaaaagcaggctggt

SEQ ID NO: 138424 - DNA, 25 bp, Probe Sequence
agtttgtacaaaaaagcaggctggt

SEQ ID NO: 138425 - DNA, 25 bp, Probe Sequence
agtttgtacaaaaaagcaggctggt

SEQ ID NO: 138426 - DNA, 25 bp, Probe Sequence
agtttgtacaaaaaagcaggctggt

SEQ ID NO: 138427 - DNA, 25 bp, Probe Sequence
agtttgtacaaaaaagcaggctggt

SEQ ID NO: 138428 - DNA, 25 bp, Probe Sequence
agtttgtacaaaaaagcaggctggt

SEQ ID NO: 138429 - DNA, 25 bp, Probe Sequence
agtttgtacaaaaaagcaggctggt

SEQ ID NO: 138430 - DNA, 25 bp, Probe Sequence
agtttgtacaaaaaagcaggctggt

SEQ ID NO: 138431 - DNA, 25 bp, Probe Sequence
agttgtgttagactttagggccagt

SEQ ID NO: 138432 - DNA, 25 bp, Probe Sequence
agtattttagccactgaacttcagt

SEQ ID NO: 138433 - DNA, 25 bp, Probe Sequence
agtatgtttatgtttcatgacacta

SEQ ID NO: 138434 - DNA, 25 bp, Probe Sequence
agttctgtcatatgttaagcagcta

SEQ ID NO: 138435 - DNA, 25 bp, Probe Sequence
agttcagtatttggtctaggcttca

SEQ ID NO: 138436 - DNA, 25 bp, Probe Sequence
agtacgtatgttcatctacagtaca

SEQ ID NO: 138437 - DNA, 25 bp, Probe Sequence
agtactgttgtctcatgtaatgcta

SEQ ID NO: 138438 - DNA, 25 bp, Probe Sequence
agtacatgtatgtgttgtgatatta

SEQ ID NO: 138439 - DNA, 25 bp, Probe Sequence
agtacgtgcaggtttgttacatagg

SEQ ID NO: 138440 - DNA, 25 bp, Probe Sequence
agtacaggcgctaattgttgtgata

SEQ ID NO: 138441 - DNA, 25 bp, Probe Sequence
agatcgcgccggattattgctgcaa

SEQ ID NO: 138442 - DNA, 25 bp, Probe Sequence
agatcgcgccggattattgctgcaa

SEQ ID NO: 138443 - DNA, 25 bp, Probe Sequence
agattagccggaaagaatgtgccaa

SEQ ID NO: 138444 - DNA, 25 bp, Probe Sequence
agtatgacctggtggcagcgggcaa

SEQ ID NO: 138445 - DNA, 25 bp, Probe Sequence
agttcacctacatgggggctcaggt

SEQ ID NO: 138446 - DNA, 25 bp, Probe Sequence
agttccagctactcaggaggctgag

SEQ ID NO: 138447 - DNA, 25 bp, Probe Sequence
agttccagctactcaggaggctgag

SEQ ID NO: 138448 - DNA, 25 bp, Probe Sequence
agttcgagaaagacctgaggcgcat

SEQ ID NO: 138449 - DNA, 25 bp, Probe Sequence
agttctagagagctgcctgtgggac

SEQ ID NO: 138450 - DNA, 25 bp, Probe Sequence
agttttatgcaggctgtttgtggca

SEQ ID NO: 138451 - DNA, 25 bp, Probe Sequence
agttttccatgcgtgtttctgactc

SEQ ID NO: 138452 - DNA, 25 bp, Probe Sequence
agagtttcctggatattagccgccc

SEQ ID NO: 138453 - DNA, 25 bp, Probe Sequence
agctgtaggcttgtaaatacccgcc

SEQ ID NO: 138454 - DNA, 25 bp, Probe Sequence
agttgagtgttcctctaaaccctct

SEQ ID NO: 138455 - DNA, 25 bp, Probe Sequence
agtagacttaccgttcaatctcctt

SEQ ID NO: 138456 - DNA, 25 bp, Probe Sequence
agtagactgtttgaatgcaatatat

SEQ ID NO: 138457 - DNA, 25 bp, Probe Sequence
agatatatccacagaaataatcatt

SEQ ID NO: 138458 - DNA, 25 bp, Probe Sequence
agtatatgtatgctgagaatttcca

SEQ ID NO: 138459 - DNA, 25 bp, Probe Sequence
agtagtgctctgcatagtttactga

SEQ ID NO: 138460 - DNA, 25 bp, Probe Sequence
agtagtgttggactgttgccacagt

SEQ ID NO: 138461 - DNA, 25 bp, Probe Sequence
agtaggaggggcatcagctcacatc

SEQ ID NO: 138462 - DNA, 25 bp, Probe Sequence
agtaggggaatctaagcacaatgca

SEQ ID NO: 138463 - DNA, 25 bp, Probe Sequence
agtactgggagatacagccatccac

SEQ ID NO: 138464 - DNA, 25 bp, Probe Sequence
agtaggtgggattacaggcgcccgc

SEQ ID NO: 138465 - DNA, 25 bp, Probe Sequence
agtaggatggaattgatgctgggcc

SEQ ID NO: 138466 - DNA, 25 bp, Probe Sequence
agtagaggccattcatagagctgtg

SEQ ID NO: 138467 - DNA, 25 bp, Probe Sequence
agtttgcagccatcattgtgcttgg

SEQ ID NO: 138468 - DNA, 25 bp, Probe Sequence
agtattgagcccgtttcatcatggt

SEQ ID NO: 138469 - DNA, 25 bp, Probe Sequence
agtatgctacaatctgtgtcatata

SEQ ID NO: 138470 - DNA, 25 bp, Probe Sequence
agtagctatgactgcagatcatgta

SEQ ID NO: 138471 - DNA, 25 bp, Probe Sequence
agatagacaggctgctgaagcaaac

SEQ ID NO: 138472 - DNA, 25 bp, Probe Sequence
agattacgtgaaggaagagaagtgt

SEQ ID NO: 138473 - DNA, 25 bp, Probe Sequence
agactccgttatggataagaagatc

SEQ ID NO: 138474 - DNA, 25 bp, Probe Sequence
agacttgggctagagcagaaggcat

SEQ ID NO: 138475 - DNA, 25 bp, Probe Sequence
agtttggtgctgacggtgagaggaa

SEQ ID NO: 138476 - DNA, 25 bp, Probe Sequence
agttttctgcctcactgaagcgaat

SEQ ID NO: 138477 - DNA, 25 bp, Probe Sequence
agttagtctactcttaagccatctt

SEQ ID NO: 138478 - DNA, 25 bp, Probe Sequence
agttcagttgttataaaccattgtg

SEQ ID NO: 138479 - DNA, 25 bp, Probe Sequence
agttagttttgcctagaatcctgtt

SEQ ID NO: 138480 - DNA, 25 bp, Probe Sequence
agttggtcttaggttgtatacaggt

SEQ ID NO: 138481 - DNA, 25 bp, Probe Sequence
agtatttgctcaacccagttacagg

SEQ ID NO: 138482 - DNA, 25 bp, Probe Sequence
agtatgtctcttaaccagttcactt

SEQ ID NO: 138483 - DNA, 25 bp, Probe Sequence
agtatgttctttaatgctggatcac

SEQ ID NO: 138484 - DNA, 25 bp, Probe Sequence
agttaatctgatgttcatgttcacc

SEQ ID NO: 138485 - DNA, 25 bp, Probe Sequence
agtttgtcgctgatggcatcttcaa

SEQ ID NO: 138486 - DNA, 25 bp, Probe Sequence
agtatcgtcggaatgagctcttcct

SEQ ID NO: 138487 - DNA, 25 bp, Probe Sequence
agttcagtgggaagcatgtcgtctt

SEQ ID NO: 138488 - DNA, 25 bp, Probe Sequence
agtaggtggagctcattgctttctc

SEQ ID NO: 138489 - DNA, 25 bp, Probe Sequence
agtaggatagacagtcctttctaga

SEQ ID NO: 138490 - DNA, 25 bp, Probe Sequence
agataggaagccagactacactgct

SEQ ID NO: 138491 - DNA, 25 bp, Probe Sequence
agattggattccaagtagaagggga

SEQ ID NO: 138492 - DNA, 25 bp, Probe Sequence
agttgaattccctggatagtccaag

SEQ ID NO: 138493 - DNA, 25 bp, Probe Sequence
agttcagttactcgggatttctaca

SEQ ID NO: 138494 - DNA, 25 bp, Probe Sequence
agttgcttttaggggtttctgacat

SEQ ID NO: 138495 - DNA, 25 bp, Probe Sequence
agattgttatggtgagagtatttac

SEQ ID NO: 138496 - DNA, 25 bp, Probe Sequence
agttgtattggatgccctatctatc

SEQ ID NO: 138497 - DNA, 25 bp, Probe Sequence
agttgtcaaatatctcctgttcgtt

SEQ ID NO: 138498 - DNA, 25 bp, Probe Sequence
agtagtcacgttcgtcaagtccgtt

SEQ ID NO: 138499 - DNA, 25 bp, Probe Sequence
agttatcaccttctaaattactatg

SEQ ID NO: 138500 - DNA, 25 bp, Probe Sequence
agtttgacgatatcgaaatttctca

SEQ ID NO: 138501 - DNA, 25 bp, Probe Sequence
agtattacagtatcccaatctccag

SEQ ID NO: 138502 - DNA, 25 bp, Probe Sequence
agtattagagggacagcacttctcc

SEQ ID NO: 138503 - DNA, 25 bp, Probe Sequence
agatctccaagctgaaacttccacg

SEQ ID NO: 138504 - DNA, 25 bp, Probe Sequence
agtattgcagtctaaaacttcaaaa

SEQ ID NO: 138505 - DNA, 25 bp, Probe Sequence
agtatccctgaataacttatgcaaa

SEQ ID NO: 138506 - DNA, 25 bp, Probe Sequence
agttcaccttatcaagttacaccat

SEQ ID NO: 138507 - DNA, 25 bp, Probe Sequence
agttatcctttcacagtgttcccaa

SEQ ID NO: 138508 - DNA, 25 bp, Probe Sequence
agttatttcgtcactgtcgcaaaca

SEQ ID NO: 138509 - DNA, 25 bp, Probe Sequence
agttgtttagcttcttagcacaaag

SEQ ID NO: 138510 - DNA, 25 bp, Probe Sequence
agtttctgtccctttagaagagatt

SEQ ID NO: 138511 - DNA, 25 bp, Probe Sequence
agtttcttgcccttgaaaatccaat

SEQ ID NO: 138512 - DNA, 25 bp, Probe Sequence
agtttcctgtcctgagacgaaattc

SEQ ID NO: 138513 - DNA, 25 bp, Probe Sequence
agtttcaataccggagatcatgcaa

SEQ ID NO: 138514 - DNA, 25 bp, Probe Sequence
agttgatgccttcccagagtcaacc

SEQ ID NO: 138515 - DNA, 25 bp, Probe Sequence
agtagagcacgtcgccgagatgaag

SEQ ID NO: 138516 - DNA, 25 bp, Probe Sequence
agttcaccgaggccgagagcaacat

SEQ ID NO: 138517 - DNA, 25 bp, Probe Sequence
agttccttggccatgcagaaagcat

SEQ ID NO: 138518 - DNA, 25 bp, Probe Sequence
agtaggttggacagcatataatttg

SEQ ID NO: 138519 - DNA, 25 bp, Probe Sequence
agtagtatgtgaccgagctataaat

SEQ ID NO: 138520 - DNA, 25 bp, Probe Sequence
agtatatctggacaagccaacttgt

SEQ ID NO: 138521 - DNA, 25 bp, Probe Sequence
agtatatgtgtgtctatacacacac

SEQ ID NO: 138522 - DNA, 25 bp, Probe Sequence
agttttggagtttgcaaccacagta

SEQ ID NO: 138523 - DNA, 25 bp, Probe Sequence
cagtcttttaatttaacccagtcag

SEQ ID NO: 138524 - DNA, 25 bp, Probe Sequence
agttagttactcttacactcttgtc

SEQ ID NO: 138525 - DNA, 25 bp, Probe Sequence
agttgtataactcaggcgtctttgc

SEQ ID NO: 138526 - DNA, 25 bp, Probe Sequence
agttgaacaaactgtgaatcttctg

SEQ ID NO: 138527 - DNA, 25 bp, Probe Sequence
agttggaaaacttgtgcccttgtat

SEQ ID NO: 138528 - DNA, 25 bp, Probe Sequence
agttggaaaacttgtgcccttgtat

SEQ ID NO: 138529 - DNA, 25 bp, Probe Sequence
agttgaaaatagtgagccctgttaa

SEQ ID NO: 138530 - DNA, 25 bp, Probe Sequence
agttgatattatttttggccgttag

SEQ ID NO: 138531 - DNA, 25 bp, Probe Sequence
agtagtttatgatattgccctcttt

SEQ ID NO: 138532 - DNA, 25 bp, Probe Sequence
agtatcctatatgtattcctttcta

SEQ ID NO: 138533 - DNA, 25 bp, Probe Sequence
agttcctgctagatttcgtattcta

SEQ ID NO: 138534 - DNA, 25 bp, Probe Sequence
agttggctctagctacttggactat

SEQ ID NO: 138535 - DNA, 25 bp, Probe Sequence
agtttctctcagattctttgattat

SEQ ID NO: 138536 - DNA, 25 bp, Probe Sequence
agttttgtgccaacattccatgtat

SEQ ID NO: 138537 - DNA, 25 bp, Probe Sequence
agtttcagtgtcaaatggcggtctt

SEQ ID NO: 138538 - DNA, 25 bp, Probe Sequence
agtttatgtttccatgccagagttt

SEQ ID NO: 138539 - DNA, 25 bp, Probe Sequence
agctttatttacaaccagggagtct

SEQ ID NO: 138540 - DNA, 25 bp, Probe Sequence
agatcttcttcttcaaggaccggtt

SEQ ID NO: 138541 - DNA, 25 bp, Probe Sequence
agtttttgattctgatgactcgttt

SEQ ID NO: 138542 - DNA, 25 bp, Probe Sequence
agtatttgctgaatggggacctttt

SEQ ID NO: 138543 - DNA, 25 bp, Probe Sequence
agtagtagatgacagtgccacagct

SEQ ID NO: 138544 - DNA, 25 bp, Probe Sequence
agtaggtatgtccagagcagtcgct

SEQ ID NO: 138545 - DNA, 25 bp, Probe Sequence
agtaggctgcatctggagagcatgc

SEQ ID NO: 138546 - DNA, 25 bp, Probe Sequence
agtagacttggacgatgcgagcctt

SEQ ID NO: 138547 - DNA, 25 bp, Probe Sequence
agttactcaagtccatgggtgctcc

SEQ ID NO: 138548 - DNA, 25 bp, Probe Sequence
agttcccacagggcatgtgactttg

SEQ ID NO: 138549 - DNA, 25 bp, Probe Sequence
agattctcaccactgaagggcgtaa

SEQ ID NO: 138550 - DNA, 25 bp, Probe Sequence
agtttaaagctatggcatcatataa

SEQ ID NO: 138551 - DNA, 25 bp, Probe Sequence
agtttgtcatccctgggtctaggaa

SEQ ID NO: 138552 - DNA, 25 bp, Probe Sequence
agtattctcacttctgggttatcag

SEQ ID NO: 138553 - DNA, 25 bp, Probe Sequence
agtttgtgactatgcttgatttaat

SEQ ID NO: 138554 - DNA, 25 bp, Probe Sequence
agtttgtattgatgcgggccaacat

SEQ ID NO: 138555 - DNA, 25 bp, Probe Sequence
agtttgtctcgctgtgtaggcataa

SEQ ID NO: 138556 - DNA, 25 bp, Probe Sequence
agttagtacgcttcttagtgttgag

SEQ ID NO: 138557 - DNA, 25 bp, Probe Sequence
agatctattgacgggccttggtagc

SEQ ID NO: 138558 - DNA, 25 bp, Probe Sequence
agtttctgacatgtgcctatgcgtt

SEQ ID NO: 138559 - DNA, 25 bp, Probe Sequence
agtttcatatattacctagttattc

SEQ ID NO: 138560 - DNA, 25 bp, Probe Sequence
agttattataacagtgattctttca

SEQ ID NO: 138561 - DNA, 25 bp, Probe Sequence
agttaaaatgacctcatgtccttct

SEQ ID NO: 138562 - DNA, 25 bp, Probe Sequence
agttcacaagagaagtcgtttcatt

SEQ ID NO: 138563 - DNA, 25 bp, Probe Sequence
agatacaccaaatttcagtttgttt

SEQ ID NO: 138564 - DNA, 25 bp, Probe Sequence
agtataccaaaaccaatttatctga

SEQ ID NO: 138565 - DNA, 25 bp, Probe Sequence
agttgaatcatatgcccaaagtacg

SEQ ID NO: 138566 - DNA, 25 bp, Probe Sequence
agtatgacaacagcctcaagatcat

SEQ ID NO: 138567 - DNA, 25 bp, Probe Sequence
agtatgactgggttctatagatgcc

SEQ ID NO: 138568 - DNA, 25 bp, Probe Sequence
agtaggctgccatattcagaggcag

SEQ ID NO: 138569 - DNA, 25 bp, Probe Sequence
agtagttggtcttgtacatgcgcag

SEQ ID NO: 138570 - DNA, 25 bp, Probe Sequence
agtagttgcttccctaactgcaaag

SEQ ID NO: 138571 - DNA, 25 bp, Probe Sequence
agaggttgctgctgtcaaaatccaa

SEQ ID NO: 138572 - DNA, 25 bp, Probe Sequence
agaggcttgtacaaagaaggccaga

SEQ ID NO: 138573 - DNA, 25 bp, Probe Sequence
agttgtttgacgtgcaatggcccag

SEQ ID NO: 138574 - DNA, 25 bp, Probe Sequence
agttgtctgaacaggttgtcaccac

SEQ ID NO: 138575 - DNA, 25 bp, Probe Sequence
agttcacagaagcggtggaagccaa

SEQ ID NO: 138576 - DNA, 25 bp, Probe Sequence
agttaatgatactcctggaatacaa

SEQ ID NO: 138577 - DNA, 25 bp, Probe Sequence
agttcaagaccagcctggccaacat

SEQ ID NO: 138578 - DNA, 25 bp, Probe Sequence
agttcgagaccagcttggccaacat

SEQ ID NO: 138579 - DNA, 25 bp, Probe Sequence
agttcgagaccatcctgggcaatat

SEQ ID NO: 138580 - DNA, 25 bp, Probe Sequence
agttggcaaacttctcaggacaatg

SEQ ID NO: 138581 - DNA, 25 bp, Probe Sequence
agatcttcaaacaagcatcagcgtt

SEQ ID NO: 138582 - DNA, 25 bp, Probe Sequence
agatcatatcctcagaccaggtgga

SEQ ID NO: 138583 - DNA, 25 bp, Probe Sequence
agtatatccaggacacgctgcactg

SEQ ID NO: 138584 - DNA, 25 bp, Probe Sequence
agttacaagggcctgcatcatcttt

SEQ ID NO: 138585 - DNA, 25 bp, Probe Sequence
agtattcatagatgactgtcacatt

SEQ ID NO: 138586 - DNA, 25 bp, Probe Sequence
agtatgttctgatgagctgggcaag

SEQ ID NO: 138587 - DNA, 25 bp, Probe Sequence
agtattgtcgcctggtggcattggt

SEQ ID NO: 138588 - DNA, 25 bp, Probe Sequence
agttattctgcctgtgactcaattt

SEQ ID NO: 138589 - DNA, 25 bp, Probe Sequence
agtttcattgtctaacacacttctt

SEQ ID NO: 138590 - DNA, 25 bp, Probe Sequence
agtttatagatctgtgcaacatttt

SEQ ID NO: 138591 - DNA, 25 bp, Probe Sequence
agtaggtcaattcgtaacagtttat

SEQ ID NO: 138592 - DNA, 25 bp, Probe Sequence
agttaccacattctggaagatttac

SEQ ID NO: 138593 - DNA, 25 bp, Probe Sequence
agttaccactaggctaccaggtctc

SEQ ID NO: 138594 - DNA, 25 bp, Probe Sequence
agttgccacctaaaacaagtgtgtt

SEQ ID NO: 138595 - DNA, 25 bp, Probe Sequence
agtattctcttttcaagaagttctt

SEQ ID NO: 138596 - DNA, 25 bp, Probe Sequence
agtttctcctctaatcagtaatttc

SEQ ID NO: 138597 - DNA, 25 bp, Probe Sequence
agttttgccgtggatcagatggttt

SEQ ID NO: 138598 - DNA, 25 bp, Probe Sequence
agttggtctcgcaccagatagtatt

SEQ ID NO: 138599 - DNA, 25 bp, Probe Sequence
agttgtttcaaagatgatatttctg

SEQ ID NO: 138600 - DNA, 25 bp, Probe Sequence
agttggaatcggtttgcatttacgc

SEQ ID NO: 138601 - DNA, 25 bp, Probe Sequence
agttggagaccgctgtcaatcttgc

SEQ ID NO: 138602 - DNA, 25 bp, Probe Sequence
agttcaaccaagatgatactgttca

SEQ ID NO: 138603 - DNA, 25 bp, Probe Sequence
agtatacactacacgtactgtaata

SEQ ID NO: 138604 - DNA, 25 bp, Probe Sequence
agatatacctatgttaactgtaact

SEQ ID NO: 138605 - DNA, 25 bp, Probe Sequence
agttcagcacttgtctcattttaat

SEQ ID NO: 138606 - DNA, 25 bp, Probe Sequence
agttggcacagtgtccgccttaatc

SEQ ID NO: 138607 - DNA, 25 bp, Probe Sequence
agttgctaacatcatcttccttatt

SEQ ID NO: 138608 - DNA, 25 bp, Probe Sequence
agtttattgcagcctttcttttcct

SEQ ID NO: 138609 - DNA, 25 bp, Probe Sequence
agatattcagtagtttgtttttcat

SEQ ID NO: 138610 - DNA, 25 bp, Probe Sequence
agatattcagtagtttgtttttcat

SEQ ID NO: 138611 - DNA, 25 bp, Probe Sequence
agtttacttgtttgcatgtattctc

SEQ ID NO: 138612 - DNA, 25 bp, Probe Sequence
agtttcctttcttagctgatgtctt

SEQ ID NO: 138613 - DNA, 25 bp, Probe Sequence
agttttcttcctatcggtgtgtcta

SEQ ID NO: 138614 - DNA, 25 bp, Probe Sequence
agttcatgctttctttgcggtgttt

SEQ ID NO: 138615 - DNA, 25 bp, Probe Sequence
agtttgtgcattgtttctgggctgg

SEQ ID NO: 138616 - DNA, 25 bp, Probe Sequence
agttgggaagccactcttggctctg

SEQ ID NO: 138617 - DNA, 25 bp, Probe Sequence
agtatggacaaggcctctggttctc

SEQ ID NO: 138618 - DNA, 25 bp, Probe Sequence
agtaggaatatgtatctgtatggtc

SEQ ID NO: 138619 - DNA, 25 bp, Probe Sequence
agtagggaagttttatgccatgtta

SEQ ID NO: 138620 - DNA, 25 bp, Probe Sequence
agtaggcggcgatttttgtatgtta

SEQ ID NO: 138621 - DNA, 25 bp, Probe Sequence
agataggcaggtttactgtaaatga

SEQ ID NO: 138622 - DNA, 25 bp, Probe Sequence
agtatgcatgcagtcttgtactgtg

SEQ ID NO: 138623 - DNA, 25 bp, Probe Sequence
agttctgagtattgatagcttgctt

SEQ ID NO: 138624 - DNA, 25 bp, Probe Sequence
agttgagtgctaagaagttgatttt

SEQ ID NO: 138625 - DNA, 25 bp, Probe Sequence
agtatggtgccagtgatgttttgtt

SEQ ID NO: 138626 - DNA, 25 bp, Probe Sequence
agtatggctgcgatgatggcatttc

SEQ ID NO: 138627 - DNA, 25 bp, Probe Sequence
agtattgtgtgacgctggcattctt

SEQ ID NO: 138628 - DNA, 25 bp, Probe Sequence
agtaggtctgaaggcctccatttgt

SEQ ID NO: 138629 - DNA, 25 bp, Probe Sequence
agatgggtataaagcctcctaaggg

SEQ ID NO: 138630 - DNA, 25 bp, Probe Sequence
agatgggtataaagcctcctaaggg

SEQ ID NO: 138631 - DNA, 25 bp, Probe Sequence
agcggaaatgactccttctgaaatg

SEQ ID NO: 138632 - DNA, 25 bp, Probe Sequence
agcaggtacttctaccattaaggtg

SEQ ID NO: 138633 - DNA, 25 bp, Probe Sequence
agcaggtacttctaccattaaggtg

SEQ ID NO: 138634 - DNA, 25 bp, Probe Sequence
agcaggtacttctaccattaaggtg

SEQ ID NO: 138635 - DNA, 25 bp, Probe Sequence
agcggcccagctagacaaaaagcgg

SEQ ID NO: 138636 - DNA, 25 bp, Probe Sequence
agttctcacagtagccaaatgaagc

SEQ ID NO: 138637 - DNA, 25 bp, Probe Sequence
agttatgcagagtgctacccagcca

SEQ ID NO: 138638 - DNA, 25 bp, Probe Sequence
agttatgcagagtgctacccagcca

SEQ ID NO: 138639 - DNA, 25 bp, Probe Sequence
agttctgcaagatgttaccacctgg

SEQ ID NO: 138640 - DNA, 25 bp, Probe Sequence
agtatctcaaacctgaatccacact

SEQ ID NO: 138641 - DNA, 25 bp, Probe Sequence
agatttcgaacaatcacctccagtt

SEQ ID NO: 138642 - DNA, 25 bp, Probe Sequence
agtattgagaaacgcagcctgccag

SEQ ID NO: 138643 - DNA, 25 bp, Probe Sequence
agtatcataacaacacagccttcag

SEQ ID NO: 138644 - DNA, 25 bp, Probe Sequence
agtataatggcatcactgcctgttt

SEQ ID NO: 138645 - DNA, 25 bp, Probe Sequence
agttacatgtttgcacctttctagt

SEQ ID NO: 138646 - DNA, 25 bp, Probe Sequence
agtttatgatattgccctctttgta

SEQ ID NO: 138647 - DNA, 25 bp, Probe Sequence
agtatcttaactgcctttattcctt

SEQ ID NO: 138648 - DNA, 25 bp, Probe Sequence
agtatcactaagctcgctttcttgc

SEQ ID NO: 138649 - DNA, 25 bp, Probe Sequence
agttcactgggactcagtttacctt

SEQ ID NO: 138650 - DNA, 25 bp, Probe Sequence
agtataccaagttagttgattcttt

SEQ ID NO: 138651 - DNA, 25 bp, Probe Sequence
agtataaaactcaagttgttgctgg

SEQ ID NO: 138652 - DNA, 25 bp, Probe Sequence
agttacacaaccaatgcatttcctg

SEQ ID NO: 138653 - DNA, 25 bp, Probe Sequence
agtatacttcactgatgcttgtctg

SEQ ID NO: 138654 - DNA, 25 bp, Probe Sequence
agtatcactttgtgactccactgac

SEQ ID NO: 138655 - DNA, 25 bp, Probe Sequence
agttaccttcatgactcagagctcc

SEQ ID NO: 138656 - DNA, 25 bp, Probe Sequence
agttagccctaattctcaagatctc

SEQ ID NO: 138657 - DNA, 25 bp, Probe Sequence
agtttccatcaaaggcctagatctc

SEQ ID NO: 138658 - DNA, 25 bp, Probe Sequence
agttttcttgaagccgagatcatgc

SEQ ID NO: 138659 - DNA, 25 bp, Probe Sequence
agttcatgatttagtcctcagaaat

SEQ ID NO: 138660 - DNA, 25 bp, Probe Sequence
agtttgtttctggcatcctaaatca

SEQ ID NO: 138661 - DNA, 25 bp, Probe Sequence
agtttgttttgctaccaatatcata

SEQ ID NO: 138662 - DNA, 25 bp, Probe Sequence
agatttttttcatgccaatgaagat

SEQ ID NO: 138663 - DNA, 25 bp, Probe Sequence
agttaatctttctccaatgatccta

SEQ ID NO: 138664 - DNA, 25 bp, Probe Sequence
agatctacacgttcaacaaagacca

SEQ ID NO: 138665 - DNA, 25 bp, Probe Sequence
agttagaacttcagatcatcagatc

SEQ ID NO: 138666 - DNA, 25 bp, Probe Sequence
agttaagtcttccaatgccaatctg

SEQ ID NO: 138667 - DNA, 25 bp, Probe Sequence
agttagttatattagcagccctctg

SEQ ID NO: 138668 - DNA, 25 bp, Probe Sequence
agatatttgttataatgccttgtaa

SEQ ID NO: 138669 - DNA, 25 bp, Probe Sequence
agatattgttttgtgacttttagac

SEQ ID NO: 138670 - DNA, 25 bp, Probe Sequence
agataggattttctgtgtttcctga

SEQ ID NO: 138671 - DNA, 25 bp, Probe Sequence
agttggatatttctctacattcctg

SEQ ID NO: 138672 - DNA, 25 bp, Probe Sequence
agtttgatgagctctgcatcccatt

SEQ ID NO: 138673 - DNA, 25 bp, Probe Sequence
agttcaatggctgctgaagctgcct

SEQ ID NO: 138674 - DNA, 25 bp, Probe Sequence
agttcaagccttggatgacaccgaa

SEQ ID NO: 138675 - DNA, 25 bp, Probe Sequence
agttcaggccagactgcatgcaata

SEQ ID NO: 138676 - DNA, 25 bp, Probe Sequence
agttcaagccatgcctgcaaatcgc

SEQ ID NO: 138677 - DNA, 25 bp, Probe Sequence
agatctacacgcacttcacgtgcgc

SEQ ID NO: 138678 - DNA, 25 bp, Probe Sequence
agatcaagatcacgttctaggagga

SEQ ID NO: 138679 - DNA, 25 bp, Probe Sequence
agtattgctcagcttataacagatg

SEQ ID NO: 138680 - DNA, 25 bp, Probe Sequence
agttatcatcagtctttgtatcaag

SEQ ID NO: 138681 - DNA, 25 bp, Probe Sequence
agtatttcaactgctgtaaaattat

SEQ ID NO: 138682 - DNA, 25 bp, Probe Sequence
agtttctccaatgctgaggtacttg

SEQ ID NO: 138683 - DNA, 25 bp, Probe Sequence
agttactgaaaattgcaggctaatt

SEQ ID NO: 138684 - DNA, 25 bp, Probe Sequence
agttcctcaaactgaagcttattga

SEQ ID NO: 138685 - DNA, 25 bp, Probe Sequence
agatcccatctcaaaaaacattatt

SEQ ID NO: 138686 - DNA, 25 bp, Probe Sequence
agatcctaccccaattccttgtagg

SEQ ID NO: 138687 - DNA, 25 bp, Probe Sequence
agttctatcctctaattccattaaa

SEQ ID NO: 138688 - DNA, 25 bp, Probe Sequence
agttctctcacctatttgccaagaa

SEQ ID NO: 138689 - DNA, 25 bp, Probe Sequence
agattacccctatacacaagaatgg

SEQ ID NO: 138690 - DNA, 25 bp, Probe Sequence
agttaccatctcatcacatctaaaa

SEQ ID NO: 138691 - DNA, 25 bp, Probe Sequence
agttaatgactaatatgtttacaag

SEQ ID NO: 138692 - DNA, 25 bp, Probe Sequence
agttagtgacagatgttgttgatca

SEQ ID NO: 138693 - DNA, 25 bp, Probe Sequence
agatctaggacactgttgtggggtt

SEQ ID NO: 138694 - DNA, 25 bp, Probe Sequence
agatcatgcaagctggtggctggac

SEQ ID NO: 138695 - DNA, 25 bp, Probe Sequence
agatatgcgggtccagtgtcaacag

SEQ ID NO: 138696 - DNA, 25 bp, Probe Sequence
agatttcctagagttgctcaacagc

SEQ ID NO: 138697 - DNA, 25 bp, Probe Sequence
agttaccatatgatttagcaatgct

SEQ ID NO: 138698 - DNA, 25 bp, Probe Sequence
agttcctctttggtgtacagacttc

SEQ ID NO: 138699 - DNA, 25 bp, Probe Sequence
agttctctcttttctatctaggtgt

SEQ ID NO: 138700 - DNA, 25 bp, Probe Sequence
agtatttctcctttgcaatagcagt

SEQ ID NO: 138701 - DNA, 25 bp, Probe Sequence
agatattccacctgtaatagcactt

SEQ ID NO: 138702 - DNA, 25 bp, Probe Sequence
agtttcacagcctggagaaattggt

SEQ ID NO: 138703 - DNA, 25 bp, Probe Sequence
agtttccccagaagagaatatggga

SEQ ID NO: 138704 - DNA, 25 bp, Probe Sequence
agatctaccccagggagaatctgag

SEQ ID NO: 138705 - DNA, 25 bp, Probe Sequence
agattcccgacgagagagactgagg

SEQ ID NO: 138706 - DNA, 25 bp, Probe Sequence
agagataaaactctgagagactact

SEQ ID NO: 138707 - DNA, 25 bp, Probe Sequence
agatgataaaccttagaaacattat

SEQ ID NO: 138708 - DNA, 25 bp, Probe Sequence
agttcatgaaacttccaaccatcct

SEQ ID NO: 138709 - DNA, 25 bp, Probe Sequence
agttataaatttgccatctccctct

SEQ ID NO: 138710 - DNA, 25 bp, Probe Sequence
agtttaagtagtgtatcctgcacct

SEQ ID NO: 138711 - DNA, 25 bp, Probe Sequence
agttctacagtttattacttgccca

SEQ ID NO: 138712 - DNA, 25 bp, Probe Sequence
agttccaagttttatctctgtccta

SEQ ID NO: 138713 - DNA, 25 bp, Probe Sequence
agttccaactttcatcttgtgttcc

SEQ ID NO: 138714 - DNA, 25 bp, Probe Sequence
agttttactattctggtgctgcttc

SEQ ID NO: 138715 - DNA, 25 bp, Probe Sequence
agttcttcagccctagatggtgctc

SEQ ID NO: 138716 - DNA, 25 bp, Probe Sequence
agttcagtacctggaggaggagcag

SEQ ID NO: 138717 - DNA, 25 bp, Probe Sequence
agttcagtacctggaggaggagcag

SEQ ID NO: 138718 - DNA, 25 bp, Probe Sequence
agttgagtagagagtgtagagtgca

SEQ ID NO: 138719 - DNA, 25 bp, Probe Sequence
agattggtagattgggctgcgcgta

SEQ ID NO: 138720 - DNA, 25 bp, Probe Sequence
agattggtaaagctgcgtcctggcg

SEQ ID NO: 138721 - DNA, 25 bp, Probe Sequence
agttgttaagtccttggcttgccat

SEQ ID NO: 138722 - DNA, 25 bp, Probe Sequence
agtatttaattcatgttgccttgca

SEQ ID NO: 138723 - DNA, 25 bp, Probe Sequence
agttgcactatttccagttgcctct

SEQ ID NO: 138724 - DNA, 25 bp, Probe Sequence
agttatctattactagtgatcagtt

SEQ ID NO: 138725 - DNA, 25 bp, Probe Sequence
agtattctcatttatatgctcatag

SEQ ID NO: 138726 - DNA, 25 bp, Probe Sequence
agtttctgcctgcaatcaaagtgga

SEQ ID NO: 138727 - DNA, 25 bp, Probe Sequence
catgttgtccaacaataaacaggaa

SEQ ID NO: 138728 - DNA, 25 bp, Probe Sequence
agattattgcaacatttaacctgaa

SEQ ID NO: 138729 - DNA, 25 bp, Probe Sequence
agtttgtgaatcaatctgtcaagga

SEQ ID NO: 138730 - DNA, 25 bp, Probe Sequence
agtattggaagtcctagcaagagca

SEQ ID NO: 138731 - DNA, 25 bp, Probe Sequence
agttgtgtgaataccccaagactcc

SEQ ID NO: 138732 - DNA, 25 bp, Probe Sequence
agtttgtcagtgaccatcccgagct

SEQ ID NO: 138733 - DNA, 25 bp, Probe Sequence
agttactcaatgaccctcttacaga

SEQ ID NO: 138734 - DNA, 25 bp, Probe Sequence
agttactccttacctatcaacaatg

SEQ ID NO: 138735 - DNA, 25 bp, Probe Sequence
agttatctccactaacatatccaag

SEQ ID NO: 138736 - DNA, 25 bp, Probe Sequence
agtttctgtcattgaacagatcacc

SEQ ID NO: 138737 - DNA, 25 bp, Probe Sequence
agtttcttatgctcatgagccctcc

SEQ ID NO: 138738 - DNA, 25 bp, Probe Sequence
agttttgtccaggatggccctgaca

SEQ ID NO: 138739 - DNA, 25 bp, Probe Sequence
agtttagagcaatctgaccctggca

SEQ ID NO: 138740 - DNA, 25 bp, Probe Sequence
agcgtgtgcctaccctacgccggca

SEQ ID NO: 138741 - DNA, 25 bp, Probe Sequence
agcgtgtgcctaccctacgccggca

SEQ ID NO: 138742 - DNA, 25 bp, Probe Sequence
agctggggtaaaaactggggcatgg

SEQ ID NO: 138743 - DNA, 25 bp, Probe Sequence
agctggggtaaaaactggggcatgg

SEQ ID NO: 138744 - DNA, 25 bp, Probe Sequence
agccgtggataagaaggggactact

SEQ ID NO: 138745 - DNA, 25 bp, Probe Sequence
acacgttcaacaaagaccaggaccg

SEQ ID NO: 138746 - DNA, 25 bp, Probe Sequence
agaggtctccctataccgagaccca

SEQ ID NO: 138747 - DNA, 25 bp, Probe Sequence
aattgacccactctaagggacgctc

SEQ ID NO: 138748 - DNA, 25 bp, Probe Sequence
agttgtcccctgggaagggcagctg

SEQ ID NO: 138749 - DNA, 25 bp, Probe Sequence
agtttgcgccctcataagcagcgac

SEQ ID NO: 138750 - DNA, 25 bp, Probe Sequence
agtttgcacccttgaaatgtgtcat

SEQ ID NO: 138751 - DNA, 25 bp, Probe Sequence
agattctgagggtggaatcctcatg

SEQ ID NO: 138752 - DNA, 25 bp, Probe Sequence
agtttgcaagaccaggagcatcctg

SEQ ID NO: 138753 - DNA, 25 bp, Probe Sequence
agtttcagtgaggcagggcacagtg

SEQ ID NO: 138754 - DNA, 25 bp, Probe Sequence
agatcttcaagtctgggcacagtgt

SEQ ID NO: 138755 - DNA, 25 bp, Probe Sequence
agatttaagctctggtggatgatta

SEQ ID NO: 138756 - DNA, 25 bp, Probe Sequence
agttaagggctccgtggacatctca

SEQ ID NO: 138757 - DNA, 25 bp, Probe Sequence
agattaaaagccaggaagcacagca

SEQ ID NO: 138758 - DNA, 25 bp, Probe Sequence
agattttaatgagctggtaaacaca

SEQ ID NO: 138759 - DNA, 25 bp, Probe Sequence
agtttagacaactggtaagccagct

SEQ ID NO: 138760 - DNA, 25 bp, Probe Sequence
agtttattataatggtttgcctgct

SEQ ID NO: 138761 - DNA, 25 bp, Probe Sequence
agaattagttactctttcctctgtg

SEQ ID NO: 138762 - DNA, 25 bp, Probe Sequence
agaagttgttacacctctaaaatgg

SEQ ID NO: 138763 - DNA, 25 bp, Probe Sequence
agatacatttttacccaccataaat

SEQ ID NO: 138764 - DNA, 25 bp, Probe Sequence
agaaatttgtatacccacgcttcag

SEQ ID NO: 138765 - DNA, 25 bp, Probe Sequence
agatatatttaaacctcatgccctg

SEQ ID NO: 138766 - DNA, 25 bp, Probe Sequence
agagagtaaatatgctttatcctgg

SEQ ID NO: 138767 - DNA, 25 bp, Probe Sequence
agatgagttgaggacagctttttta

SEQ ID NO: 138768 - DNA, 25 bp, Probe Sequence
agatggtcagcagaagttacttcga

SEQ ID NO: 138769 - DNA, 25 bp, Probe Sequence
agtttcaagctgatgttaacatcga

SEQ ID NO: 138770 - DNA, 25 bp, Probe Sequence
agttcccgtcttatgagtcatcaga

SEQ ID NO: 138771 - DNA, 25 bp, Probe Sequence
agttttcaagcagttaagtcataga

SEQ ID NO: 138772 - DNA, 25 bp, Probe Sequence
agttgtttaacttaggctcataata

SEQ ID NO: 138773 - DNA, 25 bp, Probe Sequence
agttttacaactacaatcaagtcat

SEQ ID NO: 138774 - DNA, 25 bp, Probe Sequence
agttgttagcaatttcattcaaaat

SEQ ID NO: 138775 - DNA, 25 bp, Probe Sequence
agtttcattcattctttcagtaaat

SEQ ID NO: 138776 - DNA, 25 bp, Probe Sequence
agtttcttctcagtttgatccaaat

SEQ ID NO: 138777 - DNA, 25 bp, Probe Sequence
agtttcttctcagtttgatccaaat

SEQ ID NO: 138778 - DNA, 25 bp, Probe Sequence
agattattttagtctgtcatccaga

SEQ ID NO: 138779 - DNA, 25 bp, Probe Sequence
agttcatcatttggtgcttagtctt

SEQ ID NO: 138780 - DNA, 25 bp, Probe Sequence
agttatgtactggatgctacagact

SEQ ID NO: 138781 - DNA, 25 bp, Probe Sequence
agatttttgatggctgcatgacaga

SEQ ID NO: 138782 - DNA, 25 bp, Probe Sequence
agatttctctgtagcatgcagtgct

SEQ ID NO: 138783 - DNA, 25 bp, Probe Sequence
agtttctgctctgcatggtgacatg

SEQ ID NO: 138784 - DNA, 25 bp, Probe Sequence
agtttgttcatgtcagtgagagctt

SEQ ID NO: 138785 - DNA, 25 bp, Probe Sequence
agttgctgttttgtgatggatctaa

SEQ ID NO: 138786 - DNA, 25 bp, Probe Sequence
agttgctgttttgtgatggatctaa

SEQ ID NO: 138787 - DNA, 25 bp, Probe Sequence
agtttgcttccaaagtggcctactc

SEQ ID NO: 138788 - DNA, 25 bp, Probe Sequence
agttctttctttatgtgcttgagtc

SEQ ID NO: 138789 - DNA, 25 bp, Probe Sequence
agttctttctttatgtgcttgagtc

SEQ ID NO: 138790 - DNA, 25 bp, Probe Sequence
agtttatggtgcagaatggattgag

SEQ ID NO: 138791 - DNA, 25 bp, Probe Sequence
agtttatggtcttgtaggaagcaca

SEQ ID NO: 138792 - DNA, 25 bp, Probe Sequence
agttggcatcgtactgaaatgaaac

SEQ ID NO: 138793 - DNA, 25 bp, Probe Sequence
agattgtaccacatagcaaacatac

SEQ ID NO: 138794 - DNA, 25 bp, Probe Sequence
agattcatacgcctctactgataca

SEQ ID NO: 138795 - DNA, 25 bp, Probe Sequence
agatttacgtatgggctgatgaaga

SEQ ID NO: 138796 - DNA, 25 bp, Probe Sequence
agattctacgtattagttatcgcta

SEQ ID NO: 138797 - DNA, 25 bp, Probe Sequence
agtttgacttattgctgtttcagct

SEQ ID NO: 138798 - DNA, 25 bp, Probe Sequence
agttgtcatttgtaggtttcagctg

SEQ ID NO: 138799 - DNA, 25 bp, Probe Sequence
agttgatctttcagatctttccata

SEQ ID NO: 138800 - DNA, 25 bp, Probe Sequence
agttatcattaatgtagttcctcat

SEQ ID NO: 138801 - DNA, 25 bp, Probe Sequence
agttttcatagctgtagtccattct

SEQ ID NO: 138802 - DNA, 25 bp, Probe Sequence
agtttacatgtgtttggatgccttc

SEQ ID NO: 138803 - DNA, 25 bp, Probe Sequence
agtttacatgcattattggtttata

SEQ ID NO: 138804 - DNA, 25 bp, Probe Sequence
agttttcagatgtccgtgtgttcat

SEQ ID NO: 138805 - DNA, 25 bp, Probe Sequence
agttctgtaatgtcaagaatttaag

SEQ ID NO: 138806 - DNA, 25 bp, Probe Sequence
agttgtgtacgtgttattccaagcc

SEQ ID NO: 138807 - DNA, 25 bp, Probe Sequence
cagttggcccctctttgtaaggcct

SEQ ID NO: 138808 - DNA, 25 bp, Probe Sequence
tcagttggcccctctttgtaaggcc

SEQ ID NO: 138809 - DNA, 25 bp, Probe Sequence
agttggcatgccttgtttttaatga

SEQ ID NO: 138810 - DNA, 25 bp, Probe Sequence
agttgtgcagtttttcatttcagat

SEQ ID NO: 138811 - DNA, 25 bp, Probe Sequence
agttccagagtgctataatctagat

SEQ ID NO: 138812 - DNA, 25 bp, Probe Sequence
agttcatcgacgagaacccagagct

SEQ ID NO: 138813 - DNA, 25 bp, Probe Sequence
agtttctaggagcacctccaggctt

SEQ ID NO: 138814 - DNA, 25 bp, Probe Sequence
agtttctaccagcattctcagaggc

SEQ ID NO: 138815 - DNA, 25 bp, Probe Sequence
agtttatagccgtattgctagcacc

SEQ ID NO: 138816 - DNA, 25 bp, Probe Sequence
agttcttccctggaatccagcacag

SEQ ID NO: 138817 - DNA, 25 bp, Probe Sequence
gagtttaccccgatcacagaaacca

SEQ ID NO: 138818 - DNA, 25 bp, Probe Sequence
agttgtacgcatccagattcagcga

SEQ ID NO: 138819 - DNA, 25 bp, Probe Sequence
agttgatacctgcagtcagcctgcc

SEQ ID NO: 138820 - DNA, 25 bp, Probe Sequence
agttgatcccagccatgaaactgcc

SEQ ID NO: 138821 - DNA, 25 bp, Probe Sequence
agttcactctggggaaagctggcct

SEQ ID NO: 138822 - DNA, 25 bp, Probe Sequence
agattcccaatgggaggacatccct

SEQ ID NO: 138823 - DNA, 25 bp, Probe Sequence
agattcaccagaccttggaccagac

SEQ ID NO: 138824 - DNA, 25 bp, Probe Sequence
agttgacagtcctttgtactctgac

SEQ ID NO: 138825 - DNA, 25 bp, Probe Sequence
agcttgaggctcgttttagtgatac

SEQ ID NO: 138826 - DNA, 25 bp, Probe Sequence
agtttgcagctacttgtgtagtata

SEQ ID NO: 138827 - DNA, 25 bp, Probe Sequence
agtttagtgagtgcttatgatatac

SEQ ID NO: 138828 - DNA, 25 bp, Probe Sequence
agttctagtcacccatatatgatat

SEQ ID NO: 138829 - DNA, 25 bp, Probe Sequence
agttataatcaccttgtatctctaa

SEQ ID NO: 138830 - DNA, 25 bp, Probe Sequence
agttgctagcatgtctgtgttctgt

SEQ ID NO: 138831 - DNA, 25 bp, Probe Sequence
agttccagtttagtttgctgctatt

SEQ ID NO: 138832 - DNA, 25 bp, Probe Sequence
agttccttgttacatcatggtcatt

SEQ ID NO: 138833 - DNA, 25 bp, Probe Sequence
agttattgttgttacatatgagcta

SEQ ID NO: 138834 - DNA, 25 bp, Probe Sequence
agtttgctatttttctgtgatcaca

SEQ ID NO: 138835 - DNA, 25 bp, Probe Sequence
agttcgctctgtgatgtcaagtgca

SEQ ID NO: 138836 - DNA, 25 bp, Probe Sequence
agatgcaggccaacaatgccaaggc

SEQ ID NO: 138837 - DNA, 25 bp, Probe Sequence
agatcagagctcggcaaactctctc

SEQ ID NO: 138838 - DNA, 25 bp, Probe Sequence
agatatggcattggcttccatccct

SEQ ID NO: 138839 - DNA, 25 bp, Probe Sequence
agttgaattcctagtcttccttcat

SEQ ID NO: 138840 - DNA, 25 bp, Probe Sequence
agttaataaccaatatatcgtgtat

SEQ ID NO: 138841 - DNA, 25 bp, Probe Sequence
agttgacactactttataagctgtt

SEQ ID NO: 138842 - DNA, 25 bp, Probe Sequence
agttcatcctaattctctaaatatt

SEQ ID NO: 138843 - DNA, 25 bp, Probe Sequence
agttattttttcatcaaatgatata

SEQ ID NO: 138844 - DNA, 25 bp, Probe Sequence
agttttttattcagcatttcacaat

SEQ ID NO: 138845 - DNA, 25 bp, Probe Sequence
agttttagacaaaagtggtccatca

SEQ ID NO: 138846 - DNA, 25 bp, Probe Sequence
agttttagaactatttgtactcagt

SEQ ID NO: 138847 - DNA, 25 bp, Probe Sequence
agttctaaacacattcttgatcacc

SEQ ID NO: 138848 - DNA, 25 bp, Probe Sequence
agttcctaacagatctggttgcagc

SEQ ID NO: 138849 - DNA, 25 bp, Probe Sequence
agttcctggaagacgtgcggctaca

SEQ ID NO: 138850 - DNA, 25 bp, Probe Sequence
agttcctggagacggtggagttgca

SEQ ID NO: 138851 - DNA, 25 bp, Probe Sequence
agttcctgggaccagattgaaatga

SEQ ID NO: 138852 - DNA, 25 bp, Probe Sequence
agttccaggaaccatttgtagcagt

SEQ ID NO: 138853 - DNA, 25 bp, Probe Sequence
agttcagtcgaaagcttttaagtat

SEQ ID NO: 138854 - DNA, 25 bp, Probe Sequence
agattcagtagcagatgccgttcaa

SEQ ID NO: 138855 - DNA, 25 bp, Probe Sequence
agatacgacagatgatgcttttcga

SEQ ID NO: 138856 - DNA, 25 bp, Probe Sequence
agatcacgccagagtgatggggcga

SEQ ID NO: 138857 - DNA, 25 bp, Probe Sequence
agatcaagacacaggcataggacta

SEQ ID NO: 138858 - DNA, 25 bp, Probe Sequence
agatcaaacacaaaccagggttatg

SEQ ID NO: 138859 - DNA, 25 bp, Probe Sequence
agatattatatacaacacaggcttt

SEQ ID NO: 138860 - DNA, 25 bp, Probe Sequence
agatttcttcaggaacccaggtaga

SEQ ID NO: 138861 - DNA, 25 bp, Probe Sequence
agttccttcagagagcaccagtttt

SEQ ID NO: 138862 - DNA, 25 bp, Probe Sequence
agatactttctagataccgctcttt

SEQ ID NO: 138863 - DNA, 25 bp, Probe Sequence
agatttttcatgcgttcccgtatat

SEQ ID NO: 138864 - DNA, 25 bp, Probe Sequence
agttgtttgatatatctcccctgta

SEQ ID NO: 138865 - DNA, 25 bp, Probe Sequence
agtttcattcatatttatcctctta

SEQ ID NO: 138866 - DNA, 25 bp, Probe Sequence
agttccattcatactaaaccacagt

SEQ ID NO: 138867 - DNA, 25 bp, Probe Sequence
agttccaaatccagaatgcctcttc

SEQ ID NO: 138868 - DNA, 25 bp, Probe Sequence
agattcccttgcaatcgatttctct

SEQ ID NO: 138869 - DNA, 25 bp, Probe Sequence
agttccaactgtacatacatactgt

SEQ ID NO: 138870 - DNA, 25 bp, Probe Sequence
agttgcccctgtaatacataagttt

SEQ ID NO: 138871 - DNA, 25 bp, Probe Sequence
agttccctcctcaagagatacagct

SEQ ID NO: 138872 - DNA, 25 bp, Probe Sequence
agttcttcctggagcagatgtccta

SEQ ID NO: 138873 - DNA, 25 bp, Probe Sequence
agatccatatttcggaggtcttcta

SEQ ID NO: 138874 - DNA, 25 bp, Probe Sequence
agatccacattcaagtgtgcccacc

SEQ ID NO: 138875 - DNA, 25 bp, Probe Sequence
agattcaatgctattgccattacca

SEQ ID NO: 138876 - DNA, 25 bp, Probe Sequence
agatactggcattgctcgggtacca

SEQ ID NO: 138877 - DNA, 25 bp, Probe Sequence
agatatccgtacagagagttccagt

SEQ ID NO: 138878 - DNA, 25 bp, Probe Sequence
agttctctgtactgaagtagtcatg

SEQ ID NO: 138879 - DNA, 25 bp, Probe Sequence
agttgcctgacctgagactcagatt

SEQ ID NO: 138880 - DNA, 25 bp, Probe Sequence
agttcacagacctcagacacagctg

SEQ ID NO: 138881 - DNA, 25 bp, Probe Sequence
agatcgccatcatgaacgacaccgt

SEQ ID NO: 138882 - DNA, 25 bp, Probe Sequence
agatcgccatcatgaacgacaccgt

SEQ ID NO: 138883 - DNA, 25 bp, Probe Sequence
agatttcaactatcaatcaccagtc

SEQ ID NO: 138884 - DNA, 25 bp, Probe Sequence
agatattcaacaaccgcaactgcct

SEQ ID NO: 138885 - DNA, 25 bp, Probe Sequence
agatactggagctgaccatcctgac

SEQ ID NO: 138886 - DNA, 25 bp, Probe Sequence
agatacaccatgttgaagatcctgc

SEQ ID NO: 138887 - DNA, 25 bp, Probe Sequence
agttcccatttgaaattgctggcgc

SEQ ID NO: 138888 - DNA, 25 bp, Probe Sequence
agttcttttctttgatctgtgtgcc

SEQ ID NO: 138889 - DNA, 25 bp, Probe Sequence
agttctgttatatttccttgctcga

SEQ ID NO: 138890 - DNA, 25 bp, Probe Sequence
agttctgttatatttccttgctcga

SEQ ID NO: 138891 - DNA, 25 bp, Probe Sequence
agttgatggaaaggtcacttccaga

SEQ ID NO: 138892 - DNA, 25 bp, Probe Sequence
agttcaataaaggtcatatcccaaa

SEQ ID NO: 138893 - DNA, 25 bp, Probe Sequence
agttgcactgacaaaaataccaaaa

SEQ ID NO: 138894 - DNA, 25 bp, Probe Sequence
agatacctcagcaagaacataccta

SEQ ID NO: 138895 - DNA, 25 bp, Probe Sequence
agatgacctggcaaacatcaaccaa

SEQ ID NO: 138896 - DNA, 25 bp, Probe Sequence
agatgcccaagtggaccagagtcat

SEQ ID NO: 138897 - DNA, 25 bp, Probe Sequence
agatcctcaagcacatcaacgagct

SEQ ID NO: 138898 - DNA, 25 bp, Probe Sequence
agatcattggacactggacacacta

SEQ ID NO: 138899 - DNA, 25 bp, Probe Sequence
agattgggacagtttacagcttgat

SEQ ID NO: 138900 - DNA, 25 bp, Probe Sequence
agattctgagacatttcgcctgaga

SEQ ID NO: 138901 - DNA, 25 bp, Probe Sequence
agttcgagactagtctggccgacat

SEQ ID NO: 138902 - DNA, 25 bp, Probe Sequence
agttggagacgttctaggctgcctc

SEQ ID NO: 138903 - DNA, 25 bp, Probe Sequence
agttcagaagtgttctagacatccc

SEQ ID NO: 138904 - DNA, 25 bp, Probe Sequence
agttaaatgagtacttgattcttca

SEQ ID NO: 138905 - DNA, 25 bp, Probe Sequence
agttaaatgcgtgatttatattcag

SEQ ID NO: 138906 - DNA, 25 bp, Probe Sequence
agttaggctttctcttcatattcag

SEQ ID NO: 138907 - DNA, 25 bp, Probe Sequence
agttatgccttttttttctgtcact

SEQ ID NO: 138908 - DNA, 25 bp, Probe Sequence
agaccacccatttggtttcgtggct

SEQ ID NO: 138909 - DNA, 25 bp, Probe Sequence
aatccaagaacctggattctgggca

SEQ ID NO: 138910 - DNA, 25 bp, Probe Sequence
agttcaaggactgcggttctgtgga

SEQ ID NO: 138911 - DNA, 25 bp, Probe Sequence
agttagggtctgcctgtatttctgg

SEQ ID NO: 138912 - DNA, 25 bp, Probe Sequence
agattagggtggcattgcttttata

SEQ ID NO: 138913 - DNA, 25 bp, Probe Sequence
agatttggagtcattgtgggttatt

SEQ ID NO: 138914 - DNA, 25 bp, Probe Sequence
agatttaactgatctctgaggttca

SEQ ID NO: 138915 - DNA, 25 bp, Probe Sequence
agatctctaatatttttaagcccaa

SEQ ID NO: 138916 - DNA, 25 bp, Probe Sequence
agatctctaatatttttaagcccaa

SEQ ID NO: 138917 - DNA, 25 bp, Probe Sequence
agatcattaatgacgccttcaacct

SEQ ID NO: 138918 - DNA, 25 bp, Probe Sequence
agttgtacttctgctccatagacat

SEQ ID NO: 138919 - DNA, 25 bp, Probe Sequence
ctgtgattcagtgaaccttgccctt

SEQ ID NO: 138920 - DNA, 25 bp, Probe Sequence
agatttatcatattttcccacagat

SEQ ID NO: 138921 - DNA, 25 bp, Probe Sequence
agatttctgcattggttttccagtc

SEQ ID NO: 138922 - DNA, 25 bp, Probe Sequence
agatttcagattcattccatctcct

SEQ ID NO: 138923 - DNA, 25 bp, Probe Sequence
agttctctagctgattcctatacca

SEQ ID NO: 138924 - DNA, 25 bp, Probe Sequence
agttcctagattaatgcctaacatt

SEQ ID NO: 138925 - DNA, 25 bp, Probe Sequence
agttttagatgaaatctctagattt

SEQ ID NO: 138926 - DNA, 25 bp, Probe Sequence
agagtcttcaggaaactcttgtttc

SEQ ID NO: 138927 - DNA, 25 bp, Probe Sequence
agatgtcctcggagaccattcttgc

SEQ ID NO: 138928 - DNA, 25 bp, Probe Sequence
agattacaggcgtgagccaccgtgc

SEQ ID NO: 138929 - DNA, 25 bp, Probe Sequence
agattccagtggtgacttcactgat

SEQ ID NO: 138930 - DNA, 25 bp, Probe Sequence
agattccagtggtgacttcactgat

SEQ ID NO: 138931 - DNA, 25 bp, Probe Sequence
agattctcagggtagtcatctctct

SEQ ID NO: 138932 - DNA, 25 bp, Probe Sequence
agttgatcagtgcacagttagctgc

SEQ ID NO: 138933 - DNA, 25 bp, Probe Sequence
agttgtatgtgagtctgtgccgtgc

SEQ ID NO: 138934 - DNA, 25 bp, Probe Sequence
agttgatgttgctctgggaatcctg

SEQ ID NO: 138935 - DNA, 25 bp, Probe Sequence
agttgattgactatggtctctccgg

SEQ ID NO: 138936 - DNA, 25 bp, Probe Sequence
agttgatttcttaagcagctctcac

SEQ ID NO: 138937 - DNA, 25 bp, Probe Sequence
agttttctgctgaaggcacctactc

SEQ ID NO: 138938 - DNA, 25 bp, Probe Sequence
agttggtgtgctggagctacctcac

SEQ ID NO: 138939 - DNA, 25 bp, Probe Sequence
agttggtggctttgatcccacacag

SEQ ID NO: 138940 - DNA, 25 bp, Probe Sequence
agatcgagtgatcttgccccagacc

SEQ ID NO: 138941 - DNA, 25 bp, Probe Sequence
agttgagaaggtgcctgccatagcc

SEQ ID NO: 138942 - DNA, 25 bp, Probe Sequence
agttatggaggtcctgctagccagc

SEQ ID NO: 138943 - DNA, 25 bp, Probe Sequence
agttctgaatggttccttgctgact

SEQ ID NO: 138944 - DNA, 25 bp, Probe Sequence
agttcgatgttgatgctcttgcaga

SEQ ID NO: 138945 - DNA, 25 bp, Probe Sequence
agttcagctcttattcagcatcgaa

SEQ ID NO: 138946 - DNA, 25 bp, Probe Sequence
agttcagcactggaggttctcggca

SEQ ID NO: 138947 - DNA, 25 bp, Probe Sequence
agttagcaaccatgcttctcattcc

SEQ ID NO: 138948 - DNA, 25 bp, Probe Sequence
agttatgagaaatctttgcttatat

SEQ ID NO: 138949 - DNA, 25 bp, Probe Sequence
agttgtgggatatctgtcatattta

SEQ ID NO: 138950 - DNA, 25 bp, Probe Sequence
agattgactggacactatatatata

SEQ ID NO: 138951 - DNA, 25 bp, Probe Sequence
agataacatatgtgactgccaaaca

SEQ ID NO: 138952 - DNA, 25 bp, Probe Sequence
agataatcatgttgcagtcatgcca

SEQ ID NO: 138953 - DNA, 25 bp, Probe Sequence
agatccatctgtcctgtgtggaatc

SEQ ID NO: 138954 - DNA, 25 bp, Probe Sequence
agatcctctgctccaataggcaact

SEQ ID NO: 138955 - DNA, 25 bp, Probe Sequence
agatctgggcttcatgaggcccctt

SEQ ID NO: 138956 - DNA, 25 bp, Probe Sequence
agagctaggttgcctgagtcactcg

SEQ ID NO: 138957 - DNA, 25 bp, Probe Sequence
agataaggattgctttcttgggacc

SEQ ID NO: 138958 - DNA, 25 bp, Probe Sequence
agaacggaggggagcccgatgacgc

SEQ ID NO: 138959 - DNA, 25 bp, Probe Sequence
agatccgtgaggagttcccggaccg

SEQ ID NO: 138960 - DNA, 25 bp, Probe Sequence
agatccaggacgaggtcgcggagca

SEQ ID NO: 138961 - DNA, 25 bp, Probe Sequence
agatcaaggctcgagatcttcgcgg

SEQ ID NO: 138962 - DNA, 25 bp, Probe Sequence
agatcactagcactgctttaccgct

SEQ ID NO: 138963 - DNA, 25 bp, Probe Sequence
agatcactcagatgtattttagata

SEQ ID NO: 138964 - DNA, 25 bp, Probe Sequence
agattctggggctgtcttatgaaaa

SEQ ID NO: 138965 - DNA, 25 bp, Probe Sequence
agttctggtctggagttgtttcaaa

SEQ ID NO: 138966 - DNA, 25 bp, Probe Sequence
agatttggcatctgaagggtataaa

SEQ ID NO: 138967 - DNA, 25 bp, Probe Sequence
agatttccagctaaattggtctaaa

SEQ ID NO: 138968 - DNA, 25 bp, Probe Sequence
agatattcccttgagattttgatac

SEQ ID NO: 138969 - DNA, 25 bp, Probe Sequence
agttattccataaagcatttgtata

SEQ ID NO: 138970 - DNA, 25 bp, Probe Sequence
agatcttttctacagcttctgataa

SEQ ID NO: 138971 - DNA, 25 bp, Probe Sequence
agatgggtttacaatgtcttctaaa

SEQ ID NO: 138972 - DNA, 25 bp, Probe Sequence
agatgcaggtcgtacataacttccg

SEQ ID NO: 138973 - DNA, 25 bp, Probe Sequence
agatcagtcttgtacatttccttgt

SEQ ID NO: 138974 - DNA, 25 bp, Probe Sequence
agatctttaatccattgtcagtatt

SEQ ID NO: 138975 - DNA, 25 bp, Probe Sequence
agagtttttctgaacctgatagttt

SEQ ID NO: 138976 - DNA, 25 bp, Probe Sequence
agatttaaggctgacaggaagactg

SEQ ID NO: 138977 - DNA, 25 bp, Probe Sequence
agttgggaggctgagatgggagaat

SEQ ID NO: 138978 - DNA, 25 bp, Probe Sequence
agttgctggaacttaataaatgagt

SEQ ID NO: 138979 - DNA, 25 bp, Probe Sequence
agttctggaatgtggataatatttt

SEQ ID NO: 138980 - DNA, 25 bp, Probe Sequence
agattcagaagtttggatatttgtt

SEQ ID NO: 138981 - DNA, 25 bp, Probe Sequence
agattcaaaatctgcaatggttatt

SEQ ID NO: 138982 - DNA, 25 bp, Probe Sequence
agttcataacagtgccattgtcttt

SEQ ID NO: 138983 - DNA, 25 bp, Probe Sequence
agttcataacagtgccattgtcttt

SEQ ID NO: 138984 - DNA, 25 bp, Probe Sequence
agttcatgacaagactcttctcttc

SEQ ID NO: 138985 - DNA, 25 bp, Probe Sequence
agttctgcaagtgactgtgttttgt

SEQ ID NO: 138986 - DNA, 25 bp, Probe Sequence
agatttgaagtgtccttgtagatag

SEQ ID NO: 138987 - DNA, 25 bp, Probe Sequence
agattagaagacacttgtcagactc

SEQ ID NO: 138988 - DNA, 25 bp, Probe Sequence
agattagagaaatatgctatgagat

SEQ ID NO: 138989 - DNA, 25 bp, Probe Sequence
agataagtcaatttctgctataaaa

SEQ ID NO: 138990 - DNA, 25 bp, Probe Sequence
agatatctgtgctactactgtgcta

SEQ ID NO: 138991 - DNA, 25 bp, Probe Sequence
agatgacatctccatgcatactatt

SEQ ID NO: 138992 - DNA, 25 bp, Probe Sequence
agatgtcatcatcgctgcaagcgtt

SEQ ID NO: 138993 - DNA, 25 bp, Probe Sequence
agatttgcatgtgcagtgtgcattt

SEQ ID NO: 138994 - DNA, 25 bp, Probe Sequence
agatttctgagctggatgcattttt

SEQ ID NO: 138995 - DNA, 25 bp, Probe Sequence
agatttgcctcctgatgcacttatc

SEQ ID NO: 138996 - DNA, 25 bp, Probe Sequence
agttctgacactgtgactctgtata

SEQ ID NO: 138997 - DNA, 25 bp, Probe Sequence
agttgctaccatgtacattgacagc

SEQ ID NO: 138998 - DNA, 25 bp, Probe Sequence
agatttcctcatgatacaagatact

SEQ ID NO: 138999 - DNA, 25 bp, Probe Sequence
agattgctgccctggccaagaactt

SEQ ID NO: 139000 - DNA, 25 bp, Probe Sequence
agttctgctctctctgtaggaacct

SEQ ID NO: 139001 - DNA, 25 bp, Probe Sequence
agttctgcatcttataatggtaacc

SEQ ID NO: 139002 - DNA, 25 bp, Probe Sequence
agatcattgtattcagagattgtaa

SEQ ID NO: 139003 - DNA, 25 bp, Probe Sequence
agatgaaattgacagattgctagaa

SEQ ID NO: 139004 - DNA, 25 bp, Probe Sequence
agataagggcagtgattctgaagaa

SEQ ID NO: 139005 - DNA, 25 bp, Probe Sequence
agatcacaggtggagtctaaaaaaa

SEQ ID NO: 139006 - DNA, 25 bp, Probe Sequence
aaggcaggggcgagcacggaacaat

SEQ ID NO: 139007 - DNA, 25 bp, Probe Sequence
agaccagtaggccggacggagtcca

SEQ ID NO: 139008 - DNA, 25 bp, Probe Sequence
agaccaagggtgcggcggagatcga

SEQ ID NO: 139009 - DNA, 25 bp, Probe Sequence
agatcccagggtgaggggccaggct

SEQ ID NO: 139010 - DNA, 25 bp, Probe Sequence
agatcgaacaggttagacggtccct

SEQ ID NO: 139011 - DNA, 25 bp, Probe Sequence
agttgtccgtgataatcgtgtcctg

SEQ ID NO: 139012 - DNA, 25 bp, Probe Sequence
agttgtcacagtaaatatcttgttt

SEQ ID NO: 139013 - DNA, 25 bp, Probe Sequence
agttgcccatgattacatttttttt

SEQ ID NO: 139014 - DNA, 25 bp, Probe Sequence
agttcctctgaacactattatcttc

SEQ ID NO: 139015 - DNA, 25 bp, Probe Sequence
agttcctgctaaatgactagacttc

SEQ ID NO: 139016 - DNA, 25 bp, Probe Sequence
agttctcatcattattacatagact

SEQ ID NO: 139017 - DNA, 25 bp, Probe Sequence
agttgtcaagaatgcatcaaagctt

SEQ ID NO: 139018 - DNA, 25 bp, Probe Sequence
agttgtctaattgatatgaagcctg

SEQ ID NO: 139019 - DNA, 25 bp, Probe Sequence
agttgccttcacagttgcaacaatg

SEQ ID NO: 139020 - DNA, 25 bp, Probe Sequence
agattgctttccatgtttgaaattt

SEQ ID NO: 139021 - DNA, 25 bp, Probe Sequence
agattcctacacatgactatcagaa

SEQ ID NO: 139022 - DNA, 25 bp, Probe Sequence
agatctcaaaccagccatagtgaaa

SEQ ID NO: 139023 - DNA, 25 bp, Probe Sequence
agatctctaactgagctttaggaat

SEQ ID NO: 139024 - DNA, 25 bp, Probe Sequence
agatctgcaaggctggctttaagag

SEQ ID NO: 139025 - DNA, 25 bp, Probe Sequence
agatctcagatctctggagttccaa

SEQ ID NO: 139026 - DNA, 25 bp, Probe Sequence
agattcccatggaaagtgtccaatc

SEQ ID NO: 139027 - DNA, 25 bp, Probe Sequence
agatctgctcgctgagaaagtcctt

SEQ ID NO: 139028 - DNA, 25 bp, Probe Sequence
agttctctatggcaaagtctttcaa

SEQ ID NO: 139029 - DNA, 25 bp, Probe Sequence
agttctctatggcaaagtctttcaa

SEQ ID NO: 139030 - DNA, 25 bp, Probe Sequence
agttctttggccacactcatgtgga

SEQ ID NO: 139031 - DNA, 25 bp, Probe Sequence
agttcttggagattactctttggca

SEQ ID NO: 139032 - DNA, 25 bp, Probe Sequence
agatttgtcgtgttacagttataca

SEQ ID NO: 139033 - DNA, 25 bp, Probe Sequence
agatttgatttattcaagtatgtga

SEQ ID NO: 139034 - DNA, 25 bp, Probe Sequence
agattttgttataaagtgcagctgc

SEQ ID NO: 139035 - DNA, 25 bp, Probe Sequence
agttctctgtggaagcaaggctggg

SEQ ID NO: 139036 - DNA, 25 bp, Probe Sequence
agttctctgtggaagcaaggctggg

SEQ ID NO: 139037 - DNA, 25 bp, Probe Sequence
agttctctgtggaagcaaggctggg

SEQ ID NO: 139038 - DNA, 25 bp, Probe Sequence
agttcagagtatcagcaagagctgg

SEQ ID NO: 139039 - DNA, 25 bp, Probe Sequence
agttcacagctgtagcacaaacaga

SEQ ID NO: 139040 - DNA, 25 bp, Probe Sequence
agattctagtctgctactgtggcct

SEQ ID NO: 139041 - DNA, 25 bp, Probe Sequence
agataccattcatcaactggccgct

SEQ ID NO: 139042 - DNA, 25 bp, Probe Sequence
agattcctggcattcgaggagccct

SEQ ID NO: 139043 - DNA, 25 bp, Probe Sequence
agttcctggcaggcactgtggacac

SEQ ID NO: 139044 - DNA, 25 bp, Probe Sequence
agttcactgtggacagtttgacatc

SEQ ID NO: 139045 - DNA, 25 bp, Probe Sequence
agattcgttcagacctgactgctct

SEQ ID NO: 139046 - DNA, 25 bp, Probe Sequence
agatagcagtgttctcctgacttcg

SEQ ID NO: 139047 - DNA, 25 bp, Probe Sequence
agacaggtgtgcgcatctacaacgt

SEQ ID NO: 139048 - DNA, 25 bp, Probe Sequence
agctgctgcagcagcggcactacaa

SEQ ID NO: 139049 - DNA, 25 bp, Probe Sequence
agattggcaggtggactacgagtca

SEQ ID NO: 139050 - DNA, 25 bp, Probe Sequence
agttggagaccacctgactgaggct

SEQ ID NO: 139051 - DNA, 25 bp, Probe Sequence
agttggcatgactcttgactcttgc

SEQ ID NO: 139052 - DNA, 25 bp, Probe Sequence
agttgactgacatccttttctgtcc

SEQ ID NO: 139053 - DNA, 25 bp, Probe Sequence
agttctatgacatcatctggttcag

SEQ ID NO: 139054 - DNA, 25 bp, Probe Sequence
agttcatctaaattgtgtgttctgt

SEQ ID NO: 139055 - DNA, 25 bp, Probe Sequence
agatagtctaacaatgtgatttcag

SEQ ID NO: 139056 - DNA, 25 bp, Probe Sequence
agattgtactcatttgcttattcag

SEQ ID NO: 139057 - DNA, 25 bp, Probe Sequence
agattgagtctatatcatagttctg

SEQ ID NO: 139058 - DNA, 25 bp, Probe Sequence
agatttgtttgccagaagcctctgc

SEQ ID NO: 139059 - DNA, 25 bp, Probe Sequence
agatttcgaagccacagagtctctc

SEQ ID NO: 139060 - DNA, 25 bp, Probe Sequence
agatgatatctaacctgaagtccta

SEQ ID NO: 139061 - DNA, 25 bp, Probe Sequence
agatgcattgttacaggaagtccct

SEQ ID NO: 139062 - DNA, 25 bp, Probe Sequence
agaggggaagacgatcgtggccccg

SEQ ID NO: 139063 - DNA, 25 bp, Probe Sequence
agacgggaagcgtacgaagcgggtg

SEQ ID NO: 139064 - DNA, 25 bp, Probe Sequence
agatccgggagatcgcggacgggtt

SEQ ID NO: 139065 - DNA, 25 bp, Probe Sequence
aaccttaaagcctggacttggatcg

SEQ ID NO: 139066 - DNA, 25 bp, Probe Sequence
gggtttacgacctcgatgttggatc

SEQ ID NO: 139067 - DNA, 25 bp, Probe Sequence
gaagggtacgacagacactggggtc

SEQ ID NO: 139068 - DNA, 25 bp, Probe Sequence
aatggttacaacagggggtgagctc

SEQ ID NO: 139069 - DNA, 25 bp, Probe Sequence
acagggtggaagagggtggtatata

SEQ ID NO: 139070 - DNA, 25 bp, Probe Sequence
agagggtcgggcaggttgacatatt

SEQ ID NO: 139071 - DNA, 25 bp, Probe Sequence
agacgtttaactgcagttgactttc

SEQ ID NO: 139072 - DNA, 25 bp, Probe Sequence
agagattttaacttcacttcatgct

SEQ ID NO: 139073 - DNA, 25 bp, Probe Sequence
agagattttaacttcacttcatgct

SEQ ID NO: 139074 - DNA, 25 bp, Probe Sequence
agatattgtacaagctactttctgc

SEQ ID NO: 139075 - DNA, 25 bp, Probe Sequence
agattctgtataattcactattcat

SEQ ID NO: 139076 - DNA, 25 bp, Probe Sequence
agatccgtatcactttcgattcttg

SEQ ID NO: 139077 - DNA, 25 bp, Probe Sequence
agatcagactaggttttaatcatta

SEQ ID NO: 139078 - DNA, 25 bp, Probe Sequence
agataactacatgtctttgctctta

SEQ ID NO: 139079 - DNA, 25 bp, Probe Sequence
agattgacacgctgtcattttccat

SEQ ID NO: 139080 - DNA, 25 bp, Probe Sequence
agattgagaagctgccagtggctgc

SEQ ID NO: 139081 - DNA, 25 bp, Probe Sequence
agattaacgtactgtggctgcacca

SEQ ID NO: 139082 - DNA, 25 bp, Probe Sequence
agatggacggtatgtgatgggtcac

SEQ ID NO: 139083 - DNA, 25 bp, Probe Sequence
agaggttgcagtgagctggggtcgc

SEQ ID NO: 139084 - DNA, 25 bp, Probe Sequence
agaggccagcgtgaaggacctgggc

SEQ ID NO: 139085 - DNA, 25 bp, Probe Sequence
agatttgggtgttaggatcctggtg

SEQ ID NO: 139086 - DNA, 25 bp, Probe Sequence
agttgggaggtgttggctgcacgtg

SEQ ID NO: 139087 - DNA, 25 bp, Probe Sequence
agattgtgggagcttcgctggacgt

SEQ ID NO: 139088 - DNA, 25 bp, Probe Sequence
agttgacggtgttgccgttgacctt

SEQ ID NO: 139089 - DNA, 25 bp, Probe Sequence
agattaagggtctctttgccatgct

SEQ ID NO: 139090 - DNA, 25 bp, Probe Sequence
agattgaacaagttcactttccagc

SEQ ID NO: 139091 - DNA, 25 bp, Probe Sequence
agattaactagagtccctccaacct

SEQ ID NO: 139092 - DNA, 25 bp, Probe Sequence
agataagattagttccctgatcccc

SEQ ID NO: 139093 - DNA, 25 bp, Probe Sequence
agataaactagggcttcagtctctt

SEQ ID NO: 139094 - DNA, 25 bp, Probe Sequence
agatcaaattgtgttgggtatcagt

SEQ ID NO: 139095 - DNA, 25 bp, Probe Sequence
agatcaaggtctgcaagggaattct

SEQ ID NO: 139096 - DNA, 25 bp, Probe Sequence
agatcttggacagcgtgggtatcga

SEQ ID NO: 139097 - DNA, 25 bp, Probe Sequence
agatttggagcagggtggtcacact

SEQ ID NO: 139098 - DNA, 25 bp, Probe Sequence
agatttggagcagggtggtcacact

SEQ ID NO: 139099 - DNA, 25 bp, Probe Sequence
agatttggagcagggtggtcacact

SEQ ID NO: 139100 - DNA, 25 bp, Probe Sequence
agatcgtagctggggtgaactactt

SEQ ID NO: 139101 - DNA, 25 bp, Probe Sequence
agatctgctgatggggagtaacacc

SEQ ID NO: 139102 - DNA, 25 bp, Probe Sequence
agatcgaacggactgtgaatccgct

SEQ ID NO: 139103 - DNA, 25 bp, Probe Sequence
agatcctacaggactgtctgtctcc

SEQ ID NO: 139104 - DNA, 25 bp, Probe Sequence
agatccgcaatgcttatgctgtgtt

SEQ ID NO: 139105 - DNA, 25 bp, Probe Sequence
agatcaccaatctggactgtactcg

SEQ ID NO: 139106 - DNA, 25 bp, Probe Sequence
agatgaaaatcttgcgttgtatgtt

SEQ ID NO: 139107 - DNA, 25 bp, Probe Sequence
agatggcattatcactttattgttt

SEQ ID NO: 139108 - DNA, 25 bp, Probe Sequence
agatctgctttcactttttgggggc

SEQ ID NO: 139109 - DNA, 25 bp, Probe Sequence
agatcgttgctcagctttacttcag

SEQ ID NO: 139110 - DNA, 25 bp, Probe Sequence
agatcggatcattaccattacagga

SEQ ID NO: 139111 - DNA, 25 bp, Probe Sequence
agatggcgtatcttccagttcaatg

SEQ ID NO: 139112 - DNA, 25 bp, Probe Sequence
agatccatgttcccgcagataagga

SEQ ID NO: 139113 - DNA, 25 bp, Probe Sequence
agatctatgttctctcagtagaaaa

SEQ ID NO: 139114 - DNA, 25 bp, Probe Sequence
agattcatatcctaagtaaagagaa

SEQ ID NO: 139115 - DNA, 25 bp, Probe Sequence
agttcattgctctcagtataagatt

SEQ ID NO: 139116 - DNA, 25 bp, Probe Sequence
agttctggccttctgatgcaaatgc

SEQ ID NO: 139117 - DNA, 25 bp, Probe Sequence
agttggtccttgactgtggcattgc

SEQ ID NO: 139118 - DNA, 25 bp, Probe Sequence
agttgtgtcttttgtggccagtgac

SEQ ID NO: 139119 - DNA, 25 bp, Probe Sequence
agattgtttctttctgagccaaggt

SEQ ID NO: 139120 - DNA, 25 bp, Probe Sequence
agatctttatttttagccatgcact

SEQ ID NO: 139121 - DNA, 25 bp, Probe Sequence
agatctttatttttagccatgcact

SEQ ID NO: 139122 - DNA, 25 bp, Probe Sequence
agatctttatttttagccatgcact

SEQ ID NO: 139123 - DNA, 25 bp, Probe Sequence
agagctttgtttctgggctactgtc

SEQ ID NO: 139124 - DNA, 25 bp, Probe Sequence
agatctagttttatgcaggctgttt

SEQ ID NO: 139125 - DNA, 25 bp, Probe Sequence
agattcaggtttactcacgtcatcc

SEQ ID NO: 139126 - DNA, 25 bp, Probe Sequence
agatatgcgagtacttgcgccttcc

SEQ ID NO: 139127 - DNA, 25 bp, Probe Sequence
agattgaagaatctgcccctgttga

SEQ ID NO: 139128 - DNA, 25 bp, Probe Sequence
agatagggatattggcccctcactg

SEQ ID NO: 139129 - DNA, 25 bp, Probe Sequence
agatcaaaattgcgaacccagtgga

SEQ ID NO: 139130 - DNA, 25 bp, Probe Sequence
agataaactgctccaaaccaacatg

SEQ ID NO: 139131 - DNA, 25 bp, Probe Sequence
agatataactggtaatgaactgaat

SEQ ID NO: 139132 - DNA, 25 bp, Probe Sequence
agatatgaatctctggctatttatt

SEQ ID NO: 139133 - DNA, 25 bp, Probe Sequence
agttgatatctggctgtccttttta

SEQ ID NO: 139134 - DNA, 25 bp, Probe Sequence
agttgatatctggctgtccttttta

SEQ ID NO: 139135 - DNA, 25 bp, Probe Sequence
agattgaattccgtctctgtgttgt

SEQ ID NO: 139136 - DNA, 25 bp, Probe Sequence
agatagatcaagggtctcagtgtct

SEQ ID NO: 139137 - DNA, 25 bp, Probe Sequence
agatgtatgaaggcttttggtctcc

SEQ ID NO: 139138 - DNA, 25 bp, Probe Sequence
agaaaactgctaaagggtatccctg

SEQ ID NO: 139139 - DNA, 25 bp, Probe Sequence
agaaagaccgactggatttccacca

SEQ ID NO: 139140 - DNA, 25 bp, Probe Sequence
agaaaacctgactcttcgtgtcttc

SEQ ID NO: 139141 - DNA, 25 bp, Probe Sequence
agaccaacccagttctgtttgacta

SEQ ID NO: 139142 - DNA, 25 bp, Probe Sequence
agatactacctgcaattttatacat

SEQ ID NO: 139143 - DNA, 25 bp, Probe Sequence
agcccaatgcactggtctgacttta

SEQ ID NO: 139144 - DNA, 25 bp, Probe Sequence
agataattgcgtgaactctgttaaa

SEQ ID NO: 139145 - DNA, 25 bp, Probe Sequence
agattaactttaatctctgttaaca

SEQ ID NO: 139146 - DNA, 25 bp, Probe Sequence
agattaattggtaactctggaaaat

SEQ ID NO: 139147 - DNA, 25 bp, Probe Sequence
agattttctcagtggtctagaaaat

SEQ ID NO: 139148 - DNA, 25 bp, Probe Sequence
agttgtcactactagattataaaaa

SEQ ID NO: 139149 - DNA, 25 bp, Probe Sequence
agcctggccatgtggtagtaaaaaa

SEQ ID NO: 139150 - DNA, 25 bp, Probe Sequence
agccgtaagggctacagtcgaaaag

SEQ ID NO: 139151 - DNA, 25 bp, Probe Sequence
agcggctaaggggacagaaggattg

SEQ ID NO: 139152 - DNA, 25 bp, Probe Sequence
agaggtattttggaagaaggcactg

SEQ ID NO: 139153 - DNA, 25 bp, Probe Sequence
agagcatgttcgtggagaacaaggc

SEQ ID NO: 139154 - DNA, 25 bp, Probe Sequence
agagctgctcctttgggggaatgtt

SEQ ID NO: 139155 - DNA, 25 bp, Probe Sequence
agaggccctaggcgggatgggctcg

SEQ ID NO: 139156 - DNA, 25 bp, Probe Sequence
agatggtggggtcagaccagcgcca

SEQ ID NO: 139157 - DNA, 25 bp, Probe Sequence
agatggtcagggactacctcatggc

SEQ ID NO: 139158 - DNA, 25 bp, Probe Sequence
agatgatccaggacagtacccagcg

SEQ ID NO: 139159 - DNA, 25 bp, Probe Sequence
agatacagccagaagatgccccagt

SEQ ID NO: 139160 - DNA, 25 bp, Probe Sequence
agattaccaaattagcccaggcgtg

SEQ ID NO: 139161 - DNA, 25 bp, Probe Sequence
agatctcctaaaaagcctcggtctc

SEQ ID NO: 139162 - DNA, 25 bp, Probe Sequence
agattggttgaaaaccctgtcttct

SEQ ID NO: 139163 - DNA, 25 bp, Probe Sequence
agttggattggaaacgctccctggc

SEQ ID NO: 139164 - DNA, 25 bp, Probe Sequence
agttggactaaatgctcttccttca

SEQ ID NO: 139165 - DNA, 25 bp, Probe Sequence
agcagggactaaaagccccacttcg

SEQ ID NO: 139166 - DNA, 25 bp, Probe Sequence
agatgagaaaaacttgccgccaccc

SEQ ID NO: 139167 - DNA, 25 bp, Probe Sequence
agatgtgaaatataagcctgcggcc

SEQ ID NO: 139168 - DNA, 25 bp, Probe Sequence
agaggacaatcttagacgggtttct

SEQ ID NO: 139169 - DNA, 25 bp, Probe Sequence
agatgggatttggcgtctcgttttt

SEQ ID NO: 139170 - DNA, 25 bp, Probe Sequence
agaggtgttttcactttgctttgga

SEQ ID NO: 139171 - DNA, 25 bp, Probe Sequence
agagattatttttagttgtctttat

SEQ ID NO: 139172 - DNA, 25 bp, Probe Sequence
agagattagcctgtagcttatattt

SEQ ID NO: 139173 - DNA, 25 bp, Probe Sequence
agacagttccagcttcttaatagac

SEQ ID NO: 139174 - DNA, 25 bp, Probe Sequence
agagaattccctatttatttgacaa

SEQ ID NO: 139175 - DNA, 25 bp, Probe Sequence
agagaaccgttcgtttgcaatctac

SEQ ID NO: 139176 - DNA, 25 bp, Probe Sequence
agatgaagtctcaccttccagtttg

SEQ ID NO: 139177 - DNA, 25 bp, Probe Sequence
agatgaatattgaagctcttcggga

SEQ ID NO: 139178 - DNA, 25 bp, Probe Sequence
agatgaagatagaaccccacggaaa

SEQ ID NO: 139179 - DNA, 25 bp, Probe Sequence
agatgccgataaaggcccctggtgt

SEQ ID NO: 139180 - DNA, 25 bp, Probe Sequence
agatgacttcaatggggcccagtgc

SEQ ID NO: 139181 - DNA, 25 bp, Probe Sequence
agatgagttatatcagggcagggga

SEQ ID NO: 139182 - DNA, 25 bp, Probe Sequence
agatgaatttaccaggtgagaatga

SEQ ID NO: 139183 - DNA, 25 bp, Probe Sequence
agatgcacatgttggaggagagagc

SEQ ID NO: 139184 - DNA, 25 bp, Probe Sequence
agatgcagaacggagccggtgcctc

SEQ ID NO: 139185 - DNA, 25 bp, Probe Sequence
agatctcaatcgggcttgtactgct

SEQ ID NO: 139186 - DNA, 25 bp, Probe Sequence
agattccatcagggccatgttgcct

SEQ ID NO: 139187 - DNA, 25 bp, Probe Sequence
agatctcactcgtgcaatggccaat

SEQ ID NO: 139188 - DNA, 25 bp, Probe Sequence
agatcacccagagcaatgccatcct

SEQ ID NO: 139189 - DNA, 25 bp, Probe Sequence
agatacgcacagtccaggatgcact

SEQ ID NO: 139190 - DNA, 25 bp, Probe Sequence
agattctcatcttcctggatgcatc

SEQ ID NO: 139191 - DNA, 25 bp, Probe Sequence
agattctaacgactggatgctgcta

SEQ ID NO: 139192 - DNA, 25 bp, Probe Sequence
agattctaacgactggatgctgcta

SEQ ID NO: 139193 - DNA, 25 bp, Probe Sequence
agatcttatcctagcgctgacagct

SEQ ID NO: 139194 - DNA, 25 bp, Probe Sequence
agattttccttactatcagtttatt

SEQ ID NO: 139195 - DNA, 25 bp, Probe Sequence
agattttcttacctctcagttgttg

SEQ ID NO: 139196 - DNA, 25 bp, Probe Sequence
agatctttgtgtggctcctattttt

SEQ ID NO: 139197 - DNA, 25 bp, Probe Sequence
agatctttgtgtggctcctattttt

SEQ ID NO: 139198 - DNA, 25 bp, Probe Sequence
agaccttttggctgcagtttcatgt

SEQ ID NO: 139199 - DNA, 25 bp, Probe Sequence
agatccttctattctacgtaatatt

SEQ ID NO: 139200 - DNA, 25 bp, Probe Sequence
agatcttctattaatgacagtaaca

SEQ ID NO: 139201 - DNA, 25 bp, Probe Sequence
agatattcgaataagcacgtagcac

SEQ ID NO: 139202 - DNA, 25 bp, Probe Sequence
agatatacgagaacgccatgattgc

SEQ ID NO: 139203 - DNA, 25 bp, Probe Sequence
agattgcagcggacatcccagaagt

SEQ ID NO: 139204 - DNA, 25 bp, Probe Sequence
agttgatcagagccttccagagtgt

SEQ ID NO: 139205 - DNA, 25 bp, Probe Sequence
agttgctcagaggttgtacatatgt

SEQ ID NO: 139206 - DNA, 25 bp, Probe Sequence
agaggcttgaaactgtcacagaggt

SEQ ID NO: 139207 - DNA, 25 bp, Probe Sequence
agaggggttatcttacatcagagtg

SEQ ID NO: 139208 - DNA, 25 bp, Probe Sequence
agatgggagtcccattcctagcaga

SEQ ID NO: 139209 - DNA, 25 bp, Probe Sequence
agagggaccctgatccataagcact

SEQ ID NO: 139210 - DNA, 25 bp, Probe Sequence
agagggcaccactggataaacctgg

SEQ ID NO: 139211 - DNA, 25 bp, Probe Sequence
agatgaggcttctgggataggccca

SEQ ID NO: 139212 - DNA, 25 bp, Probe Sequence
agatgaggcttctgggataggccca

SEQ ID NO: 139213 - DNA, 25 bp, Probe Sequence
agatgctggtaatggccatggtacc

SEQ ID NO: 139214 - DNA, 25 bp, Probe Sequence
agataatgattgtactgccatgagt

SEQ ID NO: 139215 - DNA, 25 bp, Probe Sequence
agatacatgatttgggctggatgtg

SEQ ID NO: 139216 - DNA, 25 bp, Probe Sequence
agattgctagattgctaaggagctg

SEQ ID NO: 139217 - DNA, 25 bp, Probe Sequence
agttgcagcgattgcaactggcctg

SEQ ID NO: 139218 - DNA, 25 bp, Probe Sequence
agatctcagcagtgcatagcgagga

SEQ ID NO: 139219 - DNA, 25 bp, Probe Sequence
agatcacactgacctggcagcagga

SEQ ID NO: 139220 - DNA, 25 bp, Probe Sequence
agatccacgctgacgcagagcggaa

SEQ ID NO: 139221 - DNA, 25 bp, Probe Sequence
agatcaagcctgcctcaatcagtat

SEQ ID NO: 139222 - DNA, 25 bp, Probe Sequence
agataagcctgagcatgtaggtgta

SEQ ID NO: 139223 - DNA, 25 bp, Probe Sequence
agatagatcctgaagttacagatga

SEQ ID NO: 139224 - DNA, 25 bp, Probe Sequence
agatcgatcctgcagatgtctctag

SEQ ID NO: 139225 - DNA, 25 bp, Probe Sequence
agttgagatctccatgctagttgag

SEQ ID NO: 139226 - DNA, 25 bp, Probe Sequence
agttgatgtctgtatgttgattgca

SEQ ID NO: 139227 - DNA, 25 bp, Probe Sequence
agttgatgagcttctggatagcagc

SEQ ID NO: 139228 - DNA, 25 bp, Probe Sequence
agttgtggcgtccagaaagcttccg

SEQ ID NO: 139229 - DNA, 25 bp, Probe Sequence
agttgtgtgctattcgtaagttctg

SEQ ID NO: 139230 - DNA, 25 bp, Probe Sequence
agttggatgctctcctggaggctct

SEQ ID NO: 139231 - DNA, 25 bp, Probe Sequence
agattgagaccatcctggccaacat

SEQ ID NO: 139232 - DNA, 25 bp, Probe Sequence
agatttgaccaagctgcaccagttg

SEQ ID NO: 139233 - DNA, 25 bp, Probe Sequence
agattctccacattgactcaatcag

SEQ ID NO: 139234 - DNA, 25 bp, Probe Sequence
agatttcacacctatgacatacatg

SEQ ID NO: 139235 - DNA, 25 bp, Probe Sequence
agatgttctgccttagcactcagtt

SEQ ID NO: 139236 - DNA, 25 bp, Probe Sequence
agttgtgctgtcaatacctcatact

SEQ ID NO: 139237 - DNA, 25 bp, Probe Sequence
agattggttctaacgctttgcgtat

SEQ ID NO: 139238 - DNA, 25 bp, Probe Sequence
agagggtactttcttatgctggatc

SEQ ID NO: 139239 - DNA, 25 bp, Probe Sequence
agaggggatctttggactacgttct

SEQ ID NO: 139240 - DNA, 25 bp, Probe Sequence
agaggagatttttggtccagttctt

SEQ ID NO: 139241 - DNA, 25 bp, Probe Sequence
agaggaagtcaaatggtccctcttt

SEQ ID NO: 139242 - DNA, 25 bp, Probe Sequence
agaggaggaagccggggctctttct

SEQ ID NO: 139243 - DNA, 25 bp, Probe Sequence
agattgatgagatgccgatgaacgt

SEQ ID NO: 139244 - DNA, 25 bp, Probe Sequence
agatatgtgagctggctgacgcctt

SEQ ID NO: 139245 - DNA, 25 bp, Probe Sequence
agttgctagaagtcatgagtctttt

SEQ ID NO: 139246 - DNA, 25 bp, Probe Sequence
agttgctatggctatcttgtctttt

SEQ ID NO: 139247 - DNA, 25 bp, Probe Sequence
agatagaatggcttctctgtttttc

SEQ ID NO: 139248 - DNA, 25 bp, Probe Sequence
agatatgagaaagtttacttttcct

SEQ ID NO: 139249 - DNA, 25 bp, Probe Sequence
agatcaagacatgttaaccttttat

SEQ ID NO: 139250 - DNA, 25 bp, Probe Sequence
agatccagccattactaacctattc

SEQ ID NO: 139251 - DNA, 25 bp, Probe Sequence
agatcacagtcttacatagctctct

SEQ ID NO: 139252 - DNA, 25 bp, Probe Sequence
agatcacatgggtgcttgtgccttc

SEQ ID NO: 139253 - DNA, 25 bp, Probe Sequence
agttgatggtgatctctatcctcct

SEQ ID NO: 139254 - DNA, 25 bp, Probe Sequence
agattcaggaattcctctctgggct

SEQ ID NO: 139255 - DNA, 25 bp, Probe Sequence
agatgtagggagcacctcagggccc

SEQ ID NO: 139256 - DNA, 25 bp, Probe Sequence
agatttggaaggggctctggctccc

SEQ ID NO: 139257 - DNA, 25 bp, Probe Sequence
agatttggaaggggctctggctccc

SEQ ID NO: 139258 - DNA, 25 bp, Probe Sequence
agacgtgggagtgtttggctgcccc

SEQ ID NO: 139259 - DNA, 25 bp, Probe Sequence
agagtgggcgagtgagttgacggcc

SEQ ID NO: 139260 - DNA, 25 bp, Probe Sequence
agatgttggctgctgtacttactcc

SEQ ID NO: 139261 - DNA, 25 bp, Probe Sequence
agatgttggctgctgtacttactcc

SEQ ID NO: 139262 - DNA, 25 bp, Probe Sequence
agattgtggcactggactctagctt

SEQ ID NO: 139263 - DNA, 25 bp, Probe Sequence
agacatgtgcgagaggcttacctat

SEQ ID NO: 139264 - DNA, 25 bp, Probe Sequence
agatcatgtgactttttttcctcat

SEQ ID NO: 139265 - DNA, 25 bp, Probe Sequence
agatgcttgtgtttcattttccttc

SEQ ID NO: 139266 - DNA, 25 bp, Probe Sequence
agatctgagttggacttgttccctt

SEQ ID NO: 139267 - DNA, 25 bp, Probe Sequence
agatcacaggggtctgtgtacctct

SEQ ID NO: 139268 - DNA, 25 bp, Probe Sequence
agatcctggggactgcccagtcagt

SEQ ID NO: 139269 - DNA, 25 bp, Probe Sequence
agacgcgggcgacgccggtaattgt

SEQ ID NO: 139270 - DNA, 25 bp, Probe Sequence
agaggggcgattccctcgtcaattt

SEQ ID NO: 139271 - DNA, 25 bp, Probe Sequence
agagggccatcaaactcattgtcac

SEQ ID NO: 139272 - DNA, 25 bp, Probe Sequence
agaggatgccccaacaaactcatgg

SEQ ID NO: 139273 - DNA, 25 bp, Probe Sequence
agagttcccattacaacattaagaa

SEQ ID NO: 139274 - DNA, 25 bp, Probe Sequence
agatgtccctttcataatatatgca

SEQ ID NO: 139275 - DNA, 25 bp, Probe Sequence
agatttctcatttgccaataataat

SEQ ID NO: 139276 - DNA, 25 bp, Probe Sequence
agatgttcaacattcaagataagaa

SEQ ID NO: 139277 - DNA, 25 bp, Probe Sequence
agatgattgctaattccttgaagga

SEQ ID NO: 139278 - DNA, 25 bp, Probe Sequence
agattagcagaacgctcttgaaaca

SEQ ID NO: 139279 - DNA, 25 bp, Probe Sequence
agattgcaaatactgcccgcaaagc

SEQ ID NO: 139280 - DNA, 25 bp, Probe Sequence
agagtgcaaatgcacctcctgcaag

SEQ ID NO: 139281 - DNA, 25 bp, Probe Sequence
agagtgcaaatgcacctcctgcaag

SEQ ID NO: 139282 - DNA, 25 bp, Probe Sequence
agatcatgaaagatgccttctgaaa

SEQ ID NO: 139283 - DNA, 25 bp, Probe Sequence
agatcatgccattgcattccagcct

SEQ ID NO: 139284 - DNA, 25 bp, Probe Sequence
agatgtgcgcattgacaccaggctc

SEQ ID NO: 139285 - DNA, 25 bp, Probe Sequence
agatgatcgctattacacagctatc

SEQ ID NO: 139286 - DNA, 25 bp, Probe Sequence
agatgatcctgaaagtcacttccaa

SEQ ID NO: 139287 - DNA, 25 bp, Probe Sequence
agatatcactggtactctttctaat

SEQ ID NO: 139288 - DNA, 25 bp, Probe Sequence
agattgctgctttttttttgacatt

SEQ ID NO: 139289 - DNA, 25 bp, Probe Sequence
agattgtccagtttattgttacatt

SEQ ID NO: 139290 - DNA, 25 bp, Probe Sequence
agattaccagatcatcagtttagct

SEQ ID NO: 139291 - DNA, 25 bp, Probe Sequence
agatgacccgaaggcagtctgtagg

SEQ ID NO: 139292 - DNA, 25 bp, Probe Sequence
agatactaacaaggcagcttcagga

SEQ ID NO: 139293 - DNA, 25 bp, Probe Sequence
agatacccagaacgccttcagaatc

SEQ ID NO: 139294 - DNA, 25 bp, Probe Sequence
agatagggaccacactgacagaact

SEQ ID NO: 139295 - DNA, 25 bp, Probe Sequence
agaggtgaatccccagtacgatagc

SEQ ID NO: 139296 - DNA, 25 bp, Probe Sequence
agatgggtttcagcccagcagaagc

SEQ ID NO: 139297 - DNA, 25 bp, Probe Sequence
agaggagtgttctgtccaggaggcc

SEQ ID NO: 139298 - DNA, 25 bp, Probe Sequence
agaggaggcttccctccaagaggac

SEQ ID NO: 139299 - DNA, 25 bp, Probe Sequence
agaggaagattctcaccactgaagg

SEQ ID NO: 139300 - DNA, 25 bp, Probe Sequence
agatggaaatcctgcagcacctcat

SEQ ID NO: 139301 - DNA, 25 bp, Probe Sequence
agatcgaacacgtcatgtaccatga

SEQ ID NO: 139302 - DNA, 25 bp, Probe Sequence
agatcgacacgtcatggaccatgac

SEQ ID NO: 139303 - DNA, 25 bp, Probe Sequence
agatggaagaatcctggacttggct

SEQ ID NO: 139304 - DNA, 25 bp, Probe Sequence
agattaagatttttgactgagtcat

SEQ ID NO: 139305 - DNA, 25 bp, Probe Sequence
agatatgagaatttactggcaagtc

SEQ ID NO: 139306 - DNA, 25 bp, Probe Sequence
agatattgtatatcatctggccgcc

SEQ ID NO: 139307 - DNA, 25 bp, Probe Sequence
agactgctgtttttctggtctgacc

SEQ ID NO: 139308 - DNA, 25 bp, Probe Sequence
agttgtgatttctgtggatcccagc

SEQ ID NO: 139309 - DNA, 25 bp, Probe Sequence
agattggatttgtcctgtatccccc

SEQ ID NO: 139310 - DNA, 25 bp, Probe Sequence
agatgttaagtgtctttatcacccc

SEQ ID NO: 139311 - DNA, 25 bp, Probe Sequence
agattcaagagtttgccgacctacc

SEQ ID NO: 139312 - DNA, 25 bp, Probe Sequence
agattcaagagtttgccgacctaac

SEQ ID NO: 139313 - DNA, 25 bp, Probe Sequence
agactacagtaacccgacacgaagc

SEQ ID NO: 139314 - DNA, 25 bp, Probe Sequence
agatctagagtaacccagacctccc

SEQ ID NO: 139315 - DNA, 25 bp, Probe Sequence
agattagagacaccagccaagagcc

SEQ ID NO: 139316 - DNA, 25 bp, Probe Sequence
agataatatggcatgcccggagccc

SEQ ID NO: 139317 - DNA, 25 bp, Probe Sequence
agataatatggcatgcccggagccc

SEQ ID NO: 139318 - DNA, 25 bp, Probe Sequence
agagacaaggcattgctgcgcagat

SEQ ID NO: 139319 - DNA, 25 bp, Probe Sequence
agatcacaagcaactctggatggga

SEQ ID NO: 139320 - DNA, 25 bp, Probe Sequence
agatctgctcaccctcggtgagcaa

SEQ ID NO: 139321 - DNA, 25 bp, Probe Sequence
agattctcatccccgtagatgcaat

SEQ ID NO: 139322 - DNA, 25 bp, Probe Sequence
agattctcattcacgggactagtta

SEQ ID NO: 139323 - DNA, 25 bp, Probe Sequence
agatcccttcccctgaagtatttga

SEQ ID NO: 139324 - DNA, 25 bp, Probe Sequence
agacccataccttggaagacttcca

SEQ ID NO: 139325 - DNA, 25 bp, Probe Sequence
agactccattccagtaatggtatca

SEQ ID NO: 139326 - DNA, 25 bp, Probe Sequence
agattccatttcatgttaaatacaa

SEQ ID NO: 139327 - DNA, 25 bp, Probe Sequence
agataacctctgttgatatgaaaaa

SEQ ID NO: 139328 - DNA, 25 bp, Probe Sequence
agataactcctcttatggcagcatt

SEQ ID NO: 139329 - DNA, 25 bp, Probe Sequence
agattgatcagcttgtgtatggttt

SEQ ID NO: 139330 - DNA, 25 bp, Probe Sequence
agatatgcacagtctattttttgta

SEQ ID NO: 139331 - DNA, 25 bp, Probe Sequence
agatgcatgagctaattatctcttt

SEQ ID NO: 139332 - DNA, 25 bp, Probe Sequence
agatgcatgccacagtagatgtcca

SEQ ID NO: 139333 - DNA, 25 bp, Probe Sequence
agatatgctatcttggagagtccaa

SEQ ID NO: 139334 - DNA, 25 bp, Probe Sequence
agatcattatctaggacttgcaaat

SEQ ID NO: 139335 - DNA, 25 bp, Probe Sequence
agatcattccatatgaattcaacag

SEQ ID NO: 139336 - DNA, 25 bp, Probe Sequence
agatatcctcatcttcttgaacagc

SEQ ID NO: 139337 - DNA, 25 bp, Probe Sequence
agattcactgatgtccttcagacag

SEQ ID NO: 139338 - DNA, 25 bp, Probe Sequence
agatctagctctgtgagccggacag

SEQ ID NO: 139339 - DNA, 25 bp, Probe Sequence
agatgaacattgcatgaccggatca

SEQ ID NO: 139340 - DNA, 25 bp, Probe Sequence
agatggacacagctgactggacccc

SEQ ID NO: 139341 - DNA, 25 bp, Probe Sequence
agatgatggaccctggttatcccaa

SEQ ID NO: 139342 - DNA, 25 bp, Probe Sequence
agattcagcacctagtgtcttcctg

SEQ ID NO: 139343 - DNA, 25 bp, Probe Sequence
agattaggccacctctcattaatgt

SEQ ID NO: 139344 - DNA, 25 bp, Probe Sequence
agatctcaaacaggcccacaaattc

SEQ ID NO: 139345 - DNA, 25 bp, Probe Sequence
agacgaacacggggacaattgtcaa

SEQ ID NO: 139346 - DNA, 25 bp, Probe Sequence
agatcaaatcatataggtaacttca

SEQ ID NO: 139347 - DNA, 25 bp, Probe Sequence
agattatattcttgacgttgacttc

SEQ ID NO: 139348 - DNA, 25 bp, Probe Sequence
agattattatgttctcagttctctc

SEQ ID NO: 139349 - DNA, 25 bp, Probe Sequence
agattcatccataatccctttctgc

SEQ ID NO: 139350 - DNA, 25 bp, Probe Sequence
agattcatccataatccctttctgc

SEQ ID NO: 139351 - DNA, 25 bp, Probe Sequence
agaggcttatttgactttatgctag

SEQ ID NO: 139352 - DNA, 25 bp, Probe Sequence
agaggcttatttgactttatgctag

SEQ ID NO: 139353 - DNA, 25 bp, Probe Sequence
agagagcctcagtcttactgatttc

SEQ ID NO: 139354 - DNA, 25 bp, Probe Sequence
agagacatgtaccttgaccatcgtc

SEQ ID NO: 139355 - DNA, 25 bp, Probe Sequence
agatggcgtaccagagcttgcgact

SEQ ID NO: 139356 - DNA, 25 bp, Probe Sequence
agatgaagaacctcgtgtggaccag

SEQ ID NO: 139357 - DNA, 25 bp, Probe Sequence
agatggaaactactccgggagctct

SEQ ID NO: 139358 - DNA, 25 bp, Probe Sequence
agaggaaacaaagcgttctgcgcgt

SEQ ID NO: 139359 - DNA, 25 bp, Probe Sequence
agaggcaatgactcgttacctgccg

SEQ ID NO: 139360 - DNA, 25 bp, Probe Sequence
agaggcttacaatgattaccttaaa

SEQ ID NO: 139361 - DNA, 25 bp, Probe Sequence
agaggcagatactaaattaagcata

SEQ ID NO: 139362 - DNA, 25 bp, Probe Sequence
agaggacataaaataacccataaga

SEQ ID NO: 139363 - DNA, 25 bp, Probe Sequence
agagatacatttatagccctagggg

SEQ ID NO: 139364 - DNA, 25 bp, Probe Sequence
agaaggaattaaacccatgtgggag

SEQ ID NO: 139365 - DNA, 25 bp, Probe Sequence
agagggacaagcatttcatcttggg

SEQ ID NO: 139366 - DNA, 25 bp, Probe Sequence
agagagaacacagacctccgggaag

SEQ ID NO: 139367 - DNA, 25 bp, Probe Sequence
acagagtcaacaggaccccgagatc

SEQ ID NO: 139368 - DNA, 25 bp, Probe Sequence
agagagtcaaagcctgcacaacaga

SEQ ID NO: 139369 - DNA, 25 bp, Probe Sequence
agagggtagggcacaaagatggatg

SEQ ID NO: 139370 - DNA, 25 bp, Probe Sequence
agaggttgcggggacccgagatggt

SEQ ID NO: 139371 - DNA, 25 bp, Probe Sequence
agaggttataggtcactcctggggc

SEQ ID NO: 139372 - DNA, 25 bp, Probe Sequence
agatatatttcactgatcctcgcgg

SEQ ID NO: 139373 - DNA, 25 bp, Probe Sequence
agatcattttcagtgattcctcagc

SEQ ID NO: 139374 - DNA, 25 bp, Probe Sequence
agatgagcattccttttcgatcagc

SEQ ID NO: 139375 - DNA, 25 bp, Probe Sequence
agagtgcttcttattcggcagggct

SEQ ID NO: 139376 - DNA, 25 bp, Probe Sequence
agaggcttacctatgggccaagtat

SEQ ID NO: 139377 - DNA, 25 bp, Probe Sequence
agaggttgagccagggttcgggaga

SEQ ID NO: 139378 - DNA, 25 bp, Probe Sequence
agcaggttagaggcctttagggaag

SEQ ID NO: 139379 - DNA, 25 bp, Probe Sequence
actgctgttcagataggggacggaa

SEQ ID NO: 139380 - DNA, 25 bp, Probe Sequence
actagttcggcgaggagactggcca

SEQ ID NO: 139381 - DNA, 25 bp, Probe Sequence
agctaggtagggactgaggacaggc

SEQ ID NO: 139382 - DNA, 25 bp, Probe Sequence
agaggggaggaacaggcacaggcta

SEQ ID NO: 139383 - DNA, 25 bp, Probe Sequence
agagggaagtgaaaacacaggcctg

SEQ ID NO: 139384 - DNA, 25 bp, Probe Sequence
agaggaaggctagaagcctgagcaa

SEQ ID NO: 139385 - DNA, 25 bp, Probe Sequence
agaggaagccttgatatctgataag

SEQ ID NO: 139386 - DNA, 25 bp, Probe Sequence
agatggaggcacccaaactggaact

SEQ ID NO: 139387 - DNA, 25 bp, Probe Sequence
agaggagactccgaagactgacaat

SEQ ID NO: 139388 - DNA, 25 bp, Probe Sequence
agatgtggaccaccaaggggttgtt

SEQ ID NO: 139389 - DNA, 25 bp, Probe Sequence
agatgctgagtggagtcgggggctt

SEQ ID NO: 139390 - DNA, 25 bp, Probe Sequence
agatgctgagtggagtcgggggctt

SEQ ID NO: 139391 - DNA, 25 bp, Probe Sequence
agatgctgagtggagtcgggggctt

SEQ ID NO: 139392 - DNA, 25 bp, Probe Sequence
agagctgcctgggaaagggcagttt

SEQ ID NO: 139393 - DNA, 25 bp, Probe Sequence
agagggatgagtttgagggagtttc

SEQ ID NO: 139394 - DNA, 25 bp, Probe Sequence
agaggaggcttccggagtagccctc

SEQ ID NO: 139395 - DNA, 25 bp, Probe Sequence
agatggagtaccccgagaacgctat

SEQ ID NO: 139396 - DNA, 25 bp, Probe Sequence
agaggaggaagcccaggtacgcaaa

SEQ ID NO: 139397 - DNA, 25 bp, Probe Sequence
agagtcaggggtagagcggcaagta

SEQ ID NO: 139398 - DNA, 25 bp, Probe Sequence
agagttgagttgtatgagtggcggc

SEQ ID NO: 139399 - DNA, 25 bp, Probe Sequence
agagttgagttcccgagagggccgg

SEQ ID NO: 139400 - DNA, 25 bp, Probe Sequence
agagggcagtggcccgagtgggacc

SEQ ID NO: 139401 - DNA, 25 bp, Probe Sequence
agagggactgaacccaaggtgtgtc

SEQ ID NO: 139402 - DNA, 25 bp, Probe Sequence
agagttaagtgtccaaaggttgtca

SEQ ID NO: 139403 - DNA, 25 bp, Probe Sequence
agattattaattccactcccttgta

SEQ ID NO: 139404 - DNA, 25 bp, Probe Sequence
agatttacaataatgcacccctctt

SEQ ID NO: 139405 - DNA, 25 bp, Probe Sequence
agatggtaaatgaacacttgttttt

SEQ ID NO: 139406 - DNA, 25 bp, Probe Sequence
agaggaaagctgacttctttctttt

SEQ ID NO: 139407 - DNA, 25 bp, Probe Sequence
agaggaacagctctttggacactag

SEQ ID NO: 139408 - DNA, 25 bp, Probe Sequence
aaggtacgtccatttggactacaag

SEQ ID NO: 139409 - DNA, 25 bp, Probe Sequence
agaggttttcctgattgcttgacaa

SEQ ID NO: 139410 - DNA, 25 bp, Probe Sequence
agaggttcgagactgggtgcttaca

SEQ ID NO: 139411 - DNA, 25 bp, Probe Sequence
agagttgtccaaagggtcgcttaag

SEQ ID NO: 139412 - DNA, 25 bp, Probe Sequence
agagtttcacaaatctttccaaaat

SEQ ID NO: 139413 - DNA, 25 bp, Probe Sequence
agagtttgttttgctaccaatatca

SEQ ID NO: 139414 - DNA, 25 bp, Probe Sequence
agagttagtttcatcaacctaatga

SEQ ID NO: 139415 - DNA, 25 bp, Probe Sequence
gaatgattattatagtaaccaaaac

SEQ ID NO: 139416 - DNA, 25 bp, Probe Sequence
agagatcttcattaagtacccaaat

SEQ ID NO: 139417 - DNA, 25 bp, Probe Sequence
agagtcttactgtagctacgctaat

SEQ ID NO: 139418 - DNA, 25 bp, Probe Sequence
agattttcactgtaatggctgctac

SEQ ID NO: 139419 - DNA, 25 bp, Probe Sequence
agatcattctgccttagaggtgcta

SEQ ID NO: 139420 - DNA, 25 bp, Probe Sequence
agatttgctgctcttggatgtcact

SEQ ID NO: 139421 - DNA, 25 bp, Probe Sequence
agatttgctgctcttggatgtcact

SEQ ID NO: 139422 - DNA, 25 bp, Probe Sequence
agatatagtgatctctgtgggcatt

SEQ ID NO: 139423 - DNA, 25 bp, Probe Sequence
agatagagccttctgtgttgcagat

SEQ ID NO: 139424 - DNA, 25 bp, Probe Sequence
agataggccttcttgtgatcttgct

SEQ ID NO: 139425 - DNA, 25 bp, Probe Sequence
agatggacgtactttgtctgactac

SEQ ID NO: 139426 - DNA, 25 bp, Probe Sequence
agaggatggtactgttttcatactt

SEQ ID NO: 139427 - DNA, 25 bp, Probe Sequence
agaggcttctcctgttttatatatt

SEQ ID NO: 139428 - DNA, 25 bp, Probe Sequence
agagtgctccttttgtattttacat

SEQ ID NO: 139429 - DNA, 25 bp, Probe Sequence
agagtttctgtgtagttttaacatt

SEQ ID NO: 139430 - DNA, 25 bp, Probe Sequence
agatgtgatctcagttgtaaataga

SEQ ID NO: 139431 - DNA, 25 bp, Probe Sequence
agatgaggccccttctagaatctag

SEQ ID NO: 139432 - DNA, 25 bp, Probe Sequence
agatatgggggcttcatgagaggct

SEQ ID NO: 139433 - DNA, 25 bp, Probe Sequence
agatcatcgggggccacgaggtgac

SEQ ID NO: 139434 - DNA, 25 bp, Probe Sequence
agactgcgggacggacggtggacgc

SEQ ID NO: 139435 - DNA, 25 bp, Probe Sequence
agaggcgtcgaggtgactgtgggcc

SEQ ID NO: 139436 - DNA, 25 bp, Probe Sequence
agaggaatcctggaggcttggtccc

SEQ ID NO: 139437 - DNA, 25 bp, Probe Sequence
agaggaatcagctgatgagtctgct

SEQ ID NO: 139438 - DNA, 25 bp, Probe Sequence
agataaatctgaagaggcttctcct

SEQ ID NO: 139439 - DNA, 25 bp, Probe Sequence
agatccagcctagagtcatttcatt

SEQ ID NO: 139440 - DNA, 25 bp, Probe Sequence
agatgccttctagattcactgtctt

SEQ ID NO: 139441 - DNA, 25 bp, Probe Sequence
agatgcatttcgctacatacttcgt

SEQ ID NO: 139442 - DNA, 25 bp, Probe Sequence
agatcatttcaaaactcatttccta

SEQ ID NO: 139443 - DNA, 25 bp, Probe Sequence
agatcttgtagataccttctttgaa

SEQ ID NO: 139444 - DNA, 25 bp, Probe Sequence
agatcattgtaattcaaatccattc

SEQ ID NO: 139445 - DNA, 25 bp, Probe Sequence
agatcaagtaattccttcactaggt

SEQ ID NO: 139446 - DNA, 25 bp, Probe Sequence
agatcaggtaacaactccgtgggtg

SEQ ID NO: 139447 - DNA, 25 bp, Probe Sequence
agatcaggttaactctgacctggag

SEQ ID NO: 139448 - DNA, 25 bp, Probe Sequence
agatcgtcgagatgtctacttcgaa

SEQ ID NO: 139449 - DNA, 25 bp, Probe Sequence
agatctccgagatgatgtgtttaga

SEQ ID NO: 139450 - DNA, 25 bp, Probe Sequence
agatatccatagtgtgtgtctccca

SEQ ID NO: 139451 - DNA, 25 bp, Probe Sequence
agatgacctaagtgtgactgcagca

SEQ ID NO: 139452 - DNA, 25 bp, Probe Sequence
agagacagtacctgtaatgagaaac

SEQ ID NO: 139453 - DNA, 25 bp, Probe Sequence
agagaaactcctagtttagacaact

SEQ ID NO: 139454 - DNA, 25 bp, Probe Sequence
agatcaaccccgagatgctgaacaa

SEQ ID NO: 139455 - DNA, 25 bp, Probe Sequence
agatcggccctactagatgcagaga

SEQ ID NO: 139456 - DNA, 25 bp, Probe Sequence
agatcgcgacctcgaagtgggaaac

SEQ ID NO: 139457 - DNA, 25 bp, Probe Sequence
agatcgcgagttcaacatgaccaac

SEQ ID NO: 139458 - DNA, 25 bp, Probe Sequence
agatggccagtcacgagaacccagt

SEQ ID NO: 139459 - DNA, 25 bp, Probe Sequence
agagcatccgatggtagaaacacca

SEQ ID NO: 139460 - DNA, 25 bp, Probe Sequence
agagactcagagttccaaaacccta

SEQ ID NO: 139461 - DNA, 25 bp, Probe Sequence
agaccatcgatttctcagaaacgcc

SEQ ID NO: 139462 - DNA, 25 bp, Probe Sequence
agatgcgcctggttattgagaaagc

SEQ ID NO: 139463 - DNA, 25 bp, Probe Sequence
agatcgcttgcttcattggtcaaac

SEQ ID NO: 139464 - DNA, 25 bp, Probe Sequence
agatcatgtattttctactcaataa

SEQ ID NO: 139465 - DNA, 25 bp, Probe Sequence
agatcttactgcttgtcacttgaat

SEQ ID NO: 139466 - DNA, 25 bp, Probe Sequence
agatctctaatctgttttgagtctt

SEQ ID NO: 139467 - DNA, 25 bp, Probe Sequence
agatgtatagagtgtttgtatgtaa

SEQ ID NO: 139468 - DNA, 25 bp, Probe Sequence
agatatctagagtagagttgctagt

SEQ ID NO: 139469 - DNA, 25 bp, Probe Sequence
agatgttcagcgtgcagggcttgct

SEQ ID NO: 139470 - DNA, 25 bp, Probe Sequence
agatgtgcctgggcacaggcctggc

SEQ ID NO: 139471 - DNA, 25 bp, Probe Sequence
agatgttctcgatacagtctggcaa

SEQ ID NO: 139472 - DNA, 25 bp, Probe Sequence
agagaagcttcctcaggctagcaaa

SEQ ID NO: 139473 - DNA, 25 bp, Probe Sequence
agatgggctatgacttcgactacag

SEQ ID NO: 139474 - DNA, 25 bp, Probe Sequence
agatgcaggctctacctcaagtaca

SEQ ID NO: 139475 - DNA, 25 bp, Probe Sequence
agatgatggatctccaacatggcag

SEQ ID NO: 139476 - DNA, 25 bp, Probe Sequence
agatgagagatctttacacacacac

SEQ ID NO: 139477 - DNA, 25 bp, Probe Sequence
agagggatcgtcctcattcagactc

SEQ ID NO: 139478 - DNA, 25 bp, Probe Sequence
agatggagataatttgcactatact

SEQ ID NO: 139479 - DNA, 25 bp, Probe Sequence
agatcagaatgactattacaaactt

SEQ ID NO: 139480 - DNA, 25 bp, Probe Sequence
agatatgattcactatttaaactat

SEQ ID NO: 139481 - DNA, 25 bp, Probe Sequence
agagcatatcttctttaaattagct

SEQ ID NO: 139482 - DNA, 25 bp, Probe Sequence
agatgttcttgtttctgaacttcgt

SEQ ID NO: 139483 - DNA, 25 bp, Probe Sequence
agataatgctggctccaaacttcct

SEQ ID NO: 139484 - DNA, 25 bp, Probe Sequence
agatctttacccgaaaccattctct

SEQ ID NO: 139485 - DNA, 25 bp, Probe Sequence
agatttctaaccgatcaacctcatc

SEQ ID NO: 139486 - DNA, 25 bp, Probe Sequence
agatccttaatctcattacatctgc

SEQ ID NO: 139487 - DNA, 25 bp, Probe Sequence
agatctttccatttttctccatggt

SEQ ID NO: 139488 - DNA, 25 bp, Probe Sequence
agatctttagcttttattccttatt

SEQ ID NO: 139489 - DNA, 25 bp, Probe Sequence
agatttctatgcacctttactcttt

SEQ ID NO: 139490 - DNA, 25 bp, Probe Sequence
agatgttaagcccactttgttcttt

SEQ ID NO: 139491 - DNA, 25 bp, Probe Sequence
agatttgtagactctggtttttctt

SEQ ID NO: 139492 - DNA, 25 bp, Probe Sequence
agatgtttaatatctggtttcttct

SEQ ID NO: 139493 - DNA, 25 bp, Probe Sequence
agatcttacaattaagttttgcttt

SEQ ID NO: 139494 - DNA, 25 bp, Probe Sequence
agatattcacattcaagagtttggg

SEQ ID NO: 139495 - DNA, 25 bp, Probe Sequence
agatctacacagtcacacaattatt

SEQ ID NO: 139496 - DNA, 25 bp, Probe Sequence
agataagcacactaagacactggta

SEQ ID NO: 139497 - DNA, 25 bp, Probe Sequence
agataggctatctcaacactgctga

SEQ ID NO: 139498 - DNA, 25 bp, Probe Sequence
agataggctatctcaacactgctga

SEQ ID NO: 139499 - DNA, 25 bp, Probe Sequence
agataggctatctcaacactgctga

SEQ ID NO: 139500 - DNA, 25 bp, Probe Sequence
agatccatttctgcagaacttactg

SEQ ID NO: 139501 - DNA, 25 bp, Probe Sequence
agatccatttctggagttcttccgc

SEQ ID NO: 139502 - DNA, 25 bp, Probe Sequence
agatcacctttgtagatttcctcgc

SEQ ID NO: 139503 - DNA, 25 bp, Probe Sequence
agatcacctttgtagatttcctcgc

SEQ ID NO: 139504 - DNA, 25 bp, Probe Sequence
agatcccagtcacaattatcaccgg

SEQ ID NO: 139505 - DNA, 25 bp, Probe Sequence
agatccacagtacatgagaatcctt

SEQ ID NO: 139506 - DNA, 25 bp, Probe Sequence
agatccacacttgaggactactctc

SEQ ID NO: 139507 - DNA, 25 bp, Probe Sequence
agatgccaactttagcaattactac

SEQ ID NO: 139508 - DNA, 25 bp, Probe Sequence
agatcacaccttttaatgtagctga

SEQ ID NO: 139509 - DNA, 25 bp, Probe Sequence
agatgcaacctcactatggtatgct

SEQ ID NO: 139510 - DNA, 25 bp, Probe Sequence
agataagtctctggtatggtgatca

SEQ ID NO: 139511 - DNA, 25 bp, Probe Sequence
agataatttgctcctgacagtcata

SEQ ID NO: 139512 - DNA, 25 bp, Probe Sequence
agatagtttctgacatgtgcctatg

SEQ ID NO: 139513 - DNA, 25 bp, Probe Sequence
agatataagttgtactgcgtatgca

SEQ ID NO: 139514 - DNA, 25 bp, Probe Sequence
agataaagctgctaactcctgatct

SEQ ID NO: 139515 - DNA, 25 bp, Probe Sequence
agatagtgactaaagcagcttatgt

SEQ ID NO: 139516 - DNA, 25 bp, Probe Sequence
agataggtctccagaggatcttcag

SEQ ID NO: 139517 - DNA, 25 bp, Probe Sequence
agagaggataccaagaagattaaac

SEQ ID NO: 139518 - DNA, 25 bp, Probe Sequence
agagtccaaccaggagacataaacc

SEQ ID NO: 139519 - DNA, 25 bp, Probe Sequence
agagatccagataagagttaaaacc

SEQ ID NO: 139520 - DNA, 25 bp, Probe Sequence
agatgacacatgaaagcagctccaa

SEQ ID NO: 139521 - DNA, 25 bp, Probe Sequence
agatgaactgaccaggcactaccgt

SEQ ID NO: 139522 - DNA, 25 bp, Probe Sequence
agatgaacgaacagactcaggcgat

SEQ ID NO: 139523 - DNA, 25 bp, Probe Sequence
agatgaagctactttcccagggcta

SEQ ID NO: 139524 - DNA, 25 bp, Probe Sequence
agaaaaacattacccagatggaagg

SEQ ID NO: 139525 - DNA, 25 bp, Probe Sequence
agaaccaattcaaccggagcgacca

SEQ ID NO: 139526 - DNA, 25 bp, Probe Sequence
agatcattgatttcttcctgggggc

SEQ ID NO: 139527 - DNA, 25 bp, Probe Sequence
agatcactatgttgtagttggggcc

SEQ ID NO: 139528 - DNA, 25 bp, Probe Sequence
agaggcttgctatacttggtctgct

SEQ ID NO: 139529 - DNA, 25 bp, Probe Sequence
agagaggtggagaactgggatttga

SEQ ID NO: 139530 - DNA, 25 bp, Probe Sequence
agatgtagtaacactgtgatttatc

SEQ ID NO: 139531 - DNA, 25 bp, Probe Sequence
agatgtagtaacttcaatgactgaa

SEQ ID NO: 139532 - DNA, 25 bp, Probe Sequence
agaggcgtagtaatcaatcacatga

SEQ ID NO: 139533 - DNA, 25 bp, Probe Sequence
agatgtaggagtagcacaatgccaa

SEQ ID NO: 139534 - DNA, 25 bp, Probe Sequence
agagtcagaacttcaccatgtcacc

SEQ ID NO: 139535 - DNA, 25 bp, Probe Sequence
agatccagagacacacaagagcacc

SEQ ID NO: 139536 - DNA, 25 bp, Probe Sequence
agatgggcagtcggcatcaaggcac

SEQ ID NO: 139537 - DNA, 25 bp, Probe Sequence
agatggctgcaggagacatcggcga

SEQ ID NO: 139538 - DNA, 25 bp, Probe Sequence
agatagagaggacccgctgcgatac

SEQ ID NO: 139539 - DNA, 25 bp, Probe Sequence
agatcagaagggaccagctggagac

SEQ ID NO: 139540 - DNA, 25 bp, Probe Sequence
agatcgagaggagcatactacatga

SEQ ID NO: 139541 - DNA, 25 bp, Probe Sequence
agatcggctagggatactcactcac

SEQ ID NO: 139542 - DNA, 25 bp, Probe Sequence
agatgggactggttgactcttcaca

SEQ ID NO: 139543 - DNA, 25 bp, Probe Sequence
agatgactggctgttttctctgaat

SEQ ID NO: 139544 - DNA, 25 bp, Probe Sequence
agatgaatcctcaccatatgctgct

SEQ ID NO: 139545 - DNA, 25 bp, Probe Sequence
agatgaagcctatctcatcggccgc

SEQ ID NO: 139546 - DNA, 25 bp, Probe Sequence
agataaggcatttctttcccggagt

SEQ ID NO: 139547 - DNA, 25 bp, Probe Sequence
aaaaggcttcttattcgggtgtgag

SEQ ID NO: 139548 - DNA, 25 bp, Probe Sequence
aaaagggatgacacttggggaggag

SEQ ID NO: 139549 - DNA, 25 bp, Probe Sequence
agaaggggctcaggtcttaggggtg

SEQ ID NO: 139550 - DNA, 25 bp, Probe Sequence
caaagggggggaaatatggtatgag

SEQ ID NO: 139551 - DNA, 25 bp, Probe Sequence
aagagggggtggaggggtgtggcag

SEQ ID NO: 139552 - DNA, 25 bp, Probe Sequence
agaggagagggatgtcgggggggtg

SEQ ID NO: 139553 - DNA, 25 bp, Probe Sequence
agaggaagttgctctctgggagaag

SEQ ID NO: 139554 - DNA, 25 bp, Probe Sequence
agaggaagtttgtcgctgatggcat

SEQ ID NO: 139555 - DNA, 25 bp, Probe Sequence
agaggaagatctggcgtcacatggc

SEQ ID NO: 139556 - DNA, 25 bp, Probe Sequence
agagaatagtttctcgtgtcccctt

SEQ ID NO: 139557 - DNA, 25 bp, Probe Sequence
agagagggctttctcaggacctagt

SEQ ID NO: 139558 - DNA, 25 bp, Probe Sequence
agatcggtttgtaataacacctcga

SEQ ID NO: 139559 - DNA, 25 bp, Probe Sequence
agagctcgttttagtgaaccgtcag

SEQ ID NO: 139560 - DNA, 25 bp, Probe Sequence
agagtttatgatgagtgtccccctg

SEQ ID NO: 139561 - DNA, 25 bp, Probe Sequence
agatggttttggagagcaccccttt

SEQ ID NO: 139562 - DNA, 25 bp, Probe Sequence
agatgcgagccttggcaggcaaccc

SEQ ID NO: 139563 - DNA, 25 bp, Probe Sequence
agatgagaggtctgaagccttcctg

SEQ ID NO: 139564 - DNA, 25 bp, Probe Sequence
agaggggtcacaaactgctggcctc

SEQ ID NO: 139565 - DNA, 25 bp, Probe Sequence
agatggaaggcatttacgctgacat

SEQ ID NO: 139566 - DNA, 25 bp, Probe Sequence
agatggaagtgctcgatcgctactg

SEQ ID NO: 139567 - DNA, 25 bp, Probe Sequence
agaggacagtgcacaggctagcctg

SEQ ID NO: 139568 - DNA, 25 bp, Probe Sequence
agagtgccagtcagcagtcatgcac

SEQ ID NO: 139569 - DNA, 25 bp, Probe Sequence
agatctcgtgagactgactgatgca

SEQ ID NO: 139570 - DNA, 25 bp, Probe Sequence
agatctagcgataatgacgatgagg

SEQ ID NO: 139571 - DNA, 25 bp, Probe Sequence
agatctggagtcacagcgccaggtc

SEQ ID NO: 139572 - DNA, 25 bp, Probe Sequence
agatctggttgcagcatctgccgga

SEQ ID NO: 139573 - DNA, 25 bp, Probe Sequence
agatgaggctagcgattgccctgtg

SEQ ID NO: 139574 - DNA, 25 bp, Probe Sequence
agaggtgtcagtcttggcttttaaa

SEQ ID NO: 139575 - DNA, 25 bp, Probe Sequence
agaggatttggatttgtgcttttca

SEQ ID NO: 139576 - DNA, 25 bp, Probe Sequence
agatggattggtgggtgtattttgc

SEQ ID NO: 139577 - DNA, 25 bp, Probe Sequence
agatggagtggtggagccgcttggt

SEQ ID NO: 139578 - DNA, 25 bp, Probe Sequence
agagggcatgggcatccgcctggat

SEQ ID NO: 139579 - DNA, 25 bp, Probe Sequence
agatgaggagggatccagagggtgc

SEQ ID NO: 139580 - DNA, 25 bp, Probe Sequence
agatgaacaggggctcgaacgagtg

SEQ ID NO: 139581 - DNA, 25 bp, Probe Sequence
agatgagtgaggacgcctacacggt

SEQ ID NO: 139582 - DNA, 25 bp, Probe Sequence
agaggcaatgccaccatgatacagg

SEQ ID NO: 139583 - DNA, 25 bp, Probe Sequence
agatggagacctgctgggatcagtg

SEQ ID NO: 139584 - DNA, 25 bp, Probe Sequence
agatgagaaggcggcggttgcaggc

SEQ ID NO: 139585 - DNA, 25 bp, Probe Sequence
agatggaggcatcatgtctgttagg

SEQ ID NO: 139586 - DNA, 25 bp, Probe Sequence
agaggcaggcatagaggcttctccg

SEQ ID NO: 139587 - DNA, 25 bp, Probe Sequence
agaggaggtgatctgttctccctcc

SEQ ID NO: 139588 - DNA, 25 bp, Probe Sequence
agagaactggaggagttccttgatc

SEQ ID NO: 139589 - DNA, 25 bp, Probe Sequence
agagatgcagtgccaggaaccctta

SEQ ID NO: 139590 - DNA, 25 bp, Probe Sequence
agagaattctaggcacacctcttcc

SEQ ID NO: 139591 - DNA, 25 bp, Probe Sequence
agatgaatgtaccatccctccatat

SEQ ID NO: 139592 - DNA, 25 bp, Probe Sequence
agatgaatgagtacaccgtgcacct

SEQ ID NO: 139593 - DNA, 25 bp, Probe Sequence
agatgcatcatgtcttctgctttca

SEQ ID NO: 139594 - DNA, 25 bp, Probe Sequence
agatgcatgctttgttctgtgcata

SEQ ID NO: 139595 - DNA, 25 bp, Probe Sequence
agatcatcagtactgttgtctcatg

SEQ ID NO: 139596 - DNA, 25 bp, Probe Sequence
agatgccagccaagtgtgatcctgc

SEQ ID NO: 139597 - DNA, 25 bp, Probe Sequence
agatcgcagcgagggagctgctctg

SEQ ID NO: 139598 - DNA, 25 bp, Probe Sequence
agatcacagagggaggagctctgag

SEQ ID NO: 139599 - DNA, 25 bp, Probe Sequence
agatcaaggctgcagtgagttatga

SEQ ID NO: 139600 - DNA, 25 bp, Probe Sequence
agatcctggatggaggagtaagatg

SEQ ID NO: 139601 - DNA, 25 bp, Probe Sequence
agatgcttggcaagaaagtgacaga

SEQ ID NO: 139602 - DNA, 25 bp, Probe Sequence
agagcatggatggcaaatggctaca

SEQ ID NO: 139603 - DNA, 25 bp, Probe Sequence
agatggtgtggccgatgtgtctatt

SEQ ID NO: 139604 - DNA, 25 bp, Probe Sequence
agatggtggcgatgatagtatttcc

SEQ ID NO: 139605 - DNA, 25 bp, Probe Sequence
agatggtgccagaattgaggatttg

SEQ ID NO: 139606 - DNA, 25 bp, Probe Sequence
agatcactgccagtttgtggattca

SEQ ID NO: 139607 - DNA, 25 bp, Probe Sequence
agatcaccctctacgggagaaccaa

SEQ ID NO: 139608 - DNA, 25 bp, Probe Sequence
agaccctggcttgaggagcagccgc

SEQ ID NO: 139609 - DNA, 25 bp, Probe Sequence
agatccgggattcaggagctctcag

SEQ ID NO: 139610 - DNA, 25 bp, Probe Sequence
agatcagccggctgctagacagtct

SEQ ID NO: 139611 - DNA, 25 bp, Probe Sequence
agatgcatgccagagacttcacagt

SEQ ID NO: 139612 - DNA, 25 bp, Probe Sequence
agatgcagtaattatgttccagatt

SEQ ID NO: 139613 - DNA, 25 bp, Probe Sequence
agagctgtcagtttgtagccgtcag

SEQ ID NO: 139614 - DNA, 25 bp, Probe Sequence
agaggctgagttagtcccttagaaa

SEQ ID NO: 139615 - DNA, 25 bp, Probe Sequence
agagggagttgtacgatcttgccaa

SEQ ID NO: 139616 - DNA, 25 bp, Probe Sequence
agagtgccgtatcatcagacttacc

SEQ ID NO: 139617 - DNA, 25 bp, Probe Sequence
agatgtacgtgacaatgagactgac

SEQ ID NO: 139618 - DNA, 25 bp, Probe Sequence
agagtacttggacatgagcagctaa

SEQ ID NO: 139619 - DNA, 25 bp, Probe Sequence
agagtcctcatatgtgccacaggaa

SEQ ID NO: 139620 - DNA, 25 bp, Probe Sequence
agatgacctctatgtctcagatgca

SEQ ID NO: 139621 - DNA, 25 bp, Probe Sequence
agatgcatccatgtttccagtgttt

SEQ ID NO: 139622 - DNA, 25 bp, Probe Sequence
agatgcatgctcgagatttcactgt

SEQ ID NO: 139623 - DNA, 25 bp, Probe Sequence
agatcatctaagatccatgctgatt

SEQ ID NO: 139624 - DNA, 25 bp, Probe Sequence
agatctataatgttcactgttcaaa

SEQ ID NO: 139625 - DNA, 25 bp, Probe Sequence
agatctaagagttacctggctacag

SEQ ID NO: 139626 - DNA, 25 bp, Probe Sequence
agactaatgaataacctggctgggc

SEQ ID NO: 139627 - DNA, 25 bp, Probe Sequence
agagtaacacatatcctgcctttac

SEQ ID NO: 139628 - DNA, 25 bp, Probe Sequence
agagttccaagcacctacattaatt

SEQ ID NO: 139629 - DNA, 25 bp, Probe Sequence
agagttccatgaacaccataccttt

SEQ ID NO: 139630 - DNA, 25 bp, Probe Sequence
agatgtatcttgtcaatactacctt

SEQ ID NO: 139631 - DNA, 25 bp, Probe Sequence
agatgttggtccaaacaccctgtct

SEQ ID NO: 139632 - DNA, 25 bp, Probe Sequence
agagtgctttagggacccactgttt

SEQ ID NO: 139633 - DNA, 25 bp, Probe Sequence
agagtgcatttcctggagacggcag

SEQ ID NO: 139634 - DNA, 25 bp, Probe Sequence
agatgtctactgggtgagacgaatg

SEQ ID NO: 139635 - DNA, 25 bp, Probe Sequence
agaggccactggataatgctgagat

SEQ ID NO: 139636 - DNA, 25 bp, Probe Sequence
agaggctcaaccaatataggatata

SEQ ID NO: 139637 - DNA, 25 bp, Probe Sequence
agagttgcaaatatcacatgtgaat

SEQ ID NO: 139638 - DNA, 25 bp, Probe Sequence
agatgattgatcgtttccaggacaa

SEQ ID NO: 139639 - DNA, 25 bp, Probe Sequence
agatctatatctggaaggggcgaaa

SEQ ID NO: 139640 - DNA, 25 bp, Probe Sequence
agatgcatattaggaatgtgaagcc

SEQ ID NO: 139641 - DNA, 25 bp, Probe Sequence
agagcattgtcagggctgtgggcat

SEQ ID NO: 139642 - DNA, 25 bp, Probe Sequence
agatgttggcgaggctgtggagaaa

SEQ ID NO: 139643 - DNA, 25 bp, Probe Sequence
agatcacacggcggcttggagaaac

SEQ ID NO: 139644 - DNA, 25 bp, Probe Sequence
agaacagggcccctgggattagcca

SEQ ID NO: 139645 - DNA, 25 bp, Probe Sequence
agagaaggggcctgtgttctcagcc

SEQ ID NO: 139646 - DNA, 25 bp, Probe Sequence
agaataagtgggagcttcggcgcca

SEQ ID NO: 139647 - DNA, 25 bp, Probe Sequence
agaaaagtggcaccagttggcccct

SEQ ID NO: 139648 - DNA, 25 bp, Probe Sequence
agaactccaggagagggtctccccg

SEQ ID NO: 139649 - DNA, 25 bp, Probe Sequence
agatccccaggataagagaccactt

SEQ ID NO: 139650 - DNA, 25 bp, Probe Sequence
agatccgcctaaccaatgtggccgt

SEQ ID NO: 139651 - DNA, 25 bp, Probe Sequence
agagcctcctaaaattctagccatt

SEQ ID NO: 139652 - DNA, 25 bp, Probe Sequence
acatccctctaaaagtaaactactg

SEQ ID NO: 139653 - DNA, 25 bp, Probe Sequence
agatcccccagaaaagaaagctaca

SEQ ID NO: 139654 - DNA, 25 bp, Probe Sequence
agatccctccaagaagagctacgta

SEQ ID NO: 139655 - DNA, 25 bp, Probe Sequence
agatgcagcctggcaagcagaagaa

SEQ ID NO: 139656 - DNA, 25 bp, Probe Sequence
agatcagcatcagcgtcatattgat

SEQ ID NO: 139657 - DNA, 25 bp, Probe Sequence
agatcatgcagcatcgcttctttgc

SEQ ID NO: 139658 - DNA, 25 bp, Probe Sequence
agatgatggttccattgctcttggc

SEQ ID NO: 139659 - DNA, 25 bp, Probe Sequence
agatgccttacgtctgatcttgatg

SEQ ID NO: 139660 - DNA, 25 bp, Probe Sequence
agatgtccaaccctgttttgactca

SEQ ID NO: 139661 - DNA, 25 bp, Probe Sequence
agatctcgaaccctgtctagaagga

SEQ ID NO: 139662 - DNA, 25 bp, Probe Sequence
agatcccagactggttcttgaacag

SEQ ID NO: 139663 - DNA, 25 bp, Probe Sequence
agatgtcagagacctgtttgtggac

SEQ ID NO: 139664 - DNA, 25 bp, Probe Sequence
agatgctcagtccctggtatgatga

SEQ ID NO: 139665 - DNA, 25 bp, Probe Sequence
agatgccactgcttttcttagcact

SEQ ID NO: 139666 - DNA, 25 bp, Probe Sequence
agatgtaatgatgattctattccat

SEQ ID NO: 139667 - DNA, 25 bp, Probe Sequence
agatgttctgcagattattccttta

SEQ ID NO: 139668 - DNA, 25 bp, Probe Sequence
agatgattctgggtctttcccttga

SEQ ID NO: 139669 - DNA, 25 bp, Probe Sequence
agatgattctgggtctttcccttga

SEQ ID NO: 139670 - DNA, 25 bp, Probe Sequence
agatgaagggtgactactaccgcta

SEQ ID NO: 139671 - DNA, 25 bp, Probe Sequence
agagtggggagtgagcttgctagct

SEQ ID NO: 139672 - DNA, 25 bp, Probe Sequence
agaggtgggacagtcacttcctcct

SEQ ID NO: 139673 - DNA, 25 bp, Probe Sequence
agatggtggctgacaccgttcgtca

SEQ ID NO: 139674 - DNA, 25 bp, Probe Sequence
agatggtggacaaccgtggcttcat

SEQ ID NO: 139675 - DNA, 25 bp, Probe Sequence
agatctgtggatgacctcagcagct

SEQ ID NO: 139676 - DNA, 25 bp, Probe Sequence
agatgctcaagtgaggctgcaggcg

SEQ ID NO: 139677 - DNA, 25 bp, Probe Sequence
agagtagcacatgcagcctggtctg

SEQ ID NO: 139678 - DNA, 25 bp, Probe Sequence
agagtcccggacttgtctagaaatg

SEQ ID NO: 139679 - DNA, 25 bp, Probe Sequence
agatgtcccaggcactttgtttata

SEQ ID NO: 139680 - DNA, 25 bp, Probe Sequence
agatgacactggtgacttgaccctt

SEQ ID NO: 139681 - DNA, 25 bp, Probe Sequence
acagacctagggacttcctacttgg

SEQ ID NO: 139682 - DNA, 25 bp, Probe Sequence
aaaccattggtgctcttaccttggg

SEQ ID NO: 139683 - DNA, 25 bp, Probe Sequence
agatcccattttcatgttactttgt

SEQ ID NO: 139684 - DNA, 25 bp, Probe Sequence
agagccagttaacatttagggagtt

SEQ ID NO: 139685 - DNA, 25 bp, Probe Sequence
agaggagtttgacatgttagggcat

SEQ ID NO: 139686 - DNA, 25 bp, Probe Sequence
agatgcgagttgagccggtggggat

SEQ ID NO: 139687 - DNA, 25 bp, Probe Sequence
agaggggtggggggaggggatgcat

SEQ ID NO: 139688 - DNA, 25 bp, Probe Sequence
agaggtggagggcggatgaggtgta

SEQ ID NO: 139689 - DNA, 25 bp, Probe Sequence
agaggtggaatccgaagtcctggga

SEQ ID NO: 139690 - DNA, 25 bp, Probe Sequence
agaggagtttctcaggaccttggct

SEQ ID NO: 139691 - DNA, 25 bp, Probe Sequence
agatgggattccctatggacgcctg

SEQ ID NO: 139692 - DNA, 25 bp, Probe Sequence
agaggagattcctgtggtcatcgct

SEQ ID NO: 139693 - DNA, 25 bp, Probe Sequence
agaggagattcctgtggtcatcgct

SEQ ID NO: 139694 - DNA, 25 bp, Probe Sequence
agaggatctctactggtttctctgt

SEQ ID NO: 139695 - DNA, 25 bp, Probe Sequence
agaggactgcagctgtctaggtctg

SEQ ID NO: 139696 - DNA, 25 bp, Probe Sequence
agatgtggctggtcatggaaggggc

SEQ ID NO: 139697 - DNA, 25 bp, Probe Sequence
agatgtcttgcttggaaagtggacc

SEQ ID NO: 139698 - DNA, 25 bp, Probe Sequence
agatgatttgtatcttagacgacct

SEQ ID NO: 139699 - DNA, 25 bp, Probe Sequence
agatgtttttcagttatctccccat

SEQ ID NO: 139700 - DNA, 25 bp, Probe Sequence
agatggtttcaacttctcatcccaa

SEQ ID NO: 139701 - DNA, 25 bp, Probe Sequence
agatgatgtttccagattacactcc

SEQ ID NO: 139702 - DNA, 25 bp, Probe Sequence
agagagctcctggaatcctacatcg

SEQ ID NO: 139703 - DNA, 25 bp, Probe Sequence
agaggctatctaattccacactctg

SEQ ID NO: 139704 - DNA, 25 bp, Probe Sequence
agagtttcattgagtccagctgcag

SEQ ID NO: 139705 - DNA, 25 bp, Probe Sequence
agagattattctcttcccacagata

SEQ ID NO: 139706 - DNA, 25 bp, Probe Sequence
agagattattctcttcccacagata

SEQ ID NO: 139707 - DNA, 25 bp, Probe Sequence
agagtatttcggcccgtatcgaact

SEQ ID NO: 139708 - DNA, 25 bp, Probe Sequence
agagttcttccctggaatccagcac

SEQ ID NO: 139709 - DNA, 25 bp, Probe Sequence
agaggtgacccctgtaataccatct

SEQ ID NO: 139710 - DNA, 25 bp, Probe Sequence
agagtaggccctctgaaaacctctc

SEQ ID NO: 139711 - DNA, 25 bp, Probe Sequence
agaggaagctttcttcaacaccatc

SEQ ID NO: 139712 - DNA, 25 bp, Probe Sequence
agagaggtttgtcctaacctccatc

SEQ ID NO: 139713 - DNA, 25 bp, Probe Sequence
agagatcgtttgatccaaccctctt

SEQ ID NO: 139714 - DNA, 25 bp, Probe Sequence
agatctggattttacccactccatc

SEQ ID NO: 139715 - DNA, 25 bp, Probe Sequence
agatgcaaatttgacaggcctctct

SEQ ID NO: 139716 - DNA, 25 bp, Probe Sequence
agatgaaattatggtttgcactgtc

SEQ ID NO: 139717 - DNA, 25 bp, Probe Sequence
agatgagaatcctcatcttcctgcc

SEQ ID NO: 139718 - DNA, 25 bp, Probe Sequence
agaggagtcgctacacttaccttga

SEQ ID NO: 139719 - DNA, 25 bp, Probe Sequence
agagaagacgtacctctacctgtgc

SEQ ID NO: 139720 - DNA, 25 bp, Probe Sequence
agagcaagggtatctatacttagat

SEQ ID NO: 139721 - DNA, 25 bp, Probe Sequence
agagagtgggttttagtgttggtca

SEQ ID NO: 139722 - DNA, 25 bp, Probe Sequence
agatgagggtttccggggctagtga

SEQ ID NO: 139723 - DNA, 25 bp, Probe Sequence
agagatggggtttcgccaggttggc

SEQ ID NO: 139724 - DNA, 25 bp, Probe Sequence
agagtggaagggctggctggatcgg

SEQ ID NO: 139725 - DNA, 25 bp, Probe Sequence
agaggcggatttggtcgtggacgtg

SEQ ID NO: 139726 - DNA, 25 bp, Probe Sequence
agaggcggatttggtcgtggacgtg

SEQ ID NO: 139727 - DNA, 25 bp, Probe Sequence
agaggaggattcagacgagtgtcgc

SEQ ID NO: 139728 - DNA, 25 bp, Probe Sequence
agaggaggcctaaggcagagccccc

SEQ ID NO: 139729 - DNA, 25 bp, Probe Sequence
agcactgaagataagggaagccccc

SEQ ID NO: 139730 - DNA, 25 bp, Probe Sequence
agactagaatcaaagtacgccccgc

SEQ ID NO: 139731 - DNA, 25 bp, Probe Sequence
agaaaaattgacctacagccacctt

SEQ ID NO: 139732 - DNA, 25 bp, Probe Sequence
agaaggaatttctttccatccctgt

SEQ ID NO: 139733 - DNA, 25 bp, Probe Sequence
agagggagtgccctaatccaacctg

SEQ ID NO: 139734 - DNA, 25 bp, Probe Sequence
agaagaggtccgcaaggcaaggggg

SEQ ID NO: 139735 - DNA, 25 bp, Probe Sequence
agaaatcccgtgccgaggaggcggg

SEQ ID NO: 139736 - DNA, 25 bp, Probe Sequence
agatcgactccctgtgggagatcag

SEQ ID NO: 139737 - DNA, 25 bp, Probe Sequence
agatctcgaccctggggagcagaat

SEQ ID NO: 139738 - DNA, 25 bp, Probe Sequence
agatctggacagaatcgccggacag

SEQ ID NO: 139739 - DNA, 25 bp, Probe Sequence
agatctgtgcaaaagcagtgagaga

SEQ ID NO: 139740 - DNA, 25 bp, Probe Sequence
agatcgtgcaaggggtgcagctccg

SEQ ID NO: 139741 - DNA, 25 bp, Probe Sequence
agatgcagtgcaattccagtggtct

SEQ ID NO: 139742 - DNA, 25 bp, Probe Sequence
agatgcccaatattcaaagctgcta

SEQ ID NO: 139743 - DNA, 25 bp, Probe Sequence
agatgcccaaatccttagatctggc

SEQ ID NO: 139744 - DNA, 25 bp, Probe Sequence
caagatctgcggcaaggcgttttcc

SEQ ID NO: 139745 - DNA, 25 bp, Probe Sequence
agatgggtagtgctttgtgctggtt

SEQ ID NO: 139746 - DNA, 25 bp, Probe Sequence
agatgtggtttgactatttctgtat

SEQ ID NO: 139747 - DNA, 25 bp, Probe Sequence
agatctggatcccgtctgtatttat

SEQ ID NO: 139748 - DNA, 25 bp, Probe Sequence
agatgcaggatccactaattttttg

SEQ ID NO: 139749 - DNA, 25 bp, Probe Sequence
agatggagtcacatggatttttggt

SEQ ID NO: 139750 - DNA, 25 bp, Probe Sequence
agagggctaaatccatgaagtttgt

SEQ ID NO: 139751 - DNA, 25 bp, Probe Sequence
agaggagctgacagctctggagtaa

SEQ ID NO: 139752 - DNA, 25 bp, Probe Sequence
agagctggcttcaagcctggcttag

SEQ ID NO: 139753 - DNA, 25 bp, Probe Sequence
agacgtgctccaacaatgggctggt

SEQ ID NO: 139754 - DNA, 25 bp, Probe Sequence
agatcctgcccaacaaggtagaccc

SEQ ID NO: 139755 - DNA, 25 bp, Probe Sequence
agatcgagaccatcctggctaacac

SEQ ID NO: 139756 - DNA, 25 bp, Probe Sequence
agatcgagaccatcctggctaacac

SEQ ID NO: 139757 - DNA, 25 bp, Probe Sequence
agatcgagaccatcctggctaacat

SEQ ID NO: 139758 - DNA, 25 bp, Probe Sequence
agatcgagaccatcctggctaacat

SEQ ID NO: 139759 - DNA, 25 bp, Probe Sequence
agatgggacgcataatcattacctt

SEQ ID NO: 139760 - DNA, 25 bp, Probe Sequence
agatggggagcttttcttacctatt

SEQ ID NO: 139761 - DNA, 25 bp, Probe Sequence
agaggcaagagttgttcctgccctt

SEQ ID NO: 139762 - DNA, 25 bp, Probe Sequence
agaggcaagagttgttcctgccctt

SEQ ID NO: 139763 - DNA, 25 bp, Probe Sequence
agatggaagttgttcttcgtcactt

SEQ ID NO: 139764 - DNA, 25 bp, Probe Sequence
agagaaagttattcgctcgattttt

SEQ ID NO: 139765 - DNA, 25 bp, Probe Sequence
agagataactatataacagcttttt

SEQ ID NO: 139766 - DNA, 25 bp, Probe Sequence
agagaccacattaattccctttgct

SEQ ID NO: 139767 - DNA, 25 bp, Probe Sequence
agatgaggtattaatcccctccatt

SEQ ID NO: 139768 - DNA, 25 bp, Probe Sequence
agaagcggcttgaagcagggctcca

SEQ ID NO: 139769 - DNA, 25 bp, Probe Sequence
agcaacgtcttgaacaggcgctgat

SEQ ID NO: 139770 - DNA, 25 bp, Probe Sequence
agaacttttagggttgtgactggct

SEQ ID NO: 139771 - DNA, 25 bp, Probe Sequence
agacctgtttagggctaggcttggc

SEQ ID NO: 139772 - DNA, 25 bp, Probe Sequence
agagcttttttcactgatggttgtc

SEQ ID NO: 139773 - DNA, 25 bp, Probe Sequence
agatgctattgtttccctatggata

SEQ ID NO: 139774 - DNA, 25 bp, Probe Sequence
agatgtatatatgtcctctgttgta

SEQ ID NO: 139775 - DNA, 25 bp, Probe Sequence
agatgcttgatagattatcttttcc

SEQ ID NO: 139776 - DNA, 25 bp, Probe Sequence
agatgtattccatagacttaatccc

SEQ ID NO: 139777 - DNA, 25 bp, Probe Sequence
agagtatcgccatgaagttcgtccc

SEQ ID NO: 139778 - DNA, 25 bp, Probe Sequence
agagaaggccggtgaggagctccct

SEQ ID NO: 139779 - DNA, 25 bp, Probe Sequence
agaggaaccggtgtgcgatgctctt

SEQ ID NO: 139780 - DNA, 25 bp, Probe Sequence
agaggaaaaggtataggcttgcctt

SEQ ID NO: 139781 - DNA, 25 bp, Probe Sequence
agaggaaagaggacactgggctaca

SEQ ID NO: 139782 - DNA, 25 bp, Probe Sequence
agagaataaggggcctgggcgaggt

SEQ ID NO: 139783 - DNA, 25 bp, Probe Sequence
agaaaccaaaaggctgggcgtagtg

SEQ ID NO: 139784 - DNA, 25 bp, Probe Sequence
aaatcactcgaatccgggagacaga

SEQ ID NO: 139785 - DNA, 25 bp, Probe Sequence
agagttcctgaatcgggagaacatt

SEQ ID NO: 139786 - DNA, 25 bp, Probe Sequence
agaggtacttgaactggcaggaaat

SEQ ID NO: 139787 - DNA, 25 bp, Probe Sequence
agatccccttgtggctactggaaat

SEQ ID NO: 139788 - DNA, 25 bp, Probe Sequence
agatcccctctgtagagatcatgcg

SEQ ID NO: 139789 - DNA, 25 bp, Probe Sequence
agatgccacctctaaggtagcgctg

SEQ ID NO: 139790 - DNA, 25 bp, Probe Sequence
agagctgaccctcaaatacggagcg

SEQ ID NO: 139791 - DNA, 25 bp, Probe Sequence
agagaactccagagaatataggact

SEQ ID NO: 139792 - DNA, 25 bp, Probe Sequence
agacagacctagggacttcctactt

SEQ ID NO: 139793 - DNA, 25 bp, Probe Sequence
agaggccctagggacgtattcctct

SEQ ID NO: 139794 - DNA, 25 bp, Probe Sequence
agaggccattagtgaggagcttccc

SEQ ID NO: 139795 - DNA, 25 bp, Probe Sequence
agaggccattagtgaggagcttccc

SEQ ID NO: 139796 - DNA, 25 bp, Probe Sequence
agagcatgctcatttgctggcggac

SEQ ID NO: 139797 - DNA, 25 bp, Probe Sequence
agacttctctgtagatcgctgagcg

SEQ ID NO: 139798 - DNA, 25 bp, Probe Sequence
agactaccagtggatcggcctgaac

SEQ ID NO: 139799 - DNA, 25 bp, Probe Sequence
agacctgccagggaataccaagagt

SEQ ID NO: 139800 - DNA, 25 bp, Probe Sequence
agacctgccagggaataccaagagt

SEQ ID NO: 139801 - DNA, 25 bp, Probe Sequence
agagccttaggcaaacctcactagg

SEQ ID NO: 139802 - DNA, 25 bp, Probe Sequence
agagtgctgaagccataatccccaa

SEQ ID NO: 139803 - DNA, 25 bp, Probe Sequence
agagtgctgaagccataatccccaa

SEQ ID NO: 139804 - DNA, 25 bp, Probe Sequence
agagagctcaaagacagcgcccatg

SEQ ID NO: 139805 - DNA, 25 bp, Probe Sequence
agagagctcaaagacagcgcccatg

SEQ ID NO: 139806 - DNA, 25 bp, Probe Sequence
agaggccaagatgaaggctcctccc

SEQ ID NO: 139807 - DNA, 25 bp, Probe Sequence
agagaggaatgtccaggtcatcttc

SEQ ID NO: 139808 - DNA, 25 bp, Probe Sequence
agaggctggttttggcatctctgtc

SEQ ID NO: 139809 - DNA, 25 bp, Probe Sequence
agaggctggttttggcatctctgtc

SEQ ID NO: 139810 - DNA, 25 bp, Probe Sequence
agatgacaggcgtcttggctttgtt

SEQ ID NO: 139811 - DNA, 25 bp, Probe Sequence
agagcaagtcactctcgattggttc

SEQ ID NO: 139812 - DNA, 25 bp, Probe Sequence
agatgccttcctctcagaggtgttc

SEQ ID NO: 139813 - DNA, 25 bp, Probe Sequence
agaggcctcctttcaaggagttcac

SEQ ID NO: 139814 - DNA, 25 bp, Probe Sequence
agatgggttctttgcatgtgggttc

SEQ ID NO: 139815 - DNA, 25 bp, Probe Sequence
agatgaggtacatacactgccgctt

SEQ ID NO: 139816 - DNA, 25 bp, Probe Sequence
agatgatggtagtgacagagactct

SEQ ID NO: 139817 - DNA, 25 bp, Probe Sequence
agatggggcagatggctcagccttg

SEQ ID NO: 139818 - DNA, 25 bp, Probe Sequence
agagggagtagggctcgccatgttt

SEQ ID NO: 139819 - DNA, 25 bp, Probe Sequence
agaggtcagtcctagtcggagctta

SEQ ID NO: 139820 - DNA, 25 bp, Probe Sequence
agcgaccccatcgagtgggcaatgt

SEQ ID NO: 139821 - DNA, 25 bp, Probe Sequence
agatgacctgcccacagtggagctt

SEQ ID NO: 139822 - DNA, 25 bp, Probe Sequence
agatgacccccaggtattgtctttt

SEQ ID NO: 139823 - DNA, 25 bp, Probe Sequence
agatgtccacgcctgttgaagtttt

SEQ ID NO: 139824 - DNA, 25 bp, Probe Sequence
agatgtccctctaaatgatatgttt

SEQ ID NO: 139825 - DNA, 25 bp, Probe Sequence
agagctcccattgtacagcatgcta

SEQ ID NO: 139826 - DNA, 25 bp, Probe Sequence
agagcatgttctcgccaacaatgat

SEQ ID NO: 139827 - DNA, 25 bp, Probe Sequence
agatgagtatgcctgccgtgtgaac

SEQ ID NO: 139828 - DNA, 25 bp, Probe Sequence
agatggctatgaaccctgtgtaaat

SEQ ID NO: 139829 - DNA, 25 bp, Probe Sequence
agatggttgtaagctattatagtat

SEQ ID NO: 139830 - DNA, 25 bp, Probe Sequence
agatgtaaacaagtcctttcagtta

SEQ ID NO: 139831 - DNA, 25 bp, Probe Sequence
agatgtagggctggtctcaaatctt

SEQ ID NO: 139832 - DNA, 25 bp, Probe Sequence
agatgctgggcgatctcatcaaggt

SEQ ID NO: 139833 - DNA, 25 bp, Probe Sequence
agagcttcctgtttctaagtggcct

SEQ ID NO: 139834 - DNA, 25 bp, Probe Sequence
agaggaccagtctctgagcttggct

SEQ ID NO: 139835 - DNA, 25 bp, Probe Sequence
agaggaagagtctgcctatgtggca

SEQ ID NO: 139836 - DNA, 25 bp, Probe Sequence
agaggacggatctagctcctgtata

SEQ ID NO: 139837 - DNA, 25 bp, Probe Sequence
agagagccggattcaccgtttggct

SEQ ID NO: 139838 - DNA, 25 bp, Probe Sequence
agagagccaactttgggttcctgct

SEQ ID NO: 139839 - DNA, 25 bp, Probe Sequence
agagtccattatttggtgttcacca

SEQ ID NO: 139840 - DNA, 25 bp, Probe Sequence
agatgatcacatttatggagattat

SEQ ID NO: 139841 - DNA, 25 bp, Probe Sequence
agatgatcactttgcaaaattatgc

SEQ ID NO: 139842 - DNA, 25 bp, Probe Sequence
agatgtcacatctgctaaagcactg

SEQ ID NO: 139843 - DNA, 25 bp, Probe Sequence
agaggcacattgcatagaagccatt

SEQ ID NO: 139844 - DNA, 25 bp, Probe Sequence
agaggctgatgtcaagcaccacacc

SEQ ID NO: 139845 - DNA, 25 bp, Probe Sequence
agagggtgccagacagcacccaccc

SEQ ID NO: 139846 - DNA, 25 bp, Probe Sequence
agagtggggatgggcgcaccatcgt

SEQ ID NO: 139847 - DNA, 25 bp, Probe Sequence
agagggacgacggcgtctttgtgca

SEQ ID NO: 139848 - DNA, 25 bp, Probe Sequence
agagggcaaaccgtgcattattata

SEQ ID NO: 139849 - DNA, 25 bp, Probe Sequence
agagaggcaaacgccaggtgcttat

SEQ ID NO: 139850 - DNA, 25 bp, Probe Sequence
agatggggataccaggatggtcctg

SEQ ID NO: 139851 - DNA, 25 bp, Probe Sequence
agatgttgtgaaggtcctgggcctg

SEQ ID NO: 139852 - DNA, 25 bp, Probe Sequence
agaggctgctggagatcgtgggccg

SEQ ID NO: 139853 - DNA, 25 bp, Probe Sequence
agatgagcaggtcaggctgtggccc

SEQ ID NO: 139854 - DNA, 25 bp, Probe Sequence
agaggcaagatgccccttgacctct

SEQ ID NO: 139855 - DNA, 25 bp, Probe Sequence
agaggccaaggaatttggcctgtaa

SEQ ID NO: 139856 - DNA, 25 bp, Probe Sequence
agaggacaggaattttgggagttca

SEQ ID NO: 139857 - DNA, 25 bp, Probe Sequence
agaggtcaggcagagaatgggggtc

SEQ ID NO: 139858 - DNA, 25 bp, Probe Sequence
agaggagccgtggataatggaaggt

SEQ ID NO: 139859 - DNA, 25 bp, Probe Sequence
agaggagctgggttgaagcggactg

SEQ ID NO: 139860 - DNA, 25 bp, Probe Sequence
agaggagtggatctgtagaagtctg

SEQ ID NO: 139861 - DNA, 25 bp, Probe Sequence
agagagagcggaaagtgagtatgcg

SEQ ID NO: 139862 - DNA, 25 bp, Probe Sequence
agaggagccggcatgggttggcagg

SEQ ID NO: 139863 - DNA, 25 bp, Probe Sequence
agaggtgttgagcctggactgtggg

SEQ ID NO: 139864 - DNA, 25 bp, Probe Sequence
agaggagtgggtgctgacagtggcg

SEQ ID NO: 139865 - DNA, 25 bp, Probe Sequence
agaggcagatgtggtcgtggacgtg

SEQ ID NO: 139866 - DNA, 25 bp, Probe Sequence
agaggtgaggcctgttagcttgtgg

SEQ ID NO: 139867 - DNA, 25 bp, Probe Sequence
agaccttgtgcctctaagcagtgga

SEQ ID NO: 139868 - DNA, 25 bp, Probe Sequence
agaccgtccccttcaagagtggaca

SEQ ID NO: 139869 - DNA, 25 bp, Probe Sequence
agagacgtcaccctagaaaacaggc

SEQ ID NO: 139870 - DNA, 25 bp, Probe Sequence
agagggaatcccatcaaagtcagcc

SEQ ID NO: 139871 - DNA, 25 bp, Probe Sequence
agagacagaatcccaataatagtcc

SEQ ID NO: 139872 - DNA, 25 bp, Probe Sequence
agagagaaaccctacaaatgtgaag

SEQ ID NO: 139873 - DNA, 25 bp, Probe Sequence
agagcttaaccttatgaccatgtgg

SEQ ID NO: 139874 - DNA, 25 bp, Probe Sequence
gggtacaacatgacaagctgtgagt

SEQ ID NO: 139875 - DNA, 25 bp, Probe Sequence
agagtgtgggcctgagtggctgctt

SEQ ID NO: 139876 - DNA, 25 bp, Probe Sequence
agatggtgggcagcatggtgggcgt

SEQ ID NO: 139877 - DNA, 25 bp, Probe Sequence
agatgggccgcagatcggtggcctt

SEQ ID NO: 139878 - DNA, 25 bp, Probe Sequence
agatggccaccaaactgagcggtct

SEQ ID NO: 139879 - DNA, 25 bp, Probe Sequence
agagggcagccatagtgtgccgact

SEQ ID NO: 139880 - DNA, 25 bp, Probe Sequence
agaggaggagcaggaggccctcatc

SEQ ID NO: 139881 - DNA, 25 bp, Probe Sequence
agatggatgaggacgggcttcctct

SEQ ID NO: 139882 - DNA, 25 bp, Probe Sequence
agatgaatgggcactgcctgccctt

SEQ ID NO: 139883 - DNA, 25 bp, Probe Sequence
agatgaatgggcactgcctgccctt

SEQ ID NO: 139884 - DNA, 25 bp, Probe Sequence
agagaacatagatctgactgcctta

SEQ ID NO: 139885 - DNA, 25 bp, Probe Sequence
agatgaaatagaccagctctcttca

SEQ ID NO: 139886 - DNA, 25 bp, Probe Sequence
agatgaaaggcaggcctatttcatc

SEQ ID NO: 139887 - DNA, 25 bp, Probe Sequence
agacataatgtaactggatttcagc

SEQ ID NO: 139888 - DNA, 25 bp, Probe Sequence
agactaagtttgagacttgaccagc

SEQ ID NO: 139889 - DNA, 25 bp, Probe Sequence
agaccaaattctacgcagctggcct

SEQ ID NO: 139890 - DNA, 25 bp, Probe Sequence
agagcacaaatccatcatctgccca

SEQ ID NO: 139891 - DNA, 25 bp, Probe Sequence
agactgatgagcacatctctctgcc

SEQ ID NO: 139892 - DNA, 25 bp, Probe Sequence
agagcatgaggagcgctcctcctgt

SEQ ID NO: 139893 - DNA, 25 bp, Probe Sequence
agatgatgggtggccatgccatccg

SEQ ID NO: 139894 - DNA, 25 bp, Probe Sequence
agatgacggaggccatgccatctgc

SEQ ID NO: 139895 - DNA, 25 bp, Probe Sequence
agatggcggaggctgtgccagggga

SEQ ID NO: 139896 - DNA, 25 bp, Probe Sequence
agagagggaggccagtgtcagggtc

SEQ ID NO: 139897 - DNA, 25 bp, Probe Sequence
agatgatgaggatgacgatgtcgat

SEQ ID NO: 139898 - DNA, 25 bp, Probe Sequence
agatggaggctgtaccatatggtac

SEQ ID NO: 139899 - DNA, 25 bp, Probe Sequence
agatggcatggttgctctattggac

SEQ ID NO: 139900 - DNA, 25 bp, Probe Sequence
agatgtgtggtactcaattgaagat

SEQ ID NO: 139901 - DNA, 25 bp, Probe Sequence
agagatgatggttatgcaattaagg

SEQ ID NO: 139902 - DNA, 25 bp, Probe Sequence
agatgatggttatgcaattaaggaa

SEQ ID NO: 139903 - DNA, 25 bp, Probe Sequence
agatgtggtgtttctctctcaaaaa

SEQ ID NO: 139904 - DNA, 25 bp, Probe Sequence
agatgtggttgcatcctaactccat

SEQ ID NO: 139905 - DNA, 25 bp, Probe Sequence
agagtaggtgctgcctagcagccct

SEQ ID NO: 139906 - DNA, 25 bp, Probe Sequence
agagcttggtttccaaagcgcctgg

SEQ ID NO: 139907 - DNA, 25 bp, Probe Sequence
agagtgggtggccaagcagaccaag

SEQ ID NO: 139908 - DNA, 25 bp, Probe Sequence
agagggggatcttgacacacaatga

SEQ ID NO: 139909 - DNA, 25 bp, Probe Sequence
agagggggatcaggaatagtaaagg

SEQ ID NO: 139910 - DNA, 25 bp, Probe Sequence
agagggggacaaatacatgtaattg

SEQ ID NO: 139911 - DNA, 25 bp, Probe Sequence
agaggtggcttaattacattgaaat

SEQ ID NO: 139912 - DNA, 25 bp, Probe Sequence
agagttggcttacatatcctaaagt

SEQ ID NO: 139913 - DNA, 25 bp, Probe Sequence
agagttgtcactactagattataaa

SEQ ID NO: 139914 - DNA, 25 bp, Probe Sequence
agagatttacaatatgactttaaca

SEQ ID NO: 139915 - DNA, 25 bp, Probe Sequence
agatgtttaatatcatttcatgtaa

SEQ ID NO: 139916 - DNA, 25 bp, Probe Sequence
agatggtctattgctgtattcagtg

SEQ ID NO: 139917 - DNA, 25 bp, Probe Sequence
agagtgtctgatgcggccactcatt

SEQ ID NO: 139918 - DNA, 25 bp, Probe Sequence
agagtgacctgcagtctcactcatc

SEQ ID NO: 139919 - DNA, 25 bp, Probe Sequence
agagtgacctgcagtctcactcatc

SEQ ID NO: 139920 - DNA, 25 bp, Probe Sequence
agatgtgaacacagcctagcaccag

SEQ ID NO: 139921 - DNA, 25 bp, Probe Sequence
agatgagcataagtcctctccaaca

SEQ ID NO: 139922 - DNA, 25 bp, Probe Sequence
agatgattcatcacagtctccaaat

SEQ ID NO: 139923 - DNA, 25 bp, Probe Sequence
agagatttaaagtcactaaagaagt

SEQ ID NO: 139924 - DNA, 25 bp, Probe Sequence
agagacttaaactacaacaaacaat

SEQ ID NO: 139925 - DNA, 25 bp, Probe Sequence
agaaatcaggaacagataaaaccat

SEQ ID NO: 139926 - DNA, 25 bp, Probe Sequence
agaccagggaatcagagacaaagct

SEQ ID NO: 139927 - DNA, 25 bp, Probe Sequence
agaccaagcagaagaaagaaattta

SEQ ID NO: 139928 - DNA, 25 bp, Probe Sequence
agaggcacacagagacagaccaact

SEQ ID NO: 139929 - DNA, 25 bp, Probe Sequence
agaggccagcgtaggagtcatcgac

SEQ ID NO: 139930 - DNA, 25 bp, Probe Sequence
agaggatcaaatgcggctcctacgg

SEQ ID NO: 139931 - DNA, 25 bp, Probe Sequence
agagttcaaggaggccttccagctg

SEQ ID NO: 139932 - DNA, 25 bp, Probe Sequence
agacttagaggggacttccagccgg

SEQ ID NO: 139933 - DNA, 25 bp, Probe Sequence
agactttggggtctacgtgcagggc

SEQ ID NO: 139934 - DNA, 25 bp, Probe Sequence
agagagttcggcatgcttacaggca

SEQ ID NO: 139935 - DNA, 25 bp, Probe Sequence
agagcactaccaggtgttagagtga

SEQ ID NO: 139936 - DNA, 25 bp, Probe Sequence
agagcagatgactacttttcgaagt

SEQ ID NO: 139937 - DNA, 25 bp, Probe Sequence
agatggtgagctctggttgccaagg

SEQ ID NO: 139938 - DNA, 25 bp, Probe Sequence
agagggcagtcatggggcccaggac

SEQ ID NO: 139939 - DNA, 25 bp, Probe Sequence
agatgggcttctggagttcgccaag

SEQ ID NO: 139940 - DNA, 25 bp, Probe Sequence
agatggggctctgagggtgccacta

SEQ ID NO: 139941 - DNA, 25 bp, Probe Sequence
agaggaggatctgatggatatggca

SEQ ID NO: 139942 - DNA, 25 bp, Probe Sequence
agaggaggactcaactatatacagt

SEQ ID NO: 139943 - DNA, 25 bp, Probe Sequence
agagaaggaagcactactagaggga

SEQ ID NO: 139944 - DNA, 25 bp, Probe Sequence
agagagagaaagaacgaacgaacag

SEQ ID NO: 139945 - DNA, 25 bp, Probe Sequence
agagaggataaaacggcaacacagc

SEQ ID NO: 139946 - DNA, 25 bp, Probe Sequence
agagggcaaagaacggcgccaccat

SEQ ID NO: 139947 - DNA, 25 bp, Probe Sequence
agagaccactggattggcagaccca

SEQ ID NO: 139948 - DNA, 25 bp, Probe Sequence
agaggccaaggcaggtgaagcacca

SEQ ID NO: 139949 - DNA, 25 bp, Probe Sequence
agaggccagagttgggtgtcacgct

SEQ ID NO: 139950 - DNA, 25 bp, Probe Sequence
agaggctgaagcaggcggatcactt

SEQ ID NO: 139951 - DNA, 25 bp, Probe Sequence
agagctgtggagaggggaccctaag

SEQ ID NO: 139952 - DNA, 25 bp, Probe Sequence
agagctggtgcgagctggcacccac

SEQ ID NO: 139953 - DNA, 25 bp, Probe Sequence
agatggtggccatgtggcacgctgc

SEQ ID NO: 139954 - DNA, 25 bp, Probe Sequence
agatggtagcgcttgtgacactggc

SEQ ID NO: 139955 - DNA, 25 bp, Probe Sequence
agatggtgagccggaacgtggccag

SEQ ID NO: 139956 - DNA, 25 bp, Probe Sequence
agagagtagcctctccagtttcagc

SEQ ID NO: 139957 - DNA, 25 bp, Probe Sequence
agaccaagactgctctagtttgagg

SEQ ID NO: 139958 - DNA, 25 bp, Probe Sequence
agagctacatagagtttggttaggt

SEQ ID NO: 139959 - DNA, 25 bp, Probe Sequence
agagtcagctatcttgtctggtttt

SEQ ID NO: 139960 - DNA, 25 bp, Probe Sequence
agagtatgttcttatgcgggtttcc

SEQ ID NO: 139961 - DNA, 25 bp, Probe Sequence
agagttattcagtctgcggattcta

SEQ ID NO: 139962 - DNA, 25 bp, Probe Sequence
agagtgctctgtgtatgcggatgat

SEQ ID NO: 139963 - DNA, 25 bp, Probe Sequence
agagagctctggtctgttgtatctc

SEQ ID NO: 139964 - DNA, 25 bp, Probe Sequence
agactgccggttattcactaggaat

SEQ ID NO: 139965 - DNA, 25 bp, Probe Sequence
agagttcagtttcttcacgatggaa

SEQ ID NO: 139966 - DNA, 25 bp, Probe Sequence
agagaacctttctgtgacattggaa

SEQ ID NO: 139967 - DNA, 25 bp, Probe Sequence
agagaacctggagtactgtatcatg

SEQ ID NO: 139968 - DNA, 25 bp, Probe Sequence
agagtgacggcttgcataatttgct

SEQ ID NO: 139969 - DNA, 25 bp, Probe Sequence
agagatgacttctgctgattttgct

SEQ ID NO: 139970 - DNA, 25 bp, Probe Sequence
agagtgcaatggcgtgatctcggct

SEQ ID NO: 139971 - DNA, 25 bp, Probe Sequence
agaggatatggggattctgctctct

SEQ ID NO: 139972 - DNA, 25 bp, Probe Sequence
agagctggatgcaccattggctcct

SEQ ID NO: 139973 - DNA, 25 bp, Probe Sequence
agagcagcaggcagccattctgtcc

SEQ ID NO: 139974 - DNA, 25 bp, Probe Sequence
agagcagcaggcagccattctgtcc

SEQ ID NO: 139975 - DNA, 25 bp, Probe Sequence
agagagaggccctctctgagcactg

SEQ ID NO: 139976 - DNA, 25 bp, Probe Sequence
agaggactgccagtactcgacatct

SEQ ID NO: 139977 - DNA, 25 bp, Probe Sequence
agaggactgccagtactcgacatct

SEQ ID NO: 139978 - DNA, 25 bp, Probe Sequence
agatggtagccagtgactcagatca

SEQ ID NO: 139979 - DNA, 25 bp, Probe Sequence
agatgggagccaggggaatgaaagg

SEQ ID NO: 139980 - DNA, 25 bp, Probe Sequence
agatgtggcccaaggggttaagtgg

SEQ ID NO: 139981 - DNA, 25 bp, Probe Sequence
agatggcgagccagtgtggttgtag

SEQ ID NO: 139982 - DNA, 25 bp, Probe Sequence
agagcaggacacagggtgtggtact

SEQ ID NO: 139983 - DNA, 25 bp, Probe Sequence
agagaaacagcaagggcggggtcaa

SEQ ID NO: 139984 - DNA, 25 bp, Probe Sequence
agagaggactgtagggagggcggca

SEQ ID NO: 139985 - DNA, 25 bp, Probe Sequence
agaggtactggatgctgggacagtc

SEQ ID NO: 139986 - DNA, 25 bp, Probe Sequence
agagtgtcacggagatgggacccct

SEQ ID NO: 139987 - DNA, 25 bp, Probe Sequence
agagggcggctgagatggaaccacc

SEQ ID NO: 139988 - DNA, 25 bp, Probe Sequence
agaggacgcttgagccagaatctca

SEQ ID NO: 139989 - DNA, 25 bp, Probe Sequence
agaggcggcgagaccgcagaattcc

SEQ ID NO: 139990 - DNA, 25 bp, Probe Sequence
agaggaggagttccgcactatctac

SEQ ID NO: 139991 - DNA, 25 bp, Probe Sequence
agaggagaatgttggtgtttgtact

SEQ ID NO: 139992 - DNA, 25 bp, Probe Sequence
agagtatgtatgtgtgtgtgtgtgt

SEQ ID NO: 139993 - DNA, 25 bp, Probe Sequence
agatggagtatgccgaggtgcgtgt

SEQ ID NO: 139994 - DNA, 25 bp, Probe Sequence
agatgtgcagacagctgagggtggc

SEQ ID NO: 139995 - DNA, 25 bp, Probe Sequence
agatggcaaagctgagtgcaggtgc

SEQ ID NO: 139996 - DNA, 25 bp, Probe Sequence
agaggtatagcaaggctgtggtgcc

SEQ ID NO: 139997 - DNA, 25 bp, Probe Sequence
agagagttacaaccctcatgtgcgc

SEQ ID NO: 139998 - DNA, 25 bp, Probe Sequence
agagagttacactctcaactccgac

SEQ ID NO: 139999 - DNA, 25 bp, Probe Sequence
agaggagaacaacacacaccggagc

SEQ ID NO: 140000 - DNA, 25 bp, Probe Sequence
accagaaggagacaaccttggagag

SEQ ID NO: 140001 - DNA, 25 bp, Probe Sequence
gccaaagggacttacccctggagag

SEQ ID NO: 140002 - DNA, 25 bp, Probe Sequence
agcaaacggtttctcctgtggatag

SEQ ID NO: 140003 - DNA, 25 bp, Probe Sequence
agagcagtcggatttctgtccttgg

SEQ ID NO: 140004 - DNA, 25 bp, Probe Sequence
agagaggtagcgttttctcctgagc

SEQ ID NO: 140005 - DNA, 25 bp, Probe Sequence
agagatggttagtcttctcccaaca

SEQ ID NO: 140006 - DNA, 25 bp, Probe Sequence
agatgtgtgttatctgtaaccatta

SEQ ID NO: 140007 - DNA, 25 bp, Probe Sequence
agatggtgtataactctagagcttg

SEQ ID NO: 140008 - DNA, 25 bp, Probe Sequence
agaggtgagacaagccatccacgtg

SEQ ID NO: 140009 - DNA, 25 bp, Probe Sequence
agaggtgggatgcagatcttcgtga

SEQ ID NO: 140010 - DNA, 25 bp, Probe Sequence
agaggtgggatgcagatcttcgtga

SEQ ID NO: 140011 - DNA, 25 bp, Probe Sequence
agagctggatttggaacttcgggat

SEQ ID NO: 140012 - DNA, 25 bp, Probe Sequence
agaggttgttggagttcagcggggc

SEQ ID NO: 140013 - DNA, 25 bp, Probe Sequence
agaggctacttggtagtgtcagcgg

SEQ ID NO: 140014 - DNA, 25 bp, Probe Sequence
agaggccgatcacttgaggtcagga

SEQ ID NO: 140015 - DNA, 25 bp, Probe Sequence
agaggagtgaagtgggtgatggagg

SEQ ID NO: 140016 - DNA, 25 bp, Probe Sequence
agatggaggagaccccttgcaggga

SEQ ID NO: 140017 - DNA, 25 bp, Probe Sequence
agagggtgaatggccctggcaggct

SEQ ID NO: 140018 - DNA, 25 bp, Probe Sequence
agaggagggcatgggttggcagggt

SEQ ID NO: 140019 - DNA, 25 bp, Probe Sequence
agagggagagcgggtaggcggctgt

SEQ ID NO: 140020 - DNA, 25 bp, Probe Sequence
agagggagagcgggtaggcggctgt

SEQ ID NO: 140021 - DNA, 25 bp, Probe Sequence
agagggaagggaggctggggctgca

SEQ ID NO: 140022 - DNA, 25 bp, Probe Sequence
agaggcggagggtcggtgatgtgga

SEQ ID NO: 140023 - DNA, 25 bp, Probe Sequence
agaggaggcctggaccgagatgtga

SEQ ID NO: 140024 - DNA, 25 bp, Probe Sequence
agagtgcgtctcggacagcgaatgc

SEQ ID NO: 140025 - DNA, 25 bp, Probe Sequence
agagggctgtcaccacagccatgtc

SEQ ID NO: 140026 - DNA, 25 bp, Probe Sequence
agaggcgattcaacacaccattgga

SEQ ID NO: 140027 - DNA, 25 bp, Probe Sequence
agagtggtgacaacaccctgagctg

SEQ ID NO: 140028 - DNA, 25 bp, Probe Sequence
agagtggagaaaacagcctggtgca

SEQ ID NO: 140029 - DNA, 25 bp, Probe Sequence
agagctaagaacctcaggcggctgc

SEQ ID NO: 140030 - DNA, 25 bp, Probe Sequence
agagcaagggacacatgcagcggct

SEQ ID NO: 140031 - DNA, 25 bp, Probe Sequence
agagggatggacaagctgtgctgga

SEQ ID NO: 140032 - DNA, 25 bp, Probe Sequence
agaggggtcagctgctgtgctacaa

SEQ ID NO: 140033 - DNA, 25 bp, Probe Sequence
agaggaggatccagctgcctatgaa

SEQ ID NO: 140034 - DNA, 25 bp, Probe Sequence
agaggaggaagcggctggcaactga

SEQ ID NO: 140035 - DNA, 25 bp, Probe Sequence
agaggcagcgacggctgctggggtc

SEQ ID NO: 140036 - DNA, 25 bp, Probe Sequence
agagggcgagtggctgcgagagaga

SEQ ID NO: 140037 - DNA, 25 bp, Probe Sequence
agatggacagagcttctgaaggaag

SEQ ID NO: 140038 - DNA, 25 bp, Probe Sequence
agaggcccaggaatcggagcgaagc

SEQ ID NO: 140039 - DNA, 25 bp, Probe Sequence
agaggcccaagtaccgtggaaggtg

SEQ ID NO: 140040 - DNA, 25 bp, Probe Sequence
agaggacccatggctagcagggaag

SEQ ID NO: 140041 - DNA, 25 bp, Probe Sequence
agaggacccagtggaaagtgattgg

SEQ ID NO: 140042 - DNA, 25 bp, Probe Sequence
agaggtcccaaggaacgccatagga

SEQ ID NO: 140043 - DNA, 25 bp, Probe Sequence
agaggtctcaatgtggaccagctga

SEQ ID NO: 140044 - DNA, 25 bp, Probe Sequence
agagtgtctcactgaagcttactga

SEQ ID NO: 140045 - DNA, 25 bp, Probe Sequence
agaggtaaaccatgtctgcagcaga

SEQ ID NO: 140046 - DNA, 25 bp, Probe Sequence
agaggtccaagctatactgtgcagg

SEQ ID NO: 140047 - DNA, 25 bp, Probe Sequence
agaggtccaagaaagctggccgcca

SEQ ID NO: 140048 - DNA, 25 bp, Probe Sequence
agaggatccgagaacgctctaagcc

SEQ ID NO: 140049 - DNA, 25 bp, Probe Sequence
agaggctaccaagcgcctgaagctc

SEQ ID NO: 140050 - DNA, 25 bp, Probe Sequence
agaccaaacagatctggcatataca

SEQ ID NO: 140051 - DNA, 25 bp, Probe Sequence
agaggaaaagactgagcatgctcac

SEQ ID NO: 140052 - DNA, 25 bp, Probe Sequence
agaggcgaagcaggcttccatccaa

SEQ ID NO: 140053 - DNA, 25 bp, Probe Sequence
agaggggagacagctatcaccacat

SEQ ID NO: 140054 - DNA, 25 bp, Probe Sequence
agagttgtgaactgttatcccattg

SEQ ID NO: 140055 - DNA, 25 bp, Probe Sequence
agagtctgtaataggatttcccata

SEQ ID NO: 140056 - DNA, 25 bp, Probe Sequence
agagtgctgagcgataacatgttcc

SEQ ID NO: 140057 - DNA, 25 bp, Probe Sequence
agagtcatcatgccatgtagctggt

SEQ ID NO: 140058 - DNA, 25 bp, Probe Sequence
agagttcaggcagtaatgtgagcaa

SEQ ID NO: 140059 - DNA, 25 bp, Probe Sequence
agaggacatgggtcagagtgaacag

SEQ ID NO: 140060 - DNA, 25 bp, Probe Sequence
agactggcttggtcgcagtgactgt

SEQ ID NO: 140061 - DNA, 25 bp, Probe Sequence
agactgcgttggtggtcaagtcctc

SEQ ID NO: 140062 - DNA, 25 bp, Probe Sequence
agactcggtccaagagtccattccc

SEQ ID NO: 140063 - DNA, 25 bp, Probe Sequence
agactcggctgcggagtactaccgc

SEQ ID NO: 140064 - DNA, 25 bp, Probe Sequence
agagctaccatgtgactttacctga

SEQ ID NO: 140065 - DNA, 25 bp, Probe Sequence
agagtgtcgatgttgcagctttcaa

SEQ ID NO: 140066 - DNA, 25 bp, Probe Sequence
agacttctgactccaatttaaacca

SEQ ID NO: 140067 - DNA, 25 bp, Probe Sequence
agagtttatgtgcagcatttaaatc

SEQ ID NO: 140068 - DNA, 25 bp, Probe Sequence
agatggattgttggtgcaataaacc

SEQ ID NO: 140069 - DNA, 25 bp, Probe Sequence
agaggctttgctgggacataacatc

SEQ ID NO: 140070 - DNA, 25 bp, Probe Sequence
agaggctttctcggtatcagcagtt

SEQ ID NO: 140071 - DNA, 25 bp, Probe Sequence
agagtgctgttcacagtgcaagatt

SEQ ID NO: 140072 - DNA, 25 bp, Probe Sequence
agactgggatcaccaaatagtttca

SEQ ID NO: 140073 - DNA, 25 bp, Probe Sequence
agagtggaactgtcgaatggtgaaa

SEQ ID NO: 140074 - DNA, 25 bp, Probe Sequence
agaggagcaactgaacactggagga

SEQ ID NO: 140075 - DNA, 25 bp, Probe Sequence
agaatagacagggagaactcgtcgg

SEQ ID NO: 140076 - DNA, 25 bp, Probe Sequence
agagttcagcattggagagccccct

SEQ ID NO: 140077 - DNA, 25 bp, Probe Sequence
agagtccagatttggcacctactcc

SEQ ID NO: 140078 - DNA, 25 bp, Probe Sequence
agagtcacgctttgattcacagact

SEQ ID NO: 140079 - DNA, 25 bp, Probe Sequence
agagcctgctgcgtaagtcacaagt

SEQ ID NO: 140080 - DNA, 25 bp, Probe Sequence
agagtttggagagctcagaagataa

SEQ ID NO: 140081 - DNA, 25 bp, Probe Sequence
agacttgtggcgaactagaaattaa

SEQ ID NO: 140082 - DNA, 25 bp, Probe Sequence
agagttgtatacaaatagagaacta

SEQ ID NO: 140083 - DNA, 25 bp, Probe Sequence
aatcgacttaccaaagagcaactga

SEQ ID NO: 140084 - DNA, 25 bp, Probe Sequence
agaccacttcaccaaacaggactaa

SEQ ID NO: 140085 - DNA, 25 bp, Probe Sequence
agactacgtccacagacactgatgc

SEQ ID NO: 140086 - DNA, 25 bp, Probe Sequence
agactgccagtgaccaagcaaccac

SEQ ID NO: 140087 - DNA, 25 bp, Probe Sequence
agagtccagtgagatggaaccacac

SEQ ID NO: 140088 - DNA, 25 bp, Probe Sequence
agctaccactaggtggatagtaaat

SEQ ID NO: 140089 - DNA, 25 bp, Probe Sequence
ggtaccccacgggcaagagtcagac

SEQ ID NO: 140090 - DNA, 25 bp, Probe Sequence
cttggccccaggaagcgaaggaaca

SEQ ID NO: 140091 - DNA, 25 bp, Probe Sequence
ctgggcaatcccgtggcttagaaaa

SEQ ID NO: 140092 - DNA, 25 bp, Probe Sequence
cagggaaccgtctctatagatagaa

SEQ ID NO: 140093 - DNA, 25 bp, Probe Sequence
agctggaacttaccactcaaaaaca

SEQ ID NO: 140094 - DNA, 25 bp, Probe Sequence
agactggacttattactcccaaagc

SEQ ID NO: 140095 - DNA, 25 bp, Probe Sequence
actctagagcttgaattttaaggga

SEQ ID NO: 140096 - DNA, 25 bp, Probe Sequence
agctcccacagtgccttttaagggg

SEQ ID NO: 140097 - DNA, 25 bp, Probe Sequence
agcctcccacatgccttaaggggac

SEQ ID NO: 140098 - DNA, 25 bp, Probe Sequence
agagctcctagatccttgaagtgtg

SEQ ID NO: 140099 - DNA, 25 bp, Probe Sequence
agagctaatacatgccgacgggcgc

SEQ ID NO: 140100 - DNA, 25 bp, Probe Sequence
agaccttccattcctcactgaaggt

SEQ ID NO: 140101 - DNA, 25 bp, Probe Sequence
agagcgcttccatttctacaaaagg

SEQ ID NO: 140102 - DNA, 25 bp, Probe Sequence
aacgcctccgtctctatataaggaa

SEQ ID NO: 140103 - DNA, 25 bp, Probe Sequence
agacgtctacgttgaattattcaga

SEQ ID NO: 140104 - DNA, 25 bp, Probe Sequence
agaggcctaagttgacactgccctg

SEQ ID NO: 140105 - DNA, 25 bp, Probe Sequence
agaggctcttgagacctgatgccct

SEQ ID NO: 140106 - DNA, 25 bp, Probe Sequence
agaggttctgaagactgccctcatc

SEQ ID NO: 140107 - DNA, 25 bp, Probe Sequence
agagcgtgcctgaaaaccttctcaa

SEQ ID NO: 140108 - DNA, 25 bp, Probe Sequence
agagtggccagctaagagcctgcct

SEQ ID NO: 140109 - DNA, 25 bp, Probe Sequence
agagtcgctggagatgagctcgcct

SEQ ID NO: 140110 - DNA, 25 bp, Probe Sequence
agagaagctacagaactcccaattc

SEQ ID NO: 140111 - DNA, 25 bp, Probe Sequence
agagtagtaagtcatcccacacttc

SEQ ID NO: 140112 - DNA, 25 bp, Probe Sequence
agagtgggcaagtcctcagctgaac

SEQ ID NO: 140113 - DNA, 25 bp, Probe Sequence
agaggagtcgagtcccaaggcatgc

SEQ ID NO: 140114 - DNA, 25 bp, Probe Sequence
agagatgagctaggaccatccacct

SEQ ID NO: 140115 - DNA, 25 bp, Probe Sequence
agagggtagtcagcatctccaattt

SEQ ID NO: 140116 - DNA, 25 bp, Probe Sequence
agaggttcctgagccttcaaattca

SEQ ID NO: 140117 - DNA, 25 bp, Probe Sequence
agactgattttgaaacttcctagtc

SEQ ID NO: 140118 - DNA, 25 bp, Probe Sequence
accaactgcttagcacccctggcca

SEQ ID NO: 140119 - DNA, 25 bp, Probe Sequence
accagcactttatacacttctggct

SEQ ID NO: 140120 - DNA, 25 bp, Probe Sequence
agagggcttgtatccctcttgtgct

SEQ ID NO: 140121 - DNA, 25 bp, Probe Sequence
agactgagctatgtcggaccttctc

SEQ ID NO: 140122 - DNA, 25 bp, Probe Sequence
agacgaatgaggaaccacctcctcc

SEQ ID NO: 140123 - DNA, 25 bp, Probe Sequence
agagtcactgaggacctacctcttc

SEQ ID NO: 140124 - DNA, 25 bp, Probe Sequence
agaggctcatagcacctcagactct

SEQ ID NO: 140125 - DNA, 25 bp, Probe Sequence
agaggctcttggacacacagtgtct

SEQ ID NO: 140126 - DNA, 25 bp, Probe Sequence
agaggctagtgttcaacaggccctt

SEQ ID NO: 140127 - DNA, 25 bp, Probe Sequence
agagtgaccttagagggctccttgg

SEQ ID NO: 140128 - DNA, 25 bp, Probe Sequence
agaggacctgggagaagcttctgct

SEQ ID NO: 140129 - DNA, 25 bp, Probe Sequence
agagaacctggagatgtagctactc

SEQ ID NO: 140130 - DNA, 25 bp, Probe Sequence
agaccatcctggacaaggaccacct

SEQ ID NO: 140131 - DNA, 25 bp, Probe Sequence
agacatccctgaaaggaagcccctt

SEQ ID NO: 140132 - DNA, 25 bp, Probe Sequence
agagtcccatgaaaggtggctccac

SEQ ID NO: 140133 - DNA, 25 bp, Probe Sequence
agagtcccagaacgaatctctcgcc

SEQ ID NO: 140134 - DNA, 25 bp, Probe Sequence
agagttatcaagagacactcccccc

SEQ ID NO: 140135 - DNA, 25 bp, Probe Sequence
agagcttaaaggatcacgccatcct

SEQ ID NO: 140136 - DNA, 25 bp, Probe Sequence
agagccagtcaaaggtccagtctcc

SEQ ID NO: 140137 - DNA, 25 bp, Probe Sequence
agaggagtccattgagaccgtggtc

SEQ ID NO: 140138 - DNA, 25 bp, Probe Sequence
agagggacatatatgtgccttagtc

SEQ ID NO: 140139 - DNA, 25 bp, Probe Sequence
agagggataggcagtgcctccgcat

SEQ ID NO: 140140 - DNA, 25 bp, Probe Sequence
agaggagtattcagcacctctgcct

SEQ ID NO: 140141 - DNA, 25 bp, Probe Sequence
agaggaccatgtgatgcacctgctc

SEQ ID NO: 140142 - DNA, 25 bp, Probe Sequence
agaggactatgagacccatcagctg

SEQ ID NO: 140143 - DNA, 25 bp, Probe Sequence
agagagacaattcactccatcccta

SEQ ID NO: 140144 - DNA, 25 bp, Probe Sequence
agagagaaaggctcacctgaccaac

SEQ ID NO: 140145 - DNA, 25 bp, Probe Sequence
agaggcttcaggtacaactggccac

SEQ ID NO: 140146 - DNA, 25 bp, Probe Sequence
agaggttactgaagagcaatagcca

SEQ ID NO: 140147 - DNA, 25 bp, Probe Sequence
agagctggtttggggctatagcata

SEQ ID NO: 140148 - DNA, 25 bp, Probe Sequence
agaggcagtttggtggcatgctact

SEQ ID NO: 140149 - DNA, 25 bp, Probe Sequence
agagattgtttgaatgatgcatgtt

SEQ ID NO: 140150 - DNA, 25 bp, Probe Sequence
agagattgttgcttcattgctagtt

SEQ ID NO: 140151 - DNA, 25 bp, Probe Sequence
agagtatgaggctcctgctctgatt

SEQ ID NO: 140152 - DNA, 25 bp, Probe Sequence
agagtatgaggctcctgctctgatt

SEQ ID NO: 140153 - DNA, 25 bp, Probe Sequence
agagtatgaggctcctgctctgatt

SEQ ID NO: 140154 - DNA, 25 bp, Probe Sequence
agagtggcagcgtggtgatctttgg

SEQ ID NO: 140155 - DNA, 25 bp, Probe Sequence
agaggtcagcagtggaatttatgtg

SEQ ID NO: 140156 - DNA, 25 bp, Probe Sequence
agaggacaagtcagagaaagcagtg

SEQ ID NO: 140157 - DNA, 25 bp, Probe Sequence
agaggaagatctacgaagcaaatgg

SEQ ID NO: 140158 - DNA, 25 bp, Probe Sequence
agagctaattcaacagaagcaactc

SEQ ID NO: 140159 - DNA, 25 bp, Probe Sequence
agagtatatgtatcggctgagtgcc

SEQ ID NO: 140160 - DNA, 25 bp, Probe Sequence
agaggcaaggttgggctggtgctca

SEQ ID NO: 140161 - DNA, 25 bp, Probe Sequence
agagagcagtgcttttggcggggag

SEQ ID NO: 140162 - DNA, 25 bp, Probe Sequence
agacaccaaatttggcggaggggtg

SEQ ID NO: 140163 - DNA, 25 bp, Probe Sequence
agacccaacacaaggcggggatgct

SEQ ID NO: 140164 - DNA, 25 bp, Probe Sequence
agactacaaatatggggcagtggct

SEQ ID NO: 140165 - DNA, 25 bp, Probe Sequence
agagtatgcaaagagcttggcagga

SEQ ID NO: 140166 - DNA, 25 bp, Probe Sequence
agagttgagcaaacagcttggactg

SEQ ID NO: 140167 - DNA, 25 bp, Probe Sequence
agaggtgtgctcatacttggactgg

SEQ ID NO: 140168 - DNA, 25 bp, Probe Sequence
agagcgtgatgggctaccaggtctg

SEQ ID NO: 140169 - DNA, 25 bp, Probe Sequence
agagctttgtcaggaccaggttgtt

SEQ ID NO: 140170 - DNA, 25 bp, Probe Sequence
agagtcaggttgaagcacaggcttt

SEQ ID NO: 140171 - DNA, 25 bp, Probe Sequence
agagtctggtgaggagcaggagttc

SEQ ID NO: 140172 - DNA, 25 bp, Probe Sequence
agagttgcaggggagccgagttgct

SEQ ID NO: 140173 - DNA, 25 bp, Probe Sequence
agagcattgcagagaaccgacacct

SEQ ID NO: 140174 - DNA, 25 bp, Probe Sequence
agagactgagtggaaatcgcccctt

SEQ ID NO: 140175 - DNA, 25 bp, Probe Sequence
agagactgagtggaaatcgcccctt

SEQ ID NO: 140176 - DNA, 25 bp, Probe Sequence
agagggttggattatcattaccttt

SEQ ID NO: 140177 - DNA, 25 bp, Probe Sequence
agaggagagtggactgagcttcgcc

SEQ ID NO: 140178 - DNA, 25 bp, Probe Sequence
agagatgggaggactgaccctgaga

SEQ ID NO: 140179 - DNA, 25 bp, Probe Sequence
agagaaggaagactcgccagccaga

SEQ ID NO: 140180 - DNA, 25 bp, Probe Sequence
agaggatgaggagcctccaccaagg

SEQ ID NO: 140181 - DNA, 25 bp, Probe Sequence
agagagtgagcttttgctacccaca

SEQ ID NO: 140182 - DNA, 25 bp, Probe Sequence
agaggtcactgtatgtggcctgcac

SEQ ID NO: 140183 - DNA, 25 bp, Probe Sequence
agaggatcacagagttctgccaccg

SEQ ID NO: 140184 - DNA, 25 bp, Probe Sequence
agaggatcacagagttctgccaccg

SEQ ID NO: 140185 - DNA, 25 bp, Probe Sequence
agaggatcaaggtctctcaggcagc

SEQ ID NO: 140186 - DNA, 25 bp, Probe Sequence
agaggatgcaaacgctgtcaggggt

SEQ ID NO: 140187 - DNA, 25 bp, Probe Sequence
agaggagaactgggtctgctgtgga

SEQ ID NO: 140188 - DNA, 25 bp, Probe Sequence
agagaaattcagcgatcagcattgg

SEQ ID NO: 140189 - DNA, 25 bp, Probe Sequence
agagaaactgcgtgagagtgtgtgc

SEQ ID NO: 140190 - DNA, 25 bp, Probe Sequence
agagaacaaggacgctggtgtggct

SEQ ID NO: 140191 - DNA, 25 bp, Probe Sequence
agagcaacacagaacgttttgactg

SEQ ID NO: 140192 - DNA, 25 bp, Probe Sequence
agagaacagattcatttgcttaatt

SEQ ID NO: 140193 - DNA, 25 bp, Probe Sequence
agaggacagatcaccatctgctata

SEQ ID NO: 140194 - DNA, 25 bp, Probe Sequence
agaggacattttctcatgcatcttc

SEQ ID NO: 140195 - DNA, 25 bp, Probe Sequence
agagggtcttgttctagatttcata

SEQ ID NO: 140196 - DNA, 25 bp, Probe Sequence
agagtggtcttttcaacactcctcc

SEQ ID NO: 140197 - DNA, 25 bp, Probe Sequence
agagtggtcttttcaacactcctcc

SEQ ID NO: 140198 - DNA, 25 bp, Probe Sequence
agaggtttgtcctaacctccatcat

SEQ ID NO: 140199 - DNA, 25 bp, Probe Sequence
agagcgttcttggagaaggcccact

SEQ ID NO: 140200 - DNA, 25 bp, Probe Sequence
agagcgttcttggagaaggcccact

SEQ ID NO: 140201 - DNA, 25 bp, Probe Sequence
agaggattgtccttaagtccctgct

SEQ ID NO: 140202 - DNA, 25 bp, Probe Sequence
agaggatagtgtgtacctgccctgc

SEQ ID NO: 140203 - DNA, 25 bp, Probe Sequence
agagcaagacttctacgtgacctcg

SEQ ID NO: 140204 - DNA, 25 bp, Probe Sequence
agagattgacttcctaagctactta

SEQ ID NO: 140205 - DNA, 25 bp, Probe Sequence
agagacaccctcctctagaatttag

SEQ ID NO: 140206 - DNA, 25 bp, Probe Sequence
agagatcccctggcttgcagaaaat

SEQ ID NO: 140207 - DNA, 25 bp, Probe Sequence
agacctgctgtcgagttgagaaaag

SEQ ID NO: 140208 - DNA, 25 bp, Probe Sequence
agagtgtgcttggagtcagagaaca

SEQ ID NO: 140209 - DNA, 25 bp, Probe Sequence
agagtgctctgtgatgtcatggccc

SEQ ID NO: 140210 - DNA, 25 bp, Probe Sequence
agagatattgtgtttgctgccagcc

SEQ ID NO: 140211 - DNA, 25 bp, Probe Sequence
agagtgatctcacattgtgcccggt

SEQ ID NO: 140212 - DNA, 25 bp, Probe Sequence
agagctgtgtctgtatacactgggt

SEQ ID NO: 140213 - DNA, 25 bp, Probe Sequence
agagctgtttggatagactgtggta

SEQ ID NO: 140214 - DNA, 25 bp, Probe Sequence
agagtggttggcagagtcctcattg

SEQ ID NO: 140215 - DNA, 25 bp, Probe Sequence
agagatctttggtgttctctctgtg

SEQ ID NO: 140216 - DNA, 25 bp, Probe Sequence
agaatgccttggctaatcccttgta

SEQ ID NO: 140217 - DNA, 25 bp, Probe Sequence
agagagactcggttctaacttcgaa

SEQ ID NO: 140218 - DNA, 25 bp, Probe Sequence
agagagaatcccttgtggactgggg

SEQ ID NO: 140219 - DNA, 25 bp, Probe Sequence
agagagagacaggcagctgggccgg

SEQ ID NO: 140220 - DNA, 25 bp, Probe Sequence
agagacagaccaactggcagccagg

SEQ ID NO: 140221 - DNA, 25 bp, Probe Sequence
agagacgagctgtggggatctggca

SEQ ID NO: 140222 - DNA, 25 bp, Probe Sequence
agagagcggaaagtgagtatgcggc

SEQ ID NO: 140223 - DNA, 25 bp, Probe Sequence
agagcggaaagtgagtatgcggctg

SEQ ID NO: 140224 - DNA, 25 bp, Probe Sequence
agagggctaaggattctgtctgctg

SEQ ID NO: 140225 - DNA, 25 bp, Probe Sequence
agagtggtgaagcgttgctgtccct

SEQ ID NO: 140226 - DNA, 25 bp, Probe Sequence
agacgggcggggaatggtgccctgg

SEQ ID NO: 140227 - DNA, 25 bp, Probe Sequence
agacaggagcagggtccaggttccc

SEQ ID NO: 140228 - DNA, 25 bp, Probe Sequence
agaagaacggcgtggcttacctcta

SEQ ID NO: 140229 - DNA, 25 bp, Probe Sequence
agaagttcaccttcggcttagactg

SEQ ID NO: 140230 - DNA, 25 bp, Probe Sequence
agaagaagccactcggctcttggct

SEQ ID NO: 140231 - DNA, 25 bp, Probe Sequence
agagctaaacactgggatttttgga

SEQ ID NO: 140232 - DNA, 25 bp, Probe Sequence
agagcttgaagcagatggaatttta

SEQ ID NO: 140233 - DNA, 25 bp, Probe Sequence
agagcaagagaccaggtaatttcta

SEQ ID NO: 140234 - DNA, 25 bp, Probe Sequence
agagaagagccagggtccttcacca

SEQ ID NO: 140235 - DNA, 25 bp, Probe Sequence
agagaagagccagggtccttcacca

SEQ ID NO: 140236 - DNA, 25 bp, Probe Sequence
agagacgcagcggaggttttcctgg

SEQ ID NO: 140237 - DNA, 25 bp, Probe Sequence
agagaccagctggcagggtgccaac

SEQ ID NO: 140238 - DNA, 25 bp, Probe Sequence
agagaccagctccggagagcagagg

SEQ ID NO: 140239 - DNA, 25 bp, Probe Sequence
agagtcgcatctcagtgcaggagag

SEQ ID NO: 140240 - DNA, 25 bp, Probe Sequence
agagtcggctcaatctggtgcagag

SEQ ID NO: 140241 - DNA, 25 bp, Probe Sequence
agaggatgtgcttgatggagatgaa

SEQ ID NO: 140242 - DNA, 25 bp, Probe Sequence
agaggatggctctatgctggtgact

SEQ ID NO: 140243 - DNA, 25 bp, Probe Sequence
agaggattatccggggcatctactc

SEQ ID NO: 140244 - DNA, 25 bp, Probe Sequence
agaggtgttctaagggatctcatct

SEQ ID NO: 140245 - DNA, 25 bp, Probe Sequence
agagcaggttcttcgtgagttcctc

SEQ ID NO: 140246 - DNA, 25 bp, Probe Sequence
agacctgtccgaggagagtttccgc

SEQ ID NO: 140247 - DNA, 25 bp, Probe Sequence
agaccgctcgggcatggagaattcc

SEQ ID NO: 140248 - DNA, 25 bp, Probe Sequence
agagaggtggggctgaggtgtctcc

SEQ ID NO: 140249 - DNA, 25 bp, Probe Sequence
agagaggtggggctgaggtgtctcc

SEQ ID NO: 140250 - DNA, 25 bp, Probe Sequence
agacgaggtcggcctcgtcattccc

SEQ ID NO: 140251 - DNA, 25 bp, Probe Sequence
agagcgacagtaggctgcatctgga

SEQ ID NO: 140252 - DNA, 25 bp, Probe Sequence
agagggcagctgttgcagcatccag

SEQ ID NO: 140253 - DNA, 25 bp, Probe Sequence
agagatgggctgttcgatacaatac

SEQ ID NO: 140254 - DNA, 25 bp, Probe Sequence
agagggtgcagtccagacagcttga

SEQ ID NO: 140255 - DNA, 25 bp, Probe Sequence
agagggtgcagtccagacagcttga

SEQ ID NO: 140256 - DNA, 25 bp, Probe Sequence
agagggtctgaggcaatagctgtga

SEQ ID NO: 140257 - DNA, 25 bp, Probe Sequence
agagcgctttgggattgcctgatga

SEQ ID NO: 140258 - DNA, 25 bp, Probe Sequence
agagactgtctggcagttgcctatg

SEQ ID NO: 140259 - DNA, 25 bp, Probe Sequence
agagcactactggatgtcagcggag

SEQ ID NO: 140260 - DNA, 25 bp, Probe Sequence
agagatcatatcctcagaccaggtg

SEQ ID NO: 140261 - DNA, 25 bp, Probe Sequence
agagactacgtccacagacactgat

SEQ ID NO: 140262 - DNA, 25 bp, Probe Sequence
agagatttaagccacagacacacaa

SEQ ID NO: 140263 - DNA, 25 bp, Probe Sequence
agagcatatatacccacgctgacaa

SEQ ID NO: 140264 - DNA, 25 bp, Probe Sequence
agagcagagatgccttcacctggca

SEQ ID NO: 140265 - DNA, 25 bp, Probe Sequence
agagcaatgagcattccgatgtgat

SEQ ID NO: 140266 - DNA, 25 bp, Probe Sequence
agagtcatgtgagcctcgtgtcatc

SEQ ID NO: 140267 - DNA, 25 bp, Probe Sequence
agagtcagctggtcgtctatcaatg

SEQ ID NO: 140268 - DNA, 25 bp, Probe Sequence
agagtactgtgactggatcaaaagg

SEQ ID NO: 140269 - DNA, 25 bp, Probe Sequence
agagttctgtcgtgtgcacacacag

SEQ ID NO: 140270 - DNA, 25 bp, Probe Sequence
agagttctgttgtaatcaccctttc

SEQ ID NO: 140271 - DNA, 25 bp, Probe Sequence
agagttctgttggagatgacgcttg

SEQ ID NO: 140272 - DNA, 25 bp, Probe Sequence
agagtgtagtgttggtggcgctgtg

SEQ ID NO: 140273 - DNA, 25 bp, Probe Sequence
agagtctagcctgggtgtgtatgga

SEQ ID NO: 140274 - DNA, 25 bp, Probe Sequence
agagtgctacaccgtttcaatgaaa

SEQ ID NO: 140275 - DNA, 25 bp, Probe Sequence
agagtgaaactctgtctcaaaaaaa

SEQ ID NO: 140276 - DNA, 25 bp, Probe Sequence
agagttaacatcttcctgagacaaa

SEQ ID NO: 140277 - DNA, 25 bp, Probe Sequence
agactgtccctctgactggaaaaca

SEQ ID NO: 140278 - DNA, 25 bp, Probe Sequence
agactaccactgcctacaagaaaac

SEQ ID NO: 140279 - DNA, 25 bp, Probe Sequence
agagctcccggcattcaaggaaatc

SEQ ID NO: 140280 - DNA, 25 bp, Probe Sequence
agagttcacggagttcacagaggac

SEQ ID NO: 140281 - DNA, 25 bp, Probe Sequence
agacttcctgggcctcaagaggatc

SEQ ID NO: 140282 - DNA, 25 bp, Probe Sequence
aacttcagctggcacgtcagttgac

SEQ ID NO: 140283 - DNA, 25 bp, Probe Sequence
agactagcctgtcacgtttgtctct

SEQ ID NO: 140284 - DNA, 25 bp, Probe Sequence
agagtagcggggtgtggtggcttgc

SEQ ID NO: 140285 - DNA, 25 bp, Probe Sequence
agaaacgatgggtgctgtggtcctc

SEQ ID NO: 140286 - DNA, 25 bp, Probe Sequence
agagatttggggggctctggccccg

SEQ ID NO: 140287 - DNA, 25 bp, Probe Sequence
agacttctgggggaattgtcgcctc

SEQ ID NO: 140288 - DNA, 25 bp, Probe Sequence
agacttgggtggcaattcctcaacc

SEQ ID NO: 140289 - DNA, 25 bp, Probe Sequence
agagctctgggtgggatattacata

SEQ ID NO: 140290 - DNA, 25 bp, Probe Sequence
agacctcggtctaattcaactgagt

SEQ ID NO: 140291 - DNA, 25 bp, Probe Sequence
agacctgcgtggataggtactatta

SEQ ID NO: 140292 - DNA, 25 bp, Probe Sequence
agaccccagcgtcaggtgggagtac

SEQ ID NO: 140293 - DNA, 25 bp, Probe Sequence
agacccccggagcaggggtctgagc

SEQ ID NO: 140294 - DNA, 25 bp, Probe Sequence
agagcttcccgatggagagtactgg

SEQ ID NO: 140295 - DNA, 25 bp, Probe Sequence
agacttcaacggggagtgtggatgg

SEQ ID NO: 140296 - DNA, 25 bp, Probe Sequence
agagtcctggcgatgaagtgtgggg

SEQ ID NO: 140297 - DNA, 25 bp, Probe Sequence
agagtcctggcgatgaagtgtgggg

SEQ ID NO: 140298 - DNA, 25 bp, Probe Sequence
agagacctgtcctagatgttggggc

SEQ ID NO: 140299 - DNA, 25 bp, Probe Sequence
agaccattttcaagagggacggtat

SEQ ID NO: 140300 - DNA, 25 bp, Probe Sequence
agagccctaccaaccttgaagagtt

SEQ ID NO: 140301 - DNA, 25 bp, Probe Sequence
agagctcctccatgtttggatagca

SEQ ID NO: 140302 - DNA, 25 bp, Probe Sequence
agagctcgctcgtgtaatagagagt

SEQ ID NO: 140303 - DNA, 25 bp, Probe Sequence
agactccatcgtcttacagtcagtg

SEQ ID NO: 140304 - DNA, 25 bp, Probe Sequence
agagaagtttcacttcaagtcatgg

SEQ ID NO: 140305 - DNA, 25 bp, Probe Sequence
agagacgtcttccagatcggtctga

SEQ ID NO: 140306 - DNA, 25 bp, Probe Sequence
agagaaatgaccgattccagctctg

SEQ ID NO: 140307 - DNA, 25 bp, Probe Sequence
agagaaatgagcccatattccctgc

SEQ ID NO: 140308 - DNA, 25 bp, Probe Sequence
agagaaatgagcccatattccctgc

SEQ ID NO: 140309 - DNA, 25 bp, Probe Sequence
agagaaggacgtcatgctcctgtgc

SEQ ID NO: 140310 - DNA, 25 bp, Probe Sequence
agagagtggaaaaatctcatcttca

SEQ ID NO: 140311 - DNA, 25 bp, Probe Sequence
agagagaggacatctacactttaga

SEQ ID NO: 140312 - DNA, 25 bp, Probe Sequence
agagaaggttgtcccgctttatggg

SEQ ID NO: 140313 - DNA, 25 bp, Probe Sequence
agagccggattcaccgtttggctcg

SEQ ID NO: 140314 - DNA, 25 bp, Probe Sequence
agagccagggctaggccctggtggt

SEQ ID NO: 140315 - DNA, 25 bp, Probe Sequence
agagtcacaggtagtgggtctgctg

SEQ ID NO: 140316 - DNA, 25 bp, Probe Sequence
agagatccacattagcttgttagta

SEQ ID NO: 140317 - DNA, 25 bp, Probe Sequence
agagtctcaatggagttttctattt

SEQ ID NO: 140318 - DNA, 25 bp, Probe Sequence
agagctgccaggaagtgttttttct

SEQ ID NO: 140319 - DNA, 25 bp, Probe Sequence
agactccagaccttttgtttttgct

SEQ ID NO: 140320 - DNA, 25 bp, Probe Sequence
agagtcgaggctgtcttgtatcctg

SEQ ID NO: 140321 - DNA, 25 bp, Probe Sequence
agagatcctttcccatttattctgg

SEQ ID NO: 140322 - DNA, 25 bp, Probe Sequence
agagttgccttaacattgcaattgc

SEQ ID NO: 140323 - DNA, 25 bp, Probe Sequence
agagttcactattctatctgccatt

SEQ ID NO: 140324 - DNA, 25 bp, Probe Sequence
agagcttcacgcactatcgataggg

SEQ ID NO: 140325 - DNA, 25 bp, Probe Sequence
agagctgtcaggaccatgaagccag

SEQ ID NO: 140326 - DNA, 25 bp, Probe Sequence
agactgtgcggggagaatgcgatgg

SEQ ID NO: 140327 - DNA, 25 bp, Probe Sequence
agacttcgggaggactggaggacaa

SEQ ID NO: 140328 - DNA, 25 bp, Probe Sequence
agagctcaggtggaaaaggagggag

SEQ ID NO: 140329 - DNA, 25 bp, Probe Sequence
agagagcaacgaggaaaggagaggg

SEQ ID NO: 140330 - DNA, 25 bp, Probe Sequence
agagacacaccacggaagagaaggg

SEQ ID NO: 140331 - DNA, 25 bp, Probe Sequence
agagcaccacctctggaaatgggag

SEQ ID NO: 140332 - DNA, 25 bp, Probe Sequence
agagaggcaccctggatcttttgac

SEQ ID NO: 140333 - DNA, 25 bp, Probe Sequence
gaggggccacctgtagtatttgcct

SEQ ID NO: 140334 - DNA, 25 bp, Probe Sequence
agagggtaatctggaagagtttcct

SEQ ID NO: 140335 - DNA, 25 bp, Probe Sequence
agagatgagtgactggccaaatgtc

SEQ ID NO: 140336 - DNA, 25 bp, Probe Sequence
agagatgccggcttctacaagtgca

SEQ ID NO: 140337 - DNA, 25 bp, Probe Sequence
agagctgacagtcctgcttagagcc

SEQ ID NO: 140338 - DNA, 25 bp, Probe Sequence
agagtgaaggcaagttaaccatggg

SEQ ID NO: 140339 - DNA, 25 bp, Probe Sequence
agagtgggtgaggttacacctgctg

SEQ ID NO: 140340 - DNA, 25 bp, Probe Sequence
agagcatccggaggttcacaacctc

SEQ ID NO: 140341 - DNA, 25 bp, Probe Sequence
agagatccaaacttcaagcactcca

SEQ ID NO: 140342 - DNA, 25 bp, Probe Sequence
agagtccagaaattctccactcggc

SEQ ID NO: 140343 - DNA, 25 bp, Probe Sequence
agagcctcagaattgctcagccacc

SEQ ID NO: 140344 - DNA, 25 bp, Probe Sequence
agagttcagacttatcaccattctt

SEQ ID NO: 140345 - DNA, 25 bp, Probe Sequence
agagattgagccaagtcagccttct

SEQ ID NO: 140346 - DNA, 25 bp, Probe Sequence
agagatttctccatcaacttgcttg

SEQ ID NO: 140347 - DNA, 25 bp, Probe Sequence
agagtcttctcctcattcatattta

SEQ ID NO: 140348 - DNA, 25 bp, Probe Sequence
agagtatattcctacttatatcttt

SEQ ID NO: 140349 - DNA, 25 bp, Probe Sequence
agagctttacctcttagcacatctt

SEQ ID NO: 140350 - DNA, 25 bp, Probe Sequence
agagctataaccactttgctgccat

SEQ ID NO: 140351 - DNA, 25 bp, Probe Sequence
agagtctagaacttccttccactct

SEQ ID NO: 140352 - DNA, 25 bp, Probe Sequence
agagtgaaaacctctactccatcgc

SEQ ID NO: 140353 - DNA, 25 bp, Probe Sequence
agagtgaaaacctctactccatcgc

SEQ ID NO: 140354 - DNA, 25 bp, Probe Sequence
agagtgaaatacgtgtccaccgctc

SEQ ID NO: 140355 - DNA, 25 bp, Probe Sequence
agagtaactacaatcttcccatgca

SEQ ID NO: 140356 - DNA, 25 bp, Probe Sequence
agagtaactacaatcttcccatgca

SEQ ID NO: 140357 - DNA, 25 bp, Probe Sequence
agagaaaggccaagcggaccagagc

SEQ ID NO: 140358 - DNA, 25 bp, Probe Sequence
agagaagaggccactcagcatccaa

SEQ ID NO: 140359 - DNA, 25 bp, Probe Sequence
agagagttgtcactactagattata

SEQ ID NO: 140360 - DNA, 25 bp, Probe Sequence
agagcagcttgtttgactacacagt

SEQ ID NO: 140361 - DNA, 25 bp, Probe Sequence
agaagcgttttgccgacgcagcttc

SEQ ID NO: 140362 - DNA, 25 bp, Probe Sequence
agagagcctatttgggacagcattc

SEQ ID NO: 140363 - DNA, 25 bp, Probe Sequence
agagcagctcacacagcatggacga

SEQ ID NO: 140364 - DNA, 25 bp, Probe Sequence
agagagtcgcatctcagtgcaggag

SEQ ID NO: 140365 - DNA, 25 bp, Probe Sequence
agagatatcgattttgtccaagttt

SEQ ID NO: 140366 - DNA, 25 bp, Probe Sequence
agagctaggacatagtaaagagatt

SEQ ID NO: 140367 - DNA, 25 bp, Probe Sequence
agagtaggcacgggaaccggcactc

SEQ ID NO: 140368 - DNA, 25 bp, Probe Sequence
agagaatgccacgggtgacctggcc

SEQ ID NO: 140369 - DNA, 25 bp, Probe Sequence
agaaacactcaggcctgacctaggc

SEQ ID NO: 140370 - DNA, 25 bp, Probe Sequence
agactgaactgctccattcctagtc

SEQ ID NO: 140371 - DNA, 25 bp, Probe Sequence
agactaaggccaccttcctaaagct

SEQ ID NO: 140372 - DNA, 25 bp, Probe Sequence
agacgtggggcatccccagaaagac

SEQ ID NO: 140373 - DNA, 25 bp, Probe Sequence
agacattagggtgccagccaggttg

SEQ ID NO: 140374 - DNA, 25 bp, Probe Sequence
agagcttctgggaagtcctcagagt

SEQ ID NO: 140375 - DNA, 25 bp, Probe Sequence
agagcctgccggaagtcggtgatga

SEQ ID NO: 140376 - DNA, 25 bp, Probe Sequence
agacggtatgtgaagggtggatggc

SEQ ID NO: 140377 - DNA, 25 bp, Probe Sequence
agacgtcattgcccagggtattggc

SEQ ID NO: 140378 - DNA, 25 bp, Probe Sequence
agacgtcttgcactcatgagctgtc

SEQ ID NO: 140379 - DNA, 25 bp, Probe Sequence
agacccattgattcaggttgcagtt

SEQ ID NO: 140380 - DNA, 25 bp, Probe Sequence
agagcccttctcttcagttgagatc

SEQ ID NO: 140381 - DNA, 25 bp, Probe Sequence
agaccctgattgcccgtaggttaag

SEQ ID NO: 140382 - DNA, 25 bp, Probe Sequence
agacacgcttttccttaggtatgcc

SEQ ID NO: 140383 - DNA, 25 bp, Probe Sequence
agactccttcgtgatctggggatgt

SEQ ID NO: 140384 - DNA, 25 bp, Probe Sequence
agagtgccattgcctgtttgggaga

SEQ ID NO: 140385 - DNA, 25 bp, Probe Sequence
agacgctatccacgtcataggggtc

SEQ ID NO: 140386 - DNA, 25 bp, Probe Sequence
agacgcatacaaccccagtgttgtt

SEQ ID NO: 140387 - DNA, 25 bp, Probe Sequence
agaccatgtaagggtatgtttttag

SEQ ID NO: 140388 - DNA, 25 bp, Probe Sequence
agacctgtcaaatttagattatgtt

SEQ ID NO: 140389 - DNA, 25 bp, Probe Sequence
agactcgggccacttggagttgtgt

SEQ ID NO: 140390 - DNA, 25 bp, Probe Sequence
agactgggtcctttggagttactgc

SEQ ID NO: 140391 - DNA, 25 bp, Probe Sequence
agacgggagtcctgcaattgtactg

SEQ ID NO: 140392 - DNA, 25 bp, Probe Sequence
agagccaggcgtgcggagggaactt

SEQ ID NO: 140393 - DNA, 25 bp, Probe Sequence
agagccaggcgtgcggagggaactt

SEQ ID NO: 140394 - DNA, 25 bp, Probe Sequence
agacggtggtcttgggggacctgct

SEQ ID NO: 140395 - DNA, 25 bp, Probe Sequence
agactgccgtacactgtgggacttt

SEQ ID NO: 140396 - DNA, 25 bp, Probe Sequence
agacccaggagcactggtacacttc

SEQ ID NO: 140397 - DNA, 25 bp, Probe Sequence
agacgctggggatgctggtacaagt

SEQ ID NO: 140398 - DNA, 25 bp, Probe Sequence
agacgctggggatgctggtacaagt

SEQ ID NO: 140399 - DNA, 25 bp, Probe Sequence
agacctgagaggcgcaggcttcctt

SEQ ID NO: 140400 - DNA, 25 bp, Probe Sequence
agacctgagaggcgcaggcttcctt

SEQ ID NO: 140401 - DNA, 25 bp, Probe Sequence
agaccaaggagcgagctttctctca

SEQ ID NO: 140402 - DNA, 25 bp, Probe Sequence
agagaaaggaccctcttgtctactt

SEQ ID NO: 140403 - DNA, 25 bp, Probe Sequence
agagaagagagactcggttctaact

SEQ ID NO: 140404 - DNA, 25 bp, Probe Sequence
agagaaaatgattagtgtactgttt

SEQ ID NO: 140405 - DNA, 25 bp, Probe Sequence
agaagaataatctacgtgactggtt

SEQ ID NO: 140406 - DNA, 25 bp, Probe Sequence
agagcatggtaacaagagactggat

SEQ ID NO: 140407 - DNA, 25 bp, Probe Sequence
agagcgcgctcataaaggcagctga

SEQ ID NO: 140408 - DNA, 25 bp, Probe Sequence
agagcagcctgattacccagggctg

SEQ ID NO: 140409 - DNA, 25 bp, Probe Sequence
agacagcctgtatcttgggggacag

SEQ ID NO: 140410 - DNA, 25 bp, Probe Sequence
agcacgtcgcttatattgggatgac

SEQ ID NO: 140411 - DNA, 25 bp, Probe Sequence
agacgtttttgtgctgtgggcagca

SEQ ID NO: 140412 - DNA, 25 bp, Probe Sequence
agacgttttgtattctttgaacata

SEQ ID NO: 140413 - DNA, 25 bp, Probe Sequence
agaccaaacaattgtctttgaccat

SEQ ID NO: 140414 - DNA, 25 bp, Probe Sequence
agaccacgcacgtgatttgtccagc

SEQ ID NO: 140415 - DNA, 25 bp, Probe Sequence
agactcatcgccaaagcatcctggc

SEQ ID NO: 140416 - DNA, 25 bp, Probe Sequence
agactcggcgcaaggcccgagaaca

SEQ ID NO: 140417 - DNA, 25 bp, Probe Sequence
agaccggctccgttcggagacagag

SEQ ID NO: 140418 - DNA, 25 bp, Probe Sequence
agaccaggaaagtgccatagacata

SEQ ID NO: 140419 - DNA, 25 bp, Probe Sequence
agaccagggcagtatccatatagga

SEQ ID NO: 140420 - DNA, 25 bp, Probe Sequence
agagaagagggatcacatcgtggag

SEQ ID NO: 140421 - DNA, 25 bp, Probe Sequence
agagaagactagaaaggctgggacc

SEQ ID NO: 140422 - DNA, 25 bp, Probe Sequence
agagacagaccacaagagcagggca

SEQ ID NO: 140423 - DNA, 25 bp, Probe Sequence
agagaccacaacgcagaaggctgaa

SEQ ID NO: 140424 - DNA, 25 bp, Probe Sequence
agagaccagcctggccagtatggtg

SEQ ID NO: 140425 - DNA, 25 bp, Probe Sequence
agagaccagcctggccagtatggtg

SEQ ID NO: 140426 - DNA, 25 bp, Probe Sequence
agagactctgcaggcctggaaggag

SEQ ID NO: 140427 - DNA, 25 bp, Probe Sequence
agagacccagacttggttggcagcg

SEQ ID NO: 140428 - DNA, 25 bp, Probe Sequence
agagtcgccgtctggatgaccagag

SEQ ID NO: 140429 - DNA, 25 bp, Probe Sequence
agagaggccctctagagaatccagg

SEQ ID NO: 140430 - DNA, 25 bp, Probe Sequence
agagagaccctgtcaatcaaccaac

SEQ ID NO: 140431 - DNA, 25 bp, Probe Sequence
agagaaccctggctgaatctcactc

SEQ ID NO: 140432 - DNA, 25 bp, Probe Sequence
agaaccccatgcgggaacttcgcat

SEQ ID NO: 140433 - DNA, 25 bp, Probe Sequence
agagagaaacttgggaacttccatg

SEQ ID NO: 140434 - DNA, 25 bp, Probe Sequence
agagcgaagttggcgggactttcag

SEQ ID NO: 140435 - DNA, 25 bp, Probe Sequence
agagcaaagtgtcagtgccactgaa

SEQ ID NO: 140436 - DNA, 25 bp, Probe Sequence
agagcaaagtgtcagtgccactgaa

SEQ ID NO: 140437 - DNA, 25 bp, Probe Sequence
agagcaaaggtcaaggaccccctct

SEQ ID NO: 140438 - DNA, 25 bp, Probe Sequence
agagcaaaggtcaaggaccccctct

SEQ ID NO: 140439 - DNA, 25 bp, Probe Sequence
agagctaaaacttgaacccagactt

SEQ ID NO: 140440 - DNA, 25 bp, Probe Sequence
agagctaaaagcagaactaccactt

SEQ ID NO: 140441 - DNA, 25 bp, Probe Sequence
agagctcaaaacactacatccacat

SEQ ID NO: 140442 - DNA, 25 bp, Probe Sequence
agagacaaaatcagccaatccacca

SEQ ID NO: 140443 - DNA, 25 bp, Probe Sequence
agagacaaaagcagccgatccacca

SEQ ID NO: 140444 - DNA, 25 bp, Probe Sequence
agagacaaaagtacgtcccagccac

SEQ ID NO: 140445 - DNA, 25 bp, Probe Sequence
agagaaactgaagcagtccctgccc

SEQ ID NO: 140446 - DNA, 25 bp, Probe Sequence
agagccaactttgggttcctgctca

SEQ ID NO: 140447 - DNA, 25 bp, Probe Sequence
agagaatatttttggcattcctctc

SEQ ID NO: 140448 - DNA, 25 bp, Probe Sequence
agagaagtgatgagcaccattcctt

SEQ ID NO: 140449 - DNA, 25 bp, Probe Sequence
agagacaattgcagaccttttggtt

SEQ ID NO: 140450 - DNA, 25 bp, Probe Sequence
agagatggcattacgaacctttggc

SEQ ID NO: 140451 - DNA, 25 bp, Probe Sequence
agcgtgacttctaaactttatccca

SEQ ID NO: 140452 - DNA, 25 bp, Probe Sequence
agagaggcttctaacaattttacag

SEQ ID NO: 140453 - DNA, 25 bp, Probe Sequence
agagagtttgtcaccagttaagcag

SEQ ID NO: 140454 - DNA, 25 bp, Probe Sequence
agagagtttggcgcgatgtctcaca

SEQ ID NO: 140455 - DNA, 25 bp, Probe Sequence
agagaattatgtggcctcatcctcc

SEQ ID NO: 140456 - DNA, 25 bp, Probe Sequence
agagaatggattggtcctgcctttt

SEQ ID NO: 140457 - DNA, 25 bp, Probe Sequence
agagaaggtctcattcggtgttttg

SEQ ID NO: 140458 - DNA, 25 bp, Probe Sequence
agagaaagttagttcggctcgattt

SEQ ID NO: 140459 - DNA, 25 bp, Probe Sequence
agagataaggtgatgtcagagttta

SEQ ID NO: 140460 - DNA, 25 bp, Probe Sequence
agagaaatgcctagtgtctatttta

SEQ ID NO: 140461 - DNA, 25 bp, Probe Sequence
agagtaatccaactgactaatcttg

SEQ ID NO: 140462 - DNA, 25 bp, Probe Sequence
agagtagatcactgctttattcttg

SEQ ID NO: 140463 - DNA, 25 bp, Probe Sequence
agagctctggtctgttgtatctcta

SEQ ID NO: 140464 - DNA, 25 bp, Probe Sequence
agagcctttcacctaatcatgtcta

SEQ ID NO: 140465 - DNA, 25 bp, Probe Sequence
agaccttctgagtcttctgcagtct

SEQ ID NO: 140466 - DNA, 25 bp, Probe Sequence
agactttagatgtcttgtattaaaa

SEQ ID NO: 140467 - DNA, 25 bp, Probe Sequence
agagcttctggacttacatttagat

SEQ ID NO: 140468 - DNA, 25 bp, Probe Sequence
agactaggaagcacatctttcagat

SEQ ID NO: 140469 - DNA, 25 bp, Probe Sequence
agactaggaagcacatctttcagat

SEQ ID NO: 140470 - DNA, 25 bp, Probe Sequence
agactgaggcagctaacctgggcac

SEQ ID NO: 140471 - DNA, 25 bp, Probe Sequence
agagctcaccagtaacacctgtgtg

SEQ ID NO: 140472 - DNA, 25 bp, Probe Sequence
agagaaacagtccacctctgtgtct

SEQ ID NO: 140473 - DNA, 25 bp, Probe Sequence
agagatcaacacatctcactcattt

SEQ ID NO: 140474 - DNA, 25 bp, Probe Sequence
agagatgccatgatatcacttcttc

SEQ ID NO: 140475 - DNA, 25 bp, Probe Sequence
agagatcctgatcacggtgctgtct

SEQ ID NO: 140476 - DNA, 25 bp, Probe Sequence
agagatcaccaatctggactgtact

SEQ ID NO: 140477 - DNA, 25 bp, Probe Sequence
agagccagccaatgtgggcgtcact

SEQ ID NO: 140478 - DNA, 25 bp, Probe Sequence
agagcagatgccatcttctggcttc

SEQ ID NO: 140479 - DNA, 25 bp, Probe Sequence
agagacactttcactgtgttgccca

SEQ ID NO: 140480 - DNA, 25 bp, Probe Sequence
agagacacagttgacattgcctccc

SEQ ID NO: 140481 - DNA, 25 bp, Probe Sequence
agagagcacagctgtgacttcctcc

SEQ ID NO: 140482 - DNA, 25 bp, Probe Sequence
agagactgcgcaggcgcagttcccc

SEQ ID NO: 140483 - DNA, 25 bp, Probe Sequence
agagacggcacccagaatcagatcc

SEQ ID NO: 140484 - DNA, 25 bp, Probe Sequence
agagaagcagaacagcccagagccc

SEQ ID NO: 140485 - DNA, 25 bp, Probe Sequence
agagaagcagaacagcccagagccc

SEQ ID NO: 140486 - DNA, 25 bp, Probe Sequence
agagaagcaaccaccacaagctctc

SEQ ID NO: 140487 - DNA, 25 bp, Probe Sequence
agagattcaaagcctccacgactct

SEQ ID NO: 140488 - DNA, 25 bp, Probe Sequence
agagttttgattaccactgacctgc

SEQ ID NO: 140489 - DNA, 25 bp, Probe Sequence
agagactcttgacaccggtctctgc

SEQ ID NO: 140490 - DNA, 25 bp, Probe Sequence
agacctctagggtcctggttcatca

SEQ ID NO: 140491 - DNA, 25 bp, Probe Sequence
agaaatcttggagccgctggacact

SEQ ID NO: 140492 - DNA, 25 bp, Probe Sequence
agaactcgtagctcatttaagccta

SEQ ID NO: 140493 - DNA, 25 bp, Probe Sequence
agagaccagttcttttagaagccac

SEQ ID NO: 140494 - DNA, 25 bp, Probe Sequence
agagaccaggtaatttctaagaaca

SEQ ID NO: 140495 - DNA, 25 bp, Probe Sequence
agaagccgaggcagttgttgaaacc

SEQ ID NO: 140496 - DNA, 25 bp, Probe Sequence
agagaggcctgtccagtctttgaaa

SEQ ID NO: 140497 - DNA, 25 bp, Probe Sequence
agagcagaactgtacccttagagaa

SEQ ID NO: 140498 - DNA, 25 bp, Probe Sequence
agagacaaggctgctgctattagag

SEQ ID NO: 140499 - DNA, 25 bp, Probe Sequence
agagatcacctcacatccattaaga

SEQ ID NO: 140500 - DNA, 25 bp, Probe Sequence
agagaatcactcaattcctattgga

SEQ ID NO: 140501 - DNA, 25 bp, Probe Sequence
agacctgcctgctttatctaatgta

SEQ ID NO: 140502 - DNA, 25 bp, Probe Sequence
agagcctgtctgctatagctcagtg

SEQ ID NO: 140503 - DNA, 25 bp, Probe Sequence
agagccagattttgctgagccgctg

SEQ ID NO: 140504 - DNA, 25 bp, Probe Sequence
agagctgatgaggttgctgcagccc

SEQ ID NO: 140505 - DNA, 25 bp, Probe Sequence
agagctatgaccactcaaggcacca

SEQ ID NO: 140506 - DNA, 25 bp, Probe Sequence
agaccatgatccacaatgggcctcc

SEQ ID NO: 140507 - DNA, 25 bp, Probe Sequence
agacgctgtccaagtacgagtccag

SEQ ID NO: 140508 - DNA, 25 bp, Probe Sequence
agacctgaacttccctgagatcaaa

SEQ ID NO: 140509 - DNA, 25 bp, Probe Sequence
agaccatgaatcctccttgagaagt

SEQ ID NO: 140510 - DNA, 25 bp, Probe Sequence
agagccaagagcctctcagtagagg

SEQ ID NO: 140511 - DNA, 25 bp, Probe Sequence
agagacatagagatagagacagaga

SEQ ID NO: 140512 - DNA, 25 bp, Probe Sequence
agagaattcagtcaggggagcacca

SEQ ID NO: 140513 - DNA, 25 bp, Probe Sequence
agacgtaaggcgtggagacagctcc

SEQ ID NO: 140514 - DNA, 25 bp, Probe Sequence
agacggtggcgcgattgggacagtc

SEQ ID NO: 140515 - DNA, 25 bp, Probe Sequence
agagcgggcgcaagaaagtgacggc

SEQ ID NO: 140516 - DNA, 25 bp, Probe Sequence
agagcggtgcgatgatgacagtgtc

SEQ ID NO: 140517 - DNA, 25 bp, Probe Sequence
agagcgatgacctagagtatctgga

SEQ ID NO: 140518 - DNA, 25 bp, Probe Sequence
agagcagcttccgataggacctgcc

SEQ ID NO: 140519 - DNA, 25 bp, Probe Sequence
agagcagttagccgagagcatcctc

SEQ ID NO: 140520 - DNA, 25 bp, Probe Sequence
agagagcttgagcgctatgtccttt

SEQ ID NO: 140521 - DNA, 25 bp, Probe Sequence
agagatctaagctgctttccatctt

SEQ ID NO: 140522 - DNA, 25 bp, Probe Sequence
agagatggcaatgttttccttgttc

SEQ ID NO: 140523 - DNA, 25 bp, Probe Sequence
agagagacaagcattttgccaagat

SEQ ID NO: 140524 - DNA, 25 bp, Probe Sequence
agagagaagccactttattccctgt

SEQ ID NO: 140525 - DNA, 25 bp, Probe Sequence
agaagacagtgactctttttccctg

SEQ ID NO: 140526 - DNA, 25 bp, Probe Sequence
agaccacagtgttttggttccctga

SEQ ID NO: 140527 - DNA, 25 bp, Probe Sequence
agaccacagtgttttggttccctga

SEQ ID NO: 140528 - DNA, 25 bp, Probe Sequence
agagccaagttatatgttcttgtct

SEQ ID NO: 140529 - DNA, 25 bp, Probe Sequence
agacccgttcaaattatcttgctga

SEQ ID NO: 140530 - DNA, 25 bp, Probe Sequence
agagcactacttgtttcatttgttt

SEQ ID NO: 140531 - DNA, 25 bp, Probe Sequence
agagaatgacttctgccttcatctg

SEQ ID NO: 140532 - DNA, 25 bp, Probe Sequence
agagactggtgacacgcttctgagc

SEQ ID NO: 140533 - DNA, 25 bp, Probe Sequence
agagatcatgcgaactacagtttgg

SEQ ID NO: 140534 - DNA, 25 bp, Probe Sequence
agagattgacgagagatgtgttggt

SEQ ID NO: 140535 - DNA, 25 bp, Probe Sequence
agagacggcagagatatgttgctag

SEQ ID NO: 140536 - DNA, 25 bp, Probe Sequence
agagagcggctggttcattgtgtgt

SEQ ID NO: 140537 - DNA, 25 bp, Probe Sequence
agagcaggcctcattatgtggagca

SEQ ID NO: 140538 - DNA, 25 bp, Probe Sequence
agacggacctgtctgtcagagttcg

SEQ ID NO: 140539 - DNA, 25 bp, Probe Sequence
agacagtaacgtcagttgatgctgg

SEQ ID NO: 140540 - DNA, 25 bp, Probe Sequence
agactgcttcacctgtagtaactgc

SEQ ID NO: 140541 - DNA, 25 bp, Probe Sequence
agactttttgtatgtcaacagaaaa

SEQ ID NO: 140542 - DNA, 25 bp, Probe Sequence
agacttttctgtgccaaatcctaaa

SEQ ID NO: 140543 - DNA, 25 bp, Probe Sequence
agactgatcggctgcgcgaaatcct

SEQ ID NO: 140544 - DNA, 25 bp, Probe Sequence
agacgtgctgtattgcccagaagcc

SEQ ID NO: 140545 - DNA, 25 bp, Probe Sequence
agacgtggctacttcatcaacaata

SEQ ID NO: 140546 - DNA, 25 bp, Probe Sequence
agaactgaggactattcaagcgatg

SEQ ID NO: 140547 - DNA, 25 bp, Probe Sequence
agagcagtggggtttcaaggaaagc

SEQ ID NO: 140548 - DNA, 25 bp, Probe Sequence
agagctgggaggcttcacagagaag

SEQ ID NO: 140549 - DNA, 25 bp, Probe Sequence
agagctgggaggcttcacagagaag

SEQ ID NO: 140550 - DNA, 25 bp, Probe Sequence
agactgggaggcatgacaagtaaag

SEQ ID NO: 140551 - DNA, 25 bp, Probe Sequence
agagctttggccttgacaacatcaa

SEQ ID NO: 140552 - DNA, 25 bp, Probe Sequence
agacatttggacaaactcaatcaaa

SEQ ID NO: 140553 - DNA, 25 bp, Probe Sequence
agacttagaaatagactagaccaag

SEQ ID NO: 140554 - DNA, 25 bp, Probe Sequence
agacatgtaaattagttctagtaaa

SEQ ID NO: 140555 - DNA, 25 bp, Probe Sequence
agagcgaaactctgtctcaaaaaaa

SEQ ID NO: 140556 - DNA, 25 bp, Probe Sequence
agagcgaaactccatctcaaaaaaa

SEQ ID NO: 140557 - DNA, 25 bp, Probe Sequence
agagcaagactctgtcttaaaaaaa

SEQ ID NO: 140558 - DNA, 25 bp, Probe Sequence
agagcgagactctgtctgaaaaaaa

SEQ ID NO: 140559 - DNA, 25 bp, Probe Sequence
agagcaacactctgtctcaaaaaaa

SEQ ID NO: 140560 - DNA, 25 bp, Probe Sequence
agagcaagactctgtctcaaaaaga

SEQ ID NO: 140561 - DNA, 25 bp, Probe Sequence
agagcaagactctgtctcaaaaaaa

SEQ ID NO: 140562 - DNA, 25 bp, Probe Sequence
agagcaagactctgtctcaaaaaaa

SEQ ID NO: 140563 - DNA, 25 bp, Probe Sequence
agagcaagactctgtctccaaaaaa

SEQ ID NO: 140564 - DNA, 25 bp, Probe Sequence
aacggactattgttcagctagaaaa

SEQ ID NO: 140565 - DNA, 25 bp, Probe Sequence
aaccacacatttgtaccgaattggc

SEQ ID NO: 140566 - DNA, 25 bp, Probe Sequence
accacactctttgttcacgtttgaa

SEQ ID NO: 140567 - DNA, 25 bp, Probe Sequence
accactccgattggttacgatcgaa

SEQ ID NO: 140568 - DNA, 25 bp, Probe Sequence
accaatctggactgtactcgggaga

SEQ ID NO: 140569 - DNA, 25 bp, Probe Sequence
agaccctggagctgtacttggccag

SEQ ID NO: 140570 - DNA, 25 bp, Probe Sequence
agaccctggagctgtacttggccag

SEQ ID NO: 140571 - DNA, 25 bp, Probe Sequence
agagccggtggagtgtacttgtccc

SEQ ID NO: 140572 - DNA, 25 bp, Probe Sequence
agagacggggtttcaccatgttgcc

SEQ ID NO: 140573 - DNA, 25 bp, Probe Sequence
agagacttgtccttaccacaaggcc

SEQ ID NO: 140574 - DNA, 25 bp, Probe Sequence
agagatgaagctactttcccagggc

SEQ ID NO: 140575 - DNA, 25 bp, Probe Sequence
agagagcagcctgattacccagggc

SEQ ID NO: 140576 - DNA, 25 bp, Probe Sequence
aaaaccccactatccacggatagtg

SEQ ID NO: 140577 - DNA, 25 bp, Probe Sequence
agaaactctctcttacttactggga

SEQ ID NO: 140578 - DNA, 25 bp, Probe Sequence
aataagcctctctgttgaaacggtc

SEQ ID NO: 140579 - DNA, 25 bp, Probe Sequence
agaaagtctgcctgtttagtaagtg

SEQ ID NO: 140580 - DNA, 25 bp, Probe Sequence
agaatgaggttctgtgttttgaagg

SEQ ID NO: 140581 - DNA, 25 bp, Probe Sequence
agacaactgttctgcgggttggaga

SEQ ID NO: 140582 - DNA, 25 bp, Probe Sequence
actgaacttcagtggagggtggtga

SEQ ID NO: 140583 - DNA, 25 bp, Probe Sequence
agcttagcccaaaggggttgtgaat

SEQ ID NO: 140584 - DNA, 25 bp, Probe Sequence
agctttgaccagagggacctggcac

SEQ ID NO: 140585 - DNA, 25 bp, Probe Sequence
agagctttggggtggatcctgtcac

SEQ ID NO: 140586 - DNA, 25 bp, Probe Sequence
agactcttgggccagggggcattct

SEQ ID NO: 140587 - DNA, 25 bp, Probe Sequence
agactttgaggacgatggtggcccc

SEQ ID NO: 140588 - DNA, 25 bp, Probe Sequence
agactggttgggccatggtgtctct

SEQ ID NO: 140589 - DNA, 25 bp, Probe Sequence
agactggttgggccatggtgtctct

SEQ ID NO: 140590 - DNA, 25 bp, Probe Sequence
agagctggttacccagcagttgccc

SEQ ID NO: 140591 - DNA, 25 bp, Probe Sequence
agacggtgaacccaattggccatct

SEQ ID NO: 140592 - DNA, 25 bp, Probe Sequence
agacttttagctggacacggaccta

SEQ ID NO: 140593 - DNA, 25 bp, Probe Sequence
agactttactgcagcacagtggcca

SEQ ID NO: 140594 - DNA, 25 bp, Probe Sequence
agactttcactttctagctagcaga

SEQ ID NO: 140595 - DNA, 25 bp, Probe Sequence
agagcttggccttaatagtgtagat

SEQ ID NO: 140596 - DNA, 25 bp, Probe Sequence
agactatatgttttgaagtttgata

SEQ ID NO: 140597 - DNA, 25 bp, Probe Sequence
agaccagctggcctctaagtatctg

SEQ ID NO: 140598 - DNA, 25 bp, Probe Sequence
agagcaagtgtcccatgaatgtgat

SEQ ID NO: 140599 - DNA, 25 bp, Probe Sequence
agagcctgtgctaccgcaagatagc

SEQ ID NO: 140600 - DNA, 25 bp, Probe Sequence
agagcatctctgtgaccaagatcac

SEQ ID NO: 140601 - DNA, 25 bp, Probe Sequence
agagcagtgcttggattcagcctcc

SEQ ID NO: 140602 - DNA, 25 bp, Probe Sequence
agagcagatcttgagtgtactccag

SEQ ID NO: 140603 - DNA, 25 bp, Probe Sequence
agaaatcattatcttagccaccaga

SEQ ID NO: 140604 - DNA, 25 bp, Probe Sequence
agagaagcactacagttgtcaagaa

SEQ ID NO: 140605 - DNA, 25 bp, Probe Sequence
agagaaggtagttaatgcagtagaa

SEQ ID NO: 140606 - DNA, 25 bp, Probe Sequence
agaccaggctggccaacatggtaaa

SEQ ID NO: 140607 - DNA, 25 bp, Probe Sequence
agaccagcctgcagctgatcatgga

SEQ ID NO: 140608 - DNA, 25 bp, Probe Sequence
agacgcacctgcgggacatgatcat

SEQ ID NO: 140609 - DNA, 25 bp, Probe Sequence
agacgagctgtggggatctggcact

SEQ ID NO: 140610 - DNA, 25 bp, Probe Sequence
agagctgagccttggcagtggggcg

SEQ ID NO: 140611 - DNA, 25 bp, Probe Sequence
agagctgagccttggcagtggggcg

SEQ ID NO: 140612 - DNA, 25 bp, Probe Sequence
agagcatcatgctttgaggtttggg

SEQ ID NO: 140613 - DNA, 25 bp, Probe Sequence
agagcattcatcgtgaggggtcttt

SEQ ID NO: 140614 - DNA, 25 bp, Probe Sequence
agagcttatctctggtgtgtgctgt

SEQ ID NO: 140615 - DNA, 25 bp, Probe Sequence
agagcattcatcgatcctcttggtt

SEQ ID NO: 140616 - DNA, 25 bp, Probe Sequence
agagcatgtctggcatagcagcctg

SEQ ID NO: 140617 - DNA, 25 bp, Probe Sequence
agagacctgcagaagagcgtggagg

SEQ ID NO: 140618 - DNA, 25 bp, Probe Sequence
agagcatccggcatgagggctgaga

SEQ ID NO: 140619 - DNA, 25 bp, Probe Sequence
agagcatccggcatgagggctgaga

SEQ ID NO: 140620 - DNA, 25 bp, Probe Sequence
agactccagcagccaagatggtgaa

SEQ ID NO: 140621 - DNA, 25 bp, Probe Sequence
agactctacatgtaggatggtaacc

SEQ ID NO: 140622 - DNA, 25 bp, Probe Sequence
agactggatcgatggtgttctcaac

SEQ ID NO: 140623 - DNA, 25 bp, Probe Sequence
agactggatcaatgtgggtcagcta

SEQ ID NO: 140624 - DNA, 25 bp, Probe Sequence
agacggacatagtcgtggatcacta

SEQ ID NO: 140625 - DNA, 25 bp, Probe Sequence
agagcaggaacttctgtgtatatct

SEQ ID NO: 140626 - DNA, 25 bp, Probe Sequence
agacatcgcaacgctgaggattcag

SEQ ID NO: 140627 - DNA, 25 bp, Probe Sequence
agagctggcccgacaagaatacaac

SEQ ID NO: 140628 - DNA, 25 bp, Probe Sequence
agactgaggcaaataagactacaga

SEQ ID NO: 140629 - DNA, 25 bp, Probe Sequence
agacatcgagcatatgaaatttcca

SEQ ID NO: 140630 - DNA, 25 bp, Probe Sequence
agactctgaatgggactgagtccca

SEQ ID NO: 140631 - DNA, 25 bp, Probe Sequence
agactgttcatggtactgtggctca

SEQ ID NO: 140632 - DNA, 25 bp, Probe Sequence
agactacactgcttacgttgccatg

SEQ ID NO: 140633 - DNA, 25 bp, Probe Sequence
agagcatacaactgaatgtgccctt

SEQ ID NO: 140634 - DNA, 25 bp, Probe Sequence
agagaacatcacagagcagccagcc

SEQ ID NO: 140635 - DNA, 25 bp, Probe Sequence
agagacacacaagagcaccaaagca

SEQ ID NO: 140636 - DNA, 25 bp, Probe Sequence
agcaaattcaagagtccagacggga

SEQ ID NO: 140637 - DNA, 25 bp, Probe Sequence
agcaaaaaagatcaccgccgcgagt

SEQ ID NO: 140638 - DNA, 25 bp, Probe Sequence
agcaaaaaagatcaccgccgcgagt

SEQ ID NO: 140639 - DNA, 25 bp, Probe Sequence
agagaacgaagaaatcccccgagca

SEQ ID NO: 140640 - DNA, 25 bp, Probe Sequence
agaaaccgaagatccctctctggat

SEQ ID NO: 140641 - DNA, 25 bp, Probe Sequence
agacatcccgaagaggcctttctct

SEQ ID NO: 140642 - DNA, 25 bp, Probe Sequence
aaattccaagcctgtagtgtccttc

SEQ ID NO: 140643 - DNA, 25 bp, Probe Sequence
agactggccaagccactgtggcttc

SEQ ID NO: 140644 - DNA, 25 bp, Probe Sequence
agactggtaagccagacaggcctcc

SEQ ID NO: 140645 - DNA, 25 bp, Probe Sequence
agactgttaattcctcatgcgttgc

SEQ ID NO: 140646 - DNA, 25 bp, Probe Sequence
agactgttaattcctcatgcgttgc

SEQ ID NO: 140647 - DNA, 25 bp, Probe Sequence
agactgctaagcggcgacacgtatg

SEQ ID NO: 140648 - DNA, 25 bp, Probe Sequence
agactgctaagcggcgacacgtatg

SEQ ID NO: 140649 - DNA, 25 bp, Probe Sequence
agacttgaagcacagagggctaggg

SEQ ID NO: 140650 - DNA, 25 bp, Probe Sequence
agacctggacactagggtcaggcgg

SEQ ID NO: 140651 - DNA, 25 bp, Probe Sequence
agaccgtcaatggagcagaggcggg

SEQ ID NO: 140652 - DNA, 25 bp, Probe Sequence
agaccttcatcagtgacgtgctgca

SEQ ID NO: 140653 - DNA, 25 bp, Probe Sequence
agacctatgccaatactgggaggtt

SEQ ID NO: 140654 - DNA, 25 bp, Probe Sequence
agagccctgaagtgctccgggcatt

SEQ ID NO: 140655 - DNA, 25 bp, Probe Sequence
agacctgtgacgtcctcaaggagtt

SEQ ID NO: 140656 - DNA, 25 bp, Probe Sequence
agagctcgggagcccggagggtctt

SEQ ID NO: 140657 - DNA, 25 bp, Probe Sequence
agagctcgggagcccggagggtctt

SEQ ID NO: 140658 - DNA, 25 bp, Probe Sequence
agagctggaaggccctggagcgggc

SEQ ID NO: 140659 - DNA, 25 bp, Probe Sequence
agagctggaaggccctggagcgggc

SEQ ID NO: 140660 - DNA, 25 bp, Probe Sequence
agagcagggaggcagtgggggagga

SEQ ID NO: 140661 - DNA, 25 bp, Probe Sequence
agaccaggcctgcaggggatggaac

SEQ ID NO: 140662 - DNA, 25 bp, Probe Sequence
agaccaggcctgcaggggatggaac

SEQ ID NO: 140663 - DNA, 25 bp, Probe Sequence
agaccagccctggcaacgtagtgaa

SEQ ID NO: 140664 - DNA, 25 bp, Probe Sequence
agagcctcttatgatatccttgtga

SEQ ID NO: 140665 - DNA, 25 bp, Probe Sequence
agagcaccaaatgatctgccctgga

SEQ ID NO: 140666 - DNA, 25 bp, Probe Sequence
agagacggagtactctgccttggag

SEQ ID NO: 140667 - DNA, 25 bp, Probe Sequence
agacagcttagaagtccaagggaga

SEQ ID NO: 140668 - DNA, 25 bp, Probe Sequence
agagccaatcagacgtcgcagagcc

SEQ ID NO: 140669 - DNA, 25 bp, Probe Sequence
agagccagatgagcgggcagcagct

SEQ ID NO: 140670 - DNA, 25 bp, Probe Sequence
agagcacagatctgtttcgtgcatt

SEQ ID NO: 140671 - DNA, 25 bp, Probe Sequence
agagcaagatagccttccactgatt

SEQ ID NO: 140672 - DNA, 25 bp, Probe Sequence
agacaacgcaggttgccgcatactt

SEQ ID NO: 140673 - DNA, 25 bp, Probe Sequence
agacatcctgagcagtgccagcttt

SEQ ID NO: 140674 - DNA, 25 bp, Probe Sequence
agagcagccaggaggccagcatggc

SEQ ID NO: 140675 - DNA, 25 bp, Probe Sequence
agacgcatctggaggctccagtccc

SEQ ID NO: 140676 - DNA, 25 bp, Probe Sequence
agacctttgagagcctagcccaggc

SEQ ID NO: 140677 - DNA, 25 bp, Probe Sequence
agaaggtacagagcctccgaagggc

SEQ ID NO: 140678 - DNA, 25 bp, Probe Sequence
agacaccgaagagccctgtaggggt

SEQ ID NO: 140679 - DNA, 25 bp, Probe Sequence
agacctcaaggcagcacctgtaggg

SEQ ID NO: 140680 - DNA, 25 bp, Probe Sequence
agacctcaagaaagcaacgaaagga

SEQ ID NO: 140681 - DNA, 25 bp, Probe Sequence
agacctgccaagagcaacaacctag

SEQ ID NO: 140682 - DNA, 25 bp, Probe Sequence
agacctctccagagcacttagtgct

SEQ ID NO: 140683 - DNA, 25 bp, Probe Sequence
agacttccagcgagttcttgatgtg

SEQ ID NO: 140684 - DNA, 25 bp, Probe Sequence
agactctcccgtggatgacggatga

SEQ ID NO: 140685 - DNA, 25 bp, Probe Sequence
agaccatcactctcgaagtggagcc

SEQ ID NO: 140686 - DNA, 25 bp, Probe Sequence
agaccatcactctcgaagtggagcc

SEQ ID NO: 140687 - DNA, 25 bp, Probe Sequence
agaccatcactctcgaggtggagcc

SEQ ID NO: 140688 - DNA, 25 bp, Probe Sequence
agaccatcactctcgaggtggagcc

SEQ ID NO: 140689 - DNA, 25 bp, Probe Sequence
agacccacatcagcaagggtacgct

SEQ ID NO: 140690 - DNA, 25 bp, Probe Sequence
agaccgcagcacacacaggtctacc

SEQ ID NO: 140691 - DNA, 25 bp, Probe Sequence
agacctagaatggcacagatgactt

SEQ ID NO: 140692 - DNA, 25 bp, Probe Sequence
agagccttgattgaagatatattct

SEQ ID NO: 140693 - DNA, 25 bp, Probe Sequence
agactcgattttacatgatattttg

SEQ ID NO: 140694 - DNA, 25 bp, Probe Sequence
agactcttcatttacttttctggta

SEQ ID NO: 140695 - DNA, 25 bp, Probe Sequence
agagctattcatgccattttttggg

SEQ ID NO: 140696 - DNA, 25 bp, Probe Sequence
agagctatgatagcaataatgtacg

SEQ ID NO: 140697 - DNA, 25 bp, Probe Sequence
agagcatatctcgccaggatgtagg

SEQ ID NO: 140698 - DNA, 25 bp, Probe Sequence
agagcatctttcccattgagtctgg

SEQ ID NO: 140699 - DNA, 25 bp, Probe Sequence
agagcatgtttaccagtttgatgat

SEQ ID NO: 140700 - DNA, 25 bp, Probe Sequence
agagcattgtgcaatacagtttcat

SEQ ID NO: 140701 - DNA, 25 bp, Probe Sequence
agagccagctgttcagcgtactctt

SEQ ID NO: 140702 - DNA, 25 bp, Probe Sequence
agaccatcactgtcactttctttaa

SEQ ID NO: 140703 - DNA, 25 bp, Probe Sequence
agagcaatagtatttctttatatcc

SEQ ID NO: 140704 - DNA, 25 bp, Probe Sequence
agagcaatagaacctttaagacagt

SEQ ID NO: 140705 - DNA, 25 bp, Probe Sequence
agacttaatgagactttaaaagcat

SEQ ID NO: 140706 - DNA, 25 bp, Probe Sequence
agacttgagcttgtttaaatgctgc

SEQ ID NO: 140707 - DNA, 25 bp, Probe Sequence
agactcattgcttaattctaagact

SEQ ID NO: 140708 - DNA, 25 bp, Probe Sequence
agagccttgctttattactcaatta

SEQ ID NO: 140709 - DNA, 25 bp, Probe Sequence
agagcacttttgtattgtaatttat

SEQ ID NO: 140710 - DNA, 25 bp, Probe Sequence
agagctctgctatgactataagttt

SEQ ID NO: 140711 - DNA, 25 bp, Probe Sequence
agagctgccaaagccaactgatgtt

SEQ ID NO: 140712 - DNA, 25 bp, Probe Sequence
agcacggcatcgtcaccaactggga

SEQ ID NO: 140713 - DNA, 25 bp, Probe Sequence
agcaaggaaggctcaactcgggctt

SEQ ID NO: 140714 - DNA, 25 bp, Probe Sequence
agaccgaatggtgcaagctcttcct

SEQ ID NO: 140715 - DNA, 25 bp, Probe Sequence
agaccaagagcctcaacatttccta

SEQ ID NO: 140716 - DNA, 25 bp, Probe Sequence
agacaccaggtcgaaaattttcaag

SEQ ID NO: 140717 - DNA, 25 bp, Probe Sequence
agacatcgcatcatcaaaagttatc

SEQ ID NO: 140718 - DNA, 25 bp, Probe Sequence
agagcatagctccaaaagtgatatt

SEQ ID NO: 140719 - DNA, 25 bp, Probe Sequence
agagcccagcaaatagcgtgaagtt

SEQ ID NO: 140720 - DNA, 25 bp, Probe Sequence
agagcccaagatcaatgctcaagtt

SEQ ID NO: 140721 - DNA, 25 bp, Probe Sequence
agagcagttcaatgaagctcaactt

SEQ ID NO: 140722 - DNA, 25 bp, Probe Sequence
agagaatccacactgaagctcttcc

SEQ ID NO: 140723 - DNA, 25 bp, Probe Sequence
agagaatttccgtctgatctatgac

SEQ ID NO: 140724 - DNA, 25 bp, Probe Sequence
agagcacatttgcctactaatggaa

SEQ ID NO: 140725 - DNA, 25 bp, Probe Sequence
agaccctgtggctagaagtggcaga

SEQ ID NO: 140726 - DNA, 25 bp, Probe Sequence
agagcccctggatgactatgtgaat

SEQ ID NO: 140727 - DNA, 25 bp, Probe Sequence
agacccctggcatgtgctaagtgta

SEQ ID NO: 140728 - DNA, 25 bp, Probe Sequence
agaagcccagggtgacaagattatt

SEQ ID NO: 140729 - DNA, 25 bp, Probe Sequence
agaaggaacgagttgaagcagttaa

SEQ ID NO: 140730 - DNA, 25 bp, Probe Sequence
agaaaacacgaatgcaaagtcaagt

SEQ ID NO: 140731 - DNA, 25 bp, Probe Sequence
agaagaaactgaacccaagctaaca

SEQ ID NO: 140732 - DNA, 25 bp, Probe Sequence
agaaaagcattgaaactaccaaaat

SEQ ID NO: 140733 - DNA, 25 bp, Probe Sequence
agaccacacgtgagcctgtgctcaa

SEQ ID NO: 140734 - DNA, 25 bp, Probe Sequence
agaaagaagaacctcggccacaggg

SEQ ID NO: 140735 - DNA, 25 bp, Probe Sequence
agaaattaaacctcagcagcaatgg

SEQ ID NO: 140736 - DNA, 25 bp, Probe Sequence
agactttaaaccttatcaccatgct

SEQ ID NO: 140737 - DNA, 25 bp, Probe Sequence
agagctaaagaagggtgacaccatc

SEQ ID NO: 140738 - DNA, 25 bp, Probe Sequence
agagcctaagcctggagacctgatt

SEQ ID NO: 140739 - DNA, 25 bp, Probe Sequence
agacgcatcacctagttaacctgct

SEQ ID NO: 140740 - DNA, 25 bp, Probe Sequence
agaccctcactagtaaacttcagga

SEQ ID NO: 140741 - DNA, 25 bp, Probe Sequence
agagcgactccaagagaaccttcaa

SEQ ID NO: 140742 - DNA, 25 bp, Probe Sequence
agagcagcctctatgaacaacctcg

SEQ ID NO: 140743 - DNA, 25 bp, Probe Sequence
agagcagcctttcgagaaacgttca

SEQ ID NO: 140744 - DNA, 25 bp, Probe Sequence
agacacttggcacaaaacctggcac

SEQ ID NO: 140745 - DNA, 25 bp, Probe Sequence
agacctcatctgcagaaacacctac

SEQ ID NO: 140746 - DNA, 25 bp, Probe Sequence
agactctcatcatgcaaattagcca

SEQ ID NO: 140747 - DNA, 25 bp, Probe Sequence
agactcatgcacaagcttcaatagc

SEQ ID NO: 140748 - DNA, 25 bp, Probe Sequence
agacatgtccgagtccaagagcggc

SEQ ID NO: 140749 - DNA, 25 bp, Probe Sequence
agacatgactagttaacaacacagc

SEQ ID NO: 140750 - DNA, 25 bp, Probe Sequence
agagcaactcagcaggacacagaac

SEQ ID NO: 140751 - DNA, 25 bp, Probe Sequence
agagcagagcatttaacccagaatc

SEQ ID NO: 140752 - DNA, 25 bp, Probe Sequence
agaaggcgacgatgaccggactgtg

SEQ ID NO: 140753 - DNA, 25 bp, Probe Sequence
agaagttcctgatgaccgcgacttc

SEQ ID NO: 140754 - DNA, 25 bp, Probe Sequence
agaagttcctgatgaccgcgacttc

SEQ ID NO: 140755 - DNA, 25 bp, Probe Sequence
agacgtggcctgtaggcactgtctc

SEQ ID NO: 140756 - DNA, 25 bp, Probe Sequence
agacttggtctatacactggctttc

SEQ ID NO: 140757 - DNA, 25 bp, Probe Sequence
agacttggtctatacactggctttc

SEQ ID NO: 140758 - DNA, 25 bp, Probe Sequence
agaactttataacacttgtctttca

SEQ ID NO: 140759 - DNA, 25 bp, Probe Sequence
agacctcaataaagacaccttttgt

SEQ ID NO: 140760 - DNA, 25 bp, Probe Sequence
agacccagttatacaacccagttgt

SEQ ID NO: 140761 - DNA, 25 bp, Probe Sequence
agacccatgaaattaggcgccttgt

SEQ ID NO: 140762 - DNA, 25 bp, Probe Sequence
agactccagggagaaggcattgctt

SEQ ID NO: 140763 - DNA, 25 bp, Probe Sequence
agagcccagtggtctgtgaggttgc

SEQ ID NO: 140764 - DNA, 25 bp, Probe Sequence
agagcagaagtgtctctggcgtgct

SEQ ID NO: 140765 - DNA, 25 bp, Probe Sequence
agagcaagttgctgtgggtcatccg

SEQ ID NO: 140766 - DNA, 25 bp, Probe Sequence
agagcaagttgctgtgggtcatccg

SEQ ID NO: 140767 - DNA, 25 bp, Probe Sequence
agaacatttgcctgttggcttctga

SEQ ID NO: 140768 - DNA, 25 bp, Probe Sequence
agacatatttaactggtgcactttg

SEQ ID NO: 140769 - DNA, 25 bp, Probe Sequence
agacttttccagagatcatcgacta

SEQ ID NO: 140770 - DNA, 25 bp, Probe Sequence
agacttccctcgaggatttctactt

SEQ ID NO: 140771 - DNA, 25 bp, Probe Sequence
agaatctccccagacattttctttt

SEQ ID NO: 140772 - DNA, 25 bp, Probe Sequence
agaccttcacggaacagttgccttt

SEQ ID NO: 140773 - DNA, 25 bp, Probe Sequence
agaccatatacaaaacctctccact

SEQ ID NO: 140774 - DNA, 25 bp, Probe Sequence
agaccgctacatggaacctgtcacc

SEQ ID NO: 140775 - DNA, 25 bp, Probe Sequence
agagcgacaccatggaccattaccg

SEQ ID NO: 140776 - DNA, 25 bp, Probe Sequence
agagcgtggcctgtgaccaggaggc

SEQ ID NO: 140777 - DNA, 25 bp, Probe Sequence
agagcggaggctgggatctagcgag

SEQ ID NO: 140778 - DNA, 25 bp, Probe Sequence
agactgaggcttctgcctactgagc

SEQ ID NO: 140779 - DNA, 25 bp, Probe Sequence
agaccactcattgttctactgaggt

SEQ ID NO: 140780 - DNA, 25 bp, Probe Sequence
agaccactagtcaagtcatcagcag

SEQ ID NO: 140781 - DNA, 25 bp, Probe Sequence
agaccacatgatagggctagacagc

SEQ ID NO: 140782 - DNA, 25 bp, Probe Sequence
agagcacagctcatgggcaacatca

SEQ ID NO: 140783 - DNA, 25 bp, Probe Sequence
agacatgccttaggtaactgcagaa

SEQ ID NO: 140784 - DNA, 25 bp, Probe Sequence
agagcatgactttgtcttcctgagc

SEQ ID NO: 140785 - DNA, 25 bp, Probe Sequence
agactgacatctagctttgacaatc

SEQ ID NO: 140786 - DNA, 25 bp, Probe Sequence
agagcagccacttctttgcatatct

SEQ ID NO: 140787 - DNA, 25 bp, Probe Sequence
agagcagtcaccatctgatcttcat

SEQ ID NO: 140788 - DNA, 25 bp, Probe Sequence
agagcagatttcatacatcattcat

SEQ ID NO: 140789 - DNA, 25 bp, Probe Sequence
agagctatttgctatgaaattatat

SEQ ID NO: 140790 - DNA, 25 bp, Probe Sequence
agagcatagtttaacatcttgagaa

SEQ ID NO: 140791 - DNA, 25 bp, Probe Sequence
agagctcagcgacttttattgcaga

SEQ ID NO: 140792 - DNA, 25 bp, Probe Sequence
agagctcatgagcatttactgtact

SEQ ID NO: 140793 - DNA, 25 bp, Probe Sequence
agagcatggatgcatttcaaatgtt

SEQ ID NO: 140794 - DNA, 25 bp, Probe Sequence
agagcgctgtcggcttcaatgaaat

SEQ ID NO: 140795 - DNA, 25 bp, Probe Sequence
agagccagatcctatctcaataaaa

SEQ ID NO: 140796 - DNA, 25 bp, Probe Sequence
agaccgatctctacaaaaaatacaa

SEQ ID NO: 140797 - DNA, 25 bp, Probe Sequence
agactccatctcaaaataaataaac

SEQ ID NO: 140798 - DNA, 25 bp, Probe Sequence
agactacatctttagaggaagcaca

SEQ ID NO: 140799 - DNA, 25 bp, Probe Sequence
agagctgagctgattaagctgagtg

SEQ ID NO: 140800 - DNA, 25 bp, Probe Sequence
agactgagctgcatggtagttgggg

SEQ ID NO: 140801 - DNA, 25 bp, Probe Sequence
agaccacctggcatgagggagaggg

SEQ ID NO: 140802 - DNA, 25 bp, Probe Sequence
agaccaactggcagccaggcagccc

SEQ ID NO: 140803 - DNA, 25 bp, Probe Sequence
agacccctgacaagctgcagcaggc

SEQ ID NO: 140804 - DNA, 25 bp, Probe Sequence
agagcctcgatgacaatctgggagt

SEQ ID NO: 140805 - DNA, 25 bp, Probe Sequence
agacccgtgtacaatgaggagctgg

SEQ ID NO: 140806 - DNA, 25 bp, Probe Sequence
agaccgcggcctaataatgagtgat

SEQ ID NO: 140807 - DNA, 25 bp, Probe Sequence
agactctcggcacatacgatattgc

SEQ ID NO: 140808 - DNA, 25 bp, Probe Sequence
agacacatgggctgatacgttgact

SEQ ID NO: 140809 - DNA, 25 bp, Probe Sequence
agacatcgagtctcactctgttgtc

SEQ ID NO: 140810 - DNA, 25 bp, Probe Sequence
agaccatagttgacccatctggcat

SEQ ID NO: 140811 - DNA, 25 bp, Probe Sequence
agacctcatttatgccttggataca

SEQ ID NO: 140812 - DNA, 25 bp, Probe Sequence
gatgatcccttatcccttggaaaag

SEQ ID NO: 140813 - DNA, 25 bp, Probe Sequence
agaccaatataaaacctgccaaaag

SEQ ID NO: 140814 - DNA, 25 bp, Probe Sequence
agagccctaagattacaaacaacta

SEQ ID NO: 140815 - DNA, 25 bp, Probe Sequence
agaccaggaagttgatcaatcccga

SEQ ID NO: 140816 - DNA, 25 bp, Probe Sequence
agaccaagaatttgacaactcacaa

SEQ ID NO: 140817 - DNA, 25 bp, Probe Sequence
agagccagacaagtatgcccacttt

SEQ ID NO: 140818 - DNA, 25 bp, Probe Sequence
agaccagcataattgacccactcta

SEQ ID NO: 140819 - DNA, 25 bp, Probe Sequence
agaccactaaatacttcatcacaca

SEQ ID NO: 140820 - DNA, 25 bp, Probe Sequence
agactgccaaactattggctgacca

SEQ ID NO: 140821 - DNA, 25 bp, Probe Sequence
agacgatcataatactggtgtcgga

SEQ ID NO: 140822 - DNA, 25 bp, Probe Sequence
agacgattacaagcggaggcgctgc

SEQ ID NO: 140823 - DNA, 25 bp, Probe Sequence
agacgattacaagcggaggcgctgc

SEQ ID NO: 140824 - DNA, 25 bp, Probe Sequence
agacgttcaacctggagggatccca

SEQ ID NO: 140825 - DNA, 25 bp, Probe Sequence
agagcttataatgaggtagggcaac

SEQ ID NO: 140826 - DNA, 25 bp, Probe Sequence
agactctaaagccaggtattaaact

SEQ ID NO: 140827 - DNA, 25 bp, Probe Sequence
agcacttcaaggtataatttaaaca

SEQ ID NO: 140828 - DNA, 25 bp, Probe Sequence
agactacatatttttcatgtctaaa

SEQ ID NO: 140829 - DNA, 25 bp, Probe Sequence
agactgaatcttcctttgttgcaca

SEQ ID NO: 140830 - DNA, 25 bp, Probe Sequence
agactgaatcttcctttgttgcaca

SEQ ID NO: 140831 - DNA, 25 bp, Probe Sequence
agactatccatgtcatctttgttga

SEQ ID NO: 140832 - DNA, 25 bp, Probe Sequence
agactatcagcttctcttttgcttt

SEQ ID NO: 140833 - DNA, 25 bp, Probe Sequence
agacccaccactaggtcatcttatt

SEQ ID NO: 140834 - DNA, 25 bp, Probe Sequence
cgacctgtccagatggttaccattt

SEQ ID NO: 140835 - DNA, 25 bp, Probe Sequence
agacacgttcagaacggcaactctt

SEQ ID NO: 140836 - DNA, 25 bp, Probe Sequence
agactcagttcagaagtcaccttct

SEQ ID NO: 140837 - DNA, 25 bp, Probe Sequence
agacataggtatgaagctcaacacc

SEQ ID NO: 140838 - DNA, 25 bp, Probe Sequence
agactatggctcatgagaaacactc

SEQ ID NO: 140839 - DNA, 25 bp, Probe Sequence
agactgggcctattcacaacagctc

SEQ ID NO: 140840 - DNA, 25 bp, Probe Sequence
agactgggcatccactatcccaggc

SEQ ID NO: 140841 - DNA, 25 bp, Probe Sequence
agacctggtgctctaatgccaagtt

SEQ ID NO: 140842 - DNA, 25 bp, Probe Sequence
agacattgcgggcctaggccactgt

SEQ ID NO: 140843 - DNA, 25 bp, Probe Sequence
agacctgtggctccaaggaatcttc

SEQ ID NO: 140844 - DNA, 25 bp, Probe Sequence
agaccctgcactccagatggaaaac

SEQ ID NO: 140845 - DNA, 25 bp, Probe Sequence
agacagtacctgtaatgagaaacag

SEQ ID NO: 140846 - DNA, 25 bp, Probe Sequence
agagcttactctgagaaggtgacag

SEQ ID NO: 140847 - DNA, 25 bp, Probe Sequence
agagcttttcataatgaggcccagg

SEQ ID NO: 140848 - DNA, 25 bp, Probe Sequence
agacaatttcagatggtagccagtg

SEQ ID NO: 140849 - DNA, 25 bp, Probe Sequence
agaactccataaatggaccaaggtc

SEQ ID NO: 140850 - DNA, 25 bp, Probe Sequence
agaccgccaaagaacacctgaggaa

SEQ ID NO: 140851 - DNA, 25 bp, Probe Sequence
agaccatcctggctaacacggtgaa

SEQ ID NO: 140852 - DNA, 25 bp, Probe Sequence
agaccatcctggctaacacggtgaa

SEQ ID NO: 140853 - DNA, 25 bp, Probe Sequence
agaccatcctggctaacacggtgaa

SEQ ID NO: 140854 - DNA, 25 bp, Probe Sequence
agaccatcctggctaacacggtgaa

SEQ ID NO: 140855 - DNA, 25 bp, Probe Sequence
agaccatcctggctaacacggtgaa

SEQ ID NO: 140856 - DNA, 25 bp, Probe Sequence
agaccatcctggctaacacagtgaa

SEQ ID NO: 140857 - DNA, 25 bp, Probe Sequence
agaccattgagtccatcaaccagct

SEQ ID NO: 140858 - DNA, 25 bp, Probe Sequence
agaccatgctaatgctagaccagta

SEQ ID NO: 140859 - DNA, 25 bp, Probe Sequence
agaccagtgatgagtggcccaggac

SEQ ID NO: 140860 - DNA, 25 bp, Probe Sequence
agacggtgtatggggaccagagcct

SEQ ID NO: 140861 - DNA, 25 bp, Probe Sequence
agacctggacagtgagactcgcagc

SEQ ID NO: 140862 - DNA, 25 bp, Probe Sequence
agagcgggatcgggcaatgctggct

SEQ ID NO: 140863 - DNA, 25 bp, Probe Sequence
agagcgggatcgggcaatgctggct

SEQ ID NO: 140864 - DNA, 25 bp, Probe Sequence
agagcgggatcgggcaatgctggct

SEQ ID NO: 140865 - DNA, 25 bp, Probe Sequence
agagctggagatgaggccagaccat

SEQ ID NO: 140866 - DNA, 25 bp, Probe Sequence
agagctgaagctgatcggcgagtat

SEQ ID NO: 140867 - DNA, 25 bp, Probe Sequence
agacattagctgtctaggcgtgtgg

SEQ ID NO: 140868 - DNA, 25 bp, Probe Sequence
agcacagtacgagaccctgtcggat

SEQ ID NO: 140869 - DNA, 25 bp, Probe Sequence
agaaatactacaaggccattttgat

SEQ ID NO: 140870 - DNA, 25 bp, Probe Sequence
agaaaagggagtcatgcattttgct

SEQ ID NO: 140871 - DNA, 25 bp, Probe Sequence
agaaaactgcgagccagcattaccc

SEQ ID NO: 140872 - DNA, 25 bp, Probe Sequence
agaaaagcctggctaaaccccatct

SEQ ID NO: 140873 - DNA, 25 bp, Probe Sequence
agaaaagtatggcatccccgagccg

SEQ ID NO: 140874 - DNA, 25 bp, Probe Sequence
agaaacgaatggcagccttccagga

SEQ ID NO: 140875 - DNA, 25 bp, Probe Sequence
agaccacggtgggagccttatagtg

SEQ ID NO: 140876 - DNA, 25 bp, Probe Sequence
agaaccgcagtgcggccctgaagaa

SEQ ID NO: 140877 - DNA, 25 bp, Probe Sequence
agaccatccgaggcctggttgaaga

SEQ ID NO: 140878 - DNA, 25 bp, Probe Sequence
agacgccagccacgctggtgattga

SEQ ID NO: 140879 - DNA, 25 bp, Probe Sequence
agagccagcccacagatgatgaaga

SEQ ID NO: 140880 - DNA, 25 bp, Probe Sequence
agaccatcctcacgagctatagtgg

SEQ ID NO: 140881 - DNA, 25 bp, Probe Sequence
agacacctctcaggagctaagcgga

SEQ ID NO: 140882 - DNA, 25 bp, Probe Sequence
agaccaatctgggcagtgtagcaag

SEQ ID NO: 140883 - DNA, 25 bp, Probe Sequence
agagccagtgtggtcagtattccaa

SEQ ID NO: 140884 - DNA, 25 bp, Probe Sequence
agaccagtgtctacagattttcatt

SEQ ID NO: 140885 - DNA, 25 bp, Probe Sequence
agacttgtgctgatcgtgctaaatt

SEQ ID NO: 140886 - DNA, 25 bp, Probe Sequence
agactgatgttcatgggtaaaataa

SEQ ID NO: 140887 - DNA, 25 bp, Probe Sequence
ctgacgcacttggggttttacgcaa

SEQ ID NO: 140888 - DNA, 25 bp, Probe Sequence
agacgacctgtccagatggttacca

SEQ ID NO: 140889 - DNA, 25 bp, Probe Sequence
agacatgaccataaatagcgtatac

SEQ ID NO: 140890 - DNA, 25 bp, Probe Sequence
agagctgtcctatatcacaatgaac

SEQ ID NO: 140891 - DNA, 25 bp, Probe Sequence
agagctggagcttttacagaaatta

SEQ ID NO: 140892 - DNA, 25 bp, Probe Sequence
agactgaacatgtttacaggtttga

SEQ ID NO: 140893 - DNA, 25 bp, Probe Sequence
agactgcagaattgttacaggttgc

SEQ ID NO: 140894 - DNA, 25 bp, Probe Sequence
agaccagatctacttaagctttaaa

SEQ ID NO: 140895 - DNA, 25 bp, Probe Sequence
agacctttagctaacttagtgcaaa

SEQ ID NO: 140896 - DNA, 25 bp, Probe Sequence
agaaattagcgtaatattgagaaaa

SEQ ID NO: 140897 - DNA, 25 bp, Probe Sequence
agaaaaagcctccatcttggcaaga

SEQ ID NO: 140898 - DNA, 25 bp, Probe Sequence
agaaaataatgaggcctttgaaaca

SEQ ID NO: 140899 - DNA, 25 bp, Probe Sequence
agaaatccagtatagtttgccatta

SEQ ID NO: 140900 - DNA, 25 bp, Probe Sequence
agaaattagctatggccacgcaact

SEQ ID NO: 140901 - DNA, 25 bp, Probe Sequence
agacaattattgtgatgccatcaac

SEQ ID NO: 140902 - DNA, 25 bp, Probe Sequence
agacaatttttcgctccatgatgcg

SEQ ID NO: 140903 - DNA, 25 bp, Probe Sequence
agacactggcattatccctttagga

SEQ ID NO: 140904 - DNA, 25 bp, Probe Sequence
agacgcaggcacaactctttatacg

SEQ ID NO: 140905 - DNA, 25 bp, Probe Sequence
agactcaggcgatgtgctttatggc

SEQ ID NO: 140906 - DNA, 25 bp, Probe Sequence
agactcaggcgatgtgctttatggc

SEQ ID NO: 140907 - DNA, 25 bp, Probe Sequence
agactcaggcagttcttgattctgg

SEQ ID NO: 140908 - DNA, 25 bp, Probe Sequence
agagctgaggaattgtatcttcatc

SEQ ID NO: 140909 - DNA, 25 bp, Probe Sequence
agagctgcttgactgtgagaccctc

SEQ ID NO: 140910 - DNA, 25 bp, Probe Sequence
agagctgtgatactgagagctacct

SEQ ID NO: 140911 - DNA, 25 bp, Probe Sequence
agactgatgagaggagggcagcctg

SEQ ID NO: 140912 - DNA, 25 bp, Probe Sequence
agactcagaagtaggacatgccagt

SEQ ID NO: 140913 - DNA, 25 bp, Probe Sequence
agaccagaagccagcttccagcact

SEQ ID NO: 140914 - DNA, 25 bp, Probe Sequence
agaccaagaccaatgggcagctggc

SEQ ID NO: 140915 - DNA, 25 bp, Probe Sequence
agacgcgaactcaggtgccttaaaa

SEQ ID NO: 140916 - DNA, 25 bp, Probe Sequence
agacctgaagctgtattccctagag

SEQ ID NO: 140917 - DNA, 25 bp, Probe Sequence
agacctgcaactgttccgcaaactg

SEQ ID NO: 140918 - DNA, 25 bp, Probe Sequence
agaccaagagcatcttcgagcaaga

SEQ ID NO: 140919 - DNA, 25 bp, Probe Sequence
agacaccactcgtcgtcaagataga

SEQ ID NO: 140920 - DNA, 25 bp, Probe Sequence
agactcgcagcatggtggaaaagat

SEQ ID NO: 140921 - DNA, 25 bp, Probe Sequence
agagctgacagctgtgtttttctgt

SEQ ID NO: 140922 - DNA, 25 bp, Probe Sequence
agacgcacgcagctgactttgtctt

SEQ ID NO: 140923 - DNA, 25 bp, Probe Sequence
agactactgcaggtggtgatttgtt

SEQ ID NO: 140924 - DNA, 25 bp, Probe Sequence
agactgtctggcagttgcctatgtt

SEQ ID NO: 140925 - DNA, 25 bp, Probe Sequence
agactgattggagggccctatcttg

SEQ ID NO: 140926 - DNA, 25 bp, Probe Sequence
agaccattcgcatggccaaattctg

SEQ ID NO: 140927 - DNA, 25 bp, Probe Sequence
agactttaatccgtcaaattcttgt

SEQ ID NO: 140928 - DNA, 25 bp, Probe Sequence
agaattgtttcctctaagtgtagtt

SEQ ID NO: 140929 - DNA, 25 bp, Probe Sequence
agaacgtgtttatagaatgtgtttt

SEQ ID NO: 140930 - DNA, 25 bp, Probe Sequence
agaacctttctgtgacattggaagt

SEQ ID NO: 140931 - DNA, 25 bp, Probe Sequence
agaaccgtagccagacatgggactg

SEQ ID NO: 140932 - DNA, 25 bp, Probe Sequence
agacctcggaacagacacgtgtgtg

SEQ ID NO: 140933 - DNA, 25 bp, Probe Sequence
agacctaggcaaaggagccgtgggg

SEQ ID NO: 140934 - DNA, 25 bp, Probe Sequence
agacctaggccatagagcacagtgg

SEQ ID NO: 140935 - DNA, 25 bp, Probe Sequence
agaccagcagaggcataaggttcgg

SEQ ID NO: 140936 - DNA, 25 bp, Probe Sequence
agacagcatctgttcaaagtcgtag

SEQ ID NO: 140937 - DNA, 25 bp, Probe Sequence
agaccattttcacagcttatcatga

SEQ ID NO: 140938 - DNA, 25 bp, Probe Sequence
agaccacttatctcctataatcaac

SEQ ID NO: 140939 - DNA, 25 bp, Probe Sequence
agaccacttgactctctgtaaaatg

SEQ ID NO: 140940 - DNA, 25 bp, Probe Sequence
agacaccttgcctataattaaaatg

SEQ ID NO: 140941 - DNA, 25 bp, Probe Sequence
agacagcctccctttattgaattgg

SEQ ID NO: 140942 - DNA, 25 bp, Probe Sequence
agacacccagaacatcttcttcatg

SEQ ID NO: 140943 - DNA, 25 bp, Probe Sequence
agagcctgtcgatgagactgtttat

SEQ ID NO: 140944 - DNA, 25 bp, Probe Sequence
agacaatacgatggaacgttctatg

SEQ ID NO: 140945 - DNA, 25 bp, Probe Sequence
agacaaactttgtacctctctgtgc

SEQ ID NO: 140946 - DNA, 25 bp, Probe Sequence
agaaaccagttgttcccaatctgcc

SEQ ID NO: 140947 - DNA, 25 bp, Probe Sequence
agaaatccaggtgctttccagactc

SEQ ID NO: 140948 - DNA, 25 bp, Probe Sequence
agaaatcaaggtgttcaatacagta

SEQ ID NO: 140949 - DNA, 25 bp, Probe Sequence
agcaaaataaactcttaacagtata

SEQ ID NO: 140950 - DNA, 25 bp, Probe Sequence
agaaaaatcaactcactgttcagtg

SEQ ID NO: 140951 - DNA, 25 bp, Probe Sequence
agaaagtaccaacacctctgcagtg

SEQ ID NO: 140952 - DNA, 25 bp, Probe Sequence
agaaaggatcctagaccgttgcagc

SEQ ID NO: 140953 - DNA, 25 bp, Probe Sequence
agcttaagtctctgcaggcgtggca

SEQ ID NO: 140954 - DNA, 25 bp, Probe Sequence
agcattaaaggttttgattgatccc

SEQ ID NO: 140955 - DNA, 25 bp, Probe Sequence
agactatttggtttgtatgttcatt

SEQ ID NO: 140956 - DNA, 25 bp, Probe Sequence
agacgcaaccgtgtttttcattctc

SEQ ID NO: 140957 - DNA, 25 bp, Probe Sequence
agaccatacccttttgtgttattct

SEQ ID NO: 140958 - DNA, 25 bp, Probe Sequence
agagccgttgctgtttgttttttgg

SEQ ID NO: 140959 - DNA, 25 bp, Probe Sequence
agagccgttgctgtttgttttttgg

SEQ ID NO: 140960 - DNA, 25 bp, Probe Sequence
agagccagttgtgtgcatctctttc

SEQ ID NO: 140961 - DNA, 25 bp, Probe Sequence
agaccaccactggtgcattccattc

SEQ ID NO: 140962 - DNA, 25 bp, Probe Sequence
agagcccctgctgtgattggtgctc

SEQ ID NO: 140963 - DNA, 25 bp, Probe Sequence
agagccctgagtttcttggctgcat

SEQ ID NO: 140964 - DNA, 25 bp, Probe Sequence
agacttctgagatagcctgggatga

SEQ ID NO: 140965 - DNA, 25 bp, Probe Sequence
agacctcggtgatcactgagggatt

SEQ ID NO: 140966 - DNA, 25 bp, Probe Sequence
agaccaccttaaaccagggatcatg

SEQ ID NO: 140967 - DNA, 25 bp, Probe Sequence
agactaccttaatttagctagcagt

SEQ ID NO: 140968 - DNA, 25 bp, Probe Sequence
agacctcttctctgaaactagcagt

SEQ ID NO: 140969 - DNA, 25 bp, Probe Sequence
agaccccctcaagacaacaagaaag

SEQ ID NO: 140970 - DNA, 25 bp, Probe Sequence
agaaacgaccaagaacaactgacaa

SEQ ID NO: 140971 - DNA, 25 bp, Probe Sequence
agacaaccatcctgaagaagttcaa

SEQ ID NO: 140972 - DNA, 25 bp, Probe Sequence
agaaaccaactggaagaagttctca

SEQ ID NO: 140973 - DNA, 25 bp, Probe Sequence
agaaaggaaggctcagaacttgctg

SEQ ID NO: 140974 - DNA, 25 bp, Probe Sequence
agaaaggagagttacaaagttgcca

SEQ ID NO: 140975 - DNA, 25 bp, Probe Sequence
agactaagaggaaacaaagcgttct

SEQ ID NO: 140976 - DNA, 25 bp, Probe Sequence
agactcagaggtactaaaatttgtt

SEQ ID NO: 140977 - DNA, 25 bp, Probe Sequence
agaattaggtttgaactcttgagct

SEQ ID NO: 140978 - DNA, 25 bp, Probe Sequence
agaaacgtgggttaagctcttcctg

SEQ ID NO: 140979 - DNA, 25 bp, Probe Sequence
agaccacgtgggacagaactcctgc

SEQ ID NO: 140980 - DNA, 25 bp, Probe Sequence
agaccaaggcagcacatacagcccc

SEQ ID NO: 140981 - DNA, 25 bp, Probe Sequence
agaccagaggacaagcagtggcgcc

SEQ ID NO: 140982 - DNA, 25 bp, Probe Sequence
agaccagggcatgtgtggctcctgc

SEQ ID NO: 140983 - DNA, 25 bp, Probe Sequence
agactcttgacagttgtgcttctct

SEQ ID NO: 140984 - DNA, 25 bp, Probe Sequence
agacatattaacttgtgctgtcgcc

SEQ ID NO: 140985 - DNA, 25 bp, Probe Sequence
agactgtaagcctgtgtgtgccact

SEQ ID NO: 140986 - DNA, 25 bp, Probe Sequence
agaccaaatcgctggttgtgcgctt

SEQ ID NO: 140987 - DNA, 25 bp, Probe Sequence
agaccaaagctgcttttgctgcgcc

SEQ ID NO: 140988 - DNA, 25 bp, Probe Sequence
agagccaaaccgtattattctgccc

SEQ ID NO: 140989 - DNA, 25 bp, Probe Sequence
agaccaatgcattgcgtttctttcc

SEQ ID NO: 140990 - DNA, 25 bp, Probe Sequence
agaagaaaagctgtctctttcccct

SEQ ID NO: 140991 - DNA, 25 bp, Probe Sequence
agaaaaaatgtcatcgaccctccca

SEQ ID NO: 140992 - DNA, 25 bp, Probe Sequence
agaaaaatcttgaaccagctctccc

SEQ ID NO: 140993 - DNA, 25 bp, Probe Sequence
agacacagaccttgtatcctggctc

SEQ ID NO: 140994 - DNA, 25 bp, Probe Sequence
agacatagatctgatttctccctca

SEQ ID NO: 140995 - DNA, 25 bp, Probe Sequence
agacacagatatgcacttataccca

SEQ ID NO: 140996 - DNA, 25 bp, Probe Sequence
agacacagatatgcacttataccca

SEQ ID NO: 140997 - DNA, 25 bp, Probe Sequence
agacagcagtaacctctgcagactt

SEQ ID NO: 140998 - DNA, 25 bp, Probe Sequence
agacatggttacctgcagctgagct

SEQ ID NO: 140999 - DNA, 25 bp, Probe Sequence
agacatggaatatgccctgcgtaaa

SEQ ID NO: 141000 - DNA, 25 bp, Probe Sequence
agacaggcaataatgagcagagttt

SEQ ID NO: 141001 - DNA, 25 bp, Probe Sequence
agacattgacttaggcgaggatttc

SEQ ID NO: 141002 - DNA, 25 bp, Probe Sequence
agacctccacttcgaaggcatgttc

SEQ ID NO: 141003 - DNA, 25 bp, Probe Sequence
agacattctcacataagcccagttc

SEQ ID NO: 141004 - DNA, 25 bp, Probe Sequence
agacgatgtcacgtattgccaagag

SEQ ID NO: 141005 - DNA, 25 bp, Probe Sequence
agacttgtccttaccacaaggcctg

SEQ ID NO: 141006 - DNA, 25 bp, Probe Sequence
agacctgttctctatccacaagagc

SEQ ID NO: 141007 - DNA, 25 bp, Probe Sequence
agaccattccgcttcaaggcagagc

SEQ ID NO: 141008 - DNA, 25 bp, Probe Sequence
agaccaacatcgccttcctgcagaa

SEQ ID NO: 141009 - DNA, 25 bp, Probe Sequence
agaaaagaccctgcctatagaacct

SEQ ID NO: 141010 - DNA, 25 bp, Probe Sequence
agaagctagtctgatggccttaaaa

SEQ ID NO: 141011 - DNA, 25 bp, Probe Sequence
agacctagtcattaccagttaacat

SEQ ID NO: 141012 - DNA, 25 bp, Probe Sequence
agactctcagtaatatcccttgttt

SEQ ID NO: 141013 - DNA, 25 bp, Probe Sequence
agaactcagtagtatggctttgttg

SEQ ID NO: 141014 - DNA, 25 bp, Probe Sequence
agaccattatactatgtgtatgttt

SEQ ID NO: 141015 - DNA, 25 bp, Probe Sequence
agaccatttgaccatatgaatggaa

SEQ ID NO: 141016 - DNA, 25 bp, Probe Sequence
agacagcatcttgcatctatatatg

SEQ ID NO: 141017 - DNA, 25 bp, Probe Sequence
agactctctgctgatccgaagaatc

SEQ ID NO: 141018 - DNA, 25 bp, Probe Sequence
agacctcatccattccaaaatatgc

SEQ ID NO: 141019 - DNA, 25 bp, Probe Sequence
agaccacaccttgccatcaagatgc

SEQ ID NO: 141020 - DNA, 25 bp, Probe Sequence
agaaaccattcagcctgcaaagctg

SEQ ID NO: 141021 - DNA, 25 bp, Probe Sequence
agaaaaatggcagcctcttagtgct

SEQ ID NO: 141022 - DNA, 25 bp, Probe Sequence
agaaaattgtgctgttcgtagtttg

SEQ ID NO: 141023 - DNA, 25 bp, Probe Sequence
agaacttttgcattttaatcgttgt

SEQ ID NO: 141024 - DNA, 25 bp, Probe Sequence
agaagccattcttgtaaaacgtttg

SEQ ID NO: 141025 - DNA, 25 bp, Probe Sequence
agaattctttcctaagagcccttcg

SEQ ID NO: 141026 - DNA, 25 bp, Probe Sequence
agaacccatagccaatagagttttc

SEQ ID NO: 141027 - DNA, 25 bp, Probe Sequence
agacacggcaaccatccgatttctc

SEQ ID NO: 141028 - DNA, 25 bp, Probe Sequence
agacacggcaaccatccgatttctc

SEQ ID NO: 141029 - DNA, 25 bp, Probe Sequence
agaccccaaccatgctgcatgtgta

SEQ ID NO: 141030 - DNA, 25 bp, Probe Sequence
agaccatccaagactgcagcgggta

SEQ ID NO: 141031 - DNA, 25 bp, Probe Sequence
agaatgattcagtcttgacggtgaa

SEQ ID NO: 141032 - DNA, 25 bp, Probe Sequence
agacagtgtgcggcggcacatggcg

SEQ ID NO: 141033 - DNA, 25 bp, Probe Sequence
agacacatggcagaagcttgaggtt

SEQ ID NO: 141034 - DNA, 25 bp, Probe Sequence
agacacattggagagcttagaggat

SEQ ID NO: 141035 - DNA, 25 bp, Probe Sequence
aaagcagatggggagttacggagtt

SEQ ID NO: 141036 - DNA, 25 bp, Probe Sequence
agaccggtggcgatgtcagcggatg

SEQ ID NO: 141037 - DNA, 25 bp, Probe Sequence
agacctacgaggcatgccagcaggc

SEQ ID NO: 141038 - DNA, 25 bp, Probe Sequence
agacctcacagaagatcagctaccc

SEQ ID NO: 141039 - DNA, 25 bp, Probe Sequence
agaccatcagagagcaaaaccacat

SEQ ID NO: 141040 - DNA, 25 bp, Probe Sequence
agaaatcgagacccatactgctgac

SEQ ID NO: 141041 - DNA, 25 bp, Probe Sequence
agaaaaggcatctcaactccaaact

SEQ ID NO: 141042 - DNA, 25 bp, Probe Sequence
agcaagaggaagtgcccctctcaac

SEQ ID NO: 141043 - DNA, 25 bp, Probe Sequence
agaaaagaagagacccacccactcg

SEQ ID NO: 141044 - DNA, 25 bp, Probe Sequence
agacgagaaagatctgccactccct

SEQ ID NO: 141045 - DNA, 25 bp, Probe Sequence
agacgagaaaagaatccagctggaa

SEQ ID NO: 141046 - DNA, 25 bp, Probe Sequence
agacggggagagtttcagctgcagc

SEQ ID NO: 141047 - DNA, 25 bp, Probe Sequence
agacggaggaatttgtgctggacat

SEQ ID NO: 141048 - DNA, 25 bp, Probe Sequence
agacggaggaatttgtgctggacat

SEQ ID NO: 141049 - DNA, 25 bp, Probe Sequence
agacggaggaatttgtgctggacat

SEQ ID NO: 141050 - DNA, 25 bp, Probe Sequence
agactgtggctcctagtgatgtgga

SEQ ID NO: 141051 - DNA, 25 bp, Probe Sequence
agacgtgcacaccatggatctggga

SEQ ID NO: 141052 - DNA, 25 bp, Probe Sequence
agacgagcacaccaggagagagctg

SEQ ID NO: 141053 - DNA, 25 bp, Probe Sequence
agactagcctgccaaacatggcgaa

SEQ ID NO: 141054 - DNA, 25 bp, Probe Sequence
agaccagcctgaccaacatggagaa

SEQ ID NO: 141055 - DNA, 25 bp, Probe Sequence
agaccagcctgaccaacatggagaa

SEQ ID NO: 141056 - DNA, 25 bp, Probe Sequence
agaccagcctgaccaacatggagaa

SEQ ID NO: 141057 - DNA, 25 bp, Probe Sequence
agaccagcctgaccaacatggagaa

SEQ ID NO: 141058 - DNA, 25 bp, Probe Sequence
agaccagcctggccaacatggtgaa

SEQ ID NO: 141059 - DNA, 25 bp, Probe Sequence
agaccagcctggacaacatagtaat

SEQ ID NO: 141060 - DNA, 25 bp, Probe Sequence
agaccagtctggtcaaaatggtgaa

SEQ ID NO: 141061 - DNA, 25 bp, Probe Sequence
agactaaatatgtcaaaattgtgga

SEQ ID NO: 141062 - DNA, 25 bp, Probe Sequence
agaatataacactgtaactgtggtg

SEQ ID NO: 141063 - DNA, 25 bp, Probe Sequence
agaataagccctgttacctgctgga

SEQ ID NO: 141064 - DNA, 25 bp, Probe Sequence
agaactatcccagcttacttgtgag

SEQ ID NO: 141065 - DNA, 25 bp, Probe Sequence
agaacttgggcattcattttttcaa

SEQ ID NO: 141066 - DNA, 25 bp, Probe Sequence
agaaccgcgtggctgtttttgaact

SEQ ID NO: 141067 - DNA, 25 bp, Probe Sequence
agaagtggcattgttacttttaaca

SEQ ID NO: 141068 - DNA, 25 bp, Probe Sequence
agaaggtccttaacacagtcgtgaa

SEQ ID NO: 141069 - DNA, 25 bp, Probe Sequence
agaaagtcttccttggagtcctcaa

SEQ ID NO: 141070 - DNA, 25 bp, Probe Sequence
agaaattttgcctgccattttcaga

SEQ ID NO: 141071 - DNA, 25 bp, Probe Sequence
agaaattttgcctgccattttcaga

SEQ ID NO: 141072 - DNA, 25 bp, Probe Sequence
agaaattttgcctgccattttcaga

SEQ ID NO: 141073 - DNA, 25 bp, Probe Sequence
agaaattttgcctgccattttcaga

SEQ ID NO: 141074 - DNA, 25 bp, Probe Sequence
agaatagtagatgtggcctttgaat

SEQ ID NO: 141075 - DNA, 25 bp, Probe Sequence
agaatagctagaaaccctccgcaat

SEQ ID NO: 141076 - DNA, 25 bp, Probe Sequence
agacatggtgggcaccttcacagac

SEQ ID NO: 141077 - DNA, 25 bp, Probe Sequence
agacaggtgcggcaagtctactgcg

SEQ ID NO: 141078 - DNA, 25 bp, Probe Sequence
agactggggtggtgtccacaggcct

SEQ ID NO: 141079 - DNA, 25 bp, Probe Sequence
agacggagggggctgtcaaggccta

SEQ ID NO: 141080 - DNA, 25 bp, Probe Sequence
agacggtccctgagagtcagaggcc

SEQ ID NO: 141081 - DNA, 25 bp, Probe Sequence
agaaagtcctccccagtctggggat

SEQ ID NO: 141082 - DNA, 25 bp, Probe Sequence
aaacagtaacacgcgcttcggaata

SEQ ID NO: 141083 - DNA, 25 bp, Probe Sequence
aaataaacagaccccgtctggcaag

SEQ ID NO: 141084 - DNA, 25 bp, Probe Sequence
aaataaaactctatgggtccaagtg

SEQ ID NO: 141085 - DNA, 25 bp, Probe Sequence
agaaagaaactcagaagcttcaaat

SEQ ID NO: 141086 - DNA, 25 bp, Probe Sequence
agaaagctggtggctctacagttaa

SEQ ID NO: 141087 - DNA, 25 bp, Probe Sequence
agaagaaggtggtatccttataatt

SEQ ID NO: 141088 - DNA, 25 bp, Probe Sequence
agcaaggtgctgtctctaacttaaa

SEQ ID NO: 141089 - DNA, 25 bp, Probe Sequence
agacgattgttcttagacctcctaa

SEQ ID NO: 141090 - DNA, 25 bp, Probe Sequence
agacttatttttagactcacagctc

SEQ ID NO: 141091 - DNA, 25 bp, Probe Sequence
agactatgtcttgcctgacttcagt

SEQ ID NO: 141092 - DNA, 25 bp, Probe Sequence
agacctgtttgatctgatcctcact

SEQ ID NO: 141093 - DNA, 25 bp, Probe Sequence
agaactgattggggcttccacagcc

SEQ ID NO: 141094 - DNA, 25 bp, Probe Sequence
agctactaggagggccagcccagga

SEQ ID NO: 141095 - DNA, 25 bp, Probe Sequence
agaaatcggcaaggccagcagcggg

SEQ ID NO: 141096 - DNA, 25 bp, Probe Sequence
agaaactgaaatgtagcgccgggcg

SEQ ID NO: 141097 - DNA, 25 bp, Probe Sequence
agaaaggacttagcatggccgggcg

SEQ ID NO: 141098 - DNA, 25 bp, Probe Sequence
agaaaggcgccatagtgacccttgg

SEQ ID NO: 141099 - DNA, 25 bp, Probe Sequence
agaaatgcccagcaaagacccttcc

SEQ ID NO: 141100 - DNA, 25 bp, Probe Sequence
agaaattcctggctggaccttgtca

SEQ ID NO: 141101 - DNA, 25 bp, Probe Sequence
agaagctttccgagcttcactttcc

SEQ ID NO: 141102 - DNA, 25 bp, Probe Sequence
agacactactgaggtggttctttct

SEQ ID NO: 141103 - DNA, 25 bp, Probe Sequence
agacacaagctgcagtagcttcctg

SEQ ID NO: 141104 - DNA, 25 bp, Probe Sequence
agacctacaggaatcgcttctggaa

SEQ ID NO: 141105 - DNA, 25 bp, Probe Sequence
agacctgctaaaagagcttctggaa

SEQ ID NO: 141106 - DNA, 25 bp, Probe Sequence
agacctgtgaaaagacgtcaatatc

SEQ ID NO: 141107 - DNA, 25 bp, Probe Sequence
agacaagtgaatggcaatcctaaat

SEQ ID NO: 141108 - DNA, 25 bp, Probe Sequence
agactacagcaaggacccgtggcat

SEQ ID NO: 141109 - DNA, 25 bp, Probe Sequence
agactacagccagaagcccatggag

SEQ ID NO: 141110 - DNA, 25 bp, Probe Sequence
agacaaccttccaagatgcctggca

SEQ ID NO: 141111 - DNA, 25 bp, Probe Sequence
agaaagacctcagtacatgctttgc

SEQ ID NO: 141112 - DNA, 25 bp, Probe Sequence
agacatgggccttgtcgatctgttc

SEQ ID NO: 141113 - DNA, 25 bp, Probe Sequence
agacagcgcccatgcaggtgctgtt

SEQ ID NO: 141114 - DNA, 25 bp, Probe Sequence
agacctgaccaaggtgccagctatt

SEQ ID NO: 141115 - DNA, 25 bp, Probe Sequence
agaacggcaagagtgtccagtatgt

SEQ ID NO: 141116 - DNA, 25 bp, Probe Sequence
agaaaggcatctttcgccagtggat

SEQ ID NO: 141117 - DNA, 25 bp, Probe Sequence
agaaagtgcactgtcgttggcctgt

SEQ ID NO: 141118 - DNA, 25 bp, Probe Sequence
agacaaatgactgtctgggcccaca

SEQ ID NO: 141119 - DNA, 25 bp, Probe Sequence
agacaagacaggagctgtcgcccca

SEQ ID NO: 141120 - DNA, 25 bp, Probe Sequence
agacacacaaggagcagtcctgccc

SEQ ID NO: 141121 - DNA, 25 bp, Probe Sequence
agacccgagctttgattgactccgt

SEQ ID NO: 141122 - DNA, 25 bp, Probe Sequence
agcaaccgaagttttcactccagtt

SEQ ID NO: 141123 - DNA, 25 bp, Probe Sequence
agacacacgagcatatttcacctcc

SEQ ID NO: 141124 - DNA, 25 bp, Probe Sequence
agacgaggacatcacctcacacatg

SEQ ID NO: 141125 - DNA, 25 bp, Probe Sequence
agactggccactggcaccataacat

SEQ ID NO: 141126 - DNA, 25 bp, Probe Sequence
agacttcacacttcatccagatgtc

SEQ ID NO: 141127 - DNA, 25 bp, Probe Sequence
agacttcacacttcatccagatgtc

SEQ ID NO: 141128 - DNA, 25 bp, Probe Sequence
agactctcaacttaactgctgttaa

SEQ ID NO: 141129 - DNA, 25 bp, Probe Sequence
agacattatatggaaaggcattgta

SEQ ID NO: 141130 - DNA, 25 bp, Probe Sequence
agacatacttgagaccgcattattt

SEQ ID NO: 141131 - DNA, 25 bp, Probe Sequence
agacaacttagatatcctcttcctc

SEQ ID NO: 141132 - DNA, 25 bp, Probe Sequence
agaacagcgtcttttacctgtcacc

SEQ ID NO: 141133 - DNA, 25 bp, Probe Sequence
agaaagccctcatgtttgtgataac

SEQ ID NO: 141134 - DNA, 25 bp, Probe Sequence
agacaaccatctctttttatattat

SEQ ID NO: 141135 - DNA, 25 bp, Probe Sequence
agaatgaactgtggcttttactatt

SEQ ID NO: 141136 - DNA, 25 bp, Probe Sequence
agaacaccgtgggctgttacttgct

SEQ ID NO: 141137 - DNA, 25 bp, Probe Sequence
agacaccacgtggctcatttagccc

SEQ ID NO: 141138 - DNA, 25 bp, Probe Sequence
agaaacctgcttacatttaaccaag

SEQ ID NO: 141139 - DNA, 25 bp, Probe Sequence
agaaaccgctgtgatcgtggagacc

SEQ ID NO: 141140 - DNA, 25 bp, Probe Sequence
agaagaactgagccgacctgggatc

SEQ ID NO: 141141 - DNA, 25 bp, Probe Sequence
agaaatagctatagcaggccgggcg

SEQ ID NO: 141142 - DNA, 25 bp, Probe Sequence
agaaatgatgcagctggtgcccgag

SEQ ID NO: 141143 - DNA, 25 bp, Probe Sequence
agactataatcctgctgacccagag

SEQ ID NO: 141144 - DNA, 25 bp, Probe Sequence
agacaagaacccagagcatccgatg

SEQ ID NO: 141145 - DNA, 25 bp, Probe Sequence
agacgcagaggcacgagagcatccc

SEQ ID NO: 141146 - DNA, 25 bp, Probe Sequence
agacgtgaggcaactgtggcaggga

SEQ ID NO: 141147 - DNA, 25 bp, Probe Sequence
agactgaatgtgtagctggcgagga

SEQ ID NO: 141148 - DNA, 25 bp, Probe Sequence
agactggtggagatgggagagcaca

SEQ ID NO: 141149 - DNA, 25 bp, Probe Sequence
agacgatgggcggccaggcagagac

SEQ ID NO: 141150 - DNA, 25 bp, Probe Sequence
agacgacgcctgcagcaaggagacc

SEQ ID NO: 141151 - DNA, 25 bp, Probe Sequence
agacgaagccacgtgcaaggacacc

SEQ ID NO: 141152 - DNA, 25 bp, Probe Sequence
agacgaagacagtccctggatcacc

SEQ ID NO: 141153 - DNA, 25 bp, Probe Sequence
agaaaggagcagccactctggaacc

SEQ ID NO: 141154 - DNA, 25 bp, Probe Sequence
agacggtgcgcaaagccatggaagc

SEQ ID NO: 141155 - DNA, 25 bp, Probe Sequence
agactgaaggcaaaggtcagaatgc

SEQ ID NO: 141156 - DNA, 25 bp, Probe Sequence
agacgccgctgaaagtggccaactc

SEQ ID NO: 141157 - DNA, 25 bp, Probe Sequence
agacggggaagcggagccaacatgc

SEQ ID NO: 141158 - DNA, 25 bp, Probe Sequence
agaagaatggtagcagccacaagta

SEQ ID NO: 141159 - DNA, 25 bp, Probe Sequence
agaaatagactagaccaagcagaag

SEQ ID NO: 141160 - DNA, 25 bp, Probe Sequence
agaaacagatgctgttcccgcgtag

SEQ ID NO: 141161 - DNA, 25 bp, Probe Sequence
agactcagccgctgtctcgccgtgt

SEQ ID NO: 141162 - DNA, 25 bp, Probe Sequence
agacacacaagctggtggtcgtggg

SEQ ID NO: 141163 - DNA, 25 bp, Probe Sequence
agaccctcatgcagttggttgtaaa

SEQ ID NO: 141164 - DNA, 25 bp, Probe Sequence
agaccctcatgcagttggttgtaaa

SEQ ID NO: 141165 - DNA, 25 bp, Probe Sequence
agaccctcatgcagttggttgtaaa

SEQ ID NO: 141166 - DNA, 25 bp, Probe Sequence
agacccccactaagagtgtctcaaa

SEQ ID NO: 141167 - DNA, 25 bp, Probe Sequence
agacaccttccgagtgtgtgctcta

SEQ ID NO: 141168 - DNA, 25 bp, Probe Sequence
agacaccattcacttttactgcttt

SEQ ID NO: 141169 - DNA, 25 bp, Probe Sequence
agaactaattttctgcagcttttag

SEQ ID NO: 141170 - DNA, 25 bp, Probe Sequence
agaatccttgtttcttggcttttgc

SEQ ID NO: 141171 - DNA, 25 bp, Probe Sequence
agaatactttctgtgtttttatctt

SEQ ID NO: 141172 - DNA, 25 bp, Probe Sequence
agactggaattgattgtttttcatt

SEQ ID NO: 141173 - DNA, 25 bp, Probe Sequence
agacggaagatgactttgtatcact

SEQ ID NO: 141174 - DNA, 25 bp, Probe Sequence
agacgggcatgaactgctgggtcac

SEQ ID NO: 141175 - DNA, 25 bp, Probe Sequence
agactggaatgttcttgggtgctca

SEQ ID NO: 141176 - DNA, 25 bp, Probe Sequence
agactggaattgtgtgtggatgctg

SEQ ID NO: 141177 - DNA, 25 bp, Probe Sequence
agacccagtttgcattgtgctgctg

SEQ ID NO: 141178 - DNA, 25 bp, Probe Sequence
agacccgcatccaggtgagactggg

SEQ ID NO: 141179 - DNA, 25 bp, Probe Sequence
agacaacctgacactgtggacggcc

SEQ ID NO: 141180 - DNA, 25 bp, Probe Sequence
agaaacttcagtgtgtggacctcca

SEQ ID NO: 141181 - DNA, 25 bp, Probe Sequence
agacaacttgcagaggaggaaccca

SEQ ID NO: 141182 - DNA, 25 bp, Probe Sequence
agaaggttgcagaagaaaaccccag

SEQ ID NO: 141183 - DNA, 25 bp, Probe Sequence
agaaggcccaggacaaaattcttag

SEQ ID NO: 141184 - DNA, 25 bp, Probe Sequence
agaagggccctagaaattgatgtgg

SEQ ID NO: 141185 - DNA, 25 bp, Probe Sequence
agaaaatgccccaaaaacaatagag

SEQ ID NO: 141186 - DNA, 25 bp, Probe Sequence
agaaaactcactcacaaacaacata

SEQ ID NO: 141187 - DNA, 25 bp, Probe Sequence
agactagaccaagcagaagaaagaa

SEQ ID NO: 141188 - DNA, 25 bp, Probe Sequence
agacgagcaacaattaccataaaaa

SEQ ID NO: 141189 - DNA, 25 bp, Probe Sequence
agacagagcatatctccccatgatc

SEQ ID NO: 141190 - DNA, 25 bp, Probe Sequence
agacaaacagcctagcccataaacg

SEQ ID NO: 141191 - DNA, 25 bp, Probe Sequence
agacaaaagactgcaccaactcacc

SEQ ID NO: 141192 - DNA, 25 bp, Probe Sequence
agaattaaacccacaagctgcctct

SEQ ID NO: 141193 - DNA, 25 bp, Probe Sequence
agacatcaagtccccaataagcctt

SEQ ID NO: 141194 - DNA, 25 bp, Probe Sequence
agactccagtcttgcacagcataga

SEQ ID NO: 141195 - DNA, 25 bp, Probe Sequence
agactatggctgtcgaccatgtgac

SEQ ID NO: 141196 - DNA, 25 bp, Probe Sequence
agactgcatggggctgagccctgcc

SEQ ID NO: 141197 - DNA, 25 bp, Probe Sequence
aactctggagccagacctcctaggt

SEQ ID NO: 141198 - DNA, 25 bp, Probe Sequence
agcaccttggccgtgattcccaagg

SEQ ID NO: 141199 - DNA, 25 bp, Probe Sequence
agacgcgagagacgtgcttccgaag

SEQ ID NO: 141200 - DNA, 25 bp, Probe Sequence
agactcgatggtcacatcccataca

SEQ ID NO: 141201 - DNA, 25 bp, Probe Sequence
agactaactgtctacatctccatat

SEQ ID NO: 141202 - DNA, 25 bp, Probe Sequence
agacgagattgatgccatcgccacc

SEQ ID NO: 141203 - DNA, 25 bp, Probe Sequence
agacggagtatgtcatccgctgcac

SEQ ID NO: 141204 - DNA, 25 bp, Probe Sequence
agacaggaatattcacatatgtgca

SEQ ID NO: 141205 - DNA, 25 bp, Probe Sequence
agacattcaatatcactaatcattt

SEQ ID NO: 141206 - DNA, 25 bp, Probe Sequence
agacatgttcaattacttcctctct

SEQ ID NO: 141207 - DNA, 25 bp, Probe Sequence
agacatcaatcaggttctcttctct

SEQ ID NO: 141208 - DNA, 25 bp, Probe Sequence
agacataaccagttgccatctgcgt

SEQ ID NO: 141209 - DNA, 25 bp, Probe Sequence
agacattagccagtagctcactctt

SEQ ID NO: 141210 - DNA, 25 bp, Probe Sequence
agaatctgaccagaccccattttga

SEQ ID NO: 141211 - DNA, 25 bp, Probe Sequence
agaatccccaggaacttcaaatctg

SEQ ID NO: 141212 - DNA, 25 bp, Probe Sequence
agaaatcccagcgtagatccaaact

SEQ ID NO: 141213 - DNA, 25 bp, Probe Sequence
agaaagcccttcgagatgccaaact

SEQ ID NO: 141214 - DNA, 25 bp, Probe Sequence
agaaactcactcaaaaccacacaac

SEQ ID NO: 141215 - DNA, 25 bp, Probe Sequence
agctcacaccctaataagtccacat

SEQ ID NO: 141216 - DNA, 25 bp, Probe Sequence
agctaagcccttactagaccaatgg

SEQ ID NO: 141217 - DNA, 25 bp, Probe Sequence
agaacagcctttttaggccacagtg

SEQ ID NO: 141218 - DNA, 25 bp, Probe Sequence
agacacaggcctgggtaaccatggt

SEQ ID NO: 141219 - DNA, 25 bp, Probe Sequence
agactttgccgcagtaggtcaggta

SEQ ID NO: 141220 - DNA, 25 bp, Probe Sequence
agacatttaaatttcaaggcaggta

SEQ ID NO: 141221 - DNA, 25 bp, Probe Sequence
agaatttatagttacaggcggtgtc

SEQ ID NO: 141222 - DNA, 25 bp, Probe Sequence
actgattcccagttagggggtgcct

SEQ ID NO: 141223 - DNA, 25 bp, Probe Sequence
actgtcctaaggcaggggcgagcac

SEQ ID NO: 141224 - DNA, 25 bp, Probe Sequence
acactttaagggttcggcaatcact

SEQ ID NO: 141225 - DNA, 25 bp, Probe Sequence
agactgttatcgagtaccggtcaca

SEQ ID NO: 141226 - DNA, 25 bp, Probe Sequence
agcagtagtaagagtttcttgtaga

SEQ ID NO: 141227 - DNA, 25 bp, Probe Sequence
agactattcaactttattttctagg

SEQ ID NO: 141228 - DNA, 25 bp, Probe Sequence
agacttaaactgtcaatttgctcta

SEQ ID NO: 141229 - DNA, 25 bp, Probe Sequence
agactttaatctgactgtagctcat

SEQ ID NO: 141230 - DNA, 25 bp, Probe Sequence
agacttcttatctgactgaactgat

SEQ ID NO: 141231 - DNA, 25 bp, Probe Sequence
agacttgtatactggctgaatatca

SEQ ID NO: 141232 - DNA, 25 bp, Probe Sequence
agactgttcaacatgccttatgata

SEQ ID NO: 141233 - DNA, 25 bp, Probe Sequence
agacttatcaccattcttatgtcac

SEQ ID NO: 141234 - DNA, 25 bp, Probe Sequence
agacttaaatttgattatgtcccca

SEQ ID NO: 141235 - DNA, 25 bp, Probe Sequence
actccaaactttgtaggatgccttc

SEQ ID NO: 141236 - DNA, 25 bp, Probe Sequence
agaaaggacgttgtggtggcctcac

SEQ ID NO: 141237 - DNA, 25 bp, Probe Sequence
agacgagtgtcgctgcgtgagtggc

SEQ ID NO: 141238 - DNA, 25 bp, Probe Sequence
agaaagtgacggccgtgcacaaggc

SEQ ID NO: 141239 - DNA, 25 bp, Probe Sequence
agaaatgtgaagtgctagctgaagg

SEQ ID NO: 141240 - DNA, 25 bp, Probe Sequence
agacatctgctaaaatgcttgctga

SEQ ID NO: 141241 - DNA, 25 bp, Probe Sequence
agaactcagatagagtgagctactc

SEQ ID NO: 141242 - DNA, 25 bp, Probe Sequence
agaactcaaatcaagaagtaagaaa

SEQ ID NO: 141243 - DNA, 25 bp, Probe Sequence
agaagcccttctggaactacaagca

SEQ ID NO: 141244 - DNA, 25 bp, Probe Sequence
agaacggtgttgcatcgatacaggc

SEQ ID NO: 141245 - DNA, 25 bp, Probe Sequence
agaacagcccctggatgctaacagg

SEQ ID NO: 141246 - DNA, 25 bp, Probe Sequence
agaagacggcctggtccagttggag

SEQ ID NO: 141247 - DNA, 25 bp, Probe Sequence
agacagacgggggatctggctggtg

SEQ ID NO: 141248 - DNA, 25 bp, Probe Sequence
agacaaggttgctgttgtgcagtgt

SEQ ID NO: 141249 - DNA, 25 bp, Probe Sequence
agaaaagtttagtatgtgacgataa

SEQ ID NO: 141250 - DNA, 25 bp, Probe Sequence
agacagtattttggatgattgggat

SEQ ID NO: 141251 - DNA, 25 bp, Probe Sequence
agaagtattttgccagagtttaatt

SEQ ID NO: 141252 - DNA, 25 bp, Probe Sequence
agacgttttcatcctggtgttcagt

SEQ ID NO: 141253 - DNA, 25 bp, Probe Sequence
agacttgtagtcactgggcttttgt

SEQ ID NO: 141254 - DNA, 25 bp, Probe Sequence
agacattgtactcagtgggccttgg

SEQ ID NO: 141255 - DNA, 25 bp, Probe Sequence
agacaggtatgtcagaggaccgtgt

SEQ ID NO: 141256 - DNA, 25 bp, Probe Sequence
agaagaggattcccaggatcctggg

SEQ ID NO: 141257 - DNA, 25 bp, Probe Sequence
agaacagacatttaggtatctcagg

SEQ ID NO: 141258 - DNA, 25 bp, Probe Sequence
agaacaacatagacgtttgtcctga

SEQ ID NO: 141259 - DNA, 25 bp, Probe Sequence
agaacgaatgagggtcctctcatcg

SEQ ID NO: 141260 - DNA, 25 bp, Probe Sequence
agaaggaagaccgcactcctatggc

SEQ ID NO: 141261 - DNA, 25 bp, Probe Sequence
agaaaacagacctaatgctccttgt

SEQ ID NO: 141262 - DNA, 25 bp, Probe Sequence
agaagagaaacctgatggccttatc

SEQ ID NO: 141263 - DNA, 25 bp, Probe Sequence
agaagagaaacctgatggccttatc

SEQ ID NO: 141264 - DNA, 25 bp, Probe Sequence
agaaggagaccctgcagtacttcca

SEQ ID NO: 141265 - DNA, 25 bp, Probe Sequence
agaaggacacccggacaatgctggc

SEQ ID NO: 141266 - DNA, 25 bp, Probe Sequence
agaacggaatccaggcaatctgttt

SEQ ID NO: 141267 - DNA, 25 bp, Probe Sequence
agaattgtaaacattgaactgaaca

SEQ ID NO: 141268 - DNA, 25 bp, Probe Sequence
agaaatgaccaatattatactaaga

SEQ ID NO: 141269 - DNA, 25 bp, Probe Sequence
agaaatgaccgtatgtcaccaagag

SEQ ID NO: 141270 - DNA, 25 bp, Probe Sequence
agaactgcactgctttgtttaaagg

SEQ ID NO: 141271 - DNA, 25 bp, Probe Sequence
agaaacacgcacttagtctctaaag

SEQ ID NO: 141272 - DNA, 25 bp, Probe Sequence
agaataacgttgcagttcccacagg

SEQ ID NO: 141273 - DNA, 25 bp, Probe Sequence
agaagctacagcctggacttaccac

SEQ ID NO: 141274 - DNA, 25 bp, Probe Sequence
agacactcagccggagttgtaccac

SEQ ID NO: 141275 - DNA, 25 bp, Probe Sequence
agacactgaccgggcttttcagagc

SEQ ID NO: 141276 - DNA, 25 bp, Probe Sequence
agaaatgggggccttgatgctcacc

SEQ ID NO: 141277 - DNA, 25 bp, Probe Sequence
agacaaggacggccattttcaccac

SEQ ID NO: 141278 - DNA, 25 bp, Probe Sequence
agaagggacaagccaccttgaccgt

SEQ ID NO: 141279 - DNA, 25 bp, Probe Sequence
agaattgggcaacaccttgttctat

SEQ ID NO: 141280 - DNA, 25 bp, Probe Sequence
agaattcgaaggctctctctttcta

SEQ ID NO: 141281 - DNA, 25 bp, Probe Sequence
agacaaggaaggcatccctcctgat

SEQ ID NO: 141282 - DNA, 25 bp, Probe Sequence
agacagggaattaggcccccatcat

SEQ ID NO: 141283 - DNA, 25 bp, Probe Sequence
agcactgaaaatttggccccttgat

SEQ ID NO: 141284 - DNA, 25 bp, Probe Sequence
agactgaaaatgtcggccagcctgg

SEQ ID NO: 141285 - DNA, 25 bp, Probe Sequence
agactgaagattcgaggctccctgg

SEQ ID NO: 141286 - DNA, 25 bp, Probe Sequence
agactgtcatatccagcgagtccct

SEQ ID NO: 141287 - DNA, 25 bp, Probe Sequence
agactgtattcaccaagtctcccta

SEQ ID NO: 141288 - DNA, 25 bp, Probe Sequence
agacttctgcatcaaggtctcacct

SEQ ID NO: 141289 - DNA, 25 bp, Probe Sequence
agacacctgcaaaggtgactcaggt

SEQ ID NO: 141290 - DNA, 25 bp, Probe Sequence
agacacttacaaagctgcctcactt

SEQ ID NO: 141291 - DNA, 25 bp, Probe Sequence
agacacttcacatactgctggttta

SEQ ID NO: 141292 - DNA, 25 bp, Probe Sequence
agactgcttgaacccaggagttcaa

SEQ ID NO: 141293 - DNA, 25 bp, Probe Sequence
agaactatgatccccagaaggacaa

SEQ ID NO: 141294 - DNA, 25 bp, Probe Sequence
agaaatatgatcagagcttgaacac

SEQ ID NO: 141295 - DNA, 25 bp, Probe Sequence
agaactagacacccttgaagatttg

SEQ ID NO: 141296 - DNA, 25 bp, Probe Sequence
agacactgaatcacccggagtgctt

SEQ ID NO: 141297 - DNA, 25 bp, Probe Sequence
agacattgaataaccctgggcagtg

SEQ ID NO: 141298 - DNA, 25 bp, Probe Sequence
agacagggagaactcgtcggcaggt

SEQ ID NO: 141299 - DNA, 25 bp, Probe Sequence
agacaaaggtagagattggagtgat

SEQ ID NO: 141300 - DNA, 25 bp, Probe Sequence
agaaagaggtagaaggtcaaggagc

SEQ ID NO: 141301 - DNA, 25 bp, Probe Sequence
agaacagacgggaagcgtacgaagc

SEQ ID NO: 141302 - DNA, 25 bp, Probe Sequence
agaacttgaccgaaggtaagcaggc

SEQ ID NO: 141303 - DNA, 25 bp, Probe Sequence
agaactaccaccaggactcagaggc

SEQ ID NO: 141304 - DNA, 25 bp, Probe Sequence
agaacaaacaagacggcctggggat

SEQ ID NO: 141305 - DNA, 25 bp, Probe Sequence
agaaccaaaaactgagtgtgagaga

SEQ ID NO: 141306 - DNA, 25 bp, Probe Sequence
agaagtcaaaaagcacactgaaaga

SEQ ID NO: 141307 - DNA, 25 bp, Probe Sequence
agaacactacgagccacagcttaaa

SEQ ID NO: 141308 - DNA, 25 bp, Probe Sequence
agacaagtgatggagcagcaccagc

SEQ ID NO: 141309 - DNA, 25 bp, Probe Sequence
agacaatgttgtctgcagccagcct

SEQ ID NO: 141310 - DNA, 25 bp, Probe Sequence
agacaatgttgtctgcagccagcct

SEQ ID NO: 141311 - DNA, 25 bp, Probe Sequence
agaaatctggggcagccaccatcaa

SEQ ID NO: 141312 - DNA, 25 bp, Probe Sequence
agacaactggtaagccagctcctca

SEQ ID NO: 141313 - DNA, 25 bp, Probe Sequence
agacactctggttgcagtcaccatc

SEQ ID NO: 141314 - DNA, 25 bp, Probe Sequence
agacacatcctttcaccaaacttgt

SEQ ID NO: 141315 - DNA, 25 bp, Probe Sequence
agaacgttgtacacacaaacctggt

SEQ ID NO: 141316 - DNA, 25 bp, Probe Sequence
agaactgtcttacaccacttgagct

SEQ ID NO: 141317 - DNA, 25 bp, Probe Sequence
agaagttccacaggaccagcatttg

SEQ ID NO: 141318 - DNA, 25 bp, Probe Sequence
agcacagtgcaagcaaacacctttg

SEQ ID NO: 141319 - DNA, 25 bp, Probe Sequence
agaatcggatactcaatcactttgg

SEQ ID NO: 141320 - DNA, 25 bp, Probe Sequence
agaaattatagctgcatatcccttc

SEQ ID NO: 141321 - DNA, 25 bp, Probe Sequence
agaacttgattgttgagacgccttg

SEQ ID NO: 141322 - DNA, 25 bp, Probe Sequence
agaagctctttgtcggaggccttaa

SEQ ID NO: 141323 - DNA, 25 bp, Probe Sequence
agaagacttttctgagaccctgact

SEQ ID NO: 141324 - DNA, 25 bp, Probe Sequence
aagtattttctgtgggaccgactct

SEQ ID NO: 141325 - DNA, 25 bp, Probe Sequence
aagtattttctgtgggaccgactct

SEQ ID NO: 141326 - DNA, 25 bp, Probe Sequence
agcgttacctggaggcgatcctaat

SEQ ID NO: 141327 - DNA, 25 bp, Probe Sequence
acggtccctgtagaagtctccagga

SEQ ID NO: 141328 - DNA, 25 bp, Probe Sequence
acgtttgccatgagggctgttccgg

SEQ ID NO: 141329 - DNA, 25 bp, Probe Sequence
agactctctcctacataggtgtctc

SEQ ID NO: 141330 - DNA, 25 bp, Probe Sequence
agacttgctctactgaaggcttctt

SEQ ID NO: 141331 - DNA, 25 bp, Probe Sequence
agactctttactcaggtgcatggtt

SEQ ID NO: 141332 - DNA, 25 bp, Probe Sequence
agactttcaactattgttagatgtt

SEQ ID NO: 141333 - DNA, 25 bp, Probe Sequence
agacttttcctttcatctttgtgtt

SEQ ID NO: 141334 - DNA, 25 bp, Probe Sequence
agaactgattgataccattttggtt

SEQ ID NO: 141335 - DNA, 25 bp, Probe Sequence
agaactgtactaatccaggggattt

SEQ ID NO: 141336 - DNA, 25 bp, Probe Sequence
agaactttcatagccagtcaagcat

SEQ ID NO: 141337 - DNA, 25 bp, Probe Sequence
agacacaaataacctttgcaaacct

SEQ ID NO: 141338 - DNA, 25 bp, Probe Sequence
agacaagctgtttgagctttcaaac

SEQ ID NO: 141339 - DNA, 25 bp, Probe Sequence
agacaagtgtaatctcaccataata

SEQ ID NO: 141340 - DNA, 25 bp, Probe Sequence
agcacaatttgagcattcccattaa

SEQ ID NO: 141341 - DNA, 25 bp, Probe Sequence
agacaaggtcaggcatttttttcat

SEQ ID NO: 141342 - DNA, 25 bp, Probe Sequence
agaacaggtcccattttcacattag

SEQ ID NO: 141343 - DNA, 25 bp, Probe Sequence
agaaatggtgtggctttcacaaatt

SEQ ID NO: 141344 - DNA, 25 bp, Probe Sequence
agaaacttggctgcttaaaataagc

SEQ ID NO: 141345 - DNA, 25 bp, Probe Sequence
agaaacagtggactctctaaaaaat

SEQ ID NO: 141346 - DNA, 25 bp, Probe Sequence
agacagcctgcgtgttgtaaataaa

SEQ ID NO: 141347 - DNA, 25 bp, Probe Sequence
agaagcctgtggtaggtaagaaagg

SEQ ID NO: 141348 - DNA, 25 bp, Probe Sequence
agaacctgatggacatgttcaggga

SEQ ID NO: 141349 - DNA, 25 bp, Probe Sequence
agacagcctgttacgacatcgatgt

SEQ ID NO: 141350 - DNA, 25 bp, Probe Sequence
agacagtcatgtgaccaggcgctgg

SEQ ID NO: 141351 - DNA, 25 bp, Probe Sequence
agaagtaatcatctgcaaccatgtg

SEQ ID NO: 141352 - DNA, 25 bp, Probe Sequence
agaagttagcatcctgggccagttt

SEQ ID NO: 141353 - DNA, 25 bp, Probe Sequence
agaagcttaggcagggctctctttc

SEQ ID NO: 141354 - DNA, 25 bp, Probe Sequence
agaagctcggtgcacaggttttctc

SEQ ID NO: 141355 - DNA, 25 bp, Probe Sequence
agacagtcagtccgcaagatattta

SEQ ID NO: 141356 - DNA, 25 bp, Probe Sequence
agacattccgcgcacagtgataata

SEQ ID NO: 141357 - DNA, 25 bp, Probe Sequence
agaattcccgtactgattagtcaac

SEQ ID NO: 141358 - DNA, 25 bp, Probe Sequence
agaaccaccaaaatgcttagatcca

SEQ ID NO: 141359 - DNA, 25 bp, Probe Sequence
agacatctacctatacttaatctaa

SEQ ID NO: 141360 - DNA, 25 bp, Probe Sequence
agacatcatcaacattactcttcct

SEQ ID NO: 141361 - DNA, 25 bp, Probe Sequence
agaacattagtcatcaacattacat

SEQ ID NO: 141362 - DNA, 25 bp, Probe Sequence
agcaaagagagttacgaattacgtt

SEQ ID NO: 141363 - DNA, 25 bp, Probe Sequence
agacatcaagggaacgggtactgtt

SEQ ID NO: 141364 - DNA, 25 bp, Probe Sequence
agacataaggaggccagaggctgca

SEQ ID NO: 141365 - DNA, 25 bp, Probe Sequence
agactctggggcagcagacatgctg

SEQ ID NO: 141366 - DNA, 25 bp, Probe Sequence
agacactcagggatggagctgctgc

SEQ ID NO: 141367 - DNA, 25 bp, Probe Sequence
agaagaatgggaatgctgcgctgat

SEQ ID NO: 141368 - DNA, 25 bp, Probe Sequence
agacacagctgggacacatgcctat

SEQ ID NO: 141369 - DNA, 25 bp, Probe Sequence
agaacctgggaattcctgcacggaa

SEQ ID NO: 141370 - DNA, 25 bp, Probe Sequence
agaaacatggtttacttgcacaaaa

SEQ ID NO: 141371 - DNA, 25 bp, Probe Sequence
agaaaccgatttgcttgagaaaagc

SEQ ID NO: 141372 - DNA, 25 bp, Probe Sequence
agaaacctcattctttggcaagcag

SEQ ID NO: 141373 - DNA, 25 bp, Probe Sequence
agaaactcctagtttagacaactgg

SEQ ID NO: 141374 - DNA, 25 bp, Probe Sequence
agaaggaccggtatgagatcaattc

SEQ ID NO: 141375 - DNA, 25 bp, Probe Sequence
agaacaatccggctggaaacatctt

SEQ ID NO: 141376 - DNA, 25 bp, Probe Sequence
agaataaaccagctgagaagaactc

SEQ ID NO: 141377 - DNA, 25 bp, Probe Sequence
agaaatatagacctgtgaaaagacg

SEQ ID NO: 141378 - DNA, 25 bp, Probe Sequence
agaaatgctccacctgtaagaacag

SEQ ID NO: 141379 - DNA, 25 bp, Probe Sequence
agaaatgcctcacagctatcgtgaa

SEQ ID NO: 141380 - DNA, 25 bp, Probe Sequence
agaaatcccggcctgcaatgtatga

SEQ ID NO: 141381 - DNA, 25 bp, Probe Sequence
agaaatcttagcggaaattatatat

SEQ ID NO: 141382 - DNA, 25 bp, Probe Sequence
agacaacctgcctagaaactctgaa

SEQ ID NO: 141383 - DNA, 25 bp, Probe Sequence
agacatactccataactcactctga

SEQ ID NO: 141384 - DNA, 25 bp, Probe Sequence
agacagactacaggagaggccactg

SEQ ID NO: 141385 - DNA, 25 bp, Probe Sequence
agaaagcctacaagatgcagccctg

SEQ ID NO: 141386 - DNA, 25 bp, Probe Sequence
agaaaccgatgctgagcccggatgt

SEQ ID NO: 141387 - DNA, 25 bp, Probe Sequence
agaagacctgagtgggacccagttt

SEQ ID NO: 141388 - DNA, 25 bp, Probe Sequence
agaagaacggggctgagcactcgct

SEQ ID NO: 141389 - DNA, 25 bp, Probe Sequence
agaagaactgaacctgccagactcc

SEQ ID NO: 141390 - DNA, 25 bp, Probe Sequence
agaagaaggaccggtatgagatcaa

SEQ ID NO: 141391 - DNA, 25 bp, Probe Sequence
agaaaagggccaagtggacatcttg

SEQ ID NO: 141392 - DNA, 25 bp, Probe Sequence
agaactaggatgtaactggagagct

SEQ ID NO: 141393 - DNA, 25 bp, Probe Sequence
agacagcggggatccggatggcttc

SEQ ID NO: 141394 - DNA, 25 bp, Probe Sequence
agaacttgggtgaccggatccttca

SEQ ID NO: 141395 - DNA, 25 bp, Probe Sequence
agaaggctgtttaacatctaccttc

SEQ ID NO: 141396 - DNA, 25 bp, Probe Sequence
agaaatgatgttcaaaaactgttca

SEQ ID NO: 141397 - DNA, 25 bp, Probe Sequence
agaaccatgtattaaccacacttaa

SEQ ID NO: 141398 - DNA, 25 bp, Probe Sequence
agacacctgttctgaaacctgagga

SEQ ID NO: 141399 - DNA, 25 bp, Probe Sequence
agcaacctgaatctcaaacctggag

SEQ ID NO: 141400 - DNA, 25 bp, Probe Sequence
agaacctgcagccccaaaactgggg

SEQ ID NO: 141401 - DNA, 25 bp, Probe Sequence
agaacctggccttgaacgagtgcgg

SEQ ID NO: 141402 - DNA, 25 bp, Probe Sequence
agacacgcaggcctctgagagggtc

SEQ ID NO: 141403 - DNA, 25 bp, Probe Sequence
agaacgcgggtgcagcgtgtgatcg

SEQ ID NO: 141404 - DNA, 25 bp, Probe Sequence
agacagcagggagtgtgtgcctctt

SEQ ID NO: 141405 - DNA, 25 bp, Probe Sequence
agaagcatctgggctaggcctctta

SEQ ID NO: 141406 - DNA, 25 bp, Probe Sequence
agaacattcagaatcaggtcagctt

SEQ ID NO: 141407 - DNA, 25 bp, Probe Sequence
agcaacagtcaacatttcccttaat

SEQ ID NO: 141408 - DNA, 25 bp, Probe Sequence
agaaatgtaactttttgctcttata

SEQ ID NO: 141409 - DNA, 25 bp, Probe Sequence
agaaattccctagtgtatgtcttta

SEQ ID NO: 141410 - DNA, 25 bp, Probe Sequence
agaaattacctttatattctagtat

SEQ ID NO: 141411 - DNA, 25 bp, Probe Sequence
agaaatgtgcacactaatatttagt

SEQ ID NO: 141412 - DNA, 25 bp, Probe Sequence
agaacatggacttgtatatttgtac

SEQ ID NO: 141413 - DNA, 25 bp, Probe Sequence
agaaacgactcgaaaattgtccaag

SEQ ID NO: 141414 - DNA, 25 bp, Probe Sequence
agacagggacctgaaaggatccaga

SEQ ID NO: 141415 - DNA, 25 bp, Probe Sequence
agaaggcagtccgctggaggacctg

SEQ ID NO: 141416 - DNA, 25 bp, Probe Sequence
agaaggcccacctgatggagatcca

SEQ ID NO: 141417 - DNA, 25 bp, Probe Sequence
agaagacctccctgtgagagagttg

SEQ ID NO: 141418 - DNA, 25 bp, Probe Sequence
agaagacttcttatctgactgaact

SEQ ID NO: 141419 - DNA, 25 bp, Probe Sequence
agaaaatctttgatctacaggactg

SEQ ID NO: 141420 - DNA, 25 bp, Probe Sequence
agaacaatatttgtgtcataagaca

SEQ ID NO: 141421 - DNA, 25 bp, Probe Sequence
agaaactttgtgctacatgacgaca

SEQ ID NO: 141422 - DNA, 25 bp, Probe Sequence
agaaacttggatgtcactgcctgac

SEQ ID NO: 141423 - DNA, 25 bp, Probe Sequence
agaaactcttgtttcagctcttggc

SEQ ID NO: 141424 - DNA, 25 bp, Probe Sequence
agaacttcgttgttcagttttcatg

SEQ ID NO: 141425 - DNA, 25 bp, Probe Sequence
agaaccattttgtctcattattcct

SEQ ID NO: 141426 - DNA, 25 bp, Probe Sequence
agacttcagtctcattattattgcc

SEQ ID NO: 141427 - DNA, 25 bp, Probe Sequence
agacatttatcaagattatctgttc

SEQ ID NO: 141428 - DNA, 25 bp, Probe Sequence
agacaattgcatcaactttgtggca

SEQ ID NO: 141429 - DNA, 25 bp, Probe Sequence
agacactaaaatatttgcaggcatg

SEQ ID NO: 141430 - DNA, 25 bp, Probe Sequence
agacagcaaagatttccttcagcaa

SEQ ID NO: 141431 - DNA, 25 bp, Probe Sequence
agacatgaaatgttctgcactgatt

SEQ ID NO: 141432 - DNA, 25 bp, Probe Sequence
agacaaggcattgctgcgcagattt

SEQ ID NO: 141433 - DNA, 25 bp, Probe Sequence
agcagcaaggacatccggatgaaaa

SEQ ID NO: 141434 - DNA, 25 bp, Probe Sequence
agcagcaaggacatccggatgaaaa

SEQ ID NO: 141435 - DNA, 25 bp, Probe Sequence
agacatctggtctgcaacagaaaaa

SEQ ID NO: 141436 - DNA, 25 bp, Probe Sequence
agacatggcctgtatgagaagaaaa

SEQ ID NO: 141437 - DNA, 25 bp, Probe Sequence
agacagctgccttgtgtgggactga

SEQ ID NO: 141438 - DNA, 25 bp, Probe Sequence
agacagagcgcttggcacaggagga

SEQ ID NO: 141439 - DNA, 25 bp, Probe Sequence
agacaactctgtccattgggagcgc

SEQ ID NO: 141440 - DNA, 25 bp, Probe Sequence
agaaacctggcttgtgaggacgcgt

SEQ ID NO: 141441 - DNA, 25 bp, Probe Sequence
agaaatacgtcggtgagggggctcg

SEQ ID NO: 141442 - DNA, 25 bp, Probe Sequence
agaacaagcgtcggaggggctgtcc

SEQ ID NO: 141443 - DNA, 25 bp, Probe Sequence
agaacaagcgtcggaggggctgtcc

SEQ ID NO: 141444 - DNA, 25 bp, Probe Sequence
agacaccagggtttgggggatgcct

SEQ ID NO: 141445 - DNA, 25 bp, Probe Sequence
agacattcatggctttgggcagaag

SEQ ID NO: 141446 - DNA, 25 bp, Probe Sequence
agaagtaggcgtatgggataactat

SEQ ID NO: 141447 - DNA, 25 bp, Probe Sequence
agaagtagacgggttgtttcaacat

SEQ ID NO: 141448 - DNA, 25 bp, Probe Sequence
agaaatggtagatactgtgttaacc

SEQ ID NO: 141449 - DNA, 25 bp, Probe Sequence
agaagggtgaactatcttggtaaca

SEQ ID NO: 141450 - DNA, 25 bp, Probe Sequence
agaaggcgatagcttttagaaagag

SEQ ID NO: 141451 - DNA, 25 bp, Probe Sequence
agaaatgctaaattttcttaacaag

SEQ ID NO: 141452 - DNA, 25 bp, Probe Sequence
agaagtctcaaaattccgaaaccag

SEQ ID NO: 141453 - DNA, 25 bp, Probe Sequence
agaagtataaaaatccacatcaatg

SEQ ID NO: 141454 - DNA, 25 bp, Probe Sequence
agaaatatgacatcaccacgctcag

SEQ ID NO: 141455 - DNA, 25 bp, Probe Sequence
agaaatgtgcatcaagccagcctga

SEQ ID NO: 141456 - DNA, 25 bp, Probe Sequence
agaaatgtgcatcaagccagcctga

SEQ ID NO: 141457 - DNA, 25 bp, Probe Sequence
agaagctgtgctcttgctgttagaa

SEQ ID NO: 141458 - DNA, 25 bp, Probe Sequence
agacagcttgtgattcgctctagac

SEQ ID NO: 141459 - DNA, 25 bp, Probe Sequence
agacagagtctgcttctgttaccca

SEQ ID NO: 141460 - DNA, 25 bp, Probe Sequence
agacaaggtggtgcagtgtggccgc

SEQ ID NO: 141461 - DNA, 25 bp, Probe Sequence
agaaagggcagtggagtgctcagct

SEQ ID NO: 141462 - DNA, 25 bp, Probe Sequence
agaaaggccctcgaggcagagaccc

SEQ ID NO: 141463 - DNA, 25 bp, Probe Sequence
agaagagcgccggcaagaggggccc

SEQ ID NO: 141464 - DNA, 25 bp, Probe Sequence
agaatccccatggggtgtgggccgt

SEQ ID NO: 141465 - DNA, 25 bp, Probe Sequence
agaacccctggacatttgagcgaat

SEQ ID NO: 141466 - DNA, 25 bp, Probe Sequence
agaacccttacaaattcgaagaatg

SEQ ID NO: 141467 - DNA, 25 bp, Probe Sequence
agaactcctttaatatctccaacct

SEQ ID NO: 141468 - DNA, 25 bp, Probe Sequence
agaactccttgtagactttcacgtc

SEQ ID NO: 141469 - DNA, 25 bp, Probe Sequence
agacacccttgaagatttggcctgg

SEQ ID NO: 141470 - DNA, 25 bp, Probe Sequence
agacagtcctctactgcgatttctt

SEQ ID NO: 141471 - DNA, 25 bp, Probe Sequence
agaaccgcatctatgtgtactcctt

SEQ ID NO: 141472 - DNA, 25 bp, Probe Sequence
agaaccgcatctatgtgtactcctt

SEQ ID NO: 141473 - DNA, 25 bp, Probe Sequence
agaactccctcaagtttcatttgtg

SEQ ID NO: 141474 - DNA, 25 bp, Probe Sequence
agaaacccacttgttcacagcatgt

SEQ ID NO: 141475 - DNA, 25 bp, Probe Sequence
agaaagcaaacgagctgcccacagt

SEQ ID NO: 141476 - DNA, 25 bp, Probe Sequence
agaaagaacctatgtgccctgtcta

SEQ ID NO: 141477 - DNA, 25 bp, Probe Sequence
agaaaaccattcaaggccctactat

SEQ ID NO: 141478 - DNA, 25 bp, Probe Sequence
aaatggtccaacagtccgaccttgg

SEQ ID NO: 141479 - DNA, 25 bp, Probe Sequence
agaagggccagagggtccaggcatc

SEQ ID NO: 141480 - DNA, 25 bp, Probe Sequence
agaagggccagagggtccaggcatc

SEQ ID NO: 141481 - DNA, 25 bp, Probe Sequence
agacagatgggggctgggcccacac

SEQ ID NO: 141482 - DNA, 25 bp, Probe Sequence
agaagtcagagatcagggccaaaca

SEQ ID NO: 141483 - DNA, 25 bp, Probe Sequence
agaaaagcacataatggaccaagta

SEQ ID NO: 141484 - DNA, 25 bp, Probe Sequence
agaaaacctcattgaaggcgcagag

SEQ ID NO: 141485 - DNA, 25 bp, Probe Sequence
agaacaatctcctagaagtgcctgt

SEQ ID NO: 141486 - DNA, 25 bp, Probe Sequence
agacagaatcccaataatagtccca

SEQ ID NO: 141487 - DNA, 25 bp, Probe Sequence
agaagacgcccagttacttcgtcac

SEQ ID NO: 141488 - DNA, 25 bp, Probe Sequence
agaagcacgaactataaccttgata

SEQ ID NO: 141489 - DNA, 25 bp, Probe Sequence
agaaaggacagttcacaatctagta

SEQ ID NO: 141490 - DNA, 25 bp, Probe Sequence
agaaaggactgatagcaactggcat

SEQ ID NO: 141491 - DNA, 25 bp, Probe Sequence
agaactggaatagacaaggacggcc

SEQ ID NO: 141492 - DNA, 25 bp, Probe Sequence
agaacaggcactagaagaaggaaga

SEQ ID NO: 141493 - DNA, 25 bp, Probe Sequence
agaacatccagtagtgaaacagaag

SEQ ID NO: 141494 - DNA, 25 bp, Probe Sequence
agaaatccacattcttacacaagaa

SEQ ID NO: 141495 - DNA, 25 bp, Probe Sequence
agaacattccatccaatagcaacag

SEQ ID NO: 141496 - DNA, 25 bp, Probe Sequence
agaagattaaccttccagccaacct

SEQ ID NO: 141497 - DNA, 25 bp, Probe Sequence
agaagactttaatccgtcaaattct

SEQ ID NO: 141498 - DNA, 25 bp, Probe Sequence
agaacctttagatactccaactcac

SEQ ID NO: 141499 - DNA, 25 bp, Probe Sequence
agaacttctagaataacccagatgc

SEQ ID NO: 141500 - DNA, 25 bp, Probe Sequence
agaaatgcccagtaatcacctcagg

SEQ ID NO: 141501 - DNA, 25 bp, Probe Sequence
agacagatggtactttacctcgtgt

SEQ ID NO: 141502 - DNA, 25 bp, Probe Sequence
agaaagcgtacttcaccttgggtga

SEQ ID NO: 141503 - DNA, 25 bp, Probe Sequence
agaagggaacttgcctgaggtggac

SEQ ID NO: 141504 - DNA, 25 bp, Probe Sequence
agacagggtttcaccatgttggcca

SEQ ID NO: 141505 - DNA, 25 bp, Probe Sequence
agacaaggtttctccatgttggtca

SEQ ID NO: 141506 - DNA, 25 bp, Probe Sequence
agaaatgcctggtaccttgttggaa

SEQ ID NO: 141507 - DNA, 25 bp, Probe Sequence
agaaatgcctagtgtctattttatt

SEQ ID NO: 141508 - DNA, 25 bp, Probe Sequence
agacaaaccagatgtaatatatttt

SEQ ID NO: 141509 - DNA, 25 bp, Probe Sequence
agaaaatccaaaccagtacaactat

SEQ ID NO: 141510 - DNA, 25 bp, Probe Sequence
agaactgactcctagaagtacccca

SEQ ID NO: 141511 - DNA, 25 bp, Probe Sequence
agcaagccactagaaccaaggccca

SEQ ID NO: 141512 - DNA, 25 bp, Probe Sequence
agcacagcccctctatccaaggggc

SEQ ID NO: 141513 - DNA, 25 bp, Probe Sequence
agaaccctgatgcctttcttggggt

SEQ ID NO: 141514 - DNA, 25 bp, Probe Sequence
agcaacccggtccagtactgggaga

SEQ ID NO: 141515 - DNA, 25 bp, Probe Sequence
agcaacccggtccagtactgggaga

SEQ ID NO: 141516 - DNA, 25 bp, Probe Sequence
agcaacccggtccagtactgggaga

SEQ ID NO: 141517 - DNA, 25 bp, Probe Sequence
agcaacccggtccagtactgggaga

SEQ ID NO: 141518 - DNA, 25 bp, Probe Sequence
agcaacccggtccagtactgggaga

SEQ ID NO: 141519 - DNA, 25 bp, Probe Sequence
agacaccggcgtgggaatgtgggaa

SEQ ID NO: 141520 - DNA, 25 bp, Probe Sequence
agaaacagcgtggggtatatgggaa

SEQ ID NO: 141521 - DNA, 25 bp, Probe Sequence
agaaatcagcctatggtttaagcct

SEQ ID NO: 141522 - DNA, 25 bp, Probe Sequence
agaagtgggcttcagatttaaggct

SEQ ID NO: 141523 - DNA, 25 bp, Probe Sequence
agaagtgggcttcagatttaaggct

SEQ ID NO: 141524 - DNA, 25 bp, Probe Sequence
agaatgtggatctgccgaattgaag

SEQ ID NO: 141525 - DNA, 25 bp, Probe Sequence
agaaggtgactagctatactccaac

SEQ ID NO: 141526 - DNA, 25 bp, Probe Sequence
agaagttacatctctatttcccaca

SEQ ID NO: 141527 - DNA, 25 bp, Probe Sequence
agacagtttctgtggatgttcctca

SEQ ID NO: 141528 - DNA, 25 bp, Probe Sequence
agacagacttgggtggcaattcctc

SEQ ID NO: 141529 - DNA, 25 bp, Probe Sequence
agacatggccgtggtaaatgtcact

SEQ ID NO: 141530 - DNA, 25 bp, Probe Sequence
agacatggggctgttagcgtctctc

SEQ ID NO: 141531 - DNA, 25 bp, Probe Sequence
agacagcagtggagacggcagttct

SEQ ID NO: 141532 - DNA, 25 bp, Probe Sequence
agaaagtggcagcctagagcctttg

SEQ ID NO: 141533 - DNA, 25 bp, Probe Sequence
agaaatgttcatttaggcctggcgc

SEQ ID NO: 141534 - DNA, 25 bp, Probe Sequence
agaaaattctcttatctgggtggct

SEQ ID NO: 141535 - DNA, 25 bp, Probe Sequence
agaaagtttgcctatctggggcgcc

SEQ ID NO: 141536 - DNA, 25 bp, Probe Sequence
agaaagtattcaggctctggggaga

SEQ ID NO: 141537 - DNA, 25 bp, Probe Sequence
agaaacaagtcagcgtctggccaac

SEQ ID NO: 141538 - DNA, 25 bp, Probe Sequence
agaatgaaatgcaccagtctggctt

SEQ ID NO: 141539 - DNA, 25 bp, Probe Sequence
agacaagaatgtacactgctctgtg

SEQ ID NO: 141540 - DNA, 25 bp, Probe Sequence
agaaataatgttctgctgcgtcccc

SEQ ID NO: 141541 - DNA, 25 bp, Probe Sequence
agaaataatgttctgctgcgtcccc

SEQ ID NO: 141542 - DNA, 25 bp, Probe Sequence
agaagatagtttctgacatgtgcct

SEQ ID NO: 141543 - DNA, 25 bp, Probe Sequence
agaaaagtcttcctggaggtgttca

SEQ ID NO: 141544 - DNA, 25 bp, Probe Sequence
agaaagggcactgggggctgttctc

SEQ ID NO: 141545 - DNA, 25 bp, Probe Sequence
agaacacccatcatgtggctgctgt

SEQ ID NO: 141546 - DNA, 25 bp, Probe Sequence
agacacaagaacaatctttgctata

SEQ ID NO: 141547 - DNA, 25 bp, Probe Sequence
agacaacatagaaatgcttcctcat

SEQ ID NO: 141548 - DNA, 25 bp, Probe Sequence
agaagacacaatgcattctccctgg

SEQ ID NO: 141549 - DNA, 25 bp, Probe Sequence
agacaatgacataatcccgcctttg

SEQ ID NO: 141550 - DNA, 25 bp, Probe Sequence
agaaagactgattacctcctgtgtg

SEQ ID NO: 141551 - DNA, 25 bp, Probe Sequence
agacagagacctttgcttcctgttg

SEQ ID NO: 141552 - DNA, 25 bp, Probe Sequence
agacagaagacgtactggccgctgg

SEQ ID NO: 141553 - DNA, 25 bp, Probe Sequence
agacagaagacgtactggccgctgg

SEQ ID NO: 141554 - DNA, 25 bp, Probe Sequence
agacaataaagtcgctccgcagctg

SEQ ID NO: 141555 - DNA, 25 bp, Probe Sequence
agacaatgaacagcgacccaggcct

SEQ ID NO: 141556 - DNA, 25 bp, Probe Sequence
agacacacacacatcagactggcaa

SEQ ID NO: 141557 - DNA, 25 bp, Probe Sequence
agacacacacacatcagactggcaa

SEQ ID NO: 141558 - DNA, 25 bp, Probe Sequence
agacacacacacagtgcgcagaaag

SEQ ID NO: 141559 - DNA, 25 bp, Probe Sequence
agacacactacttggcctcagtgat

SEQ ID NO: 141560 - DNA, 25 bp, Probe Sequence
agaagactgacttccctagattccc

SEQ ID NO: 141561 - DNA, 25 bp, Probe Sequence
agaaattggcttctctaggctcttc

SEQ ID NO: 141562 - DNA, 25 bp, Probe Sequence
agacactggcgctttttagacttcc

SEQ ID NO: 141563 - DNA, 25 bp, Probe Sequence
agacagatgtggttgcatcctaact

SEQ ID NO: 141564 - DNA, 25 bp, Probe Sequence
agaaattggcaattccataatccta

SEQ ID NO: 141565 - DNA, 25 bp, Probe Sequence
agaaatcatggactcacagggtcct

SEQ ID NO: 141566 - DNA, 25 bp, Probe Sequence
agaaatcttgctccacaaggatctc

SEQ ID NO: 141567 - DNA, 25 bp, Probe Sequence
agaaattattgcttcaaggacacct

SEQ ID NO: 141568 - DNA, 25 bp, Probe Sequence
agaatttttctatgaggagcaggga

SEQ ID NO: 141569 - DNA, 25 bp, Probe Sequence
agaaattccgcaaggctgtgacaga

SEQ ID NO: 141570 - DNA, 25 bp, Probe Sequence
agaaaagccagcatagagaaagcaa

SEQ ID NO: 141571 - DNA, 25 bp, Probe Sequence
agacaagaggcacacagagacagac

SEQ ID NO: 141572 - DNA, 25 bp, Probe Sequence
agacaaaggcgcggcaggagcaggg

SEQ ID NO: 141573 - DNA, 25 bp, Probe Sequence
agaaagatgactgatgtggtagggt

SEQ ID NO: 141574 - DNA, 25 bp, Probe Sequence
agaagagagactcggttctaacttc

SEQ ID NO: 141575 - DNA, 25 bp, Probe Sequence
agacaaggccgcggtggtcaagttc

SEQ ID NO: 141576 - DNA, 25 bp, Probe Sequence
agacaaggcccacagaataagattt

SEQ ID NO: 141577 - DNA, 25 bp, Probe Sequence
accgagcccctatgaaaagaccaga

SEQ ID NO: 141578 - DNA, 25 bp, Probe Sequence
aatcgagttcctctacgaagaacac

SEQ ID NO: 141579 - DNA, 25 bp, Probe Sequence
aaaggctcccatgtgggaagaagac

SEQ ID NO: 141580 - DNA, 25 bp, Probe Sequence
agaaggtcacgtgtgctccagataa

SEQ ID NO: 141581 - DNA, 25 bp, Probe Sequence
agaaagacgccgatcctcagatgaa

SEQ ID NO: 141582 - DNA, 25 bp, Probe Sequence
agacaatattgtcttcctgcgagaa

SEQ ID NO: 141583 - DNA, 25 bp, Probe Sequence
agaagtgtaggtttcctctggaagc

SEQ ID NO: 141584 - DNA, 25 bp, Probe Sequence
agcaagtttttacccacattggagc

SEQ ID NO: 141585 - DNA, 25 bp, Probe Sequence
agaaatgttctctctataattggac

SEQ ID NO: 141586 - DNA, 25 bp, Probe Sequence
agaaatgcttcctcattatgagcca

SEQ ID NO: 141587 - DNA, 25 bp, Probe Sequence
agcagaagcttcgttttagtgaacc

SEQ ID NO: 141588 - DNA, 25 bp, Probe Sequence
agaaaggtgccgattcaccaacaca

SEQ ID NO: 141589 - DNA, 25 bp, Probe Sequence
agaaaggtgacgattctcactcacc

SEQ ID NO: 141590 - DNA, 25 bp, Probe Sequence
agaaaggctcattggttgctcctga

SEQ ID NO: 141591 - DNA, 25 bp, Probe Sequence
agaaaggctcatacctggcttgcag

SEQ ID NO: 141592 - DNA, 25 bp, Probe Sequence
agcattcaaggtcccattcggggct

SEQ ID NO: 141593 - DNA, 25 bp, Probe Sequence
agcttctgggtaaatttggtgagtt

SEQ ID NO: 141594 - DNA, 25 bp, Probe Sequence
agcttcagactgttttattggtggt

SEQ ID NO: 141595 - DNA, 25 bp, Probe Sequence
agctttacacattttgatggggaat

SEQ ID NO: 141596 - DNA, 25 bp, Probe Sequence
agcctggacctgtttctgggaggtg

SEQ ID NO: 141597 - DNA, 25 bp, Probe Sequence
agaattgatcgttttggggaagatg

SEQ ID NO: 141598 - DNA, 25 bp, Probe Sequence
agaactgtctgtggactgggaaaca

SEQ ID NO: 141599 - DNA, 25 bp, Probe Sequence
agaacctggtggattgctcaactga

SEQ ID NO: 141600 - DNA, 25 bp, Probe Sequence
agaacatccgccgtgtgttcaacga

SEQ ID NO: 141601 - DNA, 25 bp, Probe Sequence
agaacaccactgactttgtggacga

SEQ ID NO: 141602 - DNA, 25 bp, Probe Sequence
agaactccagtttcactgggcatcc

SEQ ID NO: 141603 - DNA, 25 bp, Probe Sequence
agaactccagtgcaaagaactccac

SEQ ID NO: 141604 - DNA, 25 bp, Probe Sequence
agaacccaaggatagcagagcccag

SEQ ID NO: 141605 - DNA, 25 bp, Probe Sequence
agaattgcctggctgttgaaggccg

SEQ ID NO: 141606 - DNA, 25 bp, Probe Sequence
agaagatcctggctgccaactgagc

SEQ ID NO: 141607 - DNA, 25 bp, Probe Sequence
agaaagcagcgcctgctccaaaagc

SEQ ID NO: 141608 - DNA, 25 bp, Probe Sequence
agaaagcagcgcctgctccaaaagc

SEQ ID NO: 141609 - DNA, 25 bp, Probe Sequence
agaaagcacctgctccaaaggcatc

SEQ ID NO: 141610 - DNA, 25 bp, Probe Sequence
agaaagcacctgctccaaaggcatc

SEQ ID NO: 141611 - DNA, 25 bp, Probe Sequence
agaaagccctggggatgaagctgcc

SEQ ID NO: 141612 - DNA, 25 bp, Probe Sequence
agaacactacagcggagacgccacc

SEQ ID NO: 141613 - DNA, 25 bp, Probe Sequence
agacacacgggctgagcagacggcc

SEQ ID NO: 141614 - DNA, 25 bp, Probe Sequence
agaacacgtggctcaagatcctggt

SEQ ID NO: 141615 - DNA, 25 bp, Probe Sequence
agaaccgttcgtcgagaactcagtc

SEQ ID NO: 141616 - DNA, 25 bp, Probe Sequence
agaacaactacgtgatgaatgcaca

SEQ ID NO: 141617 - DNA, 25 bp, Probe Sequence
agaacactttgcctgaatgtgatca

SEQ ID NO: 141618 - DNA, 25 bp, Probe Sequence
agaacagtagctgatgaagctgccc

SEQ ID NO: 141619 - DNA, 25 bp, Probe Sequence
agaacagagtgttcgattctgccct

SEQ ID NO: 141620 - DNA, 25 bp, Probe Sequence
agaacagagtgttcgattctgccct

SEQ ID NO: 141621 - DNA, 25 bp, Probe Sequence
agaagaacttatcgattcctctcct

SEQ ID NO: 141622 - DNA, 25 bp, Probe Sequence
agacaaacagaaaatctccctcctc

SEQ ID NO: 141623 - DNA, 25 bp, Probe Sequence
agaattacgacagattctccacctc

SEQ ID NO: 141624 - DNA, 25 bp, Probe Sequence
agaatttaacatgacttctgcccca

SEQ ID NO: 141625 - DNA, 25 bp, Probe Sequence
agaataccacgatgacttcttccca

SEQ ID NO: 141626 - DNA, 25 bp, Probe Sequence
agaacctgctcgggagctatttccc

SEQ ID NO: 141627 - DNA, 25 bp, Probe Sequence
agaaggatgccgcagaccattatct

SEQ ID NO: 141628 - DNA, 25 bp, Probe Sequence
agaagaatcggtggtcctgtccttc

SEQ ID NO: 141629 - DNA, 25 bp, Probe Sequence
agaagaccaagtttcgcttctcggc

SEQ ID NO: 141630 - DNA, 25 bp, Probe Sequence
agaaaaaacttcagcatgtgccagg

SEQ ID NO: 141631 - DNA, 25 bp, Probe Sequence
agaaagaacagtgccctgctggcca

SEQ ID NO: 141632 - DNA, 25 bp, Probe Sequence
agaacatgtaggtccccttgtgtct

SEQ ID NO: 141633 - DNA, 25 bp, Probe Sequence
agaatcagtttgacccacctattgt

SEQ ID NO: 141634 - DNA, 25 bp, Probe Sequence
agaatagtatttgctcaacccagtt

SEQ ID NO: 141635 - DNA, 25 bp, Probe Sequence
agaacaggtcattgcactcaagcct

SEQ ID NO: 141636 - DNA, 25 bp, Probe Sequence
agaaaattcatactatcacacctgt

SEQ ID NO: 141637 - DNA, 25 bp, Probe Sequence
agaaggatgtcatgcttctctgtca

SEQ ID NO: 141638 - DNA, 25 bp, Probe Sequence
agaagggccttactccttcacagat

SEQ ID NO: 141639 - DNA, 25 bp, Probe Sequence
agaatggcccttgccttattgctga

SEQ ID NO: 141640 - DNA, 25 bp, Probe Sequence
agaagtcccacttccagaattctag

SEQ ID NO: 141641 - DNA, 25 bp, Probe Sequence
agaaatgctctatttacaaatttac

SEQ ID NO: 141642 - DNA, 25 bp, Probe Sequence
agaaagctataataacaggattgtt

SEQ ID NO: 141643 - DNA, 25 bp, Probe Sequence
aaacgtcagcaaccaaaggcaccgg

SEQ ID NO: 141644 - DNA, 25 bp, Probe Sequence
agaaaacatgcaactcaaacgacgg

SEQ ID NO: 141645 - DNA, 25 bp, Probe Sequence
agaaattctccactaagtctgacgt

SEQ ID NO: 141646 - DNA, 25 bp, Probe Sequence
agaactcacacaggttagtaacagt

SEQ ID NO: 141647 - DNA, 25 bp, Probe Sequence
agaactaacgctcctgagtaccagc

SEQ ID NO: 141648 - DNA, 25 bp, Probe Sequence
agaactaagcctttgggtccagagt

SEQ ID NO: 141649 - DNA, 25 bp, Probe Sequence
agaacataaaagatggtgtcaccag

SEQ ID NO: 141650 - DNA, 25 bp, Probe Sequence
agaacgaggaaaaagtggcatcaga

SEQ ID NO: 141651 - DNA, 25 bp, Probe Sequence
agaaccggacctagcatgattgtaa

SEQ ID NO: 141652 - DNA, 25 bp, Probe Sequence
agaatcaaaacctgcattttaaaca

SEQ ID NO: 141653 - DNA, 25 bp, Probe Sequence
agaatctaaaccttacatgtgtaaa

SEQ ID NO: 141654 - DNA, 25 bp, Probe Sequence
agaaccacccctaagcatgttacaa

SEQ ID NO: 141655 - DNA, 25 bp, Probe Sequence
agcaacccacctacaatggcgttat

SEQ ID NO: 141656 - DNA, 25 bp, Probe Sequence
agaagactctctcctacataggtgt

SEQ ID NO: 141657 - DNA, 25 bp, Probe Sequence
agaacagcacgtcctactggctggt

SEQ ID NO: 141658 - DNA, 25 bp, Probe Sequence
agaacactcgtgaaactgctcaggc

SEQ ID NO: 141659 - DNA, 25 bp, Probe Sequence
agaaagcttgtataattcagattta

SEQ ID NO: 141660 - DNA, 25 bp, Probe Sequence
agaacactttattatatttcactta

SEQ ID NO: 141661 - DNA, 25 bp, Probe Sequence
agaacactttaatgaagtactctat

SEQ ID NO: 141662 - DNA, 25 bp, Probe Sequence
agaacctttaatcagagaagtaatc

SEQ ID NO: 141663 - DNA, 25 bp, Probe Sequence
agaacctttactccaggacacaaat

SEQ ID NO: 141664 - DNA, 25 bp, Probe Sequence
agaaactatccgagggaagaatatg

SEQ ID NO: 141665 - DNA, 25 bp, Probe Sequence
agaagaaatcttagcggaaattata

SEQ ID NO: 141666 - DNA, 25 bp, Probe Sequence
agaaatatcactcaccataatttaa

SEQ ID NO: 141667 - DNA, 25 bp, Probe Sequence
agaaatctacatccaccaaaattgt

SEQ ID NO: 141668 - DNA, 25 bp, Probe Sequence
agaacattcaatgccctgaaaatgt

SEQ ID NO: 141669 - DNA, 25 bp, Probe Sequence
aaacatctcggcacctagtaatggt

SEQ ID NO: 141670 - DNA, 25 bp, Probe Sequence
agaacttcaggctcctgggcaacgt

SEQ ID NO: 141671 - DNA, 25 bp, Probe Sequence
agaacttcaggctcctgggcaacgt

SEQ ID NO: 141672 - DNA, 25 bp, Probe Sequence
agaactgtaggcatctcttggaatg

SEQ ID NO: 141673 - DNA, 25 bp, Probe Sequence
agaacagtggacatggcttggggta

SEQ ID NO: 141674 - DNA, 25 bp, Probe Sequence
agaacgtggtttgcctgaggctgta

SEQ ID NO: 141675 - DNA, 25 bp, Probe Sequence
agaacttaaaatgctctgagtgctg

SEQ ID NO: 141676 - DNA, 25 bp, Probe Sequence
agaagctactcagtgatccctgacc

SEQ ID NO: 141677 - DNA, 25 bp, Probe Sequence
agaagcaagcacttctagccagacc

SEQ ID NO: 141678 - DNA, 25 bp, Probe Sequence
agaaatcagcactgagaccatcacc

SEQ ID NO: 141679 - DNA, 25 bp, Probe Sequence
agaagaagccaacgaactcaccaag

SEQ ID NO: 141680 - DNA, 25 bp, Probe Sequence
agaagagcctgataaattcctcata

SEQ ID NO: 141681 - DNA, 25 bp, Probe Sequence
agaaacctataacttcacactcata

SEQ ID NO: 141682 - DNA, 25 bp, Probe Sequence
agaaacgaatcttgctgtacaccat

SEQ ID NO: 141683 - DNA, 25 bp, Probe Sequence
agaaagccaatcaggtcatcaggaa

SEQ ID NO: 141684 - DNA, 25 bp, Probe Sequence
agaaatggagatgagcctctgagga

SEQ ID NO: 141685 - DNA, 25 bp, Probe Sequence
agaaatggatctgactgcccggaca

SEQ ID NO: 141686 - DNA, 25 bp, Probe Sequence
agaaattgtgtggagtgacggaact

SEQ ID NO: 141687 - DNA, 25 bp, Probe Sequence
agaagtggcgtgaactgtcaggagt

SEQ ID NO: 141688 - DNA, 25 bp, Probe Sequence
agaagaatcagtaagtgtaaggtgt

SEQ ID NO: 141689 - DNA, 25 bp, Probe Sequence
agaagaccagtatgactcaagtttg

SEQ ID NO: 141690 - DNA, 25 bp, Probe Sequence
agaagcccacttaaacacattttgt

SEQ ID NO: 141691 - DNA, 25 bp, Probe Sequence
agaatacatacttattcccattttt

SEQ ID NO: 141692 - DNA, 25 bp, Probe Sequence
agaagaaaattatctgccatttttt

SEQ ID NO: 141693 - DNA, 25 bp, Probe Sequence
agaagcaagtaaatcatcctctttt

SEQ ID NO: 141694 - DNA, 25 bp, Probe Sequence
agaaatactcaattatgtctttgtt

SEQ ID NO: 141695 - DNA, 25 bp, Probe Sequence
agaaacttattattggcttctgttt

SEQ ID NO: 141696 - DNA, 25 bp, Probe Sequence
agaaagtaatctgcatatgttgttt

SEQ ID NO: 141697 - DNA, 25 bp, Probe Sequence
agaacagaagcattcctaattttgt

SEQ ID NO: 141698 - DNA, 25 bp, Probe Sequence
agaacaaatcagatctcaaggttga

SEQ ID NO: 141699 - DNA, 25 bp, Probe Sequence
agaaaaatgctgaatcatctatatt

SEQ ID NO: 141700 - DNA, 25 bp, Probe Sequence
agaaaaccatgaagctgctacatgt

SEQ ID NO: 141701 - DNA, 25 bp, Probe Sequence
agaaaagcctgcaaccagatgtttt

SEQ ID NO: 141702 - DNA, 25 bp, Probe Sequence
agaagtcagcagcaaccatgtcttg

SEQ ID NO: 141703 - DNA, 25 bp, Probe Sequence
agaaatagagagcccacgttgtgta

SEQ ID NO: 141704 - DNA, 25 bp, Probe Sequence
agaagcaagaaggcgatagctttta

SEQ ID NO: 141705 - DNA, 25 bp, Probe Sequence
agaaaatgattagtgtactgtttga

SEQ ID NO: 141706 - DNA, 25 bp, Probe Sequence
agaaaatcatcttggccactttaat

SEQ ID NO: 141707 - DNA, 25 bp, Probe Sequence
agaaacactctacacctctaatcaa

SEQ ID NO: 141708 - DNA, 25 bp, Probe Sequence
agaaacctcatcctatattttacaa

SEQ ID NO: 141709 - DNA, 25 bp, Probe Sequence
agaaaatggatcctggctttcccaa

SEQ ID NO: 141710 - DNA, 25 bp, Probe Sequence
agaaagattattagatgacttacct

SEQ ID NO: 141711 - DNA, 25 bp, Probe Sequence
agaaaattttcacgacctactcatc

SEQ ID NO: 141712 - DNA, 25 bp, Probe Sequence
agaaaattttagctgctttatcatc

SEQ ID NO: 141713 - DNA, 25 bp, Probe Sequence
agaagagaatattactggtttctac

SEQ ID NO: 141714 - DNA, 25 bp, Probe Sequence
agaatagacattagacagggacctg

SEQ ID NO: 141715 - DNA, 25 bp, Probe Sequence
agaattaagatgcaggtgtatcctg

SEQ ID NO: 141716 - DNA, 25 bp, Probe Sequence
agaattactggctgatggcccctga

SEQ ID NO: 141717 - DNA, 25 bp, Probe Sequence
agaagtttgaggacaggtccccagc

SEQ ID NO: 141718 - DNA, 25 bp, Probe Sequence
agcaaggttgcagatcggtccttcc

SEQ ID NO: 141719 - DNA, 25 bp, Probe Sequence
agaagagaggcagcagcgtggtccc

SEQ ID NO: 141720 - DNA, 25 bp, Probe Sequence
agaagcagatgtcaccgtggggcca

SEQ ID NO: 141721 - DNA, 25 bp, Probe Sequence
agaaatgattaaccctggaggctgc

SEQ ID NO: 141722 - DNA, 25 bp, Probe Sequence
agaaaattaacttatgtggactgta

SEQ ID NO: 141723 - DNA, 25 bp, Probe Sequence
agaaaggaaacttaggtgcctatat

SEQ ID NO: 141724 - DNA, 25 bp, Probe Sequence
agaaaggcgtccacacagagcctta

SEQ ID NO: 141725 - DNA, 25 bp, Probe Sequence
agaaaagtgcttaacctggcctgta

SEQ ID NO: 141726 - DNA, 25 bp, Probe Sequence
agaagaaggagtcagccatcgccaa

SEQ ID NO: 141727 - DNA, 25 bp, Probe Sequence
agaagcgagtgttgtagcacctccg

SEQ ID NO: 141728 - DNA, 25 bp, Probe Sequence
agaaggtgcatttccagtcacccag

SEQ ID NO: 141729 - DNA, 25 bp, Probe Sequence
agaagctgtgctgccacggcaggcc

SEQ ID NO: 141730 - DNA, 25 bp, Probe Sequence
agaactctgctcagacggacgtcag

SEQ ID NO: 141731 - DNA, 25 bp, Probe Sequence
agaatcttctgtggacatcgacctc

SEQ ID NO: 141732 - DNA, 25 bp, Probe Sequence
agaatgtttgagcacactgcccaca

SEQ ID NO: 141733 - DNA, 25 bp, Probe Sequence
agaagtctggcaggaactcgaaccc

SEQ ID NO: 141734 - DNA, 25 bp, Probe Sequence
agccaacggaaacctcctagagccg

SEQ ID NO: 141735 - DNA, 25 bp, Probe Sequence
agccaacggaaacctcctagagccg

SEQ ID NO: 141736 - DNA, 25 bp, Probe Sequence
agccaacggaaacctcctagagccg

SEQ ID NO: 141737 - DNA, 25 bp, Probe Sequence
agaaacaggaaagtgccctgcactg

SEQ ID NO: 141738 - DNA, 25 bp, Probe Sequence
agaaatgtggcttttgccccacttt

SEQ ID NO: 141739 - DNA, 25 bp, Probe Sequence
agaaatgttgttactcttcctctct

SEQ ID NO: 141740 - DNA, 25 bp, Probe Sequence
agaacatggtgatttctatttttct

SEQ ID NO: 141741 - DNA, 25 bp, Probe Sequence
agaacaatggctttttatgattttt

SEQ ID NO: 141742 - DNA, 25 bp, Probe Sequence
agaacataggtgtctttgtggtttt

SEQ ID NO: 141743 - DNA, 25 bp, Probe Sequence
agaactatgtggacacttgtttcat

SEQ ID NO: 141744 - DNA, 25 bp, Probe Sequence
agaactgtggtgtcaatgtgtaatt

SEQ ID NO: 141745 - DNA, 25 bp, Probe Sequence
agaatatgtgtcccatcgttaattc

SEQ ID NO: 141746 - DNA, 25 bp, Probe Sequence
agcaaagcattctcatcagtcgcaa

SEQ ID NO: 141747 - DNA, 25 bp, Probe Sequence
agaaagcagctcacaagtcaaaaga

SEQ ID NO: 141748 - DNA, 25 bp, Probe Sequence
agaaatgacttcctactaatacaga

SEQ ID NO: 141749 - DNA, 25 bp, Probe Sequence
agaaatgccctggtatctcatctag

SEQ ID NO: 141750 - DNA, 25 bp, Probe Sequence
agaactgcgttggctgcagccagct

SEQ ID NO: 141751 - DNA, 25 bp, Probe Sequence
agaacagcgaaggatctgccagtaa

SEQ ID NO: 141752 - DNA, 25 bp, Probe Sequence
agaacaggcgcatgacccatttagc

SEQ ID NO: 141753 - DNA, 25 bp, Probe Sequence
agaaggggaacactccattgtggct

SEQ ID NO: 141754 - DNA, 25 bp, Probe Sequence
agaagagactaaaccctgtgtgcct

SEQ ID NO: 141755 - DNA, 25 bp, Probe Sequence
agaaagatctgcaaatacctggctc

SEQ ID NO: 141756 - DNA, 25 bp, Probe Sequence
agaatactggcagttcactgtggac

SEQ ID NO: 141757 - DNA, 25 bp, Probe Sequence
agaacacaaacgacctgatggagct

SEQ ID NO: 141758 - DNA, 25 bp, Probe Sequence
agaaacacaagcggctctatgagtc

SEQ ID NO: 141759 - DNA, 25 bp, Probe Sequence
agaacacaacaccagttacactcat

SEQ ID NO: 141760 - DNA, 25 bp, Probe Sequence
agaacccagagctgttccagctgcg

SEQ ID NO: 141761 - DNA, 25 bp, Probe Sequence
agaagccaagagtctctgtcaactc

SEQ ID NO: 141762 - DNA, 25 bp, Probe Sequence
agaacacacaggctcgtgctgtctt

SEQ ID NO: 141763 - DNA, 25 bp, Probe Sequence
agaactccaggctacatatcgtctt

SEQ ID NO: 141764 - DNA, 25 bp, Probe Sequence
agaaccctactgacatgcatggttt

SEQ ID NO: 141765 - DNA, 25 bp, Probe Sequence
agaagtgcaatatttatagtgttat

SEQ ID NO: 141766 - DNA, 25 bp, Probe Sequence
agaagtcacacattacaaagttaaa

SEQ ID NO: 141767 - DNA, 25 bp, Probe Sequence
agaattcaacataacaagctcatta

SEQ ID NO: 141768 - DNA, 25 bp, Probe Sequence
agaatacgcacattcacaccttgta

SEQ ID NO: 141769 - DNA, 25 bp, Probe Sequence
agaacctacagataccctgctactt

SEQ ID NO: 141770 - DNA, 25 bp, Probe Sequence
agaacaccaatattaacacgctgcc

SEQ ID NO: 141771 - DNA, 25 bp, Probe Sequence
agaatcatgatctatacgcaaccgg

SEQ ID NO: 141772 - DNA, 25 bp, Probe Sequence
agaacatgcctctcgcaaaggatct

SEQ ID NO: 141773 - DNA, 25 bp, Probe Sequence
agaacatgattatccaggggtattt

SEQ ID NO: 141774 - DNA, 25 bp, Probe Sequence
agaatctgcagtttactgagggcat

SEQ ID NO: 141775 - DNA, 25 bp, Probe Sequence
agaacgcatctttagctaaacttcg

SEQ ID NO: 141776 - DNA, 25 bp, Probe Sequence
agaacctgtctgtgcaaaatattag

SEQ ID NO: 141777 - DNA, 25 bp, Probe Sequence
agaagacttctggcagcaacgtaaa

SEQ ID NO: 141778 - DNA, 25 bp, Probe Sequence
agaagacactcgggaccgatgccag

SEQ ID NO: 141779 - DNA, 25 bp, Probe Sequence
agaagcaagctgaggaccgctgcaa

SEQ ID NO: 141780 - DNA, 25 bp, Probe Sequence
agaagcaagctgaggaccgctgcaa

SEQ ID NO: 141781 - DNA, 25 bp, Probe Sequence
agaaaactggcagtgcacctctcat

SEQ ID NO: 141782 - DNA, 25 bp, Probe Sequence
agaagaaggctgttgccatctcctt

SEQ ID NO: 141783 - DNA, 25 bp, Probe Sequence
agaagaagggccccaatgccaactc

SEQ ID NO: 141784 - DNA, 25 bp, Probe Sequence
agaaacagggccgccaggaagctct

SEQ ID NO: 141785 - DNA, 25 bp, Probe Sequence
aataatagtcccacagggaacctgg

SEQ ID NO: 141786 - DNA, 25 bp, Probe Sequence
agcaagaaatcctggcggcgaacct

SEQ ID NO: 141787 - DNA, 25 bp, Probe Sequence
agaagaaacgcctggtgcagagccc

SEQ ID NO: 141788 - DNA, 25 bp, Probe Sequence
agaagaaacgcctggtgcagagccc

SEQ ID NO: 141789 - DNA, 25 bp, Probe Sequence
agaaagaagtccttgaggcgcaccc

SEQ ID NO: 141790 - DNA, 25 bp, Probe Sequence
agaaagacagaacaggtgcgacttc

SEQ ID NO: 141791 - DNA, 25 bp, Probe Sequence
agaacgaagacactcagccggagtt

SEQ ID NO: 141792 - DNA, 25 bp, Probe Sequence
agaagaaggacaccgcggaggcttt

SEQ ID NO: 141793 - DNA, 25 bp, Probe Sequence
agaaaaggatcaacgctcagaaggt

SEQ ID NO: 141794 - DNA, 25 bp, Probe Sequence
agaaggcgcgacatcggcgaacact

SEQ ID NO: 141795 - DNA, 25 bp, Probe Sequence
agaaggcgcgacatcggcgaacact

SEQ ID NO: 141796 - DNA, 25 bp, Probe Sequence
agaagagagctggctttctggaagc

SEQ ID NO: 141797 - DNA, 25 bp, Probe Sequence
agcacaaatggacctctctggaaga

SEQ ID NO: 141798 - DNA, 25 bp, Probe Sequence
agcaacctggagtttgcccagaaag

SEQ ID NO: 141799 - DNA, 25 bp, Probe Sequence
agaacttcgagactcatgcacaagc

SEQ ID NO: 141800 - DNA, 25 bp, Probe Sequence
agaactttacacctagcacagctgg

SEQ ID NO: 141801 - DNA, 25 bp, Probe Sequence
agaagtggtacccatagccagtctc

SEQ ID NO: 141802 - DNA, 25 bp, Probe Sequence
agaacattacccgaatggagtctgc

SEQ ID NO: 141803 - DNA, 25 bp, Probe Sequence
agaactcttcttgcagtgggttgct

SEQ ID NO: 141804 - DNA, 25 bp, Probe Sequence
agaacgttcatttcaggagcttctc

SEQ ID NO: 141805 - DNA, 25 bp, Probe Sequence
agaacgctttgtgtggagctctctg

SEQ ID NO: 141806 - DNA, 25 bp, Probe Sequence
agaaccttgaatccggtgcatgcct

SEQ ID NO: 141807 - DNA, 25 bp, Probe Sequence
agaaaaattagccgggcatggtggc

SEQ ID NO: 141808 - DNA, 25 bp, Probe Sequence
agaaacacaaggaggcggctgtggc

SEQ ID NO: 141809 - DNA, 25 bp, Probe Sequence
agaatttagtggcgggtctgggctg

SEQ ID NO: 141810 - DNA, 25 bp, Probe Sequence
aaattgtagggtatgccttccagta

SEQ ID NO: 141811 - DNA, 25 bp, Probe Sequence
agaaggtgggccactgactatccac

SEQ ID NO: 141812 - DNA, 25 bp, Probe Sequence
agaagcgcgagggctacgagcgtct

SEQ ID NO: 141813 - DNA, 25 bp, Probe Sequence
agaaccaatgggaaggagcctgagc

SEQ ID NO: 141814 - DNA, 25 bp, Probe Sequence
agaactgaataactgcagtgacttg

SEQ ID NO: 141815 - DNA, 25 bp, Probe Sequence
agaactcagttctgcaggtctgtgt

SEQ ID NO: 141816 - DNA, 25 bp, Probe Sequence
agaactcgactttatgtgatcatgg

SEQ ID NO: 141817 - DNA, 25 bp, Probe Sequence
agaacttgctgccattagtaaggat

SEQ ID NO: 141818 - DNA, 25 bp, Probe Sequence
agaacttgcccacatgataactcat

SEQ ID NO: 141819 - DNA, 25 bp, Probe Sequence
agaacttaccagcagaaatcctcat

SEQ ID NO: 141820 - DNA, 25 bp, Probe Sequence
agcatccttacttcaaacaaggaca

SEQ ID NO: 141821 - DNA, 25 bp, Probe Sequence
agcattccccttggaaactggcaca

SEQ ID NO: 141822 - DNA, 25 bp, Probe Sequence
agccttgcctttgtaatttgacttc

SEQ ID NO: 141823 - DNA, 25 bp, Probe Sequence
agcactaaatttataactttttgca

SEQ ID NO: 141824 - DNA, 25 bp, Probe Sequence
agcaataaattctccaactaacttc

SEQ ID NO: 141825 - DNA, 25 bp, Probe Sequence
agcattgaaactaccaaaataaagt

SEQ ID NO: 141826 - DNA, 25 bp, Probe Sequence
agcagcgtaactaccctaaaagcat

SEQ ID NO: 141827 - DNA, 25 bp, Probe Sequence
agcaggccatagaccccaaaaatct

SEQ ID NO: 141828 - DNA, 25 bp, Probe Sequence
agcaggccatagaccccaaaaatct

SEQ ID NO: 141829 - DNA, 25 bp, Probe Sequence
agaaccagcggaactcaaaactgct

SEQ ID NO: 141830 - DNA, 25 bp, Probe Sequence
agaatccacgccagtacaagatccc

SEQ ID NO: 141831 - DNA, 25 bp, Probe Sequence
agcaactacctacaaaagattctaa

SEQ ID NO: 141832 - DNA, 25 bp, Probe Sequence
agcaggctacctggcaacatagaaa

SEQ ID NO: 141833 - DNA, 25 bp, Probe Sequence
agcgggagcggccaaaatgaagttt

SEQ ID NO: 141834 - DNA, 25 bp, Probe Sequence
agctgcaaggggcgaagcaacttta

SEQ ID NO: 141835 - DNA, 25 bp, Probe Sequence
agctctaaattgtgtacaactataa

SEQ ID NO: 141836 - DNA, 25 bp, Probe Sequence
agcacttgaaggtatgcttccctaa

SEQ ID NO: 141837 - DNA, 25 bp, Probe Sequence
agcacaaagcagtttttccctaggg

SEQ ID NO: 141838 - DNA, 25 bp, Probe Sequence
agaaaaggtcttggtgcctctgcag

SEQ ID NO: 141839 - DNA, 25 bp, Probe Sequence
agaaaagctgctcatcagtgcctgg

SEQ ID NO: 141840 - DNA, 25 bp, Probe Sequence
agaaaagtcactacagaccaggatt

SEQ ID NO: 141841 - DNA, 25 bp, Probe Sequence
agaagaaggactacacccaggtgga

SEQ ID NO: 141842 - DNA, 25 bp, Probe Sequence
agaagaaagtcttcctcctactgaa

SEQ ID NO: 141843 - DNA, 25 bp, Probe Sequence
agaaaaagaatctccaatgcctgat

SEQ ID NO: 141844 - DNA, 25 bp, Probe Sequence
agaagctacagaactcccaattctg

SEQ ID NO: 141845 - DNA, 25 bp, Probe Sequence
agaatgctaagcaaccgccaagacc

SEQ ID NO: 141846 - DNA, 25 bp, Probe Sequence
agaatcttgaaaagcccagagatcc

SEQ ID NO: 141847 - DNA, 25 bp, Probe Sequence
agaatccaaaaacctcaacatccaa

SEQ ID NO: 141848 - DNA, 25 bp, Probe Sequence
agaatgctaaagaatgttcaaactt

SEQ ID NO: 141849 - DNA, 25 bp, Probe Sequence
agaatgtcaatgtgcattcatgcaa

SEQ ID NO: 141850 - DNA, 25 bp, Probe Sequence
agaagtgcaggtggatgacatcaag

SEQ ID NO: 141851 - DNA, 25 bp, Probe Sequence
agaagtgccagttgatcaatgaata

SEQ ID NO: 141852 - DNA, 25 bp, Probe Sequence
agaagtccagttccatgatttgccc

SEQ ID NO: 141853 - DNA, 25 bp, Probe Sequence
agaatgccatagatccatgttcccg

SEQ ID NO: 141854 - DNA, 25 bp, Probe Sequence
agaagcacacagatcgcaagtccta

SEQ ID NO: 141855 - DNA, 25 bp, Probe Sequence
agaacaccatgatgcgcaaggccat

SEQ ID NO: 141856 - DNA, 25 bp, Probe Sequence
agaacgccatgattgctgctggact

SEQ ID NO: 141857 - DNA, 25 bp, Probe Sequence
agaagctgctgacatggctgagcgt

SEQ ID NO: 141858 - DNA, 25 bp, Probe Sequence
agaatctcattttggccatgctggg

SEQ ID NO: 141859 - DNA, 25 bp, Probe Sequence
agaactttgttggtgcaggtggcct

SEQ ID NO: 141860 - DNA, 25 bp, Probe Sequence
agaacagggttctagcgatgggact

SEQ ID NO: 141861 - DNA, 25 bp, Probe Sequence
agcccagacaggactaaggggactt

SEQ ID NO: 141862 - DNA, 25 bp, Probe Sequence
acgtgtgacacgcagaagggtacct

SEQ ID NO: 141863 - DNA, 25 bp, Probe Sequence
acgtgtgacacgcagaagggtacct

SEQ ID NO: 141864 - DNA, 25 bp, Probe Sequence
acagtggaaaggtaaaggtggacat

SEQ ID NO: 141865 - DNA, 25 bp, Probe Sequence
agccgaagaagccttaagtgggaat

SEQ ID NO: 141866 - DNA, 25 bp, Probe Sequence
agcggaaggggctttatgtggaaga

SEQ ID NO: 141867 - DNA, 25 bp, Probe Sequence
agcagtggacaacacgtttccaaga

SEQ ID NO: 141868 - DNA, 25 bp, Probe Sequence
agcagtggacaacacgtttccaaga

SEQ ID NO: 141869 - DNA, 25 bp, Probe Sequence
agcagtggacaacacgtttccaaga

SEQ ID NO: 141870 - DNA, 25 bp, Probe Sequence
agcggataacttgctgtttctcacg

SEQ ID NO: 141871 - DNA, 25 bp, Probe Sequence
agcagttaactctcttaactccctt

SEQ ID NO: 141872 - DNA, 25 bp, Probe Sequence
aacttgaaattataaatgtcccttg

SEQ ID NO: 141873 - DNA, 25 bp, Probe Sequence
accggaactcctataatgtctccac

SEQ ID NO: 141874 - DNA, 25 bp, Probe Sequence
accaagtgaccaccgtgaagtgcct

SEQ ID NO: 141875 - DNA, 25 bp, Probe Sequence
agaaggtgaccgtgtgaggctccat

SEQ ID NO: 141876 - DNA, 25 bp, Probe Sequence
agaagatgtggctggttggacctcg

SEQ ID NO: 141877 - DNA, 25 bp, Probe Sequence
agaacgtcagttcgtgttgacgccg

SEQ ID NO: 141878 - DNA, 25 bp, Probe Sequence
agaactgtcagctcagcgttgactg

SEQ ID NO: 141879 - DNA, 25 bp, Probe Sequence
agaacgctgcatgcgagtgctgtac

SEQ ID NO: 141880 - DNA, 25 bp, Probe Sequence
agaacagcagactcagctcgtgaca

SEQ ID NO: 141881 - DNA, 25 bp, Probe Sequence
agaaacaaatctggccactgcacat

SEQ ID NO: 141882 - DNA, 25 bp, Probe Sequence
agcaaagaagcaatcagccaaaatg

SEQ ID NO: 141883 - DNA, 25 bp, Probe Sequence
agaagcgaatgcgcaggctgaagcg

SEQ ID NO: 141884 - DNA, 25 bp, Probe Sequence
agaagacaggtcgggctaagcggcg

SEQ ID NO: 141885 - DNA, 25 bp, Probe Sequence
agaaaagggcggccaacgcctggca

SEQ ID NO: 141886 - DNA, 25 bp, Probe Sequence
agaaaagagctggctgtacaccctg

SEQ ID NO: 141887 - DNA, 25 bp, Probe Sequence
agaaaagagctggctgtacaccctg

SEQ ID NO: 141888 - DNA, 25 bp, Probe Sequence
agaagtatgtgtgttacaccctcac

SEQ ID NO: 141889 - DNA, 25 bp, Probe Sequence
agaagtatctgggtgagggcccccg

SEQ ID NO: 141890 - DNA, 25 bp, Probe Sequence
agaagatgttgtctgagggctccgt

SEQ ID NO: 141891 - DNA, 25 bp, Probe Sequence
agaacagtatgtgtagcaggcttac

SEQ ID NO: 141892 - DNA, 25 bp, Probe Sequence
agaatgtgggtcttcaaatcttact

SEQ ID NO: 141893 - DNA, 25 bp, Probe Sequence
agaagctgggtctccagatcccatt

SEQ ID NO: 141894 - DNA, 25 bp, Probe Sequence
agaactggagtctcaatatcagcaa

SEQ ID NO: 141895 - DNA, 25 bp, Probe Sequence
agaagcgtatctttcagaatcacac

SEQ ID NO: 141896 - DNA, 25 bp, Probe Sequence
agcaataaccttgcgaatgccccaa

SEQ ID NO: 141897 - DNA, 25 bp, Probe Sequence
agcaaaaccattgcttcactaccca

SEQ ID NO: 141898 - DNA, 25 bp, Probe Sequence
agcaaaaaccaggctccatctactc

SEQ ID NO: 141899 - DNA, 25 bp, Probe Sequence
agcacaacacactaggaagttacta

SEQ ID NO: 141900 - DNA, 25 bp, Probe Sequence
agaagacacagctattccagacacc

SEQ ID NO: 141901 - DNA, 25 bp, Probe Sequence
agaaggcaagcttcctcagagctca

SEQ ID NO: 141902 - DNA, 25 bp, Probe Sequence
agaaggcaagcttcctcagagctca

SEQ ID NO: 141903 - DNA, 25 bp, Probe Sequence
agaacagacagcaagcctcaggcgc

SEQ ID NO: 141904 - DNA, 25 bp, Probe Sequence
agaacgtgcagggcctgcctagctt

SEQ ID NO: 141905 - DNA, 25 bp, Probe Sequence
agaagcgtgagacgccaccattcct

SEQ ID NO: 141906 - DNA, 25 bp, Probe Sequence
agaagcgtgagacgccaccattcct

SEQ ID NO: 141907 - DNA, 25 bp, Probe Sequence
agaacgtcaactctgtcattgccat

SEQ ID NO: 141908 - DNA, 25 bp, Probe Sequence
agaacgtcaactctgtcattgccat

SEQ ID NO: 141909 - DNA, 25 bp, Probe Sequence
agaacaacgcctgtggcattgccaa

SEQ ID NO: 141910 - DNA, 25 bp, Probe Sequence
agaacaaccactgggtcctacatcg

SEQ ID NO: 141911 - DNA, 25 bp, Probe Sequence
agaagaacctcaagagtgcctcccg

SEQ ID NO: 141912 - DNA, 25 bp, Probe Sequence
agcacaggggccagggactcctgga

SEQ ID NO: 141913 - DNA, 25 bp, Probe Sequence
agcaaggccctcaggtatgtaagtg

SEQ ID NO: 141914 - DNA, 25 bp, Probe Sequence
agaaggcagcacagggtgtatgtag

SEQ ID NO: 141915 - DNA, 25 bp, Probe Sequence
agaagggatgaccgcgtttgtggaa

SEQ ID NO: 141916 - DNA, 25 bp, Probe Sequence
agaatggtatacagatggatctatt

SEQ ID NO: 141917 - DNA, 25 bp, Probe Sequence
agaactttatgatatgtgcacttat

SEQ ID NO: 141918 - DNA, 25 bp, Probe Sequence
agaactatttggaagtgcctcttat

SEQ ID NO: 141919 - DNA, 25 bp, Probe Sequence
agaagtaattgcggaggctccttca

SEQ ID NO: 141920 - DNA, 25 bp, Probe Sequence
agaagactgattggagggccctatc

SEQ ID NO: 141921 - DNA, 25 bp, Probe Sequence
agaagagcttctgaggcgctgcttt

SEQ ID NO: 141922 - DNA, 25 bp, Probe Sequence
agaagcgttgtccaggtgtgtctac

SEQ ID NO: 141923 - DNA, 25 bp, Probe Sequence
agaacgaattggagcttgagcttca

SEQ ID NO: 141924 - DNA, 25 bp, Probe Sequence
agaaggaattagacactctgcctgc

SEQ ID NO: 141925 - DNA, 25 bp, Probe Sequence
agaaaatttcaactctctcctgtga

SEQ ID NO: 141926 - DNA, 25 bp, Probe Sequence
agaaccttataactttcacactcat

SEQ ID NO: 141927 - DNA, 25 bp, Probe Sequence
agaacagttaagatctctcagcaat

SEQ ID NO: 141928 - DNA, 25 bp, Probe Sequence
agcacacgcttagcaacctggagtt

SEQ ID NO: 141929 - DNA, 25 bp, Probe Sequence
agaactctatacacagaatgggatt

SEQ ID NO: 141930 - DNA, 25 bp, Probe Sequence
agaacttttttccatatgcgtgcat

SEQ ID NO: 141931 - DNA, 25 bp, Probe Sequence
agaacctatctactcgttgttgaaa

SEQ ID NO: 141932 - DNA, 25 bp, Probe Sequence
agaacactgtgcataccttgaataa

SEQ ID NO: 141933 - DNA, 25 bp, Probe Sequence
agaacacagtacagcttcatcactg

SEQ ID NO: 141934 - DNA, 25 bp, Probe Sequence
agaattcagctaacgcttccagacc

SEQ ID NO: 141935 - DNA, 25 bp, Probe Sequence
agaatctacataacctaagcccata

SEQ ID NO: 141936 - DNA, 25 bp, Probe Sequence
agaatgccataagacaacgctctct

SEQ ID NO: 141937 - DNA, 25 bp, Probe Sequence
agcaaccataactgccactgtgctc

SEQ ID NO: 141938 - DNA, 25 bp, Probe Sequence
agaacaacaagcttggaggtctgcc

SEQ ID NO: 141939 - DNA, 25 bp, Probe Sequence
agaagcagacaatgctccagttccc

SEQ ID NO: 141940 - DNA, 25 bp, Probe Sequence
agaagtacaacgtgcgatccatgcc

SEQ ID NO: 141941 - DNA, 25 bp, Probe Sequence
agaatttcaacctcaacatcacctg

SEQ ID NO: 141942 - DNA, 25 bp, Probe Sequence
agaactggaaaatgcaagcgccctg

SEQ ID NO: 141943 - DNA, 25 bp, Probe Sequence
agaactgaataagagcatcaaccct

SEQ ID NO: 141944 - DNA, 25 bp, Probe Sequence
agaactaaatcacagtactcaactt

SEQ ID NO: 141945 - DNA, 25 bp, Probe Sequence
agaatcaatactgccaattccagaa

SEQ ID NO: 141946 - DNA, 25 bp, Probe Sequence
agaacaaacggctgtctgccaactg

SEQ ID NO: 141947 - DNA, 25 bp, Probe Sequence
agaacaaacaccagactctgctcct

SEQ ID NO: 141948 - DNA, 25 bp, Probe Sequence
agaacacatatgtcctgtgaccgcc

SEQ ID NO: 141949 - DNA, 25 bp, Probe Sequence
agaactctctgtcttggcacaacag

SEQ ID NO: 141950 - DNA, 25 bp, Probe Sequence
agaacttctttaggcaacagacaga

SEQ ID NO: 141951 - DNA, 25 bp, Probe Sequence
agaacttttccatgcaaccaaacac

SEQ ID NO: 141952 - DNA, 25 bp, Probe Sequence
agaactttaccacaagtctatgact

SEQ ID NO: 141953 - DNA, 25 bp, Probe Sequence
agaactttgactctaagagtttctg

SEQ ID NO: 141954 - DNA, 25 bp, Probe Sequence
agaagctttattgtctagttgtttt

SEQ ID NO: 141955 - DNA, 25 bp, Probe Sequence
agaagtttggtcgtgtcgtttgtat

SEQ ID NO: 141956 - DNA, 25 bp, Probe Sequence
agaagatgtatggtatctccctttg

SEQ ID NO: 141957 - DNA, 25 bp, Probe Sequence
agaactgctctgggactgtaatttg

SEQ ID NO: 141958 - DNA, 25 bp, Probe Sequence
agcaacattctgggactctttttct

SEQ ID NO: 141959 - DNA, 25 bp, Probe Sequence
agcacaatcttagactcatatttgc

SEQ ID NO: 141960 - DNA, 25 bp, Probe Sequence
agcacgactaagagccttctgagcc

SEQ ID NO: 141961 - DNA, 25 bp, Probe Sequence
agcacgtctaacagttacatagaat

SEQ ID NO: 141962 - DNA, 25 bp, Probe Sequence
agaagtcttagcagctggcaaacaa

SEQ ID NO: 141963 - DNA, 25 bp, Probe Sequence
aaattttaaactcaaccaagctgtg

SEQ ID NO: 141964 - DNA, 25 bp, Probe Sequence
agccttttgaagttggagaccacct

SEQ ID NO: 141965 - DNA, 25 bp, Probe Sequence
agccttcttgtgcttaggactaccc

SEQ ID NO: 141966 - DNA, 25 bp, Probe Sequence
agctttctacagcaggggtgtccgc

SEQ ID NO: 141967 - DNA, 25 bp, Probe Sequence
agccctctcgaggaaggttgccctc

SEQ ID NO: 141968 - DNA, 25 bp, Probe Sequence
agcacccctggccaaggtcatccat

SEQ ID NO: 141969 - DNA, 25 bp, Probe Sequence
agaagctttgcccaaggctgcattc

SEQ ID NO: 141970 - DNA, 25 bp, Probe Sequence
agaactttagcaaatgtgtcataag

SEQ ID NO: 141971 - DNA, 25 bp, Probe Sequence
agaatctttagcttatcttttgaag

SEQ ID NO: 141972 - DNA, 25 bp, Probe Sequence
agaatctatgattcaactcttttaa

SEQ ID NO: 141973 - DNA, 25 bp, Probe Sequence
agaactcatctgtagtcctttatta

SEQ ID NO: 141974 - DNA, 25 bp, Probe Sequence
agaacttctcattacctataactac

SEQ ID NO: 141975 - DNA, 25 bp, Probe Sequence
agaatcttctaaactcataaaatac

SEQ ID NO: 141976 - DNA, 25 bp, Probe Sequence
agcaaaactccatctcaaagagaaa

SEQ ID NO: 141977 - DNA, 25 bp, Probe Sequence
agaagcacaaccactaccagaagca

SEQ ID NO: 141978 - DNA, 25 bp, Probe Sequence
agaatcaatttcctcaagccagaag

SEQ ID NO: 141979 - DNA, 25 bp, Probe Sequence
agaataatctacgtgactggttgcg

SEQ ID NO: 141980 - DNA, 25 bp, Probe Sequence
agaacatggctcattcactggtctc

SEQ ID NO: 141981 - DNA, 25 bp, Probe Sequence
agaagctgacttcttctggagcctg

SEQ ID NO: 141982 - DNA, 25 bp, Probe Sequence
agcagaggcataaggttcgggaaga

SEQ ID NO: 141983 - DNA, 25 bp, Probe Sequence
agctgaaaattacttaaggaagaga

SEQ ID NO: 141984 - DNA, 25 bp, Probe Sequence
agaagaccattactttaggcaaatt

SEQ ID NO: 141985 - DNA, 25 bp, Probe Sequence
agaaggtcttattgttcagtgaaat

SEQ ID NO: 141986 - DNA, 25 bp, Probe Sequence
agcaagggctgtgttttggaaattt

SEQ ID NO: 141987 - DNA, 25 bp, Probe Sequence
agaaggctgtctgtacttgtgaaac

SEQ ID NO: 141988 - DNA, 25 bp, Probe Sequence
agaagtctctctgggcaggtgtagt

SEQ ID NO: 141989 - DNA, 25 bp, Probe Sequence
agaagtgatccgcgggctgtgattt

SEQ ID NO: 141990 - DNA, 25 bp, Probe Sequence
agaagttactgggagctgctatttt

SEQ ID NO: 141991 - DNA, 25 bp, Probe Sequence
agaagttactgggagctgctatttt

SEQ ID NO: 141992 - DNA, 25 bp, Probe Sequence
agaagatgcggggaggctccatcct

SEQ ID NO: 141993 - DNA, 25 bp, Probe Sequence
agaagaggaggcctgcttcacttgc

SEQ ID NO: 141994 - DNA, 25 bp, Probe Sequence
agaatggtggtggctttacattgca

SEQ ID NO: 141995 - DNA, 25 bp, Probe Sequence
agaatggtggcagcggagcatcgtc

SEQ ID NO: 141996 - DNA, 25 bp, Probe Sequence
agaagtgtgactactggatcaggac

SEQ ID NO: 141997 - DNA, 25 bp, Probe Sequence
agcactggtgccagtaccagtacca

SEQ ID NO: 141998 - DNA, 25 bp, Probe Sequence
agcactgtcctcagtaccattgtgt

SEQ ID NO: 141999 - DNA, 25 bp, Probe Sequence
agaattttgcagttaacagtagtat

SEQ ID NO: 142000 - DNA, 25 bp, Probe Sequence
agcgatttgtctggttaattccgat

SEQ ID NO: 142001 - DNA, 25 bp, Probe Sequence
acgactaattcatcttttcctgatc

SEQ ID NO: 142002 - DNA, 25 bp, Probe Sequence
accttagttccacatttggctgcat

SEQ ID NO: 142003 - DNA, 25 bp, Probe Sequence
accattaggcctatttaggtgacac

SEQ ID NO: 142004 - DNA, 25 bp, Probe Sequence
accattaggcctatttaggtgacac

SEQ ID NO: 142005 - DNA, 25 bp, Probe Sequence
accttagggagggactgggatgaga

SEQ ID NO: 142006 - DNA, 25 bp, Probe Sequence
aaaacatggggaactctgggtcaga

SEQ ID NO: 142007 - DNA, 25 bp, Probe Sequence
agaagtgctgggtaactggctgggg

SEQ ID NO: 142008 - DNA, 25 bp, Probe Sequence
agaagggggaatgctgtcgggactg

SEQ ID NO: 142009 - DNA, 25 bp, Probe Sequence
agaagtgggaaattgctgtcaggca

SEQ ID NO: 142010 - DNA, 25 bp, Probe Sequence
agaagtacctagttgctgaagagca

SEQ ID NO: 142011 - DNA, 25 bp, Probe Sequence
agaagacaccttgtgctcatgggcc

SEQ ID NO: 142012 - DNA, 25 bp, Probe Sequence
agaagacacctgctatggcgatgcg

SEQ ID NO: 142013 - DNA, 25 bp, Probe Sequence
agaatatgccctggttccagctgac

SEQ ID NO: 142014 - DNA, 25 bp, Probe Sequence
agaatatctacgatgcccatgtctc

SEQ ID NO: 142015 - DNA, 25 bp, Probe Sequence
agaagattacgggtcatagtcacaa

SEQ ID NO: 142016 - DNA, 25 bp, Probe Sequence
agaagcctatcgtagtatggtacag

SEQ ID NO: 142017 - DNA, 25 bp, Probe Sequence
agaaggctatcacacttgtgaaatt

SEQ ID NO: 142018 - DNA, 25 bp, Probe Sequence
agaatgatgtccccgttgtatgtat

SEQ ID NO: 142019 - DNA, 25 bp, Probe Sequence
agaagagttggcgtgaatttgtcat

SEQ ID NO: 142020 - DNA, 25 bp, Probe Sequence
agaaggtttgaagcatttccatgag

SEQ ID NO: 142021 - DNA, 25 bp, Probe Sequence
agaagagcttatcacctttcatgga

SEQ ID NO: 142022 - DNA, 25 bp, Probe Sequence
agaagaggtcatcatcagctggtcg

SEQ ID NO: 142023 - DNA, 25 bp, Probe Sequence
agaagaggtcatcatcagctggtcg

SEQ ID NO: 142024 - DNA, 25 bp, Probe Sequence
agaaggggactgaagctgctggggc

SEQ ID NO: 142025 - DNA, 25 bp, Probe Sequence
agaagggtgggaagccagagccgcc

SEQ ID NO: 142026 - DNA, 25 bp, Probe Sequence
agaaggtaagcacttgccgaccgtc

SEQ ID NO: 142027 - DNA, 25 bp, Probe Sequence
agaaggagaagcttctctcgcagcc

SEQ ID NO: 142028 - DNA, 25 bp, Probe Sequence
agaagagagtagctcgtcctcactg

SEQ ID NO: 142029 - DNA, 25 bp, Probe Sequence
agaagagagtagctcgtcctcactg

SEQ ID NO: 142030 - DNA, 25 bp, Probe Sequence
agaataagtaggtaccctccatgcc

SEQ ID NO: 142031 - DNA, 25 bp, Probe Sequence
agaagaaggcggtggccttcagccc

SEQ ID NO: 142032 - DNA, 25 bp, Probe Sequence
agcagaagggggtggtgtctccaac

SEQ ID NO: 142033 - DNA, 25 bp, Probe Sequence
agaagtgtggggtgccgttcacaga

SEQ ID NO: 142034 - DNA, 25 bp, Probe Sequence
agaagaggattggaaccagttccga

SEQ ID NO: 142035 - DNA, 25 bp, Probe Sequence
agaagatgaggtctaccaggcccag

SEQ ID NO: 142036 - DNA, 25 bp, Probe Sequence
agaaggagttgctgaccagtgccca

SEQ ID NO: 142037 - DNA, 25 bp, Probe Sequence
agaatgaggattttgcgccggctgc

SEQ ID NO: 142038 - DNA, 25 bp, Probe Sequence
aataaaactgataatcggaagacat

SEQ ID NO: 142039 - DNA, 25 bp, Probe Sequence
agaagcactacagttgtcaagaatg

SEQ ID NO: 142040 - DNA, 25 bp, Probe Sequence
agaagctgccagtggctgcaagaga

SEQ ID NO: 142041 - DNA, 25 bp, Probe Sequence
agaacgctgctgttggtgcaaggga

SEQ ID NO: 142042 - DNA, 25 bp, Probe Sequence
agaagcagctcttattagaagtcga

SEQ ID NO: 142043 - DNA, 25 bp, Probe Sequence
agaactctctggtatacactggcta

SEQ ID NO: 142044 - DNA, 25 bp, Probe Sequence
agaagcttgcggtgagtgtgtgcca

SEQ ID NO: 142045 - DNA, 25 bp, Probe Sequence
agcaaggtcatggtctgagtggggc

SEQ ID NO: 142046 - DNA, 25 bp, Probe Sequence
agaacctcgagtggattgcgggcgg

SEQ ID NO: 142047 - DNA, 25 bp, Probe Sequence
agaacctcgagtggattgcgggcgg

SEQ ID NO: 142048 - DNA, 25 bp, Probe Sequence
agaaccagccctggatggcgggttt

SEQ ID NO: 142049 - DNA, 25 bp, Probe Sequence
agaaggagccctaaggcaggaattt

SEQ ID NO: 142050 - DNA, 25 bp, Probe Sequence
agaaggagccacagagtagagtagt

SEQ ID NO: 142051 - DNA, 25 bp, Probe Sequence
agaatcaaggccagaagaggtggct

SEQ ID NO: 142052 - DNA, 25 bp, Probe Sequence
agaagagtcccatgaaaggtggctc

SEQ ID NO: 142053 - DNA, 25 bp, Probe Sequence
agaagcacgccctgctggaggggcg

SEQ ID NO: 142054 - DNA, 25 bp, Probe Sequence
agaaccccatcatcgtggagtggcg

SEQ ID NO: 142055 - DNA, 25 bp, Probe Sequence
agaatacccacattccgaagggctg

SEQ ID NO: 142056 - DNA, 25 bp, Probe Sequence
agaattttgacattcccaagtcagt

SEQ ID NO: 142057 - DNA, 25 bp, Probe Sequence
agaatttgcatacttacctagtgaa

SEQ ID NO: 142058 - DNA, 25 bp, Probe Sequence
agaagatccaccttcaattagtgaa

SEQ ID NO: 142059 - DNA, 25 bp, Probe Sequence
agaagcacgaccttcatgttacctc

SEQ ID NO: 142060 - DNA, 25 bp, Probe Sequence
agaagagccactaactcgtgacctc

SEQ ID NO: 142061 - DNA, 25 bp, Probe Sequence
agaagagccactaactcgtgacctc

SEQ ID NO: 142062 - DNA, 25 bp, Probe Sequence
agcaaggcacaatgagtttgacttc

SEQ ID NO: 142063 - DNA, 25 bp, Probe Sequence
agaaggcaacattccctgaacatac

SEQ ID NO: 142064 - DNA, 25 bp, Probe Sequence
agaagccaactatctaatcaatgcc

SEQ ID NO: 142065 - DNA, 25 bp, Probe Sequence
agaattcaactatcttcataatcga

SEQ ID NO: 142066 - DNA, 25 bp, Probe Sequence
agaatttctctcacttaagcaggat

SEQ ID NO: 142067 - DNA, 25 bp, Probe Sequence
agaatcttccatatttatacagcag

SEQ ID NO: 142068 - DNA, 25 bp, Probe Sequence
agaatcttccatatttatacagcag

SEQ ID NO: 142069 - DNA, 25 bp, Probe Sequence
agcaactcatcgattgatttacggc

SEQ ID NO: 142070 - DNA, 25 bp, Probe Sequence
agcaagttcttcgagcacttcatcg

SEQ ID NO: 142071 - DNA, 25 bp, Probe Sequence
agaaggtcatgacccacgtcagcaa

SEQ ID NO: 142072 - DNA, 25 bp, Probe Sequence
agaagagtcagagtccgaggcaaaa

SEQ ID NO: 142073 - DNA, 25 bp, Probe Sequence
agaatggtagcagccacaagtaaag

SEQ ID NO: 142074 - DNA, 25 bp, Probe Sequence
agcaatgcgtaataacaagttaagc

SEQ ID NO: 142075 - DNA, 25 bp, Probe Sequence
agaatgtgctcaacaaccagcagtt

SEQ ID NO: 142076 - DNA, 25 bp, Probe Sequence
agaagcagctgaagcagcccgcata

SEQ ID NO: 142077 - DNA, 25 bp, Probe Sequence
agaagcacatgaagggccacaagcc

SEQ ID NO: 142078 - DNA, 25 bp, Probe Sequence
agaagacattgaccagctcatcacc

SEQ ID NO: 142079 - DNA, 25 bp, Probe Sequence
agaatcaatcataaagtgcacacct

SEQ ID NO: 142080 - DNA, 25 bp, Probe Sequence
agaagcactgcaacaagaagagggt

SEQ ID NO: 142081 - DNA, 25 bp, Probe Sequence
agaagttgcagtcagaaagtgtgtg

SEQ ID NO: 142082 - DNA, 25 bp, Probe Sequence
agaagttctgggctatagtgtgcta

SEQ ID NO: 142083 - DNA, 25 bp, Probe Sequence
agaagtatgatgcgtttttggcctc

SEQ ID NO: 142084 - DNA, 25 bp, Probe Sequence
agaagtgggcggctgtggtggtgcc

SEQ ID NO: 142085 - DNA, 25 bp, Probe Sequence
agaaggagacggccgtggaggggct

SEQ ID NO: 142086 - DNA, 25 bp, Probe Sequence
agaaggcaacgaccacattgagcgg

SEQ ID NO: 142087 - DNA, 25 bp, Probe Sequence
agaagagagcatagccacctagggg

SEQ ID NO: 142088 - DNA, 25 bp, Probe Sequence
agaagagcacagagccctgaggggc

SEQ ID NO: 142089 - DNA, 25 bp, Probe Sequence
agaagatcaagatccctcggagcac

SEQ ID NO: 142090 - DNA, 25 bp, Probe Sequence
agaaggacgatttcctcgatgaccc

SEQ ID NO: 142091 - DNA, 25 bp, Probe Sequence
agaatgtgacaaatatgccctgcag

SEQ ID NO: 142092 - DNA, 25 bp, Probe Sequence
agaagtgagagatgctggcctgcgc

SEQ ID NO: 142093 - DNA, 25 bp, Probe Sequence
agaagatggaatcatggatgctgcc

SEQ ID NO: 142094 - DNA, 25 bp, Probe Sequence
agaagtggaatcagccatggcttga

SEQ ID NO: 142095 - DNA, 25 bp, Probe Sequence
agaagctgttacatgccagcctcag

SEQ ID NO: 142096 - DNA, 25 bp, Probe Sequence
agcagacattaatatccatgccata

SEQ ID NO: 142097 - DNA, 25 bp, Probe Sequence
agcaccagtatattgctggcagcta

SEQ ID NO: 142098 - DNA, 25 bp, Probe Sequence
agcatccaggcggtcaagatctttc

SEQ ID NO: 142099 - DNA, 25 bp, Probe Sequence
agcaccagggaggagaacttctatg

SEQ ID NO: 142100 - DNA, 25 bp, Probe Sequence
agcaaaggggctgacacgtgccagg

SEQ ID NO: 142101 - DNA, 25 bp, Probe Sequence
agaagaaggagcggcacaggcgcca

SEQ ID NO: 142102 - DNA, 25 bp, Probe Sequence
agaagtccgactgaggggctagagc

SEQ ID NO: 142103 - DNA, 25 bp, Probe Sequence
agaatttccctctgatatgtctagg

SEQ ID NO: 142104 - DNA, 25 bp, Probe Sequence
agaatcatcatctgtcattatttta

SEQ ID NO: 142105 - DNA, 25 bp, Probe Sequence
agaatatgcactgtccatcatgttt

SEQ ID NO: 142106 - DNA, 25 bp, Probe Sequence
agaatctcctctacagatttttgct

SEQ ID NO: 142107 - DNA, 25 bp, Probe Sequence
agcaagcccctatgatttgtcacta

SEQ ID NO: 142108 - DNA, 25 bp, Probe Sequence
agaagatccgcgaggttgtctgcta

SEQ ID NO: 142109 - DNA, 25 bp, Probe Sequence
agaaccctgactttgtttctgcaaa

SEQ ID NO: 142110 - DNA, 25 bp, Probe Sequence
agaaccctgactttgtttctgcaaa

SEQ ID NO: 142111 - DNA, 25 bp, Probe Sequence
agaagcccttcttgttcatattcag

SEQ ID NO: 142112 - DNA, 25 bp, Probe Sequence
agaaccctttatgtaccatctggaa

SEQ ID NO: 142113 - DNA, 25 bp, Probe Sequence
agaatcccaataatagtcccacagg

SEQ ID NO: 142114 - DNA, 25 bp, Probe Sequence
agaagctacagaagatggatcccca

SEQ ID NO: 142115 - DNA, 25 bp, Probe Sequence
agaagaagcagctgaagcagcccgc

SEQ ID NO: 142116 - DNA, 25 bp, Probe Sequence
agcagggacctataaggccacctac

SEQ ID NO: 142117 - DNA, 25 bp, Probe Sequence
agcaaggtccttccatagtgacgcc

SEQ ID NO: 142118 - DNA, 25 bp, Probe Sequence
agaagcggcaaaagcaggtacctgc

SEQ ID NO: 142119 - DNA, 25 bp, Probe Sequence
agaagtgtaaatggctggtccctgc

SEQ ID NO: 142120 - DNA, 25 bp, Probe Sequence
agaagtagaaatcgtggcccacctc

SEQ ID NO: 142121 - DNA, 25 bp, Probe Sequence
agaataagaatttgcatacttacct

SEQ ID NO: 142122 - DNA, 25 bp, Probe Sequence
agaagcaagttctgaagttcactct

SEQ ID NO: 142123 - DNA, 25 bp, Probe Sequence
agaagcaagttctgaagttcactct

SEQ ID NO: 142124 - DNA, 25 bp, Probe Sequence
agaagaattgcctgtaatcccctaa

SEQ ID NO: 142125 - DNA, 25 bp, Probe Sequence
agcaagactcccttgtaattctcac

SEQ ID NO: 142126 - DNA, 25 bp, Probe Sequence
agaagatgccccattatatcctcat

SEQ ID NO: 142127 - DNA, 25 bp, Probe Sequence
agaagagcccacagtgcattccagt

SEQ ID NO: 142128 - DNA, 25 bp, Probe Sequence
agaatagacccaccagcatttcgtg

SEQ ID NO: 142129 - DNA, 25 bp, Probe Sequence
agaatcgccggacaggtggcagctg

SEQ ID NO: 142130 - DNA, 25 bp, Probe Sequence
agaattccgcttcggtggagcagct

SEQ ID NO: 142131 - DNA, 25 bp, Probe Sequence
agaagtctctgttgatgggcaagga

SEQ ID NO: 142132 - DNA, 25 bp, Probe Sequence
agaagtctctgctccaaatggagag

SEQ ID NO: 142133 - DNA, 25 bp, Probe Sequence
agaagcttcgcttcacatacagaag

SEQ ID NO: 142134 - DNA, 25 bp, Probe Sequence
agaagttatcagtaccagcagcaag

SEQ ID NO: 142135 - DNA, 25 bp, Probe Sequence
agaagcagttctcagactgaaaggc

SEQ ID NO: 142136 - DNA, 25 bp, Probe Sequence
agaagagctcttaaaatgcccaggc

SEQ ID NO: 142137 - DNA, 25 bp, Probe Sequence
agaagtgttctagacatcccaggac

SEQ ID NO: 142138 - DNA, 25 bp, Probe Sequence
agaatgtggtaactctctaccagga

SEQ ID NO: 142139 - DNA, 25 bp, Probe Sequence
agaatgtggtaaatctcttcctgga

SEQ ID NO: 142140 - DNA, 25 bp, Probe Sequence
acctgatgggactttcctacttgca

SEQ ID NO: 142141 - DNA, 25 bp, Probe Sequence
accagggtatttagcctagttggca

SEQ ID NO: 142142 - DNA, 25 bp, Probe Sequence
agcccgagttctctcttaaatggca

SEQ ID NO: 142143 - DNA, 25 bp, Probe Sequence
agcacaaagtttctctttactgcca

SEQ ID NO: 142144 - DNA, 25 bp, Probe Sequence
agcaaaggcttctctttactgtcac

SEQ ID NO: 142145 - DNA, 25 bp, Probe Sequence
agaagcaggttccctgttttgcctc

SEQ ID NO: 142146 - DNA, 25 bp, Probe Sequence
agcaaagggagcactgggttgactt

SEQ ID NO: 142147 - DNA, 25 bp, Probe Sequence
agcaccagggagatccagttacctt

SEQ ID NO: 142148 - DNA, 25 bp, Probe Sequence
agcacctcctaaggccaaaacgcct

SEQ ID NO: 142149 - DNA, 25 bp, Probe Sequence
agctgttctaacaccaaaacgcttg

SEQ ID NO: 142150 - DNA, 25 bp, Probe Sequence
agctgtcctccagtcttaaaaggtt

SEQ ID NO: 142151 - DNA, 25 bp, Probe Sequence
agctgaccttactttaggatggggt

SEQ ID NO: 142152 - DNA, 25 bp, Probe Sequence
agctgccgttatactgttctggggg

SEQ ID NO: 142153 - DNA, 25 bp, Probe Sequence
agctccgaatgtgcttaagtggaaa

SEQ ID NO: 142154 - DNA, 25 bp, Probe Sequence
agctccggaaccagaagtgaacgcg

SEQ ID NO: 142155 - DNA, 25 bp, Probe Sequence
agctttagaccctgggtgggctctg

SEQ ID NO: 142156 - DNA, 25 bp, Probe Sequence
agcaattaccgccgggtgtggggct

SEQ ID NO: 142157 - DNA, 25 bp, Probe Sequence
agcaattaccgccgggtgtggggct

SEQ ID NO: 142158 - DNA, 25 bp, Probe Sequence
agcaattaccgccgggtgtggggct

SEQ ID NO: 142159 - DNA, 25 bp, Probe Sequence
agctttgtcgtcagggatggggtgc

SEQ ID NO: 142160 - DNA, 25 bp, Probe Sequence
agcccttttgtccgtaggagttgat

SEQ ID NO: 142161 - DNA, 25 bp, Probe Sequence
agcacctattttggaaaactgggat

SEQ ID NO: 142162 - DNA, 25 bp, Probe Sequence
agcacttttactgccaaagggcagg

SEQ ID NO: 142163 - DNA, 25 bp, Probe Sequence
agctctgtttggggctaccttgagc

SEQ ID NO: 142164 - DNA, 25 bp, Probe Sequence
agcactcttcagagactacgtccac

SEQ ID NO: 142165 - DNA, 25 bp, Probe Sequence
agaagtctcagctaagctcacgtcc

SEQ ID NO: 142166 - DNA, 25 bp, Probe Sequence
agaagtctcacgtgatcacttccgc

SEQ ID NO: 142167 - DNA, 25 bp, Probe Sequence
agaagtttcgcagacctgacatcca

SEQ ID NO: 142168 - DNA, 25 bp, Probe Sequence
agaagacggtcgaaactgacatcta

SEQ ID NO: 142169 - DNA, 25 bp, Probe Sequence
agaagaaggacgaaggcagctactc

SEQ ID NO: 142170 - DNA, 25 bp, Probe Sequence
agaatttccagcctggtgcgtacat

SEQ ID NO: 142171 - DNA, 25 bp, Probe Sequence
agaattgttgacatgggggctcatc

SEQ ID NO: 142172 - DNA, 25 bp, Probe Sequence
agaattgcttgaagggctggtattg

SEQ ID NO: 142173 - DNA, 25 bp, Probe Sequence
agaattgcttggattgctacatgga

SEQ ID NO: 142174 - DNA, 25 bp, Probe Sequence
agaagcgcttggacaggctggagga

SEQ ID NO: 142175 - DNA, 25 bp, Probe Sequence
agaagatcttggacagcgtgggtat

SEQ ID NO: 142176 - DNA, 25 bp, Probe Sequence
agaagatcttggacagcgtgggtat

SEQ ID NO: 142177 - DNA, 25 bp, Probe Sequence
agaagctctttgaagttgtcagatg

SEQ ID NO: 142178 - DNA, 25 bp, Probe Sequence
agaatcttttggtttctcactgcat

SEQ ID NO: 142179 - DNA, 25 bp, Probe Sequence
agaatcttcaattgtttgccttatt

SEQ ID NO: 142180 - DNA, 25 bp, Probe Sequence
agaatctttttgatgtcgatgttca

SEQ ID NO: 142181 - DNA, 25 bp, Probe Sequence
agaagagtttaggggcaggttatgc

SEQ ID NO: 142182 - DNA, 25 bp, Probe Sequence
agaaggtgtccacggtggtttgatc

SEQ ID NO: 142183 - DNA, 25 bp, Probe Sequence
agaaggtctcattcggtgttttggg

SEQ ID NO: 142184 - DNA, 25 bp, Probe Sequence
agaagttgccattctctgcagtttt

SEQ ID NO: 142185 - DNA, 25 bp, Probe Sequence
agcgagtctggaactctttcttcgg

SEQ ID NO: 142186 - DNA, 25 bp, Probe Sequence
agaagatcgatgacctcttctccgg

SEQ ID NO: 142187 - DNA, 25 bp, Probe Sequence
agaagtagatgagcgctctctctct

SEQ ID NO: 142188 - DNA, 25 bp, Probe Sequence
agaagattcatacgcctctactgat

SEQ ID NO: 142189 - DNA, 25 bp, Probe Sequence
agaagatcactttccttcactgtgc

SEQ ID NO: 142190 - DNA, 25 bp, Probe Sequence
agaagctgctctaggagttcctggc

SEQ ID NO: 142191 - DNA, 25 bp, Probe Sequence
agaagtactgccaagtcatccgtgt

SEQ ID NO: 142192 - DNA, 25 bp, Probe Sequence
agcactgaaaccgagtcacctgtgg

SEQ ID NO: 142193 - DNA, 25 bp, Probe Sequence
agcactgataaagcgacagctgggc

SEQ ID NO: 142194 - DNA, 25 bp, Probe Sequence
agcatcgagaaaatcaacggaaccc

SEQ ID NO: 142195 - DNA, 25 bp, Probe Sequence
agcacgacaagtacatggcggacat

SEQ ID NO: 142196 - DNA, 25 bp, Probe Sequence
agcagcgatacctagggcggaagtg

SEQ ID NO: 142197 - DNA, 25 bp, Probe Sequence
agcaagaagttgggggggatgtgaa

SEQ ID NO: 142198 - DNA, 25 bp, Probe Sequence
agaagggaggggcctgagagattat

SEQ ID NO: 142199 - DNA, 25 bp, Probe Sequence
agaagagtaggtcgcccagagtggt

SEQ ID NO: 142200 - DNA, 25 bp, Probe Sequence
agcaaggatcagtttccggaggtct

SEQ ID NO: 142201 - DNA, 25 bp, Probe Sequence
agcaggggcgatatcctctgacgta

SEQ ID NO: 142202 - DNA, 25 bp, Probe Sequence
agcacgaaggcaaaccctactgcaa

SEQ ID NO: 142203 - DNA, 25 bp, Probe Sequence
agcaacatagtgaaaccccatctcc

SEQ ID NO: 142204 - DNA, 25 bp, Probe Sequence
agctcctttgggacccagatcatcg

SEQ ID NO: 142205 - DNA, 25 bp, Probe Sequence
agcaaccttctgcaccaatgaacag

SEQ ID NO: 142206 - DNA, 25 bp, Probe Sequence
agcactctgtgttaaagactaactg

SEQ ID NO: 142207 - DNA, 25 bp, Probe Sequence
agcactttcccatgtattgatactg

SEQ ID NO: 142208 - DNA, 25 bp, Probe Sequence
agcacaaccggctgtacatgaaggc

SEQ ID NO: 142209 - DNA, 25 bp, Probe Sequence
agcaaacagctgcccgggaacaggc

SEQ ID NO: 142210 - DNA, 25 bp, Probe Sequence
agcaaacagctgcccgggaacaggc

SEQ ID NO: 142211 - DNA, 25 bp, Probe Sequence
agaagaagtcagcttgagcatacag

SEQ ID NO: 142212 - DNA, 25 bp, Probe Sequence
agaagtcaatcagtttccatcagat

SEQ ID NO: 142213 - DNA, 25 bp, Probe Sequence
agaaggaggcctcatcctaatctca

SEQ ID NO: 142214 - DNA, 25 bp, Probe Sequence
agaaggggctgaaaactaaatccat

SEQ ID NO: 142215 - DNA, 25 bp, Probe Sequence
agaagggcctcacaagacaaaacag

SEQ ID NO: 142216 - DNA, 25 bp, Probe Sequence
agaagggcacctcagaaacagacac

SEQ ID NO: 142217 - DNA, 25 bp, Probe Sequence
agaaggtcacccagagagccagaca

SEQ ID NO: 142218 - DNA, 25 bp, Probe Sequence
agaagggcactcagggacatgaaca

SEQ ID NO: 142219 - DNA, 25 bp, Probe Sequence
agcaagggcttgcaggacctgaagc

SEQ ID NO: 142220 - DNA, 25 bp, Probe Sequence
agaagagctttgcgtgagtgtgaga

SEQ ID NO: 142221 - DNA, 25 bp, Probe Sequence
agaatagcaaggcgtcactggagag

SEQ ID NO: 142222 - DNA, 25 bp, Probe Sequence
agaatggatcaatggtgccacggag

SEQ ID NO: 142223 - DNA, 25 bp, Probe Sequence
agaatggtcctaagctggcaagccg

SEQ ID NO: 142224 - DNA, 25 bp, Probe Sequence
agaatgccattccagaggacaagcc

SEQ ID NO: 142225 - DNA, 25 bp, Probe Sequence
agcaagcctagccagatgtaagggc

SEQ ID NO: 142226 - DNA, 25 bp, Probe Sequence
agcacccaaggccagtacatggtgg

SEQ ID NO: 142227 - DNA, 25 bp, Probe Sequence
agcaactgggcaccattacaggaag

SEQ ID NO: 142228 - DNA, 25 bp, Probe Sequence
agaaggagctcaccattggctcgaa

SEQ ID NO: 142229 - DNA, 25 bp, Probe Sequence
agaagaggctgctgctcttctcaga

SEQ ID NO: 142230 - DNA, 25 bp, Probe Sequence
agcgagaaaataccttccgtgctct

SEQ ID NO: 142231 - DNA, 25 bp, Probe Sequence
agcaccagcaactgttagacctcgc

SEQ ID NO: 142232 - DNA, 25 bp, Probe Sequence
agcagccagagccggctttaagtcc

SEQ ID NO: 142233 - DNA, 25 bp, Probe Sequence
agcacctgagctaaggttaaggctg

SEQ ID NO: 142234 - DNA, 25 bp, Probe Sequence
agccttggtagggtctggagtcaga

SEQ ID NO: 142235 - DNA, 25 bp, Probe Sequence
agcacttagtagctgtggaggaaga

SEQ ID NO: 142236 - DNA, 25 bp, Probe Sequence
agcacctgtcatttggggaggacta

SEQ ID NO: 142237 - DNA, 25 bp, Probe Sequence
agctcacctgtttgtgtggggacgg

SEQ ID NO: 142238 - DNA, 25 bp, Probe Sequence
agctgactcgacggtgatggggggc

SEQ ID NO: 142239 - DNA, 25 bp, Probe Sequence
agcttctccagcgtttggaggagag

SEQ ID NO: 142240 - DNA, 25 bp, Probe Sequence
agcacttcccagtggcagaggctga

SEQ ID NO: 142241 - DNA, 25 bp, Probe Sequence
agcaccacccagaagaagagcctga

SEQ ID NO: 142242 - DNA, 25 bp, Probe Sequence
agaatcactacaagaaaaactcctt

SEQ ID NO: 142243 - DNA, 25 bp, Probe Sequence
agaattcacatcaaaaaaacagctt

SEQ ID NO: 142244 - DNA, 25 bp, Probe Sequence
agaattcctgtaccaaattggcttg

SEQ ID NO: 142245 - DNA, 25 bp, Probe Sequence
agaagaccagtcctaaattagtata

SEQ ID NO: 142246 - DNA, 25 bp, Probe Sequence
agaagatctgcactattaactttgt

SEQ ID NO: 142247 - DNA, 25 bp, Probe Sequence
agcacacagctcttcttaaaattga

SEQ ID NO: 142248 - DNA, 25 bp, Probe Sequence
agcacacagctcttcttaaaattga

SEQ ID NO: 142249 - DNA, 25 bp, Probe Sequence
agcacacagctcttcttaaaattga

SEQ ID NO: 142250 - DNA, 25 bp, Probe Sequence
agaatcactcctctcaaatatgccc

SEQ ID NO: 142251 - DNA, 25 bp, Probe Sequence
agaatccaactgatgagtatctagg

SEQ ID NO: 142252 - DNA, 25 bp, Probe Sequence
agaataagtgtgatgaggtgctgag

SEQ ID NO: 142253 - DNA, 25 bp, Probe Sequence
agaatcatggattgctggaggtctt

SEQ ID NO: 142254 - DNA, 25 bp, Probe Sequence
agcatgacacagctcgggctgtcag

SEQ ID NO: 142255 - DNA, 25 bp, Probe Sequence
agcagcgccaggaggaagctgacag

SEQ ID NO: 142256 - DNA, 25 bp, Probe Sequence
agaagtgaggccagacgcggcagct

SEQ ID NO: 142257 - DNA, 25 bp, Probe Sequence
acagatggggccagactccggcccc

SEQ ID NO: 142258 - DNA, 25 bp, Probe Sequence
agaatctgggtgagacttccacccc

SEQ ID NO: 142259 - DNA, 25 bp, Probe Sequence
agaatttggtgtggacgttggccct

SEQ ID NO: 142260 - DNA, 25 bp, Probe Sequence
agaatttggccccagcagtttgcct

SEQ ID NO: 142261 - DNA, 25 bp, Probe Sequence
agaatatccatgacctagttttcca

SEQ ID NO: 142262 - DNA, 25 bp, Probe Sequence
agaatatctctgaagctggattgat

SEQ ID NO: 142263 - DNA, 25 bp, Probe Sequence
agaatgatctttactgaatttgccc

SEQ ID NO: 142264 - DNA, 25 bp, Probe Sequence
agaatactcattgcagcagccttcc

SEQ ID NO: 142265 - DNA, 25 bp, Probe Sequence
agaattggcctgccacaacttcact

SEQ ID NO: 142266 - DNA, 25 bp, Probe Sequence
agaagaggctcgcctctagtgtcct

SEQ ID NO: 142267 - DNA, 25 bp, Probe Sequence
agaagagtccagcctcatagtggcc

SEQ ID NO: 142268 - DNA, 25 bp, Probe Sequence
agcacaaaagcactttgagtggcac

SEQ ID NO: 142269 - DNA, 25 bp, Probe Sequence
agaaggaagcggagcaggtgctgca

SEQ ID NO: 142270 - DNA, 25 bp, Probe Sequence
agaaggacggagctgacttcgccaa

SEQ ID NO: 142271 - DNA, 25 bp, Probe Sequence
agaatcccgatgaggacttcagctg

SEQ ID NO: 142272 - DNA, 25 bp, Probe Sequence
agaatggtagtgtggttgctcacgc

SEQ ID NO: 142273 - DNA, 25 bp, Probe Sequence
agaaggtgagtagggctgggcacag

SEQ ID NO: 142274 - DNA, 25 bp, Probe Sequence
agaaggtatgtagtgctgcagcccc

SEQ ID NO: 142275 - DNA, 25 bp, Probe Sequence
agaatggctgatcatcttggcatcc

SEQ ID NO: 142276 - DNA, 25 bp, Probe Sequence
agaatggctgatcatcttggcatcc

SEQ ID NO: 142277 - DNA, 25 bp, Probe Sequence
agaatgtctctggatctttcctcat

SEQ ID NO: 142278 - DNA, 25 bp, Probe Sequence
agaatgttctgcttctagctagcct

SEQ ID NO: 142279 - DNA, 25 bp, Probe Sequence
agaattactgtttacacacattttt

SEQ ID NO: 142280 - DNA, 25 bp, Probe Sequence
agaataaagatcttaacaggatttt

SEQ ID NO: 142281 - DNA, 25 bp, Probe Sequence
agaataacacttcaaagtcatcttg

SEQ ID NO: 142282 - DNA, 25 bp, Probe Sequence
agaattcctcttcaacatgtacctc

SEQ ID NO: 142283 - DNA, 25 bp, Probe Sequence
cagttttatcaacaagttacttcaa

SEQ ID NO: 142284 - DNA, 25 bp, Probe Sequence
acttttctaactgagttgtcctaca

SEQ ID NO: 142285 - DNA, 25 bp, Probe Sequence
agcttctttaacacaatttcctgac

SEQ ID NO: 142286 - DNA, 25 bp, Probe Sequence
accactttagaacacacctcaggaa

SEQ ID NO: 142287 - DNA, 25 bp, Probe Sequence
agcacctttaaatatctgaccaaga

SEQ ID NO: 142288 - DNA, 25 bp, Probe Sequence
agcacctattgaaaaaggactacag

SEQ ID NO: 142289 - DNA, 25 bp, Probe Sequence
cgccgccggaaagcgtgccaatcaa

SEQ ID NO: 142290 - DNA, 25 bp, Probe Sequence
acctccagtacatgggcccaaaagt

SEQ ID NO: 142291 - DNA, 25 bp, Probe Sequence
agcttccctaccagggcaaaagcaa

SEQ ID NO: 142292 - DNA, 25 bp, Probe Sequence
agctgtccccacattaggcttaaaa

SEQ ID NO: 142293 - DNA, 25 bp, Probe Sequence
agctgtccccacattaggcttaaaa

SEQ ID NO: 142294 - DNA, 25 bp, Probe Sequence
agcttccccaactaaagcctagaag

SEQ ID NO: 142295 - DNA, 25 bp, Probe Sequence
agccgtcccctgtaagatgcgggaa

SEQ ID NO: 142296 - DNA, 25 bp, Probe Sequence
agcacaaccggttcacaaaggagac

SEQ ID NO: 142297 - DNA, 25 bp, Probe Sequence
agcagaacgctcttgaaacaagtaa

SEQ ID NO: 142298 - DNA, 25 bp, Probe Sequence
agcaaacacctatagagcaatacaa

SEQ ID NO: 142299 - DNA, 25 bp, Probe Sequence
agcaacatccactcggagagaaagc

SEQ ID NO: 142300 - DNA, 25 bp, Probe Sequence
agcaactcatcctgtaagtaaacgt

SEQ ID NO: 142301 - DNA, 25 bp, Probe Sequence
agcaactcctgtactctactaaaag

SEQ ID NO: 142302 - DNA, 25 bp, Probe Sequence
agcaagtccataagcttgcttaaaa

SEQ ID NO: 142303 - DNA, 25 bp, Probe Sequence
agcaagatcctgtctttgtaaaaaa

SEQ ID NO: 142304 - DNA, 25 bp, Probe Sequence
agaaggctgctgttggtgttaagaa

SEQ ID NO: 142305 - DNA, 25 bp, Probe Sequence
agaaggctgtcttagtgcaaaaaac

SEQ ID NO: 142306 - DNA, 25 bp, Probe Sequence
agcagctgactgaattttcataaga

SEQ ID NO: 142307 - DNA, 25 bp, Probe Sequence
agcagatactgacttgttgccatta

SEQ ID NO: 142308 - DNA, 25 bp, Probe Sequence
agcagatgattgctaattccttgaa

SEQ ID NO: 142309 - DNA, 25 bp, Probe Sequence
agcagacttttacttctcttacact

SEQ ID NO: 142310 - DNA, 25 bp, Probe Sequence
agcaacttttagcccaattgtcact

SEQ ID NO: 142311 - DNA, 25 bp, Probe Sequence
agaatatttctggcctcaaggaact

SEQ ID NO: 142312 - DNA, 25 bp, Probe Sequence
agaatttccttcctactgagaatct

SEQ ID NO: 142313 - DNA, 25 bp, Probe Sequence
agaatcactcaattcctattggagt

SEQ ID NO: 142314 - DNA, 25 bp, Probe Sequence
agaatcccactttctatagcagatt

SEQ ID NO: 142315 - DNA, 25 bp, Probe Sequence
agaattccaatttctgtccacttcc

SEQ ID NO: 142316 - DNA, 25 bp, Probe Sequence
agaatatctccaagacgatcgccac

SEQ ID NO: 142317 - DNA, 25 bp, Probe Sequence
agcaagagtccaagacgtcaccgca

SEQ ID NO: 142318 - DNA, 25 bp, Probe Sequence
agcaagagcccaaaatatcatccag

SEQ ID NO: 142319 - DNA, 25 bp, Probe Sequence
agaagtgccatgactactacaccac

SEQ ID NO: 142320 - DNA, 25 bp, Probe Sequence
agaagtgtactctctacaatgcaat

SEQ ID NO: 142321 - DNA, 25 bp, Probe Sequence
agaattggattctctcatcaaggct

SEQ ID NO: 142322 - DNA, 25 bp, Probe Sequence
agaattggattctctcatcaaggct

SEQ ID NO: 142323 - DNA, 25 bp, Probe Sequence
agaattcgtcatcacgcatcacagg

SEQ ID NO: 142324 - DNA, 25 bp, Probe Sequence
agcaaatcggtgcactgatcgctgc

SEQ ID NO: 142325 - DNA, 25 bp, Probe Sequence
agcaaatcggtgcactgatcgctgc

SEQ ID NO: 142326 - DNA, 25 bp, Probe Sequence
agaagtcagcttgagcatacagctg

SEQ ID NO: 142327 - DNA, 25 bp, Probe Sequence
agaagtgcagctgctgcgcctgatg

SEQ ID NO: 142328 - DNA, 25 bp, Probe Sequence
agaagtgcagcacctgagacaggac

SEQ ID NO: 142329 - DNA, 25 bp, Probe Sequence
agaagtgcagcacctgagacaggac

SEQ ID NO: 142330 - DNA, 25 bp, Probe Sequence
agcaggatgaacgtgaacagtcaga

SEQ ID NO: 142331 - DNA, 25 bp, Probe Sequence
agcacctggcacataacagatcttt

SEQ ID NO: 142332 - DNA, 25 bp, Probe Sequence
agcacctcagcccagaacaatgcta

SEQ ID NO: 142333 - DNA, 25 bp, Probe Sequence
agcaagcatcattctggagaccgtc

SEQ ID NO: 142334 - DNA, 25 bp, Probe Sequence
agcaatgacatctgggaatccattt

SEQ ID NO: 142335 - DNA, 25 bp, Probe Sequence
agaagtgaacctcgaatctcatgtt

SEQ ID NO: 142336 - DNA, 25 bp, Probe Sequence
agaaggaactcagtgtttgtggtac

SEQ ID NO: 142337 - DNA, 25 bp, Probe Sequence
agcaaatgaactgtgttggttgttt

SEQ ID NO: 142338 - DNA, 25 bp, Probe Sequence
agaatgtgaatcatggtgtacttgt

SEQ ID NO: 142339 - DNA, 25 bp, Probe Sequence
agaagtcagggctgtgtgattgtgt

SEQ ID NO: 142340 - DNA, 25 bp, Probe Sequence
agaagtcaactgtgtgagtgtgata

SEQ ID NO: 142341 - DNA, 25 bp, Probe Sequence
agaagtctacagtgagtctgagatg

SEQ ID NO: 142342 - DNA, 25 bp, Probe Sequence
agaattataaggcctggtgcgatgg

SEQ ID NO: 142343 - DNA, 25 bp, Probe Sequence
agcttcctaaggtccttgtattgtt

SEQ ID NO: 142344 - DNA, 25 bp, Probe Sequence
agctatgaccattaggcctatttag

SEQ ID NO: 142345 - DNA, 25 bp, Probe Sequence
agctatgaccattaggcctatttag

SEQ ID NO: 142346 - DNA, 25 bp, Probe Sequence
agcaatgacctcttggactgttata

SEQ ID NO: 142347 - DNA, 25 bp, Probe Sequence
agcaagaaggcgatagcttttagaa

SEQ ID NO: 142348 - DNA, 25 bp, Probe Sequence
agcaaaagactatcactctttggaa

SEQ ID NO: 142349 - DNA, 25 bp, Probe Sequence
agaataagattttccatgcatttgc

SEQ ID NO: 142350 - DNA, 25 bp, Probe Sequence
agaattagtgttttggcttctgtac

SEQ ID NO: 142351 - DNA, 25 bp, Probe Sequence
agaattgggtatttggtatcatttt

SEQ ID NO: 142352 - DNA, 25 bp, Probe Sequence
agccttatagtaactgtgtaatttg

SEQ ID NO: 142353 - DNA, 25 bp, Probe Sequence
agcagttttgtgtgggataatttga

SEQ ID NO: 142354 - DNA, 25 bp, Probe Sequence
agcaattattggagctgtacagatt

SEQ ID NO: 142355 - DNA, 25 bp, Probe Sequence
agcaatccttgaatttagacagaat

SEQ ID NO: 142356 - DNA, 25 bp, Probe Sequence
agcaacttccacttctagtagtatg

SEQ ID NO: 142357 - DNA, 25 bp, Probe Sequence
agcagacagtgccacagttagctca

SEQ ID NO: 142358 - DNA, 25 bp, Probe Sequence
agcagacaggaatagtgaacaacag

SEQ ID NO: 142359 - DNA, 25 bp, Probe Sequence
agcaaatgtgtggggagcaaaggca

SEQ ID NO: 142360 - DNA, 25 bp, Probe Sequence
agcacacaggtcccagacaggggct

SEQ ID NO: 142361 - DNA, 25 bp, Probe Sequence
agcacaatgagaaacggcagcgccg

SEQ ID NO: 142362 - DNA, 25 bp, Probe Sequence
agcagaatcagtgcctagcctgtgc

SEQ ID NO: 142363 - DNA, 25 bp, Probe Sequence
agcagtatagttttacctatccgta

SEQ ID NO: 142364 - DNA, 25 bp, Probe Sequence
agaatacagttgtctagccaagcca

SEQ ID NO: 142365 - DNA, 25 bp, Probe Sequence
agaatcactgctgcagctactcacc

SEQ ID NO: 142366 - DNA, 25 bp, Probe Sequence
agaatagatgctgactgtactcctc

SEQ ID NO: 142367 - DNA, 25 bp, Probe Sequence
agcaataggctaaccagaacactta

SEQ ID NO: 142368 - DNA, 25 bp, Probe Sequence
agcaaagtgcaagcgagtacctatg

SEQ ID NO: 142369 - DNA, 25 bp, Probe Sequence
agcaagtggcccatgtgatactctg

SEQ ID NO: 142370 - DNA, 25 bp, Probe Sequence
agaagtgtgtcagtctgtctgtctt

SEQ ID NO: 142371 - DNA, 25 bp, Probe Sequence
agaatgtggctcagttctggtcctt

SEQ ID NO: 142372 - DNA, 25 bp, Probe Sequence
agcaatgtactgagtcctgtggact

SEQ ID NO: 142373 - DNA, 25 bp, Probe Sequence
agaatttgggtggctcatgttgaat

SEQ ID NO: 142374 - DNA, 25 bp, Probe Sequence
agcactttgggaggctctcttgaag

SEQ ID NO: 142375 - DNA, 25 bp, Probe Sequence
acagattatggagagctttcaaggc

SEQ ID NO: 142376 - DNA, 25 bp, Probe Sequence
agcagatttccagccttctactgct

SEQ ID NO: 142377 - DNA, 25 bp, Probe Sequence
agcagatttccagccttctactgct

SEQ ID NO: 142378 - DNA, 25 bp, Probe Sequence
agcacagctgtccaagactttccat

SEQ ID NO: 142379 - DNA, 25 bp, Probe Sequence
agctcatctgggtgccttttaggag

SEQ ID NO: 142380 - DNA, 25 bp, Probe Sequence
agcactttgatctctttttgaggtt

SEQ ID NO: 142381 - DNA, 25 bp, Probe Sequence
agcacatgttactgcttcattttgg

SEQ ID NO: 142382 - DNA, 25 bp, Probe Sequence
agaatgcttaaggatgtgattggat

SEQ ID NO: 142383 - DNA, 25 bp, Probe Sequence
agaatgttaatccatattggcagaa

SEQ ID NO: 142384 - DNA, 25 bp, Probe Sequence
agaatcattaatatttgagaaaatt

SEQ ID NO: 142385 - DNA, 25 bp, Probe Sequence
agcacatttgcctactaatggaaaa

SEQ ID NO: 142386 - DNA, 25 bp, Probe Sequence
agcaactgtcctttactaaaatgac

SEQ ID NO: 142387 - DNA, 25 bp, Probe Sequence
agaagtgctccatttactgagaagc

SEQ ID NO: 142388 - DNA, 25 bp, Probe Sequence
agaaggctagtgtgactacagccaa

SEQ ID NO: 142389 - DNA, 25 bp, Probe Sequence
agaaggctgaaatcactaacacata

SEQ ID NO: 142390 - DNA, 25 bp, Probe Sequence
agaagggagcactagccgagagaca

SEQ ID NO: 142391 - DNA, 25 bp, Probe Sequence
agaaggagcgcctagagctggtgct

SEQ ID NO: 142392 - DNA, 25 bp, Probe Sequence
agaaggacttgctgggtcgctttgt

SEQ ID NO: 142393 - DNA, 25 bp, Probe Sequence
agaaggacttcattgctttctgctc

SEQ ID NO: 142394 - DNA, 25 bp, Probe Sequence
agaatacactctggacctgtgctgt

SEQ ID NO: 142395 - DNA, 25 bp, Probe Sequence
agcaaccaccatggaccagaagtct

SEQ ID NO: 142396 - DNA, 25 bp, Probe Sequence
agaatataaagccccagaatgtccc

SEQ ID NO: 142397 - DNA, 25 bp, Probe Sequence
agaataaagcagcatttgaaatcgc

SEQ ID NO: 142398 - DNA, 25 bp, Probe Sequence
agaatcccagcgccatttatgagga

SEQ ID NO: 142399 - DNA, 25 bp, Probe Sequence
agaatcccagcaccattctataggc

SEQ ID NO: 142400 - DNA, 25 bp, Probe Sequence
agaatctacagctgctttacaggct

SEQ ID NO: 142401 - DNA, 25 bp, Probe Sequence
agcaactatcagggcatgctctgcc

SEQ ID NO: 142402 - DNA, 25 bp, Probe Sequence
agaaggtcatgcagatgatctgagc

SEQ ID NO: 142403 - DNA, 25 bp, Probe Sequence
agaaggtgctgcagacactgggcgt

SEQ ID NO: 142404 - DNA, 25 bp, Probe Sequence
agcaagagtctcatgatcctggtgc

SEQ ID NO: 142405 - DNA, 25 bp, Probe Sequence
agcaatgagtctgtacaactgtctt

SEQ ID NO: 142406 - DNA, 25 bp, Probe Sequence
agcaaattcgctgcaacctgttgat

SEQ ID NO: 142407 - DNA, 25 bp, Probe Sequence
agcaagctttcatcaagccttctcc

SEQ ID NO: 142408 - DNA, 25 bp, Probe Sequence
agcacagagtgttaaagcctccacc

SEQ ID NO: 142409 - DNA, 25 bp, Probe Sequence
agcacctggagatcaatccctgacc

SEQ ID NO: 142410 - DNA, 25 bp, Probe Sequence
agcacctggtactaagggtactgct

SEQ ID NO: 142411 - DNA, 25 bp, Probe Sequence
agcaccttaagattagggtggcatt

SEQ ID NO: 142412 - DNA, 25 bp, Probe Sequence
agcactcgataatctaagggacatt

SEQ ID NO: 142413 - DNA, 25 bp, Probe Sequence
agcactctaagagccgagatagctt

SEQ ID NO: 142414 - DNA, 25 bp, Probe Sequence
agcaccaaggccacaggatacatga

SEQ ID NO: 142415 - DNA, 25 bp, Probe Sequence
agcactaatttcctgctgtgaaaac

SEQ ID NO: 142416 - DNA, 25 bp, Probe Sequence
agcatcatgaactcgtttgtaaacg

SEQ ID NO: 142417 - DNA, 25 bp, Probe Sequence
agcaagcaacaatgtttctcaacaa

SEQ ID NO: 142418 - DNA, 25 bp, Probe Sequence
agcagtgaactctggtgtctcaaag

SEQ ID NO: 142419 - DNA, 25 bp, Probe Sequence
agaataagcccacctgttcaatgca

SEQ ID NO: 142420 - DNA, 25 bp, Probe Sequence
agaatacagccatggccagtcacct

SEQ ID NO: 142421 - DNA, 25 bp, Probe Sequence
agaatattctgtggtgccagtgcac

SEQ ID NO: 142422 - DNA, 25 bp, Probe Sequence
agaatatgagtgccatgcatccaat

SEQ ID NO: 142423 - DNA, 25 bp, Probe Sequence
agcaatgactgtgctcaccagtaaa

SEQ ID NO: 142424 - DNA, 25 bp, Probe Sequence
agcaatgaaggaggcatccaccaaa

SEQ ID NO: 142425 - DNA, 25 bp, Probe Sequence
agcaagaaatctacatccaccaaaa

SEQ ID NO: 142426 - DNA, 25 bp, Probe Sequence
agcagaaaagttcccctctgaacca

SEQ ID NO: 142427 - DNA, 25 bp, Probe Sequence
agaaggaatgggaccttctaatctc

SEQ ID NO: 142428 - DNA, 25 bp, Probe Sequence
agaaggaatggtaccagctcctcct

SEQ ID NO: 142429 - DNA, 25 bp, Probe Sequence
agaaggagggaatcccacctcatcc

SEQ ID NO: 142430 - DNA, 25 bp, Probe Sequence
agcagtggaggggttggcctccctt

SEQ ID NO: 142431 - DNA, 25 bp, Probe Sequence
agcaggggagtggcttcccaaggtc

SEQ ID NO: 142432 - DNA, 25 bp, Probe Sequence
agcagcgggagcagtcggtcaagtt

SEQ ID NO: 142433 - DNA, 25 bp, Probe Sequence
agcactgagggtctggtgccaatcc

SEQ ID NO: 142434 - DNA, 25 bp, Probe Sequence
agaatggaggctcggttcttctgac

SEQ ID NO: 142435 - DNA, 25 bp, Probe Sequence
agcacaggggattcgtcttgactga

SEQ ID NO: 142436 - DNA, 25 bp, Probe Sequence
agaaggtggatgtggtggccgagac

SEQ ID NO: 142437 - DNA, 25 bp, Probe Sequence
agaaggtggcagttcttcatgggag

SEQ ID NO: 142438 - DNA, 25 bp, Probe Sequence
agaatggggagactcctcaagcagg

SEQ ID NO: 142439 - DNA, 25 bp, Probe Sequence
agaaggggacctgcgaagactggcc

SEQ ID NO: 142440 - DNA, 25 bp, Probe Sequence
agaatggcgtgaacccaggaggcgg

SEQ ID NO: 142441 - DNA, 25 bp, Probe Sequence
agaatcgcttgaacctgggaggcaa

SEQ ID NO: 142442 - DNA, 25 bp, Probe Sequence
agaatcgctggaacctgggaggcag

SEQ ID NO: 142443 - DNA, 25 bp, Probe Sequence
agaatcgcttgaacctgggaggcag

SEQ ID NO: 142444 - DNA, 25 bp, Probe Sequence
agaatcgcttgaacctgggaggcag

SEQ ID NO: 142445 - DNA, 25 bp, Probe Sequence
agaatcgcttgaacctgggaggcag

SEQ ID NO: 142446 - DNA, 25 bp, Probe Sequence
agaatctcttgaacctggcaggtgg

SEQ ID NO: 142447 - DNA, 25 bp, Probe Sequence
accactgtatgtgtctggggtgtgt

SEQ ID NO: 142448 - DNA, 25 bp, Probe Sequence
agcaaggctggggtcttgggttcct

SEQ ID NO: 142449 - DNA, 25 bp, Probe Sequence
agcaaggctggggtcttgggttcct

SEQ ID NO: 142450 - DNA, 25 bp, Probe Sequence
agcaaggctggggtcttgggttcct

SEQ ID NO: 142451 - DNA, 25 bp, Probe Sequence
agcactccaggggttgtgggtttgt

SEQ ID NO: 142452 - DNA, 25 bp, Probe Sequence
agaatccagtgggtgagtgccctca

SEQ ID NO: 142453 - DNA, 25 bp, Probe Sequence
agaatctcttgggcgagcaccattt

SEQ ID NO: 142454 - DNA, 25 bp, Probe Sequence
agaatctcatagttcagagacacag

SEQ ID NO: 142455 - DNA, 25 bp, Probe Sequence
agaatgcccatctgtgaacacatgg

SEQ ID NO: 142456 - DNA, 25 bp, Probe Sequence
agaatttgacaactcacaagctgga

SEQ ID NO: 142457 - DNA, 25 bp, Probe Sequence
agaattctgaccatgaatactgcag

SEQ ID NO: 142458 - DNA, 25 bp, Probe Sequence
agcacttggcactaagacatttcga

SEQ ID NO: 142459 - DNA, 25 bp, Probe Sequence
agcacttggcactaagacatttcga

SEQ ID NO: 142460 - DNA, 25 bp, Probe Sequence
agcactgtggcaataacttttgaat

SEQ ID NO: 142461 - DNA, 25 bp, Probe Sequence
agcactgtacagcattcttactcct

SEQ ID NO: 142462 - DNA, 25 bp, Probe Sequence
agcaagagacagtttcactacttct

SEQ ID NO: 142463 - DNA, 25 bp, Probe Sequence
agcacaagagaaactcctagtttag

SEQ ID NO: 142464 - DNA, 25 bp, Probe Sequence
agcacaacgagctaccgtttttatt

SEQ ID NO: 142465 - DNA, 25 bp, Probe Sequence
agcaaatgaatgtccctttgtattt

SEQ ID NO: 142466 - DNA, 25 bp, Probe Sequence
agcaccaaatgattccctggttatg

SEQ ID NO: 142467 - DNA, 25 bp, Probe Sequence
agcaccaggtggtctcctctgactt

SEQ ID NO: 142468 - DNA, 25 bp, Probe Sequence
agcaaggactggtctttctatctct

SEQ ID NO: 142469 - DNA, 25 bp, Probe Sequence
agcaatcagttgccactttaatatt

SEQ ID NO: 142470 - DNA, 25 bp, Probe Sequence
agcaatcagttgccactttaatatt

SEQ ID NO: 142471 - DNA, 25 bp, Probe Sequence
agcagcttgaggccctattaatatg

SEQ ID NO: 142472 - DNA, 25 bp, Probe Sequence
agcagctagtgctccagttagaagc

SEQ ID NO: 142473 - DNA, 25 bp, Probe Sequence
agcagcttgtcattggcgttaacga

SEQ ID NO: 142474 - DNA, 25 bp, Probe Sequence
agcagctggttgaggggcaccaaga

SEQ ID NO: 142475 - DNA, 25 bp, Probe Sequence
agcacttgggattggggttaagcct

SEQ ID NO: 142476 - DNA, 25 bp, Probe Sequence
agcgttacgttggaggtctatataa

SEQ ID NO: 142477 - DNA, 25 bp, Probe Sequence
agcactgtacgtagaaggccttagg

SEQ ID NO: 142478 - DNA, 25 bp, Probe Sequence
agcatgttactattaaatggttggt

SEQ ID NO: 142479 - DNA, 25 bp, Probe Sequence
agcagttagtcctgaaggcccttga

SEQ ID NO: 142480 - DNA, 25 bp, Probe Sequence
agcatgtttacctgttggcttgctt

SEQ ID NO: 142481 - DNA, 25 bp, Probe Sequence
agcattaggacttacctccttcttt

SEQ ID NO: 142482 - DNA, 25 bp, Probe Sequence
agcaatgaggaaaagactccctatt

SEQ ID NO: 142483 - DNA, 25 bp, Probe Sequence
agaatgatgcaggttcaggtcccct

SEQ ID NO: 142484 - DNA, 25 bp, Probe Sequence
agaattgctgtgcaaggctcaccct

SEQ ID NO: 142485 - DNA, 25 bp, Probe Sequence
agaatatctgaggaaactgcacttg

SEQ ID NO: 142486 - DNA, 25 bp, Probe Sequence
agaatttagtatagatctcagatct

SEQ ID NO: 142487 - DNA, 25 bp, Probe Sequence
agaatccgagtgtttgccaggctta

SEQ ID NO: 142488 - DNA, 25 bp, Probe Sequence
agcactcggagtgtagtcaacagta

SEQ ID NO: 142489 - DNA, 25 bp, Probe Sequence
agcagtggggctctcagtaaggaac

SEQ ID NO: 142490 - DNA, 25 bp, Probe Sequence
agcagggggagtacagtgaggccat

SEQ ID NO: 142491 - DNA, 25 bp, Probe Sequence
agcaagaaggattgaggctgggcct

SEQ ID NO: 142492 - DNA, 25 bp, Probe Sequence
agcagaggggcttggagggtcacat

SEQ ID NO: 142493 - DNA, 25 bp, Probe Sequence
agaaggctgagtaccatgggctaca

SEQ ID NO: 142494 - DNA, 25 bp, Probe Sequence
agcaacctgagaagcacagagtgtt

SEQ ID NO: 142495 - DNA, 25 bp, Probe Sequence
agaatccatcagggccatgagtgtc

SEQ ID NO: 142496 - DNA, 25 bp, Probe Sequence
agaatctcattctggtagagctaaa

SEQ ID NO: 142497 - DNA, 25 bp, Probe Sequence
agaatcttttttcaagcatgtacat

SEQ ID NO: 142498 - DNA, 25 bp, Probe Sequence
agaatatttttctcagactgatgaa

SEQ ID NO: 142499 - DNA, 25 bp, Probe Sequence
agctacatagtttccacagggtaat

SEQ ID NO: 142500 - DNA, 25 bp, Probe Sequence
agctgaatcttttccccagtatagt

SEQ ID NO: 142501 - DNA, 25 bp, Probe Sequence
agcagttctattacccggttcagaa

SEQ ID NO: 142502 - DNA, 25 bp, Probe Sequence
agcagaagtttaagccggactccaa

SEQ ID NO: 142503 - DNA, 25 bp, Probe Sequence
agcaggagtatgacgagtccggccc

SEQ ID NO: 142504 - DNA, 25 bp, Probe Sequence
agcagccgttctggaatcacaggga

SEQ ID NO: 142505 - DNA, 25 bp, Probe Sequence
agcacactctccagaacagtggagg

SEQ ID NO: 142506 - DNA, 25 bp, Probe Sequence
agcacaatcggctgaaagaggatgc

SEQ ID NO: 142507 - DNA, 25 bp, Probe Sequence
agcagcagctagccaggcaaagggg

SEQ ID NO: 142508 - DNA, 25 bp, Probe Sequence
agcagcagccagccttaaagtagtc

SEQ ID NO: 142509 - DNA, 25 bp, Probe Sequence
agcactccacactcagattgtagcc

SEQ ID NO: 142510 - DNA, 25 bp, Probe Sequence
agcactccagacttgattaaatgtc

SEQ ID NO: 142511 - DNA, 25 bp, Probe Sequence
agcacccacatttgtttcaatgccc

SEQ ID NO: 142512 - DNA, 25 bp, Probe Sequence
agcagcatccattcttgtttaagcc

SEQ ID NO: 142513 - DNA, 25 bp, Probe Sequence
agcacatcgctgacgctgattgtgt

SEQ ID NO: 142514 - DNA, 25 bp, Probe Sequence
agcactggatgtagcatgactggat

SEQ ID NO: 142515 - DNA, 25 bp, Probe Sequence
agcagctgagatcctgcagtgcttt

SEQ ID NO: 142516 - DNA, 25 bp, Probe Sequence
agcaagagatggccacggctgcttc

SEQ ID NO: 142517 - DNA, 25 bp, Probe Sequence
agcaatggctgctgcatcgacagtt

SEQ ID NO: 142518 - DNA, 25 bp, Probe Sequence
agctgttgctgctcacgatgttgga

SEQ ID NO: 142519 - DNA, 25 bp, Probe Sequence
agctaatctagtggggatgtggaga

SEQ ID NO: 142520 - DNA, 25 bp, Probe Sequence
agcaaacaatgttggaattggaact

SEQ ID NO: 142521 - DNA, 25 bp, Probe Sequence
agcaaccactgcagcgactagggac

SEQ ID NO: 142522 - DNA, 25 bp, Probe Sequence
agcaacgccagcaggcgtcagaggc

SEQ ID NO: 142523 - DNA, 25 bp, Probe Sequence
agcagcacccaggaggggatgccgc

SEQ ID NO: 142524 - DNA, 25 bp, Probe Sequence
agcaccatccagacaggcatgagac

SEQ ID NO: 142525 - DNA, 25 bp, Probe Sequence
agcaccatccataccagtaaactgg

SEQ ID NO: 142526 - DNA, 25 bp, Probe Sequence
agcacgttgctgtcgattaagaccg

SEQ ID NO: 142527 - DNA, 25 bp, Probe Sequence
agcaagcatttctcaggaagtcctg

SEQ ID NO: 142528 - DNA, 25 bp, Probe Sequence
agcaagcatttctcaggaagtcctg

SEQ ID NO: 142529 - DNA, 25 bp, Probe Sequence
agcaaagtctgctcgaggagtctgt

SEQ ID NO: 142530 - DNA, 25 bp, Probe Sequence
agcaagaggctgttacggcaccatg

SEQ ID NO: 142531 - DNA, 25 bp, Probe Sequence
agcaatcaggagttgacccagcgtc

SEQ ID NO: 142532 - DNA, 25 bp, Probe Sequence
agcaatgctgaatctgactccacgt

SEQ ID NO: 142533 - DNA, 25 bp, Probe Sequence
agcaagctgatatcatcccattgca

SEQ ID NO: 142534 - DNA, 25 bp, Probe Sequence
agcaagcatctatgctgccagtgaa

SEQ ID NO: 142535 - DNA, 25 bp, Probe Sequence
agcagatatcaatctcgcttaggta

SEQ ID NO: 142536 - DNA, 25 bp, Probe Sequence
agcagaactaccactttggcctaac

SEQ ID NO: 142537 - DNA, 25 bp, Probe Sequence
agcagaaccaccagaaggtcctata

SEQ ID NO: 142538 - DNA, 25 bp, Probe Sequence
agcagaaatacagcagaagggcctg

SEQ ID NO: 142539 - DNA, 25 bp, Probe Sequence
agcatgaagaccgccacggtgggca

SEQ ID NO: 142540 - DNA, 25 bp, Probe Sequence
agcaagatagccttccactgattgg

SEQ ID NO: 142541 - DNA, 25 bp, Probe Sequence
agcagatgaagcctatctcatcggc

SEQ ID NO: 142542 - DNA, 25 bp, Probe Sequence
agcacgcagacactgtgcagctggt

SEQ ID NO: 142543 - DNA, 25 bp, Probe Sequence
agcaagagatacatatgcgagttca

SEQ ID NO: 142544 - DNA, 25 bp, Probe Sequence
agcacaggtggcatatgcgagcaaa

SEQ ID NO: 142545 - DNA, 25 bp, Probe Sequence
agcaaggccgtggtgcatggcatcc

SEQ ID NO: 142546 - DNA, 25 bp, Probe Sequence
agcaactgacgacagatgctgcccg

SEQ ID NO: 142547 - DNA, 25 bp, Probe Sequence
agcaaagaagacttgggcctgggag

SEQ ID NO: 142548 - DNA, 25 bp, Probe Sequence
agcagggacacctgggccaatgggc

SEQ ID NO: 142549 - DNA, 25 bp, Probe Sequence
agcagggacacctgggccaatgggc

SEQ ID NO: 142550 - DNA, 25 bp, Probe Sequence
agcagggacacctgggccaatgggc

SEQ ID NO: 142551 - DNA, 25 bp, Probe Sequence
agcaaggagcaatcgggtggaggcg

SEQ ID NO: 142552 - DNA, 25 bp, Probe Sequence
agcagagggagagcgggtaggcggc

SEQ ID NO: 142553 - DNA, 25 bp, Probe Sequence
agcagcgggaacggagcttcggagc

SEQ ID NO: 142554 - DNA, 25 bp, Probe Sequence
agcaggggagactgtcattgctaga

SEQ ID NO: 142555 - DNA, 25 bp, Probe Sequence
agcaatggaaactttcacattaaaa

SEQ ID NO: 142556 - DNA, 25 bp, Probe Sequence
agcactggtaatttctacctgtaat

SEQ ID NO: 142557 - DNA, 25 bp, Probe Sequence
agcactttatctgttgagcctttat

SEQ ID NO: 142558 - DNA, 25 bp, Probe Sequence
agaatttatcctaatggcctttata

SEQ ID NO: 142559 - DNA, 25 bp, Probe Sequence
agaattgtatctcttgtctttaaaa

SEQ ID NO: 142560 - DNA, 25 bp, Probe Sequence
agaattgctgactgatgtttttaag

SEQ ID NO: 142561 - DNA, 25 bp, Probe Sequence
agaatttgaatttggcttcctcacc

SEQ ID NO: 142562 - DNA, 25 bp, Probe Sequence
agcaatgtaaacagcagcttcacca

SEQ ID NO: 142563 - DNA, 25 bp, Probe Sequence
agaataactgatatgccttcactca

SEQ ID NO: 142564 - DNA, 25 bp, Probe Sequence
agcaataccgtcatgtttcagccaa

SEQ ID NO: 142565 - DNA, 25 bp, Probe Sequence
agcttaccagctggcttttcgatat

SEQ ID NO: 142566 - DNA, 25 bp, Probe Sequence
agctttctctgtgtattcggacttc

SEQ ID NO: 142567 - DNA, 25 bp, Probe Sequence
agcgtttctggttcaataggttttg

SEQ ID NO: 142568 - DNA, 25 bp, Probe Sequence
agcagagccttgagttacggtgttt

SEQ ID NO: 142569 - DNA, 25 bp, Probe Sequence
agcataacttttctactggtgtaat

SEQ ID NO: 142570 - DNA, 25 bp, Probe Sequence
agaatactgtttccttctaataaag

SEQ ID NO: 142571 - DNA, 25 bp, Probe Sequence
agaatagcatgtttactttcaagta

SEQ ID NO: 142572 - DNA, 25 bp, Probe Sequence
agcaatgtcagttttcataaccagg

SEQ ID NO: 142573 - DNA, 25 bp, Probe Sequence
agcaattcattctctctgaacacac

SEQ ID NO: 142574 - DNA, 25 bp, Probe Sequence
agcaagtcatagttctgcccatacc

SEQ ID NO: 142575 - DNA, 25 bp, Probe Sequence
agcaggagatgagcttcctctaccc

SEQ ID NO: 142576 - DNA, 25 bp, Probe Sequence
agcagcggataacttgctgtttctc

SEQ ID NO: 142577 - DNA, 25 bp, Probe Sequence
agcagtgactaatttcatgtttcca

SEQ ID NO: 142578 - DNA, 25 bp, Probe Sequence
agcaaacacaacctctggtcctata

SEQ ID NO: 142579 - DNA, 25 bp, Probe Sequence
agcagaaaaagccctgaactcttgg

SEQ ID NO: 142580 - DNA, 25 bp, Probe Sequence
agcagaaagggccttgaatcctggc

SEQ ID NO: 142581 - DNA, 25 bp, Probe Sequence
agcagaaagggacatccacccagct

SEQ ID NO: 142582 - DNA, 25 bp, Probe Sequence
agcaggaagaatcaagccaccaact

SEQ ID NO: 142583 - DNA, 25 bp, Probe Sequence
agcagtaatgcagcagtaagccgaa

SEQ ID NO: 142584 - DNA, 25 bp, Probe Sequence
agcagtacaaggaccaggccgacaa

SEQ ID NO: 142585 - DNA, 25 bp, Probe Sequence
agcacataaaggtccaggcgcaggt

SEQ ID NO: 142586 - DNA, 25 bp, Probe Sequence
agcaagaacagacccaacagccagc

SEQ ID NO: 142587 - DNA, 25 bp, Probe Sequence
agcagagaacagaatcccagcacca

SEQ ID NO: 142588 - DNA, 25 bp, Probe Sequence
agcacagaataattccacaacagga

SEQ ID NO: 142589 - DNA, 25 bp, Probe Sequence
agcaagatcttatccacagactcca

SEQ ID NO: 142590 - DNA, 25 bp, Probe Sequence
agcggacttaccgccatatgtacct

SEQ ID NO: 142591 - DNA, 25 bp, Probe Sequence
acagggttacgtgcggaatccgcca

SEQ ID NO: 142592 - DNA, 25 bp, Probe Sequence
acgggttacaactggttcattctga

SEQ ID NO: 142593 - DNA, 25 bp, Probe Sequence
acaaggtaagcgtggcgttctttct

SEQ ID NO: 142594 - DNA, 25 bp, Probe Sequence
agcaaactacagcaaggcttatttt

SEQ ID NO: 142595 - DNA, 25 bp, Probe Sequence
agcaacacccaggtagttttgctgt

SEQ ID NO: 142596 - DNA, 25 bp, Probe Sequence
agcaacactctatatttagattgtt

SEQ ID NO: 142597 - DNA, 25 bp, Probe Sequence
agcaaactctagtttatgacaagta

SEQ ID NO: 142598 - DNA, 25 bp, Probe Sequence
agaatcactcctgtgttaccttact

SEQ ID NO: 142599 - DNA, 25 bp, Probe Sequence
agcaccctactggttttgaaaatct

SEQ ID NO: 142600 - DNA, 25 bp, Probe Sequence
agcacccccatctgttaataaatat

SEQ ID NO: 142601 - DNA, 25 bp, Probe Sequence
agcccctcgaggccttaaaaagctg

SEQ ID NO: 142602 - DNA, 25 bp, Probe Sequence
acctgccttgggacttagaacaccg

SEQ ID NO: 142603 - DNA, 25 bp, Probe Sequence
agcctccaatggctttatcctacct

SEQ ID NO: 142604 - DNA, 25 bp, Probe Sequence
agcaccttaaggatgtgatcctact

SEQ ID NO: 142605 - DNA, 25 bp, Probe Sequence
agcagccctataaagagttcagcat

SEQ ID NO: 142606 - DNA, 25 bp, Probe Sequence
agcacaactcttggacatttcagat

SEQ ID NO: 142607 - DNA, 25 bp, Probe Sequence
agcatcgacatcacgagaaggagtg

SEQ ID NO: 142608 - DNA, 25 bp, Probe Sequence
agcactgcctaaaagcaagcagaga

SEQ ID NO: 142609 - DNA, 25 bp, Probe Sequence
agcagctacgaaaaaattgaggata

SEQ ID NO: 142610 - DNA, 25 bp, Probe Sequence
agctgtactaaacacacgattgaat

SEQ ID NO: 142611 - DNA, 25 bp, Probe Sequence
agcagtaactgacaacttgaataat

SEQ ID NO: 142612 - DNA, 25 bp, Probe Sequence
agcactccagttcaactgttaagtt

SEQ ID NO: 142613 - DNA, 25 bp, Probe Sequence
agcacatccctagatactactcaag

SEQ ID NO: 142614 - DNA, 25 bp, Probe Sequence
agcacaacagggtaactgtcatcaa

SEQ ID NO: 142615 - DNA, 25 bp, Probe Sequence
agcacatacaggcttaagctctaag

SEQ ID NO: 142616 - DNA, 25 bp, Probe Sequence
agcacaaatttggtaagtcacatag

SEQ ID NO: 142617 - DNA, 25 bp, Probe Sequence
agcactatttacatacaggccatac

SEQ ID NO: 142618 - DNA, 25 bp, Probe Sequence
agcaccttatctatcacagaccagt

SEQ ID NO: 142619 - DNA, 25 bp, Probe Sequence
agcagtgcccttcatccagggcagt

SEQ ID NO: 142620 - DNA, 25 bp, Probe Sequence
agcgtcccatctttcagttggagga

SEQ ID NO: 142621 - DNA, 25 bp, Probe Sequence
agcgtcccatctttcagttggagga

SEQ ID NO: 142622 - DNA, 25 bp, Probe Sequence
agcttccactctttatttccaaaga

SEQ ID NO: 142623 - DNA, 25 bp, Probe Sequence
agcttttttggaatcttctgctaaa

SEQ ID NO: 142624 - DNA, 25 bp, Probe Sequence
acggtgacttgagtacttttgactt

SEQ ID NO: 142625 - DNA, 25 bp, Probe Sequence
agcagggaatgttgtatctttggag

SEQ ID NO: 142626 - DNA, 25 bp, Probe Sequence
agcaggtgccgttgttctggcacgg

SEQ ID NO: 142627 - DNA, 25 bp, Probe Sequence
agcaggtggctgggattcgttagtg

SEQ ID NO: 142628 - DNA, 25 bp, Probe Sequence
agcagtgtgtcgggaagggatagtg

SEQ ID NO: 142629 - DNA, 25 bp, Probe Sequence
agcaggtgtacttgcctgcgtaagt

SEQ ID NO: 142630 - DNA, 25 bp, Probe Sequence
agcatggtgctggtaacagttcaac

SEQ ID NO: 142631 - DNA, 25 bp, Probe Sequence
agcagggtggtaatattggcattct

SEQ ID NO: 142632 - DNA, 25 bp, Probe Sequence
agcagatgctggatgactttggacc

SEQ ID NO: 142633 - DNA, 25 bp, Probe Sequence
agcacaaggtgcacttcatggtctc

SEQ ID NO: 142634 - DNA, 25 bp, Probe Sequence
agcacataggactctagacggcatc

SEQ ID NO: 142635 - DNA, 25 bp, Probe Sequence
agcagctggggctctagaagtcaga

SEQ ID NO: 142636 - DNA, 25 bp, Probe Sequence
agcactgacccgtctagagcattag

SEQ ID NO: 142637 - DNA, 25 bp, Probe Sequence
agcactatgtctgggttgacctagg

SEQ ID NO: 142638 - DNA, 25 bp, Probe Sequence
agcaggaatcttcttactcatccgc

SEQ ID NO: 142639 - DNA, 25 bp, Probe Sequence
agcaggtatcttctggttgtcacag

SEQ ID NO: 142640 - DNA, 25 bp, Probe Sequence
agcagaaagcctgtgatttggccag

SEQ ID NO: 142641 - DNA, 25 bp, Probe Sequence
agcagttagagcggtcgttggccaa

SEQ ID NO: 142642 - DNA, 25 bp, Probe Sequence
aaattagccgcgtggtggcccacgc

SEQ ID NO: 142643 - DNA, 25 bp, Probe Sequence
accttaccactgtgactgggacggc

SEQ ID NO: 142644 - DNA, 25 bp, Probe Sequence
acgtaccccgacgcggtgaagatct

SEQ ID NO: 142645 - DNA, 25 bp, Probe Sequence
agcagtgaccagtgacgggggaaac

SEQ ID NO: 142646 - DNA, 25 bp, Probe Sequence
agcagatgatgccagaagtccgggg

SEQ ID NO: 142647 - DNA, 25 bp, Probe Sequence
agcattatgccaaaggcccgggggt

SEQ ID NO: 142648 - DNA, 25 bp, Probe Sequence
agcaggatgacacagtctacatggg

SEQ ID NO: 142649 - DNA, 25 bp, Probe Sequence
agcaaatctcacagtctggctggtc

SEQ ID NO: 142650 - DNA, 25 bp, Probe Sequence
agcaaatatcacttttggctgcatt

SEQ ID NO: 142651 - DNA, 25 bp, Probe Sequence
agcaatatgacattcttggtgacag

SEQ ID NO: 142652 - DNA, 25 bp, Probe Sequence
agcaatcacaacactggctgagcgg

SEQ ID NO: 142653 - DNA, 25 bp, Probe Sequence
agcacatcaaaacccacgagctgca

SEQ ID NO: 142654 - DNA, 25 bp, Probe Sequence
agcactaaaagcactctgagtcaag

SEQ ID NO: 142655 - DNA, 25 bp, Probe Sequence
agcactaaaagcactctgaatcaag

SEQ ID NO: 142656 - DNA, 25 bp, Probe Sequence
agcagctgaagcagcccgcatatta

SEQ ID NO: 142657 - DNA, 25 bp, Probe Sequence
agcactttcattgccagtgtctttc

SEQ ID NO: 142658 - DNA, 25 bp, Probe Sequence
agcactttcattgccagtgtctttc

SEQ ID NO: 142659 - DNA, 25 bp, Probe Sequence
agcactttcattgccagtgtctttc

SEQ ID NO: 142660 - DNA, 25 bp, Probe Sequence
agcaattccattactagataggtct

SEQ ID NO: 142661 - DNA, 25 bp, Probe Sequence
agcacaaccactaccagaagcagct

SEQ ID NO: 142662 - DNA, 25 bp, Probe Sequence
agcagcaggccctgctaggaagtgg

SEQ ID NO: 142663 - DNA, 25 bp, Probe Sequence
agcagctgcgacttctgctacgaat

SEQ ID NO: 142664 - DNA, 25 bp, Probe Sequence
agcagcgggcaagtgcgatgcggtc

SEQ ID NO: 142665 - DNA, 25 bp, Probe Sequence
agcacagtggacatgagcatgccag

SEQ ID NO: 142666 - DNA, 25 bp, Probe Sequence
agcaatgcatgtattcacagccgcc

SEQ ID NO: 142667 - DNA, 25 bp, Probe Sequence
agcaactgtgtcgtgagcagctgcc

SEQ ID NO: 142668 - DNA, 25 bp, Probe Sequence
agcaattggtcaaaagtggcttttt

SEQ ID NO: 142669 - DNA, 25 bp, Probe Sequence
agcatgattcccacaaggactaagt

SEQ ID NO: 142670 - DNA, 25 bp, Probe Sequence
agcagtacctgtccaaggatttgac

SEQ ID NO: 142671 - DNA, 25 bp, Probe Sequence
agcacaaccagatcaaagtcttgac

SEQ ID NO: 142672 - DNA, 25 bp, Probe Sequence
agcagcataccatgttacagttccc

SEQ ID NO: 142673 - DNA, 25 bp, Probe Sequence
agcagaagtcatgttccagcttgga

SEQ ID NO: 142674 - DNA, 25 bp, Probe Sequence
agcaaagatttccttcagcaatgaa

SEQ ID NO: 142675 - DNA, 25 bp, Probe Sequence
agcaatgagcatagtgactggcaca

SEQ ID NO: 142676 - DNA, 25 bp, Probe Sequence
agcaattgttgtttgtgcctcctgt

SEQ ID NO: 142677 - DNA, 25 bp, Probe Sequence
agcatcctttatctgtgacttcatg

SEQ ID NO: 142678 - DNA, 25 bp, Probe Sequence
agcacggtaatgtttgcactcatct

SEQ ID NO: 142679 - DNA, 25 bp, Probe Sequence
agcatttccgattttgacatatgtt

SEQ ID NO: 142680 - DNA, 25 bp, Probe Sequence
agcattgaggtttttgagcatagta

SEQ ID NO: 142681 - DNA, 25 bp, Probe Sequence
agcttggtgcggatagtctgactag

SEQ ID NO: 142682 - DNA, 25 bp, Probe Sequence
agcttggtgcggatagtctgactag

SEQ ID NO: 142683 - DNA, 25 bp, Probe Sequence
agcaatggtaaatttgtcgaagcat

SEQ ID NO: 142684 - DNA, 25 bp, Probe Sequence
agcaatttaaattctctggatgagc

SEQ ID NO: 142685 - DNA, 25 bp, Probe Sequence
agcaatttgaaaggcaaggtaggag

SEQ ID NO: 142686 - DNA, 25 bp, Probe Sequence
agcactttaggaagctgaggtggga

SEQ ID NO: 142687 - DNA, 25 bp, Probe Sequence
agcaattcctggactcgggggtatt

SEQ ID NO: 142688 - DNA, 25 bp, Probe Sequence
agaattggcttcatagaggaggtga

SEQ ID NO: 142689 - DNA, 25 bp, Probe Sequence
agaattgtgtaaaaaggaagtgcta

SEQ ID NO: 142690 - DNA, 25 bp, Probe Sequence
agaattgttgcaaagtagtgaatgg

SEQ ID NO: 142691 - DNA, 25 bp, Probe Sequence
agaattgcttgaacccaggaggcgg

SEQ ID NO: 142692 - DNA, 25 bp, Probe Sequence
agaattgatatcccacctggagcag

SEQ ID NO: 142693 - DNA, 25 bp, Probe Sequence
agcaattcaatcacatcactagcac

SEQ ID NO: 142694 - DNA, 25 bp, Probe Sequence
agcacattaagcactctaagagccg

SEQ ID NO: 142695 - DNA, 25 bp, Probe Sequence
agcacataatcagactctccagagt

SEQ ID NO: 142696 - DNA, 25 bp, Probe Sequence
agcataacacaccactgcttttggt

SEQ ID NO: 142697 - DNA, 25 bp, Probe Sequence
agcatgaacatgggcagtgactttg

SEQ ID NO: 142698 - DNA, 25 bp, Probe Sequence
agcaaatgctgagaagacttctggc

SEQ ID NO: 142699 - DNA, 25 bp, Probe Sequence
agcaaagcaatccaagatgcttggc

SEQ ID NO: 142700 - DNA, 25 bp, Probe Sequence
agcaaagacaccgagtttggctacc

SEQ ID NO: 142701 - DNA, 25 bp, Probe Sequence
agcaaagccacaggcacggggctac

SEQ ID NO: 142702 - DNA, 25 bp, Probe Sequence
agcaaagccacaggcacggggctac

SEQ ID NO: 142703 - DNA, 25 bp, Probe Sequence
agcaaactacatggactctgtccct

SEQ ID NO: 142704 - DNA, 25 bp, Probe Sequence
agcaaagtgacttgagcatctgaag

SEQ ID NO: 142705 - DNA, 25 bp, Probe Sequence
agcaaatgtgacactgtctatcagt

SEQ ID NO: 142706 - DNA, 25 bp, Probe Sequence
agcacaatgggctctatcttcatca

SEQ ID NO: 142707 - DNA, 25 bp, Probe Sequence
agcaagatccggcctgatcattcct

SEQ ID NO: 142708 - DNA, 25 bp, Probe Sequence
agcacagtgactgtcagcagattcc

SEQ ID NO: 142709 - DNA, 25 bp, Probe Sequence
agcacgtgaggatccgatcccagtt

SEQ ID NO: 142710 - DNA, 25 bp, Probe Sequence
agcactttgagaggccgaggcgggt

SEQ ID NO: 142711 - DNA, 25 bp, Probe Sequence
agcatagttaaggggtgggtcagaa

SEQ ID NO: 142712 - DNA, 25 bp, Probe Sequence
agcagaagtaggcgtatgggataac

SEQ ID NO: 142713 - DNA, 25 bp, Probe Sequence
agcgaatctctaggagtaggcttaa

SEQ ID NO: 142714 - DNA, 25 bp, Probe Sequence
agcagaagcatctgggctaggcctc

SEQ ID NO: 142715 - DNA, 25 bp, Probe Sequence
agcacacagatgcggttcatggcct

SEQ ID NO: 142716 - DNA, 25 bp, Probe Sequence
agcaccagaggaagagtctgcctat

SEQ ID NO: 142717 - DNA, 25 bp, Probe Sequence
agcaccaacagcttcagttactcat

SEQ ID NO: 142718 - DNA, 25 bp, Probe Sequence
agcacctatcccaagtgtgatcctt

SEQ ID NO: 142719 - DNA, 25 bp, Probe Sequence
agcaacttgcctaagattatccagt

SEQ ID NO: 142720 - DNA, 25 bp, Probe Sequence
agcacatttgttaatgattcttgtg

SEQ ID NO: 142721 - DNA, 25 bp, Probe Sequence
agcacatgttttgcatattatatgt

SEQ ID NO: 142722 - DNA, 25 bp, Probe Sequence
agcacaggttgtggattaatcttta

SEQ ID NO: 142723 - DNA, 25 bp, Probe Sequence
agcacaggtttctctagtagattag

SEQ ID NO: 142724 - DNA, 25 bp, Probe Sequence
agcatctggattctgcctaataaaa

SEQ ID NO: 142725 - DNA, 25 bp, Probe Sequence
agcactgggatgggcctgatagaag

SEQ ID NO: 142726 - DNA, 25 bp, Probe Sequence
agcaaggttaggcctgcaactgagc

SEQ ID NO: 142727 - DNA, 25 bp, Probe Sequence
agcatttgttgaccgccaactgaca

SEQ ID NO: 142728 - DNA, 25 bp, Probe Sequence
agcacattgtactggcctgtgctga

SEQ ID NO: 142729 - DNA, 25 bp, Probe Sequence
agcacatcgtacactggattgcagt

SEQ ID NO: 142730 - DNA, 25 bp, Probe Sequence
agcacatcgccgaccaggtgaggtc

SEQ ID NO: 142731 - DNA, 25 bp, Probe Sequence
agcagatgcccgtcatcatggtcat

SEQ ID NO: 142732 - DNA, 25 bp, Probe Sequence
agcaggcatcgcaactttctgcatg

SEQ ID NO: 142733 - DNA, 25 bp, Probe Sequence
agcagcagctacaacatggtcatcc

SEQ ID NO: 142734 - DNA, 25 bp, Probe Sequence
agcagcagctacaacatggtcatcc

SEQ ID NO: 142735 - DNA, 25 bp, Probe Sequence
agcagcagccaaagaagtcaggaca

SEQ ID NO: 142736 - DNA, 25 bp, Probe Sequence
agcacagctggttgaagaatgggca

SEQ ID NO: 142737 - DNA, 25 bp, Probe Sequence
agcacagaggcaagaagcgaaggca

SEQ ID NO: 142738 - DNA, 25 bp, Probe Sequence
agcaaggaattgtctcccagtgcat

SEQ ID NO: 142739 - DNA, 25 bp, Probe Sequence
agcaggcacatagtgagcccgggca

SEQ ID NO: 142740 - DNA, 25 bp, Probe Sequence
agcacgtgaagtcccaggggcataa

SEQ ID NO: 142741 - DNA, 25 bp, Probe Sequence
agcacaggaagctgcacagtgggat

SEQ ID NO: 142742 - DNA, 25 bp, Probe Sequence
agcacagtagagttgatcattaaat

SEQ ID NO: 142743 - DNA, 25 bp, Probe Sequence
agcattggcactttgatcttgaaat

SEQ ID NO: 142744 - DNA, 25 bp, Probe Sequence
agcatttacttttttgaccacgagc

SEQ ID NO: 142745 - DNA, 25 bp, Probe Sequence
agcattgaactagatgtcgtccccg

SEQ ID NO: 142746 - DNA, 25 bp, Probe Sequence
agcaggaacccattatcctgccagc

SEQ ID NO: 142747 - DNA, 25 bp, Probe Sequence
agcaggaaaccatggttctcagaaa

SEQ ID NO: 142748 - DNA, 25 bp, Probe Sequence
agcaggaacttctgtgtatatctga

SEQ ID NO: 142749 - DNA, 25 bp, Probe Sequence
agcacgtagtttatgttcctgaggc

SEQ ID NO: 142750 - DNA, 25 bp, Probe Sequence
agcaccctttctttgtacagtgggg

SEQ ID NO: 142751 - DNA, 25 bp, Probe Sequence
agcattcctagtcgttgcttcagtg

SEQ ID NO: 142752 - DNA, 25 bp, Probe Sequence
agcagatcctcatgtgttgaccctg

SEQ ID NO: 142753 - DNA, 25 bp, Probe Sequence
agcaaccatgacctgaaacctcagc

SEQ ID NO: 142754 - DNA, 25 bp, Probe Sequence
agcagttgaatcctggaacccagtg

SEQ ID NO: 142755 - DNA, 25 bp, Probe Sequence
agcaggtgatactggataacacaga

SEQ ID NO: 142756 - DNA, 25 bp, Probe Sequence
agcagcggctaggggagatccagca

SEQ ID NO: 142757 - DNA, 25 bp, Probe Sequence
agctgggcaaggtgttgtctgactt

SEQ ID NO: 142758 - DNA, 25 bp, Probe Sequence
agctgggaaaattgttgtgaacctc

SEQ ID NO: 142759 - DNA, 25 bp, Probe Sequence
agcagggaaccttctggtggacgtc

SEQ ID NO: 142760 - DNA, 25 bp, Probe Sequence
agcagggaataccacggcccctgca

SEQ ID NO: 142761 - DNA, 25 bp, Probe Sequence
agcaggtaatacccgagactctcct

SEQ ID NO: 142762 - DNA, 25 bp, Probe Sequence
agcggataatatgtaggcactttgt

SEQ ID NO: 142763 - DNA, 25 bp, Probe Sequence
agctggaccaaggctaacctttcta

SEQ ID NO: 142764 - DNA, 25 bp, Probe Sequence
agcaaacacaggtctaatctctttt

SEQ ID NO: 142765 - DNA, 25 bp, Probe Sequence
agcacaagtcggttaatccctgtct

SEQ ID NO: 142766 - DNA, 25 bp, Probe Sequence
agcacaaggcagtgtagatccaggt

SEQ ID NO: 142767 - DNA, 25 bp, Probe Sequence
agcacacaggctttagagtcaaagt

SEQ ID NO: 142768 - DNA, 25 bp, Probe Sequence
agcaactcgctttaggtcagcagcc

SEQ ID NO: 142769 - DNA, 25 bp, Probe Sequence
agcaggttcttgttggtgcacagca

SEQ ID NO: 142770 - DNA, 25 bp, Probe Sequence
agcaagtctcttgataaccgaaaca

SEQ ID NO: 142771 - DNA, 25 bp, Probe Sequence
agcaagttccagtaaaccacaagta

SEQ ID NO: 142772 - DNA, 25 bp, Probe Sequence
agcagtttccacaagcaagccaggg

SEQ ID NO: 142773 - DNA, 25 bp, Probe Sequence
agcagctttgtcgtcatgtagcaca

SEQ ID NO: 142774 - DNA, 25 bp, Probe Sequence
agcagtgtctgtgttttgaaagaat

SEQ ID NO: 142775 - DNA, 25 bp, Probe Sequence
agcagcgttgctgtaaccgacaaag

SEQ ID NO: 142776 - DNA, 25 bp, Probe Sequence
agcatgagtggtggctaacctgacc

SEQ ID NO: 142777 - DNA, 25 bp, Probe Sequence
agcatgagtggtggctaacctgacc

SEQ ID NO: 142778 - DNA, 25 bp, Probe Sequence
agcttgagtttgaacgccatgaccc

SEQ ID NO: 142779 - DNA, 25 bp, Probe Sequence
agctagcatgtttatttctaggcct

SEQ ID NO: 142780 - DNA, 25 bp, Probe Sequence
agcacggtttttcctcatgtgactt

SEQ ID NO: 142781 - DNA, 25 bp, Probe Sequence
agcacggtttttcctcatgtgactt

SEQ ID NO: 142782 - DNA, 25 bp, Probe Sequence
agcagggtgttaagcctctgtctct

SEQ ID NO: 142783 - DNA, 25 bp, Probe Sequence
agcaggtgccttattctttgctttt

SEQ ID NO: 142784 - DNA, 25 bp, Probe Sequence
agcagtatttttgacatttttcttt

SEQ ID NO: 142785 - DNA, 25 bp, Probe Sequence
agcacttgttatttcctgtttcttg

SEQ ID NO: 142786 - DNA, 25 bp, Probe Sequence
agctgctttatgatctgcgttacct

SEQ ID NO: 142787 - DNA, 25 bp, Probe Sequence
agcactccataaattctattaccta

SEQ ID NO: 142788 - DNA, 25 bp, Probe Sequence
agcattctttttttcctatcgctaa

SEQ ID NO: 142789 - DNA, 25 bp, Probe Sequence
agcaactttctatttagctgtcact

SEQ ID NO: 142790 - DNA, 25 bp, Probe Sequence
agcacctgcttttgtttctgtgaga

SEQ ID NO: 142791 - DNA, 25 bp, Probe Sequence
agcacacgcaattcctactggtgaa

SEQ ID NO: 142792 - DNA, 25 bp, Probe Sequence
agcacaccagacaccacatggtaca

SEQ ID NO: 142793 - DNA, 25 bp, Probe Sequence
agcacctagattacagccaggaaca

SEQ ID NO: 142794 - DNA, 25 bp, Probe Sequence
agcacctagataccagcacaagtcg

SEQ ID NO: 142795 - DNA, 25 bp, Probe Sequence
agcactctttgcacagatgggtcag

SEQ ID NO: 142796 - DNA, 25 bp, Probe Sequence
agcacttgttccgggatggtgtggt

SEQ ID NO: 142797 - DNA, 25 bp, Probe Sequence
agcagttttgccgacggatggggca

SEQ ID NO: 142798 - DNA, 25 bp, Probe Sequence
agctgtatttgttcaaggatgggaa

SEQ ID NO: 142799 - DNA, 25 bp, Probe Sequence
agcagtcttttagacaatggtaaga

SEQ ID NO: 142800 - DNA, 25 bp, Probe Sequence
agcagcttttaatacagggtagata

SEQ ID NO: 142801 - DNA, 25 bp, Probe Sequence
agcacttttagatcctttgtgagca

SEQ ID NO: 142802 - DNA, 25 bp, Probe Sequence
agcactttatacacttctggctcac

SEQ ID NO: 142803 - DNA, 25 bp, Probe Sequence
agcactttatacacttctggctcac

SEQ ID NO: 142804 - DNA, 25 bp, Probe Sequence
agcatatgtaaagttttcttggcct

SEQ ID NO: 142805 - DNA, 25 bp, Probe Sequence
agcaaataaagctacatccttccct

SEQ ID NO: 142806 - DNA, 25 bp, Probe Sequence
agcactcaaagataacctgatcatc

SEQ ID NO: 142807 - DNA, 25 bp, Probe Sequence
agcactcaaagacgtaccactttcc

SEQ ID NO: 142808 - DNA, 25 bp, Probe Sequence
agcactgaagaactgtcagctcagc

SEQ ID NO: 142809 - DNA, 25 bp, Probe Sequence
agcacatatataacgtctctctcct

SEQ ID NO: 142810 - DNA, 25 bp, Probe Sequence
agcttatttgaagtcctgcctcatt

SEQ ID NO: 142811 - DNA, 25 bp, Probe Sequence
agcatttcttaagtgcctatctaaa

SEQ ID NO: 142812 - DNA, 25 bp, Probe Sequence
agcactagttattcatgccatagta

SEQ ID NO: 142813 - DNA, 25 bp, Probe Sequence
agctcgacgtcattcagcttcacgg

SEQ ID NO: 142814 - DNA, 25 bp, Probe Sequence
agcacagaatgttatccttacgtcc

SEQ ID NO: 142815 - DNA, 25 bp, Probe Sequence
agcacaacatgatagctttgtcggc

SEQ ID NO: 142816 - DNA, 25 bp, Probe Sequence
agcacaattctattgctttgtcttg

SEQ ID NO: 142817 - DNA, 25 bp, Probe Sequence
agcagccatttgatgtttctgcatt

SEQ ID NO: 142818 - DNA, 25 bp, Probe Sequence
agcaggcgtgagatgctttccttta

SEQ ID NO: 142819 - DNA, 25 bp, Probe Sequence
agcagcgtgatgttacttatctctt

SEQ ID NO: 142820 - DNA, 25 bp, Probe Sequence
agcagagctgagtaaaacttcagtt

SEQ ID NO: 142821 - DNA, 25 bp, Probe Sequence
agcacagtagtgaaaacctatattg

SEQ ID NO: 142822 - DNA, 25 bp, Probe Sequence
agcacactaggtggtatgcctttat

SEQ ID NO: 142823 - DNA, 25 bp, Probe Sequence
agctactgatggcagcctggctttc

SEQ ID NO: 142824 - DNA, 25 bp, Probe Sequence
agcagcagctaacagctctgtgatt

SEQ ID NO: 142825 - DNA, 25 bp, Probe Sequence
agcactgtaagaagctgtccagctg

SEQ ID NO: 142826 - DNA, 25 bp, Probe Sequence
agcactgtaagaagctgtccagctg

SEQ ID NO: 142827 - DNA, 25 bp, Probe Sequence
agcacaggactgaacacatccctgg

SEQ ID NO: 142828 - DNA, 25 bp, Probe Sequence
agcacggactgtcagttctctggga

SEQ ID NO: 142829 - DNA, 25 bp, Probe Sequence
agcatcaggacggggttgccctgtg

SEQ ID NO: 142830 - DNA, 25 bp, Probe Sequence
agcatcaggccatttggggcctgct

SEQ ID NO: 142831 - DNA, 25 bp, Probe Sequence
agcatcgaggctataggacgcagct

SEQ ID NO: 142832 - DNA, 25 bp, Probe Sequence
agcatcaatactcctagggctcagg

SEQ ID NO: 142833 - DNA, 25 bp, Probe Sequence
agcacgaacttccaggagccggtgc

SEQ ID NO: 142834 - DNA, 25 bp, Probe Sequence
agcacgaatctcacgggctgtgcgt

SEQ ID NO: 142835 - DNA, 25 bp, Probe Sequence
agcaggaaatccctggggctggttc

SEQ ID NO: 142836 - DNA, 25 bp, Probe Sequence
agcacgaggtggctgtgctgggggg

SEQ ID NO: 142837 - DNA, 25 bp, Probe Sequence
agcacgacgagccgtgctactggcg

SEQ ID NO: 142838 - DNA, 25 bp, Probe Sequence
agctcaacatgaactctgctcctac

SEQ ID NO: 142839 - DNA, 25 bp, Probe Sequence
agctcaacatgaactctgctcctac

SEQ ID NO: 142840 - DNA, 25 bp, Probe Sequence
agcacaaagagcttgctccctacga

SEQ ID NO: 142841 - DNA, 25 bp, Probe Sequence
agcacaaagagcttgctccctacga

SEQ ID NO: 142842 - DNA, 25 bp, Probe Sequence
agcacagggagaggtccacagacaa

SEQ ID NO: 142843 - DNA, 25 bp, Probe Sequence
agcacagcctgaggggtacagcaaa

SEQ ID NO: 142844 - DNA, 25 bp, Probe Sequence
agcacccagacgagtggctcagaga

SEQ ID NO: 142845 - DNA, 25 bp, Probe Sequence
agcacctggacaatgttgaccaaac

SEQ ID NO: 142846 - DNA, 25 bp, Probe Sequence
agcagcctgcagctggattacgcaa

SEQ ID NO: 142847 - DNA, 25 bp, Probe Sequence
agcacttcagcaccgaggatggcat

SEQ ID NO: 142848 - DNA, 25 bp, Probe Sequence
agcatgcattccaggcaggagacac

SEQ ID NO: 142849 - DNA, 25 bp, Probe Sequence
agcatgaacagctgacattgagaaa

SEQ ID NO: 142850 - DNA, 25 bp, Probe Sequence
agcatggtagcacctcctaacagat

SEQ ID NO: 142851 - DNA, 25 bp, Probe Sequence
agcgttaccctcaatagctatgtcc

SEQ ID NO: 142852 - DNA, 25 bp, Probe Sequence
agctttcagaccatacagtattcat

SEQ ID NO: 142853 - DNA, 25 bp, Probe Sequence
agcattttaccgtacaaatatcctg

SEQ ID NO: 142854 - DNA, 25 bp, Probe Sequence
agcattttcccagatggtacaattg

SEQ ID NO: 142855 - DNA, 25 bp, Probe Sequence
agcactttctccagtgccagcaaag

SEQ ID NO: 142856 - DNA, 25 bp, Probe Sequence
agcacatttgggagctggagaacag

SEQ ID NO: 142857 - DNA, 25 bp, Probe Sequence
agcactttgggaggctgacgcaggc

SEQ ID NO: 142858 - DNA, 25 bp, Probe Sequence
agcactttgggaggctgaggcgggt

SEQ ID NO: 142859 - DNA, 25 bp, Probe Sequence
agcactttgggaggctgaggcgggt

SEQ ID NO: 142860 - DNA, 25 bp, Probe Sequence
agcactttcggaggctgaggcggga

SEQ ID NO: 142861 - DNA, 25 bp, Probe Sequence
agcactttgggaggctgaagcggga

SEQ ID NO: 142862 - DNA, 25 bp, Probe Sequence
agcactttgggagtgccaaggcagg

SEQ ID NO: 142863 - DNA, 25 bp, Probe Sequence
agcacctctcaggagagccacaggt

SEQ ID NO: 142864 - DNA, 25 bp, Probe Sequence
agcaccgagctggagactggcagtg

SEQ ID NO: 142865 - DNA, 25 bp, Probe Sequence
agcaccgagctggagactggcagtg

SEQ ID NO: 142866 - DNA, 25 bp, Probe Sequence
agcatccgtggcgtgatgctggccg

SEQ ID NO: 142867 - DNA, 25 bp, Probe Sequence
agctctacaagcagatcggcatcga

SEQ ID NO: 142868 - DNA, 25 bp, Probe Sequence
agcagttttgatatcttctcagatg

SEQ ID NO: 142869 - DNA, 25 bp, Probe Sequence
agcacctgttgtatgtcacatgcct

SEQ ID NO: 142870 - DNA, 25 bp, Probe Sequence
agcactttgttgacttccatggtgt

SEQ ID NO: 142871 - DNA, 25 bp, Probe Sequence
agcactgtctgttgtctttatagga

SEQ ID NO: 142872 - DNA, 25 bp, Probe Sequence
agcacttcatgtctctatcttgctg

SEQ ID NO: 142873 - DNA, 25 bp, Probe Sequence
agcaaatagcgattctcttcatgta

SEQ ID NO: 142874 - DNA, 25 bp, Probe Sequence
agcacagatttctatgcacctttac

SEQ ID NO: 142875 - DNA, 25 bp, Probe Sequence
agcacattctgcttcagaactttat

SEQ ID NO: 142876 - DNA, 25 bp, Probe Sequence
agcagactctcatcatgcaaattag

SEQ ID NO: 142877 - DNA, 25 bp, Probe Sequence
agcgacactcattcattgaagaagt

SEQ ID NO: 142878 - DNA, 25 bp, Probe Sequence
agcgaacatttcatgaaatcagtta

SEQ ID NO: 142879 - DNA, 25 bp, Probe Sequence
agcagccaccctgtgataattgtta

SEQ ID NO: 142880 - DNA, 25 bp, Probe Sequence
agcactcacttccaaaagattgttg

SEQ ID NO: 142881 - DNA, 25 bp, Probe Sequence
agcttccttctgaaaaggcgatctt

SEQ ID NO: 142882 - DNA, 25 bp, Probe Sequence
agcagcctcttaataaaagtacttt

SEQ ID NO: 142883 - DNA, 25 bp, Probe Sequence
agcaccacctttgagaagtctctgt

SEQ ID NO: 142884 - DNA, 25 bp, Probe Sequence
agcacagcatacttaaagtagttct

SEQ ID NO: 142885 - DNA, 25 bp, Probe Sequence
agcagccagccttaaagtagtccat

SEQ ID NO: 142886 - DNA, 25 bp, Probe Sequence
agcactcctttaaagtgggcactgc

SEQ ID NO: 142887 - DNA, 25 bp, Probe Sequence
agcacttctgttttcgtgaatttgc

SEQ ID NO: 142888 - DNA, 25 bp, Probe Sequence
agcactacagttgtcaagaatgcat

SEQ ID NO: 142889 - DNA, 25 bp, Probe Sequence
agcacttagcttgttcagatctctg

SEQ ID NO: 142890 - DNA, 25 bp, Probe Sequence
agcagcattagtggtttgagtgtct

SEQ ID NO: 142891 - DNA, 25 bp, Probe Sequence
agcagtctggtccatgttggtctca

SEQ ID NO: 142892 - DNA, 25 bp, Probe Sequence
agcactctagcttgcatgggtgttg

SEQ ID NO: 142893 - DNA, 25 bp, Probe Sequence
agcagctccatttctggagtctggg

SEQ ID NO: 142894 - DNA, 25 bp, Probe Sequence
agcagctccatttctggagtctggg

SEQ ID NO: 142895 - DNA, 25 bp, Probe Sequence
agcaaatattcactggcacctggtg

SEQ ID NO: 142896 - DNA, 25 bp, Probe Sequence
agcaaatcagtgcatggacccctct

SEQ ID NO: 142897 - DNA, 25 bp, Probe Sequence
agcacaagaagcgtgagacgccacc

SEQ ID NO: 142898 - DNA, 25 bp, Probe Sequence
agcactatgtggggaacgccactgc

SEQ ID NO: 142899 - DNA, 25 bp, Probe Sequence
agcactgattgcacgaacagcaaaa

SEQ ID NO: 142900 - DNA, 25 bp, Probe Sequence
agcagctttctgtctggaacattaa

SEQ ID NO: 142901 - DNA, 25 bp, Probe Sequence
agcaccttcttttgagacattagcc

SEQ ID NO: 142902 - DNA, 25 bp, Probe Sequence
agcactcttatgttagttcttcacc

SEQ ID NO: 142903 - DNA, 25 bp, Probe Sequence
agcacattcttggtactcatgtctc

SEQ ID NO: 142904 - DNA, 25 bp, Probe Sequence
agcacattttggaagggctccctta

SEQ ID NO: 142905 - DNA, 25 bp, Probe Sequence
agcagcaacttgcaagggcggcctt

SEQ ID NO: 142906 - DNA, 25 bp, Probe Sequence
agcagaacatcgctgggacgtgcct

SEQ ID NO: 142907 - DNA, 25 bp, Probe Sequence
agcacagcgacggtgggaagatgcc

SEQ ID NO: 142908 - DNA, 25 bp, Probe Sequence
agcacaggacgagaggatcctgccc

SEQ ID NO: 142909 - DNA, 25 bp, Probe Sequence
agcacagccaaaatcggacctcagc

SEQ ID NO: 142910 - DNA, 25 bp, Probe Sequence
agcagagtcatagttgggcacccag

SEQ ID NO: 142911 - DNA, 25 bp, Probe Sequence
agcagcggtatgttgggccagagca

SEQ ID NO: 142912 - DNA, 25 bp, Probe Sequence
agcagcggtcattcaagacacagat

SEQ ID NO: 142913 - DNA, 25 bp, Probe Sequence
agcagcggtcattcaagacacagat

SEQ ID NO: 142914 - DNA, 25 bp, Probe Sequence
agcagagagtgaaaatagcatatga

SEQ ID NO: 142915 - DNA, 25 bp, Probe Sequence
agcagctcagtgtgattacagtgca

SEQ ID NO: 142916 - DNA, 25 bp, Probe Sequence
agcagctctgtctgattgaggcgca

SEQ ID NO: 142917 - DNA, 25 bp, Probe Sequence
agcagctctataacatctacgccaa

SEQ ID NO: 142918 - DNA, 25 bp, Probe Sequence
agcagtaatatgtctgctcagcagc

SEQ ID NO: 142919 - DNA, 25 bp, Probe Sequence
agcagtgaagattagctgggcttat

SEQ ID NO: 142920 - DNA, 25 bp, Probe Sequence
agcagtgataagtttgggttaccat

SEQ ID NO: 142921 - DNA, 25 bp, Probe Sequence
agcaggtgggccgttgagttacctc

SEQ ID NO: 142922 - DNA, 25 bp, Probe Sequence
agcatggtttttgtcagttcacctc

SEQ ID NO: 142923 - DNA, 25 bp, Probe Sequence
actgtcgtttaccacagtttccatt

SEQ ID NO: 142924 - DNA, 25 bp, Probe Sequence
accggattgagaacaggtttccaga

SEQ ID NO: 142925 - DNA, 25 bp, Probe Sequence
agctgttattggatgggccattccg

SEQ ID NO: 142926 - DNA, 25 bp, Probe Sequence
agcttttgcatgcttaaggattcca

SEQ ID NO: 142927 - DNA, 25 bp, Probe Sequence
agcttttgcagccaaaacttcctct

SEQ ID NO: 142928 - DNA, 25 bp, Probe Sequence
actttatgagggagaccccgacaga

SEQ ID NO: 142929 - DNA, 25 bp, Probe Sequence
agcttgttggggagttcctggaagt

SEQ ID NO: 142930 - DNA, 25 bp, Probe Sequence
agctcatcttggggtggtacgctgc

SEQ ID NO: 142931 - DNA, 25 bp, Probe Sequence
agcatttctgtggtgggaaccccag

SEQ ID NO: 142932 - DNA, 25 bp, Probe Sequence
agctgtgactggaataaacccccgc

SEQ ID NO: 142933 - DNA, 25 bp, Probe Sequence
agcttgtctcgcagaaacccaaact

SEQ ID NO: 142934 - DNA, 25 bp, Probe Sequence
agcactgtgtggctgaataagcggt

SEQ ID NO: 142935 - DNA, 25 bp, Probe Sequence
agcagcaggtctccgaagaaggttc

SEQ ID NO: 142936 - DNA, 25 bp, Probe Sequence
agcacagcagccatctgaagagcaa

SEQ ID NO: 142937 - DNA, 25 bp, Probe Sequence
agcacagcagccatctgaagagcaa

SEQ ID NO: 142938 - DNA, 25 bp, Probe Sequence
agcagagcatctcctcttaaggata

SEQ ID NO: 142939 - DNA, 25 bp, Probe Sequence
agcagagctgcatccagtggaacta

SEQ ID NO: 142940 - DNA, 25 bp, Probe Sequence
agcaggctccctgagtgatgagctt

SEQ ID NO: 142941 - DNA, 25 bp, Probe Sequence
agcagagctcgtttagtgaaccgtc

SEQ ID NO: 142942 - DNA, 25 bp, Probe Sequence
agcagagctcgtttagtgaaccgtc

SEQ ID NO: 142943 - DNA, 25 bp, Probe Sequence
agcagagctcgtttagtgaaccgtc

SEQ ID NO: 142944 - DNA, 25 bp, Probe Sequence
agcagagctcgtttagtgaaccgtc

SEQ ID NO: 142945 - DNA, 25 bp, Probe Sequence
agcagagctcgtttagtgaaccgtc

SEQ ID NO: 142946 - DNA, 25 bp, Probe Sequence
agcagagctcgtttagtgaaccgtc

SEQ ID NO: 142947 - DNA, 25 bp, Probe Sequence
agcagagctcgtttagtgaaccgtc

SEQ ID NO: 142948 - DNA, 25 bp, Probe Sequence
agcagagctcgtttagtgaaccgtc

SEQ ID NO: 142949 - DNA, 25 bp, Probe Sequence
agcagagctcgtttagtgaaccgtc

SEQ ID NO: 142950 - DNA, 25 bp, Probe Sequence
agcagagctcgtttagtgaaccgtc

SEQ ID NO: 142951 - DNA, 25 bp, Probe Sequence
agcagagctcgtttagtgaaccgtc

SEQ ID NO: 142952 - DNA, 25 bp, Probe Sequence
agcagagctcgtttagtgaaccgtc

SEQ ID NO: 142953 - DNA, 25 bp, Probe Sequence
agcagagctcgtttagtgaaccgtc

SEQ ID NO: 142954 - DNA, 25 bp, Probe Sequence
agcagagctcgtttagtgaaccgtc

SEQ ID NO: 142955 - DNA, 25 bp, Probe Sequence
agcagagctcgtttagtgaaccgtc

SEQ ID NO: 142956 - DNA, 25 bp, Probe Sequence
agcagagctcgtttagtgaaccgtc

SEQ ID NO: 142957 - DNA, 25 bp, Probe Sequence
agcagagctcgtttagtgaaccgtc

SEQ ID NO: 142958 - DNA, 25 bp, Probe Sequence
agcagagctcgtttagtgaaccgtc

SEQ ID NO: 142959 - DNA, 25 bp, Probe Sequence
agcagagctcgtttagtgaaccgtc

SEQ ID NO: 142960 - DNA, 25 bp, Probe Sequence
agcagagctcgtttagtgaaccgtc

SEQ ID NO: 142961 - DNA, 25 bp, Probe Sequence
agcagagctcgtttagtgaaccgtc

SEQ ID NO: 142962 - DNA, 25 bp, Probe Sequence
agcagagctcgtttagtgaaccgtc

SEQ ID NO: 142963 - DNA, 25 bp, Probe Sequence
agcagagctcgtttagtgaaccgtc

SEQ ID NO: 142964 - DNA, 25 bp, Probe Sequence
agcagagctcgtttagtgaaccgtc

SEQ ID NO: 142965 - DNA, 25 bp, Probe Sequence
agcaggcggctattggtaaacgctg

SEQ ID NO: 142966 - DNA, 25 bp, Probe Sequence
agcagctgcggacagagctactacc

SEQ ID NO: 142967 - DNA, 25 bp, Probe Sequence
agcagcatgagcgagaatggctacg

SEQ ID NO: 142968 - DNA, 25 bp, Probe Sequence
agcagctacagacctggctcaagct

SEQ ID NO: 142969 - DNA, 25 bp, Probe Sequence
agcagcataagagaagccaatcatt

SEQ ID NO: 142970 - DNA, 25 bp, Probe Sequence
agcagccatactgatgaccacagca

SEQ ID NO: 142971 - DNA, 25 bp, Probe Sequence
agcacgcaacgtagatgcatcacac

SEQ ID NO: 142972 - DNA, 25 bp, Probe Sequence
agcactatatcgagtacatacaggt

SEQ ID NO: 142973 - DNA, 25 bp, Probe Sequence
agcacttactctaggcagatcaagc

SEQ ID NO: 142974 - DNA, 25 bp, Probe Sequence
agcactagactcagggtcagccagc

SEQ ID NO: 142975 - DNA, 25 bp, Probe Sequence
agcagtaaactgagagtagagtgct

SEQ ID NO: 142976 - DNA, 25 bp, Probe Sequence
agcattaaacagcctcattaaatgt

SEQ ID NO: 142977 - DNA, 25 bp, Probe Sequence
agcactacaggcccatgaattactt

SEQ ID NO: 142978 - DNA, 25 bp, Probe Sequence
agcagtacttggcctgtatataatg

SEQ ID NO: 142979 - DNA, 25 bp, Probe Sequence
agcagtttgaagcccaatctgcaag

SEQ ID NO: 142980 - DNA, 25 bp, Probe Sequence
agcagatattgatggtgatggtcaa

SEQ ID NO: 142981 - DNA, 25 bp, Probe Sequence
agctattctggaggcgttgtcaata

SEQ ID NO: 142982 - DNA, 25 bp, Probe Sequence
agctaatgtcatgtctgtgtgtcat

SEQ ID NO: 142983 - DNA, 25 bp, Probe Sequence
agcacttctagaacatggtgatttc

SEQ ID NO: 142984 - DNA, 25 bp, Probe Sequence
agcagccctctgagatggcgtatct

SEQ ID NO: 142985 - DNA, 25 bp, Probe Sequence
agcagtccatggagatgccagttac

SEQ ID NO: 142986 - DNA, 25 bp, Probe Sequence
agcagattcagtagcagatgccgtt

SEQ ID NO: 142987 - DNA, 25 bp, Probe Sequence
agcagattcagtagcagatgccgtt

SEQ ID NO: 142988 - DNA, 25 bp, Probe Sequence
agcagactggctagggaccttgggc

SEQ ID NO: 142989 - DNA, 25 bp, Probe Sequence
agcatacccagggtggcctttagca

SEQ ID NO: 142990 - DNA, 25 bp, Probe Sequence
agcaccatcctggaaggttattacc

SEQ ID NO: 142991 - DNA, 25 bp, Probe Sequence
agcagtcataacgaagtgtaactac

SEQ ID NO: 142992 - DNA, 25 bp, Probe Sequence
agcagtctattggccagtttaaaca

SEQ ID NO: 142993 - DNA, 25 bp, Probe Sequence
agcagttgcattgtactttgaagat

SEQ ID NO: 142994 - DNA, 25 bp, Probe Sequence
agcagttgcattgtactttgaagat

SEQ ID NO: 142995 - DNA, 25 bp, Probe Sequence
agcagcattgctggaggactggtga

SEQ ID NO: 142996 - DNA, 25 bp, Probe Sequence
agcatgttgctgaggagtgaggaat

SEQ ID NO: 142997 - DNA, 25 bp, Probe Sequence
agcagctagcttttggggagaataa

SEQ ID NO: 142998 - DNA, 25 bp, Probe Sequence
agcacctggtttcggggacagtagg

SEQ ID NO: 142999 - DNA, 25 bp, Probe Sequence
agcccatggatttcttcgtagcagt

SEQ ID NO: 143000 - DNA, 25 bp, Probe Sequence
agcccacgtttcatagccaggaaac

SEQ ID NO: 143001 - DNA, 25 bp, Probe Sequence
agctccacgaagactcaaaaggaaa

SEQ ID NO: 143002 - DNA, 25 bp, Probe Sequence
agcacgcagcaatgcagctcaaaac

SEQ ID NO: 143003 - DNA, 25 bp, Probe Sequence
agcacgatgccccctaaaaagggag

SEQ ID NO: 143004 - DNA, 25 bp, Probe Sequence
agcactgatgtcccactggagaact

SEQ ID NO: 143005 - DNA, 25 bp, Probe Sequence
agcactgatgtcccactggagaact

SEQ ID NO: 143006 - DNA, 25 bp, Probe Sequence
agcactttcaagcctggacaacatt

SEQ ID NO: 143007 - DNA, 25 bp, Probe Sequence
agcagcatattcaaatgtggatttt

SEQ ID NO: 143008 - DNA, 25 bp, Probe Sequence
agcagatttctgcattggttttcca

SEQ ID NO: 143009 - DNA, 25 bp, Probe Sequence
agcgagtacctatggtatgttctct

SEQ ID NO: 143010 - DNA, 25 bp, Probe Sequence
agctttacctatggtgctttgcctt

SEQ ID NO: 143011 - DNA, 25 bp, Probe Sequence
agcatgttaccaaggctttttgtct

SEQ ID NO: 143012 - DNA, 25 bp, Probe Sequence
agcttttaccaggcattctctagcc

SEQ ID NO: 143013 - DNA, 25 bp, Probe Sequence
agcttttagccgggtctgcaaggat

SEQ ID NO: 143014 - DNA, 25 bp, Probe Sequence
agctttccatgcctaggttctaggg

SEQ ID NO: 143015 - DNA, 25 bp, Probe Sequence
agcagattctctcctagtttggctg

SEQ ID NO: 143016 - DNA, 25 bp, Probe Sequence
agcagactggctgaagctttgccca

SEQ ID NO: 143017 - DNA, 25 bp, Probe Sequence
agcatatctgtggcaaactattttc

SEQ ID NO: 143018 - DNA, 25 bp, Probe Sequence
agcagcaatgctaaacctctgtttc

SEQ ID NO: 143019 - DNA, 25 bp, Probe Sequence
agcactttgatatgcctcatgatat

SEQ ID NO: 143020 - DNA, 25 bp, Probe Sequence
agcactgtttatggctgctatggtt

SEQ ID NO: 143021 - DNA, 25 bp, Probe Sequence
agcactgttgactctgcatatttat

SEQ ID NO: 143022 - DNA, 25 bp, Probe Sequence
agcacgcttactaccttcagtataa

SEQ ID NO: 143023 - DNA, 25 bp, Probe Sequence
agcacgttacagttgttgcagataa

SEQ ID NO: 143024 - DNA, 25 bp, Probe Sequence
agctcctttcattatttaaaacagc

SEQ ID NO: 143025 - DNA, 25 bp, Probe Sequence
agcagccatcttaatacattaaacc

SEQ ID NO: 143026 - DNA, 25 bp, Probe Sequence
agcacgtctatctatacacattaat

SEQ ID NO: 143027 - DNA, 25 bp, Probe Sequence
agcacgtcgtcatgaccaaggagga

SEQ ID NO: 143028 - DNA, 25 bp, Probe Sequence
agctctgggaccactcagaagatgg

SEQ ID NO: 143029 - DNA, 25 bp, Probe Sequence
agcactggcagagcaaggacgtgat

SEQ ID NO: 143030 - DNA, 25 bp, Probe Sequence
agcagggcagcagtgaaccagttgt

SEQ ID NO: 143031 - DNA, 25 bp, Probe Sequence
agcactgggcttcagccaggtgctc

SEQ ID NO: 143032 - DNA, 25 bp, Probe Sequence
agcacgagagctgtggccagtgtac

SEQ ID NO: 143033 - DNA, 25 bp, Probe Sequence
agcaccatagctctggctcagagag

SEQ ID NO: 143034 - DNA, 25 bp, Probe Sequence
agcagacaactatggccgagagcac

SEQ ID NO: 143035 - DNA, 25 bp, Probe Sequence
agcagatataccagcccagtgaacc

SEQ ID NO: 143036 - DNA, 25 bp, Probe Sequence
agcaggcccgagccgcctggatacc

SEQ ID NO: 143037 - DNA, 25 bp, Probe Sequence
agcatggcccgaagcgtgcggggcc

SEQ ID NO: 143038 - DNA, 25 bp, Probe Sequence
agcatcgccacccaggtgtggaagc

SEQ ID NO: 143039 - DNA, 25 bp, Probe Sequence
agcagcagcatcacgaggagctgag

SEQ ID NO: 143040 - DNA, 25 bp, Probe Sequence
agcagaggttgcagtgagctggggt

SEQ ID NO: 143041 - DNA, 25 bp, Probe Sequence
agcagggctcctatgtgggggaagt

SEQ ID NO: 143042 - DNA, 25 bp, Probe Sequence
agcaggaatgcctcttgtgggggag

SEQ ID NO: 143043 - DNA, 25 bp, Probe Sequence
agctagaagctctctcggtgaagga

SEQ ID NO: 143044 - DNA, 25 bp, Probe Sequence
agctatcagggctgctaaggaagca

SEQ ID NO: 143045 - DNA, 25 bp, Probe Sequence
agcagaaggtgcagacccgcaatgc

SEQ ID NO: 143046 - DNA, 25 bp, Probe Sequence
agcagaggagctaggccagtccatc

SEQ ID NO: 143047 - DNA, 25 bp, Probe Sequence
agcagaatggcacccagaccactgc

SEQ ID NO: 143048 - DNA, 25 bp, Probe Sequence
agcagacagcggtagcaaccagctc

SEQ ID NO: 143049 - DNA, 25 bp, Probe Sequence
agcagtctcggaaacacagagccag

SEQ ID NO: 143050 - DNA, 25 bp, Probe Sequence
agcagtcaattaacaataagccagt

SEQ ID NO: 143051 - DNA, 25 bp, Probe Sequence
agcagtcaaattccagagggccatt

SEQ ID NO: 143052 - DNA, 25 bp, Probe Sequence
agcatgcgaaacctgcacaggccct

SEQ ID NO: 143053 - DNA, 25 bp, Probe Sequence
agcatggatagcagagtaggccctc

SEQ ID NO: 143054 - DNA, 25 bp, Probe Sequence
agcttgataggccacttgccagcac

SEQ ID NO: 143055 - DNA, 25 bp, Probe Sequence
agcagtgataagccagctgttacta

SEQ ID NO: 143056 - DNA, 25 bp, Probe Sequence
agcaggataacaggtcttacgatgt

SEQ ID NO: 143057 - DNA, 25 bp, Probe Sequence
agcagagaagcctgtctgtacttca

SEQ ID NO: 143058 - DNA, 25 bp, Probe Sequence
agcagagacgcgcgtctcaagcctg

SEQ ID NO: 143059 - DNA, 25 bp, Probe Sequence
agcagcagttggcgtggatgtcctg

SEQ ID NO: 143060 - DNA, 25 bp, Probe Sequence
agcaggtggggagtgcagcagtcct

SEQ ID NO: 143061 - DNA, 25 bp, Probe Sequence
agcagaagagtgctctccatgctct

SEQ ID NO: 143062 - DNA, 25 bp, Probe Sequence
agctaagactggtctcacaccacta

SEQ ID NO: 143063 - DNA, 25 bp, Probe Sequence
agcatagagatttttgccccacctt

SEQ ID NO: 143064 - DNA, 25 bp, Probe Sequence
agcaggaatagggtgtcctcccttc

SEQ ID NO: 143065 - DNA, 25 bp, Probe Sequence
agcaggaatagggtgtcctcccttc

SEQ ID NO: 143066 - DNA, 25 bp, Probe Sequence
agcaggaatagggtgtcctcccttc

SEQ ID NO: 143067 - DNA, 25 bp, Probe Sequence
agcagcgggaggagtaccagccggc

SEQ ID NO: 143068 - DNA, 25 bp, Probe Sequence
agcagcgggaggcagaggaaggcgg

SEQ ID NO: 143069 - DNA, 25 bp, Probe Sequence
agctggggcaagcagagggactggg

SEQ ID NO: 143070 - DNA, 25 bp, Probe Sequence
agctcgggaagtcgaggctacagtg

SEQ ID NO: 143071 - DNA, 25 bp, Probe Sequence
agctcttggaggagggctaaggctt

SEQ ID NO: 143072 - DNA, 25 bp, Probe Sequence
agcttagggcctggtggctaggtcg

SEQ ID NO: 143073 - DNA, 25 bp, Probe Sequence
agctctcggtgcacagtgtggtttc

SEQ ID NO: 143074 - DNA, 25 bp, Probe Sequence
agctaaattgttggcgggtttcatg

SEQ ID NO: 143075 - DNA, 25 bp, Probe Sequence
agctaaacatgcttcatcgtcggtc

SEQ ID NO: 143076 - DNA, 25 bp, Probe Sequence
agcttcagattggacgcggtggctc

SEQ ID NO: 143077 - DNA, 25 bp, Probe Sequence
agcatagaggtggccccagtgactc

SEQ ID NO: 143078 - DNA, 25 bp, Probe Sequence
agcaggatagggagcctcgactctt

SEQ ID NO: 143079 - DNA, 25 bp, Probe Sequence
agcaggatagggagcctcgactctt

SEQ ID NO: 143080 - DNA, 25 bp, Probe Sequence
agcagaggagggcagttcatgagct

SEQ ID NO: 143081 - DNA, 25 bp, Probe Sequence
agcagatacagaaggtggtcatggc

SEQ ID NO: 143082 - DNA, 25 bp, Probe Sequence
agcagcactgcagaggcttgtggag

SEQ ID NO: 143083 - DNA, 25 bp, Probe Sequence
agcagcatgcgggggttgctggtgt

SEQ ID NO: 143084 - DNA, 25 bp, Probe Sequence
agcatcatgctttgaggtttggggt

SEQ ID NO: 143085 - DNA, 25 bp, Probe Sequence
agctactttgtggtgtctaggtttc

SEQ ID NO: 143086 - DNA, 25 bp, Probe Sequence
agctaattggtgttacttgctttta

SEQ ID NO: 143087 - DNA, 25 bp, Probe Sequence
agcttattgccctttcatgtaattt

SEQ ID NO: 143088 - DNA, 25 bp, Probe Sequence
agctctttgacttcttgcatgcgag

SEQ ID NO: 143089 - DNA, 25 bp, Probe Sequence
agcattctctaggtttgcatgtagc

SEQ ID NO: 143090 - DNA, 25 bp, Probe Sequence
agcacccgagattctatgtgtagat

SEQ ID NO: 143091 - DNA, 25 bp, Probe Sequence
agcagcccgcatattaggcgcagat

SEQ ID NO: 143092 - DNA, 25 bp, Probe Sequence
agcaccactgcaacatatagacctg

SEQ ID NO: 143093 - DNA, 25 bp, Probe Sequence
agcaggcactgctcattaatcctgg

SEQ ID NO: 143094 - DNA, 25 bp, Probe Sequence
agcatggtctggcttcaatttggaa

SEQ ID NO: 143095 - DNA, 25 bp, Probe Sequence
agcagttctgatgcttacatctgga

SEQ ID NO: 143096 - DNA, 25 bp, Probe Sequence
agcaccttgcatgctggatctgggc

SEQ ID NO: 143097 - DNA, 25 bp, Probe Sequence
agcaccttgcatgctggatctgggc

SEQ ID NO: 143098 - DNA, 25 bp, Probe Sequence
agcagcctgttctggatttgctgca

SEQ ID NO: 143099 - DNA, 25 bp, Probe Sequence
agcagcctgattacccagggctgcc

SEQ ID NO: 143100 - DNA, 25 bp, Probe Sequence
agcagcgtgaaaaccagtatgatct

SEQ ID NO: 143101 - DNA, 25 bp, Probe Sequence
agcagtgccagaaaccatatcgatt

SEQ ID NO: 143102 - DNA, 25 bp, Probe Sequence
agcagcagccgaacaaaatgctgaa

SEQ ID NO: 143103 - DNA, 25 bp, Probe Sequence
agcagcacctatcccaagtgtgatc

SEQ ID NO: 143104 - DNA, 25 bp, Probe Sequence
agcagcccttcaggaaatggctgta

SEQ ID NO: 143105 - DNA, 25 bp, Probe Sequence
agcagcccatgctggaatcatgttt

SEQ ID NO: 143106 - DNA, 25 bp, Probe Sequence
agcagctgccagtgataatttgttt

SEQ ID NO: 143107 - DNA, 25 bp, Probe Sequence
agcatggctagatttacttcagtat

SEQ ID NO: 143108 - DNA, 25 bp, Probe Sequence
agcatgtgaattctggcattagctc

SEQ ID NO: 143109 - DNA, 25 bp, Probe Sequence
agcagtcaagagaagccttggctcc

SEQ ID NO: 143110 - DNA, 25 bp, Probe Sequence
agcagctgcaggacaatcttattcc

SEQ ID NO: 143111 - DNA, 25 bp, Probe Sequence
agcagcacagtcactctacattgcc

SEQ ID NO: 143112 - DNA, 25 bp, Probe Sequence
agcaccagttgactgctcgtgtgcc

SEQ ID NO: 143113 - DNA, 25 bp, Probe Sequence
agcagccgggatcgatggtggcgct

SEQ ID NO: 143114 - DNA, 25 bp, Probe Sequence
agcatcttcagcgatatgggggcct

SEQ ID NO: 143115 - DNA, 25 bp, Probe Sequence
agctctgtaggaagcaaagcctcta

SEQ ID NO: 143116 - DNA, 25 bp, Probe Sequence
agctctgtattgagaagggtcatat

SEQ ID NO: 143117 - DNA, 25 bp, Probe Sequence
agcagccttggtaaggggtctgcat

SEQ ID NO: 143118 - DNA, 25 bp, Probe Sequence
agcgcttttttctggatttgcattc

SEQ ID NO: 143119 - DNA, 25 bp, Probe Sequence
agctgtcaggtctttaaataggatt

SEQ ID NO: 143120 - DNA, 25 bp, Probe Sequence
agctgggggcagaataggtagtatt

SEQ ID NO: 143121 - DNA, 25 bp, Probe Sequence
agcaggtgggcagcatgggcttggt

SEQ ID NO: 143122 - DNA, 25 bp, Probe Sequence
agcagtggctggtccagggctagtg

SEQ ID NO: 143123 - DNA, 25 bp, Probe Sequence
agcagctttgagttagaagtatgtg

SEQ ID NO: 143124 - DNA, 25 bp, Probe Sequence
agcagctttagcctcatagaatatt

SEQ ID NO: 143125 - DNA, 25 bp, Probe Sequence
agcagctttagaatatggcgcattc

SEQ ID NO: 143126 - DNA, 25 bp, Probe Sequence
agcattctaagaaattccaatcaga

SEQ ID NO: 143127 - DNA, 25 bp, Probe Sequence
agcagtggaaatggttccttgcaaa

SEQ ID NO: 143128 - DNA, 25 bp, Probe Sequence
agcaggggaaggctctcttgctgtt

SEQ ID NO: 143129 - DNA, 25 bp, Probe Sequence
agcagtggttggaaggatcctggtt

SEQ ID NO: 143130 - DNA, 25 bp, Probe Sequence
agcagtttgggatggcacctggcat

SEQ ID NO: 143131 - DNA, 25 bp, Probe Sequence
agcttgtgggtgtggacctgaacac

SEQ ID NO: 143132 - DNA, 25 bp, Probe Sequence
agcttgggccagtgacaatctgcaa

SEQ ID NO: 143133 - DNA, 25 bp, Probe Sequence
agcagtgccgcctgaaagtgtcttg

SEQ ID NO: 143134 - DNA, 25 bp, Probe Sequence
agcagttaacatctgaagtgtctaa

SEQ ID NO: 143135 - DNA, 25 bp, Probe Sequence
agctttaatcttcgtcattgtctta

SEQ ID NO: 143136 - DNA, 25 bp, Probe Sequence
agcttttcacttctaaatgcattac

SEQ ID NO: 143137 - DNA, 25 bp, Probe Sequence
agctttagtcttataaacaacattg

SEQ ID NO: 143138 - DNA, 25 bp, Probe Sequence
agctatttttggttgcataaaagat

SEQ ID NO: 143139 - DNA, 25 bp, Probe Sequence
agcataattttgcttctggattcag

SEQ ID NO: 143140 - DNA, 25 bp, Probe Sequence
agcatatagtttctttgcacccact

SEQ ID NO: 143141 - DNA, 25 bp, Probe Sequence
agcatatagtttctttgcacccact

SEQ ID NO: 143142 - DNA, 25 bp, Probe Sequence
agcagcatgagctttcttatacatc

SEQ ID NO: 143143 - DNA, 25 bp, Probe Sequence
agcatcatggaggtttgaagatgcc

SEQ ID NO: 143144 - DNA, 25 bp, Probe Sequence
agcttggagagcttcacaaatgccc

SEQ ID NO: 143145 - DNA, 25 bp, Probe Sequence
agcttggattcttcaaacgctccct

SEQ ID NO: 143146 - DNA, 25 bp, Probe Sequence
agctagttcctgtaagcatttccac

SEQ ID NO: 143147 - DNA, 25 bp, Probe Sequence
agctaagtcctgtcagttctacctc

SEQ ID NO: 143148 - DNA, 25 bp, Probe Sequence
agctagagcccgtgtacaacagcct

SEQ ID NO: 143149 - DNA, 25 bp, Probe Sequence
agctagagcccgtgtacaacagcct

SEQ ID NO: 143150 - DNA, 25 bp, Probe Sequence
agctgagaccactgagtaccagggg

SEQ ID NO: 143151 - DNA, 25 bp, Probe Sequence
agcagcacatccttgaggtactcat

SEQ ID NO: 143152 - DNA, 25 bp, Probe Sequence
agcatcactgctttggtatagtata

SEQ ID NO: 143153 - DNA, 25 bp, Probe Sequence
agcagctggctagtggcttattact

SEQ ID NO: 143154 - DNA, 25 bp, Probe Sequence
agcggatgtcacgagctcgttagct

SEQ ID NO: 143155 - DNA, 25 bp, Probe Sequence
agcggcaggatcgacgcgcttctgt

SEQ ID NO: 143156 - DNA, 25 bp, Probe Sequence
agcagtgggagcgacgcagtcctgt

SEQ ID NO: 143157 - DNA, 25 bp, Probe Sequence
agcagggcgacgtgcagatggctgt

SEQ ID NO: 143158 - DNA, 25 bp, Probe Sequence
agcaggtgccatcacgcttgtgatg

SEQ ID NO: 143159 - DNA, 25 bp, Probe Sequence
agcagcagggcttacctgtggtgat

SEQ ID NO: 143160 - DNA, 25 bp, Probe Sequence
agctgacctgcttgaccgaaggatt

SEQ ID NO: 143161 - DNA, 25 bp, Probe Sequence
agctgacctgcttgaccgaaggatt

SEQ ID NO: 143162 - DNA, 25 bp, Probe Sequence
agcttcatgcacttaaagaagtatt

SEQ ID NO: 143163 - DNA, 25 bp, Probe Sequence
agcagtcatgcacgctgataaaaaa

SEQ ID NO: 143164 - DNA, 25 bp, Probe Sequence
agcagactgtggactgtaataaagt

SEQ ID NO: 143165 - DNA, 25 bp, Probe Sequence
agcagctgttgtccttaaaaatgaa

SEQ ID NO: 143166 - DNA, 25 bp, Probe Sequence
agcatatttatgcggaaagcaaaaa

SEQ ID NO: 143167 - DNA, 25 bp, Probe Sequence
agctcacttcgcccgaattacaaaa

SEQ ID NO: 143168 - DNA, 25 bp, Probe Sequence
agcataccacgccacagggttagaa

SEQ ID NO: 143169 - DNA, 25 bp, Probe Sequence
agcataccactggaccttgtctaaa

SEQ ID NO: 143170 - DNA, 25 bp, Probe Sequence
agctcacatccaggatgccctgagc

SEQ ID NO: 143171 - DNA, 25 bp, Probe Sequence
agcatagcatactgccttctgacag

SEQ ID NO: 143172 - DNA, 25 bp, Probe Sequence
agcagctgctactagctctttgaga

SEQ ID NO: 143173 - DNA, 25 bp, Probe Sequence
agcagcatgccgtagctatataagg

SEQ ID NO: 143174 - DNA, 25 bp, Probe Sequence
agcagcaccaagtctattacaggca

SEQ ID NO: 143175 - DNA, 25 bp, Probe Sequence
agcagcgaccagctagagcagggca

SEQ ID NO: 143176 - DNA, 25 bp, Probe Sequence
agcagcggctcaggacaaagggcag

SEQ ID NO: 143177 - DNA, 25 bp, Probe Sequence
agcagctagccaggcaaagggggca

SEQ ID NO: 143178 - DNA, 25 bp, Probe Sequence
agcaggcacccaacaaggcggtgca

SEQ ID NO: 143179 - DNA, 25 bp, Probe Sequence
agcgtgtcccataccacgaggaacc

SEQ ID NO: 143180 - DNA, 25 bp, Probe Sequence
agcagtgtgccctagcagaggaaaa

SEQ ID NO: 143181 - DNA, 25 bp, Probe Sequence
agcagcgtcgccagcaggagaatat

SEQ ID NO: 143182 - DNA, 25 bp, Probe Sequence
agcagcagggccggctggacaaact

SEQ ID NO: 143183 - DNA, 25 bp, Probe Sequence
agcagggcctctagtggaacacatt

SEQ ID NO: 143184 - DNA, 25 bp, Probe Sequence
agcagggactatgcagtgaaacagt

SEQ ID NO: 143185 - DNA, 25 bp, Probe Sequence
agcagggtattgaccgagaccgcta

SEQ ID NO: 143186 - DNA, 25 bp, Probe Sequence
agcagcggttattcggtgagcggtg

SEQ ID NO: 143187 - DNA, 25 bp, Probe Sequence
agcagggtgtctgcaggtgggacgg

SEQ ID NO: 143188 - DNA, 25 bp, Probe Sequence
agcaggtggtcaccagggatcgggg

SEQ ID NO: 143189 - DNA, 25 bp, Probe Sequence
agcagggggcagtaagtgatcttgg

SEQ ID NO: 143190 - DNA, 25 bp, Probe Sequence
agcagggggcagtaagtgatcttgg

SEQ ID NO: 143191 - DNA, 25 bp, Probe Sequence
agcaggggcgtcagggatcctgctg

SEQ ID NO: 143192 - DNA, 25 bp, Probe Sequence
agcagagggagtagggctcgccatg

SEQ ID NO: 143193 - DNA, 25 bp, Probe Sequence
agctggggagttaacacataatggt

SEQ ID NO: 143194 - DNA, 25 bp, Probe Sequence
agctgggtggtgccaatccattggc

SEQ ID NO: 143195 - DNA, 25 bp, Probe Sequence
agcattggtgggtgcaccagtatct

SEQ ID NO: 143196 - DNA, 25 bp, Probe Sequence
agcttgttatctgccaccagtacat

SEQ ID NO: 143197 - DNA, 25 bp, Probe Sequence
agcatatgttacttaccttgttatt

SEQ ID NO: 143198 - DNA, 25 bp, Probe Sequence
agcattgggccatagtttgttaatc

SEQ ID NO: 143199 - DNA, 25 bp, Probe Sequence
agcagttggctctatagtttatgtc

SEQ ID NO: 143200 - DNA, 25 bp, Probe Sequence
agcagtgtgagccgtgagttttccg

SEQ ID NO: 143201 - DNA, 25 bp, Probe Sequence
agcaggatatgctgtggtttcctac

SEQ ID NO: 143202 - DNA, 25 bp, Probe Sequence
agcgagactctagtttttcctctct

SEQ ID NO: 143203 - DNA, 25 bp, Probe Sequence
agcattgccttcttattttacttct

SEQ ID NO: 143204 - DNA, 25 bp, Probe Sequence
agcttattttatatttccttgtctt

SEQ ID NO: 143205 - DNA, 25 bp, Probe Sequence
agctattttggtatccactcttttt

SEQ ID NO: 143206 - DNA, 25 bp, Probe Sequence
agctacttcttataccactattctt

SEQ ID NO: 143207 - DNA, 25 bp, Probe Sequence
agcatttttacatactccatagtct

SEQ ID NO: 143208 - DNA, 25 bp, Probe Sequence
agctattttaaccatctcaagattc

SEQ ID NO: 143209 - DNA, 25 bp, Probe Sequence
agcgttattcaagcactccagactt

SEQ ID NO: 143210 - DNA, 25 bp, Probe Sequence
agctcttttagagatccctgcagct

SEQ ID NO: 143211 - DNA, 25 bp, Probe Sequence
agctgtttctatgattatcctcaat

SEQ ID NO: 143212 - DNA, 25 bp, Probe Sequence
agcagatcctgtagtatttccagta

SEQ ID NO: 143213 - DNA, 25 bp, Probe Sequence
agcagactgatttgtttctaagata

SEQ ID NO: 143214 - DNA, 25 bp, Probe Sequence
agcagagctggtggattctctagag

SEQ ID NO: 143215 - DNA, 25 bp, Probe Sequence
agcatggtggcgcatgcctgtagtc

SEQ ID NO: 143216 - DNA, 25 bp, Probe Sequence
agcatggtggcgcatgcctgtagtc

SEQ ID NO: 143217 - DNA, 25 bp, Probe Sequence
agcaggtgggaagatgaagccggcc

SEQ ID NO: 143218 - DNA, 25 bp, Probe Sequence
agcggcggatgcagtacaaccggcg

SEQ ID NO: 143219 - DNA, 25 bp, Probe Sequence
agcggccggatggtgaaatcctccc

SEQ ID NO: 143220 - DNA, 25 bp, Probe Sequence
agcggtcggtggagaacacaggccc

SEQ ID NO: 143221 - DNA, 25 bp, Probe Sequence
agcggcctggccagtgaaaaggact

SEQ ID NO: 143222 - DNA, 25 bp, Probe Sequence
agcagacctagccatgggcacaaga

SEQ ID NO: 143223 - DNA, 25 bp, Probe Sequence
agcagaatcttgaaaagcccagaga

SEQ ID NO: 143224 - DNA, 25 bp, Probe Sequence
agcagaatcttgaaaagcccagaga

SEQ ID NO: 143225 - DNA, 25 bp, Probe Sequence
agcagaagccatagagagcagcctc

SEQ ID NO: 143226 - DNA, 25 bp, Probe Sequence
agcagaagtgcaacaacacctcgga

SEQ ID NO: 143227 - DNA, 25 bp, Probe Sequence
agcaggagaaaaccacagttctgat

SEQ ID NO: 143228 - DNA, 25 bp, Probe Sequence
agcagcagaaaagccagccttggaa

SEQ ID NO: 143229 - DNA, 25 bp, Probe Sequence
agcagaaaatagcccactaatccaa

SEQ ID NO: 143230 - DNA, 25 bp, Probe Sequence
agctgcaaaaccacactgagttaca

SEQ ID NO: 143231 - DNA, 25 bp, Probe Sequence
acgacctacgcacacgagaacatgc

SEQ ID NO: 143232 - DNA, 25 bp, Probe Sequence
actgacctaaacgtggaatgcatgt

SEQ ID NO: 143233 - DNA, 25 bp, Probe Sequence
actaccaccaaggagaatagtttag

SEQ ID NO: 143234 - DNA, 25 bp, Probe Sequence
agctacgcattcaaggatggataat

SEQ ID NO: 143235 - DNA, 25 bp, Probe Sequence
agctcaacctcaaggagtacaacct

SEQ ID NO: 143236 - DNA, 25 bp, Probe Sequence
agctcaccaccaacgaatacgtcta

SEQ ID NO: 143237 - DNA, 25 bp, Probe Sequence
agcccaacgatgactacttacttaa

SEQ ID NO: 143238 - DNA, 25 bp, Probe Sequence
agcccacaagagcagtcctaaacaa

SEQ ID NO: 143239 - DNA, 25 bp, Probe Sequence
agcagtgactttagacctaggcaaa

SEQ ID NO: 143240 - DNA, 25 bp, Probe Sequence
agctacaagtggctgctttacaact

SEQ ID NO: 143241 - DNA, 25 bp, Probe Sequence
agcttaactgacagatgttaaagct

SEQ ID NO: 143242 - DNA, 25 bp, Probe Sequence
agcccatattacttgtgttagtagt

SEQ ID NO: 143243 - DNA, 25 bp, Probe Sequence
agctatccttcctgtgtatacaaat

SEQ ID NO: 143244 - DNA, 25 bp, Probe Sequence
agcatacaaccctgctttagagaat

SEQ ID NO: 143245 - DNA, 25 bp, Probe Sequence
agcataatgactgtgtgttctgaga

SEQ ID NO: 143246 - DNA, 25 bp, Probe Sequence
agcatttgacgagctgctagccagc

SEQ ID NO: 143247 - DNA, 25 bp, Probe Sequence
agcattgatgaacggatgaagaagc

SEQ ID NO: 143248 - DNA, 25 bp, Probe Sequence
agcatgtggcaatggctacagcaat

SEQ ID NO: 143249 - DNA, 25 bp, Probe Sequence
agctgtacaatcgtttcatcattcg

SEQ ID NO: 143250 - DNA, 25 bp, Probe Sequence
agctgtacaatcgtttcatcattcg

SEQ ID NO: 143251 - DNA, 25 bp, Probe Sequence
agcgacaagatcatctactcacact

SEQ ID NO: 143252 - DNA, 25 bp, Probe Sequence
agcagaaaggtgacgattctcactc

SEQ ID NO: 143253 - DNA, 25 bp, Probe Sequence
agcagaccgagagctgcttccatct

SEQ ID NO: 143254 - DNA, 25 bp, Probe Sequence
agcatggccggaatttcttcaccag

SEQ ID NO: 143255 - DNA, 25 bp, Probe Sequence
agcattgtttgcttattgttccaag

SEQ ID NO: 143256 - DNA, 25 bp, Probe Sequence
agcttcttatgtgttgagtccaaag

SEQ ID NO: 143257 - DNA, 25 bp, Probe Sequence
agcagacatttggcctctagatcct

SEQ ID NO: 143258 - DNA, 25 bp, Probe Sequence
agcagacatttggcctctagatcct

SEQ ID NO: 143259 - DNA, 25 bp, Probe Sequence
agcaggagttcgctcaagatccaag

SEQ ID NO: 143260 - DNA, 25 bp, Probe Sequence
agcattagatttctcatttgccaat

SEQ ID NO: 143261 - DNA, 25 bp, Probe Sequence
agctttatgtcttactttccaatca

SEQ ID NO: 143262 - DNA, 25 bp, Probe Sequence
agcttggagttatgacctacagtga

SEQ ID NO: 143263 - DNA, 25 bp, Probe Sequence
agctcggattcaactaccttagata

SEQ ID NO: 143264 - DNA, 25 bp, Probe Sequence
agctcgcgcttcatttccctcattg

SEQ ID NO: 143265 - DNA, 25 bp, Probe Sequence
agctacccttttaccatcattggac

SEQ ID NO: 143266 - DNA, 25 bp, Probe Sequence
agcagatcttctttataactattta

SEQ ID NO: 143267 - DNA, 25 bp, Probe Sequence
agcagtttcactgccaacttttagt

SEQ ID NO: 143268 - DNA, 25 bp, Probe Sequence
agcagtttcctcacaacagtctaag

SEQ ID NO: 143269 - DNA, 25 bp, Probe Sequence
agcagtcttactatccacagcagta

SEQ ID NO: 143270 - DNA, 25 bp, Probe Sequence
agcagtcttatctaactatgatgca

SEQ ID NO: 143271 - DNA, 25 bp, Probe Sequence
agcagtattcactcaacatcatcct

SEQ ID NO: 143272 - DNA, 25 bp, Probe Sequence
agcagtattacagtcagtatttcat

SEQ ID NO: 143273 - DNA, 25 bp, Probe Sequence
agctgtattacagtgctataaattc

SEQ ID NO: 143274 - DNA, 25 bp, Probe Sequence
agcattgctttcgtgtaaattatgt

SEQ ID NO: 143275 - DNA, 25 bp, Probe Sequence
agcatttgctctgtgttagatcttg

SEQ ID NO: 143276 - DNA, 25 bp, Probe Sequence
agcatttgttctttgccagtctcat

SEQ ID NO: 143277 - DNA, 25 bp, Probe Sequence
agcatcctcttctatggcagattct

SEQ ID NO: 143278 - DNA, 25 bp, Probe Sequence
agcttcatcatgaccagaagcttga

SEQ ID NO: 143279 - DNA, 25 bp, Probe Sequence
agcttcatcatgaccagaagcttga

SEQ ID NO: 143280 - DNA, 25 bp, Probe Sequence
agcatactattcctgccatgcttga

SEQ ID NO: 143281 - DNA, 25 bp, Probe Sequence
agcatccagaacagcctgcttggac

SEQ ID NO: 143282 - DNA, 25 bp, Probe Sequence
agcatcataaacaggctgactggca

SEQ ID NO: 143283 - DNA, 25 bp, Probe Sequence
agcatcttcaaggcggtcacagtga

SEQ ID NO: 143284 - DNA, 25 bp, Probe Sequence
agcatttatttgcagctgcaagggc

SEQ ID NO: 143285 - DNA, 25 bp, Probe Sequence
agcttcttcttggagtctcagggca

SEQ ID NO: 143286 - DNA, 25 bp, Probe Sequence
agcagttggcgtggatgtcctgcgg

SEQ ID NO: 143287 - DNA, 25 bp, Probe Sequence
agcatgtttctgggtggcttgctgg

SEQ ID NO: 143288 - DNA, 25 bp, Probe Sequence
agcagttacctgatgcctgctgctg

SEQ ID NO: 143289 - DNA, 25 bp, Probe Sequence
agcagttacaagggcctgcatcatc

SEQ ID NO: 143290 - DNA, 25 bp, Probe Sequence
agcttagatgccaggctctgtctgc

SEQ ID NO: 143291 - DNA, 25 bp, Probe Sequence
agctagtgagacagagctcgcctcc

SEQ ID NO: 143292 - DNA, 25 bp, Probe Sequence
agcattgtgcagatacacaccccgc

SEQ ID NO: 143293 - DNA, 25 bp, Probe Sequence
agcatttcagaatacctctgacagt

SEQ ID NO: 143294 - DNA, 25 bp, Probe Sequence
agcataacagggtctccttggcagc

SEQ ID NO: 143295 - DNA, 25 bp, Probe Sequence
agcatacacaggcacatggctttaa

SEQ ID NO: 143296 - DNA, 25 bp, Probe Sequence
agctcaacatataagccgctatatt

SEQ ID NO: 143297 - DNA, 25 bp, Probe Sequence
agctcaaaatcatcactgttaattt

SEQ ID NO: 143298 - DNA, 25 bp, Probe Sequence
agctcacctatctcacttaattttt

SEQ ID NO: 143299 - DNA, 25 bp, Probe Sequence
agcttcctgacggagcgcaacattt

SEQ ID NO: 143300 - DNA, 25 bp, Probe Sequence
agcatctggctgtcaggcggaagct

SEQ ID NO: 143301 - DNA, 25 bp, Probe Sequence
agcatctgtggatcgccagaggtcc

SEQ ID NO: 143302 - DNA, 25 bp, Probe Sequence
agcatctgtggatcgccagaggtcc

SEQ ID NO: 143303 - DNA, 25 bp, Probe Sequence
agcatctgtggatcgccagaggtcc

SEQ ID NO: 143304 - DNA, 25 bp, Probe Sequence
agcagtgagagttccagggtctccc

SEQ ID NO: 143305 - DNA, 25 bp, Probe Sequence
agcagtcggttggagcgagcatccc

SEQ ID NO: 143306 - DNA, 25 bp, Probe Sequence
agcaggtgtttggcatcgatgctct

SEQ ID NO: 143307 - DNA, 25 bp, Probe Sequence
agctgagtcttctgcatcagattat

SEQ ID NO: 143308 - DNA, 25 bp, Probe Sequence
agctggtctcttatcaagaatacct

SEQ ID NO: 143309 - DNA, 25 bp, Probe Sequence
agctttccttacaatcagagcccct

SEQ ID NO: 143310 - DNA, 25 bp, Probe Sequence
agctttctctagttcaagttcacca

SEQ ID NO: 143311 - DNA, 25 bp, Probe Sequence
agctgtaactctttccagttacaat

SEQ ID NO: 143312 - DNA, 25 bp, Probe Sequence
agctgtaattattttcagattgaaa

SEQ ID NO: 143313 - DNA, 25 bp, Probe Sequence
agcatgtcacttaatctctcagatt

SEQ ID NO: 143314 - DNA, 25 bp, Probe Sequence
agcatgatcttgttactgtgatatt

SEQ ID NO: 143315 - DNA, 25 bp, Probe Sequence
agcatgatcttgttactgtgatatt

SEQ ID NO: 143316 - DNA, 25 bp, Probe Sequence
agcatgtgtgtattcaccatgaata

SEQ ID NO: 143317 - DNA, 25 bp, Probe Sequence
agcagatggccagtcacgagaaccc

SEQ ID NO: 143318 - DNA, 25 bp, Probe Sequence
agcttgagcaatttcggaccctgct

SEQ ID NO: 143319 - DNA, 25 bp, Probe Sequence
agcttcagcctgtgtagtccagctg

SEQ ID NO: 143320 - DNA, 25 bp, Probe Sequence
agctgaactcgggtagtccagtggc

SEQ ID NO: 143321 - DNA, 25 bp, Probe Sequence
agctagtctctgaagcttaccactg

SEQ ID NO: 143322 - DNA, 25 bp, Probe Sequence
agctgattcttggacagataaagtc

SEQ ID NO: 143323 - DNA, 25 bp, Probe Sequence
agctcactgctacaagtaccgcatc

SEQ ID NO: 143324 - DNA, 25 bp, Probe Sequence
agcatccaatgacctatgtaacggc

SEQ ID NO: 143325 - DNA, 25 bp, Probe Sequence
agcatgccaaggctctgtgggagga

SEQ ID NO: 143326 - DNA, 25 bp, Probe Sequence
agcatgccaaggctctgtgggagga

SEQ ID NO: 143327 - DNA, 25 bp, Probe Sequence
agcatctcaggtcctctagagggga

SEQ ID NO: 143328 - DNA, 25 bp, Probe Sequence
agctcgagtcatcactgaggaagag

SEQ ID NO: 143329 - DNA, 25 bp, Probe Sequence
agctcttcctgctccaggaacatgg

SEQ ID NO: 143330 - DNA, 25 bp, Probe Sequence
agctctgtcctgctacctaaaggat

SEQ ID NO: 143331 - DNA, 25 bp, Probe Sequence
agcttcatccggcaacaaaaggacc

SEQ ID NO: 143332 - DNA, 25 bp, Probe Sequence
agcatcctctgccaagaccaaaagg

SEQ ID NO: 143333 - DNA, 25 bp, Probe Sequence
agcatccattcctaataaaaattcc

SEQ ID NO: 143334 - DNA, 25 bp, Probe Sequence
agcatcgatacctcaacatcaattt

SEQ ID NO: 143335 - DNA, 25 bp, Probe Sequence
agcatgctaagctaccacagctaca

SEQ ID NO: 143336 - DNA, 25 bp, Probe Sequence
agcatcaacagcacagacagcgagc

SEQ ID NO: 143337 - DNA, 25 bp, Probe Sequence
agcatgcagccagccaagatcgggc

SEQ ID NO: 143338 - DNA, 25 bp, Probe Sequence
actatgtgaccaccaacgtggccgg

SEQ ID NO: 143339 - DNA, 25 bp, Probe Sequence
actataagccccagcgggcgacgac

SEQ ID NO: 143340 - DNA, 25 bp, Probe Sequence
agctagacagacccctgcaggggac

SEQ ID NO: 143341 - DNA, 25 bp, Probe Sequence
agcatcaacaaacccttggcaacac

SEQ ID NO: 143342 - DNA, 25 bp, Probe Sequence
agctcaagcaacttcgaagccaaaa

SEQ ID NO: 143343 - DNA, 25 bp, Probe Sequence
agcagagggaacgctatccaaaaag

SEQ ID NO: 143344 - DNA, 25 bp, Probe Sequence
agcaggaggcacttttatccaaaag

SEQ ID NO: 143345 - DNA, 25 bp, Probe Sequence
agcaggaccagatctgctatctcag

SEQ ID NO: 143346 - DNA, 25 bp, Probe Sequence
agcagaggcgaagcatcatctctcc

SEQ ID NO: 143347 - DNA, 25 bp, Probe Sequence
agcagatgtgggacacacagcctcc

SEQ ID NO: 143348 - DNA, 25 bp, Probe Sequence
agcgctgcgtgaacaccagcggctc

SEQ ID NO: 143349 - DNA, 25 bp, Probe Sequence
agcttctggaagtcgtgctggtctc

SEQ ID NO: 143350 - DNA, 25 bp, Probe Sequence
agctttgtagtggttgcacagtcac

SEQ ID NO: 143351 - DNA, 25 bp, Probe Sequence
agcttcttagtggatgtgcagcaga

SEQ ID NO: 143352 - DNA, 25 bp, Probe Sequence
agctatgcgagaggctgaggcagga

SEQ ID NO: 143353 - DNA, 25 bp, Probe Sequence
agctagccaggactgatggagcccc

SEQ ID NO: 143354 - DNA, 25 bp, Probe Sequence
agctactcaggaggctaaggcatga

SEQ ID NO: 143355 - DNA, 25 bp, Probe Sequence
agctcgccacgaactagggtaaggt

SEQ ID NO: 143356 - DNA, 25 bp, Probe Sequence
agcttccatgagaacagcagggtag

SEQ ID NO: 143357 - DNA, 25 bp, Probe Sequence
agcattccacactgcagggaggagt

SEQ ID NO: 143358 - DNA, 25 bp, Probe Sequence
agcattacaacagccatcgaggact

SEQ ID NO: 143359 - DNA, 25 bp, Probe Sequence
agcattacaatgcccatcatggagt

SEQ ID NO: 143360 - DNA, 25 bp, Probe Sequence
agcataagcaaaggatctcagggtg

SEQ ID NO: 143361 - DNA, 25 bp, Probe Sequence
agcatcagcaaaaattacagtggtt

SEQ ID NO: 143362 - DNA, 25 bp, Probe Sequence
agcatcgtgtgagatccgcgtgctt

SEQ ID NO: 143363 - DNA, 25 bp, Probe Sequence
agcatcctgtggtacccagagcaat

SEQ ID NO: 143364 - DNA, 25 bp, Probe Sequence
agcttctgggaagtcctcagagtac

SEQ ID NO: 143365 - DNA, 25 bp, Probe Sequence
agctttaggatagtgccagacaaac

SEQ ID NO: 143366 - DNA, 25 bp, Probe Sequence
agctttcaaatcgtccgcgatgaca

SEQ ID NO: 143367 - DNA, 25 bp, Probe Sequence
agctttaattcacttgttcagatca

SEQ ID NO: 143368 - DNA, 25 bp, Probe Sequence
agcattgtgcaatacagtttcatta

SEQ ID NO: 143369 - DNA, 25 bp, Probe Sequence
agcattgtgcaatacagtttcatta

SEQ ID NO: 143370 - DNA, 25 bp, Probe Sequence
agcatcctgacatcactgttatttt

SEQ ID NO: 143371 - DNA, 25 bp, Probe Sequence
agctaaagcaagtctgtgttttcaa

SEQ ID NO: 143372 - DNA, 25 bp, Probe Sequence
agctaaactgaatctatggctttaa

SEQ ID NO: 143373 - DNA, 25 bp, Probe Sequence
agctaacggagaacctggccttgga

SEQ ID NO: 143374 - DNA, 25 bp, Probe Sequence
agctacctggagaactctgcatcct

SEQ ID NO: 143375 - DNA, 25 bp, Probe Sequence
agctgaacgggaagctcactggcat

SEQ ID NO: 143376 - DNA, 25 bp, Probe Sequence
agcaggaggtggagcccatgtgcaa

SEQ ID NO: 143377 - DNA, 25 bp, Probe Sequence
agatacataagtcaactcttctcct

SEQ ID NO: 143378 - DNA, 25 bp, Probe Sequence
agcaggaatttccactctgaggctt

SEQ ID NO: 143379 - DNA, 25 bp, Probe Sequence
agcagggtgtgctgcactcatgggc

SEQ ID NO: 143380 - DNA, 25 bp, Probe Sequence
agcatggtggcgggcacctgtagtc

SEQ ID NO: 143381 - DNA, 25 bp, Probe Sequence
agctttgtgcttagagaatgtatgt

SEQ ID NO: 143382 - DNA, 25 bp, Probe Sequence
agcatttgttggaaggtgatggctc

SEQ ID NO: 143383 - DNA, 25 bp, Probe Sequence
agcattgctgtctgcaagggagccc

SEQ ID NO: 143384 - DNA, 25 bp, Probe Sequence
agcaggcactgagcaagcaggcccc

SEQ ID NO: 143385 - DNA, 25 bp, Probe Sequence
agcaggcactgagcaagcaggcccc

SEQ ID NO: 143386 - DNA, 25 bp, Probe Sequence
agcaggcactgagcaagcaggcccc

SEQ ID NO: 143387 - DNA, 25 bp, Probe Sequence
agcaggagtgtttgtcaggctcccg

SEQ ID NO: 143388 - DNA, 25 bp, Probe Sequence
agcagtggtctttgaagcacctgtg

SEQ ID NO: 143389 - DNA, 25 bp, Probe Sequence
agcagtggcactttatagccacggc

SEQ ID NO: 143390 - DNA, 25 bp, Probe Sequence
agcagggggaatgtgccagcgtgca

SEQ ID NO: 143391 - DNA, 25 bp, Probe Sequence
agcgggtggaaaatcccgcagtcca

SEQ ID NO: 143392 - DNA, 25 bp, Probe Sequence
agcagtggctggatatggccccatt

SEQ ID NO: 143393 - DNA, 25 bp, Probe Sequence
agctgtgggagcagagtgacccttt

SEQ ID NO: 143394 - DNA, 25 bp, Probe Sequence
agcattgaggagcggcgcatccacc

SEQ ID NO: 143395 - DNA, 25 bp, Probe Sequence
agcatgaaacaggtggctctccatc

SEQ ID NO: 143396 - DNA, 25 bp, Probe Sequence
agcagggatcagggagcgtggctcg

SEQ ID NO: 143397 - DNA, 25 bp, Probe Sequence
agcagtggacacgtgaggggggggt

SEQ ID NO: 143398 - DNA, 25 bp, Probe Sequence
agctgggaaccttggtggaggggtg

SEQ ID NO: 143399 - DNA, 25 bp, Probe Sequence
agctgggaaccttggtggaggggtg

SEQ ID NO: 143400 - DNA, 25 bp, Probe Sequence
agcggaaacccagcacgaggggcta

SEQ ID NO: 143401 - DNA, 25 bp, Probe Sequence
agcggaaacccagcacgaggggcta

SEQ ID NO: 143402 - DNA, 25 bp, Probe Sequence
actggataccgggaccgcagggact

SEQ ID NO: 143403 - DNA, 25 bp, Probe Sequence
acatctatgaccgggaccccgaagg

SEQ ID NO: 143404 - DNA, 25 bp, Probe Sequence
agcattatgtctggggaattcatcc

SEQ ID NO: 143405 - DNA, 25 bp, Probe Sequence
agcatctgggctaggcctcttagag

SEQ ID NO: 143406 - DNA, 25 bp, Probe Sequence
agcttggtgtagacagtctgaacag

SEQ ID NO: 143407 - DNA, 25 bp, Probe Sequence
agcatctttccggaggctaacagac

SEQ ID NO: 143408 - DNA, 25 bp, Probe Sequence
agcatttccgcaggagcctgggcaa

SEQ ID NO: 143409 - DNA, 25 bp, Probe Sequence
agcatagtccaagacctagccaatg

SEQ ID NO: 143410 - DNA, 25 bp, Probe Sequence
agctttagcaataactcaaccacgc

SEQ ID NO: 143411 - DNA, 25 bp, Probe Sequence
agcatttagccaatcttcaacccta

SEQ ID NO: 143412 - DNA, 25 bp, Probe Sequence
agcatttcacctttctgcaacaagt

SEQ ID NO: 143413 - DNA, 25 bp, Probe Sequence
agctttcctgtaatttaaagtgctt

SEQ ID NO: 143414 - DNA, 25 bp, Probe Sequence
agcttagccttgaaattgtgaactc

SEQ ID NO: 143415 - DNA, 25 bp, Probe Sequence
agcttgctgatattgttacggaact

SEQ ID NO: 143416 - DNA, 25 bp, Probe Sequence
agcttggatatatgctacaataata

SEQ ID NO: 143417 - DNA, 25 bp, Probe Sequence
agcttatgtcttggctaaatagtca

SEQ ID NO: 143418 - DNA, 25 bp, Probe Sequence
agcatgctatctatagttaataaca

SEQ ID NO: 143419 - DNA, 25 bp, Probe Sequence
agcatcttctgcaaaatgtactata

SEQ ID NO: 143420 - DNA, 25 bp, Probe Sequence
agcatgcatactttaacttctatag

SEQ ID NO: 143421 - DNA, 25 bp, Probe Sequence
agcatattctttatcttggatattt

SEQ ID NO: 143422 - DNA, 25 bp, Probe Sequence
agctttttttctccagtattttctg

SEQ ID NO: 143423 - DNA, 25 bp, Probe Sequence
actttttatactctttgttacatgt

SEQ ID NO: 143424 - DNA, 25 bp, Probe Sequence
agctctttattaggaattttttgtg

SEQ ID NO: 143425 - DNA, 25 bp, Probe Sequence
agcgcgttaatcccttattttagtg

SEQ ID NO: 143426 - DNA, 25 bp, Probe Sequence
agcttttcaacatcattattttagg

SEQ ID NO: 143427 - DNA, 25 bp, Probe Sequence
agctgtttccaaactacagtcctat

SEQ ID NO: 143428 - DNA, 25 bp, Probe Sequence
agctatttctacactatctgtggca

SEQ ID NO: 143429 - DNA, 25 bp, Probe Sequence
agcatgagtatcatcttcttcctgc

SEQ ID NO: 143430 - DNA, 25 bp, Probe Sequence
agcatcagcattgcttcgcagtgcc

SEQ ID NO: 143431 - DNA, 25 bp, Probe Sequence
agcatcatgtgtgatctcgtcttcc

SEQ ID NO: 143432 - DNA, 25 bp, Probe Sequence
agcatcttgatactgctgcagtcaa

SEQ ID NO: 143433 - DNA, 25 bp, Probe Sequence
agcattgcatgattctccagtatat

SEQ ID NO: 143434 - DNA, 25 bp, Probe Sequence
agcatatgtcattccccatatgtgt

SEQ ID NO: 143435 - DNA, 25 bp, Probe Sequence
agcatgattcatttctagcagaggc

SEQ ID NO: 143436 - DNA, 25 bp, Probe Sequence
agcatgctatcacttctcaggaagt

SEQ ID NO: 143437 - DNA, 25 bp, Probe Sequence
agctgctccatcgatatactcatag

SEQ ID NO: 143438 - DNA, 25 bp, Probe Sequence
agcatggcacatgaatacacatgta

SEQ ID NO: 143439 - DNA, 25 bp, Probe Sequence
agctagcacatgattatccttctgt

SEQ ID NO: 143440 - DNA, 25 bp, Probe Sequence
agctatgtatgaccaacacctctgt

SEQ ID NO: 143441 - DNA, 25 bp, Probe Sequence
agcatgatttatcctacactccaac

SEQ ID NO: 143442 - DNA, 25 bp, Probe Sequence
agcatttaagcttatcacttcagat

SEQ ID NO: 143443 - DNA, 25 bp, Probe Sequence
agcatttatactcaatcttctcttt

SEQ ID NO: 143444 - DNA, 25 bp, Probe Sequence
agcattatgaactcagatccattct

SEQ ID NO: 143445 - DNA, 25 bp, Probe Sequence
agcatgtgataagacctccttccat

SEQ ID NO: 143446 - DNA, 25 bp, Probe Sequence
agcattcacatgtgactctgtcccc

SEQ ID NO: 143447 - DNA, 25 bp, Probe Sequence
agcatcactatgtagcattctgttt

SEQ ID NO: 143448 - DNA, 25 bp, Probe Sequence
agcatgccattgaagaatctgtcgt

SEQ ID NO: 143449 - DNA, 25 bp, Probe Sequence
agcttgcttctgaaatgctgtcttt

SEQ ID NO: 143450 - DNA, 25 bp, Probe Sequence
agcttgttagtaatgctctgaccaa

SEQ ID NO: 143451 - DNA, 25 bp, Probe Sequence
agcttgttagtaatgctctgaccaa

SEQ ID NO: 143452 - DNA, 25 bp, Probe Sequence
agctagtctagtttttgccacatct

SEQ ID NO: 143453 - DNA, 25 bp, Probe Sequence
agctacctactactggtggattctt

SEQ ID NO: 143454 - DNA, 25 bp, Probe Sequence
agctacccagtgtgtggtattttgt

SEQ ID NO: 143455 - DNA, 25 bp, Probe Sequence
agcattcatcgtgaggggtctttgt

SEQ ID NO: 143456 - DNA, 25 bp, Probe Sequence
agcatcctgggccagtttgttctct

SEQ ID NO: 143457 - DNA, 25 bp, Probe Sequence
agcttcattggctagtttctctctc

SEQ ID NO: 143458 - DNA, 25 bp, Probe Sequence
agcttgtgggagtcatttacatcct

SEQ ID NO: 143459 - DNA, 25 bp, Probe Sequence
agcctgtagtagactcgggtcctgt

SEQ ID NO: 143460 - DNA, 25 bp, Probe Sequence
agctctggagttctcggttgttgta

SEQ ID NO: 143461 - DNA, 25 bp, Probe Sequence
agcttggtggtcctatggtgttttt

SEQ ID NO: 143462 - DNA, 25 bp, Probe Sequence
agctgatggggcccttggattcttt

SEQ ID NO: 143463 - DNA, 25 bp, Probe Sequence
agcttgtgattcgctctagactttt

SEQ ID NO: 143464 - DNA, 25 bp, Probe Sequence
agctctggtttgattcaagttgcta

SEQ ID NO: 143465 - DNA, 25 bp, Probe Sequence
agctaggaattgtttcccttctact

SEQ ID NO: 143466 - DNA, 25 bp, Probe Sequence
agctgccgaaatgtgttccagtctg

SEQ ID NO: 143467 - DNA, 25 bp, Probe Sequence
agctacgaagacctgctgtcgagtt

SEQ ID NO: 143468 - DNA, 25 bp, Probe Sequence
agctgggacaacctcttagagtctc

SEQ ID NO: 143469 - DNA, 25 bp, Probe Sequence
agctggagaatctcttcgaggccct

SEQ ID NO: 143470 - DNA, 25 bp, Probe Sequence
agctggagacgttccgggaggagct

SEQ ID NO: 143471 - DNA, 25 bp, Probe Sequence
agcaggaggtgatccgaggctggga

SEQ ID NO: 143472 - DNA, 25 bp, Probe Sequence
agcaggtggatcacttgaggtcagg

SEQ ID NO: 143473 - DNA, 25 bp, Probe Sequence
agcggatggcccagctgaggctggt

SEQ ID NO: 143474 - DNA, 25 bp, Probe Sequence
agcatggagttcccgtgggtggtgt

SEQ ID NO: 143475 - DNA, 25 bp, Probe Sequence
agctggactgggacgtagcgacggt

SEQ ID NO: 143476 - DNA, 25 bp, Probe Sequence
agcgtgactgggccgagtccacgct

SEQ ID NO: 143477 - DNA, 25 bp, Probe Sequence
agctggccgatgcctcagaaaacct

SEQ ID NO: 143478 - DNA, 25 bp, Probe Sequence
agctggccgatgcctcagaaaacct

SEQ ID NO: 143479 - DNA, 25 bp, Probe Sequence
agctcagcaaagacccaaatatcgt

SEQ ID NO: 143480 - DNA, 25 bp, Probe Sequence
agctgcactatgtgccccaatatca

SEQ ID NO: 143481 - DNA, 25 bp, Probe Sequence
agctgcagcttctagtttaagacca

SEQ ID NO: 143482 - DNA, 25 bp, Probe Sequence
agctcccatatttttagacagagaa

SEQ ID NO: 143483 - DNA, 25 bp, Probe Sequence
agcatccttacctttaagaagataa

SEQ ID NO: 143484 - DNA, 25 bp, Probe Sequence
agctttcaagcctttatagaaaagc

SEQ ID NO: 143485 - DNA, 25 bp, Probe Sequence
agctcttcacagggggtagaacaag

SEQ ID NO: 143486 - DNA, 25 bp, Probe Sequence
agcattcgcaaggagtggaaaccac

SEQ ID NO: 143487 - DNA, 25 bp, Probe Sequence
agcatcccagggagagacacagccc

SEQ ID NO: 143488 - DNA, 25 bp, Probe Sequence
agcaggccaaggtctgagccacagc

SEQ ID NO: 143489 - DNA, 25 bp, Probe Sequence
agcaggagcgacactaccagctgct

SEQ ID NO: 143490 - DNA, 25 bp, Probe Sequence
agctgggcgacagcatggccaacta

SEQ ID NO: 143491 - DNA, 25 bp, Probe Sequence
agcttgacgcaccaagcggaactgc

SEQ ID NO: 143492 - DNA, 25 bp, Probe Sequence
agcttgctccctacgatgagaactg

SEQ ID NO: 143493 - DNA, 25 bp, Probe Sequence
agcttgtgcccctgagatgagacgc

SEQ ID NO: 143494 - DNA, 25 bp, Probe Sequence
agcttcccgagctgatgctaaagaa

SEQ ID NO: 143495 - DNA, 25 bp, Probe Sequence
agcttctccgagagtggaatcaact

SEQ ID NO: 143496 - DNA, 25 bp, Probe Sequence
agctctcctcggagctgggagactt

SEQ ID NO: 143497 - DNA, 25 bp, Probe Sequence
agctctaccctcagcggatgataat

SEQ ID NO: 143498 - DNA, 25 bp, Probe Sequence
agctctaccctcagcggatgataat

SEQ ID NO: 143499 - DNA, 25 bp, Probe Sequence
agcatgtaccggaggctgagagaga

SEQ ID NO: 143500 - DNA, 25 bp, Probe Sequence
agctcttcgtggaggctgtggaaca

SEQ ID NO: 143501 - DNA, 25 bp, Probe Sequence
agcattctcgatagtgggcttggcc

SEQ ID NO: 143502 - DNA, 25 bp, Probe Sequence
agcatttcgatcctcgtcaggtgca

SEQ ID NO: 143503 - DNA, 25 bp, Probe Sequence
agcttcacgcactatcgatagggca

SEQ ID NO: 143504 - DNA, 25 bp, Probe Sequence
agcttgcagtgccaaaatcgcggca

SEQ ID NO: 143505 - DNA, 25 bp, Probe Sequence
agctgtactgcgaaacccacgcaag

SEQ ID NO: 143506 - DNA, 25 bp, Probe Sequence
agcttctttgtggcttacactggaa

SEQ ID NO: 143507 - DNA, 25 bp, Probe Sequence
agctttgcattaccttacatgacta

SEQ ID NO: 143508 - DNA, 25 bp, Probe Sequence
agctcttctatagcatcttcttctg

SEQ ID NO: 143509 - DNA, 25 bp, Probe Sequence
agcatcttgtctatcatgttttgta

SEQ ID NO: 143510 - DNA, 25 bp, Probe Sequence
agcatcttatgtggactttctctgt

SEQ ID NO: 143511 - DNA, 25 bp, Probe Sequence
agctttagccaactttctgtgaagg

SEQ ID NO: 143512 - DNA, 25 bp, Probe Sequence
agcttataataacttctttagcaga

SEQ ID NO: 143513 - DNA, 25 bp, Probe Sequence
agctctgaaagctagttattgtcaa

SEQ ID NO: 143514 - DNA, 25 bp, Probe Sequence
agctttatctgctgttgttgatgca

SEQ ID NO: 143515 - DNA, 25 bp, Probe Sequence
agctttattcctaatgtgggcacat

SEQ ID NO: 143516 - DNA, 25 bp, Probe Sequence
agctttattccttagatggttctag

SEQ ID NO: 143517 - DNA, 25 bp, Probe Sequence
agctttatccactaagtttgtgtaa

SEQ ID NO: 143518 - DNA, 25 bp, Probe Sequence
agcatatgtccttgcagaatttttt

SEQ ID NO: 143519 - DNA, 25 bp, Probe Sequence
agcttcaccttggagaatttttcta

SEQ ID NO: 143520 - DNA, 25 bp, Probe Sequence
agcataacccttaaataatttcatt

SEQ ID NO: 143521 - DNA, 25 bp, Probe Sequence
agcttcagacaccttgaaagtccta

SEQ ID NO: 143522 - DNA, 25 bp, Probe Sequence
agcttggaggctttagtcattccca

SEQ ID NO: 143523 - DNA, 25 bp, Probe Sequence
agcttcaggggatatgctcgtcccg

SEQ ID NO: 143524 - DNA, 25 bp, Probe Sequence
agcttcggggacaatctggtcaccc

SEQ ID NO: 143525 - DNA, 25 bp, Probe Sequence
agctttgtgggcgcatcgagtgccc

SEQ ID NO: 143526 - DNA, 25 bp, Probe Sequence
acgttgatggcagactggggctcct

SEQ ID NO: 143527 - DNA, 25 bp, Probe Sequence
agctttaggctgggcatggtggctc

SEQ ID NO: 143528 - DNA, 25 bp, Probe Sequence
agcttgtgagaggcctgctgagtcc

SEQ ID NO: 143529 - DNA, 25 bp, Probe Sequence
agctactagcattatctgtggctgc

SEQ ID NO: 143530 - DNA, 25 bp, Probe Sequence
agctgaatagctttgcggaggagtt

SEQ ID NO: 143531 - DNA, 25 bp, Probe Sequence
agcatagttcttaggtgggcacctt

SEQ ID NO: 143532 - DNA, 25 bp, Probe Sequence
agcttttctatgtgattgtgccgtc

SEQ ID NO: 143533 - DNA, 25 bp, Probe Sequence
agcttttctatgtgattgtgccgtc

SEQ ID NO: 143534 - DNA, 25 bp, Probe Sequence
agcttgttgtagtgatgctggccaa

SEQ ID NO: 143535 - DNA, 25 bp, Probe Sequence
agcttgaagaactatgatccccaga

SEQ ID NO: 143536 - DNA, 25 bp, Probe Sequence
agcttgcagtgagctgagatcccgc

SEQ ID NO: 143537 - DNA, 25 bp, Probe Sequence
agcttgagtcccagatacactcatg

SEQ ID NO: 143538 - DNA, 25 bp, Probe Sequence
agctggagtcctaggcacagctcta

SEQ ID NO: 143539 - DNA, 25 bp, Probe Sequence
agctggtgtccaacagacaccacct

SEQ ID NO: 143540 - DNA, 25 bp, Probe Sequence
agctgggatcatgctagtcacttcc

SEQ ID NO: 143541 - DNA, 25 bp, Probe Sequence
agcatgggcattgcaatcccagtgt

SEQ ID NO: 143542 - DNA, 25 bp, Probe Sequence
agctcgccaatggaattcctgactc

SEQ ID NO: 143543 - DNA, 25 bp, Probe Sequence
agcattgccaagaacttcagcagac

SEQ ID NO: 143544 - DNA, 25 bp, Probe Sequence
agcttcccagaacatcacatatcac

SEQ ID NO: 143545 - DNA, 25 bp, Probe Sequence
agcttccaacttcagatctaacttt

SEQ ID NO: 143546 - DNA, 25 bp, Probe Sequence
agcttaaacacttggcatacaactg

SEQ ID NO: 143547 - DNA, 25 bp, Probe Sequence
agctaaagaacttctgcacgcaaaa

SEQ ID NO: 143548 - DNA, 25 bp, Probe Sequence
agctacaaacaatgccacgcttata

SEQ ID NO: 143549 - DNA, 25 bp, Probe Sequence
agcatacctcaaaaggccctagcta

SEQ ID NO: 143550 - DNA, 25 bp, Probe Sequence
agctacctgaataaactaccagtga

SEQ ID NO: 143551 - DNA, 25 bp, Probe Sequence
agctagactaggagaccagaagtga

SEQ ID NO: 143552 - DNA, 25 bp, Probe Sequence
agctggctaaggatgactctaagtg

SEQ ID NO: 143553 - DNA, 25 bp, Probe Sequence
agctctgccaagcagaggctcccgt

SEQ ID NO: 143554 - DNA, 25 bp, Probe Sequence
agctctgccaagcagaggctcccgt

SEQ ID NO: 143555 - DNA, 25 bp, Probe Sequence
agctcatccacacttgatactacca

SEQ ID NO: 143556 - DNA, 25 bp, Probe Sequence
agcttacagatttgatcccgttcga

SEQ ID NO: 143557 - DNA, 25 bp, Probe Sequence
agctgtaagatattcgtcggttcga

SEQ ID NO: 143558 - DNA, 25 bp, Probe Sequence
agcgttcgaacgcactgatttcgac

SEQ ID NO: 143559 - DNA, 25 bp, Probe Sequence
agcgtggcttcagggagtgttccca

SEQ ID NO: 143560 - DNA, 25 bp, Probe Sequence
agctaggttttgcagttcccaacca

SEQ ID NO: 143561 - DNA, 25 bp, Probe Sequence
cagtccgtttatcactttaccaaca

SEQ ID NO: 143562 - DNA, 25 bp, Probe Sequence
accacgtatgtacatgggtaccaaa

SEQ ID NO: 143563 - DNA, 25 bp, Probe Sequence
agctacgtagttcagtggctgtccc

SEQ ID NO: 143564 - DNA, 25 bp, Probe Sequence
agctttgtcagtcaaggggctccac

SEQ ID NO: 143565 - DNA, 25 bp, Probe Sequence
agcttgttcagcttggaggtccttc

SEQ ID NO: 143566 - DNA, 25 bp, Probe Sequence
agctatgtccagctgggtgttctgc

SEQ ID NO: 143567 - DNA, 25 bp, Probe Sequence
agcttgtaaccagggtatgatctgc

SEQ ID NO: 143568 - DNA, 25 bp, Probe Sequence
agcttgttccaagggagcatgattg

SEQ ID NO: 143569 - DNA, 25 bp, Probe Sequence
agctcagttctagcaggtggcacga

SEQ ID NO: 143570 - DNA, 25 bp, Probe Sequence
agctagtatcatgccacggcactct

SEQ ID NO: 143571 - DNA, 25 bp, Probe Sequence
agcttgtcatcaatggaaatcccat

SEQ ID NO: 143572 - DNA, 25 bp, Probe Sequence
agctgtgttctggtacaacctcttg

SEQ ID NO: 143573 - DNA, 25 bp, Probe Sequence
agctgagcttctgccaaatttcatt

SEQ ID NO: 143574 - DNA, 25 bp, Probe Sequence
agctagctcatccctgaatatttgc

SEQ ID NO: 143575 - DNA, 25 bp, Probe Sequence
agcatactgccttctgacagactgg

SEQ ID NO: 143576 - DNA, 25 bp, Probe Sequence
agctgaagctgttgcttgcatacag

SEQ ID NO: 143577 - DNA, 25 bp, Probe Sequence
agctcaggcatgtttgctgcagaag

SEQ ID NO: 143578 - DNA, 25 bp, Probe Sequence
agctcatggagcttcatggtgaagg

SEQ ID NO: 143579 - DNA, 25 bp, Probe Sequence
agctcagtagctttggtcataggca

SEQ ID NO: 143580 - DNA, 25 bp, Probe Sequence
agcatcactgatccctggacagaaa

SEQ ID NO: 143581 - DNA, 25 bp, Probe Sequence
agctcctgtcagccatcgagaagct

SEQ ID NO: 143582 - DNA, 25 bp, Probe Sequence
agctgctctgtcacataatactttg

SEQ ID NO: 143583 - DNA, 25 bp, Probe Sequence
agcttcagtctttacataccatgaa

SEQ ID NO: 143584 - DNA, 25 bp, Probe Sequence
agctgttgtccttaaaaatgaattg

SEQ ID NO: 143585 - DNA, 25 bp, Probe Sequence
agctttgcccaaacaatccatggat

SEQ ID NO: 143586 - DNA, 25 bp, Probe Sequence
agctttgctccagatcagatcgatg

SEQ ID NO: 143587 - DNA, 25 bp, Probe Sequence
agcattccgcgagacgttgtttgag

SEQ ID NO: 143588 - DNA, 25 bp, Probe Sequence
agcttccattgagaagtctttctgt

SEQ ID NO: 143589 - DNA, 25 bp, Probe Sequence
agcttctcattgtgtagaatttcta

SEQ ID NO: 143590 - DNA, 25 bp, Probe Sequence
agctattagtgacctatgacagttt

SEQ ID NO: 143591 - DNA, 25 bp, Probe Sequence
agctttcaatatgctcaacgcattc

SEQ ID NO: 143592 - DNA, 25 bp, Probe Sequence
agcatctccaattttcagcagctca

SEQ ID NO: 143593 - DNA, 25 bp, Probe Sequence
agcattccaataataaggccatgac

SEQ ID NO: 143594 - DNA, 25 bp, Probe Sequence
agcatcgcacagaaaacggccatct

SEQ ID NO: 143595 - DNA, 25 bp, Probe Sequence
agcattgcatacatggatcaggcca

SEQ ID NO: 143596 - DNA, 25 bp, Probe Sequence
agcattagatgcaggtcgtacataa

SEQ ID NO: 143597 - DNA, 25 bp, Probe Sequence
agctaattctggcccgtgacatact

SEQ ID NO: 143598 - DNA, 25 bp, Probe Sequence
agctacatcctactgtgcgtgtata

SEQ ID NO: 143599 - DNA, 25 bp, Probe Sequence
agcttctcctaactccgatgaagac

SEQ ID NO: 143600 - DNA, 25 bp, Probe Sequence
agctccgtgtgatgcccagtaaagc

SEQ ID NO: 143601 - DNA, 25 bp, Probe Sequence
agctgacggtgacttcaagatcaaa

SEQ ID NO: 143602 - DNA, 25 bp, Probe Sequence
agctacagcgtactccaggagaaga

SEQ ID NO: 143603 - DNA, 25 bp, Probe Sequence
agctatatggctatttggatgacaa

SEQ ID NO: 143604 - DNA, 25 bp, Probe Sequence
agctctgaagtggttctgaacacac

SEQ ID NO: 143605 - DNA, 25 bp, Probe Sequence
agctaggatgtgcattctccagcca

SEQ ID NO: 143606 - DNA, 25 bp, Probe Sequence
agctatcggtggttctgccacaggt

SEQ ID NO: 143607 - DNA, 25 bp, Probe Sequence
agctatcaggatcattgcgcactca

SEQ ID NO: 143608 - DNA, 25 bp, Probe Sequence
agcttcagcagcagagtgacaccag

SEQ ID NO: 143609 - DNA, 25 bp, Probe Sequence
agctagcagccactgggaatcagag

SEQ ID NO: 143610 - DNA, 25 bp, Probe Sequence
agctcgagccgaaggacatatggtt

SEQ ID NO: 143611 - DNA, 25 bp, Probe Sequence
agctgccaccgctgtagtaggattc

SEQ ID NO: 143612 - DNA, 25 bp, Probe Sequence
agctgccaccgctgtagtagtagtc

SEQ ID NO: 143613 - DNA, 25 bp, Probe Sequence
agctccatcacgcggcagaagaagc

SEQ ID NO: 143614 - DNA, 25 bp, Probe Sequence
agctacaacatgggcagcaacagca

SEQ ID NO: 143615 - DNA, 25 bp, Probe Sequence
agcttcacaatggccatgaacacct

SEQ ID NO: 143616 - DNA, 25 bp, Probe Sequence
agcttcagcttaactgacagatgtt

SEQ ID NO: 143617 - DNA, 25 bp, Probe Sequence
agcattctcatcagtcgcaatgatt

SEQ ID NO: 143618 - DNA, 25 bp, Probe Sequence
agcatatcctctattattgaatgag

SEQ ID NO: 143619 - DNA, 25 bp, Probe Sequence
agctatccttccatgatctgatcat

SEQ ID NO: 143620 - DNA, 25 bp, Probe Sequence
agcttcagtagccaatttgatcatt

SEQ ID NO: 143621 - DNA, 25 bp, Probe Sequence
agctcatggctagcatatgggcact

SEQ ID NO: 143622 - DNA, 25 bp, Probe Sequence
agctctggcttaactggatgccata

SEQ ID NO: 143623 - DNA, 25 bp, Probe Sequence
agcttcctgttactgagatgtcttc

SEQ ID NO: 143624 - DNA, 25 bp, Probe Sequence
agcttcctgttactgagatgtcttc

SEQ ID NO: 143625 - DNA, 25 bp, Probe Sequence
agcgacttttattgcagatgtcttt

SEQ ID NO: 143626 - DNA, 25 bp, Probe Sequence
agcgacctttgggcaggtttctgct

SEQ ID NO: 143627 - DNA, 25 bp, Probe Sequence
agcgaagttggcgggactttcagag

SEQ ID NO: 143628 - DNA, 25 bp, Probe Sequence
agctacctatgataaactctgtaag

SEQ ID NO: 143629 - DNA, 25 bp, Probe Sequence
agcttcaaggacaataagatgttaa

SEQ ID NO: 143630 - DNA, 25 bp, Probe Sequence
agcttagtgctaaaatcagtgtaac

SEQ ID NO: 143631 - DNA, 25 bp, Probe Sequence
agcatttgttcatacaatgtggcaa

SEQ ID NO: 143632 - DNA, 25 bp, Probe Sequence
agcttggtgccattatcctgtggaa

SEQ ID NO: 143633 - DNA, 25 bp, Probe Sequence
agcattggctgaaaatcacttaaat

SEQ ID NO: 143634 - DNA, 25 bp, Probe Sequence
agctggtggctggaccaatgtaaat

SEQ ID NO: 143635 - DNA, 25 bp, Probe Sequence
agcgcagagcgggctcgaagaaaat

SEQ ID NO: 143636 - DNA, 25 bp, Probe Sequence
accaggctggtctaccaggtagttg

SEQ ID NO: 143637 - DNA, 25 bp, Probe Sequence
agcctagggacttctacttgcagta

SEQ ID NO: 143638 - DNA, 25 bp, Probe Sequence
agccgagattgcatcactgcactcc

SEQ ID NO: 143639 - DNA, 25 bp, Probe Sequence
agctcaaggtcaaatcagcattcct

SEQ ID NO: 143640 - DNA, 25 bp, Probe Sequence
agctcacagagctatgaacagaata

SEQ ID NO: 143641 - DNA, 25 bp, Probe Sequence
agctcaacccaaaagaaagacaggg

SEQ ID NO: 143642 - DNA, 25 bp, Probe Sequence
agctaatagccctaatgaacataga

SEQ ID NO: 143643 - DNA, 25 bp, Probe Sequence
agcatatatacccacgctgacaacc

SEQ ID NO: 143644 - DNA, 25 bp, Probe Sequence
agctaataaaggcgcacatgactcc

SEQ ID NO: 143645 - DNA, 25 bp, Probe Sequence
agctagcattcctagggaacctccc

SEQ ID NO: 143646 - DNA, 25 bp, Probe Sequence
agctgctctaagaagggaaccccca

SEQ ID NO: 143647 - DNA, 25 bp, Probe Sequence
agcgtgctcaagatggagtatgccg

SEQ ID NO: 143648 - DNA, 25 bp, Probe Sequence
agctttgagctgatgcgggagccgt

SEQ ID NO: 143649 - DNA, 25 bp, Probe Sequence
agctttgagctctatggcgctgact

SEQ ID NO: 143650 - DNA, 25 bp, Probe Sequence
agcttgtgcatttagtgtgttcctt

SEQ ID NO: 143651 - DNA, 25 bp, Probe Sequence
agctattcattccagattttcgtgt

SEQ ID NO: 143652 - DNA, 25 bp, Probe Sequence
agctttctcaggaactagtctggta

SEQ ID NO: 143653 - DNA, 25 bp, Probe Sequence
agctttccagctaagataattgcgt

SEQ ID NO: 143654 - DNA, 25 bp, Probe Sequence
agctatcccactaaatattgtaatc

SEQ ID NO: 143655 - DNA, 25 bp, Probe Sequence
agctcaacacctaaattattaattt

SEQ ID NO: 143656 - DNA, 25 bp, Probe Sequence
agctaacaccatacccatcattggt

SEQ ID NO: 143657 - DNA, 25 bp, Probe Sequence
agctaagagctctgtctcacatttt

SEQ ID NO: 143658 - DNA, 25 bp, Probe Sequence
agctttggttggccttgatttcttc

SEQ ID NO: 143659 - DNA, 25 bp, Probe Sequence
agctttgggagccttttctactatc

SEQ ID NO: 143660 - DNA, 25 bp, Probe Sequence
agctgtgcttggagtctttatttat

SEQ ID NO: 143661 - DNA, 25 bp, Probe Sequence
agcttgttctcaggctttgataagt

SEQ ID NO: 143662 - DNA, 25 bp, Probe Sequence
agcttctttcttcatctgcaaaatg

SEQ ID NO: 143663 - DNA, 25 bp, Probe Sequence
agctactatttaagcatccaaaaat

SEQ ID NO: 143664 - DNA, 25 bp, Probe Sequence
agctacttgactttctcctagagaa

SEQ ID NO: 143665 - DNA, 25 bp, Probe Sequence
agccgtgggcaaaccctgaagacac

SEQ ID NO: 143666 - DNA, 25 bp, Probe Sequence
accgggccggactgtacagagccct

SEQ ID NO: 143667 - DNA, 25 bp, Probe Sequence
acccggacgaggtggtggtgcctct

SEQ ID NO: 143668 - DNA, 25 bp, Probe Sequence
agcccacgacggtggcgtttgacgt

SEQ ID NO: 143669 - DNA, 25 bp, Probe Sequence
agcccccatggggaaggttctggat

SEQ ID NO: 143670 - DNA, 25 bp, Probe Sequence
agccgccccctgggggattctatgt

SEQ ID NO: 143671 - DNA, 25 bp, Probe Sequence
agcttcccccatagaaggatttcat

SEQ ID NO: 143672 - DNA, 25 bp, Probe Sequence
agcttctcccaaaaaagcacctggt

SEQ ID NO: 143673 - DNA, 25 bp, Probe Sequence
acgttctccaaaaagtgcaccagga

SEQ ID NO: 143674 - DNA, 25 bp, Probe Sequence
acgttcctcatgaaagggacgacgg

SEQ ID NO: 143675 - DNA, 25 bp, Probe Sequence
agctttcctcatgaagggacatcac

SEQ ID NO: 143676 - DNA, 25 bp, Probe Sequence
agctttccatctgatttagaatctc

SEQ ID NO: 143677 - DNA, 25 bp, Probe Sequence
agctgttcttctgttctgcagacac

SEQ ID NO: 143678 - DNA, 25 bp, Probe Sequence
agctgaaattcatgtgttcaaatct

SEQ ID NO: 143679 - DNA, 25 bp, Probe Sequence
agctgatatttcctacctaagcatc

SEQ ID NO: 143680 - DNA, 25 bp, Probe Sequence
agctgaatatggagacttaaatgca

SEQ ID NO: 143681 - DNA, 25 bp, Probe Sequence
agctgaagacgctgtttgagcaagc

SEQ ID NO: 143682 - DNA, 25 bp, Probe Sequence
agcgatatgggggcttcatgagaag

SEQ ID NO: 143683 - DNA, 25 bp, Probe Sequence
agctgaaggtgtcctacatcagcag

SEQ ID NO: 143684 - DNA, 25 bp, Probe Sequence
agctggcagggtgccaaccatgcag

SEQ ID NO: 143685 - DNA, 25 bp, Probe Sequence
agctatagtggcgcacaagcgctct

SEQ ID NO: 143686 - DNA, 25 bp, Probe Sequence
agctatggtccaaccaggacctata

SEQ ID NO: 143687 - DNA, 25 bp, Probe Sequence
agctgacggagaagcacaggtcctt

SEQ ID NO: 143688 - DNA, 25 bp, Probe Sequence
agctgacggatcaccagtgggcact

SEQ ID NO: 143689 - DNA, 25 bp, Probe Sequence
agctcagggataaccagggacattc

SEQ ID NO: 143690 - DNA, 25 bp, Probe Sequence
agctcataggaacaggtagactttc

SEQ ID NO: 143691 - DNA, 25 bp, Probe Sequence
agctgtaaatacagaggaggctttg

SEQ ID NO: 143692 - DNA, 25 bp, Probe Sequence
agcttgggtgacagagcaagactct

SEQ ID NO: 143693 - DNA, 25 bp, Probe Sequence
agcttgtggggcaggcaagcccttc

SEQ ID NO: 143694 - DNA, 25 bp, Probe Sequence
agcggtagccagaggtaccagcttc

SEQ ID NO: 143695 - DNA, 25 bp, Probe Sequence
agcggaagtacaggcgctactcgcg

SEQ ID NO: 143696 - DNA, 25 bp, Probe Sequence
agctaagcagtgacaggctcaactg

SEQ ID NO: 143697 - DNA, 25 bp, Probe Sequence
agctaatggtgatggtggtctcagt

SEQ ID NO: 143698 - DNA, 25 bp, Probe Sequence
agctcaatgggcagctgcggtccat

SEQ ID NO: 143699 - DNA, 25 bp, Probe Sequence
agctcaagcaggaactcaagtacag

SEQ ID NO: 143700 - DNA, 25 bp, Probe Sequence
agctcaagccactgatcaaggtcat

SEQ ID NO: 143701 - DNA, 25 bp, Probe Sequence
agctcaagacattttggaggatctg

SEQ ID NO: 143702 - DNA, 25 bp, Probe Sequence
agctgcaaatttcatggcagttcat

SEQ ID NO: 143703 - DNA, 25 bp, Probe Sequence
agcggaaagtgagtatgcggctgca

SEQ ID NO: 143704 - DNA, 25 bp, Probe Sequence
agcggcaaagtgtttgagcctttcc

SEQ ID NO: 143705 - DNA, 25 bp, Probe Sequence
agctggaagatggtcgtaccctgtc

SEQ ID NO: 143706 - DNA, 25 bp, Probe Sequence
agcggaggagctccgctaagacctc

SEQ ID NO: 143707 - DNA, 25 bp, Probe Sequence
acaggactgacaccctaatgccaat

SEQ ID NO: 143708 - DNA, 25 bp, Probe Sequence
agctggaagcagcctcttaataaaa

SEQ ID NO: 143709 - DNA, 25 bp, Probe Sequence
agctgtaagagtctggcttagaaca

SEQ ID NO: 143710 - DNA, 25 bp, Probe Sequence
agctgtatagtgcctgctgacttag

SEQ ID NO: 143711 - DNA, 25 bp, Probe Sequence
agctgcattggttctgcatggcagg

SEQ ID NO: 143712 - DNA, 25 bp, Probe Sequence
agctcataagagtctcaatggagtt

SEQ ID NO: 143713 - DNA, 25 bp, Probe Sequence
agctcaaagaggtccgtagtgctca

SEQ ID NO: 143714 - DNA, 25 bp, Probe Sequence
agctaaagtctgatctgtagatgtc

SEQ ID NO: 143715 - DNA, 25 bp, Probe Sequence
agctcaaagtctccagtggaagctc

SEQ ID NO: 143716 - DNA, 25 bp, Probe Sequence
agctcaacagtgtgtggattatgcc

SEQ ID NO: 143717 - DNA, 25 bp, Probe Sequence
agcgaacatctgggtggttagcatt

SEQ ID NO: 143718 - DNA, 25 bp, Probe Sequence
agctaatctctcggaggtagactgg

SEQ ID NO: 143719 - DNA, 25 bp, Probe Sequence
agctgaacaatcttggatgtagtct

SEQ ID NO: 143720 - DNA, 25 bp, Probe Sequence
agctggacatgactccgtttttggc

SEQ ID NO: 143721 - DNA, 25 bp, Probe Sequence
agcttccagcagcggtatgttgggc

SEQ ID NO: 143722 - DNA, 25 bp, Probe Sequence
agctagctgaacagatgtttcaggg

SEQ ID NO: 143723 - DNA, 25 bp, Probe Sequence
agctcagcttagatgtgttagaatg

SEQ ID NO: 143724 - DNA, 25 bp, Probe Sequence
agctcagcttcaggcttcttatgtt

SEQ ID NO: 143725 - DNA, 25 bp, Probe Sequence
agctgacattaccatttaattttat

SEQ ID NO: 143726 - DNA, 25 bp, Probe Sequence
agctttgtactcagataatttatat

SEQ ID NO: 143727 - DNA, 25 bp, Probe Sequence
agctttgcaaccttgtactttacaa

SEQ ID NO: 143728 - DNA, 25 bp, Probe Sequence
agcctccgactgggtcattttgaac

SEQ ID NO: 143729 - DNA, 25 bp, Probe Sequence
agctgccctagtgggtatctcttag

SEQ ID NO: 143730 - DNA, 25 bp, Probe Sequence
agctcacccagcagatgttcgatgc

SEQ ID NO: 143731 - DNA, 25 bp, Probe Sequence
agctctgccaccaatatgtatcttc

SEQ ID NO: 143732 - DNA, 25 bp, Probe Sequence
agctctccagaggattcaatcttgt

SEQ ID NO: 143733 - DNA, 25 bp, Probe Sequence
agctcttcgggagaatctttatttt

SEQ ID NO: 143734 - DNA, 25 bp, Probe Sequence
agctccttccagcgatcattttatt

SEQ ID NO: 143735 - DNA, 25 bp, Probe Sequence
agctccttccagcgatcattttatt

SEQ ID NO: 143736 - DNA, 25 bp, Probe Sequence
agctctcttgcactgaggaaatttt

SEQ ID NO: 143737 - DNA, 25 bp, Probe Sequence
agctgctctgtatggctaaagcttt

SEQ ID NO: 143738 - DNA, 25 bp, Probe Sequence
agctttatgatatcaaagactcatt

SEQ ID NO: 143739 - DNA, 25 bp, Probe Sequence
agcttgtcactaagaattttcattt

SEQ ID NO: 143740 - DNA, 25 bp, Probe Sequence
agctatggcatcatataatttgcta

SEQ ID NO: 143741 - DNA, 25 bp, Probe Sequence
agctgagccttggatcaactctgct

SEQ ID NO: 143742 - DNA, 25 bp, Probe Sequence
agctcaccattggctcgaagctgca

SEQ ID NO: 143743 - DNA, 25 bp, Probe Sequence
agctactctcaggctgcaagcagtg

SEQ ID NO: 143744 - DNA, 25 bp, Probe Sequence
agctagctctagcatgaagcttttt

SEQ ID NO: 143745 - DNA, 25 bp, Probe Sequence
agctatgtaatcttgacctctttgg

SEQ ID NO: 143746 - DNA, 25 bp, Probe Sequence
agcttgatcaacttgtctgttcctg

SEQ ID NO: 143747 - DNA, 25 bp, Probe Sequence
agctgctaaatgttctctttgccat

SEQ ID NO: 143748 - DNA, 25 bp, Probe Sequence
agctgctaaatgttctctttgccat

SEQ ID NO: 143749 - DNA, 25 bp, Probe Sequence
agctgtgacatctatgtccttccct

SEQ ID NO: 143750 - DNA, 25 bp, Probe Sequence
agcttatatttgacattcttcactg

SEQ ID NO: 143751 - DNA, 25 bp, Probe Sequence
agctgtcagtttatgtcttacattc

SEQ ID NO: 143752 - DNA, 25 bp, Probe Sequence
agctctgagttcatggatgttaatt

SEQ ID NO: 143753 - DNA, 25 bp, Probe Sequence
agctctggaggcaggtgagtcaatc

SEQ ID NO: 143754 - DNA, 25 bp, Probe Sequence
agctctgttgtgatggggtcattct

SEQ ID NO: 143755 - DNA, 25 bp, Probe Sequence
agctctttgtgacagggcttttcag

SEQ ID NO: 143756 - DNA, 25 bp, Probe Sequence
agctgttttgagccagggttttttg

SEQ ID NO: 143757 - DNA, 25 bp, Probe Sequence
agcgtccgcatgctaatcgcttttt

SEQ ID NO: 143758 - DNA, 25 bp, Probe Sequence
agcgtccagccagagacctgggact

SEQ ID NO: 143759 - DNA, 25 bp, Probe Sequence
agcgtccagccagagacctgggact

SEQ ID NO: 143760 - DNA, 25 bp, Probe Sequence
agcgactaggagctgagccttctac

SEQ ID NO: 143761 - DNA, 25 bp, Probe Sequence
accactagacaacgcaggttgccgc

SEQ ID NO: 143762 - DNA, 25 bp, Probe Sequence
accaaatactgcccatggcctgttt

SEQ ID NO: 143763 - DNA, 25 bp, Probe Sequence
agctctaaaatgcactgctgccatc

SEQ ID NO: 143764 - DNA, 25 bp, Probe Sequence
agctccacaaagccaatctcaatcc

SEQ ID NO: 143765 - DNA, 25 bp, Probe Sequence
agctccacaaagccaatctcaatcc

SEQ ID NO: 143766 - DNA, 25 bp, Probe Sequence
agctccacagaagacacgtgttttt

SEQ ID NO: 143767 - DNA, 25 bp, Probe Sequence
agctcatcatgaccagaaactgttt

SEQ ID NO: 143768 - DNA, 25 bp, Probe Sequence
agctcaggcagggaaagcagttgca

SEQ ID NO: 143769 - DNA, 25 bp, Probe Sequence
agctcaggcagggaaagcagttgca

SEQ ID NO: 143770 - DNA, 25 bp, Probe Sequence
agctagggccagtgacagttgcaga

SEQ ID NO: 143771 - DNA, 25 bp, Probe Sequence
agctggggccgatgaagatgacaag

SEQ ID NO: 143772 - DNA, 25 bp, Probe Sequence
agcgggaagctgtgaatgatgaaac

SEQ ID NO: 143773 - DNA, 25 bp, Probe Sequence
agcgggtcaatgctgtcaggaaact

SEQ ID NO: 143774 - DNA, 25 bp, Probe Sequence
agctgatggccttgtttcaaaattc

SEQ ID NO: 143775 - DNA, 25 bp, Probe Sequence
agcttaccctgattccagaaatatc

SEQ ID NO: 143776 - DNA, 25 bp, Probe Sequence
agctaacctctgtttcaagaatgca

SEQ ID NO: 143777 - DNA, 25 bp, Probe Sequence
agctaacctctgtttcaagaatgca

SEQ ID NO: 143778 - DNA, 25 bp, Probe Sequence
agcttagccaagttgtaaccatcat

SEQ ID NO: 143779 - DNA, 25 bp, Probe Sequence
agctgatatcagagacttagaccca

SEQ ID NO: 143780 - DNA, 25 bp, Probe Sequence
agctcaatgagcatgtttagacttt

SEQ ID NO: 143781 - DNA, 25 bp, Probe Sequence
agctcggatgccctgcatcaagact

SEQ ID NO: 143782 - DNA, 25 bp, Probe Sequence
agctccgatccactgcagaaagttg

SEQ ID NO: 143783 - DNA, 25 bp, Probe Sequence
agctccgatccactgcagaaagttg

SEQ ID NO: 143784 - DNA, 25 bp, Probe Sequence
agctacttccgggagggcttgaggt

SEQ ID NO: 143785 - DNA, 25 bp, Probe Sequence
agctactttcccagggctatatggc

SEQ ID NO: 143786 - DNA, 25 bp, Probe Sequence
agcggcctttctatggagtcaattc

SEQ ID NO: 143787 - DNA, 25 bp, Probe Sequence
agctaccgttaaatgaggacaaatc

SEQ ID NO: 143788 - DNA, 25 bp, Probe Sequence
agctgaccctcaaatacggagcgaa

SEQ ID NO: 143789 - DNA, 25 bp, Probe Sequence
agctacccattccaccagagagtag

SEQ ID NO: 143790 - DNA, 25 bp, Probe Sequence
agctcaccagcagtgaatccaaaaa

SEQ ID NO: 143791 - DNA, 25 bp, Probe Sequence
agctcaccaagggcctcataaaaga

SEQ ID NO: 143792 - DNA, 25 bp, Probe Sequence
agctctccaaggccgtgcataaggc

SEQ ID NO: 143793 - DNA, 25 bp, Probe Sequence
agctcaggaaggctgtcagacaggc

SEQ ID NO: 143794 - DNA, 25 bp, Probe Sequence
agctaggctgggccgggatcagatg

SEQ ID NO: 143795 - DNA, 25 bp, Probe Sequence
agcgggcagggttgggctgaatcaa

SEQ ID NO: 143796 - DNA, 25 bp, Probe Sequence
agcgggagtggctgggtaatcggga

SEQ ID NO: 143797 - DNA, 25 bp, Probe Sequence
agcgggggtgggagaatcatcgggg

SEQ ID NO: 143798 - DNA, 25 bp, Probe Sequence
agctgggtgtggtggaacatgcctg

SEQ ID NO: 143799 - DNA, 25 bp, Probe Sequence
agcgtgtctggaaggtgaaccttga

SEQ ID NO: 143800 - DNA, 25 bp, Probe Sequence
agctttagctgaagacagaccgtta

SEQ ID NO: 143801 - DNA, 25 bp, Probe Sequence
agctctctgagttagacgaccgtgc

SEQ ID NO: 143802 - DNA, 25 bp, Probe Sequence
agctgccttgtgtgggactgagagg

SEQ ID NO: 143803 - DNA, 25 bp, Probe Sequence
agcccttgatgtcctgcaaatgaag

SEQ ID NO: 143804 - DNA, 25 bp, Probe Sequence
agctcctgctacactacaagacata

SEQ ID NO: 143805 - DNA, 25 bp, Probe Sequence
agctcatcttacacttgaacacaga

SEQ ID NO: 143806 - DNA, 25 bp, Probe Sequence
agctatactccaactttactaaacg

SEQ ID NO: 143807 - DNA, 25 bp, Probe Sequence
agctctaccgatatgttaccaaact

SEQ ID NO: 143808 - DNA, 25 bp, Probe Sequence
accagttcgaatgcctaccaagact

SEQ ID NO: 143809 - DNA, 25 bp, Probe Sequence
accacttaaagaggaaccagagctt

SEQ ID NO: 143810 - DNA, 25 bp, Probe Sequence
agccctctcaagttaaacgaactga

SEQ ID NO: 143811 - DNA, 25 bp, Probe Sequence
agccctctcaagttaaacgaactga

SEQ ID NO: 143812 - DNA, 25 bp, Probe Sequence
agccccatcagagttcttacgggtg

SEQ ID NO: 143813 - DNA, 25 bp, Probe Sequence
agctcaacttgcattaattcgggat

SEQ ID NO: 143814 - DNA, 25 bp, Probe Sequence
agctcaccttgagataacaatcagg

SEQ ID NO: 143815 - DNA, 25 bp, Probe Sequence
agctcaccctgagataacaggatga

SEQ ID NO: 143816 - DNA, 25 bp, Probe Sequence
agcccatcctggctaacatggtgaa

SEQ ID NO: 143817 - DNA, 25 bp, Probe Sequence
agccgtgtcgtatgacctagtaaac

SEQ ID NO: 143818 - DNA, 25 bp, Probe Sequence
acctgagtcttattgatcccttaac

SEQ ID NO: 143819 - DNA, 25 bp, Probe Sequence
caagcgaatcgagcttccctatgca

SEQ ID NO: 143820 - DNA, 25 bp, Probe Sequence
agcgtatacgagccttcacgcataa

SEQ ID NO: 143821 - DNA, 25 bp, Probe Sequence
agccgtacgctctttacagatacta

SEQ ID NO: 143822 - DNA, 25 bp, Probe Sequence
acggttaatctcttaacatagctgg

SEQ ID NO: 143823 - DNA, 25 bp, Probe Sequence
agcggtctatgtgaccaaatattgt

SEQ ID NO: 143824 - DNA, 25 bp, Probe Sequence
agcggcattaattcaccaatgcatt

SEQ ID NO: 143825 - DNA, 25 bp, Probe Sequence
agcggattgctttgcactcaggagt

SEQ ID NO: 143826 - DNA, 25 bp, Probe Sequence
agcctgatttttcctgcatgggaag

SEQ ID NO: 143827 - DNA, 25 bp, Probe Sequence
agctgtgtctgtatacactgggtaa

SEQ ID NO: 143828 - DNA, 25 bp, Probe Sequence
agctgatgcacgccgtcaaggaggt

SEQ ID NO: 143829 - DNA, 25 bp, Probe Sequence
agctggcaggcctcagaggactctt

SEQ ID NO: 143830 - DNA, 25 bp, Probe Sequence
agctggatgggctgagcgtgagcct

SEQ ID NO: 143831 - DNA, 25 bp, Probe Sequence
agctcgaggccatgagcagatatac

SEQ ID NO: 143832 - DNA, 25 bp, Probe Sequence
agctgctggtgttgtcactgagata

SEQ ID NO: 143833 - DNA, 25 bp, Probe Sequence
agctgggtgtaggcactgcagggag

SEQ ID NO: 143834 - DNA, 25 bp, Probe Sequence
agctgaggtgcttgggactaggagc

SEQ ID NO: 143835 - DNA, 25 bp, Probe Sequence
agctgagtttaacatgtgtggtctt

SEQ ID NO: 143836 - DNA, 25 bp, Probe Sequence
agctgagcttcaaaaggggggacat

SEQ ID NO: 143837 - DNA, 25 bp, Probe Sequence
agcgtggccatgaatcggggggcac

SEQ ID NO: 143838 - DNA, 25 bp, Probe Sequence
agcgggcaaggctttggagggcatg

SEQ ID NO: 143839 - DNA, 25 bp, Probe Sequence
agctggtcaaggtatggaacctggc

SEQ ID NO: 143840 - DNA, 25 bp, Probe Sequence
agctggccacaagattgaattccgt

SEQ ID NO: 143841 - DNA, 25 bp, Probe Sequence
agctggcaacacgtttgcaaaggtt

SEQ ID NO: 143842 - DNA, 25 bp, Probe Sequence
agctgtggaccactgcctgaaaggt

SEQ ID NO: 143843 - DNA, 25 bp, Probe Sequence
agcggagtagcagaagacaaggcat

SEQ ID NO: 143844 - DNA, 25 bp, Probe Sequence
agcggaatcgacttaccaaagagca

SEQ ID NO: 143845 - DNA, 25 bp, Probe Sequence
agcgggacgacgttgaagccatggc

SEQ ID NO: 143846 - DNA, 25 bp, Probe Sequence
agcggccaaacagttacaccttgtt

SEQ ID NO: 143847 - DNA, 25 bp, Probe Sequence
agctgcagtaaaagtaaatctcctt

SEQ ID NO: 143848 - DNA, 25 bp, Probe Sequence
agctcagttcagtaccataactaca

SEQ ID NO: 143849 - DNA, 25 bp, Probe Sequence
agctcacttattccaaaactaagga

SEQ ID NO: 143850 - DNA, 25 bp, Probe Sequence
agctcactgctttgctaagaaaaat

SEQ ID NO: 143851 - DNA, 25 bp, Probe Sequence
agctaagcattattaccaaagagtc

SEQ ID NO: 143852 - DNA, 25 bp, Probe Sequence
agcgatatttattatctgcaaggtt

SEQ ID NO: 143853 - DNA, 25 bp, Probe Sequence
agctcttttataaaccaggtttgag

SEQ ID NO: 143854 - DNA, 25 bp, Probe Sequence
agctctgtgtaggtaaccagatggc

SEQ ID NO: 143855 - DNA, 25 bp, Probe Sequence
agctctgttagaaacaccgtgtgct

SEQ ID NO: 143856 - DNA, 25 bp, Probe Sequence
agctcagtatggagtcaccaagttc

SEQ ID NO: 143857 - DNA, 25 bp, Probe Sequence
agctacttggtagttacaattccca

SEQ ID NO: 143858 - DNA, 25 bp, Probe Sequence
agctcccaggctataagaattcccc

SEQ ID NO: 143859 - DNA, 25 bp, Probe Sequence
agctcccggcattcaaggaaatctc

SEQ ID NO: 143860 - DNA, 25 bp, Probe Sequence
agctcctggagggcggataacatct

SEQ ID NO: 143861 - DNA, 25 bp, Probe Sequence
agcgtcttcacagcgaatacacagc

SEQ ID NO: 143862 - DNA, 25 bp, Probe Sequence
agctttctcacagaagtcacagctc

SEQ ID NO: 143863 - DNA, 25 bp, Probe Sequence
agctgctttccagaagctgatgagc

SEQ ID NO: 143864 - DNA, 25 bp, Probe Sequence
agctcaattcccaacatctataggt

SEQ ID NO: 143865 - DNA, 25 bp, Probe Sequence
agccctaccagcactggtcatgtct

SEQ ID NO: 143866 - DNA, 25 bp, Probe Sequence
agctcttaaagcaacctgtcagttt

SEQ ID NO: 143867 - DNA, 25 bp, Probe Sequence
agctctgaagggcacactacactat

SEQ ID NO: 143868 - DNA, 25 bp, Probe Sequence
agctcaaagagcttagacttcaaat

SEQ ID NO: 143869 - DNA, 25 bp, Probe Sequence
agctggattacgcaacagtaaatcc

SEQ ID NO: 143870 - DNA, 25 bp, Probe Sequence
agcgtatgtagacaatggataaatc

SEQ ID NO: 143871 - DNA, 25 bp, Probe Sequence
gacgtaccggctctggaaaatccgc

SEQ ID NO: 143872 - DNA, 25 bp, Probe Sequence
actgtgaacggctcatggtacattc

SEQ ID NO: 143873 - DNA, 25 bp, Probe Sequence
agctggagacggcgatggagaccct

SEQ ID NO: 143874 - DNA, 25 bp, Probe Sequence
agcgcagaaaggctgaatagttcca

SEQ ID NO: 143875 - DNA, 25 bp, Probe Sequence
agcctgaatgggctcacttttctct

SEQ ID NO: 143876 - DNA, 25 bp, Probe Sequence
agcccaaggggtacatttattgctt

SEQ ID NO: 143877 - DNA, 25 bp, Probe Sequence
agcccagggctgagttttaagattt

SEQ ID NO: 143878 - DNA, 25 bp, Probe Sequence
accctgggcagtggttcttaggcag

SEQ ID NO: 143879 - DNA, 25 bp, Probe Sequence
agccgctgtggacaggtttctggcc

SEQ ID NO: 143880 - DNA, 25 bp, Probe Sequence
agcccttgaacctgtcatcgggctc

SEQ ID NO: 143881 - DNA, 25 bp, Probe Sequence
agcccactgaacaaggtctcagggg

SEQ ID NO: 143882 - DNA, 25 bp, Probe Sequence
agctctccctacagtgctcaaaggg

SEQ ID NO: 143883 - DNA, 25 bp, Probe Sequence
agctgcattactattgtgaagaagg

SEQ ID NO: 143884 - DNA, 25 bp, Probe Sequence
agctcttcactgactttgttaatga

SEQ ID NO: 143885 - DNA, 25 bp, Probe Sequence
agctctgagagcaacagtttcccat

SEQ ID NO: 143886 - DNA, 25 bp, Probe Sequence
agctgggacagccagcttagcccat

SEQ ID NO: 143887 - DNA, 25 bp, Probe Sequence
agctgagggaccgatttccctacct

SEQ ID NO: 143888 - DNA, 25 bp, Probe Sequence
agctgagctgaaccaattgtcaacc

SEQ ID NO: 143889 - DNA, 25 bp, Probe Sequence
agctagcagatatgcctgttcaccc

SEQ ID NO: 143890 - DNA, 25 bp, Probe Sequence
agctagcagatatgcctgttcaccc

SEQ ID NO: 143891 - DNA, 25 bp, Probe Sequence
agctagcagatatgcctgttcaccc

SEQ ID NO: 143892 - DNA, 25 bp, Probe Sequence
agctgcagcaaagccttgcaatccc

SEQ ID NO: 143893 - DNA, 25 bp, Probe Sequence
agctcagctaagtccttccataaag

SEQ ID NO: 143894 - DNA, 25 bp, Probe Sequence
agctcactgtattccttactaacct

SEQ ID NO: 143895 - DNA, 25 bp, Probe Sequence
agctcaattatagcattgtgctaac

SEQ ID NO: 143896 - DNA, 25 bp, Probe Sequence
agcgcaagtgaaggctcgtattcct

SEQ ID NO: 143897 - DNA, 25 bp, Probe Sequence
agcgcgtgcaaagtgtcgatatccc

SEQ ID NO: 143898 - DNA, 25 bp, Probe Sequence
agctcattatgatgttcctatcccc

SEQ ID NO: 143899 - DNA, 25 bp, Probe Sequence
agctcactcagtaatatcctttcaa

SEQ ID NO: 143900 - DNA, 25 bp, Probe Sequence
agctcaggcagtaataactcactac

SEQ ID NO: 143901 - DNA, 25 bp, Probe Sequence
agctcggagttgtgagcactctact

SEQ ID NO: 143902 - DNA, 25 bp, Probe Sequence
agcgccagagtgctgacgccttact

SEQ ID NO: 143903 - DNA, 25 bp, Probe Sequence
agctgcagcggtctttcctgcagtt

SEQ ID NO: 143904 - DNA, 25 bp, Probe Sequence
agctcgtggacaatgtctactgcat

SEQ ID NO: 143905 - DNA, 25 bp, Probe Sequence
agctgctgtttcaaggctgagctgg

SEQ ID NO: 143906 - DNA, 25 bp, Probe Sequence
agcggttattcggtgagcggtggtg

SEQ ID NO: 143907 - DNA, 25 bp, Probe Sequence
agctagttattgtcaaagaggtggt

SEQ ID NO: 143908 - DNA, 25 bp, Probe Sequence
agctatcttgttaagaaggtcgtgc

SEQ ID NO: 143909 - DNA, 25 bp, Probe Sequence
agctctgcaggtgaaagggctcggc

SEQ ID NO: 143910 - DNA, 25 bp, Probe Sequence
agctgctctgaggtaaaggtccatg

SEQ ID NO: 143911 - DNA, 25 bp, Probe Sequence
agctctctgacccattaatcaacgg

SEQ ID NO: 143912 - DNA, 25 bp, Probe Sequence
agctcactgtaacttgaacaaaagg

SEQ ID NO: 143913 - DNA, 25 bp, Probe Sequence
agctcaggctattgttaaatcaata

SEQ ID NO: 143914 - DNA, 25 bp, Probe Sequence
agctgaggctattgatttgagacct

SEQ ID NO: 143915 - DNA, 25 bp, Probe Sequence
agctcatgcctgtaatcctagcact

SEQ ID NO: 143916 - DNA, 25 bp, Probe Sequence
agctccctactatcagagacttgtc

SEQ ID NO: 143917 - DNA, 25 bp, Probe Sequence
agctccttactgcacaaagggctcc

SEQ ID NO: 143918 - DNA, 25 bp, Probe Sequence
agctcctggcctggctaaggaggtc

SEQ ID NO: 143919 - DNA, 25 bp, Probe Sequence
agctccagagcctgctggtggagga

SEQ ID NO: 143920 - DNA, 25 bp, Probe Sequence
agctccgactacagcatgtggagga

SEQ ID NO: 143921 - DNA, 25 bp, Probe Sequence
agctcatcgacaacatcctggagga

SEQ ID NO: 143922 - DNA, 25 bp, Probe Sequence
agctgctctacaaatttgagaggcc

SEQ ID NO: 143923 - DNA, 25 bp, Probe Sequence
agctctctgatggagtttatatggc

SEQ ID NO: 143924 - DNA, 25 bp, Probe Sequence
agctgttgatgctgagatccatatt

SEQ ID NO: 143925 - DNA, 25 bp, Probe Sequence
agctgttgaccgtatgcttgcttgg

SEQ ID NO: 143926 - DNA, 25 bp, Probe Sequence
agctgggactctaatcatggctctg

SEQ ID NO: 143927 - DNA, 25 bp, Probe Sequence
agctgggcacaacttcagagcattc

SEQ ID NO: 143928 - DNA, 25 bp, Probe Sequence
agcggtcactattagcaggcatact

SEQ ID NO: 143929 - DNA, 25 bp, Probe Sequence
agctcttcacttcagctcagtagct

SEQ ID NO: 143930 - DNA, 25 bp, Probe Sequence
agctcaccagtaacacctgtgtgtg

SEQ ID NO: 143931 - DNA, 25 bp, Probe Sequence
agctcccagttgatccattgtcggg

SEQ ID NO: 143932 - DNA, 25 bp, Probe Sequence
agctcccagttgatccattgtcggg

SEQ ID NO: 143933 - DNA, 25 bp, Probe Sequence
agctcccagggaattgtatgtgcag

SEQ ID NO: 143934 - DNA, 25 bp, Probe Sequence
agctccaccaggatctggttgaaga

SEQ ID NO: 143935 - DNA, 25 bp, Probe Sequence
agctacatccagaattagtttgagg

SEQ ID NO: 143936 - DNA, 25 bp, Probe Sequence
agctctcccacaatctgagtttggt

SEQ ID NO: 143937 - DNA, 25 bp, Probe Sequence
agctctcttgaatttggatattggt

SEQ ID NO: 143938 - DNA, 25 bp, Probe Sequence
agctgctcttcagagtggaagggct

SEQ ID NO: 143939 - DNA, 25 bp, Probe Sequence
agctctcccacaagggcaacgcaat

SEQ ID NO: 143940 - DNA, 25 bp, Probe Sequence
agctcctccaatagagtcagaatct

SEQ ID NO: 143941 - DNA, 25 bp, Probe Sequence
agctcttgcctagtgcctaaatgct

SEQ ID NO: 143942 - DNA, 25 bp, Probe Sequence
agctgttgcactacctcggccatgt

SEQ ID NO: 143943 - DNA, 25 bp, Probe Sequence
agctgttgacatactcattgcctac

SEQ ID NO: 143944 - DNA, 25 bp, Probe Sequence
agctgctgctatttccagatgtcat

SEQ ID NO: 143945 - DNA, 25 bp, Probe Sequence
agctcccattgtacagcatgctatc

SEQ ID NO: 143946 - DNA, 25 bp, Probe Sequence
agctccctcgctgcgatctattgaa

SEQ ID NO: 143947 - DNA, 25 bp, Probe Sequence
agctgccgcctggactgatggaggc

SEQ ID NO: 143948 - DNA, 25 bp, Probe Sequence
agctgctacttcgacattgagcggc

SEQ ID NO: 143949 - DNA, 25 bp, Probe Sequence
agctgctagccaaagcattggagac

SEQ ID NO: 143950 - DNA, 25 bp, Probe Sequence
agcgtagccggattatgaaatgcac

SEQ ID NO: 143951 - DNA, 25 bp, Probe Sequence
agctgtgtctcgtgtcatgaatatg

SEQ ID NO: 143952 - DNA, 25 bp, Probe Sequence
agctgtgttcactcttttatacaaa

SEQ ID NO: 143953 - DNA, 25 bp, Probe Sequence
agcgggatgacttttgtaaacagaa

SEQ ID NO: 143954 - DNA, 25 bp, Probe Sequence
acgatagaaaatgtaaaggccaaga

SEQ ID NO: 143955 - DNA, 25 bp, Probe Sequence
aaatcagccaactggaaacaccaac

SEQ ID NO: 143956 - DNA, 25 bp, Probe Sequence
aaatcaggaaccacaaactgccctc

SEQ ID NO: 143957 - DNA, 25 bp, Probe Sequence
aacaagtcggtcaggaagcccgcgc

SEQ ID NO: 143958 - DNA, 25 bp, Probe Sequence
agccaagtatggtggtgcacgcctc

SEQ ID NO: 143959 - DNA, 25 bp, Probe Sequence
agctcagtgttggagggccacctga

SEQ ID NO: 143960 - DNA, 25 bp, Probe Sequence
agctcgtttggagtgggaactaaag

SEQ ID NO: 143961 - DNA, 25 bp, Probe Sequence
agcccttcgagatgccaaactagac

SEQ ID NO: 143962 - DNA, 25 bp, Probe Sequence
agcccttcgagatgccaaactagac

SEQ ID NO: 143963 - DNA, 25 bp, Probe Sequence
agctccccaagttccaggacggaga

SEQ ID NO: 143964 - DNA, 25 bp, Probe Sequence
agctccagggaatcgaggtggggca

SEQ ID NO: 143965 - DNA, 25 bp, Probe Sequence
agccctgggacataggaagctggga

SEQ ID NO: 143966 - DNA, 25 bp, Probe Sequence
agctcactgcgggagacggacagag

SEQ ID NO: 143967 - DNA, 25 bp, Probe Sequence
agctacttgggaggctgaggcaaga

SEQ ID NO: 143968 - DNA, 25 bp, Probe Sequence
agctacttgggaggctgaagcagga

SEQ ID NO: 143969 - DNA, 25 bp, Probe Sequence
agctacttgggaggctgaagcagga

SEQ ID NO: 143970 - DNA, 25 bp, Probe Sequence
agctcctcaggagggtaatgagcca

SEQ ID NO: 143971 - DNA, 25 bp, Probe Sequence
agctctcctgaatagctaaatctca

SEQ ID NO: 143972 - DNA, 25 bp, Probe Sequence
agccctatgaacgagtgaaattaca

SEQ ID NO: 143973 - DNA, 25 bp, Probe Sequence
agctcagcttagcccagcatgaaga

SEQ ID NO: 143974 - DNA, 25 bp, Probe Sequence
agctcatatctaagtcagcatcgga

SEQ ID NO: 143975 - DNA, 25 bp, Probe Sequence
agctctcatcccatcagagctgctg

SEQ ID NO: 143976 - DNA, 25 bp, Probe Sequence
agcccatcccaggagacggggtgaa

SEQ ID NO: 143977 - DNA, 25 bp, Probe Sequence
agccttcctaggtccaggggtattg

SEQ ID NO: 143978 - DNA, 25 bp, Probe Sequence
agctcggcactacactagggaattt

SEQ ID NO: 143979 - DNA, 25 bp, Probe Sequence
agctcaggacaacactcggaagatc

SEQ ID NO: 143980 - DNA, 25 bp, Probe Sequence
agctcagagaccacaacgcagaagg

SEQ ID NO: 143981 - DNA, 25 bp, Probe Sequence
agctgcaggccctctatgagcagaa

SEQ ID NO: 143982 - DNA, 25 bp, Probe Sequence
agcgagactccatctcaaaaaaaaa

SEQ ID NO: 143983 - DNA, 25 bp, Probe Sequence
agcgaaacgccatctcaaaacaaaa

SEQ ID NO: 143984 - DNA, 25 bp, Probe Sequence
agcgaagaatgccaacacctcaaaa

SEQ ID NO: 143985 - DNA, 25 bp, Probe Sequence
agcgaagaagactgagccccgacat

SEQ ID NO: 143986 - DNA, 25 bp, Probe Sequence
agcgaagaagactgagccccgacat

SEQ ID NO: 143987 - DNA, 25 bp, Probe Sequence
agcgtagaaaacaatgcctgccttt

SEQ ID NO: 143988 - DNA, 25 bp, Probe Sequence
agctctagatttgaagtgtccttgt

SEQ ID NO: 143989 - DNA, 25 bp, Probe Sequence
agctctatgatctggaggagactcc

SEQ ID NO: 143990 - DNA, 25 bp, Probe Sequence
agctccagagcaggatgggacttcc

SEQ ID NO: 143991 - DNA, 25 bp, Probe Sequence
agcccagctgcaaatgatggacctc

SEQ ID NO: 143992 - DNA, 25 bp, Probe Sequence
agctcagcctgaacagtgtgatggt

SEQ ID NO: 143993 - DNA, 25 bp, Probe Sequence
agctggccaagaagtatgatgcgtt

SEQ ID NO: 143994 - DNA, 25 bp, Probe Sequence
agctggccgagaagctgggcagcct

SEQ ID NO: 143995 - DNA, 25 bp, Probe Sequence
agctggccctgaactgggcatggcc

SEQ ID NO: 143996 - DNA, 25 bp, Probe Sequence
agctggccctgaactgggcatggcc

SEQ ID NO: 143997 - DNA, 25 bp, Probe Sequence
agctctacctgactctgggagctgc

SEQ ID NO: 143998 - DNA, 25 bp, Probe Sequence
agcgaacgcagcctttgagagtggg

SEQ ID NO: 143999 - DNA, 25 bp, Probe Sequence
agctgaacagatgtttcagggaatt

SEQ ID NO: 144000 - DNA, 25 bp, Probe Sequence
agctctgagccagattaacaggaat

SEQ ID NO: 144001 - DNA, 25 bp, Probe Sequence
agctgctggaagtcccagaaggacg

SEQ ID NO: 144002 - DNA, 25 bp, Probe Sequence
agctgctgaaaggccacgggaggtg

SEQ ID NO: 144003 - DNA, 25 bp, Probe Sequence
agctcatgaagacagccctcaagga

SEQ ID NO: 144004 - DNA, 25 bp, Probe Sequence
agctcatcatacagaccaccatatg

SEQ ID NO: 144005 - DNA, 25 bp, Probe Sequence
agctcataaccctcatctcttgagc

SEQ ID NO: 144006 - DNA, 25 bp, Probe Sequence
agctcatcgaagaatacatccttga

SEQ ID NO: 144007 - DNA, 25 bp, Probe Sequence
agctgacgataatcacaccttttcc

SEQ ID NO: 144008 - DNA, 25 bp, Probe Sequence
agctgccagaaacgaacctctttga

SEQ ID NO: 144009 - DNA, 25 bp, Probe Sequence
agctggaaatagcttcatctttcta

SEQ ID NO: 144010 - DNA, 25 bp, Probe Sequence
agctgggtagcaccatttctttcat

SEQ ID NO: 144011 - DNA, 25 bp, Probe Sequence
agctgccaaagccaactgatgtttt

SEQ ID NO: 144012 - DNA, 25 bp, Probe Sequence
agctgcctcaacagggctgtattct

SEQ ID NO: 144013 - DNA, 25 bp, Probe Sequence
agctgactacagtggccttaggcta

SEQ ID NO: 144014 - DNA, 25 bp, Probe Sequence
agctgaatggagccggccttgaggt

SEQ ID NO: 144015 - DNA, 25 bp, Probe Sequence
agctgactatgaagctgagcgtgga

SEQ ID NO: 144016 - DNA, 25 bp, Probe Sequence
agctgcagtacaatctggagctggc

SEQ ID NO: 144017 - DNA, 25 bp, Probe Sequence
agctcagtattcatgatggtggggg

SEQ ID NO: 144018 - DNA, 25 bp, Probe Sequence
agctggtatcacatagttggagtca

SEQ ID NO: 144019 - DNA, 25 bp, Probe Sequence
agctgtgttcatttggggaagtcaa

SEQ ID NO: 144020 - DNA, 25 bp, Probe Sequence
agctggattgatacggggaaaacat

SEQ ID NO: 144021 - DNA, 25 bp, Probe Sequence
agctgtgctgtcaactttggaaaaa

SEQ ID NO: 144022 - DNA, 25 bp, Probe Sequence
agctggaggctaaattggactacaa

SEQ ID NO: 144023 - DNA, 25 bp, Probe Sequence
agctggtgccaagagatgtcctaag

SEQ ID NO: 144024 - DNA, 25 bp, Probe Sequence
agctgagcacgcagagagcatgggc

SEQ ID NO: 144025 - DNA, 25 bp, Probe Sequence
agcggcagcagttagatgcatcaga

SEQ ID NO: 144026 - DNA, 25 bp, Probe Sequence
agcggctgcagtctacaaactttgc

SEQ ID NO: 144027 - DNA, 25 bp, Probe Sequence
agctgggatctgaataccccttctc

SEQ ID NO: 144028 - DNA, 25 bp, Probe Sequence
agctggtgctggagttcaccttcac

SEQ ID NO: 144029 - DNA, 25 bp, Probe Sequence
agctggtgctggagttcaccttcac

SEQ ID NO: 144030 - DNA, 25 bp, Probe Sequence
agctggtcatggtgtgtacctgtaa

SEQ ID NO: 144031 - DNA, 25 bp, Probe Sequence
agctgggcatggtggcatgcacctg

SEQ ID NO: 144032 - DNA, 25 bp, Probe Sequence
agctgtgtggtgtgtggacgctgac

SEQ ID NO: 144033 - DNA, 25 bp, Probe Sequence
agctgttaatgctgggatccatatt

SEQ ID NO: 144034 - DNA, 25 bp, Probe Sequence
agctcttgatagtggatatactctt

SEQ ID NO: 144035 - DNA, 25 bp, Probe Sequence
agctccatctactggaatgcagcct

SEQ ID NO: 144036 - DNA, 25 bp, Probe Sequence
agctgacaatactgtgggccgcttc

SEQ ID NO: 144037 - DNA, 25 bp, Probe Sequence
agctcacaaagctactggtggcccc

SEQ ID NO: 144038 - DNA, 25 bp, Probe Sequence
agcgacaaggctaaggcgggctcct

SEQ ID NO: 144039 - DNA, 25 bp, Probe Sequence
agctggcccgctatggcggggagga

SEQ ID NO: 144040 - DNA, 25 bp, Probe Sequence
agcggcgacacgagagagacgggcg

SEQ ID NO: 144041 - DNA, 25 bp, Probe Sequence
agcggatacctctgaacaccgagca

SEQ ID NO: 144042 - DNA, 25 bp, Probe Sequence
agcggattctcatggaacacatcca

SEQ ID NO: 144043 - DNA, 25 bp, Probe Sequence
agcggatggtctgggagatcctcca

SEQ ID NO: 144044 - DNA, 25 bp, Probe Sequence
agctgtgatggtgtggatgccaacc

SEQ ID NO: 144045 - DNA, 25 bp, Probe Sequence
agctctggctctgctgtaggaagcc

SEQ ID NO: 144046 - DNA, 25 bp, Probe Sequence
agctctgcagcccactgtgggtgac

SEQ ID NO: 144047 - DNA, 25 bp, Probe Sequence
agctggcccaagctggctatgaggt

SEQ ID NO: 144048 - DNA, 25 bp, Probe Sequence
agctggcctcaggtttattggcgat

SEQ ID NO: 144049 - DNA, 25 bp, Probe Sequence
agctgagccatgcctcatttattca

SEQ ID NO: 144050 - DNA, 25 bp, Probe Sequence
agctgactcagcatagattgtataa

SEQ ID NO: 144051 - DNA, 25 bp, Probe Sequence
agctcattcacttattttgataact

SEQ ID NO: 144052 - DNA, 25 bp, Probe Sequence
agctgcttcttttggattgtaatcc

SEQ ID NO: 144053 - DNA, 25 bp, Probe Sequence
agctgtttgttttacttgcacattt

SEQ ID NO: 144054 - DNA, 25 bp, Probe Sequence
agccagttgttcatacttcctttac

SEQ ID NO: 144055 - DNA, 25 bp, Probe Sequence
agcgcaatttgaacataccatcctg

SEQ ID NO: 144056 - DNA, 25 bp, Probe Sequence
agccatgcattgttaatcatccatc

SEQ ID NO: 144057 - DNA, 25 bp, Probe Sequence
agctcacttttaatgctcatgatct

SEQ ID NO: 144058 - DNA, 25 bp, Probe Sequence
agctgcatagctacaattatctgat

SEQ ID NO: 144059 - DNA, 25 bp, Probe Sequence
agctgcatgagaaatctatcttact

SEQ ID NO: 144060 - DNA, 25 bp, Probe Sequence
agctcatggatcaatggatttgttt

SEQ ID NO: 144061 - DNA, 25 bp, Probe Sequence
agctctggagtaaatggttggctct

SEQ ID NO: 144062 - DNA, 25 bp, Probe Sequence
agctctaggtccaattgttctgctc

SEQ ID NO: 144063 - DNA, 25 bp, Probe Sequence
agctgcatagttgtactgtgcctgt

SEQ ID NO: 144064 - DNA, 25 bp, Probe Sequence
agctgccctatgatgactgtgtgtt

SEQ ID NO: 144065 - DNA, 25 bp, Probe Sequence
agctgctttctgttgtcattgctgt

SEQ ID NO: 144066 - DNA, 25 bp, Probe Sequence
agctcattttgtttgcttggatggc

SEQ ID NO: 144067 - DNA, 25 bp, Probe Sequence
agctcagcgacttttattgcagatg

SEQ ID NO: 144068 - DNA, 25 bp, Probe Sequence
agctgcagcgtctgagcttcagcgt

SEQ ID NO: 144069 - DNA, 25 bp, Probe Sequence
agctgatgagtctgctggtgcctat

SEQ ID NO: 144070 - DNA, 25 bp, Probe Sequence
agctcagcatgttcgtgctgctgcc

SEQ ID NO: 144071 - DNA, 25 bp, Probe Sequence
agctccatgtgaggcatgatggtca

SEQ ID NO: 144072 - DNA, 25 bp, Probe Sequence
agctctactgacgggagctgcactg

SEQ ID NO: 144073 - DNA, 25 bp, Probe Sequence
agctcatcaaagatgggctgatcat

SEQ ID NO: 144074 - DNA, 25 bp, Probe Sequence
agctgtatcaaactagtgcatgaat

SEQ ID NO: 144075 - DNA, 25 bp, Probe Sequence
agctggacaacctgctgcatgagaa

SEQ ID NO: 144076 - DNA, 25 bp, Probe Sequence
agctcagcacaactgcaagaatgga

SEQ ID NO: 144077 - DNA, 25 bp, Probe Sequence
agctcatcacagctgccagcttggt

SEQ ID NO: 144078 - DNA, 25 bp, Probe Sequence
agctgttgcagcatccagttcatct

SEQ ID NO: 144079 - DNA, 25 bp, Probe Sequence
agctgcctgacggccaggtcatcac

SEQ ID NO: 144080 - DNA, 25 bp, Probe Sequence
agctgctccctgcacaggatatcaa

SEQ ID NO: 144081 - DNA, 25 bp, Probe Sequence
agctcttactcttcaagttcaacca

SEQ ID NO: 144082 - DNA, 25 bp, Probe Sequence
agctctataacatctacgccaagca

SEQ ID NO: 144083 - DNA, 25 bp, Probe Sequence
agctgcttatacgaaaacccacatt

SEQ ID NO: 144084 - DNA, 25 bp, Probe Sequence
agctgatatcatcccattgcattcc

SEQ ID NO: 144085 - DNA, 25 bp, Probe Sequence
agctgtatgcatttcattgctgtct

SEQ ID NO: 144086 - DNA, 25 bp, Probe Sequence
agctgtatgcatttcattgctgtct

SEQ ID NO: 144087 - DNA, 25 bp, Probe Sequence
agctgctgtgctatatgatgctgtt

SEQ ID NO: 144088 - DNA, 25 bp, Probe Sequence
agctctgtggattcatcactgtggt

SEQ ID NO: 144089 - DNA, 25 bp, Probe Sequence
agctgctgtgtgttaactagtgtca

SEQ ID NO: 144090 - DNA, 25 bp, Probe Sequence
agccgcattggtgactcacttcaat

SEQ ID NO: 144091 - DNA, 25 bp, Probe Sequence
actcctctcattggaggccctattt

SEQ ID NO: 144092 - DNA, 25 bp, Probe Sequence
agctgctcctttgggggaatgtttg

SEQ ID NO: 144093 - DNA, 25 bp, Probe Sequence
agctctcccttggtaagacttattt

SEQ ID NO: 144094 - DNA, 25 bp, Probe Sequence
agctctctactggagttgagttttc

SEQ ID NO: 144095 - DNA, 25 bp, Probe Sequence
agctgtcttctgagttgttttctct

SEQ ID NO: 144096 - DNA, 25 bp, Probe Sequence
agctgttactgcaagtgtttcttct

SEQ ID NO: 144097 - DNA, 25 bp, Probe Sequence
agctgtcagtctaggttattctctt

SEQ ID NO: 144098 - DNA, 25 bp, Probe Sequence
agctgtcagagctggtgtactctgc

SEQ ID NO: 144099 - DNA, 25 bp, Probe Sequence
agctgagcatggtggtgggctcctg

SEQ ID NO: 144100 - DNA, 25 bp, Probe Sequence
agctgagtgagctgcgtgagggcct

SEQ ID NO: 144101 - DNA, 25 bp, Probe Sequence
agctgagtgagctgcgtgagggcct

SEQ ID NO: 144102 - DNA, 25 bp, Probe Sequence
agcgatgcgacaggcatgatggagg

SEQ ID NO: 144103 - DNA, 25 bp, Probe Sequence
agctgtggagctggcaattgcaagc

SEQ ID NO: 144104 - DNA, 25 bp, Probe Sequence
agctgctgggtgtccattgccatat

SEQ ID NO: 144105 - DNA, 25 bp, Probe Sequence
agctgctgggtgtccattgccatat

SEQ ID NO: 144106 - DNA, 25 bp, Probe Sequence
agctctggagaaactgctgcctcat

SEQ ID NO: 144107 - DNA, 25 bp, Probe Sequence
agctgagtaaaaagctgcccccttc

SEQ ID NO: 144108 - DNA, 25 bp, Probe Sequence
agcgaagaaggaagctcctgcccct

SEQ ID NO: 144109 - DNA, 25 bp, Probe Sequence
agcgggagcagtatgccgatcgggc

SEQ ID NO: 144110 - DNA, 25 bp, Probe Sequence
agcggtggcttgttgtcagaggccc

SEQ ID NO: 144111 - DNA, 25 bp, Probe Sequence
agcgggtctgagtgtgaggtgccac

SEQ ID NO: 144112 - DNA, 25 bp, Probe Sequence
agcgagaactagaggcggtggagca

SEQ ID NO: 144113 - DNA, 25 bp, Probe Sequence
agcggcaacaagggtccgtggacca

SEQ ID NO: 144114 - DNA, 25 bp, Probe Sequence
agctgcagaacaaggtgtttcagga

SEQ ID NO: 144115 - DNA, 25 bp, Probe Sequence
agcgctcacgcaagcatggttaacg

SEQ ID NO: 144116 - DNA, 25 bp, Probe Sequence
agctgcagtcgcacggcgtgcaagc

SEQ ID NO: 144117 - DNA, 25 bp, Probe Sequence
agctgcttcactagggaatcctgcg

SEQ ID NO: 144118 - DNA, 25 bp, Probe Sequence
agctgaccagcaagaagaacgtcgg

SEQ ID NO: 144119 - DNA, 25 bp, Probe Sequence
agctgcactggcaagaaaatggacc

SEQ ID NO: 144120 - DNA, 25 bp, Probe Sequence
agctgacaggcataacgctgaagcc

SEQ ID NO: 144121 - DNA, 25 bp, Probe Sequence
agctgcctgctgtgaacctgaaggt

SEQ ID NO: 144122 - DNA, 25 bp, Probe Sequence
agctcctgaacgtcagcagctagag

SEQ ID NO: 144123 - DNA, 25 bp, Probe Sequence
agctcttgagtcccgccaagatgat

SEQ ID NO: 144124 - DNA, 25 bp, Probe Sequence
agctgcttgaaccctggaagtggag

SEQ ID NO: 144125 - DNA, 25 bp, Probe Sequence
agctctgtgaaaaccgaagcagctg

SEQ ID NO: 144126 - DNA, 25 bp, Probe Sequence
agctctgctaaaaactccagcgcaa

SEQ ID NO: 144127 - DNA, 25 bp, Probe Sequence
agctcggaattgagcttcatgtcaa

SEQ ID NO: 144128 - DNA, 25 bp, Probe Sequence
agctccgaatataatgctccatata

SEQ ID NO: 144129 - DNA, 25 bp, Probe Sequence
agcggcagcaaaatatgcccgagct

SEQ ID NO: 144130 - DNA, 25 bp, Probe Sequence
agcggagaaaccggcagagtgctct

SEQ ID NO: 144131 - DNA, 25 bp, Probe Sequence
agcggagaaaccggcagagtgctct

SEQ ID NO: 144132 - DNA, 25 bp, Probe Sequence
agcgggagagacctcatgcagattt

SEQ ID NO: 144133 - DNA, 25 bp, Probe Sequence
agcgagaaggacatcatggccgaga

SEQ ID NO: 144134 - DNA, 25 bp, Probe Sequence
agctgagggtgaagacggccagaac

SEQ ID NO: 144135 - DNA, 25 bp, Probe Sequence
agctgcttcctgagacagatgctca

SEQ ID NO: 144136 - DNA, 25 bp, Probe Sequence
agctgctaccacatgacagacacaa

SEQ ID NO: 144137 - DNA, 25 bp, Probe Sequence
agctgctaactcctgatctaactga

SEQ ID NO: 144138 - DNA, 25 bp, Probe Sequence
agctggactgctgtacatcaaggac

SEQ ID NO: 144139 - DNA, 25 bp, Probe Sequence
agctgacaggctgtgaaatatggaa

SEQ ID NO: 144140 - DNA, 25 bp, Probe Sequence
agctgacaggctgtgaaatatggaa

SEQ ID NO: 144141 - DNA, 25 bp, Probe Sequence
agctgaagcagcccgcatattaggc

SEQ ID NO: 144142 - DNA, 25 bp, Probe Sequence
agctgaatgacaaccatcttgccag

SEQ ID NO: 144143 - DNA, 25 bp, Probe Sequence
agctgatacctgaagcactcccagg

SEQ ID NO: 144144 - DNA, 25 bp, Probe Sequence
agcccctggatgctaacaggggcgc

SEQ ID NO: 144145 - DNA, 25 bp, Probe Sequence
agcctctctgttgaaacggtccagc

SEQ ID NO: 144146 - DNA, 25 bp, Probe Sequence
agctctcctattgaaacttgcccag

SEQ ID NO: 144147 - DNA, 25 bp, Probe Sequence
agcctccttctcaaatttttcaatg

SEQ ID NO: 144148 - DNA, 25 bp, Probe Sequence
agccaccgatccagattcattaaga

SEQ ID NO: 144149 - DNA, 25 bp, Probe Sequence
agcccagtgtccgctttgtaggaca

SEQ ID NO: 144150 - DNA, 25 bp, Probe Sequence
agcccagtgtccgctttgtaggaca

SEQ ID NO: 144151 - DNA, 25 bp, Probe Sequence
agcccagtgtccgctttgtaggaca

SEQ ID NO: 144152 - DNA, 25 bp, Probe Sequence
agcctttgccttattctgtgcatgg

SEQ ID NO: 144153 - DNA, 25 bp, Probe Sequence
agccgcctccttacatactgtaagt

SEQ ID NO: 144154 - DNA, 25 bp, Probe Sequence
agcccctcctctatggggacaggtt

SEQ ID NO: 144155 - DNA, 25 bp, Probe Sequence
agctcctccccaagggtagatcgga

SEQ ID NO: 144156 - DNA, 25 bp, Probe Sequence
agctcctccccaagggtagatcgga

SEQ ID NO: 144157 - DNA, 25 bp, Probe Sequence
agctccaccctcagcagatgataat

SEQ ID NO: 144158 - DNA, 25 bp, Probe Sequence
agctccacccttttctgagagttat

SEQ ID NO: 144159 - DNA, 25 bp, Probe Sequence
agccccccaactatgagatgctcaa

SEQ ID NO: 144160 - DNA, 25 bp, Probe Sequence
agctctgacccaaatttagtcccag

SEQ ID NO: 144161 - DNA, 25 bp, Probe Sequence
agctctgagaccagatgttggctgc

SEQ ID NO: 144162 - DNA, 25 bp, Probe Sequence
agctgctgcaagacggtggtggctc

SEQ ID NO: 144163 - DNA, 25 bp, Probe Sequence
agctcgaatgggcattgggctcggc

SEQ ID NO: 144164 - DNA, 25 bp, Probe Sequence
agcgaagtggggttgggccgcagac

SEQ ID NO: 144165 - DNA, 25 bp, Probe Sequence
agctggaagaggccgtgggccgcat

SEQ ID NO: 144166 - DNA, 25 bp, Probe Sequence
agctggaagaggccgtgggccgcat

SEQ ID NO: 144167 - DNA, 25 bp, Probe Sequence
agctggacaaacctggggctgacac

SEQ ID NO: 144168 - DNA, 25 bp, Probe Sequence
agctggacagattcgggggcatctc

SEQ ID NO: 144169 - DNA, 25 bp, Probe Sequence
agctggacagattcgggggcatctc

SEQ ID NO: 144170 - DNA, 25 bp, Probe Sequence
agcggtatgttgggccagagcatcc

SEQ ID NO: 144171 - DNA, 25 bp, Probe Sequence
agcgtattgtatatacgcctcacac

SEQ ID NO: 144172 - DNA, 25 bp, Probe Sequence
agctgacatctgtaaaaggccttca

SEQ ID NO: 144173 - DNA, 25 bp, Probe Sequence
agctgacatctgtatctctggacct

SEQ ID NO: 144174 - DNA, 25 bp, Probe Sequence
agctggcttgacatgctgtattcca

SEQ ID NO: 144175 - DNA, 25 bp, Probe Sequence
agctgcgctgtgactttgaggtcct

SEQ ID NO: 144176 - DNA, 25 bp, Probe Sequence
agctgcatggtagttggggatccaa

SEQ ID NO: 144177 - DNA, 25 bp, Probe Sequence
agctgcttgatcattaagccatcca

SEQ ID NO: 144178 - DNA, 25 bp, Probe Sequence
agcggctacttcagagcacagctga

SEQ ID NO: 144179 - DNA, 25 bp, Probe Sequence
agcggtcgtcacagaaaggtctctc

SEQ ID NO: 144180 - DNA, 25 bp, Probe Sequence
agctggccgccattaaacaggttct

SEQ ID NO: 144181 - DNA, 25 bp, Probe Sequence
agctcctggccatatatcaaggttt

SEQ ID NO: 144182 - DNA, 25 bp, Probe Sequence
agctgcccactgtagtatccacagt

SEQ ID NO: 144183 - DNA, 25 bp, Probe Sequence
agctgtccactgtgacttctaattt

SEQ ID NO: 144184 - DNA, 25 bp, Probe Sequence
agctggcaactgtgggaatacatct

SEQ ID NO: 144185 - DNA, 25 bp, Probe Sequence
agctgcgaaaatggagtgaaactca

SEQ ID NO: 144186 - DNA, 25 bp, Probe Sequence
agctgaaacacttaaaatcactcaa

SEQ ID NO: 144187 - DNA, 25 bp, Probe Sequence
agctgaactcatcaaaacccatcac

SEQ ID NO: 144188 - DNA, 25 bp, Probe Sequence
agctgaactatatcaacatcttaaa

SEQ ID NO: 144189 - DNA, 25 bp, Probe Sequence
agctgagacatgaaactatttgaaa

SEQ ID NO: 144190 - DNA, 25 bp, Probe Sequence
agcggcatgatgtacctgatactga

SEQ ID NO: 144191 - DNA, 25 bp, Probe Sequence
agccgcgtggacggatcacgatttc

SEQ ID NO: 144192 - DNA, 25 bp, Probe Sequence
agctggggagacggtgacaggcggc

SEQ ID NO: 144193 - DNA, 25 bp, Probe Sequence
agctgcacgccgtggagatcagcgc

SEQ ID NO: 144194 - DNA, 25 bp, Probe Sequence
agctgtcaactgtgcaggcatcgcg

SEQ ID NO: 144195 - DNA, 25 bp, Probe Sequence
agctgtcagcacaggtgccatcgag

SEQ ID NO: 144196 - DNA, 25 bp, Probe Sequence
agctgatccagaaggagctcaccat

SEQ ID NO: 144197 - DNA, 25 bp, Probe Sequence
agcgttctgagcagagacacgcaga

SEQ ID NO: 144198 - DNA, 25 bp, Probe Sequence
agctgttccagctgcggcctgcaca

SEQ ID NO: 144199 - DNA, 25 bp, Probe Sequence
agctgccactaggcagctagcccac

SEQ ID NO: 144200 - DNA, 25 bp, Probe Sequence
agctccattgtgcctgcaatggccc

SEQ ID NO: 144201 - DNA, 25 bp, Probe Sequence
agctgccagtggctgcaagagagcc

SEQ ID NO: 144202 - DNA, 25 bp, Probe Sequence
agcgccagtagtgacaggggcgaac

SEQ ID NO: 144203 - DNA, 25 bp, Probe Sequence
agctgccagtgtacgacaggggcgt

SEQ ID NO: 144204 - DNA, 25 bp, Probe Sequence
agcccatgttgatgtttcggctgcc

SEQ ID NO: 144205 - DNA, 25 bp, Probe Sequence
agcccttcgaagcaaagcgtgccga

SEQ ID NO: 144206 - DNA, 25 bp, Probe Sequence
agcgtttcaaagcgtcagctgtggg

SEQ ID NO: 144207 - DNA, 25 bp, Probe Sequence
agctgctgttgatggggtgggtgtt

SEQ ID NO: 144208 - DNA, 25 bp, Probe Sequence
agctggtgagcatgaacgtgcaggg

SEQ ID NO: 144209 - DNA, 25 bp, Probe Sequence
agctgggcaattggcgggcatggag

SEQ ID NO: 144210 - DNA, 25 bp, Probe Sequence
agctgtggaataaggcccagtgcag

SEQ ID NO: 144211 - DNA, 25 bp, Probe Sequence
agctggtgagccagtggccattaga

SEQ ID NO: 144212 - DNA, 25 bp, Probe Sequence
agcgagtgagcagcgatacctaggg

SEQ ID NO: 144213 - DNA, 25 bp, Probe Sequence
agctgagtccgacaaccattggggt

SEQ ID NO: 144214 - DNA, 25 bp, Probe Sequence
agctgcttagtacaaccatctgggt

SEQ ID NO: 144215 - DNA, 25 bp, Probe Sequence
agcgcttagaagaaatgacacagag

SEQ ID NO: 144216 - DNA, 25 bp, Probe Sequence
agctgtccaggacagatggcctggt

SEQ ID NO: 144217 - DNA, 25 bp, Probe Sequence
agctcctagtgactggacatgcctg

SEQ ID NO: 144218 - DNA, 25 bp, Probe Sequence
agctcctgaggatggatctgcagat

SEQ ID NO: 144219 - DNA, 25 bp, Probe Sequence
agctcctgcaagtgcaaagagtgca

SEQ ID NO: 144220 - DNA, 25 bp, Probe Sequence
agctcctcactctaacaacttgaaa

SEQ ID NO: 144221 - DNA, 25 bp, Probe Sequence
agctcccccaaacaagtgagaacat

SEQ ID NO: 144222 - DNA, 25 bp, Probe Sequence
agctgccgtccagaagtcggcagaa

SEQ ID NO: 144223 - DNA, 25 bp, Probe Sequence
agctccgcgccaggatggcgaggaa

SEQ ID NO: 144224 - DNA, 25 bp, Probe Sequence
agctccccacaattagtcagagaat

SEQ ID NO: 144225 - DNA, 25 bp, Probe Sequence
agctccctggagaatatgtcataac

SEQ ID NO: 144226 - DNA, 25 bp, Probe Sequence
agctccacttggaaaaccatcacaa

SEQ ID NO: 144227 - DNA, 25 bp, Probe Sequence
tatggcccagtacaagaccttaagg

SEQ ID NO: 144228 - DNA, 25 bp, Probe Sequence
agcgacggtgggaagatgccttacg

SEQ ID NO: 144229 - DNA, 25 bp, Probe Sequence
agctgtctggctgtataactcttac

SEQ ID NO: 144230 - DNA, 25 bp, Probe Sequence
agctgtcatcgtgaagaacattgat

SEQ ID NO: 144231 - DNA, 25 bp, Probe Sequence
agctgtcatcatcaaaacaactcat

SEQ ID NO: 144232 - DNA, 25 bp, Probe Sequence
agctccatcctgacaaacaagacat

SEQ ID NO: 144233 - DNA, 25 bp, Probe Sequence
agcccaacttccagcaggacaagtt

SEQ ID NO: 144234 - DNA, 25 bp, Probe Sequence
agctccacacttgtgagaagtgcag

SEQ ID NO: 144235 - DNA, 25 bp, Probe Sequence
agctccatggtgtcggggaggagga

SEQ ID NO: 144236 - DNA, 25 bp, Probe Sequence
actagctttcggtggtggaggagga

SEQ ID NO: 144237 - DNA, 25 bp, Probe Sequence
aagtcttttggatgggttgggagat

SEQ ID NO: 144238 - DNA, 25 bp, Probe Sequence
acgcctatttggagctggggggcct

SEQ ID NO: 144239 - DNA, 25 bp, Probe Sequence
accactttgggaggctgaggcgggt

SEQ ID NO: 144240 - DNA, 25 bp, Probe Sequence
agctcctttaggactgggtggatgg

SEQ ID NO: 144241 - DNA, 25 bp, Probe Sequence
agctggctttatgtgctggggcaga

SEQ ID NO: 144242 - DNA, 25 bp, Probe Sequence
agctgctgctttatcctgtaatcag

SEQ ID NO: 144243 - DNA, 25 bp, Probe Sequence
agctggtctgaagtccttaagagaa

SEQ ID NO: 144244 - DNA, 25 bp, Probe Sequence
agctgcgttaatgtttgcaaatgca

SEQ ID NO: 144245 - DNA, 25 bp, Probe Sequence
agcgccattacctttttgatgtgca

SEQ ID NO: 144246 - DNA, 25 bp, Probe Sequence
agcgaagagcaggaacttctgtgta

SEQ ID NO: 144247 - DNA, 25 bp, Probe Sequence
agctgggggtgaaggccatgctgtg

SEQ ID NO: 144248 - DNA, 25 bp, Probe Sequence
agctgggcgtggtgttgcatgccag

SEQ ID NO: 144249 - DNA, 25 bp, Probe Sequence
agctgcggcaacctggtgtatacag

SEQ ID NO: 144250 - DNA, 25 bp, Probe Sequence
agcgcccaacagcgtggatgtcgat

SEQ ID NO: 144251 - DNA, 25 bp, Probe Sequence
agcgcccaacagcgtggatgtcgat

SEQ ID NO: 144252 - DNA, 25 bp, Probe Sequence
agctgccatcagatgccggagactc

SEQ ID NO: 144253 - DNA, 25 bp, Probe Sequence
agctgccatcagatgccggagactc

SEQ ID NO: 144254 - DNA, 25 bp, Probe Sequence
agctgctccagtacttgagagcgac

SEQ ID NO: 144255 - DNA, 25 bp, Probe Sequence
agctgtctagcgcctagcaaggtgc

SEQ ID NO: 144256 - DNA, 25 bp, Probe Sequence
agcgacatagccatacatctgactg

SEQ ID NO: 144257 - DNA, 25 bp, Probe Sequence
agccttgaactctatcatcgacgtc

SEQ ID NO: 144258 - DNA, 25 bp, Probe Sequence
agcgtattactgttctgtgacttcc

SEQ ID NO: 144259 - DNA, 25 bp, Probe Sequence
agcgtaatcattcatcgtggctccc

SEQ ID NO: 144260 - DNA, 25 bp, Probe Sequence
agctgataatgttgtctcgatgcct

SEQ ID NO: 144261 - DNA, 25 bp, Probe Sequence
agctgtagagtttctatgtgcctac

SEQ ID NO: 144262 - DNA, 25 bp, Probe Sequence
agctccaagctatttctacactatc

SEQ ID NO: 144263 - DNA, 25 bp, Probe Sequence
agctccagctggacttcgatgactt

SEQ ID NO: 144264 - DNA, 25 bp, Probe Sequence
agcctcaggttcacgtgcttttgag

SEQ ID NO: 144265 - DNA, 25 bp, Probe Sequence
accaagtttgagagcgtgtgtagag

SEQ ID NO: 144266 - DNA, 25 bp, Probe Sequence
accactgcctgaaaggtttgtacag

SEQ ID NO: 144267 - DNA, 25 bp, Probe Sequence
agcctatcaggatcacagttttaag

SEQ ID NO: 144268 - DNA, 25 bp, Probe Sequence
agcctggggaaagtctgtttacagc

SEQ ID NO: 144269 - DNA, 25 bp, Probe Sequence
agctgcgggaagaagcctggtctcc

SEQ ID NO: 144270 - DNA, 25 bp, Probe Sequence
agcggagtgaacaacctttcatcac

SEQ ID NO: 144271 - DNA, 25 bp, Probe Sequence
acgcaacagtaaatccttacacctt

SEQ ID NO: 144272 - DNA, 25 bp, Probe Sequence
agcgcatacgcatgactacattaca

SEQ ID NO: 144273 - DNA, 25 bp, Probe Sequence
agcgaacggtcagtcaaggatcata

SEQ ID NO: 144274 - DNA, 25 bp, Probe Sequence
acgaccggctcaacaaggttatcag

SEQ ID NO: 144275 - DNA, 25 bp, Probe Sequence
accccgagctctacaactgggacag

SEQ ID NO: 144276 - DNA, 25 bp, Probe Sequence
agcccttactagaccaatgggactt

SEQ ID NO: 144277 - DNA, 25 bp, Probe Sequence
aaacttatcgataccgtcgacctcg

SEQ ID NO: 144278 - DNA, 25 bp, Probe Sequence
taccctggattaacgagttacctcg

SEQ ID NO: 144279 - DNA, 25 bp, Probe Sequence
tgaccaacggaacaagttaccctag

SEQ ID NO: 144280 - DNA, 25 bp, Probe Sequence
accactcaaaaacatgtataaccta

SEQ ID NO: 144281 - DNA, 25 bp, Probe Sequence
acaaaaaggtcacaattctacctat

SEQ ID NO: 144282 - DNA, 25 bp, Probe Sequence
accaacgaggtggccgaatcttcct

SEQ ID NO: 144283 - DNA, 25 bp, Probe Sequence
ggtcaaggaactcaaggtttcgctg

SEQ ID NO: 144284 - DNA, 25 bp, Probe Sequence
agcgcaagggttcaggagttccctt

SEQ ID NO: 144285 - DNA, 25 bp, Probe Sequence
agcgcaccaggttcaaggcatttgt

SEQ ID NO: 144286 - DNA, 25 bp, Probe Sequence
agccctagtcaagaggcatctttta

SEQ ID NO: 144287 - DNA, 25 bp, Probe Sequence
agcgactgagcctaggggactttgc

SEQ ID NO: 144288 - DNA, 25 bp, Probe Sequence
agcgaagtgccactgggttctttgc

SEQ ID NO: 144289 - DNA, 25 bp, Probe Sequence
agcgaagcttagcgttcatccgtgt

SEQ ID NO: 144290 - DNA, 25 bp, Probe Sequence
agcgatggatttccgtctctggtgt

SEQ ID NO: 144291 - DNA, 25 bp, Probe Sequence
agctggtggattcggtcctggatgt

SEQ ID NO: 144292 - DNA, 25 bp, Probe Sequence
agctggtcgacataatctctgtatt

SEQ ID NO: 144293 - DNA, 25 bp, Probe Sequence
agctggacacactatgtgacttgta

SEQ ID NO: 144294 - DNA, 25 bp, Probe Sequence
agctggacaattgctagttgtatat

SEQ ID NO: 144295 - DNA, 25 bp, Probe Sequence
agctgagagcatcttgccctttaat

SEQ ID NO: 144296 - DNA, 25 bp, Probe Sequence
agctgaggcaagctgtcttttttcc

SEQ ID NO: 144297 - DNA, 25 bp, Probe Sequence
actgggagaggtgccttttgtatcc

SEQ ID NO: 144298 - DNA, 25 bp, Probe Sequence
agctgggaggtaggcacttcatttt

SEQ ID NO: 144299 - DNA, 25 bp, Probe Sequence
agctgtgctacgtcgccctggactt

SEQ ID NO: 144300 - DNA, 25 bp, Probe Sequence
agcgtttcctcgtcagtaactagtg

SEQ ID NO: 144301 - DNA, 25 bp, Probe Sequence
agcgcatttcttaaactaaacagga

SEQ ID NO: 144302 - DNA, 25 bp, Probe Sequence
agccatttgtgtaatctccaaaagt

SEQ ID NO: 144303 - DNA, 25 bp, Probe Sequence
agccttgttgtctcacacaaaagcc

SEQ ID NO: 144304 - DNA, 25 bp, Probe Sequence
agcctatgcttgtagtcacagctac

SEQ ID NO: 144305 - DNA, 25 bp, Probe Sequence
agcccatgtaacacatcctgaactg

SEQ ID NO: 144306 - DNA, 25 bp, Probe Sequence
agcctcagctgaaaacccgaatctg

SEQ ID NO: 144307 - DNA, 25 bp, Probe Sequence
agcccagccatcaagaacttctgat

SEQ ID NO: 144308 - DNA, 25 bp, Probe Sequence
agccctccagtagtagcgtggtatc

SEQ ID NO: 144309 - DNA, 25 bp, Probe Sequence
agcccaggcgttggcagcagggtta

SEQ ID NO: 144310 - DNA, 25 bp, Probe Sequence
agcccactggcacttcgggcaataa

SEQ ID NO: 144311 - DNA, 25 bp, Probe Sequence
agctgtcctggaactccggaaaaag

SEQ ID NO: 144312 - DNA, 25 bp, Probe Sequence
agctgtttgcagaagcaccgtgaag

SEQ ID NO: 144313 - DNA, 25 bp, Probe Sequence
agctgattctggaagcaacgttctt

SEQ ID NO: 144314 - DNA, 25 bp, Probe Sequence
agctgattcttgacagatttagtcg

SEQ ID NO: 144315 - DNA, 25 bp, Probe Sequence
agctggcctctgaaatcttaatgca

SEQ ID NO: 144316 - DNA, 25 bp, Probe Sequence
agcggacattgaatatcttgaagat

SEQ ID NO: 144317 - DNA, 25 bp, Probe Sequence
agcgctgtttgcagcatcaggaagt

SEQ ID NO: 144318 - DNA, 25 bp, Probe Sequence
agctgagctattggaacaggaaata

SEQ ID NO: 144319 - DNA, 25 bp, Probe Sequence
agctgtcatgttggagattggtaat

SEQ ID NO: 144320 - DNA, 25 bp, Probe Sequence
agctgtctgctagtggttgtcttaa

SEQ ID NO: 144321 - DNA, 25 bp, Probe Sequence
agcgactgcgacgttcgatcttgca

SEQ ID NO: 144322 - DNA, 25 bp, Probe Sequence
agcgaaggcaccatcaatgccaccg

SEQ ID NO: 144323 - DNA, 25 bp, Probe Sequence
agcgaaggcaccatcaatgccaccg

SEQ ID NO: 144324 - DNA, 25 bp, Probe Sequence
agcggagatcacaccattgcactcc

SEQ ID NO: 144325 - DNA, 25 bp, Probe Sequence
agctgagattgtgccacttcactcc

SEQ ID NO: 144326 - DNA, 25 bp, Probe Sequence
agctgaggtggcttctcattaaccc

SEQ ID NO: 144327 - DNA, 25 bp, Probe Sequence
agcgagttccttgcagtaaatccgt

SEQ ID NO: 144328 - DNA, 25 bp, Probe Sequence
gtaatttttggctctaagctccgat

SEQ ID NO: 144329 - DNA, 25 bp, Probe Sequence
accagaagttcctctaggtctcgta

SEQ ID NO: 144330 - DNA, 25 bp, Probe Sequence
accaggagttcagtactaacctggg

SEQ ID NO: 144331 - DNA, 25 bp, Probe Sequence
agccctggtttctctgaaggctgga

SEQ ID NO: 144332 - DNA, 25 bp, Probe Sequence
agccgtgggttctgctgagtaggtg

SEQ ID NO: 144333 - DNA, 25 bp, Probe Sequence
agcggaaggttcattcgcataggtg

SEQ ID NO: 144334 - DNA, 25 bp, Probe Sequence
agctggactgcgacatcctccagct

SEQ ID NO: 144335 - DNA, 25 bp, Probe Sequence
agctggatggaaatgcctctcactt

SEQ ID NO: 144336 - DNA, 25 bp, Probe Sequence
agctgaagggattcctgctcttctg

SEQ ID NO: 144337 - DNA, 25 bp, Probe Sequence
agcggagggagacctgtgtccgtgc

SEQ ID NO: 144338 - DNA, 25 bp, Probe Sequence
agctgagagcggaaaatggtcttct

SEQ ID NO: 144339 - DNA, 25 bp, Probe Sequence
agctgcagactgcttagggacttct

SEQ ID NO: 144340 - DNA, 25 bp, Probe Sequence
agctgcaagatgctgtaggaccccc

SEQ ID NO: 144341 - DNA, 25 bp, Probe Sequence
agcgaaagcggcaggatcgacgcgc

SEQ ID NO: 144342 - DNA, 25 bp, Probe Sequence
agcgaaagtggcattataggtgttt

SEQ ID NO: 144343 - DNA, 25 bp, Probe Sequence
agcggaagtgcgatcttcgggctgt

SEQ ID NO: 144344 - DNA, 25 bp, Probe Sequence
agcgcgagagcaagttcttcgagca

SEQ ID NO: 144345 - DNA, 25 bp, Probe Sequence
acggcatcagcaagttcgaagtcaa

SEQ ID NO: 144346 - DNA, 25 bp, Probe Sequence
agcgtcaagacatttgctgaactca

SEQ ID NO: 144347 - DNA, 25 bp, Probe Sequence
agctgtccagtgttggtgattccag

SEQ ID NO: 144348 - DNA, 25 bp, Probe Sequence
agctgtatggtgtctactgcttcag

SEQ ID NO: 144349 - DNA, 25 bp, Probe Sequence
agctgatgaggttgctgcagccccg

SEQ ID NO: 144350 - DNA, 25 bp, Probe Sequence
agcgatgcaggtagcggggacgatg

SEQ ID NO: 144351 - DNA, 25 bp, Probe Sequence
agcgatgactgactgtggggtgggc

SEQ ID NO: 144352 - DNA, 25 bp, Probe Sequence
agcgctcgctgacagcttgggagga

SEQ ID NO: 144353 - DNA, 25 bp, Probe Sequence
agcgctcatcgagtccattgagggc

SEQ ID NO: 144354 - DNA, 25 bp, Probe Sequence
agccccggtcaatgggtcagtcttt

SEQ ID NO: 144355 - DNA, 25 bp, Probe Sequence
agccccctgctaatggagtacagcc

SEQ ID NO: 144356 - DNA, 25 bp, Probe Sequence
agctgtcccctagtgagggactgtg

SEQ ID NO: 144357 - DNA, 25 bp, Probe Sequence
agcgagacacacaagctggtggtcg

SEQ ID NO: 144358 - DNA, 25 bp, Probe Sequence
agcgcaagagaaagcgggtctcgga

SEQ ID NO: 144359 - DNA, 25 bp, Probe Sequence
agcggtgagcgaggtgggttggaga

SEQ ID NO: 144360 - DNA, 25 bp, Probe Sequence
agccgtggagctgtggaattgggcc

SEQ ID NO: 144361 - DNA, 25 bp, Probe Sequence
agccctggcacggtgtattctgggg

SEQ ID NO: 144362 - DNA, 25 bp, Probe Sequence
acctctgacccgttattcttataat

SEQ ID NO: 144363 - DNA, 25 bp, Probe Sequence
acctctgacccgttattcttataat

SEQ ID NO: 144364 - DNA, 25 bp, Probe Sequence
acgactacagccagtcagacttcaa

SEQ ID NO: 144365 - DNA, 25 bp, Probe Sequence
acgactacagccagtcagacttcaa

SEQ ID NO: 144366 - DNA, 25 bp, Probe Sequence
acgactacagccagtcagacttcaa

SEQ ID NO: 144367 - DNA, 25 bp, Probe Sequence
agcccacataccagtaacttatact

SEQ ID NO: 144368 - DNA, 25 bp, Probe Sequence
tcagccacccgagattgagcaataa

SEQ ID NO: 144369 - DNA, 25 bp, Probe Sequence
agcctcccaaattctctagtttata

SEQ ID NO: 144370 - DNA, 25 bp, Probe Sequence
agccctccaggttaaagttgattca

SEQ ID NO: 144371 - DNA, 25 bp, Probe Sequence
agccctgggagataacctggcttcc

SEQ ID NO: 144372 - DNA, 25 bp, Probe Sequence
agccctcaggttgtgaccgagattc

SEQ ID NO: 144373 - DNA, 25 bp, Probe Sequence
agcccctggagaactacctggatat

SEQ ID NO: 144374 - DNA, 25 bp, Probe Sequence
agccctggaagagcactactggatg

SEQ ID NO: 144375 - DNA, 25 bp, Probe Sequence
agcgccgaaaagccaagacttcatg

SEQ ID NO: 144376 - DNA, 25 bp, Probe Sequence
agcgttgaacaaccacagctctatt

SEQ ID NO: 144377 - DNA, 25 bp, Probe Sequence
agctggtgcaaggagaagcgtcatt

SEQ ID NO: 144378 - DNA, 25 bp, Probe Sequence
agctgtggcattggtcaaggtgaca

SEQ ID NO: 144379 - DNA, 25 bp, Probe Sequence
agcgatcagcattggaactgttgaa

SEQ ID NO: 144380 - DNA, 25 bp, Probe Sequence
agcgtgccaatcaacatgctggtga

SEQ ID NO: 144381 - DNA, 25 bp, Probe Sequence
agctgtgctgcaactcaatgaggag

SEQ ID NO: 144382 - DNA, 25 bp, Probe Sequence
agctgatgctcttgccaaagtattt

SEQ ID NO: 144383 - DNA, 25 bp, Probe Sequence
agctgactgtgacccaactgatatt

SEQ ID NO: 144384 - DNA, 25 bp, Probe Sequence
agctgtcatgtacggagccgagatt

SEQ ID NO: 144385 - DNA, 25 bp, Probe Sequence
agcctatctcatcggccgcggcctg

SEQ ID NO: 144386 - DNA, 25 bp, Probe Sequence
agctgttctcaggatcactgggctc

SEQ ID NO: 144387 - DNA, 25 bp, Probe Sequence
agctggtggcacaacaagtggcaca

SEQ ID NO: 144388 - DNA, 25 bp, Probe Sequence
agctggcaacacaaaaatgtcaatg

SEQ ID NO: 144389 - DNA, 25 bp, Probe Sequence
agcggcagatcagccaggatgtcaa

SEQ ID NO: 144390 - DNA, 25 bp, Probe Sequence
agcctgcatggcaccaagtacaaag

SEQ ID NO: 144391 - DNA, 25 bp, Probe Sequence
agcctgggcgtacggtaccacaggc

SEQ ID NO: 144392 - DNA, 25 bp, Probe Sequence
agccttctggggcgaattacggagg

SEQ ID NO: 144393 - DNA, 25 bp, Probe Sequence
agccttttggaggggattgggtgag

SEQ ID NO: 144394 - DNA, 25 bp, Probe Sequence
agccttttggacagtatcttttgga

SEQ ID NO: 144395 - DNA, 25 bp, Probe Sequence
agccttccggtcagtgacgtgtgag

SEQ ID NO: 144396 - DNA, 25 bp, Probe Sequence
agccattgcagcggcatttggtcgg

SEQ ID NO: 144397 - DNA, 25 bp, Probe Sequence
agcctcggttctatgcatatatgga

SEQ ID NO: 144398 - DNA, 25 bp, Probe Sequence
agcccgaggactggacatcattgga

SEQ ID NO: 144399 - DNA, 25 bp, Probe Sequence
accactgctaagggactctatccat

SEQ ID NO: 144400 - DNA, 25 bp, Probe Sequence
acgcacttatcaggaacgcctcgat

SEQ ID NO: 144401 - DNA, 25 bp, Probe Sequence
cggacttatactgatcccaagttaa

SEQ ID NO: 144402 - DNA, 25 bp, Probe Sequence
aatgactaatatgtttacaagttag

SEQ ID NO: 144403 - DNA, 25 bp, Probe Sequence
accctaagaccaataaatacttcag

SEQ ID NO: 144404 - DNA, 25 bp, Probe Sequence
agccctagggctgaaagatatcttt

SEQ ID NO: 144405 - DNA, 25 bp, Probe Sequence
agccctggccttaaagaatgttact

SEQ ID NO: 144406 - DNA, 25 bp, Probe Sequence
agcctgtgtgcccactgaagagatg

SEQ ID NO: 144407 - DNA, 25 bp, Probe Sequence
agcctcgatgacaatctgggagtgt

SEQ ID NO: 144408 - DNA, 25 bp, Probe Sequence
agcccagtggtctgtgaggttgcag

SEQ ID NO: 144409 - DNA, 25 bp, Probe Sequence
agcccagaaggctattgagtttcac

SEQ ID NO: 144410 - DNA, 25 bp, Probe Sequence
agccgcacacaggcctagaggtaac

SEQ ID NO: 144411 - DNA, 25 bp, Probe Sequence
agcgcgcaagagggcagaccgatag

SEQ ID NO: 144412 - DNA, 25 bp, Probe Sequence
agcgtccgcagaggtgaccgaaaag

SEQ ID NO: 144413 - DNA, 25 bp, Probe Sequence
agcctcgtgagaggtcaccgggatg

SEQ ID NO: 144414 - DNA, 25 bp, Probe Sequence
agcccagggaaggctccgtgggagg

SEQ ID NO: 144415 - DNA, 25 bp, Probe Sequence
agcccggtagagtgtatgggccagg

SEQ ID NO: 144416 - DNA, 25 bp, Probe Sequence
actagggaaggcttgaaggccaaga

SEQ ID NO: 144417 - DNA, 25 bp, Probe Sequence
agcccaaggaggttaagcccaagat

SEQ ID NO: 144418 - DNA, 25 bp, Probe Sequence
agcccaagatgggactcagaccctg

SEQ ID NO: 144419 - DNA, 25 bp, Probe Sequence
agccaaagaggggaagacgatcgtg

SEQ ID NO: 144420 - DNA, 25 bp, Probe Sequence
agcgaatgagagctggcaaaggcaa

SEQ ID NO: 144421 - DNA, 25 bp, Probe Sequence
agcgaatagccactgccaacatgct

SEQ ID NO: 144422 - DNA, 25 bp, Probe Sequence
agcgagctttctctcagagcatgct

SEQ ID NO: 144423 - DNA, 25 bp, Probe Sequence
agcgagctcttcggggagcagcgat

SEQ ID NO: 144424 - DNA, 25 bp, Probe Sequence
agctggcttccctagtacagagaac

SEQ ID NO: 144425 - DNA, 25 bp, Probe Sequence
agctggctatggttaaagcggaacc

SEQ ID NO: 144426 - DNA, 25 bp, Probe Sequence
agcggctcaggacaaagggcaggtg

SEQ ID NO: 144427 - DNA, 25 bp, Probe Sequence
agctggtgccgttgagaagggggtc

SEQ ID NO: 144428 - DNA, 25 bp, Probe Sequence
agctgggctcttttgaaggattggt

SEQ ID NO: 144429 - DNA, 25 bp, Probe Sequence
agctggttttgttccagagactggt

SEQ ID NO: 144430 - DNA, 25 bp, Probe Sequence
agcgcgtgtttgactacagtgagta

SEQ ID NO: 144431 - DNA, 25 bp, Probe Sequence
agcgggcatttgactctgcagtagc

SEQ ID NO: 144432 - DNA, 25 bp, Probe Sequence
agccggcagttgcccaagatctgat

SEQ ID NO: 144433 - DNA, 25 bp, Probe Sequence
accggccctcctgagaggatgccgg

SEQ ID NO: 144434 - DNA, 25 bp, Probe Sequence
agccaggtcctagccaatggtctgg

SEQ ID NO: 144435 - DNA, 25 bp, Probe Sequence
agcgacggccggggcagaagttgag

SEQ ID NO: 144436 - DNA, 25 bp, Probe Sequence
agccggcagccgacggcaaaggtgt

SEQ ID NO: 144437 - DNA, 25 bp, Probe Sequence
agcgctggctgaaggggcaaggggt

SEQ ID NO: 144438 - DNA, 25 bp, Probe Sequence
agcctgttgtcggggccaggtacat

SEQ ID NO: 144439 - DNA, 25 bp, Probe Sequence
agccttcttcaagtggctccgtgaa

SEQ ID NO: 144440 - DNA, 25 bp, Probe Sequence
agcctttacatgtatggtctggtta

SEQ ID NO: 144441 - DNA, 25 bp, Probe Sequence
acgtcgtactgatgggctaggtagt

SEQ ID NO: 144442 - DNA, 25 bp, Probe Sequence
agcgccggactgtggtggacagtga

SEQ ID NO: 144443 - DNA, 25 bp, Probe Sequence
agcggctgaacttcggggacgacat

SEQ ID NO: 144444 - DNA, 25 bp, Probe Sequence
actggtctacactggttgccgaatt

SEQ ID NO: 144445 - DNA, 25 bp, Probe Sequence
actggtctacactggttgccgaatt

SEQ ID NO: 144446 - DNA, 25 bp, Probe Sequence
actagcttaatctggtttacggatg

SEQ ID NO: 144447 - DNA, 25 bp, Probe Sequence
tactactttacgggtattaaggcat

SEQ ID NO: 144448 - DNA, 25 bp, Probe Sequence
accagtttcaagcagtattaagagt

SEQ ID NO: 144449 - DNA, 25 bp, Probe Sequence
accagcttacaactcaaaccgggct

SEQ ID NO: 144450 - DNA, 25 bp, Probe Sequence
acgcagaatacctcgaaccaggcgg

SEQ ID NO: 144451 - DNA, 25 bp, Probe Sequence
acgcatgactacattacaacgggcc

SEQ ID NO: 144452 - DNA, 25 bp, Probe Sequence
accatcactactcaagaccggaggc

SEQ ID NO: 144453 - DNA, 25 bp, Probe Sequence
agcctcatttcttacagacggggaa

SEQ ID NO: 144454 - DNA, 25 bp, Probe Sequence
agcctttctgtttggccagggctac

SEQ ID NO: 144455 - DNA, 25 bp, Probe Sequence
agcctgcctctgttatagcttgtac

SEQ ID NO: 144456 - DNA, 25 bp, Probe Sequence
agccgcactcagttatggcttctac

SEQ ID NO: 144457 - DNA, 25 bp, Probe Sequence
agcccagtcagcattagactctaca

SEQ ID NO: 144458 - DNA, 25 bp, Probe Sequence
agcccagtcagcattagactctaca

SEQ ID NO: 144459 - DNA, 25 bp, Probe Sequence
agccctcaagatctacagctcaaca

SEQ ID NO: 144460 - DNA, 25 bp, Probe Sequence
agcccctacccattagatgcaggct

SEQ ID NO: 144461 - DNA, 25 bp, Probe Sequence
agccccttggactgaggcagttttg

SEQ ID NO: 144462 - DNA, 25 bp, Probe Sequence
agcctcggatggccaacattcagtt

SEQ ID NO: 144463 - DNA, 25 bp, Probe Sequence
agcctgggatgagcaatcctgttat

SEQ ID NO: 144464 - DNA, 25 bp, Probe Sequence
agcgctgggatatgaagcttcgtca

SEQ ID NO: 144465 - DNA, 25 bp, Probe Sequence
agctgtagtcactggagctgcggtc

SEQ ID NO: 144466 - DNA, 25 bp, Probe Sequence
agctgtagtcactggagctgcggtc

SEQ ID NO: 144467 - DNA, 25 bp, Probe Sequence
agctgtagtcactggagctgcggtc

SEQ ID NO: 144468 - DNA, 25 bp, Probe Sequence
agctgtggtcactggagctgtggtc

SEQ ID NO: 144469 - DNA, 25 bp, Probe Sequence
agctgggcccagagcagctggaggc

SEQ ID NO: 144470 - DNA, 25 bp, Probe Sequence
agctgggcccagagcagctggaggc

SEQ ID NO: 144471 - DNA, 25 bp, Probe Sequence
agctggggcgagggctgtgcccagc

SEQ ID NO: 144472 - DNA, 25 bp, Probe Sequence
agctggggcgagggctgtgcccagc

SEQ ID NO: 144473 - DNA, 25 bp, Probe Sequence
agctggtgttagggctatctcaggc

SEQ ID NO: 144474 - DNA, 25 bp, Probe Sequence
agctggtgttcagcgtgtctgtgga

SEQ ID NO: 144475 - DNA, 25 bp, Probe Sequence
agctgggtatgtgcttgaaggaatt

SEQ ID NO: 144476 - DNA, 25 bp, Probe Sequence
agctggttaaccttgaagtgactgt

SEQ ID NO: 144477 - DNA, 25 bp, Probe Sequence
agctgtgttagagcaggaacccatt

SEQ ID NO: 144478 - DNA, 25 bp, Probe Sequence
agcctgtatgtagcagggctccctt

SEQ ID NO: 144479 - DNA, 25 bp, Probe Sequence
agcctggatccatcaaggggccttg

SEQ ID NO: 144480 - DNA, 25 bp, Probe Sequence
agccatggacttggccagtaggcct

SEQ ID NO: 144481 - DNA, 25 bp, Probe Sequence
agcctggggctcccagtaggagctc

SEQ ID NO: 144482 - DNA, 25 bp, Probe Sequence
agcctgggcaacataccaagacccc

SEQ ID NO: 144483 - DNA, 25 bp, Probe Sequence
agcgtggacaaatctctcagccacc

SEQ ID NO: 144484 - DNA, 25 bp, Probe Sequence
agcggctaaaaacctgagcacgttt

SEQ ID NO: 144485 - DNA, 25 bp, Probe Sequence
agcggagaaatatggtacacctctt

SEQ ID NO: 144486 - DNA, 25 bp, Probe Sequence
agcgcgcagaacaaggacaaaacct

SEQ ID NO: 144487 - DNA, 25 bp, Probe Sequence
agcccaaataagcatcctcaaatct

SEQ ID NO: 144488 - DNA, 25 bp, Probe Sequence
actacaaatacgcacaaaaatatta

SEQ ID NO: 144489 - DNA, 25 bp, Probe Sequence
acaaccttacaagcaaacttactat

SEQ ID NO: 144490 - DNA, 25 bp, Probe Sequence
accttttacagataaagctgctaac

SEQ ID NO: 144491 - DNA, 25 bp, Probe Sequence
agccttttctctcaaagcgtttatt

SEQ ID NO: 144492 - DNA, 25 bp, Probe Sequence
agccttttcctggcgagggttatga

SEQ ID NO: 144493 - DNA, 25 bp, Probe Sequence
agccaaacccaggcaagggtcctca

SEQ ID NO: 144494 - DNA, 25 bp, Probe Sequence
accaagacctcgtgttgagacctcc

SEQ ID NO: 144495 - DNA, 25 bp, Probe Sequence
accaaactcttcggactgtgagccc

SEQ ID NO: 144496 - DNA, 25 bp, Probe Sequence
acccaactttcgatcgaatcgccct

SEQ ID NO: 144497 - DNA, 25 bp, Probe Sequence
agcccaagtgataacttcgaagcca

SEQ ID NO: 144498 - DNA, 25 bp, Probe Sequence
agccatcaggtacagtttacactac

SEQ ID NO: 144499 - DNA, 25 bp, Probe Sequence
agccctggataatgctttactttct

SEQ ID NO: 144500 - DNA, 25 bp, Probe Sequence
ggtcctggaagtgttgtacttacca

SEQ ID NO: 144501 - DNA, 25 bp, Probe Sequence
gggcctggaagtaccttaggacaca

SEQ ID NO: 144502 - DNA, 25 bp, Probe Sequence
agcccattagggacactatagaaca

SEQ ID NO: 144503 - DNA, 25 bp, Probe Sequence
agcgacagtaggctgcatctggaga

SEQ ID NO: 144504 - DNA, 25 bp, Probe Sequence
agccctgaagtgctccgggcatttg

SEQ ID NO: 144505 - DNA, 25 bp, Probe Sequence
agcctcaaagtgcaccgactagttg

SEQ ID NO: 144506 - DNA, 25 bp, Probe Sequence
agcctcacaggttatacccagcagt

SEQ ID NO: 144507 - DNA, 25 bp, Probe Sequence
agcccacagtgcctgtacaggaagg

SEQ ID NO: 144508 - DNA, 25 bp, Probe Sequence
agcccagggcgagtattggaggagg

SEQ ID NO: 144509 - DNA, 25 bp, Probe Sequence
agcccaactggatatcggagacgag

SEQ ID NO: 144510 - DNA, 25 bp, Probe Sequence
agcccagcctacagtgcggataaag

SEQ ID NO: 144511 - DNA, 25 bp, Probe Sequence
agccggccttgaggtggaggactca

SEQ ID NO: 144512 - DNA, 25 bp, Probe Sequence
accaggacacagggtggggaacatc

SEQ ID NO: 144513 - DNA, 25 bp, Probe Sequence
accagagaccaaacaaggactaatc

SEQ ID NO: 144514 - DNA, 25 bp, Probe Sequence
accaattccaatttcaaaatgtctc

SEQ ID NO: 144515 - DNA, 25 bp, Probe Sequence
agcgcagagtccttgtttaaaggtc

SEQ ID NO: 144516 - DNA, 25 bp, Probe Sequence
agcctgtggccatggttaattggca

SEQ ID NO: 144517 - DNA, 25 bp, Probe Sequence
agccctgaccagtgtagagattcca

SEQ ID NO: 144518 - DNA, 25 bp, Probe Sequence
agcctctaatcctgataaggttgct

SEQ ID NO: 144519 - DNA, 25 bp, Probe Sequence
agcccagaacaatgctaaagtagct

SEQ ID NO: 144520 - DNA, 25 bp, Probe Sequence
agcccgaacaccattgagggagctg

SEQ ID NO: 144521 - DNA, 25 bp, Probe Sequence
agcctctaactggatcttaaggact

SEQ ID NO: 144522 - DNA, 25 bp, Probe Sequence
agccatcttattcttgtaaaatttt

SEQ ID NO: 144523 - DNA, 25 bp, Probe Sequence
aacaaaattggtgtgaaactttcat

SEQ ID NO: 144524 - DNA, 25 bp, Probe Sequence
acgaaaaggcctgcatgaaacttaa

SEQ ID NO: 144525 - DNA, 25 bp, Probe Sequence
cacgtaaacccttctaaaatcagtg

SEQ ID NO: 144526 - DNA, 25 bp, Probe Sequence
caggacaaaattcttagtaatgagt

SEQ ID NO: 144527 - DNA, 25 bp, Probe Sequence
acgcacaaaaatattaggtaggtat

SEQ ID NO: 144528 - DNA, 25 bp, Probe Sequence
tacgcacaaaaatattaggtaggta

SEQ ID NO: 144529 - DNA, 25 bp, Probe Sequence
ccccgaaaccagatcgagctaccta

SEQ ID NO: 144530 - DNA, 25 bp, Probe Sequence
accggataacacatttcaccacccg

SEQ ID NO: 144531 - DNA, 25 bp, Probe Sequence
actagaaataccacttgacccagcc

SEQ ID NO: 144532 - DNA, 25 bp, Probe Sequence
accaaaaaccttctgttcaatgaca

SEQ ID NO: 144533 - DNA, 25 bp, Probe Sequence
accaagtatactgtacttccacagt

SEQ ID NO: 144534 - DNA, 25 bp, Probe Sequence
accaagataatcacatcactccctc

SEQ ID NO: 144535 - DNA, 25 bp, Probe Sequence
agccattgaaagctcattaccagta

SEQ ID NO: 144536 - DNA, 25 bp, Probe Sequence
agccatctattacttcaaggccaat

SEQ ID NO: 144537 - DNA, 25 bp, Probe Sequence
agcctcaggctcaaatccaggccaa

SEQ ID NO: 144538 - DNA, 25 bp, Probe Sequence
agcgctagagatgagtgactggcca

SEQ ID NO: 144539 - DNA, 25 bp, Probe Sequence
agcgccagaatggagatgatccctt

SEQ ID NO: 144540 - DNA, 25 bp, Probe Sequence
agcgccatgagattgtgcagaccct

SEQ ID NO: 144541 - DNA, 25 bp, Probe Sequence
agcccatggtgaatgcatatgcctt

SEQ ID NO: 144542 - DNA, 25 bp, Probe Sequence
agccctggatttgcatacattcttc

SEQ ID NO: 144543 - DNA, 25 bp, Probe Sequence
agccgtgtgttttatgaatgacctt

SEQ ID NO: 144544 - DNA, 25 bp, Probe Sequence
agccagtctgttgaagaggccctca

SEQ ID NO: 144545 - DNA, 25 bp, Probe Sequence
agccatgagtttgaaagggcccatc

SEQ ID NO: 144546 - DNA, 25 bp, Probe Sequence
agcctgcctcttgaagagggggttt

SEQ ID NO: 144547 - DNA, 25 bp, Probe Sequence
agcctgtatcttgggggacagggct

SEQ ID NO: 144548 - DNA, 25 bp, Probe Sequence
agcctgtaggtgcagaggccctggc

SEQ ID NO: 144549 - DNA, 25 bp, Probe Sequence
actaaagcctgacagtgtccggtcc

SEQ ID NO: 144550 - DNA, 25 bp, Probe Sequence
accacggcactacaaccttggtggc

SEQ ID NO: 144551 - DNA, 25 bp, Probe Sequence
agcgctgggttgactaacctctggt

SEQ ID NO: 144552 - DNA, 25 bp, Probe Sequence
agcgtgctgcttagaaatacggctg

SEQ ID NO: 144553 - DNA, 25 bp, Probe Sequence
agcgctgctgtaacgacttcaggag

SEQ ID NO: 144554 - DNA, 25 bp, Probe Sequence
agccggtatcagaaccatagtagca

SEQ ID NO: 144555 - DNA, 25 bp, Probe Sequence
agccggtatcagaaccatagtagca

SEQ ID NO: 144556 - DNA, 25 bp, Probe Sequence
agccagtgtgactatgcacctaatt

SEQ ID NO: 144557 - DNA, 25 bp, Probe Sequence
agccagcgaagccacgctgctgaac

SEQ ID NO: 144558 - DNA, 25 bp, Probe Sequence
agcccgagcacaaggcgtgagagcc

SEQ ID NO: 144559 - DNA, 25 bp, Probe Sequence
agccctacatctaagccagagagag

SEQ ID NO: 144560 - DNA, 25 bp, Probe Sequence
agcctgctgatcttaagaagagaat

SEQ ID NO: 144561 - DNA, 25 bp, Probe Sequence
agcgttgactgaggagatagtgaaa

SEQ ID NO: 144562 - DNA, 25 bp, Probe Sequence
agcgggcagctgaagatgatgagga

SEQ ID NO: 144563 - DNA, 25 bp, Probe Sequence
agcgggcagctgaagatgatgagga

SEQ ID NO: 144564 - DNA, 25 bp, Probe Sequence
agcggctgctcgaacagattgcgag

SEQ ID NO: 144565 - DNA, 25 bp, Probe Sequence
agccgtgctgtcaacatcatccggc

SEQ ID NO: 144566 - DNA, 25 bp, Probe Sequence
agcctggcagatcattgcacccagc

SEQ ID NO: 144567 - DNA, 25 bp, Probe Sequence
agcctggactggctgccagccagcg

SEQ ID NO: 144568 - DNA, 25 bp, Probe Sequence
agcctggactggctgccagccagcg

SEQ ID NO: 144569 - DNA, 25 bp, Probe Sequence
agcctggactggctgccagccagcg

SEQ ID NO: 144570 - DNA, 25 bp, Probe Sequence
agcctggactggctgccagccagcg

SEQ ID NO: 144571 - DNA, 25 bp, Probe Sequence
agcgctggatcaagaattgcctggc

SEQ ID NO: 144572 - DNA, 25 bp, Probe Sequence
agccctgatgcatgacacctgggaa

SEQ ID NO: 144573 - DNA, 25 bp, Probe Sequence
agcccagtacatgacctatggaact

SEQ ID NO: 144574 - DNA, 25 bp, Probe Sequence
agcccatatactctgcactgtgtaa

SEQ ID NO: 144575 - DNA, 25 bp, Probe Sequence
agcgccaagacctgcaatgttgact

SEQ ID NO: 144576 - DNA, 25 bp, Probe Sequence
agcgagaagcccggaggttgcgctg

SEQ ID NO: 144577 - DNA, 25 bp, Probe Sequence
agccaaaacctggggttgcagctcc

SEQ ID NO: 144578 - DNA, 25 bp, Probe Sequence
agcccaggtcctgaggacatcggcc

SEQ ID NO: 144579 - DNA, 25 bp, Probe Sequence
agcctcctaactgacagaatctgag

SEQ ID NO: 144580 - DNA, 25 bp, Probe Sequence
agcccttaatcctacagtcactggg

SEQ ID NO: 144581 - DNA, 25 bp, Probe Sequence
agcgcctgatgttttagcgatcccg

SEQ ID NO: 144582 - DNA, 25 bp, Probe Sequence
agcccagtgactgtgaggatcgccc

SEQ ID NO: 144583 - DNA, 25 bp, Probe Sequence
agcccagtgactgtgaggatcgccc

SEQ ID NO: 144584 - DNA, 25 bp, Probe Sequence
accacggagcatctgttgattccac

SEQ ID NO: 144585 - DNA, 25 bp, Probe Sequence
agcccagagagacgctgcttttacc

SEQ ID NO: 144586 - DNA, 25 bp, Probe Sequence
agcgaaatcgagcctggccttgagg

SEQ ID NO: 144587 - DNA, 25 bp, Probe Sequence
agcgataacatgttccgctcataat

SEQ ID NO: 144588 - DNA, 25 bp, Probe Sequence
agcctaacatgtatcgctcattcag

SEQ ID NO: 144589 - DNA, 25 bp, Probe Sequence
agcctgttcagtactgctggctctg

SEQ ID NO: 144590 - DNA, 25 bp, Probe Sequence
agcctgttcctaaatccctagaatt

SEQ ID NO: 144591 - DNA, 25 bp, Probe Sequence
accgtgttccattggcctcaaaatt

SEQ ID NO: 144592 - DNA, 25 bp, Probe Sequence
accgtaactatccgcactagaaagt

SEQ ID NO: 144593 - DNA, 25 bp, Probe Sequence
accctcctttgctgcttaataaatt

SEQ ID NO: 144594 - DNA, 25 bp, Probe Sequence
accacgcggttctggaaaggcactt

SEQ ID NO: 144595 - DNA, 25 bp, Probe Sequence
acccgcaagtcctggagaaagcctg

SEQ ID NO: 144596 - DNA, 25 bp, Probe Sequence
agccccaatgtatagtaaaatcagc

SEQ ID NO: 144597 - DNA, 25 bp, Probe Sequence
agccccagatgggatggaaatgaaa

SEQ ID NO: 144598 - DNA, 25 bp, Probe Sequence
agccctatgtggagagcgacagtag

SEQ ID NO: 144599 - DNA, 25 bp, Probe Sequence
agcgcctggaggacgggacagatgg

SEQ ID NO: 144600 - DNA, 25 bp, Probe Sequence
agccctgtgaggcgtggcaggtgga

SEQ ID NO: 144601 - DNA, 25 bp, Probe Sequence
agcgcctcgcgaacgccgggctgga

SEQ ID NO: 144602 - DNA, 25 bp, Probe Sequence
agcccagggcagcccctgggcagga

SEQ ID NO: 144603 - DNA, 25 bp, Probe Sequence
agccgagtgtgacacagtggagcag

SEQ ID NO: 144604 - DNA, 25 bp, Probe Sequence
agccgcctggactgcaggggggcgg

SEQ ID NO: 144605 - DNA, 25 bp, Probe Sequence
agcccagcgacacagaagggggtgg

SEQ ID NO: 144606 - DNA, 25 bp, Probe Sequence
agcccagcgacacagaagggggtgg

SEQ ID NO: 144607 - DNA, 25 bp, Probe Sequence
agcccattggccagaaaggaaagac

SEQ ID NO: 144608 - DNA, 25 bp, Probe Sequence
agccagattaacaggaatgaagaac

SEQ ID NO: 144609 - DNA, 25 bp, Probe Sequence
agcctgcaaaactgtgagtcaatta

SEQ ID NO: 144610 - DNA, 25 bp, Probe Sequence
agcctgccagaacaaggccaatata

SEQ ID NO: 144611 - DNA, 25 bp, Probe Sequence
agccgcctgcaatcaggtgaatata

SEQ ID NO: 144612 - DNA, 25 bp, Probe Sequence
agcgcagctctattaagctgtggtg

SEQ ID NO: 144613 - DNA, 25 bp, Probe Sequence
agcgcagacatggcccatgctgtgc

SEQ ID NO: 144614 - DNA, 25 bp, Probe Sequence
agcgcaacagcagcctgcagctgga

SEQ ID NO: 144615 - DNA, 25 bp, Probe Sequence
agcccatctgcagcgatgcagctgg

SEQ ID NO: 144616 - DNA, 25 bp, Probe Sequence
agccctctcacggtgcaatggagtg

SEQ ID NO: 144617 - DNA, 25 bp, Probe Sequence
agcccaccagcaggagcttggagtt

SEQ ID NO: 144618 - DNA, 25 bp, Probe Sequence
agcccactccattcagatcatgaag

SEQ ID NO: 144619 - DNA, 25 bp, Probe Sequence
agcctcagccctagctgatgctgat

SEQ ID NO: 144620 - DNA, 25 bp, Probe Sequence
agcctcactcctgtcaatatattct

SEQ ID NO: 144621 - DNA, 25 bp, Probe Sequence
agcctcctcttttctagaagtctat

SEQ ID NO: 144622 - DNA, 25 bp, Probe Sequence
agcccctgtctatcaaaagttatta

SEQ ID NO: 144623 - DNA, 25 bp, Probe Sequence
agcccctgcttgacaaccaggttgg

SEQ ID NO: 144624 - DNA, 25 bp, Probe Sequence
agcccaccaatgaaagccactctat

SEQ ID NO: 144625 - DNA, 25 bp, Probe Sequence
agcccacaactagtattcagccatt

SEQ ID NO: 144626 - DNA, 25 bp, Probe Sequence
agcccagagatccacaagaggccct

SEQ ID NO: 144627 - DNA, 25 bp, Probe Sequence
agcccaaactcctaggactcttgaa

SEQ ID NO: 144628 - DNA, 25 bp, Probe Sequence
agcccgaacttgtaaagacctgcaa

SEQ ID NO: 144629 - DNA, 25 bp, Probe Sequence
acccaagacttatacccaggatgat

SEQ ID NO: 144630 - DNA, 25 bp, Probe Sequence
agcccaatttggggacaagccgagt

SEQ ID NO: 144631 - DNA, 25 bp, Probe Sequence
agcccagctttttggtaatgccagc

SEQ ID NO: 144632 - DNA, 25 bp, Probe Sequence
agccgttttgttcgtgttgccaaat

SEQ ID NO: 144633 - DNA, 25 bp, Probe Sequence
agccagtttggattcgatttcccat

SEQ ID NO: 144634 - DNA, 25 bp, Probe Sequence
agcgcagttgctaacaggatggacc

SEQ ID NO: 144635 - DNA, 25 bp, Probe Sequence
agccgtccatcgtcagacgtgatca

SEQ ID NO: 144636 - DNA, 25 bp, Probe Sequence
agcctttgtctgtgatcagtgcggt

SEQ ID NO: 144637 - DNA, 25 bp, Probe Sequence
accaatctgatctgcagtagtgtgg

SEQ ID NO: 144638 - DNA, 25 bp, Probe Sequence
agcctactgcactgagaacttgcgt

SEQ ID NO: 144639 - DNA, 25 bp, Probe Sequence
agcctaacgctgtcaagacattgct

SEQ ID NO: 144640 - DNA, 25 bp, Probe Sequence
agccttcacgcataagaggcagtgc

SEQ ID NO: 144641 - DNA, 25 bp, Probe Sequence
agccgccaccaagcaggcaggtgga

SEQ ID NO: 144642 - DNA, 25 bp, Probe Sequence
agccgccaccaagcaggcaggtgga

SEQ ID NO: 144643 - DNA, 25 bp, Probe Sequence
agcccacccagcaggtgtttggcat

SEQ ID NO: 144644 - DNA, 25 bp, Probe Sequence
agccagctcccgagcggttgggcct

SEQ ID NO: 144645 - DNA, 25 bp, Probe Sequence
accatgccctagaggagtcggcttc

SEQ ID NO: 144646 - DNA, 25 bp, Probe Sequence
accacgactttgcaggatctaatag

SEQ ID NO: 144647 - DNA, 25 bp, Probe Sequence
accagagaatggaaactatttaagg

SEQ ID NO: 144648 - DNA, 25 bp, Probe Sequence
agcctggcaagggaatttcttcaac

SEQ ID NO: 144649 - DNA, 25 bp, Probe Sequence
agccagctggactgcaatttcttaa

SEQ ID NO: 144650 - DNA, 25 bp, Probe Sequence
accactggaactggagtccttatat

SEQ ID NO: 144651 - DNA, 25 bp, Probe Sequence
accagctagaagtggtccctctttc

SEQ ID NO: 144652 - DNA, 25 bp, Probe Sequence
accaagaacgtcagttcgtgttgac

SEQ ID NO: 144653 - DNA, 25 bp, Probe Sequence
accttggacagtgggatgtggtgtt

SEQ ID NO: 144654 - DNA, 25 bp, Probe Sequence
accaattaagcttgagattgttctg

SEQ ID NO: 144655 - DNA, 25 bp, Probe Sequence
accaaggattgttggagagtccagt

SEQ ID NO: 144656 - DNA, 25 bp, Probe Sequence
agccagggaacttcaaggtccagac

SEQ ID NO: 144657 - DNA, 25 bp, Probe Sequence
agcctggccaagctaggtggacaga

SEQ ID NO: 144658 - DNA, 25 bp, Probe Sequence
agcctggctgaccgtgagggccaga

SEQ ID NO: 144659 - DNA, 25 bp, Probe Sequence
agcgggcagcagcttgtggaacaga

SEQ ID NO: 144660 - DNA, 25 bp, Probe Sequence
agcgcgaggcatgggtgcgcgaaaa

SEQ ID NO: 144661 - DNA, 25 bp, Probe Sequence
agcgtggcctacgtgagccaacaag

SEQ ID NO: 144662 - DNA, 25 bp, Probe Sequence
agcgctagcctgaggagctcagagc

SEQ ID NO: 144663 - DNA, 25 bp, Probe Sequence
agcgccagcgcgacgagaaagaggc

SEQ ID NO: 144664 - DNA, 25 bp, Probe Sequence
agccccaggacaggcaaagatcgca

SEQ ID NO: 144665 - DNA, 25 bp, Probe Sequence
agcccgaggagaactgagactctgc

SEQ ID NO: 144666 - DNA, 25 bp, Probe Sequence
agcccagaggctcatcaggacttgt

SEQ ID NO: 144667 - DNA, 25 bp, Probe Sequence
agcccagggcctcaatgagcctggt

SEQ ID NO: 144668 - DNA, 25 bp, Probe Sequence
agcctgcagcggcacaaatgcacct

SEQ ID NO: 144669 - DNA, 25 bp, Probe Sequence
agcgcatccgggagatcatggccat

SEQ ID NO: 144670 - DNA, 25 bp, Probe Sequence
agcgtagggtgctgagctggcgcta

SEQ ID NO: 144671 - DNA, 25 bp, Probe Sequence
agcggtggaggctgagtcgcaggac

SEQ ID NO: 144672 - DNA, 25 bp, Probe Sequence
agcctttgagagtgggcgagtgagt

SEQ ID NO: 144673 - DNA, 25 bp, Probe Sequence
agcctttgagagtgagcatactatg

SEQ ID NO: 144674 - DNA, 25 bp, Probe Sequence
agcgcatccatggagtgggcttcaa

SEQ ID NO: 144675 - DNA, 25 bp, Probe Sequence
agcccattggcaatgaggctgccca

SEQ ID NO: 144676 - DNA, 25 bp, Probe Sequence
agcccaatggctagagggctctgct

SEQ ID NO: 144677 - DNA, 25 bp, Probe Sequence
agcccaaggcacaggggtgctaggc

SEQ ID NO: 144678 - DNA, 25 bp, Probe Sequence
agccccacctgcaggggcttagtgt

SEQ ID NO: 144679 - DNA, 25 bp, Probe Sequence
agccttccctcagtgatgggttcag

SEQ ID NO: 144680 - DNA, 25 bp, Probe Sequence
agcgtctgccccagtgaggaggcag

SEQ ID NO: 144681 - DNA, 25 bp, Probe Sequence
agccatctgtactggcggggagcag

SEQ ID NO: 144682 - DNA, 25 bp, Probe Sequence
agcgattgcaactggcctggccgca

SEQ ID NO: 144683 - DNA, 25 bp, Probe Sequence
agcgcattgaacagtcctgggcact

SEQ ID NO: 144684 - DNA, 25 bp, Probe Sequence
agccatgaggacagttgtgtgccac

SEQ ID NO: 144685 - DNA, 25 bp, Probe Sequence
agcgcagaccacagttacatgtatg

SEQ ID NO: 144686 - DNA, 25 bp, Probe Sequence
agcgcagaccacagttacatgtatg

SEQ ID NO: 144687 - DNA, 25 bp, Probe Sequence
agccagactacactgcttacgttgc

SEQ ID NO: 144688 - DNA, 25 bp, Probe Sequence
agccatgccataaccattacttact

SEQ ID NO: 144689 - DNA, 25 bp, Probe Sequence
agcctgctcagctctgcataagtaa

SEQ ID NO: 144690 - DNA, 25 bp, Probe Sequence
agccctctcagcaagcatgtagtaa

SEQ ID NO: 144691 - DNA, 25 bp, Probe Sequence
agcctctttgcaactgggtcagaat

SEQ ID NO: 144692 - DNA, 25 bp, Probe Sequence
agcccttttgtttggtctatcagta

SEQ ID NO: 144693 - DNA, 25 bp, Probe Sequence
agcccatttctgttaacctattatc

SEQ ID NO: 144694 - DNA, 25 bp, Probe Sequence
agcccatatggcaagtaaacctttc

SEQ ID NO: 144695 - DNA, 25 bp, Probe Sequence
agccctcatgtttgtgataaccgtg

SEQ ID NO: 144696 - DNA, 25 bp, Probe Sequence
agccctcatttttataacctggcaa

SEQ ID NO: 144697 - DNA, 25 bp, Probe Sequence
agccctcatttttataacctggcaa

SEQ ID NO: 144698 - DNA, 25 bp, Probe Sequence
agccctcattaggtatttaatccca

SEQ ID NO: 144699 - DNA, 25 bp, Probe Sequence
agccctgctctagtaatgtctgact

SEQ ID NO: 144700 - DNA, 25 bp, Probe Sequence
agcccatgtcttagagattctttcc

SEQ ID NO: 144701 - DNA, 25 bp, Probe Sequence
agcctcatttgtggagattcgctga

SEQ ID NO: 144702 - DNA, 25 bp, Probe Sequence
agcctttagtggatatttgggaaca

SEQ ID NO: 144703 - DNA, 25 bp, Probe Sequence
agcctcttagtgctattcattggtg

SEQ ID NO: 144704 - DNA, 25 bp, Probe Sequence
agcctctttgctattctattggagt

SEQ ID NO: 144705 - DNA, 25 bp, Probe Sequence
agcctccccacttgtctattgaggt

SEQ ID NO: 144706 - DNA, 25 bp, Probe Sequence
agcctccccagacgacgatctggga

SEQ ID NO: 144707 - DNA, 25 bp, Probe Sequence
agcctcccattgtgcagtgcttggg

SEQ ID NO: 144708 - DNA, 25 bp, Probe Sequence
agccaaccaatgtgtgcgcggggta

SEQ ID NO: 144709 - DNA, 25 bp, Probe Sequence
agccaaagaagattggggggtatgt

SEQ ID NO: 144710 - DNA, 25 bp, Probe Sequence
accaaaacagcatggtactggtacc

SEQ ID NO: 144711 - DNA, 25 bp, Probe Sequence
agcccagaacactggtctcgggccc

SEQ ID NO: 144712 - DNA, 25 bp, Probe Sequence
agcgcctaagcatagtgttagagtt

SEQ ID NO: 144713 - DNA, 25 bp, Probe Sequence
agcgcctagagctggtgctggaagc

SEQ ID NO: 144714 - DNA, 25 bp, Probe Sequence
agcccaagagagtggcagtgccagc

SEQ ID NO: 144715 - DNA, 25 bp, Probe Sequence
agcccaagcagatagctcatggcta

SEQ ID NO: 144716 - DNA, 25 bp, Probe Sequence
agcccagtgcaatgctgtcgagcat

SEQ ID NO: 144717 - DNA, 25 bp, Probe Sequence
agcccagtgacttgcatgagaagcc

SEQ ID NO: 144718 - DNA, 25 bp, Probe Sequence
agcccagtccactgagcaagcaagg

SEQ ID NO: 144719 - DNA, 25 bp, Probe Sequence
accacaactcaacggctacatagaa

SEQ ID NO: 144720 - DNA, 25 bp, Probe Sequence
actgcagctaaccctagtcaaaact

SEQ ID NO: 144721 - DNA, 25 bp, Probe Sequence
agccctgaaccaaagtcccagagct

SEQ ID NO: 144722 - DNA, 25 bp, Probe Sequence
agcctggcctccaaagtcaccaggc

SEQ ID NO: 144723 - DNA, 25 bp, Probe Sequence
agcctgctactccaggagttcggct

SEQ ID NO: 144724 - DNA, 25 bp, Probe Sequence
agccgcatgaaccggatgtctcggc

SEQ ID NO: 144725 - DNA, 25 bp, Probe Sequence
agcccagacacaggtgctgtctctg

SEQ ID NO: 144726 - DNA, 25 bp, Probe Sequence
agccacagcagttgctgcaggtctt

SEQ ID NO: 144727 - DNA, 25 bp, Probe Sequence
agcccagctgcttgcacaaatggat

SEQ ID NO: 144728 - DNA, 25 bp, Probe Sequence
agccctctgtaccaacagtgtcaat

SEQ ID NO: 144729 - DNA, 25 bp, Probe Sequence
agccctttgatctagacatcttact

SEQ ID NO: 144730 - DNA, 25 bp, Probe Sequence
agcgcttctttctgactctaaaata

SEQ ID NO: 144731 - DNA, 25 bp, Probe Sequence
agcccttctctctgacgaaagatgt

SEQ ID NO: 144732 - DNA, 25 bp, Probe Sequence
agccttggacgctgtgcgggagatg

SEQ ID NO: 144733 - DNA, 25 bp, Probe Sequence
agccttggacgctgtgcgggagatg

SEQ ID NO: 144734 - DNA, 25 bp, Probe Sequence
agccatatagcaggcacgtccgggt

SEQ ID NO: 144735 - DNA, 25 bp, Probe Sequence
agccatgaacgggctggcagggcct

SEQ ID NO: 144736 - DNA, 25 bp, Probe Sequence
agccaagccggtcgtgagtgacgat

SEQ ID NO: 144737 - DNA, 25 bp, Probe Sequence
agccaagccggtcgtgagtgacgat

SEQ ID NO: 144738 - DNA, 25 bp, Probe Sequence
agcgcagagccggtagcgggaagga

SEQ ID NO: 144739 - DNA, 25 bp, Probe Sequence
agccagtcactggtgagggggggta

SEQ ID NO: 144740 - DNA, 25 bp, Probe Sequence
agcctgtgcactggagaatggatgg

SEQ ID NO: 144741 - DNA, 25 bp, Probe Sequence
agccgtccaggaactcaagcgggtc

SEQ ID NO: 144742 - DNA, 25 bp, Probe Sequence
agcctcctggaaagccaacgggatc

SEQ ID NO: 144743 - DNA, 25 bp, Probe Sequence
agcctgcagctggattacgcaacag

SEQ ID NO: 144744 - DNA, 25 bp, Probe Sequence
agcctgcagctggattacgcaacag

SEQ ID NO: 144745 - DNA, 25 bp, Probe Sequence
agcctggagaattcagtgcagccag

SEQ ID NO: 144746 - DNA, 25 bp, Probe Sequence
agccagagaacttattcctactccc

SEQ ID NO: 144747 - DNA, 25 bp, Probe Sequence
agccgagaagtttccactgggacca

SEQ ID NO: 144748 - DNA, 25 bp, Probe Sequence
agcccaaggcagaatccaagggtcc

SEQ ID NO: 144749 - DNA, 25 bp, Probe Sequence
agcccgggaggaacacaggcagctc

SEQ ID NO: 144750 - DNA, 25 bp, Probe Sequence
accagggaggaaatggcggcagctg

SEQ ID NO: 144751 - DNA, 25 bp, Probe Sequence
agccagaagactgattggagggccc

SEQ ID NO: 144752 - DNA, 25 bp, Probe Sequence
agccggagccggatgcagtaggact

SEQ ID NO: 144753 - DNA, 25 bp, Probe Sequence
agcgccacactggtgtctgaaagga

SEQ ID NO: 144754 - DNA, 25 bp, Probe Sequence
agcgaggcactggtgacgtcaagct

SEQ ID NO: 144755 - DNA, 25 bp, Probe Sequence
agccggcactggcagcttaatgcct

SEQ ID NO: 144756 - DNA, 25 bp, Probe Sequence
acgaggacggaggttaatggctgct

SEQ ID NO: 144757 - DNA, 25 bp, Probe Sequence
agccttcgcggggcaaaatggagct

SEQ ID NO: 144758 - DNA, 25 bp, Probe Sequence
agcctccctcagagacaaagtcact

SEQ ID NO: 144759 - DNA, 25 bp, Probe Sequence
agccacgcccagaagaacgagaatg

SEQ ID NO: 144760 - DNA, 25 bp, Probe Sequence
acccctacggaatcagagaatcctc

SEQ ID NO: 144761 - DNA, 25 bp, Probe Sequence
accggctgacggacaccagcagata

SEQ ID NO: 144762 - DNA, 25 bp, Probe Sequence
accgtggcctggtaccaggtgagcc

SEQ ID NO: 144763 - DNA, 25 bp, Probe Sequence
agcccagacctggccataagggaca

SEQ ID NO: 144764 - DNA, 25 bp, Probe Sequence
accacataccttgtccggaacatta

SEQ ID NO: 144765 - DNA, 25 bp, Probe Sequence
accaaacaaccaactcagaaattcg

SEQ ID NO: 144766 - DNA, 25 bp, Probe Sequence
accaagccaaacatcatcatggagt

SEQ ID NO: 144767 - DNA, 25 bp, Probe Sequence
agcccctaatggacctgcatggtgt

SEQ ID NO: 144768 - DNA, 25 bp, Probe Sequence
agcccatgcgaaggcccgcatgagc

SEQ ID NO: 144769 - DNA, 25 bp, Probe Sequence
accacaggcaagcactgcgagacct

SEQ ID NO: 144770 - DNA, 25 bp, Probe Sequence
accagctggagaccacggagttcat

SEQ ID NO: 144771 - DNA, 25 bp, Probe Sequence
agccagtgaggtcccagtagtctaa

SEQ ID NO: 144772 - DNA, 25 bp, Probe Sequence
agccagggagtaacgaagagatcaa

SEQ ID NO: 144773 - DNA, 25 bp, Probe Sequence
agccgcatgccacagagcagaaagt

SEQ ID NO: 144774 - DNA, 25 bp, Probe Sequence
agcccagccctgtatcaaatcagtc

SEQ ID NO: 144775 - DNA, 25 bp, Probe Sequence
agcccagccctgtatcaaatcagtc

SEQ ID NO: 144776 - DNA, 25 bp, Probe Sequence
agcctgagcagcctgttgaaacatt

SEQ ID NO: 144777 - DNA, 25 bp, Probe Sequence
agcccagagcagctggagaagttcc

SEQ ID NO: 144778 - DNA, 25 bp, Probe Sequence
agcgccaggcagcctgcaaacaggt

SEQ ID NO: 144779 - DNA, 25 bp, Probe Sequence
agcgacgcgctggcgttacagcgca

SEQ ID NO: 144780 - DNA, 25 bp, Probe Sequence
agcgccaaggacctttgcagcgcgt

SEQ ID NO: 144781 - DNA, 25 bp, Probe Sequence
agcgccaggagagcatcttccaggc

SEQ ID NO: 144782 - DNA, 25 bp, Probe Sequence
agccgacaggagagagatgggaccc

SEQ ID NO: 144783 - DNA, 25 bp, Probe Sequence
agcgcgacgagaaagaggcggccga

SEQ ID NO: 144784 - DNA, 25 bp, Probe Sequence
agccgcaaaggcagcaggctaccgg

SEQ ID NO: 144785 - DNA, 25 bp, Probe Sequence
agcccaattgagacaaacccctggc

SEQ ID NO: 144786 - DNA, 25 bp, Probe Sequence
agccaacttgagcgaaaccgcctgc

SEQ ID NO: 144787 - DNA, 25 bp, Probe Sequence
agcccttggggcagagaccccaggc

SEQ ID NO: 144788 - DNA, 25 bp, Probe Sequence
agcccttggggtgtttcactcaaga

SEQ ID NO: 144789 - DNA, 25 bp, Probe Sequence
agcccaggagttctgtttccgaaga

SEQ ID NO: 144790 - DNA, 25 bp, Probe Sequence
accggtggctctcttcttaaaagca

SEQ ID NO: 144791 - DNA, 25 bp, Probe Sequence
accaagggcctatatttatcaaaag

SEQ ID NO: 144792 - DNA, 25 bp, Probe Sequence
agcccgtttctatgctgttcaaaaa

SEQ ID NO: 144793 - DNA, 25 bp, Probe Sequence
agccttcactccagctggttaaaaa

SEQ ID NO: 144794 - DNA, 25 bp, Probe Sequence
agccttcactccagctggttaaaaa

SEQ ID NO: 144795 - DNA, 25 bp, Probe Sequence
agccgaccccatcgtagaatacaaa

SEQ ID NO: 144796 - DNA, 25 bp, Probe Sequence
agccgatccaccagctgagaattcg

SEQ ID NO: 144797 - DNA, 25 bp, Probe Sequence
agccgtcaacagcctggtcaatttg

SEQ ID NO: 144798 - DNA, 25 bp, Probe Sequence
agccagtctaactagttcaagctta

SEQ ID NO: 144799 - DNA, 25 bp, Probe Sequence
agccagtgatcgtctcagtcttggt

SEQ ID NO: 144800 - DNA, 25 bp, Probe Sequence
agccctcagcagtccatggagatgc

SEQ ID NO: 144801 - DNA, 25 bp, Probe Sequence
agccctcggagccatgtgtgagata

SEQ ID NO: 144802 - DNA, 25 bp, Probe Sequence
agcgaattgggccttgtgacacaag

SEQ ID NO: 144803 - DNA, 25 bp, Probe Sequence
agcctttgggcaggtgtagaaatta

SEQ ID NO: 144804 - DNA, 25 bp, Probe Sequence
agcgctttgggtgagtgcagtgaat

SEQ ID NO: 144805 - DNA, 25 bp, Probe Sequence
agccatctctagcttcattgcttac

SEQ ID NO: 144806 - DNA, 25 bp, Probe Sequence
agccattcacatcattttttatagg

SEQ ID NO: 144807 - DNA, 25 bp, Probe Sequence
agcctgccaaggagccgtgttagga

SEQ ID NO: 144808 - DNA, 25 bp, Probe Sequence
aacttcgtggaggccgtgtccaaag

SEQ ID NO: 144809 - DNA, 25 bp, Probe Sequence
accttcgggaaggagttcacagaag

SEQ ID NO: 144810 - DNA, 25 bp, Probe Sequence
agccctgctggtaagagagttgtca

SEQ ID NO: 144811 - DNA, 25 bp, Probe Sequence
agcccactgaggcctatgaggtgct

SEQ ID NO: 144812 - DNA, 25 bp, Probe Sequence
agccctctagccgtagtatgatctg

SEQ ID NO: 144813 - DNA, 25 bp, Probe Sequence
agcgcctgatggcagctatgtacac

SEQ ID NO: 144814 - DNA, 25 bp, Probe Sequence
agccagctgatatggtagcaaccaa

SEQ ID NO: 144815 - DNA, 25 bp, Probe Sequence
agcctgctgaactgccagaatccat

SEQ ID NO: 144816 - DNA, 25 bp, Probe Sequence
agccgtgaattccacagccatgaat

SEQ ID NO: 144817 - DNA, 25 bp, Probe Sequence
agccgctcagatatgaagcatcaac

SEQ ID NO: 144818 - DNA, 25 bp, Probe Sequence
cagccctagtagcaattaaggaaat

SEQ ID NO: 144819 - DNA, 25 bp, Probe Sequence
agccctagtagcaattaaggaaata

SEQ ID NO: 144820 - DNA, 25 bp, Probe Sequence
agcccctaactcataaagcaatcaa

SEQ ID NO: 144821 - DNA, 25 bp, Probe Sequence
agcctccatggagtacttcaaatct

SEQ ID NO: 144822 - DNA, 25 bp, Probe Sequence
agccccaggacttcgaatatgtctg

SEQ ID NO: 144823 - DNA, 25 bp, Probe Sequence
agcccaacgatcaagaaaatgcctg

SEQ ID NO: 144824 - DNA, 25 bp, Probe Sequence
agccagcaacgacatgtaccacagc

SEQ ID NO: 144825 - DNA, 25 bp, Probe Sequence
agcccaacagcacagtacccaaggg

SEQ ID NO: 144826 - DNA, 25 bp, Probe Sequence
agccaaagacagcagcattcccaag

SEQ ID NO: 144827 - DNA, 25 bp, Probe Sequence
caccgacgtcagcaacttcgacgag

SEQ ID NO: 144828 - DNA, 25 bp, Probe Sequence
acgagtggtcagcacatttagtaag

SEQ ID NO: 144829 - DNA, 25 bp, Probe Sequence
accactggtcccttcattagtgacg

SEQ ID NO: 144830 - DNA, 25 bp, Probe Sequence
agccagggacctctggctggtgacg

SEQ ID NO: 144831 - DNA, 25 bp, Probe Sequence
agcccaggggtgctgtgggaactgg

SEQ ID NO: 144832 - DNA, 25 bp, Probe Sequence
gactcccggaggctggggaagttct

SEQ ID NO: 144833 - DNA, 25 bp, Probe Sequence
acctcggtagtcatgggggaaatgt

SEQ ID NO: 144834 - DNA, 25 bp, Probe Sequence
acctcggaaggcatcggagagttca

SEQ ID NO: 144835 - DNA, 25 bp, Probe Sequence
agcccccaagagatgaggacagttc

SEQ ID NO: 144836 - DNA, 25 bp, Probe Sequence
agcccctcagaggacgggaagattc

SEQ ID NO: 144837 - DNA, 25 bp, Probe Sequence
agcccccaggtgtgtgagcagagct

SEQ ID NO: 144838 - DNA, 25 bp, Probe Sequence
agccacctgagtctggtctgggctt

SEQ ID NO: 144839 - DNA, 25 bp, Probe Sequence
agcccaggaggcggagattgcagtg

SEQ ID NO: 144840 - DNA, 25 bp, Probe Sequence
agcccaggaggcggagattgcagtg

SEQ ID NO: 144841 - DNA, 25 bp, Probe Sequence
agcccatgagttcgaagttgcactg

SEQ ID NO: 144842 - DNA, 25 bp, Probe Sequence
agcccagactctttcagttctctgg

SEQ ID NO: 144843 - DNA, 25 bp, Probe Sequence
agcccatcacgctgtggtttgatga

SEQ ID NO: 144844 - DNA, 25 bp, Probe Sequence
agccccacaggacggtttatgagca

SEQ ID NO: 144845 - DNA, 25 bp, Probe Sequence
agccggacgaggcgctggtggatga

SEQ ID NO: 144846 - DNA, 25 bp, Probe Sequence
agccggacgaggcgctggtggatga

SEQ ID NO: 144847 - DNA, 25 bp, Probe Sequence
agccggacgaggcgctggtggatga

SEQ ID NO: 144848 - DNA, 25 bp, Probe Sequence
agccggacgaggcgctggtggatga

SEQ ID NO: 144849 - DNA, 25 bp, Probe Sequence
agccttggagcatgggctcgtggga

SEQ ID NO: 144850 - DNA, 25 bp, Probe Sequence
agccactatgaggagggccctggga

SEQ ID NO: 144851 - DNA, 25 bp, Probe Sequence
agccactgatgctggatgaccttgg

SEQ ID NO: 144852 - DNA, 25 bp, Probe Sequence
agccctgtgaagtgacctcagtgag

SEQ ID NO: 144853 - DNA, 25 bp, Probe Sequence
agccctgagacacaggcctcagtta

SEQ ID NO: 144854 - DNA, 25 bp, Probe Sequence
agccctgagagaccagttcttttag

SEQ ID NO: 144855 - DNA, 25 bp, Probe Sequence
agccctaattaattcatctttgtga

SEQ ID NO: 144856 - DNA, 25 bp, Probe Sequence
agccctaatgtagaatgtcattgtt

SEQ ID NO: 144857 - DNA, 25 bp, Probe Sequence
agccctaattctcaagatctcattt

SEQ ID NO: 144858 - DNA, 25 bp, Probe Sequence
agccctgccttatagaatgtactta

SEQ ID NO: 144859 - DNA, 25 bp, Probe Sequence
agccctccttatcaaaggacaccat

SEQ ID NO: 144860 - DNA, 25 bp, Probe Sequence
agccctctcttgccaaaaagcacaa

SEQ ID NO: 144861 - DNA, 25 bp, Probe Sequence
accaccagcttccagagattaaagt

SEQ ID NO: 144862 - DNA, 25 bp, Probe Sequence
agcccagagccctaagattacaaac

SEQ ID NO: 144863 - DNA, 25 bp, Probe Sequence
agcccactgccagtaagaaggccaa

SEQ ID NO: 144864 - DNA, 25 bp, Probe Sequence
agccccttcagctataccggaaagg

SEQ ID NO: 144865 - DNA, 25 bp, Probe Sequence
agccccctacaatgccttgacgggg

SEQ ID NO: 144866 - DNA, 25 bp, Probe Sequence
acccctatcacgtgtggtaccaggg

SEQ ID NO: 144867 - DNA, 25 bp, Probe Sequence
accaccctccttgtagctattgggg

SEQ ID NO: 144868 - DNA, 25 bp, Probe Sequence
accaaccccgtgttagagcattagc

SEQ ID NO: 144869 - DNA, 25 bp, Probe Sequence
acgaactaacagaagtagccttcag

SEQ ID NO: 144870 - DNA, 25 bp, Probe Sequence
acttacttaaaacagccaatgcgat

SEQ ID NO: 144871 - DNA, 25 bp, Probe Sequence
acctacccctaccagggcaaggatg

SEQ ID NO: 144872 - DNA, 25 bp, Probe Sequence
agcctcacacctcactaggtgcaga

SEQ ID NO: 144873 - DNA, 25 bp, Probe Sequence
agcctcacgttcacttaggcacatc

SEQ ID NO: 144874 - DNA, 25 bp, Probe Sequence
agcctgcaccgggagttgagggagc

SEQ ID NO: 144875 - DNA, 25 bp, Probe Sequence
acccccgtggagagcgacgaaatgc

SEQ ID NO: 144876 - DNA, 25 bp, Probe Sequence
acctaccgggaaggcatgaccaagg

SEQ ID NO: 144877 - DNA, 25 bp, Probe Sequence
agcctccctgtgaaaggagtccaca

SEQ ID NO: 144878 - DNA, 25 bp, Probe Sequence
agcctccatttttagggcgctcagc

SEQ ID NO: 144879 - DNA, 25 bp, Probe Sequence
agcccctctatccaaggggctctcc

SEQ ID NO: 144880 - DNA, 25 bp, Probe Sequence
agccccactgggatctgagtattcc

SEQ ID NO: 144881 - DNA, 25 bp, Probe Sequence
accgtcactagtattactattcagt

SEQ ID NO: 144882 - DNA, 25 bp, Probe Sequence
accgtttgattgtttgacttctagt

SEQ ID NO: 144883 - DNA, 25 bp, Probe Sequence
agcccttctaactttgagttgatgg

SEQ ID NO: 144884 - DNA, 25 bp, Probe Sequence
agccacatgtaaagacttggttatg

SEQ ID NO: 144885 - DNA, 25 bp, Probe Sequence
agcgccaggaaatctctgcagcttt

SEQ ID NO: 144886 - DNA, 25 bp, Probe Sequence
agcccaggcggatgtagctgtttta

SEQ ID NO: 144887 - DNA, 25 bp, Probe Sequence
agcccatggcatcatagttgtgtat

SEQ ID NO: 144888 - DNA, 25 bp, Probe Sequence
agcctgatagcaaggattagtgtat

SEQ ID NO: 144889 - DNA, 25 bp, Probe Sequence
agcctcaccaaggactccatgaata

SEQ ID NO: 144890 - DNA, 25 bp, Probe Sequence
agcctcagccctgagcggcataata

SEQ ID NO: 144891 - DNA, 25 bp, Probe Sequence
agcccgcatattaggcgcagataaa

SEQ ID NO: 144892 - DNA, 25 bp, Probe Sequence
agccctggattcagtgagtgaaacc

SEQ ID NO: 144893 - DNA, 25 bp, Probe Sequence
agccctggcttcaagaacgacacac

SEQ ID NO: 144894 - DNA, 25 bp, Probe Sequence
agccctgagtgtgaatttgtccgcc

SEQ ID NO: 144895 - DNA, 25 bp, Probe Sequence
agccctgaagcagcaatcaaatccc

SEQ ID NO: 144896 - DNA, 25 bp, Probe Sequence
agcctctgaagagccatagggcccc

SEQ ID NO: 144897 - DNA, 25 bp, Probe Sequence
agcctctgaagagccatagggcccc

SEQ ID NO: 144898 - DNA, 25 bp, Probe Sequence
agccatcagaagtacctgtcggccc

SEQ ID NO: 144899 - DNA, 25 bp, Probe Sequence
agccatcgagttaccacctggcatg

SEQ ID NO: 144900 - DNA, 25 bp, Probe Sequence
agccccagttatgcaactgcaaagg

SEQ ID NO: 144901 - DNA, 25 bp, Probe Sequence
agccccagttgatgctgacagcagg

SEQ ID NO: 144902 - DNA, 25 bp, Probe Sequence
agcccagtttgttcatgtcagtgag

SEQ ID NO: 144903 - DNA, 25 bp, Probe Sequence
agccatgagcttcgttctacgtgaa

SEQ ID NO: 144904 - DNA, 25 bp, Probe Sequence
agcctggccagtgtgccacattaaa

SEQ ID NO: 144905 - DNA, 25 bp, Probe Sequence
agcctctcggtggtgggattatgaa

SEQ ID NO: 144906 - DNA, 25 bp, Probe Sequence
agccttggggactgctaggatgaag

SEQ ID NO: 144907 - DNA, 25 bp, Probe Sequence
agcctgtgcagggtacttgggagaa

SEQ ID NO: 144908 - DNA, 25 bp, Probe Sequence
agcctgtgcagggtacttgggagaa

SEQ ID NO: 144909 - DNA, 25 bp, Probe Sequence
acctgacggtgatcttgggcagaac

SEQ ID NO: 144910 - DNA, 25 bp, Probe Sequence
agccatacggaacctgctgtgagcc

SEQ ID NO: 144911 - DNA, 25 bp, Probe Sequence
agccacatttgcaaccttggccatc

SEQ ID NO: 144912 - DNA, 25 bp, Probe Sequence
agccactctggaaccgtgtacatct

SEQ ID NO: 144913 - DNA, 25 bp, Probe Sequence
agccccgactattcgtgggcatgat

SEQ ID NO: 144914 - DNA, 25 bp, Probe Sequence
agccctgtagccatctattggcaga

SEQ ID NO: 144915 - DNA, 25 bp, Probe Sequence
agccacagttcccctatgtggaagt

SEQ ID NO: 144916 - DNA, 25 bp, Probe Sequence
accaccaacttcctatggtaattag

SEQ ID NO: 144917 - DNA, 25 bp, Probe Sequence
accacctagttgatagttaatctca

SEQ ID NO: 144918 - DNA, 25 bp, Probe Sequence
accactaggtggatagtaaatttat

SEQ ID NO: 144919 - DNA, 25 bp, Probe Sequence
accaaaagggttctgcttatttatg

SEQ ID NO: 144920 - DNA, 25 bp, Probe Sequence
accttaatgggtcttgtctatcttc

SEQ ID NO: 144921 - DNA, 25 bp, Probe Sequence
agccattaaaagccactggttattt

SEQ ID NO: 144922 - DNA, 25 bp, Probe Sequence
accaataaacagttgtggtttgtct

SEQ ID NO: 144923 - DNA, 25 bp, Probe Sequence
accattaacaagatgagccttgtgc

SEQ ID NO: 144924 - DNA, 25 bp, Probe Sequence
agccttaacaacttggtccatctga

SEQ ID NO: 144925 - DNA, 25 bp, Probe Sequence
agccaaggacagggctggctcctct

SEQ ID NO: 144926 - DNA, 25 bp, Probe Sequence
agccaaggacagggctggctcctct

SEQ ID NO: 144927 - DNA, 25 bp, Probe Sequence
agccaaggacagggctggctcctct

SEQ ID NO: 144928 - DNA, 25 bp, Probe Sequence
agccgagttcaggagctccggctgc

SEQ ID NO: 144929 - DNA, 25 bp, Probe Sequence
agccgagatgtagtactcctgtctg

SEQ ID NO: 144930 - DNA, 25 bp, Probe Sequence
agccgagagtacacagctgctgtag

SEQ ID NO: 144931 - DNA, 25 bp, Probe Sequence
agccgaagttatggaccgctagcat

SEQ ID NO: 144932 - DNA, 25 bp, Probe Sequence
agccaaaatgctatagcctgtcaca

SEQ ID NO: 144933 - DNA, 25 bp, Probe Sequence
accacaaggtgcataccatgatagg

SEQ ID NO: 144934 - DNA, 25 bp, Probe Sequence
accacacagggcttcatcgtaactg

SEQ ID NO: 144935 - DNA, 25 bp, Probe Sequence
agcccgaggagcctcctgaaggtgg

SEQ ID NO: 144936 - DNA, 25 bp, Probe Sequence
agcccgagggaccctggatggatgt

SEQ ID NO: 144937 - DNA, 25 bp, Probe Sequence
agcccgaggacgtcctggatgatga

SEQ ID NO: 144938 - DNA, 25 bp, Probe Sequence
agccctacgaggagctggaggcgga

SEQ ID NO: 144939 - DNA, 25 bp, Probe Sequence
agccctacgaggagctggaggcgga

SEQ ID NO: 144940 - DNA, 25 bp, Probe Sequence
accttgacgggactgggagacgaca

SEQ ID NO: 144941 - DNA, 25 bp, Probe Sequence
agccctggcgggcacgagaggaaac

SEQ ID NO: 144942 - DNA, 25 bp, Probe Sequence
accatctggcgaggtcatttactga

SEQ ID NO: 144943 - DNA, 25 bp, Probe Sequence
agccttgtgagtagtcagtaactgg

SEQ ID NO: 144944 - DNA, 25 bp, Probe Sequence
agccggtggtagaccttacagcagc

SEQ ID NO: 144945 - DNA, 25 bp, Probe Sequence
agccaggctggcaagtgactttcag

SEQ ID NO: 144946 - DNA, 25 bp, Probe Sequence
agccaagccggggcagtttcagtct

SEQ ID NO: 144947 - DNA, 25 bp, Probe Sequence
agccaagccggggcagtttcagtct

SEQ ID NO: 144948 - DNA, 25 bp, Probe Sequence
agccaagctacatccagaattagtt

SEQ ID NO: 144949 - DNA, 25 bp, Probe Sequence
accacgcatccatccagatgaacgt

SEQ ID NO: 144950 - DNA, 25 bp, Probe Sequence
agccattatctctccatgggaagct

SEQ ID NO: 144951 - DNA, 25 bp, Probe Sequence
agcctctgcattgacaactggaaat

SEQ ID NO: 144952 - DNA, 25 bp, Probe Sequence
agccgtattgctagcaccttgtagt

SEQ ID NO: 144953 - DNA, 25 bp, Probe Sequence
agccgtattgctagcaccttgtagt

SEQ ID NO: 144954 - DNA, 25 bp, Probe Sequence
agcctgagactttcactttctagct

SEQ ID NO: 144955 - DNA, 25 bp, Probe Sequence
agcctattcttacttactctacagt

SEQ ID NO: 144956 - DNA, 25 bp, Probe Sequence
agccttatgttacagatgctctgaa

SEQ ID NO: 144957 - DNA, 25 bp, Probe Sequence
agccttggtaaggggtctgcatgca

SEQ ID NO: 144958 - DNA, 25 bp, Probe Sequence
agcctttgctagggtgtcttgtgct

SEQ ID NO: 144959 - DNA, 25 bp, Probe Sequence
agcctctagtactgatgatctttac

SEQ ID NO: 144960 - DNA, 25 bp, Probe Sequence
agcctacaacgctgagacaatcccc

SEQ ID NO: 144961 - DNA, 25 bp, Probe Sequence
agcctggtgaccgtgaaaatcgccc

SEQ ID NO: 144962 - DNA, 25 bp, Probe Sequence
accatcgatttctcagaaacgcccg

SEQ ID NO: 144963 - DNA, 25 bp, Probe Sequence
accactatgtccccaaaaagccgtg

SEQ ID NO: 144964 - DNA, 25 bp, Probe Sequence
accactatgtccccaaaaagccgtg

SEQ ID NO: 144965 - DNA, 25 bp, Probe Sequence
accactatgtccccaaaaagccgtg

SEQ ID NO: 144966 - DNA, 25 bp, Probe Sequence
ttaattggtaagtgaaaactctgtt

SEQ ID NO: 144967 - DNA, 25 bp, Probe Sequence
tatttgggtaaagaaaccatttgct

SEQ ID NO: 144968 - DNA, 25 bp, Probe Sequence
accagggtcaaagaaccctcttgat

SEQ ID NO: 144969 - DNA, 25 bp, Probe Sequence
acctggagtcaaagcagttccttca

SEQ ID NO: 144970 - DNA, 25 bp, Probe Sequence
agccaggaggcaaagctgtttcaat

SEQ ID NO: 144971 - DNA, 25 bp, Probe Sequence
agccaggaggcttcgttttagtgga

SEQ ID NO: 144972 - DNA, 25 bp, Probe Sequence
accagtgggtatctgttctactaaa

SEQ ID NO: 144973 - DNA, 25 bp, Probe Sequence
accaattgggtggatttgattctag

SEQ ID NO: 144974 - DNA, 25 bp, Probe Sequence
accaacatggtagactttgctatgg

SEQ ID NO: 144975 - DNA, 25 bp, Probe Sequence
acctgcaacggagactccggtgggc

SEQ ID NO: 144976 - DNA, 25 bp, Probe Sequence
agcctggaaagacacctctgtctgg

SEQ ID NO: 144977 - DNA, 25 bp, Probe Sequence
agcctgcaaaagacaaccactactg

SEQ ID NO: 144978 - DNA, 25 bp, Probe Sequence
accaacatggagaaaccctgtctct

SEQ ID NO: 144979 - DNA, 25 bp, Probe Sequence
accaacatggagagacctccctctc

SEQ ID NO: 144980 - DNA, 25 bp, Probe Sequence
accatcacacggatggcgcctactt

SEQ ID NO: 144981 - DNA, 25 bp, Probe Sequence
accaaattggttgccctgaccgaag

SEQ ID NO: 144982 - DNA, 25 bp, Probe Sequence
agccaaattttatctttaaagactg

SEQ ID NO: 144983 - DNA, 25 bp, Probe Sequence
accaaatgtttctccttcacaagta

SEQ ID NO: 144984 - DNA, 25 bp, Probe Sequence
accaaagttctcatgcactatgcac

SEQ ID NO: 144985 - DNA, 25 bp, Probe Sequence
accagccagtagattgtctgtcagt

SEQ ID NO: 144986 - DNA, 25 bp, Probe Sequence
agcctgggaagttctgttgctgcag

SEQ ID NO: 144987 - DNA, 25 bp, Probe Sequence
agcctggaggaggcacgggcagagc

SEQ ID NO: 144988 - DNA, 25 bp, Probe Sequence
agcctggaggaggcacgggcagagc

SEQ ID NO: 144989 - DNA, 25 bp, Probe Sequence
agcctggaggaggcacgggcagagc

SEQ ID NO: 144990 - DNA, 25 bp, Probe Sequence
acctcctggggctgcgggcagcccc

SEQ ID NO: 144991 - DNA, 25 bp, Probe Sequence
agcctgcactgaggggtgcggtgcc

SEQ ID NO: 144992 - DNA, 25 bp, Probe Sequence
agcccctgagccaggaggtcctgga

SEQ ID NO: 144993 - DNA, 25 bp, Probe Sequence
agcccctgcgacagaagttggctgc

SEQ ID NO: 144994 - DNA, 25 bp, Probe Sequence
agccccgctgacagagatgaggtgg

SEQ ID NO: 144995 - DNA, 25 bp, Probe Sequence
agcctacgcctcaggcatgtggtga

SEQ ID NO: 144996 - DNA, 25 bp, Probe Sequence
accacaggccccggatggtgtggga

SEQ ID NO: 144997 - DNA, 25 bp, Probe Sequence
accaggaccccagaactgtggagtc

SEQ ID NO: 144998 - DNA, 25 bp, Probe Sequence
accaggtgcccacttaactgtgaaa

SEQ ID NO: 144999 - DNA, 25 bp, Probe Sequence
accaggtgcccacttaactgtgaaa

SEQ ID NO: 145000 - DNA, 25 bp, Probe Sequence
agccagtgatccttttatcctgcta

SEQ ID NO: 145001 - DNA, 25 bp, Probe Sequence
agccttgattctcttgtttctaata

SEQ ID NO: 145002 - DNA, 25 bp, Probe Sequence
agccattttagtggtgtttgcaaat

SEQ ID NO: 145003 - DNA, 25 bp, Probe Sequence
acctaacttggcattgggcaaaaag

SEQ ID NO: 145004 - DNA, 25 bp, Probe Sequence
accaaactggactctcgtgcagaaa

SEQ ID NO: 145005 - DNA, 25 bp, Probe Sequence
agccaacatcatcgaggagctcagg

SEQ ID NO: 145006 - DNA, 25 bp, Probe Sequence
agccatcatatgtcacagtgttcag

SEQ ID NO: 145007 - DNA, 25 bp, Probe Sequence
agcctcaagacaactgtcatgcgta

SEQ ID NO: 145008 - DNA, 25 bp, Probe Sequence
agcctcctgagcacatggcagagct

SEQ ID NO: 145009 - DNA, 25 bp, Probe Sequence
agcctctctgagaagctgggactac

SEQ ID NO: 145010 - DNA, 25 bp, Probe Sequence
agcctcctgagtagctgggattata

SEQ ID NO: 145011 - DNA, 25 bp, Probe Sequence
agcctcctgagtagctgggactaca

SEQ ID NO: 145012 - DNA, 25 bp, Probe Sequence
agccttctgaatagctggaacaaca

SEQ ID NO: 145013 - DNA, 25 bp, Probe Sequence
agccttgctaaactgtctgaatcaa

SEQ ID NO: 145014 - DNA, 25 bp, Probe Sequence
agcctttccacaccatcatgaaaca

SEQ ID NO: 145015 - DNA, 25 bp, Probe Sequence
agcctttcacctaatcatgtctaca

SEQ ID NO: 145016 - DNA, 25 bp, Probe Sequence
agccccatcgcctatgaagattaca

SEQ ID NO: 145017 - DNA, 25 bp, Probe Sequence
agcctcactcagcagaagcaatgta

SEQ ID NO: 145018 - DNA, 25 bp, Probe Sequence
agcccctatgtcaaagaattcagag

SEQ ID NO: 145019 - DNA, 25 bp, Probe Sequence
agcctccacatgtcataaaatggga

SEQ ID NO: 145020 - DNA, 25 bp, Probe Sequence
agccggcagcataatgaaaagtggg

SEQ ID NO: 145021 - DNA, 25 bp, Probe Sequence
agccatcggcatcatgagaaggctg

SEQ ID NO: 145022 - DNA, 25 bp, Probe Sequence
agcctcatggcagctgaaagagtga

SEQ ID NO: 145023 - DNA, 25 bp, Probe Sequence
agcctatcacgcgtgaatcggtgtc

SEQ ID NO: 145024 - DNA, 25 bp, Probe Sequence
agccgatctcgctataggggttctc

SEQ ID NO: 145025 - DNA, 25 bp, Probe Sequence
agccgattcctaagcagcaaggacc

SEQ ID NO: 145026 - DNA, 25 bp, Probe Sequence
agcctgattttcagccatcattacc

SEQ ID NO: 145027 - DNA, 25 bp, Probe Sequence
agccagcaaattacttcatcatcta

SEQ ID NO: 145028 - DNA, 25 bp, Probe Sequence
agccagcaaattacttcatcatcta

SEQ ID NO: 145029 - DNA, 25 bp, Probe Sequence
agccgtggcatttttctacagcaac

SEQ ID NO: 145030 - DNA, 25 bp, Probe Sequence
agccgtggcatttttctacagcaac

SEQ ID NO: 145031 - DNA, 25 bp, Probe Sequence
agccctggctcatatacatgttgag

SEQ ID NO: 145032 - DNA, 25 bp, Probe Sequence
agcctggtgcgtacattctgtagag

SEQ ID NO: 145033 - DNA, 25 bp, Probe Sequence
acctgaggcgcatctggctgaaggc

SEQ ID NO: 145034 - DNA, 25 bp, Probe Sequence
agccagtggcctgctgaggtcaggc

SEQ ID NO: 145035 - DNA, 25 bp, Probe Sequence
agccactggggccatcagtgctgag

SEQ ID NO: 145036 - DNA, 25 bp, Probe Sequence
accagctgcaaggccaacagctgtg

SEQ ID NO: 145037 - DNA, 25 bp, Probe Sequence
accactcacaaccagacgatagctg

SEQ ID NO: 145038 - DNA, 25 bp, Probe Sequence
accagggcaagccatgcacatgcat

SEQ ID NO: 145039 - DNA, 25 bp, Probe Sequence
agccaggccaacagatctcatatag

SEQ ID NO: 145040 - DNA, 25 bp, Probe Sequence
agccgctgccattttattaaagtgt

SEQ ID NO: 145041 - DNA, 25 bp, Probe Sequence
accagcttccagagattaaagtttg

SEQ ID NO: 145042 - DNA, 25 bp, Probe Sequence
accacttccagtaagaaaatgggtg

SEQ ID NO: 145043 - DNA, 25 bp, Probe Sequence
aacctatccacctgacaaagggctg

SEQ ID NO: 145044 - DNA, 25 bp, Probe Sequence
agccgtaccccatgagacaagaagt

SEQ ID NO: 145045 - DNA, 25 bp, Probe Sequence
accgggactacatggaaagagataa

SEQ ID NO: 145046 - DNA, 25 bp, Probe Sequence
acccccaccaagggcgcaagagtag

SEQ ID NO: 145047 - DNA, 25 bp, Probe Sequence
accaccattgccaaggtccaataaa

SEQ ID NO: 145048 - DNA, 25 bp, Probe Sequence
accacagcctccatggatctaatta

SEQ ID NO: 145049 - DNA, 25 bp, Probe Sequence
agccagcggggagggactgattttt

SEQ ID NO: 145050 - DNA, 25 bp, Probe Sequence
accatcggcaggtgacctaaagaat

SEQ ID NO: 145051 - DNA, 25 bp, Probe Sequence
accacccaggaaaccatcgacaaga

SEQ ID NO: 145052 - DNA, 25 bp, Probe Sequence
accagcccgaacaccattgagggag

SEQ ID NO: 145053 - DNA, 25 bp, Probe Sequence
accggttcaagagcttccagaggag

SEQ ID NO: 145054 - DNA, 25 bp, Probe Sequence
agcctggtgacagactttccgcagg

SEQ ID NO: 145055 - DNA, 25 bp, Probe Sequence
accattgagaccacttttcctggat

SEQ ID NO: 145056 - DNA, 25 bp, Probe Sequence
acgcaaacacacactaattcctggc

SEQ ID NO: 145057 - DNA, 25 bp, Probe Sequence
accaaggcaactacaaactcctggt

SEQ ID NO: 145058 - DNA, 25 bp, Probe Sequence
agccaataaagtgatacacccgaaa

SEQ ID NO: 145059 - DNA, 25 bp, Probe Sequence
agccatattagagtccaaccaggag

SEQ ID NO: 145060 - DNA, 25 bp, Probe Sequence
agcctttattaccaagcccagagat

SEQ ID NO: 145061 - DNA, 25 bp, Probe Sequence
agcctgtttggtgggaagcccatga

SEQ ID NO: 145062 - DNA, 25 bp, Probe Sequence
agccgtttgcaggggaggcggctcc

SEQ ID NO: 145063 - DNA, 25 bp, Probe Sequence
agccgtttgcaggggaggcggctcc

SEQ ID NO: 145064 - DNA, 25 bp, Probe Sequence
agccaggttcagtggcagtgggtct

SEQ ID NO: 145065 - DNA, 25 bp, Probe Sequence
accaagatggcgagccagtgtggtt

SEQ ID NO: 145066 - DNA, 25 bp, Probe Sequence
accaggcagcggagacatgtggaat

SEQ ID NO: 145067 - DNA, 25 bp, Probe Sequence
accagccttggtagccatgggctta

SEQ ID NO: 145068 - DNA, 25 bp, Probe Sequence
agcccctgtgtgtgctcagtgccat

SEQ ID NO: 145069 - DNA, 25 bp, Probe Sequence
agcctgtctgctatagctcagtgac

SEQ ID NO: 145070 - DNA, 25 bp, Probe Sequence
agcctgccagtgactcttagtgtct

SEQ ID NO: 145071 - DNA, 25 bp, Probe Sequence
agccggagctcagcttcaggtttta

SEQ ID NO: 145072 - DNA, 25 bp, Probe Sequence
agccaggactgatcttccatttctt

SEQ ID NO: 145073 - DNA, 25 bp, Probe Sequence
agccatggaggatgctaaaccattg

SEQ ID NO: 145074 - DNA, 25 bp, Probe Sequence
agccattggctatttaaacttgtat

SEQ ID NO: 145075 - DNA, 25 bp, Probe Sequence
agccactggtccatccaaattgtgg

SEQ ID NO: 145076 - DNA, 25 bp, Probe Sequence
accagttgccccaacatacatttcg

SEQ ID NO: 145077 - DNA, 25 bp, Probe Sequence
agccaattgtcccaaccattttgag

SEQ ID NO: 145078 - DNA, 25 bp, Probe Sequence
agccaattctcccaagatttatagt

SEQ ID NO: 145079 - DNA, 25 bp, Probe Sequence
accacgtttgcccagtgtattgaat

SEQ ID NO: 145080 - DNA, 25 bp, Probe Sequence
accaccttataccagcgttatgaga

SEQ ID NO: 145081 - DNA, 25 bp, Probe Sequence
agccccttataacaggtgctcaata

SEQ ID NO: 145082 - DNA, 25 bp, Probe Sequence
accaccggatcaacttcgacaaata

SEQ ID NO: 145083 - DNA, 25 bp, Probe Sequence
accacctgaacaaactggccgagaa

SEQ ID NO: 145084 - DNA, 25 bp, Probe Sequence
accagtctgaatcaagctgcccagg

SEQ ID NO: 145085 - DNA, 25 bp, Probe Sequence
accagtgcctatggatcatgcttcc

SEQ ID NO: 145086 - DNA, 25 bp, Probe Sequence
agcctgtgactctgtgatgtatcat

SEQ ID NO: 145087 - DNA, 25 bp, Probe Sequence
agcctgatattctatgctgataaag

SEQ ID NO: 145088 - DNA, 25 bp, Probe Sequence
agcctgagtgctcacttaaacacta

SEQ ID NO: 145089 - DNA, 25 bp, Probe Sequence
agccgagttgctctgttagaaggag

SEQ ID NO: 145090 - DNA, 25 bp, Probe Sequence
accaagttcctcatcgacaagaacg

SEQ ID NO: 145091 - DNA, 25 bp, Probe Sequence
acctagttagtaccccagcagtaca

SEQ ID NO: 145092 - DNA, 25 bp, Probe Sequence
catgccatagtatgggccccgggat

SEQ ID NO: 145093 - DNA, 25 bp, Probe Sequence
agcctatctatagagacccttggat

SEQ ID NO: 145094 - DNA, 25 bp, Probe Sequence
agcctgagcttagctcagcgccggg

SEQ ID NO: 145095 - DNA, 25 bp, Probe Sequence
agccatcacggagctgatgcatccc

SEQ ID NO: 145096 - DNA, 25 bp, Probe Sequence
agcctagggagcctggtcatcaact

SEQ ID NO: 145097 - DNA, 25 bp, Probe Sequence
agcctcccagagaaagtgtgcaact

SEQ ID NO: 145098 - DNA, 25 bp, Probe Sequence
agcccctcagcagagtggtgcagtt

SEQ ID NO: 145099 - DNA, 25 bp, Probe Sequence
agccaccatcgaggaaggggcatgt

SEQ ID NO: 145100 - DNA, 25 bp, Probe Sequence
agccagaaatgtgaagtgctagctg

SEQ ID NO: 145101 - DNA, 25 bp, Probe Sequence
accagcagaggcataaggttcggga

SEQ ID NO: 145102 - DNA, 25 bp, Probe Sequence
accacaggctgcagacgtttgccag

SEQ ID NO: 145103 - DNA, 25 bp, Probe Sequence
agccaagagcttcaggtatatccca

SEQ ID NO: 145104 - DNA, 25 bp, Probe Sequence
agccgaggctccaagagtgtggccc

SEQ ID NO: 145105 - DNA, 25 bp, Probe Sequence
agccgaggctccaagagtgtggccc

SEQ ID NO: 145106 - DNA, 25 bp, Probe Sequence
agcctggacgacagatcgagacacc

SEQ ID NO: 145107 - DNA, 25 bp, Probe Sequence
agcctggacagcatggtgaaacctc

SEQ ID NO: 145108 - DNA, 25 bp, Probe Sequence
agccatggaccagctggccaagacc

SEQ ID NO: 145109 - DNA, 25 bp, Probe Sequence
agcctgcaaacaggtgcgtcggacc

SEQ ID NO: 145110 - DNA, 25 bp, Probe Sequence
accgctataaggccagtcggactgc

SEQ ID NO: 145111 - DNA, 25 bp, Probe Sequence
accacttcgaggccattgcgttggt

SEQ ID NO: 145112 - DNA, 25 bp, Probe Sequence
agccacttcagcagcgattcttaag

SEQ ID NO: 145113 - DNA, 25 bp, Probe Sequence
agccgctggcacaggaggtgttatg

SEQ ID NO: 145114 - DNA, 25 bp, Probe Sequence
agcctgggcaacagagcgagattct

SEQ ID NO: 145115 - DNA, 25 bp, Probe Sequence
agcctgggcgacagcaagacctgtc

SEQ ID NO: 145116 - DNA, 25 bp, Probe Sequence
agcctgggtggcagagcaacacttc

SEQ ID NO: 145117 - DNA, 25 bp, Probe Sequence
agcctgggtgacagagtgagactct

SEQ ID NO: 145118 - DNA, 25 bp, Probe Sequence
agcctgggtgacagagcaagactct

SEQ ID NO: 145119 - DNA, 25 bp, Probe Sequence
agcctgggtgacaaagcgagactcc

SEQ ID NO: 145120 - DNA, 25 bp, Probe Sequence
agcctgggcgacagagcgagactcc

SEQ ID NO: 145121 - DNA, 25 bp, Probe Sequence
agcctgggcaacaagagcgaaacgc

SEQ ID NO: 145122 - DNA, 25 bp, Probe Sequence
agcctgggcaacatggtgaaacctt

SEQ ID NO: 145123 - DNA, 25 bp, Probe Sequence
agcctggacaacatagtaataccct

SEQ ID NO: 145124 - DNA, 25 bp, Probe Sequence
accagtgaaaagcgaatatccctct

SEQ ID NO: 145125 - DNA, 25 bp, Probe Sequence
agccataaaaagcaacagtcctctg

SEQ ID NO: 145126 - DNA, 25 bp, Probe Sequence
accataaatagcgtatacgagcctt

SEQ ID NO: 145127 - DNA, 25 bp, Probe Sequence
accaccgtacgaaagaagcctgatc

SEQ ID NO: 145128 - DNA, 25 bp, Probe Sequence
accacttttcagccaagaatcctat

SEQ ID NO: 145129 - DNA, 25 bp, Probe Sequence
agccattttgggcatatgtatcttt

SEQ ID NO: 145130 - DNA, 25 bp, Probe Sequence
agccttcttttgtacttttcattct

SEQ ID NO: 145131 - DNA, 25 bp, Probe Sequence
agcctctctaaatgacctttcattt

SEQ ID NO: 145132 - DNA, 25 bp, Probe Sequence
agccactatagctacttcctttttc

SEQ ID NO: 145133 - DNA, 25 bp, Probe Sequence
accacaaggtacgtccatttggact

SEQ ID NO: 145134 - DNA, 25 bp, Probe Sequence
accacaacattcttctattttgcca

SEQ ID NO: 145135 - DNA, 25 bp, Probe Sequence
accccacctgaaattcttggccagt

SEQ ID NO: 145136 - DNA, 25 bp, Probe Sequence
accacgcacgtgatttgtccagcga

SEQ ID NO: 145137 - DNA, 25 bp, Probe Sequence
accaggaagttgatcaatcccgagg

SEQ ID NO: 145138 - DNA, 25 bp, Probe Sequence
agccgggaagttgattcactctaag

SEQ ID NO: 145139 - DNA, 25 bp, Probe Sequence
aacgtgaacgttattcagcctaact

SEQ ID NO: 145140 - DNA, 25 bp, Probe Sequence
accatgagaccgctacttagcctca

SEQ ID NO: 145141 - DNA, 25 bp, Probe Sequence
agccagatgacaaagatgccttaga

SEQ ID NO: 145142 - DNA, 25 bp, Probe Sequence
agccagatgacgtgatccttaaaga

SEQ ID NO: 145143 - DNA, 25 bp, Probe Sequence
accaatgaaggcccccaagaggatg

SEQ ID NO: 145144 - DNA, 25 bp, Probe Sequence
agccactaggtaccgccagaagaag

SEQ ID NO: 145145 - DNA, 25 bp, Probe Sequence
accaccaggccagtcctaaaagagc

SEQ ID NO: 145146 - DNA, 25 bp, Probe Sequence
accacctgggaagatagcacaaggc

SEQ ID NO: 145147 - DNA, 25 bp, Probe Sequence
aacccataggtagtcaggaaccagg

SEQ ID NO: 145148 - DNA, 25 bp, Probe Sequence
agcctccaaagtgctgggattacag

SEQ ID NO: 145149 - DNA, 25 bp, Probe Sequence
agccttccaagtagctgggactaca

SEQ ID NO: 145150 - DNA, 25 bp, Probe Sequence
agcctggccaacatgtcagaactac

SEQ ID NO: 145151 - DNA, 25 bp, Probe Sequence
agcctggccacatgtcaaaactact

SEQ ID NO: 145152 - DNA, 25 bp, Probe Sequence
agcctggctcaatatctaatcaatg

SEQ ID NO: 145153 - DNA, 25 bp, Probe Sequence
agcctggctcaatatctaatcaatg

SEQ ID NO: 145154 - DNA, 25 bp, Probe Sequence
agcctgtgcataaaactgaaacagc

SEQ ID NO: 145155 - DNA, 25 bp, Probe Sequence
agccggattatgaaatgcacgacac

SEQ ID NO: 145156 - DNA, 25 bp, Probe Sequence
accaccaatatccaatgcaagaacg

SEQ ID NO: 145157 - DNA, 25 bp, Probe Sequence
accactgcctacaagaaaacacatg

SEQ ID NO: 145158 - DNA, 25 bp, Probe Sequence
agccacctacacaaaagcaaactgc

SEQ ID NO: 145159 - DNA, 25 bp, Probe Sequence
accaacaacagacaagcaaagagcc

SEQ ID NO: 145160 - DNA, 25 bp, Probe Sequence
accaccatgtcgagcaaaaaggcaa

SEQ ID NO: 145161 - DNA, 25 bp, Probe Sequence
accagccactttgcaaaaactgtca

SEQ ID NO: 145162 - DNA, 25 bp, Probe Sequence
accaccacaggaaagttagatccca

SEQ ID NO: 145163 - DNA, 25 bp, Probe Sequence
accacccaactatctataaacctag

SEQ ID NO: 145164 - DNA, 25 bp, Probe Sequence
accaccagaaggtcctataaatgca

SEQ ID NO: 145165 - DNA, 25 bp, Probe Sequence
accacaagaacaacactaagccatt

SEQ ID NO: 145166 - DNA, 25 bp, Probe Sequence
accagaaaaccaactctagtaatat

SEQ ID NO: 145167 - DNA, 25 bp, Probe Sequence
accaaagaaccaattccttgaatgt

SEQ ID NO: 145168 - DNA, 25 bp, Probe Sequence
accagtacaactatattgcatagaa

SEQ ID NO: 145169 - DNA, 25 bp, Probe Sequence
accaatgacaactttattctcccta

SEQ ID NO: 145170 - DNA, 25 bp, Probe Sequence
accagtggaatctttaatcttgtta

SEQ ID NO: 145171 - DNA, 25 bp, Probe Sequence
agccagtgaattgtgttttcatgtc

SEQ ID NO: 145172 - DNA, 25 bp, Probe Sequence
accactgaacttagacctctcaaca

SEQ ID NO: 145173 - DNA, 25 bp, Probe Sequence
accaggcaacttggaatccctaaat

SEQ ID NO: 145174 - DNA, 25 bp, Probe Sequence
accagtattctcagagataccatca

SEQ ID NO: 145175 - DNA, 25 bp, Probe Sequence
accagtattctcagagataccatca

SEQ ID NO: 145176 - DNA, 25 bp, Probe Sequence
accagtattctcagagataccatca

SEQ ID NO: 145177 - DNA, 25 bp, Probe Sequence
accagcatatgctacaaggtacgca

SEQ ID NO: 145178 - DNA, 25 bp, Probe Sequence
accagctgctggacatgtcctacga

SEQ ID NO: 145179 - DNA, 25 bp, Probe Sequence
agccatgctgagcatctgagctcgc

SEQ ID NO: 145180 - DNA, 25 bp, Probe Sequence
agccagtgatcacctgagtcagagt

SEQ ID NO: 145181 - DNA, 25 bp, Probe Sequence
agccttgtctttaccgagggatgct

SEQ ID NO: 145182 - DNA, 25 bp, Probe Sequence
agccacttccttgaatggaggatgc

SEQ ID NO: 145183 - DNA, 25 bp, Probe Sequence
accagttcctttacagcatggcgac

SEQ ID NO: 145184 - DNA, 25 bp, Probe Sequence
agccagtgcccttaagactggagaa

SEQ ID NO: 145185 - DNA, 25 bp, Probe Sequence
agccatgtccctgtagtcggtaggg

SEQ ID NO: 145186 - DNA, 25 bp, Probe Sequence
agccatgtctgcgtttgaggggccg

SEQ ID NO: 145187 - DNA, 25 bp, Probe Sequence
accagagctcgtttagtgaaccgtc

SEQ ID NO: 145188 - DNA, 25 bp, Probe Sequence
accaagccatgtaatggtaacttgg

SEQ ID NO: 145189 - DNA, 25 bp, Probe Sequence
accaaaagtatcaaaccacttgtgt

SEQ ID NO: 145190 - DNA, 25 bp, Probe Sequence
accactgtttagaatgacccttggg

SEQ ID NO: 145191 - DNA, 25 bp, Probe Sequence
agccacgttccttatgagcaccgtg

SEQ ID NO: 145192 - DNA, 25 bp, Probe Sequence
agcctgctgtgtgccacaagacgga

SEQ ID NO: 145193 - DNA, 25 bp, Probe Sequence
agcctgcgcttcagagcaagacttc

SEQ ID NO: 145194 - DNA, 25 bp, Probe Sequence
agcctggcgacggaggaatgctgtc

SEQ ID NO: 145195 - DNA, 25 bp, Probe Sequence
agcctggcaacagagtgagactccg

SEQ ID NO: 145196 - DNA, 25 bp, Probe Sequence
agcctggcaacaagatgaagcaagc

SEQ ID NO: 145197 - DNA, 25 bp, Probe Sequence
agcctgcctacatttgcagacagac

SEQ ID NO: 145198 - DNA, 25 bp, Probe Sequence
agcctgcgcccattgagcaggagcc

SEQ ID NO: 145199 - DNA, 25 bp, Probe Sequence
agccatctactctgagcaggacacg

SEQ ID NO: 145200 - DNA, 25 bp, Probe Sequence
agcctcccctacaatggaatgcaga

SEQ ID NO: 145201 - DNA, 25 bp, Probe Sequence
agccagcgccctactgggaaggaac

SEQ ID NO: 145202 - DNA, 25 bp, Probe Sequence
agccacctcctcttgtgggaaggag

SEQ ID NO: 145203 - DNA, 25 bp, Probe Sequence
agcctttctctcagtcgtgagggag

SEQ ID NO: 145204 - DNA, 25 bp, Probe Sequence
agccttcacctctgttgctgaggaa

SEQ ID NO: 145205 - DNA, 25 bp, Probe Sequence
agccttcacctctgttgctgaggaa

SEQ ID NO: 145206 - DNA, 25 bp, Probe Sequence
agccttcacctctgttgctgaggaa

SEQ ID NO: 145207 - DNA, 25 bp, Probe Sequence
agcctgtcacttttgactgtgcagt

SEQ ID NO: 145208 - DNA, 25 bp, Probe Sequence
agccaggcactgtagtggcctcagc

SEQ ID NO: 145209 - DNA, 25 bp, Probe Sequence
agccaggcactgtagtggcctcagc

SEQ ID NO: 145210 - DNA, 25 bp, Probe Sequence
agccatgagcagcaaagtctctcgc

SEQ ID NO: 145211 - DNA, 25 bp, Probe Sequence
agccataggtcatagcctctttgct

SEQ ID NO: 145212 - DNA, 25 bp, Probe Sequence
agccaattggtttagctgcttcttt

SEQ ID NO: 145213 - DNA, 25 bp, Probe Sequence
agccacttttaaggtgctgtcatat

SEQ ID NO: 145214 - DNA, 25 bp, Probe Sequence
accacgtagtcaagggtctcttcgt

SEQ ID NO: 145215 - DNA, 25 bp, Probe Sequence
accaaacccaggtttctcttgcttg

SEQ ID NO: 145216 - DNA, 25 bp, Probe Sequence
agccaaacaccactatggtcttagt

SEQ ID NO: 145217 - DNA, 25 bp, Probe Sequence
agccaaacaaagctgctgtgctata

SEQ ID NO: 145218 - DNA, 25 bp, Probe Sequence
agccattatcaaaaacagctcttaa

SEQ ID NO: 145219 - DNA, 25 bp, Probe Sequence
agccatgtaccagtgtactgctttc

SEQ ID NO: 145220 - DNA, 25 bp, Probe Sequence
agccatgtattgtgatttgtcctct

SEQ ID NO: 145221 - DNA, 25 bp, Probe Sequence
agccattgatgatcgttcttctctc

SEQ ID NO: 145222 - DNA, 25 bp, Probe Sequence
accacatgaaacatcctatcatctg

SEQ ID NO: 145223 - DNA, 25 bp, Probe Sequence
accacagtgagagctgccttatatt

SEQ ID NO: 145224 - DNA, 25 bp, Probe Sequence
accaagtatgatgctgcgcacttcc

SEQ ID NO: 145225 - DNA, 25 bp, Probe Sequence
agccaggttgtgacgcgttatgcct

SEQ ID NO: 145226 - DNA, 25 bp, Probe Sequence
accaatgaatgcatccagttcccat

SEQ ID NO: 145227 - DNA, 25 bp, Probe Sequence
agccttgctcaggtgcaagtgcccc

SEQ ID NO: 145228 - DNA, 25 bp, Probe Sequence
agccactgctcggaaatatgcccac

SEQ ID NO: 145229 - DNA, 25 bp, Probe Sequence
agcctatcatccatcaaatcactag

SEQ ID NO: 145230 - DNA, 25 bp, Probe Sequence
agcctcatacctacatcagacaaaa

SEQ ID NO: 145231 - DNA, 25 bp, Probe Sequence
agcctcttcctgcattgtcaaaaaa

SEQ ID NO: 145232 - DNA, 25 bp, Probe Sequence
agcctttaagcaatcttcaaaactg

SEQ ID NO: 145233 - DNA, 25 bp, Probe Sequence
acgactcgaaaattgtccaagaagc

SEQ ID NO: 145234 - DNA, 25 bp, Probe Sequence
accacccagaagttgtcagcataat

SEQ ID NO: 145235 - DNA, 25 bp, Probe Sequence
agccaccctgagtttgaagaagaca

SEQ ID NO: 145236 - DNA, 25 bp, Probe Sequence
accacgctgtggtttcagcaagcag

SEQ ID NO: 145237 - DNA, 25 bp, Probe Sequence
accactcatgggtatatgctaggat

SEQ ID NO: 145238 - DNA, 25 bp, Probe Sequence
agccactcaagaggctgaggcagga

SEQ ID NO: 145239 - DNA, 25 bp, Probe Sequence
agccactccagaggctgaggcagga

SEQ ID NO: 145240 - DNA, 25 bp, Probe Sequence
agccactccagaggctgaggcagga

SEQ ID NO: 145241 - DNA, 25 bp, Probe Sequence
agccagctggatgggctgagcgtga

SEQ ID NO: 145242 - DNA, 25 bp, Probe Sequence
agccacgtgcttgcagggtgagggc

SEQ ID NO: 145243 - DNA, 25 bp, Probe Sequence
accacaggtctatgtgtgctggggg

SEQ ID NO: 145244 - DNA, 25 bp, Probe Sequence
accacgcagtctgtgatggggtttg

SEQ ID NO: 145245 - DNA, 25 bp, Probe Sequence
accacgtgtctctgggggactatga

SEQ ID NO: 145246 - DNA, 25 bp, Probe Sequence
accacctggtcggggaggagaccat

SEQ ID NO: 145247 - DNA, 25 bp, Probe Sequence
accacgctggtgcagggatcgttac

SEQ ID NO: 145248 - DNA, 25 bp, Probe Sequence
accaccccatggacgcagaagttac

SEQ ID NO: 145249 - DNA, 25 bp, Probe Sequence
agccatatcccaaggtagaaaccac

SEQ ID NO: 145250 - DNA, 25 bp, Probe Sequence
agccatcaccagaaggtaggagaga

SEQ ID NO: 145251 - DNA, 25 bp, Probe Sequence
accaagcagcagtgttcggaagacc

SEQ ID NO: 145252 - DNA, 25 bp, Probe Sequence
agccaagccagatctacgagataac

SEQ ID NO: 145253 - DNA, 25 bp, Probe Sequence
agcctactcagtggtcagcggaaac

SEQ ID NO: 145254 - DNA, 25 bp, Probe Sequence
acctactacttggactggatccacc

SEQ ID NO: 145255 - DNA, 25 bp, Probe Sequence
acctactacttggactggatccacc

SEQ ID NO: 145256 - DNA, 25 bp, Probe Sequence
acctactacttggactggatccacc

SEQ ID NO: 145257 - DNA, 25 bp, Probe Sequence
accacctggttgcagctgcagatac

SEQ ID NO: 145258 - DNA, 25 bp, Probe Sequence
actgacatctagaggaataaatcgt

SEQ ID NO: 145259 - DNA, 25 bp, Probe Sequence
acgattccgaaacataatatcaatt

SEQ ID NO: 145260 - DNA, 25 bp, Probe Sequence
actaacctcaaacaaatgataacca

SEQ ID NO: 145261 - DNA, 25 bp, Probe Sequence
acttactttaatgtaggcaaactat

SEQ ID NO: 145262 - DNA, 25 bp, Probe Sequence
actaaccttgactgtattcaaactt

SEQ ID NO: 145263 - DNA, 25 bp, Probe Sequence
accaaccgtcactagtattactatt

SEQ ID NO: 145264 - DNA, 25 bp, Probe Sequence
accaaccctgcaataagtgtactaa

SEQ ID NO: 145265 - DNA, 25 bp, Probe Sequence
accaagccctttatttatctggcag

SEQ ID NO: 145266 - DNA, 25 bp, Probe Sequence
agccaaacctttcctgtaacagaga

SEQ ID NO: 145267 - DNA, 25 bp, Probe Sequence
accaaatccttaaccctagcgatgg

SEQ ID NO: 145268 - DNA, 25 bp, Probe Sequence
agccataatttgaataactctacga

SEQ ID NO: 145269 - DNA, 25 bp, Probe Sequence
agccaccttgtaaaactgctgggag

SEQ ID NO: 145270 - DNA, 25 bp, Probe Sequence
agccactttgcaaaaactgtcagga

SEQ ID NO: 145271 - DNA, 25 bp, Probe Sequence
accactttgcaattgtagattccca

SEQ ID NO: 145272 - DNA, 25 bp, Probe Sequence
agccaatttctacgtatgcattccc

SEQ ID NO: 145273 - DNA, 25 bp, Probe Sequence
agcctaccacgatgtcaatgtcact

SEQ ID NO: 145274 - DNA, 25 bp, Probe Sequence
agcctagcaatccatcagacaatcc

SEQ ID NO: 145275 - DNA, 25 bp, Probe Sequence
accaacatatctcatgaatattcgt

SEQ ID NO: 145276 - DNA, 25 bp, Probe Sequence
accacacattcgaagaacccgtata

SEQ ID NO: 145277 - DNA, 25 bp, Probe Sequence
agcctagcttggagaacgctgctgt

SEQ ID NO: 145278 - DNA, 25 bp, Probe Sequence
agcctagcaccagggagatccagtt

SEQ ID NO: 145279 - DNA, 25 bp, Probe Sequence
agcctcagacactactgaggtggtt

SEQ ID NO: 145280 - DNA, 25 bp, Probe Sequence
agcctctgcaacaagtcaggtggtg

SEQ ID NO: 145281 - DNA, 25 bp, Probe Sequence
agccactaacgggagagctggtggt

SEQ ID NO: 145282 - DNA, 25 bp, Probe Sequence
accactacatcacgccgatgatgga

SEQ ID NO: 145283 - DNA, 25 bp, Probe Sequence
accaccaatcagcaggagatcgcct

SEQ ID NO: 145284 - DNA, 25 bp, Probe Sequence
accacacatctgtggagatgcccag

SEQ ID NO: 145285 - DNA, 25 bp, Probe Sequence
accaagcatcttgggggggtggccg

SEQ ID NO: 145286 - DNA, 25 bp, Probe Sequence
accgagcattttccaggtcggacca

SEQ ID NO: 145287 - DNA, 25 bp, Probe Sequence
acctacaatattcatttcaaactgc

SEQ ID NO: 145288 - DNA, 25 bp, Probe Sequence
accacactattttcttctaagaggt

SEQ ID NO: 145289 - DNA, 25 bp, Probe Sequence
accaccataatgagttctgaatcca

SEQ ID NO: 145290 - DNA, 25 bp, Probe Sequence
accaaaacatggcattataatctta

SEQ ID NO: 145291 - DNA, 25 bp, Probe Sequence
accaagaacagtttttagtgactat

SEQ ID NO: 145292 - DNA, 25 bp, Probe Sequence
accagaaaccttatttgtgactttg

SEQ ID NO: 145293 - DNA, 25 bp, Probe Sequence
accaaaagcctgcatttgtacctcc

SEQ ID NO: 145294 - DNA, 25 bp, Probe Sequence
accagactaccttaatttagctagc

SEQ ID NO: 145295 - DNA, 25 bp, Probe Sequence
agccagatctacgagataaccccaa

SEQ ID NO: 145296 - DNA, 25 bp, Probe Sequence
agccaaagatcctatgaggccctgc

SEQ ID NO: 145297 - DNA, 25 bp, Probe Sequence
agccaggcatgaaggctggcgcccg

SEQ ID NO: 145298 - DNA, 25 bp, Probe Sequence
agccagagatgaattgtgctgcatc

SEQ ID NO: 145299 - DNA, 25 bp, Probe Sequence
agccaggcatgctcgtgcatgcctg

SEQ ID NO: 145300 - DNA, 25 bp, Probe Sequence
agccagacatggtggcatgcgcttg

SEQ ID NO: 145301 - DNA, 25 bp, Probe Sequence
accagactgggaggcatgacaagta

SEQ ID NO: 145302 - DNA, 25 bp, Probe Sequence
agccaatcattaaggtgacagagtg

SEQ ID NO: 145303 - DNA, 25 bp, Probe Sequence
agccaagcttcaaggcaaaaatcgt

SEQ ID NO: 145304 - DNA, 25 bp, Probe Sequence
agccatagctggtgacaaacagatg

SEQ ID NO: 145305 - DNA, 25 bp, Probe Sequence
agccatagggtggagaaaggatatt

SEQ ID NO: 145306 - DNA, 25 bp, Probe Sequence
agccaacgagcggaaaatggcagac

SEQ ID NO: 145307 - DNA, 25 bp, Probe Sequence
agcctactgggcaaaatcagctaac

SEQ ID NO: 145308 - DNA, 25 bp, Probe Sequence
agccataggagcgaacactgctgct

SEQ ID NO: 145309 - DNA, 25 bp, Probe Sequence
agccatggagtccattgcactccat

SEQ ID NO: 145310 - DNA, 25 bp, Probe Sequence
agccattggtggagcttctctggaa

SEQ ID NO: 145311 - DNA, 25 bp, Probe Sequence
agccttgtggtgaggactcagtgag

SEQ ID NO: 145312 - DNA, 25 bp, Probe Sequence
agccattcgggttggagtaattggt

SEQ ID NO: 145313 - DNA, 25 bp, Probe Sequence
agccatccgggtggaaacctgtatt

SEQ ID NO: 145314 - DNA, 25 bp, Probe Sequence
accaccaggaggcataacttattaa

SEQ ID NO: 145315 - DNA, 25 bp, Probe Sequence
accaccaggaccccagaactgtgga

SEQ ID NO: 145316 - DNA, 25 bp, Probe Sequence
accaccaccaccacagagtctgtgg

SEQ ID NO: 145317 - DNA, 25 bp, Probe Sequence
accattaaccacgcaagtcagctgg

SEQ ID NO: 145318 - DNA, 25 bp, Probe Sequence
agccttccctcaaaaagatgcctgg

SEQ ID NO: 145319 - DNA, 25 bp, Probe Sequence
agccttccctcaaaaagatgcctgg

SEQ ID NO: 145320 - DNA, 25 bp, Probe Sequence
agccttcagcactaacctatgaggg

SEQ ID NO: 145321 - DNA, 25 bp, Probe Sequence
agccttgatgccatatgccttgggg

SEQ ID NO: 145322 - DNA, 25 bp, Probe Sequence
agccttgcatgttgtagttagagac

SEQ ID NO: 145323 - DNA, 25 bp, Probe Sequence
agccttggtcgccatgtatgagcac

SEQ ID NO: 145324 - DNA, 25 bp, Probe Sequence
agccaatgcccgaatgccagagaag

SEQ ID NO: 145325 - DNA, 25 bp, Probe Sequence
agccacatggcaaggcatgccagag

SEQ ID NO: 145326 - DNA, 25 bp, Probe Sequence
agccagccatgctgagcatctgagc

SEQ ID NO: 145327 - DNA, 25 bp, Probe Sequence
agccactcagatggtgatgcatgac

SEQ ID NO: 145328 - DNA, 25 bp, Probe Sequence
accactggcatcgtgatggactccg

SEQ ID NO: 145329 - DNA, 25 bp, Probe Sequence
accatcttgcctaatggactagatt

SEQ ID NO: 145330 - DNA, 25 bp, Probe Sequence
agccatgaggctgttggagtttctg

SEQ ID NO: 145331 - DNA, 25 bp, Probe Sequence
agccatgaattcagtgaactctttt

SEQ ID NO: 145332 - DNA, 25 bp, Probe Sequence
accagctgcaccaggagggcaagtt

SEQ ID NO: 145333 - DNA, 25 bp, Probe Sequence
agccagggccaccagagaagacaga

SEQ ID NO: 145334 - DNA, 25 bp, Probe Sequence
agccaggtgcctgatatcaagtagg

SEQ ID NO: 145335 - DNA, 25 bp, Probe Sequence
agccaggtattctatattaccagga

SEQ ID NO: 145336 - DNA, 25 bp, Probe Sequence
agccatagatcattcctttcaactg

SEQ ID NO: 145337 - DNA, 25 bp, Probe Sequence
accaacatgcattgcctttcaatgc

SEQ ID NO: 145338 - DNA, 25 bp, Probe Sequence
agccaagatcatgcctactgcactc

SEQ ID NO: 145339 - DNA, 25 bp, Probe Sequence
agccaagatatgtggactctctcct

SEQ ID NO: 145340 - DNA, 25 bp, Probe Sequence
accatcaacatgaagccccttcagc

SEQ ID NO: 145341 - DNA, 25 bp, Probe Sequence
agccaaccatgatgctgccatcttt

SEQ ID NO: 145342 - DNA, 25 bp, Probe Sequence
agccatgaccatgttcactttataa

SEQ ID NO: 145343 - DNA, 25 bp, Probe Sequence
agccatcccatgttagagcttctca

SEQ ID NO: 145344 - DNA, 25 bp, Probe Sequence
agccactgacacaatagagtcacat

SEQ ID NO: 145345 - DNA, 25 bp, Probe Sequence
accagtgcatgcatatactgtctct

SEQ ID NO: 145346 - DNA, 25 bp, Probe Sequence
agccacttaatcacttctatggact

SEQ ID NO: 145347 - DNA, 25 bp, Probe Sequence
accaccataaaacccttgagcacaa

SEQ ID NO: 145348 - DNA, 25 bp, Probe Sequence
accaaaaacaaatctctgacaccca

SEQ ID NO: 145349 - DNA, 25 bp, Probe Sequence
accaaaaataagcactcctagccca

SEQ ID NO: 145350 - DNA, 25 bp, Probe Sequence
accattagaaaacagtgactcaccc

SEQ ID NO: 145351 - DNA, 25 bp, Probe Sequence
acctttaaatccctgggcagcaccg

SEQ ID NO: 145352 - DNA, 25 bp, Probe Sequence
accgtgtaacacgtgaaggcagtgc

SEQ ID NO: 145353 - DNA, 25 bp, Probe Sequence
agccagttgagaattctaaggcatg

SEQ ID NO: 145354 - DNA, 25 bp, Probe Sequence
accacttgagaatttcatgagcact

SEQ ID NO: 145355 - DNA, 25 bp, Probe Sequence
accactctatgagctcgatggcacg

SEQ ID NO: 145356 - DNA, 25 bp, Probe Sequence
accacttctgagaccaagtgcagac

SEQ ID NO: 145357 - DNA, 25 bp, Probe Sequence
accaactctagggacactcaggaag

SEQ ID NO: 145358 - DNA, 25 bp, Probe Sequence
accaacccgaaaccatcaagaatga

SEQ ID NO: 145359 - DNA, 25 bp, Probe Sequence
accaacccaaaaccatcaagaatga

SEQ ID NO: 145360 - DNA, 25 bp, Probe Sequence
accaagccacacaaagactacaaga

SEQ ID NO: 145361 - DNA, 25 bp, Probe Sequence
accaagaatttgacaactcacaagc

SEQ ID NO: 145362 - DNA, 25 bp, Probe Sequence
accaagaactgtacattcttctggt

SEQ ID NO: 145363 - DNA, 25 bp, Probe Sequence
agccaaatactcatcgtctttgaga

SEQ ID NO: 145364 - DNA, 25 bp, Probe Sequence
accaaactcatttgcagttcttagg

SEQ ID NO: 145365 - DNA, 25 bp, Probe Sequence
accaagcagctctcagcagggcttt

SEQ ID NO: 145366 - DNA, 25 bp, Probe Sequence
agccaacctaacaagcatggtgctt

SEQ ID NO: 145367 - DNA, 25 bp, Probe Sequence
agccatcacacttgaccaatttttt

SEQ ID NO: 145368 - DNA, 25 bp, Probe Sequence
agccaccctgtgataattgttatta

SEQ ID NO: 145369 - DNA, 25 bp, Probe Sequence
agccactgccttctttgtaatatta

SEQ ID NO: 145370 - DNA, 25 bp, Probe Sequence
agccacatcccttggttttgtattt

SEQ ID NO: 145371 - DNA, 25 bp, Probe Sequence
agccatttggcctgtgtcttataat

SEQ ID NO: 145372 - DNA, 25 bp, Probe Sequence
accactgaggactgttgctgtattg

SEQ ID NO: 145373 - DNA, 25 bp, Probe Sequence
agccattattacttttggtatccca

SEQ ID NO: 145374 - DNA, 25 bp, Probe Sequence
agccttttactcttctgttagctct

SEQ ID NO: 145375 - DNA, 25 bp, Probe Sequence
accacttatactgtctgtctgaggc

SEQ ID NO: 145376 - DNA, 25 bp, Probe Sequence
accaagttcagtgatctcacagagg

SEQ ID NO: 145377 - DNA, 25 bp, Probe Sequence
accagatcttgcgtgaactcatcga

SEQ ID NO: 145378 - DNA, 25 bp, Probe Sequence
accaatcctccaacttgatgcagaa

SEQ ID NO: 145379 - DNA, 25 bp, Probe Sequence
accaatgcccctttaagtgctgcag

SEQ ID NO: 145380 - DNA, 25 bp, Probe Sequence
accatatccaacagctaacctagta

SEQ ID NO: 145381 - DNA, 25 bp, Probe Sequence
agccttccagaagtcaagtctctta

SEQ ID NO: 145382 - DNA, 25 bp, Probe Sequence
agccttccaaagtcagcagcaatct

SEQ ID NO: 145383 - DNA, 25 bp, Probe Sequence
agccttgcaaaacctgcacaatcag

SEQ ID NO: 145384 - DNA, 25 bp, Probe Sequence
agccatctcaattaccatatataca

SEQ ID NO: 145385 - DNA, 25 bp, Probe Sequence
accaatatagtgacctcatgtgagc

SEQ ID NO: 145386 - DNA, 25 bp, Probe Sequence
accattactgtgacgtctgaggctg

SEQ ID NO: 145387 - DNA, 25 bp, Probe Sequence
agccaccctgagaagtctcacgtga

SEQ ID NO: 145388 - DNA, 25 bp, Probe Sequence
accagccattggaactctccagggt

SEQ ID NO: 145389 - DNA, 25 bp, Probe Sequence
accaaagtgctcaactacgtggact

SEQ ID NO: 145390 - DNA, 25 bp, Probe Sequence
accaagagccttgtgagcctggtct

SEQ ID NO: 145391 - DNA, 25 bp, Probe Sequence
accaggctgggtgtaccttgagctg

SEQ ID NO: 145392 - DNA, 25 bp, Probe Sequence
accggaaagatgctgtccttggcgg

SEQ ID NO: 145393 - DNA, 25 bp, Probe Sequence
accggaagcggcagtgccgctcctc

SEQ ID NO: 145394 - DNA, 25 bp, Probe Sequence
accaggacgcggtgtacatctgttc

SEQ ID NO: 145395 - DNA, 25 bp, Probe Sequence
accactgaagggcgtaatgcactta

SEQ ID NO: 145396 - DNA, 25 bp, Probe Sequence
accactgactgctgaaatacagcaa

SEQ ID NO: 145397 - DNA, 25 bp, Probe Sequence
acccatgactgcaagaatactggca

SEQ ID NO: 145398 - DNA, 25 bp, Probe Sequence
accacaactgtacacctgaattcca

SEQ ID NO: 145399 - DNA, 25 bp, Probe Sequence
accactgcctgaagaaccaggttcc

SEQ ID NO: 145400 - DNA, 25 bp, Probe Sequence
accattgtcatatacccggttcagc

SEQ ID NO: 145401 - DNA, 25 bp, Probe Sequence
accagtgataatgccccaaggacaa

SEQ ID NO: 145402 - DNA, 25 bp, Probe Sequence
accaatgactttcttcacagaatca

SEQ ID NO: 145403 - DNA, 25 bp, Probe Sequence
accaatgagcttactacccaacttc

SEQ ID NO: 145404 - DNA, 25 bp, Probe Sequence
accacatggtacattcctagagtta

SEQ ID NO: 145405 - DNA, 25 bp, Probe Sequence
accaccgtgaagtgcctatgatgaa

SEQ ID NO: 145406 - DNA, 25 bp, Probe Sequence
accacctagaacaagcactagagaa

SEQ ID NO: 145407 - DNA, 25 bp, Probe Sequence
accacagtcaaagcaacagaaacaa

SEQ ID NO: 145408 - DNA, 25 bp, Probe Sequence
agccaagtcacgtcccaaaacagga

SEQ ID NO: 145409 - DNA, 25 bp, Probe Sequence
agccagagagccgcctagagaaagg

SEQ ID NO: 145410 - DNA, 25 bp, Probe Sequence
accagtggatcggcctgaacgacag

SEQ ID NO: 145411 - DNA, 25 bp, Probe Sequence
accgtcttgggccagaacgacacgg

SEQ ID NO: 145412 - DNA, 25 bp, Probe Sequence
accaggcgggatccgggagacacgg

SEQ ID NO: 145413 - DNA, 25 bp, Probe Sequence
agccagggctgtgcacctggcagtc

SEQ ID NO: 145414 - DNA, 25 bp, Probe Sequence
agccaagagcggtaccggcattgcg

SEQ ID NO: 145415 - DNA, 25 bp, Probe Sequence
accagaagctggtacccagttacca

SEQ ID NO: 145416 - DNA, 25 bp, Probe Sequence
accagagactggttacatcagtgat

SEQ ID NO: 145417 - DNA, 25 bp, Probe Sequence
accaggatctgcctattactgctgt

SEQ ID NO: 145418 - DNA, 25 bp, Probe Sequence
accaagactcattcatatagcacgt

SEQ ID NO: 145419 - DNA, 25 bp, Probe Sequence
accaaggtctacaactacgtgaaat

SEQ ID NO: 145420 - DNA, 25 bp, Probe Sequence
agccaacgggatcagaggaccatca

SEQ ID NO: 145421 - DNA, 25 bp, Probe Sequence
accagactgggtaagtcgcaccagc

SEQ ID NO: 145422 - DNA, 25 bp, Probe Sequence
accaagtggggtcggctgaccgtgt

SEQ ID NO: 145423 - DNA, 25 bp, Probe Sequence
accaaatggcggatgacgccggtgc

SEQ ID NO: 145424 - DNA, 25 bp, Probe Sequence
accaatcacacggagtaccacggct

SEQ ID NO: 145425 - DNA, 25 bp, Probe Sequence
accaaccaagtgttacaagccccag

SEQ ID NO: 145426 - DNA, 25 bp, Probe Sequence
accagaccttgttctaaagcccagg

SEQ ID NO: 145427 - DNA, 25 bp, Probe Sequence
agccaactttctgtgaaggccaagt

SEQ ID NO: 145428 - DNA, 25 bp, Probe Sequence
acccactgtgtggactaagatgcca

SEQ ID NO: 145429 - DNA, 25 bp, Probe Sequence
accaacaggctctagccaacatgca

SEQ ID NO: 145430 - DNA, 25 bp, Probe Sequence
accagcttggtgtagacagtctgaa

SEQ ID NO: 145431 - DNA, 25 bp, Probe Sequence
accaccgagtgctgaaggatgaatt

SEQ ID NO: 145432 - DNA, 25 bp, Probe Sequence
agccaccaagtctctggtaactctg

SEQ ID NO: 145433 - DNA, 25 bp, Probe Sequence
accagccaacctatgttacacgtga

SEQ ID NO: 145434 - DNA, 25 bp, Probe Sequence
accagccagatcctcttggttattt

SEQ ID NO: 145435 - DNA, 25 bp, Probe Sequence
accagactatcagtgctttgatcaa

SEQ ID NO: 145436 - DNA, 25 bp, Probe Sequence
accagtttttgtttctcaagctcag

SEQ ID NO: 145437 - DNA, 25 bp, Probe Sequence
agccagtgattattcttgttcaggg

SEQ ID NO: 145438 - DNA, 25 bp, Probe Sequence
accactaccacgtatgtacatgggt

SEQ ID NO: 145439 - DNA, 25 bp, Probe Sequence
acccattcagcccaatgtagcaggc

SEQ ID NO: 145440 - DNA, 25 bp, Probe Sequence
accaatgtggccgtggtacggatga

SEQ ID NO: 145441 - DNA, 25 bp, Probe Sequence
accttgggcctgcggaaggcagggt

SEQ ID NO: 145442 - DNA, 25 bp, Probe Sequence
accttcgggtcaaggcagaggcagg

SEQ ID NO: 145443 - DNA, 25 bp, Probe Sequence
agccagtcgggtttcctggagcaat

SEQ ID NO: 145444 - DNA, 25 bp, Probe Sequence
accattccaggtttgccaaacaatt

SEQ ID NO: 145445 - DNA, 25 bp, Probe Sequence
accaacacggtgactgcggtgaaga

SEQ ID NO: 145446 - DNA, 25 bp, Probe Sequence
agccaacaggactcttgagctgaag

SEQ ID NO: 145447 - DNA, 25 bp, Probe Sequence
accagtcaggactctatgttcaata

SEQ ID NO: 145448 - DNA, 25 bp, Probe Sequence
accactgcttgagtacaggcttaat

SEQ ID NO: 145449 - DNA, 25 bp, Probe Sequence
accacgtgggcctatgcttgtaatt

SEQ ID NO: 145450 - DNA, 25 bp, Probe Sequence
accacgtgcagcccaatttgtgatc

SEQ ID NO: 145451 - DNA, 25 bp, Probe Sequence
agccatcagtgaggcagcagttact

SEQ ID NO: 145452 - DNA, 25 bp, Probe Sequence
agccatcagtgaagagaggttgcga

SEQ ID NO: 145453 - DNA, 25 bp, Probe Sequence
accatcatgtgactggaagatatgc

SEQ ID NO: 145454 - DNA, 25 bp, Probe Sequence
accacattatgtcaagattcaagtt

SEQ ID NO: 145455 - DNA, 25 bp, Probe Sequence
accactcattttgaccatatagatt

SEQ ID NO: 145456 - DNA, 25 bp, Probe Sequence
accactttctctgtatatgaaatgt

SEQ ID NO: 145457 - DNA, 25 bp, Probe Sequence
accactgagtctgccatgaagaaga

SEQ ID NO: 145458 - DNA, 25 bp, Probe Sequence
accagctcccctcaaaaagaagaca

SEQ ID NO: 145459 - DNA, 25 bp, Probe Sequence
accctcccactatcaagaaataact

SEQ ID NO: 145460 - DNA, 25 bp, Probe Sequence
accacctcatcacaatcaaatttca

SEQ ID NO: 145461 - DNA, 25 bp, Probe Sequence
accacctcaatgcaaagattctaca

SEQ ID NO: 145462 - DNA, 25 bp, Probe Sequence
accagccagaatataagttgcatga

SEQ ID NO: 145463 - DNA, 25 bp, Probe Sequence
accagacgcgatggcaaagtggata

SEQ ID NO: 145464 - DNA, 25 bp, Probe Sequence
accaacgccaggacgtggcgcgacg

SEQ ID NO: 145465 - DNA, 25 bp, Probe Sequence
accaaggccaggacgtggaggtgga

SEQ ID NO: 145466 - DNA, 25 bp, Probe Sequence
accaaggtcaggaggccgttgcaga

SEQ ID NO: 145467 - DNA, 25 bp, Probe Sequence
accaaggtcaggaggccgttgcaga

SEQ ID NO: 145468 - DNA, 25 bp, Probe Sequence
accaggtgtgggttggctcggaaga

SEQ ID NO: 145469 - DNA, 25 bp, Probe Sequence
accagggtctggatgagcttgaatt

SEQ ID NO: 145470 - DNA, 25 bp, Probe Sequence
accaggctgggcgaatagcttaagt

SEQ ID NO: 145471 - DNA, 25 bp, Probe Sequence
accaggtgaggtcccagcttgaaga

SEQ ID NO: 145472 - DNA, 25 bp, Probe Sequence
accagtggaggtgccagggaggccc

SEQ ID NO: 145473 - DNA, 25 bp, Probe Sequence
aaatgcttgaggtgaaggacgcccc

SEQ ID NO: 145474 - DNA, 25 bp, Probe Sequence
caaacgtattggcaggcgaacccct

SEQ ID NO: 145475 - DNA, 25 bp, Probe Sequence
acacgcactttatgagggagacccc

SEQ ID NO: 145476 - DNA, 25 bp, Probe Sequence
accagcactttatctgttgagcctt

SEQ ID NO: 145477 - DNA, 25 bp, Probe Sequence
accaactaaccaagcttggcctctg

SEQ ID NO: 145478 - DNA, 25 bp, Probe Sequence
accaagataacatactgtcctccag

SEQ ID NO: 145479 - DNA, 25 bp, Probe Sequence
accaataaattctacttcctgtcca

SEQ ID NO: 145480 - DNA, 25 bp, Probe Sequence
accataaataacccttcacgtgtca

SEQ ID NO: 145481 - DNA, 25 bp, Probe Sequence
agccaaacgaagcttcataagtgaa

SEQ ID NO: 145482 - DNA, 25 bp, Probe Sequence
agccacaaagattggattccaagta

SEQ ID NO: 145483 - DNA, 25 bp, Probe Sequence
agccaagaagtatgcttcccgcgtg

SEQ ID NO: 145484 - DNA, 25 bp, Probe Sequence
accaggcaattatgtagccaccgtt

SEQ ID NO: 145485 - DNA, 25 bp, Probe Sequence
accaggtaacatcatcaggccgggt

SEQ ID NO: 145486 - DNA, 25 bp, Probe Sequence
accaggcgtacctggtgcgcgagag

SEQ ID NO: 145487 - DNA, 25 bp, Probe Sequence
agccagggagacaagggagtcggtg

SEQ ID NO: 145488 - DNA, 25 bp, Probe Sequence
agccaggaaacggggcttcacggtg

SEQ ID NO: 145489 - DNA, 25 bp, Probe Sequence
accaggtcaagggacgttctgtggg

SEQ ID NO: 145490 - DNA, 25 bp, Probe Sequence
accacgtgagagccaagctgtcctg

SEQ ID NO: 145491 - DNA, 25 bp, Probe Sequence
agccaccagccagcaagcattaatg

SEQ ID NO: 145492 - DNA, 25 bp, Probe Sequence
agccaccagccagcaagcattaatg

SEQ ID NO: 145493 - DNA, 25 bp, Probe Sequence
agccacctccagtaatgcgtatact

SEQ ID NO: 145494 - DNA, 25 bp, Probe Sequence
accacactcaactactgcgtatggc

SEQ ID NO: 145495 - DNA, 25 bp, Probe Sequence
accacacacacctgtctgtgcagat

SEQ ID NO: 145496 - DNA, 25 bp, Probe Sequence
accaacacatactgtcagactgggt

SEQ ID NO: 145497 - DNA, 25 bp, Probe Sequence
accacatcctcctctaacagggaga

SEQ ID NO: 145498 - DNA, 25 bp, Probe Sequence
accatctccttgggcaaagcacgga

SEQ ID NO: 145499 - DNA, 25 bp, Probe Sequence
accacaccttctacaatgagctgcg

SEQ ID NO: 145500 - DNA, 25 bp, Probe Sequence
accacagtcctcacgatggtgcagt

SEQ ID NO: 145501 - DNA, 25 bp, Probe Sequence
accacagatcctacaggactgtctg

SEQ ID NO: 145502 - DNA, 25 bp, Probe Sequence
accaagaccaatgggcagctggccc

SEQ ID NO: 145503 - DNA, 25 bp, Probe Sequence
accacacagctaagggagggcctgg

SEQ ID NO: 145504 - DNA, 25 bp, Probe Sequence
accatctcagtgaggggcaggagct

SEQ ID NO: 145505 - DNA, 25 bp, Probe Sequence
accacctgtccttcgagcaggagtt

SEQ ID NO: 145506 - DNA, 25 bp, Probe Sequence
accacctgtccttcgagcaggagtt

SEQ ID NO: 145507 - DNA, 25 bp, Probe Sequence
accacagtattctagagacgggttg

SEQ ID NO: 145508 - DNA, 25 bp, Probe Sequence
acctgagttacaaagacagaccctg

SEQ ID NO: 145509 - DNA, 25 bp, Probe Sequence
accaggcttcctgcaaagaccaggg

SEQ ID NO: 145510 - DNA, 25 bp, Probe Sequence
accacccaagcccaagaggcagagg

SEQ ID NO: 145511 - DNA, 25 bp, Probe Sequence
accacctaatgctcttatggcacag

SEQ ID NO: 145512 - DNA, 25 bp, Probe Sequence
accacctctcacaatttaggcagaa

SEQ ID NO: 145513 - DNA, 25 bp, Probe Sequence
agccaccaacagattgtgtgcccaa

SEQ ID NO: 145514 - DNA, 25 bp, Probe Sequence
accagcacaaaggagtgtgtaccta

SEQ ID NO: 145515 - DNA, 25 bp, Probe Sequence
accacaacacaatggggctcactca

SEQ ID NO: 145516 - DNA, 25 bp, Probe Sequence
accatagagccctggggcctcatac

SEQ ID NO: 145517 - DNA, 25 bp, Probe Sequence
acaaagtccccaggatgggcatccc

SEQ ID NO: 145518 - DNA, 25 bp, Probe Sequence
accaatgtgtgcgcggggtatcctg

SEQ ID NO: 145519 - DNA, 25 bp, Probe Sequence
accactgttcccagtcagcatatac

SEQ ID NO: 145520 - DNA, 25 bp, Probe Sequence
accaagtcatgcatgaggtcagctt

SEQ ID NO: 145521 - DNA, 25 bp, Probe Sequence
accaattatgagcagtctccttact

SEQ ID NO: 145522 - DNA, 25 bp, Probe Sequence
accaattagcaaacatcttcttagt

SEQ ID NO: 145523 - DNA, 25 bp, Probe Sequence
accaatctacaagtctctgtctttt

SEQ ID NO: 145524 - DNA, 25 bp, Probe Sequence
accactgctgcatatatttgttttt

SEQ ID NO: 145525 - DNA, 25 bp, Probe Sequence
accacatggtttttcagtttgactg

SEQ ID NO: 145526 - DNA, 25 bp, Probe Sequence
agccaagatgttcatgtagtattga

SEQ ID NO: 145527 - DNA, 25 bp, Probe Sequence
agccaaacctgtagtgagcgatttt

SEQ ID NO: 145528 - DNA, 25 bp, Probe Sequence
agccagcaccgtcagtggaaaactt

SEQ ID NO: 145529 - DNA, 25 bp, Probe Sequence
gactagccctggtgggaacgacttt

SEQ ID NO: 145530 - DNA, 25 bp, Probe Sequence
acctgcggctggatggaaactactt

SEQ ID NO: 145531 - DNA, 25 bp, Probe Sequence
acctcaccatggatgacttgacaac

SEQ ID NO: 145532 - DNA, 25 bp, Probe Sequence
accttgcacatgaagtgagcttggc

SEQ ID NO: 145533 - DNA, 25 bp, Probe Sequence
accagtgcacagtttgacagtggcc

SEQ ID NO: 145534 - DNA, 25 bp, Probe Sequence
accagtggatgcttctgcacttggc

SEQ ID NO: 145535 - DNA, 25 bp, Probe Sequence
accactgcagattctcatctttggc

SEQ ID NO: 145536 - DNA, 25 bp, Probe Sequence
accaagcaatgagcactttggcatt

SEQ ID NO: 145537 - DNA, 25 bp, Probe Sequence
agccaaggatgaacactctatgcat

SEQ ID NO: 145538 - DNA, 25 bp, Probe Sequence
accaagctattgtcactgcagtgca

SEQ ID NO: 145539 - DNA, 25 bp, Probe Sequence
accaagctattgtcactgcagtgca

SEQ ID NO: 145540 - DNA, 25 bp, Probe Sequence
accagcatgctctgtgacgaggcta

SEQ ID NO: 145541 - DNA, 25 bp, Probe Sequence
accagcagcactgtgacgaggctaa

SEQ ID NO: 145542 - DNA, 25 bp, Probe Sequence
accaggccttattcagcatggataa

SEQ ID NO: 145543 - DNA, 25 bp, Probe Sequence
accacctttgcaacgcggaatatca

SEQ ID NO: 145544 - DNA, 25 bp, Probe Sequence
accagcctgggcaacacagcaagat

SEQ ID NO: 145545 - DNA, 25 bp, Probe Sequence
accagcctgggcaacacagcaagat

SEQ ID NO: 145546 - DNA, 25 bp, Probe Sequence
accagcctgggcaacatagtgagat

SEQ ID NO: 145547 - DNA, 25 bp, Probe Sequence
accagcctgggcaacatagtgagac

SEQ ID NO: 145548 - DNA, 25 bp, Probe Sequence
accatcctggctaacactgtgaaac

SEQ ID NO: 145549 - DNA, 25 bp, Probe Sequence
accagcctggccaacatggtgaaac

SEQ ID NO: 145550 - DNA, 25 bp, Probe Sequence
accagcctggacaacatagtaatac

SEQ ID NO: 145551 - DNA, 25 bp, Probe Sequence
accaccggagaaattgtaatgacac

SEQ ID NO: 145552 - DNA, 25 bp, Probe Sequence
accacagaagaaagtttgaggaact

SEQ ID NO: 145553 - DNA, 25 bp, Probe Sequence
accacagccatgtctgcgtttgagg

SEQ ID NO: 145554 - DNA, 25 bp, Probe Sequence
accaacacgatcctattctgtggca

SEQ ID NO: 145555 - DNA, 25 bp, Probe Sequence
accaaagagctgcctcttggtggca

SEQ ID NO: 145556 - DNA, 25 bp, Probe Sequence
accaaggagctgacttcggaactaa

SEQ ID NO: 145557 - DNA, 25 bp, Probe Sequence
accaaagagttctcaccaagcataa

SEQ ID NO: 145558 - DNA, 25 bp, Probe Sequence
actggaaggttatacctctcattac

SEQ ID NO: 145559 - DNA, 25 bp, Probe Sequence
accagaaactctgccatagttcatt

SEQ ID NO: 145560 - DNA, 25 bp, Probe Sequence
accaccaacccagctaattctgaaa

SEQ ID NO: 145561 - DNA, 25 bp, Probe Sequence
accacgataccctctgattattgga

SEQ ID NO: 145562 - DNA, 25 bp, Probe Sequence
accttgatacccactttttgtgaat

SEQ ID NO: 145563 - DNA, 25 bp, Probe Sequence
accttaaaacaacctatttgctgat

SEQ ID NO: 145564 - DNA, 25 bp, Probe Sequence
accttacaagcaaacttactattag

SEQ ID NO: 145565 - DNA, 25 bp, Probe Sequence
acgcataaaggcagtcgtacatact

SEQ ID NO: 145566 - DNA, 25 bp, Probe Sequence
accaacactggatctgggactgcct

SEQ ID NO: 145567 - DNA, 25 bp, Probe Sequence
accaaccagaacgtggtttgcctga

SEQ ID NO: 145568 - DNA, 25 bp, Probe Sequence
acctgacgaaaaaggtgttgccaag

SEQ ID NO: 145569 - DNA, 25 bp, Probe Sequence
accatgtagaacaaacggctgtctg

SEQ ID NO: 145570 - DNA, 25 bp, Probe Sequence
accactcaaatatccaggtgtctga

SEQ ID NO: 145571 - DNA, 25 bp, Probe Sequence
accatccaaggcatccggtttgagg

SEQ ID NO: 145572 - DNA, 25 bp, Probe Sequence
accaccaaggagaatagtttaggag

SEQ ID NO: 145573 - DNA, 25 bp, Probe Sequence
accttcgaggttaatggcttgtgga

SEQ ID NO: 145574 - DNA, 25 bp, Probe Sequence
accagtcgttgtgtgcggctgatgt

SEQ ID NO: 145575 - DNA, 25 bp, Probe Sequence
accattgcggtcgcgcggatcatga

SEQ ID NO: 145576 - DNA, 25 bp, Probe Sequence
acctgtctaggggcggcaatcaaca

SEQ ID NO: 145577 - DNA, 25 bp, Probe Sequence
acttggatcgggggtgtagacacgc

SEQ ID NO: 145578 - DNA, 25 bp, Probe Sequence
acctggtcggggaggagaccatggc

SEQ ID NO: 145579 - DNA, 25 bp, Probe Sequence
accggaagcgggagtgcggcaacgc

SEQ ID NO: 145580 - DNA, 25 bp, Probe Sequence
accatggaggagcgaggtctggccc

SEQ ID NO: 145581 - DNA, 25 bp, Probe Sequence
accatggtgggcttgtggtggctgc

SEQ ID NO: 145582 - DNA, 25 bp, Probe Sequence
accaggatggtctcgatctgacctc

SEQ ID NO: 145583 - DNA, 25 bp, Probe Sequence
accaggtgagtatctgtcttcattc

SEQ ID NO: 145584 - DNA, 25 bp, Probe Sequence
accagaggaagagtctgcctatgtg

SEQ ID NO: 145585 - DNA, 25 bp, Probe Sequence
accaagctgtaggccagcccatggt

SEQ ID NO: 145586 - DNA, 25 bp, Probe Sequence
accaagctgagacccatgtccatgt

SEQ ID NO: 145587 - DNA, 25 bp, Probe Sequence
accaagctgagacccatgtccatgt

SEQ ID NO: 145588 - DNA, 25 bp, Probe Sequence
accaactccacccatgggctatatg

SEQ ID NO: 145589 - DNA, 25 bp, Probe Sequence
accaacttcgtctatgcgcagtttg

SEQ ID NO: 145590 - DNA, 25 bp, Probe Sequence
accacattcttgacaactatttgct

SEQ ID NO: 145591 - DNA, 25 bp, Probe Sequence
accaatctcctgaggcttgtggatt

SEQ ID NO: 145592 - DNA, 25 bp, Probe Sequence
accaatgcatcctactcgcttaggt

SEQ ID NO: 145593 - DNA, 25 bp, Probe Sequence
accaatatcagccaccactttgagt

SEQ ID NO: 145594 - DNA, 25 bp, Probe Sequence
accaaacagccatacatgtctgcaa

SEQ ID NO: 145595 - DNA, 25 bp, Probe Sequence
accaatttgccagacattatcagac

SEQ ID NO: 145596 - DNA, 25 bp, Probe Sequence
ccctatgtctcctgaattttaccgg

SEQ ID NO: 145597 - DNA, 25 bp, Probe Sequence
acctcttgagccttgaactttgacc

SEQ ID NO: 145598 - DNA, 25 bp, Probe Sequence
accttaaagcctggacttggatcgc

SEQ ID NO: 145599 - DNA, 25 bp, Probe Sequence
cactttaaccctgactggggagcaa

SEQ ID NO: 145600 - DNA, 25 bp, Probe Sequence
accttgaaccggaacctgagtgaca

SEQ ID NO: 145601 - DNA, 25 bp, Probe Sequence
accggaacgcaggttcttgagtcct

SEQ ID NO: 145602 - DNA, 25 bp, Probe Sequence
accaaaatccatgcttctcaagtcc

SEQ ID NO: 145603 - DNA, 25 bp, Probe Sequence
accaaagcacccaagattcagcgtc

SEQ ID NO: 145604 - DNA, 25 bp, Probe Sequence
accagaaccaacaagattgagaatt

SEQ ID NO: 145605 - DNA, 25 bp, Probe Sequence
accaacgtcactatgatgaagactc

SEQ ID NO: 145606 - DNA, 25 bp, Probe Sequence
accaactgtacaaaataactctcca

SEQ ID NO: 145607 - DNA, 25 bp, Probe Sequence
accaagttaactgagatactgctgc

SEQ ID NO: 145608 - DNA, 25 bp, Probe Sequence
accacagtggtgtccgagaagtcag

SEQ ID NO: 145609 - DNA, 25 bp, Probe Sequence
accatcggggaccttaagaagctga

SEQ ID NO: 145610 - DNA, 25 bp, Probe Sequence
accacggagttcctgtacaacctgt

SEQ ID NO: 145611 - DNA, 25 bp, Probe Sequence
accttcacagttcttaatacctgtt

SEQ ID NO: 145612 - DNA, 25 bp, Probe Sequence
accaccaagatacacatttacctgt

SEQ ID NO: 145613 - DNA, 25 bp, Probe Sequence
accatcgaaggggacttccgctggt

SEQ ID NO: 145614 - DNA, 25 bp, Probe Sequence
accaagaaggtggatctctcgcagc

SEQ ID NO: 145615 - DNA, 25 bp, Probe Sequence
accaggaatggaaaccatagagccc

SEQ ID NO: 145616 - DNA, 25 bp, Probe Sequence
accagaggtgccacctacaacgtca

SEQ ID NO: 145617 - DNA, 25 bp, Probe Sequence
accagaatggaaccctttcacttca

SEQ ID NO: 145618 - DNA, 25 bp, Probe Sequence
accaaaggctagtttcttcagctta

SEQ ID NO: 145619 - DNA, 25 bp, Probe Sequence
accagaacgtggtttgcctgaggct

SEQ ID NO: 145620 - DNA, 25 bp, Probe Sequence
accaaaagtcacatctactgaagct

SEQ ID NO: 145621 - DNA, 25 bp, Probe Sequence
accaccatatgttctttgactataa

SEQ ID NO: 145622 - DNA, 25 bp, Probe Sequence
accaaatttgactgtccacatcaca

SEQ ID NO: 145623 - DNA, 25 bp, Probe Sequence
accaacagattgtgtgcccaatgag

SEQ ID NO: 145624 - DNA, 25 bp, Probe Sequence
accaatggattgtgctgctctcgtt

SEQ ID NO: 145625 - DNA, 25 bp, Probe Sequence
accaagccaggctagcatgctcatg

SEQ ID NO: 145626 - DNA, 25 bp, Probe Sequence
accagagtgcaggaggcatgccagg

SEQ ID NO: 145627 - DNA, 25 bp, Probe Sequence
agccaagaagcgtctgcggcagagt

SEQ ID NO: 145628 - DNA, 25 bp, Probe Sequence
accacagttgcagctcgacatggat

SEQ ID NO: 145629 - DNA, 25 bp, Probe Sequence
accaaggtgccagctgagcggaacc

SEQ ID NO: 145630 - DNA, 25 bp, Probe Sequence
accaacgtgcgtgctgaggtgcaga

SEQ ID NO: 145631 - DNA, 25 bp, Probe Sequence
accagactgtgcggggagaatgcga

SEQ ID NO: 145632 - DNA, 25 bp, Probe Sequence
accaagctgtgctgcggcaggacgg

SEQ ID NO: 145633 - DNA, 25 bp, Probe Sequence
accagatctcactcgtgcaatggcc

SEQ ID NO: 145634 - DNA, 25 bp, Probe Sequence
accaatcagatcttcggcctgagcg

SEQ ID NO: 145635 - DNA, 25 bp, Probe Sequence
accaaagcagttttgccgacggatg

SEQ ID NO: 145636 - DNA, 25 bp, Probe Sequence
accagaagactttccgcgtggtggc

SEQ ID NO: 145637 - DNA, 25 bp, Probe Sequence
accagaagtctctctgggcaggtgt

SEQ ID NO: 145638 - DNA, 25 bp, Probe Sequence
accagaatctcctctacagattttt

SEQ ID NO: 145639 - DNA, 25 bp, Probe Sequence
accagaatttacctatcttgctatt

SEQ ID NO: 145640 - DNA, 25 bp, Probe Sequence
accaaatatccacgtattctataat

SEQ ID NO: 145641 - DNA, 25 bp, Probe Sequence
accaatatatcgtgtatccgaaaat

SEQ ID NO: 145642 - DNA, 25 bp, Probe Sequence
accaaaatcgatatcagcaatgtaa

SEQ ID NO: 145643 - DNA, 25 bp, Probe Sequence
accaacaactgtacatgctcaagga

SEQ ID NO: 145644 - DNA, 25 bp, Probe Sequence
acctatatgactaatgccatcagga

SEQ ID NO: 145645 - DNA, 25 bp, Probe Sequence
accatcaatgcatttcagcatcagc

SEQ ID NO: 145646 - DNA, 25 bp, Probe Sequence
accatcaaagcgacagcacagttct

SEQ ID NO: 145647 - DNA, 25 bp, Probe Sequence
accatggtcaggtagcatcagtatc

SEQ ID NO: 145648 - DNA, 25 bp, Probe Sequence
accatgggcagcccatacagtctct

SEQ ID NO: 145649 - DNA, 25 bp, Probe Sequence
accatggggcaggcttagccccgga

SEQ ID NO: 145650 - DNA, 25 bp, Probe Sequence
accagggaaaataagccaaccatgc

SEQ ID NO: 145651 - DNA, 25 bp, Probe Sequence
accagggaagaagattcatacgcct

SEQ ID NO: 145652 - DNA, 25 bp, Probe Sequence
accaaggaccaggagattcagaccc

SEQ ID NO: 145653 - DNA, 25 bp, Probe Sequence
accaaggaccaggagattcagaccc

SEQ ID NO: 145654 - DNA, 25 bp, Probe Sequence
accaaggtgccagctattcaacaga

SEQ ID NO: 145655 - DNA, 25 bp, Probe Sequence
accagtgtgagcgagtctaataatc

SEQ ID NO: 145656 - DNA, 25 bp, Probe Sequence
accatgttggcacaaattaactgta

SEQ ID NO: 145657 - DNA, 25 bp, Probe Sequence
accagtgtagagaagacctcaaatg

SEQ ID NO: 145658 - DNA, 25 bp, Probe Sequence
accagctttgaagaggatcaggtga

SEQ ID NO: 145659 - DNA, 25 bp, Probe Sequence
accagttggctaggggagcaggggg

SEQ ID NO: 145660 - DNA, 25 bp, Probe Sequence
accactgtgactgggacggctgtgg

SEQ ID NO: 145661 - DNA, 25 bp, Probe Sequence
accagttgtcaggagtctgtgctgt

SEQ ID NO: 145662 - DNA, 25 bp, Probe Sequence
accagttctcatgtgtttgtcttca

SEQ ID NO: 145663 - DNA, 25 bp, Probe Sequence
accagtatgaccttgtctagtctcc

SEQ ID NO: 145664 - DNA, 25 bp, Probe Sequence
accacttgtcttggctgtagattcc

SEQ ID NO: 145665 - DNA, 25 bp, Probe Sequence
accatcttggttgttgtgcttgtcc

SEQ ID NO: 145666 - DNA, 25 bp, Probe Sequence
accagcttagttatatactagtcac

SEQ ID NO: 145667 - DNA, 25 bp, Probe Sequence
accaccgagattgtcataaacccca

SEQ ID NO: 145668 - DNA, 25 bp, Probe Sequence
accactaaatacttcatcacacacc

SEQ ID NO: 145669 - DNA, 25 bp, Probe Sequence
accagccgctgcaaaatcatgccaa

SEQ ID NO: 145670 - DNA, 25 bp, Probe Sequence
accagcagcgtgacgatactgccac

SEQ ID NO: 145671 - DNA, 25 bp, Probe Sequence
accagcagggaccatagctctcagt

SEQ ID NO: 145672 - DNA, 25 bp, Probe Sequence
accacatgacagacacaaggctcag

SEQ ID NO: 145673 - DNA, 25 bp, Probe Sequence
accagcatcgcgaaccaggctgtgc

SEQ ID NO: 145674 - DNA, 25 bp, Probe Sequence
accagcatcgcgaaccaggctgtgc

SEQ ID NO: 145675 - DNA, 25 bp, Probe Sequence
accagcccagaagtgcagaactgca

SEQ ID NO: 145676 - DNA, 25 bp, Probe Sequence
accagcgcccagatgcagacctggg

SEQ ID NO: 145677 - DNA, 25 bp, Probe Sequence
accagcccagagatcaatcttttct

SEQ ID NO: 145678 - DNA, 25 bp, Probe Sequence
accagctctaggtccaattgttctg

SEQ ID NO: 145679 - DNA, 25 bp, Probe Sequence
accactttgtcaagctcatttcctg

SEQ ID NO: 145680 - DNA, 25 bp, Probe Sequence
accagattgttttgtaatgcccgcc

SEQ ID NO: 145681 - DNA, 25 bp, Probe Sequence
accactttttctagcaacacggcac

SEQ ID NO: 145682 - DNA, 25 bp, Probe Sequence
accacatcaccttctataacacgaa

SEQ ID NO: 145683 - DNA, 25 bp, Probe Sequence
accacagagcctattaatcgtgaga

SEQ ID NO: 145684 - DNA, 25 bp, Probe Sequence
accagaccatccatctagtggtgaa

SEQ ID NO: 145685 - DNA, 25 bp, Probe Sequence
acctgcaccatccatcattatgtag

SEQ ID NO: 145686 - DNA, 25 bp, Probe Sequence
accaacctccaattgatgtgatctt

SEQ ID NO: 145687 - DNA, 25 bp, Probe Sequence
accatgcccccagatgattttttta

SEQ ID NO: 145688 - DNA, 25 bp, Probe Sequence
accaccatgcccagctaatttgtat

SEQ ID NO: 145689 - DNA, 25 bp, Probe Sequence
accaccatgcccagctaatttttgt

SEQ ID NO: 145690 - DNA, 25 bp, Probe Sequence
acacccaagaccatcctttattgta

SEQ ID NO: 145691 - DNA, 25 bp, Probe Sequence
acccccacacgcactttatgaggga

SEQ ID NO: 145692 - DNA, 25 bp, Probe Sequence
acctcgcccacgagagtcggaggga

SEQ ID NO: 145693 - DNA, 25 bp, Probe Sequence
acctaaaaggaccattcaaagtctg

SEQ ID NO: 145694 - DNA, 25 bp, Probe Sequence
accaacaaaggatctcacattttct

SEQ ID NO: 145695 - DNA, 25 bp, Probe Sequence
accaaaccaaatcatactttctctt

SEQ ID NO: 145696 - DNA, 25 bp, Probe Sequence
cacccaagaaaacaactcccattct

SEQ ID NO: 145697 - DNA, 25 bp, Probe Sequence
acctcagcaacaaacaatacaccca

SEQ ID NO: 145698 - DNA, 25 bp, Probe Sequence
acctacaatacactgaaaccattat

SEQ ID NO: 145699 - DNA, 25 bp, Probe Sequence
acctagaatagccagaaaaactttg

SEQ ID NO: 145700 - DNA, 25 bp, Probe Sequence
accatggccaacaacgaaggacttt

SEQ ID NO: 145701 - DNA, 25 bp, Probe Sequence
accaggtcccagagaagcgagcctt

SEQ ID NO: 145702 - DNA, 25 bp, Probe Sequence
accagcgtcctcttaaaagatgcct

SEQ ID NO: 145703 - DNA, 25 bp, Probe Sequence
accaggctacactgacaggaagctc

SEQ ID NO: 145704 - DNA, 25 bp, Probe Sequence
accacctcaatctgacatagagaca

SEQ ID NO: 145705 - DNA, 25 bp, Probe Sequence
accaccgacaatgacatcgcactgc

SEQ ID NO: 145706 - DNA, 25 bp, Probe Sequence
accacagtagtattagcagtgcctg

SEQ ID NO: 145707 - DNA, 25 bp, Probe Sequence
accagcagtttatgagagtgaccct

SEQ ID NO: 145708 - DNA, 25 bp, Probe Sequence
accagaacacatttgggtattcctg

SEQ ID NO: 145709 - DNA, 25 bp, Probe Sequence
accagacaccacatggtacattcct

SEQ ID NO: 145710 - DNA, 25 bp, Probe Sequence
accaaaccaaagtctgacattctga

SEQ ID NO: 145711 - DNA, 25 bp, Probe Sequence
accagatccgccagacaatctttga

SEQ ID NO: 145712 - DNA, 25 bp, Probe Sequence
accagatccgccagacaatctttga

SEQ ID NO: 145713 - DNA, 25 bp, Probe Sequence
accagatccgcctaaccaatgtggc

SEQ ID NO: 145714 - DNA, 25 bp, Probe Sequence
acctattccctatgaattcatggca

SEQ ID NO: 145715 - DNA, 25 bp, Probe Sequence
accaggtgtccctgaattctggctc

SEQ ID NO: 145716 - DNA, 25 bp, Probe Sequence
accaggtgtccctgaattctggctc

SEQ ID NO: 145717 - DNA, 25 bp, Probe Sequence
accaggtgtccctgaattctggcta

SEQ ID NO: 145718 - DNA, 25 bp, Probe Sequence
accagtttgccctggagttgagcaa

SEQ ID NO: 145719 - DNA, 25 bp, Probe Sequence
accagctttaacacggtggacgagt

SEQ ID NO: 145720 - DNA, 25 bp, Probe Sequence
acccttctaaaatcagtgaatctag

SEQ ID NO: 145721 - DNA, 25 bp, Probe Sequence
accacccaatgaaaaaaggatctgg

SEQ ID NO: 145722 - DNA, 25 bp, Probe Sequence
actcccaaattaaaacacagttgtg

SEQ ID NO: 145723 - DNA, 25 bp, Probe Sequence
acctggtaattatcctcaagttgtg

SEQ ID NO: 145724 - DNA, 25 bp, Probe Sequence
accagttgaaattcagcccaatttg

SEQ ID NO: 145725 - DNA, 25 bp, Probe Sequence
accatttcatacttcaactaattaa

SEQ ID NO: 145726 - DNA, 25 bp, Probe Sequence
acctattcatgagtattattgaaac

SEQ ID NO: 145727 - DNA, 25 bp, Probe Sequence
acctatttgctgatctagtaacttg

SEQ ID NO: 145728 - DNA, 25 bp, Probe Sequence
acctatctctcttttttaagtatgg

SEQ ID NO: 145729 - DNA, 25 bp, Probe Sequence
accttgtcactgctgggccaagaag

SEQ ID NO: 145730 - DNA, 25 bp, Probe Sequence
acctattacggtcctactgagcaaa

SEQ ID NO: 145731 - DNA, 25 bp, Probe Sequence
accaactcatacacctcctatgaaa

SEQ ID NO: 145732 - DNA, 25 bp, Probe Sequence
accaactcatacacctcctatgaaa

SEQ ID NO: 145733 - DNA, 25 bp, Probe Sequence
accaactgccacaataccaactaaa

SEQ ID NO: 145734 - DNA, 25 bp, Probe Sequence
acctatcccctgtgtcaacaatgaa

SEQ ID NO: 145735 - DNA, 25 bp, Probe Sequence
accctccagccagaggaactctaaa

SEQ ID NO: 145736 - DNA, 25 bp, Probe Sequence
acccccagaaaagctcactctaaat

SEQ ID NO: 145737 - DNA, 25 bp, Probe Sequence
accaccacacatcacaggctgattt

SEQ ID NO: 145738 - DNA, 25 bp, Probe Sequence
accaaagagctaaagtctgatctgt

SEQ ID NO: 145739 - DNA, 25 bp, Probe Sequence
accaccaggtagacagcgcaatctg

SEQ ID NO: 145740 - DNA, 25 bp, Probe Sequence
accacacgcacttatcaggaacgcc

SEQ ID NO: 145741 - DNA, 25 bp, Probe Sequence
accagacacactgattggaactgta

SEQ ID NO: 145742 - DNA, 25 bp, Probe Sequence
accaacaccttaatggtggctctga

SEQ ID NO: 145743 - DNA, 25 bp, Probe Sequence
acgacgccctgtatgagtacctgcg

SEQ ID NO: 145744 - DNA, 25 bp, Probe Sequence
accacccactatatgagaaccgaga

SEQ ID NO: 145745 - DNA, 25 bp, Probe Sequence
accaaactctatctgaaatcccaac

SEQ ID NO: 145746 - DNA, 25 bp, Probe Sequence
accagacacgtacaaaatccagcta

SEQ ID NO: 145747 - DNA, 25 bp, Probe Sequence
accagtacagtaccataagtagaat

SEQ ID NO: 145748 - DNA, 25 bp, Probe Sequence
accagtacaagagcatccctgtgga

SEQ ID NO: 145749 - DNA, 25 bp, Probe Sequence
accgtacctgggagcttctggataa

SEQ ID NO: 145750 - DNA, 25 bp, Probe Sequence
accgttctttggagcattgttctaa

SEQ ID NO: 145751 - DNA, 25 bp, Probe Sequence
accgtgttattggaagtggttgcaa

SEQ ID NO: 145752 - DNA, 25 bp, Probe Sequence
accttggtatctgaagtttccctct

SEQ ID NO: 145753 - DNA, 25 bp, Probe Sequence
accagtggctgaatctactttctcc

SEQ ID NO: 145754 - DNA, 25 bp, Probe Sequence
accagaggtctggtatctacactcc

SEQ ID NO: 145755 - DNA, 25 bp, Probe Sequence
accgcggatcgtgcagaaactcgct

SEQ ID NO: 145756 - DNA, 25 bp, Probe Sequence
accagcagcaattgtaagcaaatct

SEQ ID NO: 145757 - DNA, 25 bp, Probe Sequence
accacagcagttgaaaagactccaa

SEQ ID NO: 145758 - DNA, 25 bp, Probe Sequence
accacactgtgggtgaaggcctcta

SEQ ID NO: 145759 - DNA, 25 bp, Probe Sequence
accaccatggaccagaagtctctct

SEQ ID NO: 145760 - DNA, 25 bp, Probe Sequence
accacctgagaccatcgatttctca

SEQ ID NO: 145761 - DNA, 25 bp, Probe Sequence
accacgtaacgtagcatatgatgta

SEQ ID NO: 145762 - DNA, 25 bp, Probe Sequence
accacgtaacgtagcatatgatgta

SEQ ID NO: 145763 - DNA, 25 bp, Probe Sequence
acctctgtacaggctatctatgtgc

SEQ ID NO: 145764 - DNA, 25 bp, Probe Sequence
accattggacagtctccctgatgga

SEQ ID NO: 145765 - DNA, 25 bp, Probe Sequence
accattggtaacccagagtgctgat

SEQ ID NO: 145766 - DNA, 25 bp, Probe Sequence
accatatgtgtgtgcctaggtcctc

SEQ ID NO: 145767 - DNA, 25 bp, Probe Sequence
accatatgtgtgtgcctaggtcctc

SEQ ID NO: 145768 - DNA, 25 bp, Probe Sequence
acctttgcagatacccataacctat

SEQ ID NO: 145769 - DNA, 25 bp, Probe Sequence
acctttcaatcggccactggccatt

SEQ ID NO: 145770 - DNA, 25 bp, Probe Sequence
accatttagtcatctatccgttctt

SEQ ID NO: 145771 - DNA, 25 bp, Probe Sequence
accatttgagttgcccatcttgttt

SEQ ID NO: 145772 - DNA, 25 bp, Probe Sequence
accagttgcgaagtccttttgagtt

SEQ ID NO: 145773 - DNA, 25 bp, Probe Sequence
accgtggcgaaagtcttgttaatgt

SEQ ID NO: 145774 - DNA, 25 bp, Probe Sequence
acgccgtccattttcttatctatgg

SEQ ID NO: 145775 - DNA, 25 bp, Probe Sequence
actggatatacgttaattatccggg

SEQ ID NO: 145776 - DNA, 25 bp, Probe Sequence
acggtacacgactcagtatccatgc

SEQ ID NO: 145777 - DNA, 25 bp, Probe Sequence
accgtgaccgagtgactgcactcca

SEQ ID NO: 145778 - DNA, 25 bp, Probe Sequence
accttaagaagctgattgcagccca

SEQ ID NO: 145779 - DNA, 25 bp, Probe Sequence
accactgaagaacttttccatgcaa

SEQ ID NO: 145780 - DNA, 25 bp, Probe Sequence
accagtgacatgaaaattttgagca

SEQ ID NO: 145781 - DNA, 25 bp, Probe Sequence
accagctcaagacattttggaggat

SEQ ID NO: 145782 - DNA, 25 bp, Probe Sequence
accagctgaataccttaaggaggac

SEQ ID NO: 145783 - DNA, 25 bp, Probe Sequence
accaggcaagcatcttaagaggggc

SEQ ID NO: 145784 - DNA, 25 bp, Probe Sequence
accagatcgagctacctaagaacag

SEQ ID NO: 145785 - DNA, 25 bp, Probe Sequence
accactgcaatcttcctaggaacaa

SEQ ID NO: 145786 - DNA, 25 bp, Probe Sequence
accagctcaaattccgagtgcagaa

SEQ ID NO: 145787 - DNA, 25 bp, Probe Sequence
accactaagacttctgactccaatt

SEQ ID NO: 145788 - DNA, 25 bp, Probe Sequence
acctcccgaatcttgaatccagtga

SEQ ID NO: 145789 - DNA, 25 bp, Probe Sequence
acctggagcggataaattcttggcg

SEQ ID NO: 145790 - DNA, 25 bp, Probe Sequence
accatggcacgagaacaactacgtg

SEQ ID NO: 145791 - DNA, 25 bp, Probe Sequence
accatctcaagggaatacacataca

SEQ ID NO: 145792 - DNA, 25 bp, Probe Sequence
accactcagtagaaaccatcatagc

SEQ ID NO: 145793 - DNA, 25 bp, Probe Sequence
accaggcattaaaacacgcatagaa

SEQ ID NO: 145794 - DNA, 25 bp, Probe Sequence
accagtgcataacaccacactcagc

SEQ ID NO: 145795 - DNA, 25 bp, Probe Sequence
accagctggcagggtgccaaccatg

SEQ ID NO: 145796 - DNA, 25 bp, Probe Sequence
accactgccagggatcaagatcttg

SEQ ID NO: 145797 - DNA, 25 bp, Probe Sequence
accactcaagtggttggcatcttga

SEQ ID NO: 145798 - DNA, 25 bp, Probe Sequence
accacctactggcattccttgaaat

SEQ ID NO: 145799 - DNA, 25 bp, Probe Sequence
accaccttttccttatactgtatat

SEQ ID NO: 145800 - DNA, 25 bp, Probe Sequence
accacacttggtccacttacttata

SEQ ID NO: 145801 - DNA, 25 bp, Probe Sequence
accaccctctggaatttatgctttt

SEQ ID NO: 145802 - DNA, 25 bp, Probe Sequence
accacctttgagaagtctctgttga

SEQ ID NO: 145803 - DNA, 25 bp, Probe Sequence
accacacagttctcattactgttat

SEQ ID NO: 145804 - DNA, 25 bp, Probe Sequence
accatacaactctcatttccttagt

SEQ ID NO: 145805 - DNA, 25 bp, Probe Sequence
acctgacgacatttttcctcgatta

SEQ ID NO: 145806 - DNA, 25 bp, Probe Sequence
accaggataatttttctctttacag

SEQ ID NO: 145807 - DNA, 25 bp, Probe Sequence
accatggtatatcatttcctcttca

SEQ ID NO: 145808 - DNA, 25 bp, Probe Sequence
accattgttactatctcctttgagc

SEQ ID NO: 145809 - DNA, 25 bp, Probe Sequence
accatgtattcccttatcttttact

SEQ ID NO: 145810 - DNA, 25 bp, Probe Sequence
accatgtattaaccacacttaaact

SEQ ID NO: 145811 - DNA, 25 bp, Probe Sequence
accatttgtattcaacgtagtacta

SEQ ID NO: 145812 - DNA, 25 bp, Probe Sequence
accatctcatggactgaaaggtaga

SEQ ID NO: 145813 - DNA, 25 bp, Probe Sequence
accacatctagtaaagggtgccatg

SEQ ID NO: 145814 - DNA, 25 bp, Probe Sequence
accacacttgctaaaaagtagctat

SEQ ID NO: 145815 - DNA, 25 bp, Probe Sequence
accacagtctggagtgatagctact

SEQ ID NO: 145816 - DNA, 25 bp, Probe Sequence
accactggtggtgtatagcgcctat

SEQ ID NO: 145817 - DNA, 25 bp, Probe Sequence
accagtggtctggaaacagcttgtt

SEQ ID NO: 145818 - DNA, 25 bp, Probe Sequence
accagatgacacatgaaagcagctc

SEQ ID NO: 145819 - DNA, 25 bp, Probe Sequence
accatgagaatttgcaacaggggag

SEQ ID NO: 145820 - DNA, 25 bp, Probe Sequence
acctaactgttaccatctgactgag

SEQ ID NO: 145821 - DNA, 25 bp, Probe Sequence
accttaattttgaatggcagcatga

SEQ ID NO: 145822 - DNA, 25 bp, Probe Sequence
accttattccttacatctggcaaac

SEQ ID NO: 145823 - DNA, 25 bp, Probe Sequence
accttacctacttctctggtacaag

SEQ ID NO: 145824 - DNA, 25 bp, Probe Sequence
acctatttccacagttggtacaaga

SEQ ID NO: 145825 - DNA, 25 bp, Probe Sequence
accattgtgactattgttggtcaaa

SEQ ID NO: 145826 - DNA, 25 bp, Probe Sequence
accttgtgacatttggcttaccagc

SEQ ID NO: 145827 - DNA, 25 bp, Probe Sequence
accatactaatcttagttaccgcta

SEQ ID NO: 145828 - DNA, 25 bp, Probe Sequence
accatgtcttatcagtggtccctgt

SEQ ID NO: 145829 - DNA, 25 bp, Probe Sequence
accatgtgttcttggggtcctggtt

SEQ ID NO: 145830 - DNA, 25 bp, Probe Sequence
accattgttttagcagtgcgtgttc

SEQ ID NO: 145831 - DNA, 25 bp, Probe Sequence
accatggtcctttaaggcacgctcc

SEQ ID NO: 145832 - DNA, 25 bp, Probe Sequence
acctctgtggtccgtaggagccact

SEQ ID NO: 145833 - DNA, 25 bp, Probe Sequence
accattgaggacctgtcaggctaca

SEQ ID NO: 145834 - DNA, 25 bp, Probe Sequence
accattgatattggggaggctccaa

SEQ ID NO: 145835 - DNA, 25 bp, Probe Sequence
accattgtttactgaccagccagag

SEQ ID NO: 145836 - DNA, 25 bp, Probe Sequence
accgctggatgatcaagacggccaa

SEQ ID NO: 145837 - DNA, 25 bp, Probe Sequence
accacattgtattacagagacagcc

SEQ ID NO: 145838 - DNA, 25 bp, Probe Sequence
accactttgataaaaatcagcatca

SEQ ID NO: 145839 - DNA, 25 bp, Probe Sequence
accagccgttaaaaatgagtgacca

SEQ ID NO: 145840 - DNA, 25 bp, Probe Sequence
accagcctgcttacagggagcgtga

SEQ ID NO: 145841 - DNA, 25 bp, Probe Sequence
accagccctatgtggagagcgacag

SEQ ID NO: 145842 - DNA, 25 bp, Probe Sequence
accaccctataatgagagagaaatc

SEQ ID NO: 145843 - DNA, 25 bp, Probe Sequence
acctcaaaataatgtggctgtcaac

SEQ ID NO: 145844 - DNA, 25 bp, Probe Sequence
accatagaatatagtttgtgtgtca

SEQ ID NO: 145845 - DNA, 25 bp, Probe Sequence
accactcctttttgtgtgtgtgcac

SEQ ID NO: 145846 - DNA, 25 bp, Probe Sequence
accagatcactatgttgtagttggg

SEQ ID NO: 145847 - DNA, 25 bp, Probe Sequence
accagaactccagtttcactgggca

SEQ ID NO: 145848 - DNA, 25 bp, Probe Sequence
accattactgccaagctctacgggc

SEQ ID NO: 145849 - DNA, 25 bp, Probe Sequence
accatggaccagaagtctctctggg

SEQ ID NO: 145850 - DNA, 25 bp, Probe Sequence
accagggccaataggcattcctggc

SEQ ID NO: 145851 - DNA, 25 bp, Probe Sequence
accagcagttcattaggctttctgt

SEQ ID NO: 145852 - DNA, 25 bp, Probe Sequence
accagcagttcctggcaggcactgt

SEQ ID NO: 145853 - DNA, 25 bp, Probe Sequence
accataagctacaggcacgcactga

SEQ ID NO: 145854 - DNA, 25 bp, Probe Sequence
accagaacatgtaggtccccttgtg

SEQ ID NO: 145855 - DNA, 25 bp, Probe Sequence
accagcaacagaaggtgcagaccgt

SEQ ID NO: 145856 - DNA, 25 bp, Probe Sequence
accatgcacacaaaggagagaccgg

SEQ ID NO: 145857 - DNA, 25 bp, Probe Sequence
accatgcaatccagtgaggcttcag

SEQ ID NO: 145858 - DNA, 25 bp, Probe Sequence
accagtatcagcagtatgcccagca

SEQ ID NO: 145859 - DNA, 25 bp, Probe Sequence
accagtattatggcttctcgcatac

SEQ ID NO: 145860 - DNA, 25 bp, Probe Sequence
accatggttttcttcaagatatctt

SEQ ID NO: 145861 - DNA, 25 bp, Probe Sequence
accacgtgctatccagtaatatact

SEQ ID NO: 145862 - DNA, 25 bp, Probe Sequence
accactgattgccttgttattacta

SEQ ID NO: 145863 - DNA, 25 bp, Probe Sequence
accagctgcagggtctgcttttact

SEQ ID NO: 145864 - DNA, 25 bp, Probe Sequence
accactgcggttcattcatacaatg

SEQ ID NO: 145865 - DNA, 25 bp, Probe Sequence
accactgggagcacaatgcccacat

SEQ ID NO: 145866 - DNA, 25 bp, Probe Sequence
accactgaggtgttcttgccaaaaa

SEQ ID NO: 145867 - DNA, 25 bp, Probe Sequence
acgtctaactggacttcccaagata

SEQ ID NO: 145868 - DNA, 25 bp, Probe Sequence
accattaactggcctgatctaacaa

SEQ ID NO: 145869 - DNA, 25 bp, Probe Sequence
acctttcacttcgtatccaacaaat

SEQ ID NO: 145870 - DNA, 25 bp, Probe Sequence
acctttacagacctatccaagctca

SEQ ID NO: 145871 - DNA, 25 bp, Probe Sequence
accgttaagagacatccagcaggag

SEQ ID NO: 145872 - DNA, 25 bp, Probe Sequence
accggccaggaggcttcaagaggag

SEQ ID NO: 145873 - DNA, 25 bp, Probe Sequence
accacccggggctgctgctgatgga

SEQ ID NO: 145874 - DNA, 25 bp, Probe Sequence
accacctgcaggctgtatggcgagg

SEQ ID NO: 145875 - DNA, 25 bp, Probe Sequence
accacctggctgctattgcaggagg

SEQ ID NO: 145876 - DNA, 25 bp, Probe Sequence
tttgatgctgccacttatctggccc

SEQ ID NO: 145877 - DNA, 25 bp, Probe Sequence
accagctgcgggcgatggagcgcag

SEQ ID NO: 145878 - DNA, 25 bp, Probe Sequence
accagccctgatccagatgcagagg

SEQ ID NO: 145879 - DNA, 25 bp, Probe Sequence
accagacgattgactcagcagaggc

SEQ ID NO: 145880 - DNA, 25 bp, Probe Sequence
accaggcttctgaagctgctagagc

SEQ ID NO: 145881 - DNA, 25 bp, Probe Sequence
accgtgccctgaggttggacgtggg

SEQ ID NO: 145882 - DNA, 25 bp, Probe Sequence
accgtgccctgaggttggacgtggg

SEQ ID NO: 145883 - DNA, 25 bp, Probe Sequence
accagcgcccagcgttagggctgga

SEQ ID NO: 145884 - DNA, 25 bp, Probe Sequence
accatcaccctgctgatgtaggaca

SEQ ID NO: 145885 - DNA, 25 bp, Probe Sequence
acctcaccgcagaggtacttgaact

SEQ ID NO: 145886 - DNA, 25 bp, Probe Sequence
acctcaacaagtttctaagtatagt

SEQ ID NO: 145887 - DNA, 25 bp, Probe Sequence
accattccatatctgttaagtatac

SEQ ID NO: 145888 - DNA, 25 bp, Probe Sequence
accatatcgattcttaataaacaca

SEQ ID NO: 145889 - DNA, 25 bp, Probe Sequence
accaggccttcattaaaactcaaca

SEQ ID NO: 145890 - DNA, 25 bp, Probe Sequence
accatgatgtctgagtaaaactaat

SEQ ID NO: 145891 - DNA, 25 bp, Probe Sequence
accagtgccatgcagccaacatggt

SEQ ID NO: 145892 - DNA, 25 bp, Probe Sequence
accaggtctggagcagtgcagttgt

SEQ ID NO: 145893 - DNA, 25 bp, Probe Sequence
accagccatttagcctgcagtgtga

SEQ ID NO: 145894 - DNA, 25 bp, Probe Sequence
accataatgtcatgaactgaattga

SEQ ID NO: 145895 - DNA, 25 bp, Probe Sequence
accttttctgggtcatgaatagcac

SEQ ID NO: 145896 - DNA, 25 bp, Probe Sequence
accagcgtgttgggttgaattgcac

SEQ ID NO: 145897 - DNA, 25 bp, Probe Sequence
accagcaattctgagctatgatttc

SEQ ID NO: 145898 - DNA, 25 bp, Probe Sequence
accagaacatcaacagtgctgtttc

SEQ ID NO: 145899 - DNA, 25 bp, Probe Sequence
accgaattcaagcgtggtctgccac

SEQ ID NO: 145900 - DNA, 25 bp, Probe Sequence
accagctttaaaggctgtgttgcta

SEQ ID NO: 145901 - DNA, 25 bp, Probe Sequence
accagctttagccaactttctgtga

SEQ ID NO: 145902 - DNA, 25 bp, Probe Sequence
accttttggctgcagtttcatgtta

SEQ ID NO: 145903 - DNA, 25 bp, Probe Sequence
accttctccctgcagtatggcagtg

SEQ ID NO: 145904 - DNA, 25 bp, Probe Sequence
accttatcctagaacttgaggctgg

SEQ ID NO: 145905 - DNA, 25 bp, Probe Sequence
accattacctcatcctgtgaggcct

SEQ ID NO: 145906 - DNA, 25 bp, Probe Sequence
accattgtcttgttctgtgatgagg

SEQ ID NO: 145907 - DNA, 25 bp, Probe Sequence
accagtgtctgtgacgagctcagga

SEQ ID NO: 145908 - DNA, 25 bp, Probe Sequence
accagtctctctcagaggctacaga

SEQ ID NO: 145909 - DNA, 25 bp, Probe Sequence
accagtttctgatgtttcaggcagg

SEQ ID NO: 145910 - DNA, 25 bp, Probe Sequence
accatgtttgtttttgaagctcagg

SEQ ID NO: 145911 - DNA, 25 bp, Probe Sequence
acctggttatgttgttattctcgga

SEQ ID NO: 145912 - DNA, 25 bp, Probe Sequence
acctatttctgatcctgactttgga

SEQ ID NO: 145913 - DNA, 25 bp, Probe Sequence
accttttcttttcagcttgattgca

SEQ ID NO: 145914 - DNA, 25 bp, Probe Sequence
acctatgaacgtaatccctttgcta

SEQ ID NO: 145915 - DNA, 25 bp, Probe Sequence
acctacatggtgtcttacctttgca

SEQ ID NO: 145916 - DNA, 25 bp, Probe Sequence
acctgtccagatggttaccatttgc

SEQ ID NO: 145917 - DNA, 25 bp, Probe Sequence
acctgcacacgaatgtttacattac

SEQ ID NO: 145918 - DNA, 25 bp, Probe Sequence
accataaccatactaccatcaatac

SEQ ID NO: 145919 - DNA, 25 bp, Probe Sequence
acctatgaactacggactgcactga

SEQ ID NO: 145920 - DNA, 25 bp, Probe Sequence
acctatggactgtcctactggcaga

SEQ ID NO: 145921 - DNA, 25 bp, Probe Sequence
accacggactgtggtgagcggcctg

SEQ ID NO: 145922 - DNA, 25 bp, Probe Sequence
accaccatgtgagtggtagccgccg

SEQ ID NO: 145923 - DNA, 25 bp, Probe Sequence
accatggagtctggcagtaccgccg

SEQ ID NO: 145924 - DNA, 25 bp, Probe Sequence
accatgtaccctggcattgccgaca

SEQ ID NO: 145925 - DNA, 25 bp, Probe Sequence
acctgaaccctgccattctaaaatt

SEQ ID NO: 145926 - DNA, 25 bp, Probe Sequence
accatatttccttctccaaaaagct

SEQ ID NO: 145927 - DNA, 25 bp, Probe Sequence
accaccttcactgtgacgaaatact

SEQ ID NO: 145928 - DNA, 25 bp, Probe Sequence
accatcctaagagctgaaaaatact

SEQ ID NO: 145929 - DNA, 25 bp, Probe Sequence
accatgtctaagcaccatagaatat

SEQ ID NO: 145930 - DNA, 25 bp, Probe Sequence
accagttaatctttctccaatgatc

SEQ ID NO: 145931 - DNA, 25 bp, Probe Sequence
acgagaaacactgcttctccaggcc

SEQ ID NO: 145932 - DNA, 25 bp, Probe Sequence
accagaaacactgatgtcccactcc

SEQ ID NO: 145933 - DNA, 25 bp, Probe Sequence
accgaataccaattcaaccaccaag

SEQ ID NO: 145934 - DNA, 25 bp, Probe Sequence
taccttaaccagtaacattcccgag

SEQ ID NO: 145935 - DNA, 25 bp, Probe Sequence
accgtagtaagaggacttccacgtg

SEQ ID NO: 145936 - DNA, 25 bp, Probe Sequence
accagtagttaggtgtttgcccttg

SEQ ID NO: 145937 - DNA, 25 bp, Probe Sequence
accagcggatgttggtggttctcct

SEQ ID NO: 145938 - DNA, 25 bp, Probe Sequence
accagcaggagttcgtcagagctct

SEQ ID NO: 145939 - DNA, 25 bp, Probe Sequence
accagccatgaattcagtgaactct

SEQ ID NO: 145940 - DNA, 25 bp, Probe Sequence
accagactgccatcagtgagaatta

SEQ ID NO: 145941 - DNA, 25 bp, Probe Sequence
accagcctgccatggcaagggctaa

SEQ ID NO: 145942 - DNA, 25 bp, Probe Sequence
accagcaatggatggcaggggagag

SEQ ID NO: 145943 - DNA, 25 bp, Probe Sequence
acctgcgtgaatatcggggcaagtt

SEQ ID NO: 145944 - DNA, 25 bp, Probe Sequence
acctgaggacaaagctggcgctcaa

SEQ ID NO: 145945 - DNA, 25 bp, Probe Sequence
acgctggcatcagctatcttagctc

SEQ ID NO: 145946 - DNA, 25 bp, Probe Sequence
accatggacacctcctgagttggat

SEQ ID NO: 145947 - DNA, 25 bp, Probe Sequence
accaggacctcagcaatgacatctg

SEQ ID NO: 145948 - DNA, 25 bp, Probe Sequence
acctggacttgtgtaactcgaccca

SEQ ID NO: 145949 - DNA, 25 bp, Probe Sequence
acctggatatggagtacttcggcac

SEQ ID NO: 145950 - DNA, 25 bp, Probe Sequence
acctctaaggtgattcatgttgggc

SEQ ID NO: 145951 - DNA, 25 bp, Probe Sequence
accagcccgagtctaggtctgggcc

SEQ ID NO: 145952 - DNA, 25 bp, Probe Sequence
ccttgtaggagtataggccggtcta

SEQ ID NO: 145953 - DNA, 25 bp, Probe Sequence
actctgtacaggatggggccgtcct

SEQ ID NO: 145954 - DNA, 25 bp, Probe Sequence
accatgttctggagagtggccctgc

SEQ ID NO: 145955 - DNA, 25 bp, Probe Sequence
accagtattagaggcaccgcctgcc

SEQ ID NO: 145956 - DNA, 25 bp, Probe Sequence
accagtgattacacctggccatccc

SEQ ID NO: 145957 - DNA, 25 bp, Probe Sequence
accaggtttcattttgggccttgct

SEQ ID NO: 145958 - DNA, 25 bp, Probe Sequence
accagagaactattactaggccttg

SEQ ID NO: 145959 - DNA, 25 bp, Probe Sequence
acctggtactaacgtaggcagctgc

SEQ ID NO: 145960 - DNA, 25 bp, Probe Sequence
acctcgtaggaacgctgagctgcct

SEQ ID NO: 145961 - DNA, 25 bp, Probe Sequence
accatttggctggtcaggcagctcc

SEQ ID NO: 145962 - DNA, 25 bp, Probe Sequence
accattgatgccccagggcagctgc

SEQ ID NO: 145963 - DNA, 25 bp, Probe Sequence
accatcttgccagcaggtagctgaa

SEQ ID NO: 145964 - DNA, 25 bp, Probe Sequence
accagctctggaggcaggtgagtca

SEQ ID NO: 145965 - DNA, 25 bp, Probe Sequence
accatctcgtggccagtggcagtga

SEQ ID NO: 145966 - DNA, 25 bp, Probe Sequence
accagctagggccagtgacagttgc

SEQ ID NO: 145967 - DNA, 25 bp, Probe Sequence
accagcttctgtcgcagcgactttg

SEQ ID NO: 145968 - DNA, 25 bp, Probe Sequence
acgccatgattgctgctggacttgt

SEQ ID NO: 145969 - DNA, 25 bp, Probe Sequence
accatgaatgtgtgctgacttttat

SEQ ID NO: 145970 - DNA, 25 bp, Probe Sequence
accatgactctgtggataagcttgt

SEQ ID NO: 145971 - DNA, 25 bp, Probe Sequence
accagctctgtgtaggtaaccagat

SEQ ID NO: 145972 - DNA, 25 bp, Probe Sequence
accgtcctctaggtaactcaagtgt

SEQ ID NO: 145973 - DNA, 25 bp, Probe Sequence
acctgtttccaggacaaccaagcat

SEQ ID NO: 145974 - DNA, 25 bp, Probe Sequence
acctgtttccaggacaaccaagcat

SEQ ID NO: 145975 - DNA, 25 bp, Probe Sequence
acctactatctagcaataatgaatt

SEQ ID NO: 145976 - DNA, 25 bp, Probe Sequence
accatactaccatcaatactcatca

SEQ ID NO: 145977 - DNA, 25 bp, Probe Sequence
accatgtgtacaaaatctacttcat

SEQ ID NO: 145978 - DNA, 25 bp, Probe Sequence
accattaaatggatctttcatcttt

SEQ ID NO: 145979 - DNA, 25 bp, Probe Sequence
accattccatatcagaattttcctt

SEQ ID NO: 145980 - DNA, 25 bp, Probe Sequence
accatatccatgttgctgacttttc

SEQ ID NO: 145981 - DNA, 25 bp, Probe Sequence
accatatccatgttgctgacttttc

SEQ ID NO: 145982 - DNA, 25 bp, Probe Sequence
accattcatatctggagtctctgac

SEQ ID NO: 145983 - DNA, 25 bp, Probe Sequence
accatatcattcttcacagtatctg

SEQ ID NO: 145984 - DNA, 25 bp, Probe Sequence
accattttgctatctgtttgtactt

SEQ ID NO: 145985 - DNA, 25 bp, Probe Sequence
acctgttaaatttttctggacaatg

SEQ ID NO: 145986 - DNA, 25 bp, Probe Sequence
acctgtaaaataccttgtgccctat

SEQ ID NO: 145987 - DNA, 25 bp, Probe Sequence
acctgaaattcttggccagtcctct

SEQ ID NO: 145988 - DNA, 25 bp, Probe Sequence
acctaaaatctaggacgaccagtca

SEQ ID NO: 145989 - DNA, 25 bp, Probe Sequence
accagaaaattcaggtgactcctcc

SEQ ID NO: 145990 - DNA, 25 bp, Probe Sequence
accaggaaactcagctagatccccc

SEQ ID NO: 145991 - DNA, 25 bp, Probe Sequence
acccagaagactgtggatggcccct

SEQ ID NO: 145992 - DNA, 25 bp, Probe Sequence
acccagaagactgtggatggcccct

SEQ ID NO: 145993 - DNA, 25 bp, Probe Sequence
accatcaaggcacgttggagctttc

SEQ ID NO: 145994 - DNA, 25 bp, Probe Sequence
accaccagggccaataggcattcct

SEQ ID NO: 145995 - DNA, 25 bp, Probe Sequence
acctacagccccaatactgcatatg

SEQ ID NO: 145996 - DNA, 25 bp, Probe Sequence
acctaccatccgcaagcatgctaat

SEQ ID NO: 145997 - DNA, 25 bp, Probe Sequence
acctatacacaaccaagtgaaagga

SEQ ID NO: 145998 - DNA, 25 bp, Probe Sequence
accatgatcccaatccaagtgaata

SEQ ID NO: 145999 - DNA, 25 bp, Probe Sequence
accagaaacatgatccattgaagca

SEQ ID NO: 146000 - DNA, 25 bp, Probe Sequence
accagaaacacttcgctgctgcaag

SEQ ID NO: 146001 - DNA, 25 bp, Probe Sequence
acgagaacaactacgtgatgaatgc

SEQ ID NO: 146002 - DNA, 25 bp, Probe Sequence
acgagaacaagctatcagggctgct

SEQ ID NO: 146003 - DNA, 25 bp, Probe Sequence
accagaacacagtccgtgctgtgct

SEQ ID NO: 146004 - DNA, 25 bp, Probe Sequence
accagcaacatgttctgtgtgggct

SEQ ID NO: 146005 - DNA, 25 bp, Probe Sequence
accagcagattggtgtctgatgaga

SEQ ID NO: 146006 - DNA, 25 bp, Probe Sequence
accatgcgcagggttctgatgtgtc

SEQ ID NO: 146007 - DNA, 25 bp, Probe Sequence
accagccctcgtggctgcaatatta

SEQ ID NO: 146008 - DNA, 25 bp, Probe Sequence
acctgcccctggggctctagtattt

SEQ ID NO: 146009 - DNA, 25 bp, Probe Sequence
accattcaccgagagcctatatcta

SEQ ID NO: 146010 - DNA, 25 bp, Probe Sequence
accagtacagaatgatcctgaactt

SEQ ID NO: 146011 - DNA, 25 bp, Probe Sequence
accagatactaattgtcttaactct

SEQ ID NO: 146012 - DNA, 25 bp, Probe Sequence
accagtacaacactgtctgattact

SEQ ID NO: 146013 - DNA, 25 bp, Probe Sequence
accagcagaacattcttctcttcaa

SEQ ID NO: 146014 - DNA, 25 bp, Probe Sequence
accaggcaacttctcatgatagcaa

SEQ ID NO: 146015 - DNA, 25 bp, Probe Sequence
accaggcctgttctccatagagagt

SEQ ID NO: 146016 - DNA, 25 bp, Probe Sequence
accagaccattccgcttcaaggcag

SEQ ID NO: 146017 - DNA, 25 bp, Probe Sequence
acctacttctctggtacaagggcaa

SEQ ID NO: 146018 - DNA, 25 bp, Probe Sequence
acctatccacctgacaaagggctga

SEQ ID NO: 146019 - DNA, 25 bp, Probe Sequence
accgacaaccctgagaagtggctgg

SEQ ID NO: 146020 - DNA, 25 bp, Probe Sequence
acccagcaataccataagaattact

SEQ ID NO: 146021 - DNA, 25 bp, Probe Sequence
acagccataaacaacgaaattctca

SEQ ID NO: 146022 - DNA, 25 bp, Probe Sequence
accatcatcaaagaccaaaagtaga

SEQ ID NO: 146023 - DNA, 25 bp, Probe Sequence
accatctcagaacccagcacaaggg

SEQ ID NO: 146024 - DNA, 25 bp, Probe Sequence
accagaatgcagttccagcttagga

SEQ ID NO: 146025 - DNA, 25 bp, Probe Sequence
accagcacaagattccgtgtcactg

SEQ ID NO: 146026 - DNA, 25 bp, Probe Sequence
accagcacaatttgagcattcccat

SEQ ID NO: 146027 - DNA, 25 bp, Probe Sequence
accatcaaggtgtactgccagcgca

SEQ ID NO: 146028 - DNA, 25 bp, Probe Sequence
accatcggttgtttggcagcagctt

SEQ ID NO: 146029 - DNA, 25 bp, Probe Sequence
accaggccaagttcttcgcctgcat

SEQ ID NO: 146030 - DNA, 25 bp, Probe Sequence
accaggccaagttcttcgcctgcat

SEQ ID NO: 146031 - DNA, 25 bp, Probe Sequence
accatggctaacagcttccagctgc

SEQ ID NO: 146032 - DNA, 25 bp, Probe Sequence
accaggctcattttattgccagtgc

SEQ ID NO: 146033 - DNA, 25 bp, Probe Sequence
accagaaagtgtattgccaactttg

SEQ ID NO: 146034 - DNA, 25 bp, Probe Sequence
accagaagccttatttgtgattttg

SEQ ID NO: 146035 - DNA, 25 bp, Probe Sequence
accagctatgccaaaccttggcatt

SEQ ID NO: 146036 - DNA, 25 bp, Probe Sequence
accattagcttcttcctggagcatt

SEQ ID NO: 146037 - DNA, 25 bp, Probe Sequence
accatgttctccacaaggagcttcc

SEQ ID NO: 146038 - DNA, 25 bp, Probe Sequence
accagatgtaacagaagcggttctt

SEQ ID NO: 146039 - DNA, 25 bp, Probe Sequence
accatagtaacaccaagcacgtatt

SEQ ID NO: 146040 - DNA, 25 bp, Probe Sequence
accttggcagaacatgtacgtatta

SEQ ID NO: 146041 - DNA, 25 bp, Probe Sequence
accatatgagtaggtagatacagat

SEQ ID NO: 146042 - DNA, 25 bp, Probe Sequence
acctcaggtgagttacttaaggcta

SEQ ID NO: 146043 - DNA, 25 bp, Probe Sequence
acctcgttggtgaactacaacctct

SEQ ID NO: 146044 - DNA, 25 bp, Probe Sequence
acctcctagaccagtaaagccagat

SEQ ID NO: 146045 - DNA, 25 bp, Probe Sequence
gaccctgaaacctggcaaagtcgat

SEQ ID NO: 146046 - DNA, 25 bp, Probe Sequence
acctggaacctctgggaggtctgca

SEQ ID NO: 146047 - DNA, 25 bp, Probe Sequence
accagagccccaagggtagggctgc

SEQ ID NO: 146048 - DNA, 25 bp, Probe Sequence
accagctgcctcccaaaggaggggc

SEQ ID NO: 146049 - DNA, 25 bp, Probe Sequence
accgtccggctggaacgcggagtgt

SEQ ID NO: 146050 - DNA, 25 bp, Probe Sequence
acctgaccaggtgacgtgggcgtgg

SEQ ID NO: 146051 - DNA, 25 bp, Probe Sequence
accaggccttgaaagcgctgcgggc

SEQ ID NO: 146052 - DNA, 25 bp, Probe Sequence
accatgtgtcttctaggtgctggcc

SEQ ID NO: 146053 - DNA, 25 bp, Probe Sequence
accatggactctgtcaggtctggac

SEQ ID NO: 146054 - DNA, 25 bp, Probe Sequence
acctggcacttggaactgatgcaga

SEQ ID NO: 146055 - DNA, 25 bp, Probe Sequence
accgtacatagaaggtcatgcagat

SEQ ID NO: 146056 - DNA, 25 bp, Probe Sequence
acctgaacataaaggccatggctga

SEQ ID NO: 146057 - DNA, 25 bp, Probe Sequence
acctaagtcagaccagctacggagg

SEQ ID NO: 146058 - DNA, 25 bp, Probe Sequence
accatattgtcaaaatagtccacca

SEQ ID NO: 146059 - DNA, 25 bp, Probe Sequence
accatcatttacgaagacccacagc

SEQ ID NO: 146060 - DNA, 25 bp, Probe Sequence
accagatcacgaggggtcccaagtc

SEQ ID NO: 146061 - DNA, 25 bp, Probe Sequence
accagagcctgaggggttgccagag

SEQ ID NO: 146062 - DNA, 25 bp, Probe Sequence
accattccgaggggagtccagaggt

SEQ ID NO: 146063 - DNA, 25 bp, Probe Sequence
accatcaccgtgctggaactggagt

SEQ ID NO: 146064 - DNA, 25 bp, Probe Sequence
acccccaggttgcaactttgagaat

SEQ ID NO: 146065 - DNA, 25 bp, Probe Sequence
cgccccttctctatgaacttaaaat

SEQ ID NO: 146066 - DNA, 25 bp, Probe Sequence
cagccccctccacataaattaagaa

SEQ ID NO: 146067 - DNA, 25 bp, Probe Sequence
accgtacccagcctaaatgctaagc

SEQ ID NO: 146068 - DNA, 25 bp, Probe Sequence
accttggaagcagttagaatctacc

SEQ ID NO: 146069 - DNA, 25 bp, Probe Sequence
accttggcaccagaaacatctacat

SEQ ID NO: 146070 - DNA, 25 bp, Probe Sequence
acctgtagcctgtgaagaaacctta

SEQ ID NO: 146071 - DNA, 25 bp, Probe Sequence
acctgtacggcacgcagggcaacgt

SEQ ID NO: 146072 - DNA, 25 bp, Probe Sequence
acctgctgcatgagaagcggtacct

SEQ ID NO: 146073 - DNA, 25 bp, Probe Sequence
accatgatgctgagcccggaaactc

SEQ ID NO: 146074 - DNA, 25 bp, Probe Sequence
accagttgtggcgtccagaaagctt

SEQ ID NO: 146075 - DNA, 25 bp, Probe Sequence
accagtgtgggcatccagtgagggg

SEQ ID NO: 146076 - DNA, 25 bp, Probe Sequence
accagtgtgggcagttccaagcggg

SEQ ID NO: 146077 - DNA, 25 bp, Probe Sequence
accttctggtgcgcattggcaagca

SEQ ID NO: 146078 - DNA, 25 bp, Probe Sequence
accttctgtgtcggcatgtctaagt

SEQ ID NO: 146079 - DNA, 25 bp, Probe Sequence
accttctgtgtcggcatgtctaagt

SEQ ID NO: 146080 - DNA, 25 bp, Probe Sequence
acctcactgatcgtcaagtcaaaat

SEQ ID NO: 146081 - DNA, 25 bp, Probe Sequence
acctgacgtctaagtgtccagaaag

SEQ ID NO: 146082 - DNA, 25 bp, Probe Sequence
accatgatcttgaaagtgccaaaaa

SEQ ID NO: 146083 - DNA, 25 bp, Probe Sequence
accagactgaatttcctcataaaga

SEQ ID NO: 146084 - DNA, 25 bp, Probe Sequence
acctcactgaaacctatataatgga

SEQ ID NO: 146085 - DNA, 25 bp, Probe Sequence
acctgacaaagggctgatattcaga

SEQ ID NO: 146086 - DNA, 25 bp, Probe Sequence
accttcttgaggtctttctcagaca

SEQ ID NO: 146087 - DNA, 25 bp, Probe Sequence
accatatgataggttatttctctaa

SEQ ID NO: 146088 - DNA, 25 bp, Probe Sequence
acctagacatgtgttctttgcttac

SEQ ID NO: 146089 - DNA, 25 bp, Probe Sequence
acctagcaagtgttttatggggatc

SEQ ID NO: 146090 - DNA, 25 bp, Probe Sequence
acctaacagcagttctttgctaaat

SEQ ID NO: 146091 - DNA, 25 bp, Probe Sequence
acccagaagcaggtcgtctacgaat

SEQ ID NO: 146092 - DNA, 25 bp, Probe Sequence
acctcagattgatatgttatacgta

SEQ ID NO: 146093 - DNA, 25 bp, Probe Sequence
acctctattgccatgaattaagtat

SEQ ID NO: 146094 - DNA, 25 bp, Probe Sequence
acctcagtttcctcatctgcaaaat

SEQ ID NO: 146095 - DNA, 25 bp, Probe Sequence
accatcttttcccacaatcaaatat

SEQ ID NO: 146096 - DNA, 25 bp, Probe Sequence
accatcttcattggcccagtagaaa

SEQ ID NO: 146097 - DNA, 25 bp, Probe Sequence
acctggtttgccacagaacaaagac

SEQ ID NO: 146098 - DNA, 25 bp, Probe Sequence
acctgggtctttgaaatgcttaata

SEQ ID NO: 146099 - DNA, 25 bp, Probe Sequence
accgacggtcctggaaatctcacat

SEQ ID NO: 146100 - DNA, 25 bp, Probe Sequence
accatgcacagagtccttaaaaaat

SEQ ID NO: 146101 - DNA, 25 bp, Probe Sequence
acctgacagcattccaataaagcat

SEQ ID NO: 146102 - DNA, 25 bp, Probe Sequence
accatccactatgcaattagtattc

SEQ ID NO: 146103 - DNA, 25 bp, Probe Sequence
accatccccatggtactgatgcttg

SEQ ID NO: 146104 - DNA, 25 bp, Probe Sequence
actgaccgatcagggaccatttgca

SEQ ID NO: 146105 - DNA, 25 bp, Probe Sequence
accagagagatcggtgaagtcttga

SEQ ID NO: 146106 - DNA, 25 bp, Probe Sequence
accagaggtcgggaggttgagacca

SEQ ID NO: 146107 - DNA, 25 bp, Probe Sequence
acctgaggtgcttggaggtccagac

SEQ ID NO: 146108 - DNA, 25 bp, Probe Sequence
accagagcgtgcacttgtgatccta

SEQ ID NO: 146109 - DNA, 25 bp, Probe Sequence
accaggcctgctgattgcatactgt

SEQ ID NO: 146110 - DNA, 25 bp, Probe Sequence
ccacaccctccaggaagttcaggtc

SEQ ID NO: 146111 - DNA, 25 bp, Probe Sequence
accattcgcatggccaaattctggc

SEQ ID NO: 146112 - DNA, 25 bp, Probe Sequence
accatcccagccggagttggaccgg

SEQ ID NO: 146113 - DNA, 25 bp, Probe Sequence
acctctccttcccgtgtgagaaggg

SEQ ID NO: 146114 - DNA, 25 bp, Probe Sequence
acctctccttcccgtgtgagaaggg

SEQ ID NO: 146115 - DNA, 25 bp, Probe Sequence
acctccttaccgagaacacgtggct

SEQ ID NO: 146116 - DNA, 25 bp, Probe Sequence
acctccttaccgagaacacgtggct

SEQ ID NO: 146117 - DNA, 25 bp, Probe Sequence
acgactttaaccaccaatgcgctgg

SEQ ID NO: 146118 - DNA, 25 bp, Probe Sequence
accttgttaaacatccaattgtgga

SEQ ID NO: 146119 - DNA, 25 bp, Probe Sequence
accttgaataagtctcccacagttg

SEQ ID NO: 146120 - DNA, 25 bp, Probe Sequence
accatgtcaatatagctgtccaagt

SEQ ID NO: 146121 - DNA, 25 bp, Probe Sequence
acctacagaaaagtgcccagagcat

SEQ ID NO: 146122 - DNA, 25 bp, Probe Sequence
accatcacaataaagtccccatctg

SEQ ID NO: 146123 - DNA, 25 bp, Probe Sequence
accatcgacaagactgctaaccagg

SEQ ID NO: 146124 - DNA, 25 bp, Probe Sequence
accatcgcccagagggacgacggcg

SEQ ID NO: 146125 - DNA, 25 bp, Probe Sequence
acctatgccaatactgggaggttgg

SEQ ID NO: 146126 - DNA, 25 bp, Probe Sequence
accatgtgactgtgcggggagctgt

SEQ ID NO: 146127 - DNA, 25 bp, Probe Sequence
acctgtgttgatactggggggttgg

SEQ ID NO: 146128 - DNA, 25 bp, Probe Sequence
accttgttggagcctgcagggtggt

SEQ ID NO: 146129 - DNA, 25 bp, Probe Sequence
acattagggtgccagccaggttggg

SEQ ID NO: 146130 - DNA, 25 bp, Probe Sequence
acctcagagtgtccaggggcttgga

SEQ ID NO: 146131 - DNA, 25 bp, Probe Sequence
accatcacggcaacagtgcgacggg

SEQ ID NO: 146132 - DNA, 25 bp, Probe Sequence
accatcacggcaacagtgcgacggg

SEQ ID NO: 146133 - DNA, 25 bp, Probe Sequence
accatccagccaagcagctctaggc

SEQ ID NO: 146134 - DNA, 25 bp, Probe Sequence
accatcctcacgagctatagtggcg

SEQ ID NO: 146135 - DNA, 25 bp, Probe Sequence
acctcctgcctgagtttggggtatt

SEQ ID NO: 146136 - DNA, 25 bp, Probe Sequence
acctcctggactagttcggcgagga

SEQ ID NO: 146137 - DNA, 25 bp, Probe Sequence
acctacattctctagttgggagtgg

SEQ ID NO: 146138 - DNA, 25 bp, Probe Sequence
acctatcataactacgtattcattg

SEQ ID NO: 146139 - DNA, 25 bp, Probe Sequence
accatacatcaggataaggtgtcaa

SEQ ID NO: 146140 - DNA, 25 bp, Probe Sequence
acctaccagtattatggcttctcgc

SEQ ID NO: 146141 - DNA, 25 bp, Probe Sequence
accatatacaaaaaactactcagct

SEQ ID NO: 146142 - DNA, 25 bp, Probe Sequence
acctctagcattgtaacgaccacat

SEQ ID NO: 146143 - DNA, 25 bp, Probe Sequence
accatcttctctgttaatacataat

SEQ ID NO: 146144 - DNA, 25 bp, Probe Sequence
accattctccagcttcaggggatat

SEQ ID NO: 146145 - DNA, 25 bp, Probe Sequence
accatgtgtgtcctataatggggaa

SEQ ID NO: 146146 - DNA, 25 bp, Probe Sequence
acctggtccctgtcagaagggaatg

SEQ ID NO: 146147 - DNA, 25 bp, Probe Sequence
accagtttccatcctaataggaatg

SEQ ID NO: 146148 - DNA, 25 bp, Probe Sequence
acctgttccgcacgtaattggcatg

SEQ ID NO: 146149 - DNA, 25 bp, Probe Sequence
acctcttccgctgttttagctgaag

SEQ ID NO: 146150 - DNA, 25 bp, Probe Sequence
acctctccccatattttgcaaagag

SEQ ID NO: 146151 - DNA, 25 bp, Probe Sequence
acctctcaatcccagattttcaaaa

SEQ ID NO: 146152 - DNA, 25 bp, Probe Sequence
acctcatcacaatcaaatttcaaaa

SEQ ID NO: 146153 - DNA, 25 bp, Probe Sequence
acctaacagaaatataccaaacatt

SEQ ID NO: 146154 - DNA, 25 bp, Probe Sequence
acctttccagaatacagcctatacc

SEQ ID NO: 146155 - DNA, 25 bp, Probe Sequence
acctttccaacacagatgtccaagc

SEQ ID NO: 146156 - DNA, 25 bp, Probe Sequence
acctttaaactggggatcatgctag

SEQ ID NO: 146157 - DNA, 25 bp, Probe Sequence
accttgttaagctttagtcatctca

SEQ ID NO: 146158 - DNA, 25 bp, Probe Sequence
accaggtaaggtttcagtatctact

SEQ ID NO: 146159 - DNA, 25 bp, Probe Sequence
accgtgtaagggtggtctcttccag

SEQ ID NO: 146160 - DNA, 25 bp, Probe Sequence
accgaggacgagagggctgtttcca

SEQ ID NO: 146161 - DNA, 25 bp, Probe Sequence
accgtcgatctacgggatctttcca

SEQ ID NO: 146162 - DNA, 25 bp, Probe Sequence
accgttgagctaatgttgtatttta

SEQ ID NO: 146163 - DNA, 25 bp, Probe Sequence
accatgttgacttcatttggattgc

SEQ ID NO: 146164 - DNA, 25 bp, Probe Sequence
accattctaatgtatgtagtatttc

SEQ ID NO: 146165 - DNA, 25 bp, Probe Sequence
accttatcctgatgtatggttccag

SEQ ID NO: 146166 - DNA, 25 bp, Probe Sequence
accttcaagctgtgtaatattccaa

SEQ ID NO: 146167 - DNA, 25 bp, Probe Sequence
acctgacaatgttttaaatcgcctt

SEQ ID NO: 146168 - DNA, 25 bp, Probe Sequence
acacctactgatgactcaaaccctt

SEQ ID NO: 146169 - DNA, 25 bp, Probe Sequence
accttactacatgtggagaccctgt

SEQ ID NO: 146170 - DNA, 25 bp, Probe Sequence
accttcctacattatgggtcaagct

SEQ ID NO: 146171 - DNA, 25 bp, Probe Sequence
accttggtaatttctttgcaagccg

SEQ ID NO: 146172 - DNA, 25 bp, Probe Sequence
acctcaggtaataccagctttagcc

SEQ ID NO: 146173 - DNA, 25 bp, Probe Sequence
acctacctagttgatctttcagatc

SEQ ID NO: 146174 - DNA, 25 bp, Probe Sequence
acctactctatcattattccttatc

SEQ ID NO: 146175 - DNA, 25 bp, Probe Sequence
accatccgatttctcaatcttttcc

SEQ ID NO: 146176 - DNA, 25 bp, Probe Sequence
accatccgatttctcaatcttttcc

SEQ ID NO: 146177 - DNA, 25 bp, Probe Sequence
accattactttcttgagacatttgt

SEQ ID NO: 146178 - DNA, 25 bp, Probe Sequence
acctttcttacattagcagtttgct

SEQ ID NO: 146179 - DNA, 25 bp, Probe Sequence
acctttcctttgtgagagactgcat

SEQ ID NO: 146180 - DNA, 25 bp, Probe Sequence
acctatgtctttccaagggactgtt

SEQ ID NO: 146181 - DNA, 25 bp, Probe Sequence
accttttctctgcctgggaaattat

SEQ ID NO: 146182 - DNA, 25 bp, Probe Sequence
accgttacctactgttgtcattgtt

SEQ ID NO: 146183 - DNA, 25 bp, Probe Sequence
accttttccttcggtttgatgctga

SEQ ID NO: 146184 - DNA, 25 bp, Probe Sequence
acctatgttctgcttgcgtttttga

SEQ ID NO: 146185 - DNA, 25 bp, Probe Sequence
acctggaggtgcattggtccctcat

SEQ ID NO: 146186 - DNA, 25 bp, Probe Sequence
acctgctaagtcaagggttcactgc

SEQ ID NO: 146187 - DNA, 25 bp, Probe Sequence
acctgctaagtcaagggttcactgc

SEQ ID NO: 146188 - DNA, 25 bp, Probe Sequence
acccatcgcgaccaagtttaatcca

SEQ ID NO: 146189 - DNA, 25 bp, Probe Sequence
acccccgaggaaatcttcacattca

SEQ ID NO: 146190 - DNA, 25 bp, Probe Sequence
acccccaagtgtattataaggcaat

SEQ ID NO: 146191 - DNA, 25 bp, Probe Sequence
acctcaccaaggaccttggaagagc

SEQ ID NO: 146192 - DNA, 25 bp, Probe Sequence
acccgccatttcacccagtaagcgg

SEQ ID NO: 146193 - DNA, 25 bp, Probe Sequence
acctggggttccgatccaggaactg

SEQ ID NO: 146194 - DNA, 25 bp, Probe Sequence
acctggggttgctgtcgaggaccct

SEQ ID NO: 146195 - DNA, 25 bp, Probe Sequence
acctggagtttagcacgctggtcgc

SEQ ID NO: 146196 - DNA, 25 bp, Probe Sequence
acgtgatggttaagctaccttcatt

SEQ ID NO: 146197 - DNA, 25 bp, Probe Sequence
acctgaggtttaatattctactatc

SEQ ID NO: 146198 - DNA, 25 bp, Probe Sequence
accgatggttacttgcttcgtctgt

SEQ ID NO: 146199 - DNA, 25 bp, Probe Sequence
acccatttatactctactctcagta

SEQ ID NO: 146200 - DNA, 25 bp, Probe Sequence
acctttagatactccaactcaccaa

SEQ ID NO: 146201 - DNA, 25 bp, Probe Sequence
accttctaaagatctcacctgacaa

SEQ ID NO: 146202 - DNA, 25 bp, Probe Sequence
accttcaagcagctaccatcctaat

SEQ ID NO: 146203 - DNA, 25 bp, Probe Sequence
accttaaagcatcaccactcatttt

SEQ ID NO: 146204 - DNA, 25 bp, Probe Sequence
accttcgaagattaccagatcatca

SEQ ID NO: 146205 - DNA, 25 bp, Probe Sequence
accttcgaatggttggaattccagg

SEQ ID NO: 146206 - DNA, 25 bp, Probe Sequence
acgttcgtcaagtccgttatccaga

SEQ ID NO: 146207 - DNA, 25 bp, Probe Sequence
accttcgaaaccaagttatatgcag

SEQ ID NO: 146208 - DNA, 25 bp, Probe Sequence
acctgctcgaaaccgttctaagact

SEQ ID NO: 146209 - DNA, 25 bp, Probe Sequence
accttcagtccactcgtttattgaa

SEQ ID NO: 146210 - DNA, 25 bp, Probe Sequence
accttccaccaggaaatttatgaat

SEQ ID NO: 146211 - DNA, 25 bp, Probe Sequence
acctatctcacttaattttttgaat

SEQ ID NO: 146212 - DNA, 25 bp, Probe Sequence
accttctcatgggcatattttgttt

SEQ ID NO: 146213 - DNA, 25 bp, Probe Sequence
accttctttacatgttgtgcattgt

SEQ ID NO: 146214 - DNA, 25 bp, Probe Sequence
acctctttcttccctgagtgtatat

SEQ ID NO: 146215 - DNA, 25 bp, Probe Sequence
acccattgatctgcgttttgtcact

SEQ ID NO: 146216 - DNA, 25 bp, Probe Sequence
accatgttgatcgcgtttttggcag

SEQ ID NO: 146217 - DNA, 25 bp, Probe Sequence
accatggtgatgcggttttggcagt

SEQ ID NO: 146218 - DNA, 25 bp, Probe Sequence
accatggtgatgcggttttggcagt

SEQ ID NO: 146219 - DNA, 25 bp, Probe Sequence
accatggtgatgcggttttggcagt

SEQ ID NO: 146220 - DNA, 25 bp, Probe Sequence
accatggtgatgcggttttggcagt

SEQ ID NO: 146221 - DNA, 25 bp, Probe Sequence
accatggtgatgcggttttgcaagt

SEQ ID NO: 146222 - DNA, 25 bp, Probe Sequence
accatggtgatgcgtttggcagtac

SEQ ID NO: 146223 - DNA, 25 bp, Probe Sequence
accattctgatccagttcaccagta

SEQ ID NO: 146224 - DNA, 25 bp, Probe Sequence
acctttaccagcataccactggacc

SEQ ID NO: 146225 - DNA, 25 bp, Probe Sequence
acctttggagacatgaccactgaag

SEQ ID NO: 146226 - DNA, 25 bp, Probe Sequence
accttcgtcagtacgagctgctcta

SEQ ID NO: 146227 - DNA, 25 bp, Probe Sequence
acgcctcggcgtactggttgtaggc

SEQ ID NO: 146228 - DNA, 25 bp, Probe Sequence
acccctctgcccaggatgttaaagg

SEQ ID NO: 146229 - DNA, 25 bp, Probe Sequence
accattcttacctgctatatgtgaa

SEQ ID NO: 146230 - DNA, 25 bp, Probe Sequence
accttgtttcactgtcacatatgaa

SEQ ID NO: 146231 - DNA, 25 bp, Probe Sequence
acctctttccacagtgactacagag

SEQ ID NO: 146232 - DNA, 25 bp, Probe Sequence
acctatagtcccagctactcaggaa

SEQ ID NO: 146233 - DNA, 25 bp, Probe Sequence
acctgtagttccagctactcagtga

SEQ ID NO: 146234 - DNA, 25 bp, Probe Sequence
acctggctttcagagctactaggag

SEQ ID NO: 146235 - DNA, 25 bp, Probe Sequence
accatcacttgtcgggcgagtcagg

SEQ ID NO: 146236 - DNA, 25 bp, Probe Sequence
accatcctaatcagtcagcagtaat

SEQ ID NO: 146237 - DNA, 25 bp, Probe Sequence
accatcctagcttcctagggaagac

SEQ ID NO: 146238 - DNA, 25 bp, Probe Sequence
acctgcgcaccatctcaagggaata

SEQ ID NO: 146239 - DNA, 25 bp, Probe Sequence
actccaaaccccagtgtaatcctat

SEQ ID NO: 146240 - DNA, 25 bp, Probe Sequence
ccccaagaaaccatcttatccctgt

SEQ ID NO: 146241 - DNA, 25 bp, Probe Sequence
acccaaaaagccatgattgtcctgg

SEQ ID NO: 146242 - DNA, 25 bp, Probe Sequence
acacacaaaaactggtgtaattggc

SEQ ID NO: 146243 - DNA, 25 bp, Probe Sequence
acccacaaacacttagttaacagct

SEQ ID NO: 146244 - DNA, 25 bp, Probe Sequence
acccaactactctggtaccattgct

SEQ ID NO: 146245 - DNA, 25 bp, Probe Sequence
acccaactactctggtaccattgct

SEQ ID NO: 146246 - DNA, 25 bp, Probe Sequence
acaccaacgtggtcgagtacgtgga

SEQ ID NO: 146247 - DNA, 25 bp, Probe Sequence
acaccaccagtggtcttaaggttga

SEQ ID NO: 146248 - DNA, 25 bp, Probe Sequence
acaccccagggatatacacctcgtt

SEQ ID NO: 146249 - DNA, 25 bp, Probe Sequence
acctccctggggatcaactccagat

SEQ ID NO: 146250 - DNA, 25 bp, Probe Sequence
accccaagtcggacagaaggcccat

SEQ ID NO: 146251 - DNA, 25 bp, Probe Sequence
acgaacaaggcataaacggcaccag

SEQ ID NO: 146252 - DNA, 25 bp, Probe Sequence
acgcggaaggatcataacggagccc

SEQ ID NO: 146253 - DNA, 25 bp, Probe Sequence
accgtggatgttttcagaagtggcc

SEQ ID NO: 146254 - DNA, 25 bp, Probe Sequence
accgtgcgattatacaaattatgtc

SEQ ID NO: 146255 - DNA, 25 bp, Probe Sequence
acctcggcttatgaaaacgtgatac

SEQ ID NO: 146256 - DNA, 25 bp, Probe Sequence
accttgtctgctaaataaacatgtg

SEQ ID NO: 146257 - DNA, 25 bp, Probe Sequence
acctacatcctgaatctgacccagg

SEQ ID NO: 146258 - DNA, 25 bp, Probe Sequence
accttcaatgtcactgtcaccaaga

SEQ ID NO: 146259 - DNA, 25 bp, Probe Sequence
acctgtcaatgtattctttagaaga

SEQ ID NO: 146260 - DNA, 25 bp, Probe Sequence
accttcactgatacttttactgaga

SEQ ID NO: 146261 - DNA, 25 bp, Probe Sequence
acctctcagtattttgtgtcactga

SEQ ID NO: 146262 - DNA, 25 bp, Probe Sequence
acctcaaggtcattgtggctctggg

SEQ ID NO: 146263 - DNA, 25 bp, Probe Sequence
acctcaagccagctgggctgtgggc

SEQ ID NO: 146264 - DNA, 25 bp, Probe Sequence
accatgaagtggctgctgctgctgg

SEQ ID NO: 146265 - DNA, 25 bp, Probe Sequence
acctaagtgtgactgcagcaggcag

SEQ ID NO: 146266 - DNA, 25 bp, Probe Sequence
accatccattgcagatgcgcagaca

SEQ ID NO: 146267 - DNA, 25 bp, Probe Sequence
accatgctgcgggcgatggagcgca

SEQ ID NO: 146268 - DNA, 25 bp, Probe Sequence
accatgtgggcaggctggcttgaat

SEQ ID NO: 146269 - DNA, 25 bp, Probe Sequence
accattgtgccagttgccaatcact

SEQ ID NO: 146270 - DNA, 25 bp, Probe Sequence
accatagtggattgcctacaactgg

SEQ ID NO: 146271 - DNA, 25 bp, Probe Sequence
acctttgcaaaccttcaagctgtgt

SEQ ID NO: 146272 - DNA, 25 bp, Probe Sequence
accttccagaccctggtgatgctgg

SEQ ID NO: 146273 - DNA, 25 bp, Probe Sequence
accttccagaccctggtgatgctgg

SEQ ID NO: 146274 - DNA, 25 bp, Probe Sequence
acctgtgccaactgtggagtgggga

SEQ ID NO: 146275 - DNA, 25 bp, Probe Sequence
acccctcagcacatggtgggggcca

SEQ ID NO: 146276 - DNA, 25 bp, Probe Sequence
accatcaacgccaacgtgcaggtgg

SEQ ID NO: 146277 - DNA, 25 bp, Probe Sequence
acctgcatatctggcttctacggtg

SEQ ID NO: 146278 - DNA, 25 bp, Probe Sequence
acctcatttccttcttgatcagtga

SEQ ID NO: 146279 - DNA, 25 bp, Probe Sequence
acctctgctttatgctgtacatgga

SEQ ID NO: 146280 - DNA, 25 bp, Probe Sequence
accattgcactccagcctggacaat

SEQ ID NO: 146281 - DNA, 25 bp, Probe Sequence
accttcaccagagtcattacaaaga

SEQ ID NO: 146282 - DNA, 25 bp, Probe Sequence
accttcagaccagccaagaaaaaag

SEQ ID NO: 146283 - DNA, 25 bp, Probe Sequence
accttcagcacttctcacaatgtaa

SEQ ID NO: 146284 - DNA, 25 bp, Probe Sequence
accttcaaagcactcaactgacagg

SEQ ID NO: 146285 - DNA, 25 bp, Probe Sequence
accttgcacaagcatcttctcagag

SEQ ID NO: 146286 - DNA, 25 bp, Probe Sequence
accttgcagagaccctctattatgc

SEQ ID NO: 146287 - DNA, 25 bp, Probe Sequence
accatggtgagaccctatctctatt

SEQ ID NO: 146288 - DNA, 25 bp, Probe Sequence
accttgtgaatctctatggtaagac

SEQ ID NO: 146289 - DNA, 25 bp, Probe Sequence
acctcctgagagccactaatgtaag

SEQ ID NO: 146290 - DNA, 25 bp, Probe Sequence
acctctggggcgtccaataacagtt

SEQ ID NO: 146291 - DNA, 25 bp, Probe Sequence
acaacagggggtgagctcagacttt

SEQ ID NO: 146292 - DNA, 25 bp, Probe Sequence
accatatggggactatagtgcaacc

SEQ ID NO: 146293 - DNA, 25 bp, Probe Sequence
accatagcatggcagttagaaactt

SEQ ID NO: 146294 - DNA, 25 bp, Probe Sequence
acctagactgccttaaatagactgt

SEQ ID NO: 146295 - DNA, 25 bp, Probe Sequence
acctatgacagtttgtcaaaaagtc

SEQ ID NO: 146296 - DNA, 25 bp, Probe Sequence
accatgtgatgcgttttgcagtaca

SEQ ID NO: 146297 - DNA, 25 bp, Probe Sequence
accatgtatgtgtatctatagccac

SEQ ID NO: 146298 - DNA, 25 bp, Probe Sequence
accattgagtccatcaaccagctga

SEQ ID NO: 146299 - DNA, 25 bp, Probe Sequence
accattggatcgatattatatgctg

SEQ ID NO: 146300 - DNA, 25 bp, Probe Sequence
accattgtgatgcgttcttgccagt

SEQ ID NO: 146301 - DNA, 25 bp, Probe Sequence
accatgatgatgcggttttgacagt

SEQ ID NO: 146302 - DNA, 25 bp, Probe Sequence
acctgaatcctgaatcttagactct

SEQ ID NO: 146303 - DNA, 25 bp, Probe Sequence
accatgcctccaacatctacaaggt

SEQ ID NO: 146304 - DNA, 25 bp, Probe Sequence
accatgcttcattacactcaatatg

SEQ ID NO: 146305 - DNA, 25 bp, Probe Sequence
acctgctctcagtagcctataagaa

SEQ ID NO: 146306 - DNA, 25 bp, Probe Sequence
acctcatgaagatcctcaccgagcg

SEQ ID NO: 146307 - DNA, 25 bp, Probe Sequence
accttaatggtcatgctgccgcagg

SEQ ID NO: 146308 - DNA, 25 bp, Probe Sequence
accataagggctgaatgccaggagc

SEQ ID NO: 146309 - DNA, 25 bp, Probe Sequence
acctcaaggagtacaacctggtctg

SEQ ID NO: 146310 - DNA, 25 bp, Probe Sequence
accccacaggtaaatcctgtgttag

SEQ ID NO: 146311 - DNA, 25 bp, Probe Sequence
accttcaatgttaccaccgttgaca

SEQ ID NO: 146312 - DNA, 25 bp, Probe Sequence
acctcttagttgcctcaagtgttga

SEQ ID NO: 146313 - DNA, 25 bp, Probe Sequence
accatatatagttgtgtacgtgtta

SEQ ID NO: 146314 - DNA, 25 bp, Probe Sequence
acctagatagattattgcacgtggc

SEQ ID NO: 146315 - DNA, 25 bp, Probe Sequence
acctaatggagatccatctgtcctg

SEQ ID NO: 146316 - DNA, 25 bp, Probe Sequence
acctaatggagatccatctgtcctg

SEQ ID NO: 146317 - DNA, 25 bp, Probe Sequence
accggtatgagatcaattccctggt

SEQ ID NO: 146318 - DNA, 25 bp, Probe Sequence
accgttatgtcaacaaatcccttgt

SEQ ID NO: 146319 - DNA, 25 bp, Probe Sequence
accattttgtctcattattcctgtt

SEQ ID NO: 146320 - DNA, 25 bp, Probe Sequence
accatctctttttatattatgccgc

SEQ ID NO: 146321 - DNA, 25 bp, Probe Sequence
accttattcttgtacattcattcaa

SEQ ID NO: 146322 - DNA, 25 bp, Probe Sequence
acctcatagctttacacattttgat

SEQ ID NO: 146323 - DNA, 25 bp, Probe Sequence
acctcatagtaccaacatgacatgt

SEQ ID NO: 146324 - DNA, 25 bp, Probe Sequence
acctctgaggccatcgtgaagtttg

SEQ ID NO: 146325 - DNA, 25 bp, Probe Sequence
accctcaatgccacactgtttttga

SEQ ID NO: 146326 - DNA, 25 bp, Probe Sequence
accctcaagccatctggttttcatg

SEQ ID NO: 146327 - DNA, 25 bp, Probe Sequence
acccttacctactaggtatcctgct

SEQ ID NO: 146328 - DNA, 25 bp, Probe Sequence
acccctagcccattagggacactat

SEQ ID NO: 146329 - DNA, 25 bp, Probe Sequence
acccctacctcacagggttgttgtg

SEQ ID NO: 146330 - DNA, 25 bp, Probe Sequence
acatccccaaggtgagggggtggag

SEQ ID NO: 146331 - DNA, 25 bp, Probe Sequence
tacttccagaagtgcggggtagggg

SEQ ID NO: 146332 - DNA, 25 bp, Probe Sequence
accccagaagatgagaggagtcgag

SEQ ID NO: 146333 - DNA, 25 bp, Probe Sequence
acccccaagtggaagattatcgctg

SEQ ID NO: 146334 - DNA, 25 bp, Probe Sequence
accttcttttgagacattagccagt

SEQ ID NO: 146335 - DNA, 25 bp, Probe Sequence
accttacatgttaccaatatcacca

SEQ ID NO: 146336 - DNA, 25 bp, Probe Sequence
accttcactgggaacaacacagccg

SEQ ID NO: 146337 - DNA, 25 bp, Probe Sequence
acctcacactgtaggactcacacac

SEQ ID NO: 146338 - DNA, 25 bp, Probe Sequence
accatcatcaccagaacaaaacaga

SEQ ID NO: 146339 - DNA, 25 bp, Probe Sequence
acctgctaccagtgataagagtcag

SEQ ID NO: 146340 - DNA, 25 bp, Probe Sequence
acctgttctcactgaaaagtctggc

SEQ ID NO: 146341 - DNA, 25 bp, Probe Sequence
accattgtctacagagaccaactgg

SEQ ID NO: 146342 - DNA, 25 bp, Probe Sequence
accttatctatcacagaccagtagc

SEQ ID NO: 146343 - DNA, 25 bp, Probe Sequence
acctctaacactcaaccatgtcagt

SEQ ID NO: 146344 - DNA, 25 bp, Probe Sequence
acctctagaggcctataccattcaa

SEQ ID NO: 146345 - DNA, 25 bp, Probe Sequence
acctgcttggatctagacagcatct

SEQ ID NO: 146346 - DNA, 25 bp, Probe Sequence
acctcctcagaattgcagaagatgc

SEQ ID NO: 146347 - DNA, 25 bp, Probe Sequence
accatccctacatgcaacatgctgt

SEQ ID NO: 146348 - DNA, 25 bp, Probe Sequence
accatcatgcccaaagacatccagt

SEQ ID NO: 146349 - DNA, 25 bp, Probe Sequence
acctcaccctgctacacatacagga

SEQ ID NO: 146350 - DNA, 25 bp, Probe Sequence
acctatgggctctacacacgggtaa

SEQ ID NO: 146351 - DNA, 25 bp, Probe Sequence
accatacaggctatacacgagagta

SEQ ID NO: 146352 - DNA, 25 bp, Probe Sequence
acctacatgggccataccggagctg

SEQ ID NO: 146353 - DNA, 25 bp, Probe Sequence
acctttgggctcatcctggatgacg

SEQ ID NO: 146354 - DNA, 25 bp, Probe Sequence
acctttgaggccaatgtgctggctg

SEQ ID NO: 146355 - DNA, 25 bp, Probe Sequence
accgcatcggctgcattgtggtgga

SEQ ID NO: 146356 - DNA, 25 bp, Probe Sequence
acctatactgccaattggctgggag

SEQ ID NO: 146357 - DNA, 25 bp, Probe Sequence
acctattctgacaaccagcctggtg

SEQ ID NO: 146358 - DNA, 25 bp, Probe Sequence
acctattctgacaaccagcctggtg

SEQ ID NO: 146359 - DNA, 25 bp, Probe Sequence
acctttctgataatcccatccatga

SEQ ID NO: 146360 - DNA, 25 bp, Probe Sequence
accttactattatcctccaatcagt

SEQ ID NO: 146361 - DNA, 25 bp, Probe Sequence
acctttctctattacagcttaaagt

SEQ ID NO: 146362 - DNA, 25 bp, Probe Sequence
acctttacatattatcatgtctatt

SEQ ID NO: 146363 - DNA, 25 bp, Probe Sequence
acctctatataattatcaccgtttc

SEQ ID NO: 146364 - DNA, 25 bp, Probe Sequence
acctgacattaattatctatccttg

SEQ ID NO: 146365 - DNA, 25 bp, Probe Sequence
accttcattaagcagcatgaccgct

SEQ ID NO: 146366 - DNA, 25 bp, Probe Sequence
accttcttaaggtgatctctcttga

SEQ ID NO: 146367 - DNA, 25 bp, Probe Sequence
acctttcttaggttgattcagggag

SEQ ID NO: 146368 - DNA, 25 bp, Probe Sequence
acctttgagctagtttatacacgag

SEQ ID NO: 146369 - DNA, 25 bp, Probe Sequence
acctttatgctcgttccatatttgg

SEQ ID NO: 146370 - DNA, 25 bp, Probe Sequence
acctttatgttctcccatatatagg

SEQ ID NO: 146371 - DNA, 25 bp, Probe Sequence
accgttagtttctcctctaatcagt

SEQ ID NO: 146372 - DNA, 25 bp, Probe Sequence
acctattagtttgctcctcactatt

SEQ ID NO: 146373 - DNA, 25 bp, Probe Sequence
acctttactcttagcaaactctagt

SEQ ID NO: 146374 - DNA, 25 bp, Probe Sequence
accttaacattaatgcctacctaag

SEQ ID NO: 146375 - DNA, 25 bp, Probe Sequence
acctaaacatgtaaccatgccctac

SEQ ID NO: 146376 - DNA, 25 bp, Probe Sequence
accataaacatttgcaccacttgtg

SEQ ID NO: 146377 - DNA, 25 bp, Probe Sequence
acctctatacatgcaacgacttggg

SEQ ID NO: 146378 - DNA, 25 bp, Probe Sequence
accatattcagggtacgaactggag

SEQ ID NO: 146379 - DNA, 25 bp, Probe Sequence
accatcatgtatgcccacgagggtg

SEQ ID NO: 146380 - DNA, 25 bp, Probe Sequence
accatagtattctcactggactgtg

SEQ ID NO: 146381 - DNA, 25 bp, Probe Sequence
accttgtaagaatctgaggctgggc

SEQ ID NO: 146382 - DNA, 25 bp, Probe Sequence
accttcgagaagtttgacctggagc

SEQ ID NO: 146383 - DNA, 25 bp, Probe Sequence
acctctcgggatgtgggctctagag

SEQ ID NO: 146384 - DNA, 25 bp, Probe Sequence
acctcctggtgagaagtcttcagac

SEQ ID NO: 146385 - DNA, 25 bp, Probe Sequence
accttcctgtgaagcaaacttcaga

SEQ ID NO: 146386 - DNA, 25 bp, Probe Sequence
accatttcttattcaaatctacagt

SEQ ID NO: 146387 - DNA, 25 bp, Probe Sequence
accatatgttgtgtctaatctcctt

SEQ ID NO: 146388 - DNA, 25 bp, Probe Sequence
acctagttgatctttcagatctttc

SEQ ID NO: 146389 - DNA, 25 bp, Probe Sequence
acctagtctattgtagttttattca

SEQ ID NO: 146390 - DNA, 25 bp, Probe Sequence
acctagtctattgtagttttattca

SEQ ID NO: 146391 - DNA, 25 bp, Probe Sequence
acctggtgctgggcagtagtttcct

SEQ ID NO: 146392 - DNA, 25 bp, Probe Sequence
acctggcgtcagcatttataatcct

SEQ ID NO: 146393 - DNA, 25 bp, Probe Sequence
accggaataggtatgaaatgtctac

SEQ ID NO: 146394 - DNA, 25 bp, Probe Sequence
accccaaagggataattcatcaaca

SEQ ID NO: 146395 - DNA, 25 bp, Probe Sequence
acctcaaaagcacagacaaccacaa

SEQ ID NO: 146396 - DNA, 25 bp, Probe Sequence
acctcaagggcattgaaagccagcc

SEQ ID NO: 146397 - DNA, 25 bp, Probe Sequence
acctctcaggagctaagcggagcct

SEQ ID NO: 146398 - DNA, 25 bp, Probe Sequence
accttcagatgtgtctacgtgcgct

SEQ ID NO: 146399 - DNA, 25 bp, Probe Sequence
acctgtgcagcgaagcttagcgttc

SEQ ID NO: 146400 - DNA, 25 bp, Probe Sequence
acctgatggacatgttcagggatcg

SEQ ID NO: 146401 - DNA, 25 bp, Probe Sequence
acctttgtgcagcttcgaggacagg

SEQ ID NO: 146402 - DNA, 25 bp, Probe Sequence
acctgttgatcacttaaaggcaaga

SEQ ID NO: 146403 - DNA, 25 bp, Probe Sequence
accattctgataccagaacatggtt

SEQ ID NO: 146404 - DNA, 25 bp, Probe Sequence
accttcttacgctatggcaggtaag

SEQ ID NO: 146405 - DNA, 25 bp, Probe Sequence
accattcttacgttggtggccaagt

SEQ ID NO: 146406 - DNA, 25 bp, Probe Sequence
accttatttgcctcattggccattt

SEQ ID NO: 146407 - DNA, 25 bp, Probe Sequence
acctggaagccctcattgatccatt

SEQ ID NO: 146408 - DNA, 25 bp, Probe Sequence
acctggatcacagaggcatttgtag

SEQ ID NO: 146409 - DNA, 25 bp, Probe Sequence
acctgagatgcagtgggccaagggg

SEQ ID NO: 146410 - DNA, 25 bp, Probe Sequence
acctcagaagtggccctagccgaga

SEQ ID NO: 146411 - DNA, 25 bp, Probe Sequence
accttgggtgatgccttcccagagt

SEQ ID NO: 146412 - DNA, 25 bp, Probe Sequence
acccatgggaatacctgacctaggt

SEQ ID NO: 146413 - DNA, 25 bp, Probe Sequence
acccataggtagtcaggaaccagga

SEQ ID NO: 146414 - DNA, 25 bp, Probe Sequence
acctcaactctacacaaatccagct

SEQ ID NO: 146415 - DNA, 25 bp, Probe Sequence
acctcaacccagccagaaagtactt

SEQ ID NO: 146416 - DNA, 25 bp, Probe Sequence
acctactccaagagtaagttctgct

SEQ ID NO: 146417 - DNA, 25 bp, Probe Sequence
acctacccaaagttatcgatattct

SEQ ID NO: 146418 - DNA, 25 bp, Probe Sequence
acctgcacacctaaatggatttatt

SEQ ID NO: 146419 - DNA, 25 bp, Probe Sequence
acctgtcacacaaatgcttttctaa

SEQ ID NO: 146420 - DNA, 25 bp, Probe Sequence
accttgcacacttattactgcctca

SEQ ID NO: 146421 - DNA, 25 bp, Probe Sequence
acctggcacagcacttatcagacca

SEQ ID NO: 146422 - DNA, 25 bp, Probe Sequence
acctggcacagcacttatcagacca

SEQ ID NO: 146423 - DNA, 25 bp, Probe Sequence
acctggcacagtgccagaccccaac

SEQ ID NO: 146424 - DNA, 25 bp, Probe Sequence
acctgagccgataccaggacactca

SEQ ID NO: 146425 - DNA, 25 bp, Probe Sequence
acctgcccagattactggacctact

SEQ ID NO: 146426 - DNA, 25 bp, Probe Sequence
acctcccagtaaagtagccatgaag

SEQ ID NO: 146427 - DNA, 25 bp, Probe Sequence
accccacctacaaatacctggagca

SEQ ID NO: 146428 - DNA, 25 bp, Probe Sequence
acctccaccagaaaacctcggatca

SEQ ID NO: 146429 - DNA, 25 bp, Probe Sequence
accgcgagcgacagaaactagagac

SEQ ID NO: 146430 - DNA, 25 bp, Probe Sequence
acgctgctgcaggacattaataaag

SEQ ID NO: 146431 - DNA, 25 bp, Probe Sequence
acgctgctgcaggacattaataaag

SEQ ID NO: 146432 - DNA, 25 bp, Probe Sequence
acctgtcatggaaacaatcctagag

SEQ ID NO: 146433 - DNA, 25 bp, Probe Sequence
acctgtagagatcaccaatctggac

SEQ ID NO: 146434 - DNA, 25 bp, Probe Sequence
acctgaaagctcctggcaatgctgg

SEQ ID NO: 146435 - DNA, 25 bp, Probe Sequence
acctgtacagtggatggaatctgct

SEQ ID NO: 146436 - DNA, 25 bp, Probe Sequence
acctttgagctgggaaccgaagagg

SEQ ID NO: 146437 - DNA, 25 bp, Probe Sequence
accttctgcactgtccatctaagga

SEQ ID NO: 146438 - DNA, 25 bp, Probe Sequence
acctgtcatgttggatcctgtaatc

SEQ ID NO: 146439 - DNA, 25 bp, Probe Sequence
acctgactgcttttcctgtcagtgc

SEQ ID NO: 146440 - DNA, 25 bp, Probe Sequence
acctcctgccatgatactgtcagtt

SEQ ID NO: 146441 - DNA, 25 bp, Probe Sequence
accttccagagttacttcagtgcat

SEQ ID NO: 146442 - DNA, 25 bp, Probe Sequence
acctgaccagaaacacttcgctgct

SEQ ID NO: 146443 - DNA, 25 bp, Probe Sequence
acctgatcgagcacttctcgcagtt

SEQ ID NO: 146444 - DNA, 25 bp, Probe Sequence
acctacacagagtgctgctgcctgt

SEQ ID NO: 146445 - DNA, 25 bp, Probe Sequence
acctaacagtcttgtgtgacagatg

SEQ ID NO: 146446 - DNA, 25 bp, Probe Sequence
accttgaggtcttttgacatgtgga

SEQ ID NO: 146447 - DNA, 25 bp, Probe Sequence
accattgtggtttaagctgtactga

SEQ ID NO: 146448 - DNA, 25 bp, Probe Sequence
accattgtggtttaagctgtactga

SEQ ID NO: 146449 - DNA, 25 bp, Probe Sequence
accattgtggtttaagctgtactga

SEQ ID NO: 146450 - DNA, 25 bp, Probe Sequence
accattgtggtttaagctgtactga

SEQ ID NO: 146451 - DNA, 25 bp, Probe Sequence
accattgtggaatgatgccctggct

SEQ ID NO: 146452 - DNA, 25 bp, Probe Sequence
accctgtggaaacccacggccacag

SEQ ID NO: 146453 - DNA, 25 bp, Probe Sequence
accctggtgaaggtcatcccccagg

SEQ ID NO: 146454 - DNA, 25 bp, Probe Sequence
accctggtagatgaacagcccctgg

SEQ ID NO: 146455 - DNA, 25 bp, Probe Sequence
accctggataccagtagcttcccac

SEQ ID NO: 146456 - DNA, 25 bp, Probe Sequence
accctgaacatcgccgagtttcggc

SEQ ID NO: 146457 - DNA, 25 bp, Probe Sequence
acccgaaatgccacgtggtcactgt

SEQ ID NO: 146458 - DNA, 25 bp, Probe Sequence
acctccaggtctaaaaggtagtgtg

SEQ ID NO: 146459 - DNA, 25 bp, Probe Sequence
acctccgttgccatatgggtggtgt

SEQ ID NO: 146460 - DNA, 25 bp, Probe Sequence
acctacaacgtcatagtggaggcac

SEQ ID NO: 146461 - DNA, 25 bp, Probe Sequence
acctagctaccactaggtggatagt

SEQ ID NO: 146462 - DNA, 25 bp, Probe Sequence
acctatctactcgttgttgaaattt

SEQ ID NO: 146463 - DNA, 25 bp, Probe Sequence
accttaactctttgttgtgtgtatt

SEQ ID NO: 146464 - DNA, 25 bp, Probe Sequence
accttattctctgtgtcttggatct

SEQ ID NO: 146465 - DNA, 25 bp, Probe Sequence
acctattttattagacttacagcta

SEQ ID NO: 146466 - DNA, 25 bp, Probe Sequence
acctagtttgttagtgcatttgagc

SEQ ID NO: 146467 - DNA, 25 bp, Probe Sequence
accttgctttctactggattctgaa

SEQ ID NO: 146468 - DNA, 25 bp, Probe Sequence
acctttgtttactgagataggataa

SEQ ID NO: 146469 - DNA, 25 bp, Probe Sequence
acctttcctgtaacagagacggtca

SEQ ID NO: 146470 - DNA, 25 bp, Probe Sequence
accttatcatgtcttagagcccgtc

SEQ ID NO: 146471 - DNA, 25 bp, Probe Sequence
acctatgatatggttccagagccca

SEQ ID NO: 146472 - DNA, 25 bp, Probe Sequence
accttgagtgctcagccaagaccaa

SEQ ID NO: 146473 - DNA, 25 bp, Probe Sequence
acctcggtaaagccaacatcacaat

SEQ ID NO: 146474 - DNA, 25 bp, Probe Sequence
acccaggacaaaacacccagcaagg

SEQ ID NO: 146475 - DNA, 25 bp, Probe Sequence
acctcaggaaagtacccagctgcct

SEQ ID NO: 146476 - DNA, 25 bp, Probe Sequence
acccgtaatatctaatatagcacct

SEQ ID NO: 146477 - DNA, 25 bp, Probe Sequence
acctctcttttctaagatgcacaac

SEQ ID NO: 146478 - DNA, 25 bp, Probe Sequence
acctcactctttatagtgcacaaaa

SEQ ID NO: 146479 - DNA, 25 bp, Probe Sequence
acctgcccttgtagtagtgtaaatc

SEQ ID NO: 146480 - DNA, 25 bp, Probe Sequence
acctcacacttgattcagttaagcc

SEQ ID NO: 146481 - DNA, 25 bp, Probe Sequence
acctaccttcaccatctgtatatac

SEQ ID NO: 146482 - DNA, 25 bp, Probe Sequence
acctatcctcaattcacatgtcatt

SEQ ID NO: 146483 - DNA, 25 bp, Probe Sequence
accttcctgctatcaatggcattgt

SEQ ID NO: 146484 - DNA, 25 bp, Probe Sequence
accttcctgctatcaatggcattgt

SEQ ID NO: 146485 - DNA, 25 bp, Probe Sequence
accgctcctacagcaagctgctgtg

SEQ ID NO: 146486 - DNA, 25 bp, Probe Sequence
acctacctactgaacagtctgagct

SEQ ID NO: 146487 - DNA, 25 bp, Probe Sequence
acctagcacccgagattctatgtgt

SEQ ID NO: 146488 - DNA, 25 bp, Probe Sequence
acctagaccaaaagcctgcatttgt

SEQ ID NO: 146489 - DNA, 25 bp, Probe Sequence
acctctggtcagaatccggatactg

SEQ ID NO: 146490 - DNA, 25 bp, Probe Sequence
acctctgcaaccaacatcgtgaagt

SEQ ID NO: 146491 - DNA, 25 bp, Probe Sequence
acctctgagtccaaagcaggctggt

SEQ ID NO: 146492 - DNA, 25 bp, Probe Sequence
acctcaaatcctgatccagctgtgt

SEQ ID NO: 146493 - DNA, 25 bp, Probe Sequence
accccaccacgtaccagatggatgt

SEQ ID NO: 146494 - DNA, 25 bp, Probe Sequence
accgccagtgtcataccaaagagct

SEQ ID NO: 146495 - DNA, 25 bp, Probe Sequence
acctcctgatgctgtacttacagat

SEQ ID NO: 146496 - DNA, 25 bp, Probe Sequence
acctttgcagcatttgtttacagtt

SEQ ID NO: 146497 - DNA, 25 bp, Probe Sequence
acctgtgtgctgtacttttacactc

SEQ ID NO: 146498 - DNA, 25 bp, Probe Sequence
acctaggctgtgtttcctaagctct

SEQ ID NO: 146499 - DNA, 25 bp, Probe Sequence
acctaggctgtactgccacaaagct

SEQ ID NO: 146500 - DNA, 25 bp, Probe Sequence
acctgggtgtcatttctcagaactg

SEQ ID NO: 146501 - DNA, 25 bp, Probe Sequence
acctgtgggcctgttgcaatacttt

SEQ ID NO: 146502 - DNA, 25 bp, Probe Sequence
acctgtgggcctgttgcaatacttt

SEQ ID NO: 146503 - DNA, 25 bp, Probe Sequence
acctgctggggtattgactatcatt

SEQ ID NO: 146504 - DNA, 25 bp, Probe Sequence
acctgttgaggttcattttgcatca

SEQ ID NO: 146505 - DNA, 25 bp, Probe Sequence
acctatcggccttatttctgaagta

SEQ ID NO: 146506 - DNA, 25 bp, Probe Sequence
acctgtttgcacacacttaaagcta

SEQ ID NO: 146507 - DNA, 25 bp, Probe Sequence
acctttggcagtacaatctaccgta

SEQ ID NO: 146508 - DNA, 25 bp, Probe Sequence
accttcgccagcaacaatgtgaccg

SEQ ID NO: 146509 - DNA, 25 bp, Probe Sequence
acctcagcccagaacaatgctaaag

SEQ ID NO: 146510 - DNA, 25 bp, Probe Sequence
acctgatgactaatgacaacaaaga

SEQ ID NO: 146511 - DNA, 25 bp, Probe Sequence
acctgccaaatatgatgacatcaag

SEQ ID NO: 146512 - DNA, 25 bp, Probe Sequence
acctgcagcagttcaggatgactaa

SEQ ID NO: 146513 - DNA, 25 bp, Probe Sequence
acctcgcatatgtatgacatcctgg

SEQ ID NO: 146514 - DNA, 25 bp, Probe Sequence
acctctgcactactgacatgtgggg

SEQ ID NO: 146515 - DNA, 25 bp, Probe Sequence
acctctggcatgagacagtggtgca

SEQ ID NO: 146516 - DNA, 25 bp, Probe Sequence
acctcgctgctggtgacgcagaatg

SEQ ID NO: 146517 - DNA, 25 bp, Probe Sequence
acctaggctcatggacgagatggga

SEQ ID NO: 146518 - DNA, 25 bp, Probe Sequence
acctaatgctcagacctagcagcag

SEQ ID NO: 146519 - DNA, 25 bp, Probe Sequence
acctgaactcatgaccatagtgtgg

SEQ ID NO: 146520 - DNA, 25 bp, Probe Sequence
accttcaccttcacacagattgagg

SEQ ID NO: 146521 - DNA, 25 bp, Probe Sequence
acctgtcaccttgtctagcaggatg

SEQ ID NO: 146522 - DNA, 25 bp, Probe Sequence
acctttcattctttgctgagggcat

SEQ ID NO: 146523 - DNA, 25 bp, Probe Sequence
acctattctactctgggcagtgaaa

SEQ ID NO: 146524 - DNA, 25 bp, Probe Sequence
acctttgccactgatgaccggaaag

SEQ ID NO: 146525 - DNA, 25 bp, Probe Sequence
acctcatcccaactatgaccaagaa

SEQ ID NO: 146526 - DNA, 25 bp, Probe Sequence
acctcatgccctgttgataaaccaa

SEQ ID NO: 146527 - DNA, 25 bp, Probe Sequence
acctatccctacatacataccaaat

SEQ ID NO: 146528 - DNA, 25 bp, Probe Sequence
acctatacttactgacacactcaaa

SEQ ID NO: 146529 - DNA, 25 bp, Probe Sequence
acctgtagctataccagccagactc

SEQ ID NO: 146530 - DNA, 25 bp, Probe Sequence
accttttgatggggccaatgtcgtc

SEQ ID NO: 146531 - DNA, 25 bp, Probe Sequence
accttttgtggaaccagtgatgcct

SEQ ID NO: 146532 - DNA, 25 bp, Probe Sequence
acctctttacgtatatgatgtggct

SEQ ID NO: 146533 - DNA, 25 bp, Probe Sequence
acctctggataaatggacaaggcct

SEQ ID NO: 146534 - DNA, 25 bp, Probe Sequence
acctcatggatggggacctgggact

SEQ ID NO: 146535 - DNA, 25 bp, Probe Sequence
acctcacctgcaaggctttgtggac

SEQ ID NO: 146536 - DNA, 25 bp, Probe Sequence
accgcctcatgcaggtgtggtgcga

SEQ ID NO: 146537 - DNA, 25 bp, Probe Sequence
accccttgaaggagatgacgacaca

SEQ ID NO: 146538 - DNA, 25 bp, Probe Sequence
acgcactttatgagggagaccccga

SEQ ID NO: 146539 - DNA, 25 bp, Probe Sequence
acgcagtctttgagacgggtgcccg

SEQ ID NO: 146540 - DNA, 25 bp, Probe Sequence
acgcagtctttgagacgggtgcccg

SEQ ID NO: 146541 - DNA, 25 bp, Probe Sequence
acctgtcaccgaagccaggaagccc

SEQ ID NO: 146542 - DNA, 25 bp, Probe Sequence
acctgtctcacgtgccaggggacag

SEQ ID NO: 146543 - DNA, 25 bp, Probe Sequence
acctgtcagggatcacaggggccag

SEQ ID NO: 146544 - DNA, 25 bp, Probe Sequence
acctttctgtgacattggaagtcat

SEQ ID NO: 146545 - DNA, 25 bp, Probe Sequence
acccttctgtgacaagccaggcttt

SEQ ID NO: 146546 - DNA, 25 bp, Probe Sequence
acctgcttctctgaagagttggtat

SEQ ID NO: 146547 - DNA, 25 bp, Probe Sequence
acctgactggctgaaagttgggttc

SEQ ID NO: 146548 - DNA, 25 bp, Probe Sequence
acctagcgaggtaaagttgcgtctt

SEQ ID NO: 146549 - DNA, 25 bp, Probe Sequence
acctaaagtgtagagattgccattt

SEQ ID NO: 146550 - DNA, 25 bp, Probe Sequence
accttacctgtacagcatgtctctt

SEQ ID NO: 146551 - DNA, 25 bp, Probe Sequence
accttcattcttactagtttcattc

SEQ ID NO: 146552 - DNA, 25 bp, Probe Sequence
acctagtgtcttactctgttttctg

SEQ ID NO: 146553 - DNA, 25 bp, Probe Sequence
acctactgtcatttctcaattactt

SEQ ID NO: 146554 - DNA, 25 bp, Probe Sequence
acctaagtcagctttcatctttgtg

SEQ ID NO: 146555 - DNA, 25 bp, Probe Sequence
acctcaaagcagtcattccttagta

SEQ ID NO: 146556 - DNA, 25 bp, Probe Sequence
acctcagcaagaacatacctaatat

SEQ ID NO: 146557 - DNA, 25 bp, Probe Sequence
acctcagatagacagtgccagaatt

SEQ ID NO: 146558 - DNA, 25 bp, Probe Sequence
acctcagtactgtcactacaatatt

SEQ ID NO: 146559 - DNA, 25 bp, Probe Sequence
acctagtcacattactgccaatgtt

SEQ ID NO: 146560 - DNA, 25 bp, Probe Sequence
acctaatgctcttatggcacagctg

SEQ ID NO: 146561 - DNA, 25 bp, Probe Sequence
accgagagtgcggagcgaccagcgt

SEQ ID NO: 146562 - DNA, 25 bp, Probe Sequence
accgcgcagccgcatgaaccggatg

SEQ ID NO: 146563 - DNA, 25 bp, Probe Sequence
acctgagaccatcgatttctcagaa

SEQ ID NO: 146564 - DNA, 25 bp, Probe Sequence
acctaggcttggaattcacactgat

SEQ ID NO: 146565 - DNA, 25 bp, Probe Sequence
accttttatgagattgagagtggac

SEQ ID NO: 146566 - DNA, 25 bp, Probe Sequence
accttatattggctaagacaggcca

SEQ ID NO: 146567 - DNA, 25 bp, Probe Sequence
accttattctgtgtgtagacattgt

SEQ ID NO: 146568 - DNA, 25 bp, Probe Sequence
acctgtttatctgttaactattatc

SEQ ID NO: 146569 - DNA, 25 bp, Probe Sequence
acctttatatatcatgttcacttta

SEQ ID NO: 146570 - DNA, 25 bp, Probe Sequence
acctggtgaagtcattcagccttta

SEQ ID NO: 146571 - DNA, 25 bp, Probe Sequence
acctgcgtgaagaagtgtccccgta

SEQ ID NO: 146572 - DNA, 25 bp, Probe Sequence
acctcctgagttggatgtcatcccc

SEQ ID NO: 146573 - DNA, 25 bp, Probe Sequence
acctccaagtgtcggttctatgact

SEQ ID NO: 146574 - DNA, 25 bp, Probe Sequence
acccccaagtcggttggatcacttg

SEQ ID NO: 146575 - DNA, 25 bp, Probe Sequence
accccagcaaggtggttatcactag

SEQ ID NO: 146576 - DNA, 25 bp, Probe Sequence
actccttcagggttgggggactctg

SEQ ID NO: 146577 - DNA, 25 bp, Probe Sequence
accgcttagagatttggggggctct

SEQ ID NO: 146578 - DNA, 25 bp, Probe Sequence
accgcttgccagaattgtgggactg

SEQ ID NO: 146579 - DNA, 25 bp, Probe Sequence
acctcttccagcaggggacctgagg

SEQ ID NO: 146580 - DNA, 25 bp, Probe Sequence
accggtccagctggcctggacagta

SEQ ID NO: 146581 - DNA, 25 bp, Probe Sequence
acctggcccagtttatggtgcagaa

SEQ ID NO: 146582 - DNA, 25 bp, Probe Sequence
acctagcaccagtgcttggcatcag

SEQ ID NO: 146583 - DNA, 25 bp, Probe Sequence
acctcacatccattaagatggctcc

SEQ ID NO: 146584 - DNA, 25 bp, Probe Sequence
acctgctaccacaaagggtccgaca

SEQ ID NO: 146585 - DNA, 25 bp, Probe Sequence
acgctgtgaccccgaaggtctggat

SEQ ID NO: 146586 - DNA, 25 bp, Probe Sequence
acctggagacccgcaatgtcggagt

SEQ ID NO: 146587 - DNA, 25 bp, Probe Sequence
acctggaactgcggcaaagtaggag

SEQ ID NO: 146588 - DNA, 25 bp, Probe Sequence
acctggagacggtgattttgggcct

SEQ ID NO: 146589 - DNA, 25 bp, Probe Sequence
cttctccccaggtgtgttggggcct

SEQ ID NO: 146590 - DNA, 25 bp, Probe Sequence
cttcccggagtctggtttagggctg

SEQ ID NO: 146591 - DNA, 25 bp, Probe Sequence
cttctccggacctggtgtcaggggt

SEQ ID NO: 146592 - DNA, 25 bp, Probe Sequence
acccccgactctggggtagtgtgtg

SEQ ID NO: 146593 - DNA, 25 bp, Probe Sequence
acctgtactgtcccggaggaggttg

SEQ ID NO: 146594 - DNA, 25 bp, Probe Sequence
accggactgtgtgccgggagatccg

SEQ ID NO: 146595 - DNA, 25 bp, Probe Sequence
acctgacctgttgctgggtgatttt

SEQ ID NO: 146596 - DNA, 25 bp, Probe Sequence
acctagaactcagaggattgctttt

SEQ ID NO: 146597 - DNA, 25 bp, Probe Sequence
acctagacctcaggtggtctcttgg

SEQ ID NO: 146598 - DNA, 25 bp, Probe Sequence
acctcagctaagactgggtcctttg

SEQ ID NO: 146599 - DNA, 25 bp, Probe Sequence
accgagctggagactggcagtgtcc

SEQ ID NO: 146600 - DNA, 25 bp, Probe Sequence
acctcggcagagaagtagtgtccag

SEQ ID NO: 146601 - DNA, 25 bp, Probe Sequence
acctggggagatcggtgctaccaag

SEQ ID NO: 146602 - DNA, 25 bp, Probe Sequence
acctggtggaggctttgaagagaaa

SEQ ID NO: 146603 - DNA, 25 bp, Probe Sequence
acctcaaggggccatggtgaagaag

SEQ ID NO: 146604 - DNA, 25 bp, Probe Sequence
acctcattgaaggcgcagagaaaat

SEQ ID NO: 146605 - DNA, 25 bp, Probe Sequence
acctcggatacccaggacagcatgt

SEQ ID NO: 146606 - DNA, 25 bp, Probe Sequence
accctgaaggcctggatcatgctat

SEQ ID NO: 146607 - DNA, 25 bp, Probe Sequence
accctgaaggcctggatcatgctat

SEQ ID NO: 146608 - DNA, 25 bp, Probe Sequence
acctctgtctgggaagagactctct

SEQ ID NO: 146609 - DNA, 25 bp, Probe Sequence
acctcctctgcatgcaaagattctc

SEQ ID NO: 146610 - DNA, 25 bp, Probe Sequence
acccactccaaataatctcctcggt

SEQ ID NO: 146611 - DNA, 25 bp, Probe Sequence
acccactccaaataatctcctcggt

SEQ ID NO: 146612 - DNA, 25 bp, Probe Sequence
acgaacacccaggaaattaagcagg

SEQ ID NO: 146613 - DNA, 25 bp, Probe Sequence
acctacacccaacaagtcaatgagg

SEQ ID NO: 146614 - DNA, 25 bp, Probe Sequence
acacttacctaacaagtactgctca

SEQ ID NO: 146615 - DNA, 25 bp, Probe Sequence
acctgatttctaaaaattatcccat

SEQ ID NO: 146616 - DNA, 25 bp, Probe Sequence
acctgatctcttatactagtatcct

SEQ ID NO: 146617 - DNA, 25 bp, Probe Sequence
acctgactagaaaagctattacctt

SEQ ID NO: 146618 - DNA, 25 bp, Probe Sequence
acctgtctcagatcaagtaattcct

SEQ ID NO: 146619 - DNA, 25 bp, Probe Sequence
acctcaccatatttggaagattcct

SEQ ID NO: 146620 - DNA, 25 bp, Probe Sequence
acctcacacaatggccagctatgaa

SEQ ID NO: 146621 - DNA, 25 bp, Probe Sequence
acctcacattcaatgccagttaaaa

SEQ ID NO: 146622 - DNA, 25 bp, Probe Sequence
acctcaattaatcctgttttacatt

SEQ ID NO: 146623 - DNA, 25 bp, Probe Sequence
actgctaaaaatatttgtaatcctt

SEQ ID NO: 146624 - DNA, 25 bp, Probe Sequence
actgctaaaaatatttgtaatcctt

SEQ ID NO: 146625 - DNA, 25 bp, Probe Sequence
acctatacaactgtgtttaatctcc

SEQ ID NO: 146626 - DNA, 25 bp, Probe Sequence
accctacaactcagcaattccagtc

SEQ ID NO: 146627 - DNA, 25 bp, Probe Sequence
accctgaggtcctgcatttctcagt

SEQ ID NO: 146628 - DNA, 25 bp, Probe Sequence
accctgaggtcctgcatttctcagt

SEQ ID NO: 146629 - DNA, 25 bp, Probe Sequence
accccagggtcaagtttctcactgt

SEQ ID NO: 146630 - DNA, 25 bp, Probe Sequence
acccagggagtctgtgttcaccaat

SEQ ID NO: 146631 - DNA, 25 bp, Probe Sequence
acctcagggagtttggttgatggtt

SEQ ID NO: 146632 - DNA, 25 bp, Probe Sequence
acctgcggggcaaatgagtctggcg

SEQ ID NO: 146633 - DNA, 25 bp, Probe Sequence
acctgggaggcagaagtctacagtg

SEQ ID NO: 146634 - DNA, 25 bp, Probe Sequence
accgtggcacacagaagttactatg

SEQ ID NO: 146635 - DNA, 25 bp, Probe Sequence
acgcctggccagaagacatgatttt

SEQ ID NO: 146636 - DNA, 25 bp, Probe Sequence
acctcagtcccacgacagttatgtc

SEQ ID NO: 146637 - DNA, 25 bp, Probe Sequence
acctcagtgcagccaaccatgatgc

SEQ ID NO: 146638 - DNA, 25 bp, Probe Sequence
acctcaatgccctgctcatgatggc

SEQ ID NO: 146639 - DNA, 25 bp, Probe Sequence
acctgcaacctctgtcagtagtctg

SEQ ID NO: 146640 - DNA, 25 bp, Probe Sequence
acctgagaacgaagacactcagccg

SEQ ID NO: 146641 - DNA, 25 bp, Probe Sequence
acctaaacgtggaatgcatgtgact

SEQ ID NO: 146642 - DNA, 25 bp, Probe Sequence
acctagcagaggttggagctggcac

SEQ ID NO: 146643 - DNA, 25 bp, Probe Sequence
acctgcgcacgtctatggatggcaa

SEQ ID NO: 146644 - DNA, 25 bp, Probe Sequence
acctgctgcacgagtcattgtttgg

SEQ ID NO: 146645 - DNA, 25 bp, Probe Sequence
acctgatgcggtggtgcgtgtgatt

SEQ ID NO: 146646 - DNA, 25 bp, Probe Sequence
acctgcagcgtgtgggtcattttga

SEQ ID NO: 146647 - DNA, 25 bp, Probe Sequence
acctcaccgggcctgtgatatttgc

SEQ ID NO: 146648 - DNA, 25 bp, Probe Sequence
acctcaccgggcctgtgatatttgc

SEQ ID NO: 146649 - DNA, 25 bp, Probe Sequence
acctcaccgggcctgtgatatttgc

SEQ ID NO: 146650 - DNA, 25 bp, Probe Sequence
acctctcacaaggtccttatactgc

SEQ ID NO: 146651 - DNA, 25 bp, Probe Sequence
acctctgcaatagtgataatctgat

SEQ ID NO: 146652 - DNA, 25 bp, Probe Sequence
acctctgcaacctcaactatgggga

SEQ ID NO: 146653 - DNA, 25 bp, Probe Sequence
acctgtaatctcagctactcaggag

SEQ ID NO: 146654 - DNA, 25 bp, Probe Sequence
acctctatttcggttccaacatgag

SEQ ID NO: 146655 - DNA, 25 bp, Probe Sequence
accctatgtaccgcttcactgaggg

SEQ ID NO: 146656 - DNA, 25 bp, Probe Sequence
acctcttgtaccaattataggggag

SEQ ID NO: 146657 - DNA, 25 bp, Probe Sequence
accccttcccacatataagttgaga

SEQ ID NO: 146658 - DNA, 25 bp, Probe Sequence
acccgtgtcacatcgtgaatattta

SEQ ID NO: 146659 - DNA, 25 bp, Probe Sequence
acccagaggacatcgtagattaaga

SEQ ID NO: 146660 - DNA, 25 bp, Probe Sequence
acccagcagcgagcttccaaaaaga

SEQ ID NO: 146661 - DNA, 25 bp, Probe Sequence
acccctggggctaacaaagtgctgt

SEQ ID NO: 146662 - DNA, 25 bp, Probe Sequence
acccactcgggctgcaaaaggtgaa

SEQ ID NO: 146663 - DNA, 25 bp, Probe Sequence
acccctagggtcctgacaggtggat

SEQ ID NO: 146664 - DNA, 25 bp, Probe Sequence
acctcagctatgctgtcttccagtt

SEQ ID NO: 146665 - DNA, 25 bp, Probe Sequence
acctcactatggtatgctggccagc

SEQ ID NO: 146666 - DNA, 25 bp, Probe Sequence
acctccgatgagtagtgacaccggg

SEQ ID NO: 146667 - DNA, 25 bp, Probe Sequence
accccgatgaacgtccaatggggat

SEQ ID NO: 146668 - DNA, 25 bp, Probe Sequence
acctgcccagaaattaccttggtat

SEQ ID NO: 146669 - DNA, 25 bp, Probe Sequence
accgtcttaattttccattggctat

SEQ ID NO: 146670 - DNA, 25 bp, Probe Sequence
accgctcttgcaataattggcagat

SEQ ID NO: 146671 - DNA, 25 bp, Probe Sequence
acctccgtgtgatttatgagcgcat

SEQ ID NO: 146672 - DNA, 25 bp, Probe Sequence
accccaggctgagcttgctggtttc

SEQ ID NO: 146673 - DNA, 25 bp, Probe Sequence
accgtcagtaactttgctggctttt

SEQ ID NO: 146674 - DNA, 25 bp, Probe Sequence
accgaagatccctctctggatataa

SEQ ID NO: 146675 - DNA, 25 bp, Probe Sequence
accgaacaccatgccttcaattaag

SEQ ID NO: 146676 - DNA, 25 bp, Probe Sequence
accgaatcaactggagtctatgctt

SEQ ID NO: 146677 - DNA, 25 bp, Probe Sequence
accgaatcaggcggatggtcgttaa

SEQ ID NO: 146678 - DNA, 25 bp, Probe Sequence
accgtgctgcagtgcgtgaacgtgt

SEQ ID NO: 146679 - DNA, 25 bp, Probe Sequence
acctgtgaggcatggaaactgtaat

SEQ ID NO: 146680 - DNA, 25 bp, Probe Sequence
acctggggcaattacatacaaacaa

SEQ ID NO: 146681 - DNA, 25 bp, Probe Sequence
acctgcgggacatgatcatcctacc

SEQ ID NO: 146682 - DNA, 25 bp, Probe Sequence
acctcatggaacttgtcttcttgtc

SEQ ID NO: 146683 - DNA, 25 bp, Probe Sequence
acctctggaaatacttggctctgcc

SEQ ID NO: 146684 - DNA, 25 bp, Probe Sequence
acctgcagaaacacctggctgggct

SEQ ID NO: 146685 - DNA, 25 bp, Probe Sequence
acctggccttgaacgagtgcgggct

SEQ ID NO: 146686 - DNA, 25 bp, Probe Sequence
acctcagccctaacggtggtggaga

SEQ ID NO: 146687 - DNA, 25 bp, Probe Sequence
acaccccctgcctgaatggatgggt

SEQ ID NO: 146688 - DNA, 25 bp, Probe Sequence
acctcccactgtgaaatcgctggtg

SEQ ID NO: 146689 - DNA, 25 bp, Probe Sequence
acctcatccctttcacagggattgt

SEQ ID NO: 146690 - DNA, 25 bp, Probe Sequence
acctcatccttggtgtcgcaggatc

SEQ ID NO: 146691 - DNA, 25 bp, Probe Sequence
acctctcctctgctggcagattgta

SEQ ID NO: 146692 - DNA, 25 bp, Probe Sequence
acctccacagtgcagatcagttgaa

SEQ ID NO: 146693 - DNA, 25 bp, Probe Sequence
acctctcaatggttgtgcacaataa

SEQ ID NO: 146694 - DNA, 25 bp, Probe Sequence
acccgaatggagtctgcactgtgta

SEQ ID NO: 146695 - DNA, 25 bp, Probe Sequence
acgaatgaatgccagctctgcttgg

SEQ ID NO: 146696 - DNA, 25 bp, Probe Sequence
acctctgcagtctctataccaataa

SEQ ID NO: 146697 - DNA, 25 bp, Probe Sequence
acctctatatcaccaaagtcctaaa

SEQ ID NO: 146698 - DNA, 25 bp, Probe Sequence
acctcacttccagaaggccttaagg

SEQ ID NO: 146699 - DNA, 25 bp, Probe Sequence
acctacattcccagcagggctgtat

SEQ ID NO: 146700 - DNA, 25 bp, Probe Sequence
accccaatgaccagagtgcctggtt

SEQ ID NO: 146701 - DNA, 25 bp, Probe Sequence
acctccctgggagggtgctatcagt

SEQ ID NO: 146702 - DNA, 25 bp, Probe Sequence
acctccctgggagggtgctatcagt

SEQ ID NO: 146703 - DNA, 25 bp, Probe Sequence
acctcgcccggaaggagctgaagag

SEQ ID NO: 146704 - DNA, 25 bp, Probe Sequence
acctcagccttccgagtagctggaa

SEQ ID NO: 146705 - DNA, 25 bp, Probe Sequence
acctctccctcacgttactgggagc

SEQ ID NO: 146706 - DNA, 25 bp, Probe Sequence
acctgctccaaactagtgactagga

SEQ ID NO: 146707 - DNA, 25 bp, Probe Sequence
acctgtcccccaaatacatcaagat

SEQ ID NO: 146708 - DNA, 25 bp, Probe Sequence
acctgtacctcgactacaatagcat

SEQ ID NO: 146709 - DNA, 25 bp, Probe Sequence
acctgtacctcaacaacaatagcat

SEQ ID NO: 146710 - DNA, 25 bp, Probe Sequence
acctgccaccatcacaataaagtcc

SEQ ID NO: 146711 - DNA, 25 bp, Probe Sequence
acctgccaccatcacaataaagtcc

SEQ ID NO: 146712 - DNA, 25 bp, Probe Sequence
acctgaccgactacctcatgaagat

SEQ ID NO: 146713 - DNA, 25 bp, Probe Sequence
accgacactggttcccatgaagcgg

SEQ ID NO: 146714 - DNA, 25 bp, Probe Sequence
acctgttctggtagctccacaagag

SEQ ID NO: 146715 - DNA, 25 bp, Probe Sequence
acctcttatgctcagcaccaacagg

SEQ ID NO: 146716 - DNA, 25 bp, Probe Sequence
acctctctggtgctgacatcaagag

SEQ ID NO: 146717 - DNA, 25 bp, Probe Sequence
acctctctggtgctgacatcaagag

SEQ ID NO: 146718 - DNA, 25 bp, Probe Sequence
acctcttttctgcatcatctgtaga

SEQ ID NO: 146719 - DNA, 25 bp, Probe Sequence
acctcattcttcatttcagatctga

SEQ ID NO: 146720 - DNA, 25 bp, Probe Sequence
acctcattcttcatttcagatctga

SEQ ID NO: 146721 - DNA, 25 bp, Probe Sequence
accgaagccctgtttcagacagacc

SEQ ID NO: 146722 - DNA, 25 bp, Probe Sequence
acctggagcccaagtataaagaact

SEQ ID NO: 146723 - DNA, 25 bp, Probe Sequence
acctgagacccaatgagaatcaaca

SEQ ID NO: 146724 - DNA, 25 bp, Probe Sequence
acctgagcctcagagtaatcccagc

SEQ ID NO: 146725 - DNA, 25 bp, Probe Sequence
acctgaccagagctgaagctcccgc

SEQ ID NO: 146726 - DNA, 25 bp, Probe Sequence
acctcaatcaggactttgtcccaga

SEQ ID NO: 146727 - DNA, 25 bp, Probe Sequence
acctcaacaggactttgtccagact

SEQ ID NO: 146728 - DNA, 25 bp, Probe Sequence
acctcaaaacactttcccatgagtg

SEQ ID NO: 146729 - DNA, 25 bp, Probe Sequence
accccataggactttccagtgacgt

SEQ ID NO: 146730 - DNA, 25 bp, Probe Sequence
accccatcggttttgaagtgtctga

SEQ ID NO: 146731 - DNA, 25 bp, Probe Sequence
acctcagtcggcttaatcagagtgt

SEQ ID NO: 146732 - DNA, 25 bp, Probe Sequence
acctgtgtgccattttaagagttac

SEQ ID NO: 146733 - DNA, 25 bp, Probe Sequence
acctgctggatttttcaagcactaa

SEQ ID NO: 146734 - DNA, 25 bp, Probe Sequence
acctgttatctactcccagaaataa

SEQ ID NO: 146735 - DNA, 25 bp, Probe Sequence
acctgaatactctcctgagaaaaga

SEQ ID NO: 146736 - DNA, 25 bp, Probe Sequence
acctggctgttctccgaggatatga

SEQ ID NO: 146737 - DNA, 25 bp, Probe Sequence
acctcgctcttctcagaagtgacac

SEQ ID NO: 146738 - DNA, 25 bp, Probe Sequence
acctccctcttcttcaaggagcatc

SEQ ID NO: 146739 - DNA, 25 bp, Probe Sequence
acctcacccatgacactacgggtct

SEQ ID NO: 146740 - DNA, 25 bp, Probe Sequence
acctcccatatttatggcgtgtgtt

SEQ ID NO: 146741 - DNA, 25 bp, Probe Sequence
acctctccagagcacttagtgctgc

SEQ ID NO: 146742 - DNA, 25 bp, Probe Sequence
accccacagcactagttattcatgc

SEQ ID NO: 146743 - DNA, 25 bp, Probe Sequence
accgcaccagccaagagaatatctc

SEQ ID NO: 146744 - DNA, 25 bp, Probe Sequence
accgctcgggcatggagaattccgc

SEQ ID NO: 146745 - DNA, 25 bp, Probe Sequence
acctccggccatggtggaagaactc

SEQ ID NO: 146746 - DNA, 25 bp, Probe Sequence
acctgcgggaccatggggagacagc

SEQ ID NO: 146747 - DNA, 25 bp, Probe Sequence
accgtcaccaccttggtggagaaca

SEQ ID NO: 146748 - DNA, 25 bp, Probe Sequence
acctctgaccacttgtgttaggaaa

SEQ ID NO: 146749 - DNA, 25 bp, Probe Sequence
acctctgaagccttctttgtggcct

SEQ ID NO: 146750 - DNA, 25 bp, Probe Sequence
acctcataagtcatgtctcttgggc

SEQ ID NO: 146751 - DNA, 25 bp, Probe Sequence
acctcatatgagtctttgatcttga

SEQ ID NO: 146752 - DNA, 25 bp, Probe Sequence
acctcatatgagtctttgatcttga

SEQ ID NO: 146753 - DNA, 25 bp, Probe Sequence
acctctatgaggggctggtcatgac

SEQ ID NO: 146754 - DNA, 25 bp, Probe Sequence
acctcagctgacagcgtgggcaacg

SEQ ID NO: 146755 - DNA, 25 bp, Probe Sequence
acctcctggcaactatgggaactat

SEQ ID NO: 146756 - DNA, 25 bp, Probe Sequence
acctcgctcgcaagtatcaagaaag

SEQ ID NO: 146757 - DNA, 25 bp, Probe Sequence
acctgagatcgcgagttcaacatga

SEQ ID NO: 146758 - DNA, 25 bp, Probe Sequence
acctgcaacatgacagtctaatcag

SEQ ID NO: 146759 - DNA, 25 bp, Probe Sequence
acctcaaatgcctgtgacacagcca

SEQ ID NO: 146760 - DNA, 25 bp, Probe Sequence
acctgccaatattgagttcactgcc

SEQ ID NO: 146761 - DNA, 25 bp, Probe Sequence
accccaaatgcaagcttcaccttgg

SEQ ID NO: 146762 - DNA, 25 bp, Probe Sequence
acccagcaaagccacaggcacgggg

SEQ ID NO: 146763 - DNA, 25 bp, Probe Sequence
acccagcaaagccacaggcacgggg

SEQ ID NO: 146764 - DNA, 25 bp, Probe Sequence
accgcaagatagcagctggccgggc

SEQ ID NO: 146765 - DNA, 25 bp, Probe Sequence
acctgcaataggcgggtgggtgcgt

SEQ ID NO: 146766 - DNA, 25 bp, Probe Sequence
accgtagctgggtgtggtggtgcat

SEQ ID NO: 146767 - DNA, 25 bp, Probe Sequence
accggatgctggcagggaggtggca

SEQ ID NO: 146768 - DNA, 25 bp, Probe Sequence
accggatgctggcagggaggtggca

SEQ ID NO: 146769 - DNA, 25 bp, Probe Sequence
accgcaatggcagcgggacgctgga

SEQ ID NO: 146770 - DNA, 25 bp, Probe Sequence
acctgccaggcaggggtgggggtgg

SEQ ID NO: 146771 - DNA, 25 bp, Probe Sequence
accccagccaactcattgggttgta

SEQ ID NO: 146772 - DNA, 25 bp, Probe Sequence
accccgccaagctcaagcgggcaaa

SEQ ID NO: 146773 - DNA, 25 bp, Probe Sequence
accgccccacctgtaggggatgaag

SEQ ID NO: 146774 - DNA, 25 bp, Probe Sequence
acctgcctctacttcgtggaggagg

SEQ ID NO: 146775 - DNA, 25 bp, Probe Sequence
acctcagcttgttcagcttggaggt

SEQ ID NO: 146776 - DNA, 25 bp, Probe Sequence
acctcagcactgtcaagcggaagat

SEQ ID NO: 146777 - DNA, 25 bp, Probe Sequence
acctgctgcacggatacatgggaat

SEQ ID NO: 146778 - DNA, 25 bp, Probe Sequence
acctgccctgcctacaggttatgat

SEQ ID NO: 146779 - DNA, 25 bp, Probe Sequence
acctgccacgaagagggattgctcc

SEQ ID NO: 146780 - DNA, 25 bp, Probe Sequence
acctctcacaatttaggcagaagct

SEQ ID NO: 146781 - DNA, 25 bp, Probe Sequence
acctccacaccattaacaagatgag

SEQ ID NO: 146782 - DNA, 25 bp, Probe Sequence
acctcccacactacacagacagtgg

SEQ ID NO: 146783 - DNA, 25 bp, Probe Sequence
acctcagcctcccaaagtgctggga

SEQ ID NO: 146784 - DNA, 25 bp, Probe Sequence
acctcagcctcccaaagtgctggga

SEQ ID NO: 146785 - DNA, 25 bp, Probe Sequence
acctggattcttgaaggcagtggat

SEQ ID NO: 146786 - DNA, 25 bp, Probe Sequence
acccgagtttagtaacagtgcagat

SEQ ID NO: 146787 - DNA, 25 bp, Probe Sequence
accctgtctaaactaatggcgcagt

SEQ ID NO: 146788 - DNA, 25 bp, Probe Sequence
accgcatttatagatcagatggcca

SEQ ID NO: 146789 - DNA, 25 bp, Probe Sequence
acgccattattacgacagtaccatt

SEQ ID NO: 146790 - DNA, 25 bp, Probe Sequence
acgtgcatgtaataagactcctata

SEQ ID NO: 146791 - DNA, 25 bp, Probe Sequence
acctcagaataatagactccacaca

SEQ ID NO: 146792 - DNA, 25 bp, Probe Sequence
acctgagagataaggaccaccccag

SEQ ID NO: 146793 - DNA, 25 bp, Probe Sequence
acctgagtgataaagtgagacccta

SEQ ID NO: 146794 - DNA, 25 bp, Probe Sequence
acctgaagaaaggcttgcacctgta

SEQ ID NO: 146795 - DNA, 25 bp, Probe Sequence
acctgggcaagagctgtagcctgtc

SEQ ID NO: 146796 - DNA, 25 bp, Probe Sequence
acctgaccaaggtgccagctattca

SEQ ID NO: 146797 - DNA, 25 bp, Probe Sequence
acctggccaaggtgctagtgtatga

SEQ ID NO: 146798 - DNA, 25 bp, Probe Sequence
accggccatcaggtggtactacacc

SEQ ID NO: 146799 - DNA, 25 bp, Probe Sequence
accggtcaccaggagtgaaaacagc

SEQ ID NO: 146800 - DNA, 25 bp, Probe Sequence
acctggtgccgacaagaaagccgag

SEQ ID NO: 146801 - DNA, 25 bp, Probe Sequence
acctggtgccgacaagaaagccgag

SEQ ID NO: 146802 - DNA, 25 bp, Probe Sequence
acctgtgcaccataaagaatttcaa

SEQ ID NO: 146803 - DNA, 25 bp, Probe Sequence
acctgtgcaccataaagaatttcaa

SEQ ID NO: 146804 - DNA, 25 bp, Probe Sequence
acctgctcaacatgtaattatttaa

SEQ ID NO: 146805 - DNA, 25 bp, Probe Sequence
acctgctcaaaatacagttctgctt

SEQ ID NO: 146806 - DNA, 25 bp, Probe Sequence
accctcacaaacacagtagtctata

SEQ ID NO: 146807 - DNA, 25 bp, Probe Sequence
acctctccttcctcagaatagtgat

SEQ ID NO: 146808 - DNA, 25 bp, Probe Sequence
acctctccttcctcagaatagtgat

SEQ ID NO: 146809 - DNA, 25 bp, Probe Sequence
acctctgcctttttaaacatgctat

SEQ ID NO: 146810 - DNA, 25 bp, Probe Sequence
acctccctgttcttatgaattcgaa

SEQ ID NO: 146811 - DNA, 25 bp, Probe Sequence
acctccctgttcttatgaattcgaa

SEQ ID NO: 146812 - DNA, 25 bp, Probe Sequence
accccacaattttatgacttccatt

SEQ ID NO: 146813 - DNA, 25 bp, Probe Sequence
acccagccagaattttgacttctag

SEQ ID NO: 146814 - DNA, 25 bp, Probe Sequence
accgaccagatgtttgtgttctttc

SEQ ID NO: 146815 - DNA, 25 bp, Probe Sequence
acccccgatgtcatctgtattctct

SEQ ID NO: 146816 - DNA, 25 bp, Probe Sequence
acctctgttgaggctcactattttt

SEQ ID NO: 146817 - DNA, 25 bp, Probe Sequence
acctctcctacgtattattttcttg

SEQ ID NO: 146818 - DNA, 25 bp, Probe Sequence
acctctctttagctcaatttctggg

SEQ ID NO: 146819 - DNA, 25 bp, Probe Sequence
acctcttattcacctgccgaagctg

SEQ ID NO: 146820 - DNA, 25 bp, Probe Sequence
acctcctcattctaacctgaatcgg

SEQ ID NO: 146821 - DNA, 25 bp, Probe Sequence
acctcgttttcatcgtctgtcaggt

SEQ ID NO: 146822 - DNA, 25 bp, Probe Sequence
acctctggtttgtgctatttatgga

SEQ ID NO: 146823 - DNA, 25 bp, Probe Sequence
acctctgtggttgtcgggacatgga

SEQ ID NO: 146824 - DNA, 25 bp, Probe Sequence
acccgggttgagaggagctctggtc

SEQ ID NO: 146825 - DNA, 25 bp, Probe Sequence
accccgagctgttgaggtacttgct

SEQ ID NO: 146826 - DNA, 25 bp, Probe Sequence
acctccagaggaaatcgtagctatc

SEQ ID NO: 146827 - DNA, 25 bp, Probe Sequence
acctcttagagaattcagtaccaac

SEQ ID NO: 146828 - DNA, 25 bp, Probe Sequence
acccttgtgatgcattaggtccacc

SEQ ID NO: 146829 - DNA, 25 bp, Probe Sequence
accccgaagcgaactggatccacgc

SEQ ID NO: 146830 - DNA, 25 bp, Probe Sequence
accccgtctcgtactggatatacgt

SEQ ID NO: 146831 - DNA, 25 bp, Probe Sequence
cacccggccggatgctggagaaggg

SEQ ID NO: 146832 - DNA, 25 bp, Probe Sequence
acctcggggatgtgtgcagacaggg

SEQ ID NO: 146833 - DNA, 25 bp, Probe Sequence
acctcgacggtgcactgcagagagc

SEQ ID NO: 146834 - DNA, 25 bp, Probe Sequence
acccaaggtcatcatcatgcaagcc

SEQ ID NO: 146835 - DNA, 25 bp, Probe Sequence
acccacgtgtcaaaattcagaccca

SEQ ID NO: 146836 - DNA, 25 bp, Probe Sequence
accccgtaaacttgctcaacgacat

SEQ ID NO: 146837 - DNA, 25 bp, Probe Sequence
accgactatgagaactatgccctcg

SEQ ID NO: 146838 - DNA, 25 bp, Probe Sequence
acctgcctgtagacaagtctctctc

SEQ ID NO: 146839 - DNA, 25 bp, Probe Sequence
acccctggaaaccatgcatctcaat

SEQ ID NO: 146840 - DNA, 25 bp, Probe Sequence
aaatccaggaagtccctctcctggt

SEQ ID NO: 146841 - DNA, 25 bp, Probe Sequence
accccaggaagtaccttcgcagtgt

SEQ ID NO: 146842 - DNA, 25 bp, Probe Sequence
accccagtggtatcctgtgacatgt

SEQ ID NO: 146843 - DNA, 25 bp, Probe Sequence
accccaggtacatccatgaactgcg

SEQ ID NO: 146844 - DNA, 25 bp, Probe Sequence
accccaaggacatcgatgatgacct

SEQ ID NO: 146845 - DNA, 25 bp, Probe Sequence
acgctccaactgatccagatgctac

SEQ ID NO: 146846 - DNA, 25 bp, Probe Sequence
acctcctgtatgttgccatattaca

SEQ ID NO: 146847 - DNA, 25 bp, Probe Sequence
acctctctgtaaccgtattctttga

SEQ ID NO: 146848 - DNA, 25 bp, Probe Sequence
acccctataaccatcattctgatta

SEQ ID NO: 146849 - DNA, 25 bp, Probe Sequence
accccttcaaacatgttgctttgct

SEQ ID NO: 146850 - DNA, 25 bp, Probe Sequence
acctctgcttcaacaatttggcctt

SEQ ID NO: 146851 - DNA, 25 bp, Probe Sequence
acctctgcttcaacaatttggcctt

SEQ ID NO: 146852 - DNA, 25 bp, Probe Sequence
acctgcactttttgtatgtggactt

SEQ ID NO: 146853 - DNA, 25 bp, Probe Sequence
acctgcttttgtttctgtgagatga

SEQ ID NO: 146854 - DNA, 25 bp, Probe Sequence
acctgcctgcataggagtttggagg

SEQ ID NO: 146855 - DNA, 25 bp, Probe Sequence
acctctgcatccatggtgacggagg

SEQ ID NO: 146856 - DNA, 25 bp, Probe Sequence
acctccccaccgaatctggagagct

SEQ ID NO: 146857 - DNA, 25 bp, Probe Sequence
acccccccaatttctgtgagatgga

SEQ ID NO: 146858 - DNA, 25 bp, Probe Sequence
acccccagaacatatcctgaagaga

SEQ ID NO: 146859 - DNA, 25 bp, Probe Sequence
accggctctggaaaatccgcaagac

SEQ ID NO: 146860 - DNA, 25 bp, Probe Sequence
accgtgtgggatgaggccgagcaag

SEQ ID NO: 146861 - DNA, 25 bp, Probe Sequence
accggtggcgatgtcagcggatgtc

SEQ ID NO: 146862 - DNA, 25 bp, Probe Sequence
accggcttactcttagcaggattct

SEQ ID NO: 146863 - DNA, 25 bp, Probe Sequence
acgtgtttcacgttgacaggtttgc

SEQ ID NO: 146864 - DNA, 25 bp, Probe Sequence
acgtgtccaacgaggtggtcaagct

SEQ ID NO: 146865 - DNA, 25 bp, Probe Sequence
acagtgtccgggtggttaagagcat

SEQ ID NO: 146866 - DNA, 25 bp, Probe Sequence
acaggccccggatggtgtgggacag

SEQ ID NO: 146867 - DNA, 25 bp, Probe Sequence
acggtcccagacaggtggttgtagc

SEQ ID NO: 146868 - DNA, 25 bp, Probe Sequence
acggacccatacagtttgaatacag

SEQ ID NO: 146869 - DNA, 25 bp, Probe Sequence
acctcctcctactgttcaagtacag

SEQ ID NO: 146870 - DNA, 25 bp, Probe Sequence
acctccttccagttttacagcaaag

SEQ ID NO: 146871 - DNA, 25 bp, Probe Sequence
acctgcttgtcttatttttagcata

SEQ ID NO: 146872 - DNA, 25 bp, Probe Sequence
acctgcttcttctatatgatacaat

SEQ ID NO: 146873 - DNA, 25 bp, Probe Sequence
acctcgttgcactgctgagagcaag

SEQ ID NO: 146874 - DNA, 25 bp, Probe Sequence
acctctggtatctgagcacagacag

SEQ ID NO: 146875 - DNA, 25 bp, Probe Sequence
acctcctgtatctggagctgggaga

SEQ ID NO: 146876 - DNA, 25 bp, Probe Sequence
acctcgcttaagggcagggagaagc

SEQ ID NO: 146877 - DNA, 25 bp, Probe Sequence
acccggtccagtactgggagataca

SEQ ID NO: 146878 - DNA, 25 bp, Probe Sequence
accctggcctatccattggggatac

SEQ ID NO: 146879 - DNA, 25 bp, Probe Sequence
accctacctgtcttgctgaagggag

SEQ ID NO: 146880 - DNA, 25 bp, Probe Sequence
accccccagtcatgagtcatgggtg

SEQ ID NO: 146881 - DNA, 25 bp, Probe Sequence
accccagccaggagactattacgtt

SEQ ID NO: 146882 - DNA, 25 bp, Probe Sequence
accccaccacagaatatctcattac

SEQ ID NO: 146883 - DNA, 25 bp, Probe Sequence
accccatctaccaattccatataga

SEQ ID NO: 146884 - DNA, 25 bp, Probe Sequence
acccaatcttcccaatactttcagg

SEQ ID NO: 146885 - DNA, 25 bp, Probe Sequence
accccactgggacacaagttcagag

SEQ ID NO: 146886 - DNA, 25 bp, Probe Sequence
acccaccgggtggtaagcacacagg

SEQ ID NO: 146887 - DNA, 25 bp, Probe Sequence
accgcaccgggcgattggaacacag

SEQ ID NO: 146888 - DNA, 25 bp, Probe Sequence
accccaagggccatgggagccagct

SEQ ID NO: 146889 - DNA, 25 bp, Probe Sequence
accctaatgagaacggggagctgcc

SEQ ID NO: 146890 - DNA, 25 bp, Probe Sequence
accgtcaatggagcagaggcgggga

SEQ ID NO: 146891 - DNA, 25 bp, Probe Sequence
aacgtcgggagcacagtcgggagag

SEQ ID NO: 146892 - DNA, 25 bp, Probe Sequence
accgatggggacttcgatctggagg

SEQ ID NO: 146893 - DNA, 25 bp, Probe Sequence
acctcgggatactgcacacggagag

SEQ ID NO: 146894 - DNA, 25 bp, Probe Sequence
acctgctggtgctcttgacaaagac

SEQ ID NO: 146895 - DNA, 25 bp, Probe Sequence
acctcgcagagctcctgacaaaggc

SEQ ID NO: 146896 - DNA, 25 bp, Probe Sequence
acgacctactcatctgacaaagggc

SEQ ID NO: 146897 - DNA, 25 bp, Probe Sequence
acccctctgcctggtactaaggagt

SEQ ID NO: 146898 - DNA, 25 bp, Probe Sequence
accccaatgtatgctatcataagga

SEQ ID NO: 146899 - DNA, 25 bp, Probe Sequence
accccaataatgttctatatagcct

SEQ ID NO: 146900 - DNA, 25 bp, Probe Sequence
acccacttaagagctatgtatgacc

SEQ ID NO: 146901 - DNA, 25 bp, Probe Sequence
accccaccacaagtctatagaacca

SEQ ID NO: 146902 - DNA, 25 bp, Probe Sequence
accccagcagaagccttcatacaac

SEQ ID NO: 146903 - DNA, 25 bp, Probe Sequence
accccatgagacaagaagtacacaa

SEQ ID NO: 146904 - DNA, 25 bp, Probe Sequence
acccctgctccttggaggacaacgt

SEQ ID NO: 146905 - DNA, 25 bp, Probe Sequence
acctggctgctattgcaggaggcca

SEQ ID NO: 146906 - DNA, 25 bp, Probe Sequence
acctggtgctgcacatggacgacag

SEQ ID NO: 146907 - DNA, 25 bp, Probe Sequence
acctggttgatcctgccagtagcat

SEQ ID NO: 146908 - DNA, 25 bp, Probe Sequence
acctgagcatagtgtccacttgtga

SEQ ID NO: 146909 - DNA, 25 bp, Probe Sequence
acctgcacagaaagatccaccggat

SEQ ID NO: 146910 - DNA, 25 bp, Probe Sequence
acccatctgcaaaatcccggaagga

SEQ ID NO: 146911 - DNA, 25 bp, Probe Sequence
accgctgtcaatcttgcctggacag

SEQ ID NO: 146912 - DNA, 25 bp, Probe Sequence
acgcggccaatgtgggctggaacaa

SEQ ID NO: 146913 - DNA, 25 bp, Probe Sequence
acctggccacagttgaggggaactt

SEQ ID NO: 146914 - DNA, 25 bp, Probe Sequence
acctccacacagaatcgggggactg

SEQ ID NO: 146915 - DNA, 25 bp, Probe Sequence
acctgatcaagctttcggtgagggc

SEQ ID NO: 146916 - DNA, 25 bp, Probe Sequence
acctgtcatccacgtctagtcaggg

SEQ ID NO: 146917 - DNA, 25 bp, Probe Sequence
acctgcatgttctggttgtctgtgt

SEQ ID NO: 146918 - DNA, 25 bp, Probe Sequence
acctgtggctagggtctacttctac

SEQ ID NO: 146919 - DNA, 25 bp, Probe Sequence
accgtggatcagactgcttgcactc

SEQ ID NO: 146920 - DNA, 25 bp, Probe Sequence
acctgatttcagccttcagaatctc

SEQ ID NO: 146921 - DNA, 25 bp, Probe Sequence
acctgtcttgctcctatggagtcac

SEQ ID NO: 146922 - DNA, 25 bp, Probe Sequence
acctgtacgcatccatcagggcagg

SEQ ID NO: 146923 - DNA, 25 bp, Probe Sequence
accggcagcagacgcacatgctgga

SEQ ID NO: 146924 - DNA, 25 bp, Probe Sequence
accgtgcagacgcactgcaggcagg

SEQ ID NO: 146925 - DNA, 25 bp, Probe Sequence
acctggagaactctgcatcctggta

SEQ ID NO: 146926 - DNA, 25 bp, Probe Sequence
acctgggaattcctgcacggaagac

SEQ ID NO: 146927 - DNA, 25 bp, Probe Sequence
accgggaagatgctgccgagaaggc

SEQ ID NO: 146928 - DNA, 25 bp, Probe Sequence
acctgcgtgggatctccgagcagag

SEQ ID NO: 146929 - DNA, 25 bp, Probe Sequence
acgagcggaggaacgccgagcagta

SEQ ID NO: 146930 - DNA, 25 bp, Probe Sequence
acgagaggcgggagtcagccactgc

SEQ ID NO: 146931 - DNA, 25 bp, Probe Sequence
actgcaagagggctggaaacacatt

SEQ ID NO: 146932 - DNA, 25 bp, Probe Sequence
ctctaagaggtgctgccccaaagct

SEQ ID NO: 146933 - DNA, 25 bp, Probe Sequence
actgtaaatgtgccttagcctaagc

SEQ ID NO: 146934 - DNA, 25 bp, Probe Sequence
acctgataaattcatagcccaacaa

SEQ ID NO: 146935 - DNA, 25 bp, Probe Sequence
acctgtgaaatcaaatcaccacctc

SEQ ID NO: 146936 - DNA, 25 bp, Probe Sequence
acctggcagtattaatacccttctt

SEQ ID NO: 146937 - DNA, 25 bp, Probe Sequence
accggcgcatcatcaaaaatcctat

SEQ ID NO: 146938 - DNA, 25 bp, Probe Sequence
acctgctgcctttcacagcaaactt

SEQ ID NO: 146939 - DNA, 25 bp, Probe Sequence
acctgttttgacctctatgacttta

SEQ ID NO: 146940 - DNA, 25 bp, Probe Sequence
acctgtatttgtttgaatgcctatt

SEQ ID NO: 146941 - DNA, 25 bp, Probe Sequence
acctgtacactgacttgagaccagt

SEQ ID NO: 146942 - DNA, 25 bp, Probe Sequence
acctgctcccaaatcatgggccagt

SEQ ID NO: 146943 - DNA, 25 bp, Probe Sequence
acctgctccaaaggcatctggcaag

SEQ ID NO: 146944 - DNA, 25 bp, Probe Sequence
acctgctccaaaggcatctggcaag

SEQ ID NO: 146945 - DNA, 25 bp, Probe Sequence
accctgtaagtggctgcggcgggaa

SEQ ID NO: 146946 - DNA, 25 bp, Probe Sequence
acccttatggtggagaacgctggca

SEQ ID NO: 146947 - DNA, 25 bp, Probe Sequence
acctgcccaggtgaacacagcggct

SEQ ID NO: 146948 - DNA, 25 bp, Probe Sequence
acctcctctgttcaatcatgggtgt

SEQ ID NO: 146949 - DNA, 25 bp, Probe Sequence
acctccaagtggtaacaggactgat

SEQ ID NO: 146950 - DNA, 25 bp, Probe Sequence
aaatcctttggatacagtcaataaa

SEQ ID NO: 146951 - DNA, 25 bp, Probe Sequence
acctcctaagtatcaagtatagaaa

SEQ ID NO: 146952 - DNA, 25 bp, Probe Sequence
acccactaaatgagcaggttacaag

SEQ ID NO: 146953 - DNA, 25 bp, Probe Sequence
acgccctccaagactatggtaaaag

SEQ ID NO: 146954 - DNA, 25 bp, Probe Sequence
accccttcagtgtctatgtgtttta

SEQ ID NO: 146955 - DNA, 25 bp, Probe Sequence
accccattgacgtctatgggtgttt

SEQ ID NO: 146956 - DNA, 25 bp, Probe Sequence
caccccttgtcagccgggtgggtag

SEQ ID NO: 146957 - DNA, 25 bp, Probe Sequence
acccctgctgttgcctgggcagggg

SEQ ID NO: 146958 - DNA, 25 bp, Probe Sequence
acacccttgaagatttggcctgggc

SEQ ID NO: 146959 - DNA, 25 bp, Probe Sequence
acccttttagacattgacttaggcg

SEQ ID NO: 146960 - DNA, 25 bp, Probe Sequence
acccttggtgggcagcttttagccg

SEQ ID NO: 146961 - DNA, 25 bp, Probe Sequence
acccataaagggaacacatttgact

SEQ ID NO: 146962 - DNA, 25 bp, Probe Sequence
accctcaaaggggcacagcagattt

SEQ ID NO: 146963 - DNA, 25 bp, Probe Sequence
accccaagctgggagcacatcttgt

SEQ ID NO: 146964 - DNA, 25 bp, Probe Sequence
accccaaccagagtgacctgattga

SEQ ID NO: 146965 - DNA, 25 bp, Probe Sequence
accccgactcgcagacaatgatggt

SEQ ID NO: 146966 - DNA, 25 bp, Probe Sequence
accccgacccagaagcaggtcgtct

SEQ ID NO: 146967 - DNA, 25 bp, Probe Sequence
acccccaagtgcatatgggtctgtc

SEQ ID NO: 146968 - DNA, 25 bp, Probe Sequence
actcccccagagcttgtggatctgg

SEQ ID NO: 146969 - DNA, 25 bp, Probe Sequence
accccctctcggagcaggttgagga

SEQ ID NO: 146970 - DNA, 25 bp, Probe Sequence
acccctgctcaacagaggtttagtt

SEQ ID NO: 146971 - DNA, 25 bp, Probe Sequence
accccctgaactccagatgtttgca

SEQ ID NO: 146972 - DNA, 25 bp, Probe Sequence
accccttacgtgagatgttgctgca

SEQ ID NO: 146973 - DNA, 25 bp, Probe Sequence
accccagtgacgtcatgcgagttgg

SEQ ID NO: 146974 - DNA, 25 bp, Probe Sequence
accccagtactgtgatagagctgtc

SEQ ID NO: 146975 - DNA, 25 bp, Probe Sequence
acccaactactgagctgagaccact

SEQ ID NO: 146976 - DNA, 25 bp, Probe Sequence
acgcctactaccagcagctgaacac

SEQ ID NO: 146977 - DNA, 25 bp, Probe Sequence
acccattccaccagagagtagcaca

SEQ ID NO: 146978 - DNA, 25 bp, Probe Sequence
acgcctgtcacagagtagaaactca

SEQ ID NO: 146979 - DNA, 25 bp, Probe Sequence
accctttcaacacatctacactagt

SEQ ID NO: 146980 - DNA, 25 bp, Probe Sequence
accctgtaactccacctgagttaca

SEQ ID NO: 146981 - DNA, 25 bp, Probe Sequence
accctgaagttggtcctgatgtctt

SEQ ID NO: 146982 - DNA, 25 bp, Probe Sequence
acctgaaggttggaattgagtttgg

SEQ ID NO: 146983 - DNA, 25 bp, Probe Sequence
acctgaagatgttcgcgattatctt

SEQ ID NO: 146984 - DNA, 25 bp, Probe Sequence
acctggagcaggtgcgcatgggcat

SEQ ID NO: 146985 - DNA, 25 bp, Probe Sequence
acctgaccaagatgacagcatggag

SEQ ID NO: 146986 - DNA, 25 bp, Probe Sequence
acctgacgcggaatgacctggacac

SEQ ID NO: 146987 - DNA, 25 bp, Probe Sequence
acctgacctgccaatcattagggag

SEQ ID NO: 146988 - DNA, 25 bp, Probe Sequence
acctgacctgcaactcaaaggcttt

SEQ ID NO: 146989 - DNA, 25 bp, Probe Sequence
acctgacgtagagattatgagtctt

SEQ ID NO: 146990 - DNA, 25 bp, Probe Sequence
accgacttcaaggaatgggtgcttc

SEQ ID NO: 146991 - DNA, 25 bp, Probe Sequence
accgagctgtcagcaagacggtgta

SEQ ID NO: 146992 - DNA, 25 bp, Probe Sequence
acctggtgtcccgtgaggagtgtga

SEQ ID NO: 146993 - DNA, 25 bp, Probe Sequence
acctggcttctccatgtgaggggat

SEQ ID NO: 146994 - DNA, 25 bp, Probe Sequence
acctgtagtctacttgagagtggag

SEQ ID NO: 146995 - DNA, 25 bp, Probe Sequence
accgtatgtcaccaagagatgatgg

SEQ ID NO: 146996 - DNA, 25 bp, Probe Sequence
accgtgtgtcacaacaggctagggc

SEQ ID NO: 146997 - DNA, 25 bp, Probe Sequence
acgcgatgttgactgcacaggtaat

SEQ ID NO: 146998 - DNA, 25 bp, Probe Sequence
acctgagactgtcgcagaggctgtc

SEQ ID NO: 146999 - DNA, 25 bp, Probe Sequence
acctggatcatctcagcaggctcct

SEQ ID NO: 147000 - DNA, 25 bp, Probe Sequence
acctggattctattgccagctctgt

SEQ ID NO: 147001 - DNA, 25 bp, Probe Sequence
acctgctttgcatattcacacatgg

SEQ ID NO: 147002 - DNA, 25 bp, Probe Sequence
acctggtctgcatgtatgcccgaat

SEQ ID NO: 147003 - DNA, 25 bp, Probe Sequence
acctgagtcagcagaatctacaaat

SEQ ID NO: 147004 - DNA, 25 bp, Probe Sequence
acctgtgccacaggtgaccaccaat

SEQ ID NO: 147005 - DNA, 25 bp, Probe Sequence
acgctgtcctcagggaccattaggg

SEQ ID NO: 147006 - DNA, 25 bp, Probe Sequence
acctgcttccaacttcactttggag

SEQ ID NO: 147007 - DNA, 25 bp, Probe Sequence
accccgcggagatcctttgagaaat

SEQ ID NO: 147008 - DNA, 25 bp, Probe Sequence
accctttggtacaccttgcaaaatg

SEQ ID NO: 147009 - DNA, 25 bp, Probe Sequence
accctattacttatgcctgggaagg

SEQ ID NO: 147010 - DNA, 25 bp, Probe Sequence
accctaatacttttctccactgaat

SEQ ID NO: 147011 - DNA, 25 bp, Probe Sequence
acctgcatatacatttttccatttt

SEQ ID NO: 147012 - DNA, 25 bp, Probe Sequence
acccataatggtctttcacttgtca

SEQ ID NO: 147013 - DNA, 25 bp, Probe Sequence
accccagttgtgaaagtacttcctg

SEQ ID NO: 147014 - DNA, 25 bp, Probe Sequence
acgaccactttgtcaagctcatttc

SEQ ID NO: 147015 - DNA, 25 bp, Probe Sequence
acgaccactttgccaaagctctggg

SEQ ID NO: 147016 - DNA, 25 bp, Probe Sequence
acgcaaacttcgtactttctatgag

SEQ ID NO: 147017 - DNA, 25 bp, Probe Sequence
acccaacttctccactatacaatgg

SEQ ID NO: 147018 - DNA, 25 bp, Probe Sequence
accgagacttctcctctatgaaatg

SEQ ID NO: 147019 - DNA, 25 bp, Probe Sequence
accgtgatccttattgagagagcca

SEQ ID NO: 147020 - DNA, 25 bp, Probe Sequence
accgtacgtcatatgctgaggaggc

SEQ ID NO: 147021 - DNA, 25 bp, Probe Sequence
acgactacgactatcccgaagagga

SEQ ID NO: 147022 - DNA, 25 bp, Probe Sequence
acccccagagctttcagggcaaggg

SEQ ID NO: 147023 - DNA, 25 bp, Probe Sequence
acccccatcctagaaccagagagga

SEQ ID NO: 147024 - DNA, 25 bp, Probe Sequence
accctgtctgactacaacatccaga

SEQ ID NO: 147025 - DNA, 25 bp, Probe Sequence
accctgtctgactacaacatccaga

SEQ ID NO: 147026 - DNA, 25 bp, Probe Sequence
accctggcgatgtcaccagcatggt

SEQ ID NO: 147027 - DNA, 25 bp, Probe Sequence
accgctggccattacacaggttttg

SEQ ID NO: 147028 - DNA, 25 bp, Probe Sequence
acctgttgctattaatggttttaga

SEQ ID NO: 147029 - DNA, 25 bp, Probe Sequence
accgttgctggatctgctgtttgaa

SEQ ID NO: 147030 - DNA, 25 bp, Probe Sequence
accgttgtcagcacttggaatacaa

SEQ ID NO: 147031 - DNA, 25 bp, Probe Sequence
accgtagtcactgtatggaataatt

SEQ ID NO: 147032 - DNA, 25 bp, Probe Sequence
accccaccatctgtgattataataa

SEQ ID NO: 147033 - DNA, 25 bp, Probe Sequence
acccccaaatgttgactatccatta

SEQ ID NO: 147034 - DNA, 25 bp, Probe Sequence
acccggaaatgaggaccatcactgt

SEQ ID NO: 147035 - DNA, 25 bp, Probe Sequence
accctgagaaggagacggccgtgga

SEQ ID NO: 147036 - DNA, 25 bp, Probe Sequence
acccgagtaaatgctcaggctgctg

SEQ ID NO: 147037 - DNA, 25 bp, Probe Sequence
acctggcagtgataccatcaagcct

SEQ ID NO: 147038 - DNA, 25 bp, Probe Sequence
accggcattgtattccaaagacgac

SEQ ID NO: 147039 - DNA, 25 bp, Probe Sequence
acctgtctatcttatgccagaagac

SEQ ID NO: 147040 - DNA, 25 bp, Probe Sequence
acctggcttggcttgaaggcaatca

SEQ ID NO: 147041 - DNA, 25 bp, Probe Sequence
accgcagctaggaataatggaatag

SEQ ID NO: 147042 - DNA, 25 bp, Probe Sequence
acctggctagggaactgggggctgt

SEQ ID NO: 147043 - DNA, 25 bp, Probe Sequence
accggcgtgggaatgtgggaacagt

SEQ ID NO: 147044 - DNA, 25 bp, Probe Sequence
acccgcaatgcggagttggagcacc

SEQ ID NO: 147045 - DNA, 25 bp, Probe Sequence
acccgcaatgcggagttggagcacc

SEQ ID NO: 147046 - DNA, 25 bp, Probe Sequence
accgagaacagtatgtgtagcaggc

SEQ ID NO: 147047 - DNA, 25 bp, Probe Sequence
accggaacacgtgggactgcggctt

SEQ ID NO: 147048 - DNA, 25 bp, Probe Sequence
accggaacaagcagtgaatgtggat

SEQ ID NO: 147049 - DNA, 25 bp, Probe Sequence
acctgtgaaaagacgtcaatatctg

SEQ ID NO: 147050 - DNA, 25 bp, Probe Sequence
acctgtgaagaaggctggcactgta

SEQ ID NO: 147051 - DNA, 25 bp, Probe Sequence
acctgtgggaagacggacgtggagg

SEQ ID NO: 147052 - DNA, 25 bp, Probe Sequence
acccgcagtgaaacgaaatgtgagg

SEQ ID NO: 147053 - DNA, 25 bp, Probe Sequence
accgccagatgaaatcgaacagtcg

SEQ ID NO: 147054 - DNA, 25 bp, Probe Sequence
acgcgctcaatccgttgaacagtcg

SEQ ID NO: 147055 - DNA, 25 bp, Probe Sequence
accgcttcatgccactgaatacgtt

SEQ ID NO: 147056 - DNA, 25 bp, Probe Sequence
accgcctgtgtatataacgtttccg

SEQ ID NO: 147057 - DNA, 25 bp, Probe Sequence
accgccactgtgtgaaactgtatct

SEQ ID NO: 147058 - DNA, 25 bp, Probe Sequence
accctccggaaacggctgtatctgc

SEQ ID NO: 147059 - DNA, 25 bp, Probe Sequence
accgctttggagtacagtctttatg

SEQ ID NO: 147060 - DNA, 25 bp, Probe Sequence
acctgttcgaggcacaattcctgat

SEQ ID NO: 147061 - DNA, 25 bp, Probe Sequence
acccttccactgcccaatgtggaga

SEQ ID NO: 147062 - DNA, 25 bp, Probe Sequence
accctactgacaagcagcctgggcg

SEQ ID NO: 147063 - DNA, 25 bp, Probe Sequence
acccatctctaaagcaggacgcctg

SEQ ID NO: 147064 - DNA, 25 bp, Probe Sequence
accgatccttagccagagaactctc

SEQ ID NO: 147065 - DNA, 25 bp, Probe Sequence
acctggcatcttaggaagcagtcct

SEQ ID NO: 147066 - DNA, 25 bp, Probe Sequence
acctggctctcattataagcaatac

SEQ ID NO: 147067 - DNA, 25 bp, Probe Sequence
accggcactcagttatgcagatgat

SEQ ID NO: 147068 - DNA, 25 bp, Probe Sequence
accggcatcatcaagatcagcctga

SEQ ID NO: 147069 - DNA, 25 bp, Probe Sequence
acctgagccagaatgatggcactga

SEQ ID NO: 147070 - DNA, 25 bp, Probe Sequence
acctggcacagaatatgcactgtcc

SEQ ID NO: 147071 - DNA, 25 bp, Probe Sequence
acctgatcaatgacagagccttctg

SEQ ID NO: 147072 - DNA, 25 bp, Probe Sequence
acctgtctagcatgagatcttcttg

SEQ ID NO: 147073 - DNA, 25 bp, Probe Sequence
acctgtccactctagagcattgctt

SEQ ID NO: 147074 - DNA, 25 bp, Probe Sequence
acctgtctcacctggacttaagcgt

SEQ ID NO: 147075 - DNA, 25 bp, Probe Sequence
acctgatctaccttggacggaaaca

SEQ ID NO: 147076 - DNA, 25 bp, Probe Sequence
acctgtcccacatgagcacggagag

SEQ ID NO: 147077 - DNA, 25 bp, Probe Sequence
acctgtctgccagccagaaggcact

SEQ ID NO: 147078 - DNA, 25 bp, Probe Sequence
acccctgacctcaaatgatgtgcct

SEQ ID NO: 147079 - DNA, 25 bp, Probe Sequence
accgagctgcacttaactgttctct

SEQ ID NO: 147080 - DNA, 25 bp, Probe Sequence
acctggtgaagtacatctttgctgt

SEQ ID NO: 147081 - DNA, 25 bp, Probe Sequence
accgagtgatttccatctctggtaa

SEQ ID NO: 147082 - DNA, 25 bp, Probe Sequence
accgcaatagtgactctgtgcttgt

SEQ ID NO: 147083 - DNA, 25 bp, Probe Sequence
acctgtgattgtactcttatcatgt

SEQ ID NO: 147084 - DNA, 25 bp, Probe Sequence
accgctatggtctatctatgatcac

SEQ ID NO: 147085 - DNA, 25 bp, Probe Sequence
accggtgagtcatttgcatcactcg

SEQ ID NO: 147086 - DNA, 25 bp, Probe Sequence
accgtggagcttaagccactgcctc

SEQ ID NO: 147087 - DNA, 25 bp, Probe Sequence
acctgatggatttaactctctccct

SEQ ID NO: 147088 - DNA, 25 bp, Probe Sequence
acctgatggttataagcatttctca

SEQ ID NO: 147089 - DNA, 25 bp, Probe Sequence
acctgtctgatataaactttctctg

SEQ ID NO: 147090 - DNA, 25 bp, Probe Sequence
acggatctgagagaagccctgtcct

SEQ ID NO: 147091 - DNA, 25 bp, Probe Sequence
accgtgggcaggaacggcgtcctgc

SEQ ID NO: 147092 - DNA, 25 bp, Probe Sequence
acccgggaggtagaggctgcaatgg

SEQ ID NO: 147093 - DNA, 25 bp, Probe Sequence
accctggagggctagcaaggccttc

SEQ ID NO: 147094 - DNA, 25 bp, Probe Sequence
accgatggttcctacaagtgtttgt

SEQ ID NO: 147095 - DNA, 25 bp, Probe Sequence
cacctttttgcctcaaggtctctgt

SEQ ID NO: 147096 - DNA, 25 bp, Probe Sequence
acccctgttgcctatgtaggttctc

SEQ ID NO: 147097 - DNA, 25 bp, Probe Sequence
accccatttgccttcaggagttggc

SEQ ID NO: 147098 - DNA, 25 bp, Probe Sequence
accccactctacgatcagggtggcc

SEQ ID NO: 147099 - DNA, 25 bp, Probe Sequence
accgagaccatttgcaggaggtggc

SEQ ID NO: 147100 - DNA, 25 bp, Probe Sequence
accgaatacactttgtgatggtgag

SEQ ID NO: 147101 - DNA, 25 bp, Probe Sequence
actggtaacctgtgtatggtgactg

SEQ ID NO: 147102 - DNA, 25 bp, Probe Sequence
actggtaacctgtgtatggtgactg

SEQ ID NO: 147103 - DNA, 25 bp, Probe Sequence
actgagtaaccatcccagtaacccg

SEQ ID NO: 147104 - DNA, 25 bp, Probe Sequence
acctggcaacgctggccagtaacca

SEQ ID NO: 147105 - DNA, 25 bp, Probe Sequence
acccgaacgattcgagccttacact

SEQ ID NO: 147106 - DNA, 25 bp, Probe Sequence
actgtcgaaatgttcaggacttcaa

SEQ ID NO: 147107 - DNA, 25 bp, Probe Sequence
acgatccgggtgaaggactccttga

SEQ ID NO: 147108 - DNA, 25 bp, Probe Sequence
acgttctgtgggcagtagccctgtg

SEQ ID NO: 147109 - DNA, 25 bp, Probe Sequence
acgtatggtccatagtacccattag

SEQ ID NO: 147110 - DNA, 25 bp, Probe Sequence
acggaggattaccagtaaccaccag

SEQ ID NO: 147111 - DNA, 25 bp, Probe Sequence
acgggtgttccgaataatatcctgg

SEQ ID NO: 147112 - DNA, 25 bp, Probe Sequence
acgaaggccttcattacttacgtgc

SEQ ID NO: 147113 - DNA, 25 bp, Probe Sequence
acgaaggcaaacacctttacacgct

SEQ ID NO: 147114 - DNA, 25 bp, Probe Sequence
acgaagccaaggcagacttttctgg

SEQ ID NO: 147115 - DNA, 25 bp, Probe Sequence
acgaggctaaggccgtggatatccc

SEQ ID NO: 147116 - DNA, 25 bp, Probe Sequence
acgccctaataaggagcgaatccta

SEQ ID NO: 147117 - DNA, 25 bp, Probe Sequence
acccctttgagctgactaatcatgc

SEQ ID NO: 147118 - DNA, 25 bp, Probe Sequence
acgccatccttgcattacgaagact

SEQ ID NO: 147119 - DNA, 25 bp, Probe Sequence
actgcccgctttcaaggcaagatcg

SEQ ID NO: 147120 - DNA, 25 bp, Probe Sequence
acccaagcctatcacgcgtgaatcg

SEQ ID NO: 147121 - DNA, 25 bp, Probe Sequence
acccaggccttgacattgttattca

SEQ ID NO: 147122 - DNA, 25 bp, Probe Sequence
accgtggcgcttcgagagattcgtc

SEQ ID NO: 147123 - DNA, 25 bp, Probe Sequence
accgtcctgcttccaatatggtgat

SEQ ID NO: 147124 - DNA, 25 bp, Probe Sequence
acccccatggtgtcaatagaggatg

SEQ ID NO: 147125 - DNA, 25 bp, Probe Sequence
accccactcgtgtaagcagtttggt

SEQ ID NO: 147126 - DNA, 25 bp, Probe Sequence
cactccgaccggtgagtcatttgca

SEQ ID NO: 147127 - DNA, 25 bp, Probe Sequence
actccgaccggtgagtcatttgcat

SEQ ID NO: 147128 - DNA, 25 bp, Probe Sequence
accctcactgctggggagtccctgc

SEQ ID NO: 147129 - DNA, 25 bp, Probe Sequence
accccatcatcgtggagtggcgggc

SEQ ID NO: 147130 - DNA, 25 bp, Probe Sequence
accccatcaccctcagctgagggtc

SEQ ID NO: 147131 - DNA, 25 bp, Probe Sequence
acccgaacactgatcgctgggtggc

SEQ ID NO: 147132 - DNA, 25 bp, Probe Sequence
acccgaggatctgacggtggtgctc

SEQ ID NO: 147133 - DNA, 25 bp, Probe Sequence
acccagggtgatgacctgtggacct

SEQ ID NO: 147134 - DNA, 25 bp, Probe Sequence
acccggttgatgtggttcgaactcg

SEQ ID NO: 147135 - DNA, 25 bp, Probe Sequence
accctactctactggattcaaggcc

SEQ ID NO: 147136 - DNA, 25 bp, Probe Sequence
accctacctcaaagcacaaaagtgg

SEQ ID NO: 147137 - DNA, 25 bp, Probe Sequence
acccttgagcacaacagcaaataag

SEQ ID NO: 147138 - DNA, 25 bp, Probe Sequence
acctgtgtgtgtcaccagtataact

SEQ ID NO: 147139 - DNA, 25 bp, Probe Sequence
acctggaggatttctctgttattct

SEQ ID NO: 147140 - DNA, 25 bp, Probe Sequence
acctggaggcgatcctaatcatgtc

SEQ ID NO: 147141 - DNA, 25 bp, Probe Sequence
accgcgagacggtcagtgaagagtc

SEQ ID NO: 147142 - DNA, 25 bp, Probe Sequence
accgtggcacagctcagtatggagt

SEQ ID NO: 147143 - DNA, 25 bp, Probe Sequence
acctgtggactctacatgttgcgac

SEQ ID NO: 147144 - DNA, 25 bp, Probe Sequence
accgtggacagcaaatgcttcccag

SEQ ID NO: 147145 - DNA, 25 bp, Probe Sequence
acccgtgacaaaatgtgttccatgg

SEQ ID NO: 147146 - DNA, 25 bp, Probe Sequence
accctggtcttcaatggttagcaga

SEQ ID NO: 147147 - DNA, 25 bp, Probe Sequence
accctggtcttcaatggttagcaga

SEQ ID NO: 147148 - DNA, 25 bp, Probe Sequence
accgcatggtgcttgcagttttaaa

SEQ ID NO: 147149 - DNA, 25 bp, Probe Sequence
accgatattgcagtctgtgtctaaa

SEQ ID NO: 147150 - DNA, 25 bp, Probe Sequence
accgagatgtgagtcctgttgaaga

SEQ ID NO: 147151 - DNA, 25 bp, Probe Sequence
acccgatgcagactcctgaaacaga

SEQ ID NO: 147152 - DNA, 25 bp, Probe Sequence
accggatcaacttcgacaaatacca

SEQ ID NO: 147153 - DNA, 25 bp, Probe Sequence
accctgacaccttcagcagtaaaca

SEQ ID NO: 147154 - DNA, 25 bp, Probe Sequence
acccagtcattttgcggtgaaaaca

SEQ ID NO: 147155 - DNA, 25 bp, Probe Sequence
accgcaccattccggagtgtataga

SEQ ID NO: 147156 - DNA, 25 bp, Probe Sequence
accgcagaattcccgtactgattag

SEQ ID NO: 147157 - DNA, 25 bp, Probe Sequence
accgatggtgtcccgttgtgtgggt

SEQ ID NO: 147158 - DNA, 25 bp, Probe Sequence
acgcgtggtttccgattgtttgata

SEQ ID NO: 147159 - DNA, 25 bp, Probe Sequence
acgttgcctttaatatctgttggga

SEQ ID NO: 147160 - DNA, 25 bp, Probe Sequence
acgttctgctttcacacggcagtgt

SEQ ID NO: 147161 - DNA, 25 bp, Probe Sequence
acgttctgtggggagcaaggcgcct

SEQ ID NO: 147162 - DNA, 25 bp, Probe Sequence
acgcctctgcgctgaggacagggac

SEQ ID NO: 147163 - DNA, 25 bp, Probe Sequence
acgcctctgcgctgaggacagggac

SEQ ID NO: 147164 - DNA, 25 bp, Probe Sequence
acccgcccatggagaaagagcacgc

SEQ ID NO: 147165 - DNA, 25 bp, Probe Sequence
accctcaggcctatgaaacacacag

SEQ ID NO: 147166 - DNA, 25 bp, Probe Sequence
accctcaggcctatgaaacacacag

SEQ ID NO: 147167 - DNA, 25 bp, Probe Sequence
accccagagcctaagaatggcagcc

SEQ ID NO: 147168 - DNA, 25 bp, Probe Sequence
acccctattcttcgagggacctgct

SEQ ID NO: 147169 - DNA, 25 bp, Probe Sequence
acccctatttgtctgaggttctcaa

SEQ ID NO: 147170 - DNA, 25 bp, Probe Sequence
acccttttgtgtctatgatgttgct

SEQ ID NO: 147171 - DNA, 25 bp, Probe Sequence
acccttctttgtgtatcaggtagtc

SEQ ID NO: 147172 - DNA, 25 bp, Probe Sequence
accctgtgacatggtgcctgagagg

SEQ ID NO: 147173 - DNA, 25 bp, Probe Sequence
accgcgatgatgtggctctggaagg

SEQ ID NO: 147174 - DNA, 25 bp, Probe Sequence
accgctgtgcagtgtcatgttccag

SEQ ID NO: 147175 - DNA, 25 bp, Probe Sequence
accgctgtcagaaggcaatgaccgc

SEQ ID NO: 147176 - DNA, 25 bp, Probe Sequence
accctgtgcagaaggttatcctgaa

SEQ ID NO: 147177 - DNA, 25 bp, Probe Sequence
acccagctgaacatgtcttcctgag

SEQ ID NO: 147178 - DNA, 25 bp, Probe Sequence
accctgctgaagatgcctagcgtgg

SEQ ID NO: 147179 - DNA, 25 bp, Probe Sequence
accgccagaggtgcactactggagg

SEQ ID NO: 147180 - DNA, 25 bp, Probe Sequence
actggccaggtttcaggacaggaag

SEQ ID NO: 147181 - DNA, 25 bp, Probe Sequence
acgcccagggaaagcggcgttatga

SEQ ID NO: 147182 - DNA, 25 bp, Probe Sequence
accccctgtgagaagagtccattat

SEQ ID NO: 147183 - DNA, 25 bp, Probe Sequence
accccatcgtagaatacaaactatg

SEQ ID NO: 147184 - DNA, 25 bp, Probe Sequence
acgccctgttaactacactagctta

SEQ ID NO: 147185 - DNA, 25 bp, Probe Sequence
accgcctggtcagaaactcatgctt

SEQ ID NO: 147186 - DNA, 25 bp, Probe Sequence
acccttggctaagaactgcactgct

SEQ ID NO: 147187 - DNA, 25 bp, Probe Sequence
acccttggctaagaactgcactgct

SEQ ID NO: 147188 - DNA, 25 bp, Probe Sequence
accctctgactatgcggatgctcag

SEQ ID NO: 147189 - DNA, 25 bp, Probe Sequence
accccatgaattcctgttctagatc

SEQ ID NO: 147190 - DNA, 25 bp, Probe Sequence
acccctagctgtgtgtttgatatgc

SEQ ID NO: 147191 - DNA, 25 bp, Probe Sequence
acccagctactggttcatttgagta

SEQ ID NO: 147192 - DNA, 25 bp, Probe Sequence
acccagtttgtgtgtttgagctctg

SEQ ID NO: 147193 - DNA, 25 bp, Probe Sequence
acccaagtgtttggcttctggctac

SEQ ID NO: 147194 - DNA, 25 bp, Probe Sequence
acccaaggtgatcatcttcgaggcc

SEQ ID NO: 147195 - DNA, 25 bp, Probe Sequence
acccgcagcggtcacgtgaaggacc

SEQ ID NO: 147196 - DNA, 25 bp, Probe Sequence
accccactggctctatgttgaggac

SEQ ID NO: 147197 - DNA, 25 bp, Probe Sequence
acccccatcgctctgagcatatgtt

SEQ ID NO: 147198 - DNA, 25 bp, Probe Sequence
acccagccatctggattgacactgg

SEQ ID NO: 147199 - DNA, 25 bp, Probe Sequence
accgaggtctcagatacatgtggtt

SEQ ID NO: 147200 - DNA, 25 bp, Probe Sequence
accgcggcctaataatgagtgatca

SEQ ID NO: 147201 - DNA, 25 bp, Probe Sequence
accgcaggtcgaattgttcgtgaag

SEQ ID NO: 147202 - DNA, 25 bp, Probe Sequence
acggaggttgtgtttacaatgtaga

SEQ ID NO: 147203 - DNA, 25 bp, Probe Sequence
tacgcgaatctagctttaacggaag

SEQ ID NO: 147204 - DNA, 25 bp, Probe Sequence
accggaaacccttgaacagagagag

SEQ ID NO: 147205 - DNA, 25 bp, Probe Sequence
accggataacaatttcacacaggaa

SEQ ID NO: 147206 - DNA, 25 bp, Probe Sequence
accggataacaatttcacacaggaa

SEQ ID NO: 147207 - DNA, 25 bp, Probe Sequence
acgcggaaacagatggccaagcctc

SEQ ID NO: 147208 - DNA, 25 bp, Probe Sequence
acgcggaaacagatggccaagcctc

SEQ ID NO: 147209 - DNA, 25 bp, Probe Sequence
acgcctgaaacaggtgctgctccac

SEQ ID NO: 147210 - DNA, 25 bp, Probe Sequence
accctggcaatattatgtgtccctt

SEQ ID NO: 147211 - DNA, 25 bp, Probe Sequence
accctcagaatagcatgtttacttt

SEQ ID NO: 147212 - DNA, 25 bp, Probe Sequence
accctaactggccgtatttattcat

SEQ ID NO: 147213 - DNA, 25 bp, Probe Sequence
acggcttcactggacagttttcctt

SEQ ID NO: 147214 - DNA, 25 bp, Probe Sequence
acgaatattcgcacgtgtatttttt

SEQ ID NO: 147215 - DNA, 25 bp, Probe Sequence
accgttcttgagtgtggattttgta

SEQ ID NO: 147216 - DNA, 25 bp, Probe Sequence
accgcttctacctggtgtttgagaa

SEQ ID NO: 147217 - DNA, 25 bp, Probe Sequence
acggttcataaatggctgatttata

SEQ ID NO: 147218 - DNA, 25 bp, Probe Sequence
acgcagttcaaatttcatggtttta

SEQ ID NO: 147219 - DNA, 25 bp, Probe Sequence
acgcagttcaaatttcatggtttta

SEQ ID NO: 147220 - DNA, 25 bp, Probe Sequence
acgctaccgacatttaggattctct

SEQ ID NO: 147221 - DNA, 25 bp, Probe Sequence
acccactcgcaatttgaagtcgttg

SEQ ID NO: 147222 - DNA, 25 bp, Probe Sequence
acccaatgaaaaaaggatctggagt

SEQ ID NO: 147223 - DNA, 25 bp, Probe Sequence
acccaaacaccgcgtgattggaagt

SEQ ID NO: 147224 - DNA, 25 bp, Probe Sequence
accccgatccctaggtgaggagaag

SEQ ID NO: 147225 - DNA, 25 bp, Probe Sequence
accgccgactcgcagagggatgaaa

SEQ ID NO: 147226 - DNA, 25 bp, Probe Sequence
accgacgagtcctgaggagagaacc

SEQ ID NO: 147227 - DNA, 25 bp, Probe Sequence
accggtgcgtcctgaggagagaacc

SEQ ID NO: 147228 - DNA, 25 bp, Probe Sequence
accgtgggatgccccaggaggagag

SEQ ID NO: 147229 - DNA, 25 bp, Probe Sequence
aacttcggagcagatacgacaaagg

SEQ ID NO: 147230 - DNA, 25 bp, Probe Sequence
aagaacgggcccttggaagtagctg

SEQ ID NO: 147231 - DNA, 25 bp, Probe Sequence
aaaaggggcccacgaggactgtgat

SEQ ID NO: 147232 - DNA, 25 bp, Probe Sequence
aatagggtggtcagggaaatcttct

SEQ ID NO: 147233 - DNA, 25 bp, Probe Sequence
aattggttgttcagggacaggttct

SEQ ID NO: 147234 - DNA, 25 bp, Probe Sequence
actttgtttcctgggtactgggcat

SEQ ID NO: 147235 - DNA, 25 bp, Probe Sequence
gagttcgagccctggactactgggc

SEQ ID NO: 147236 - DNA, 25 bp, Probe Sequence
acgccagggcctgggactaccaggc

SEQ ID NO: 147237 - DNA, 25 bp, Probe Sequence
acagggcccctgggattagccaggt

SEQ ID NO: 147238 - DNA, 25 bp, Probe Sequence
acccgccactccagaaatccaggag

SEQ ID NO: 147239 - DNA, 25 bp, Probe Sequence
cccggacagttcagacacccttggg

SEQ ID NO: 147240 - DNA, 25 bp, Probe Sequence
accgaggaggtggcgttcctttgag

SEQ ID NO: 147241 - DNA, 25 bp, Probe Sequence
accggaggggcggggcatcatatgg

SEQ ID NO: 147242 - DNA, 25 bp, Probe Sequence
accgaaccgcatgggagtctaagtt

SEQ ID NO: 147243 - DNA, 25 bp, Probe Sequence
acccaactacggcgctctatatttt

SEQ ID NO: 147244 - DNA, 25 bp, Probe Sequence
actccgaattagcggtgtatttctt

SEQ ID NO: 147245 - DNA, 25 bp, Probe Sequence
acccaaatgtactgggcattgtcct

SEQ ID NO: 147246 - DNA, 25 bp, Probe Sequence
accccaatgtcagtaggaatcttgg

SEQ ID NO: 147247 - DNA, 25 bp, Probe Sequence
actccaaagacagtaggcaatagca

SEQ ID NO: 147248 - DNA, 25 bp, Probe Sequence
accgcaagaagctgagccagcccat

SEQ ID NO: 147249 - DNA, 25 bp, Probe Sequence
acccactgccagtcagggcagtccc

SEQ ID NO: 147250 - DNA, 25 bp, Probe Sequence
acgaccatccattgcagatgcgcag

SEQ ID NO: 147251 - DNA, 25 bp, Probe Sequence
acgcatccatccagatgaacgtggc

SEQ ID NO: 147252 - DNA, 25 bp, Probe Sequence
acgtgacacctgtgaaggctggccg

SEQ ID NO: 147253 - DNA, 25 bp, Probe Sequence
accgatgcaatcgaggaagggactc

SEQ ID NO: 147254 - DNA, 25 bp, Probe Sequence
acccatgcaattaaaaggtacaatg

SEQ ID NO: 147255 - DNA, 25 bp, Probe Sequence
accctcctgtaaatggtgtacataa

SEQ ID NO: 147256 - DNA, 25 bp, Probe Sequence
acccctgcctaaaggatattctcat

SEQ ID NO: 147257 - DNA, 25 bp, Probe Sequence
accccgccatgagtatgggattcct

SEQ ID NO: 147258 - DNA, 25 bp, Probe Sequence
acccccacgattggtatgatgctgc

SEQ ID NO: 147259 - DNA, 25 bp, Probe Sequence
accccttcagataatgatagtggca

SEQ ID NO: 147260 - DNA, 25 bp, Probe Sequence
acccctgtagtgatcaactgatgcc

SEQ ID NO: 147261 - DNA, 25 bp, Probe Sequence
acccagctgctcttggacaagtggc

SEQ ID NO: 147262 - DNA, 25 bp, Probe Sequence
acccagcatgctgttggcattgttg

SEQ ID NO: 147263 - DNA, 25 bp, Probe Sequence
acccatgatctcttggtgttatttc

SEQ ID NO: 147264 - DNA, 25 bp, Probe Sequence
acgcaccatccactgtgtttattga

SEQ ID NO: 147265 - DNA, 25 bp, Probe Sequence
accctgctacctgattgctttagtt

SEQ ID NO: 147266 - DNA, 25 bp, Probe Sequence
acccgtctcctgattctgatgtggt

SEQ ID NO: 147267 - DNA, 25 bp, Probe Sequence
accctgtccgtgacgtggattggtg

SEQ ID NO: 147268 - DNA, 25 bp, Probe Sequence
acccaggacgtgagggtctgggtgt

SEQ ID NO: 147269 - DNA, 25 bp, Probe Sequence
acccagcgattgaggggtcaggctg

SEQ ID NO: 147270 - DNA, 25 bp, Probe Sequence
acccggaagaggtcttatgaggctt

SEQ ID NO: 147271 - DNA, 25 bp, Probe Sequence
accgggaaggagtctacacagtctt

SEQ ID NO: 147272 - DNA, 25 bp, Probe Sequence
accgaggaagcatttatgaccttct

SEQ ID NO: 147273 - DNA, 25 bp, Probe Sequence
acccagtgcaactacactacacttt

SEQ ID NO: 147274 - DNA, 25 bp, Probe Sequence
actacaggcccatgaattacttcct

SEQ ID NO: 147275 - DNA, 25 bp, Probe Sequence
acccagggccaagtatgctactgtc

SEQ ID NO: 147276 - DNA, 25 bp, Probe Sequence
acccgtgagctctaattggattccc

SEQ ID NO: 147277 - DNA, 25 bp, Probe Sequence
acgccagaactctgtctggctctcc

SEQ ID NO: 147278 - DNA, 25 bp, Probe Sequence
accgacacaatgatgtcattcccac

SEQ ID NO: 147279 - DNA, 25 bp, Probe Sequence
accgaacagctgattcatatgccaa

SEQ ID NO: 147280 - DNA, 25 bp, Probe Sequence
accgaagtgcagatgtagtcagcta

SEQ ID NO: 147281 - DNA, 25 bp, Probe Sequence
accgagggatgctagtgagtccaag

SEQ ID NO: 147282 - DNA, 25 bp, Probe Sequence
acccagcaggtgtttggcatcgatg

SEQ ID NO: 147283 - DNA, 25 bp, Probe Sequence
accgcgaggtgcagggcaatgagtc

SEQ ID NO: 147284 - DNA, 25 bp, Probe Sequence
accctgactgtggggtgcatcggtc

SEQ ID NO: 147285 - DNA, 25 bp, Probe Sequence
accgagcagcgggaggctgtctttc

SEQ ID NO: 147286 - DNA, 25 bp, Probe Sequence
accgcagcgaggagtttctcattgc

SEQ ID NO: 147287 - DNA, 25 bp, Probe Sequence
accgcagcgaggagtttctcattgc

SEQ ID NO: 147288 - DNA, 25 bp, Probe Sequence
accgcagcgaggagtttctcattgc

SEQ ID NO: 147289 - DNA, 25 bp, Probe Sequence
acgccagaagacctgaaatgccttg

SEQ ID NO: 147290 - DNA, 25 bp, Probe Sequence
acccgcacgtcactgagaattctgg

SEQ ID NO: 147291 - DNA, 25 bp, Probe Sequence
accgccaagtgcctgaacatctggg

SEQ ID NO: 147292 - DNA, 25 bp, Probe Sequence
accgtcaagctggccaagcacaaag

SEQ ID NO: 147293 - DNA, 25 bp, Probe Sequence
accgtcgccattgccagaaagagcg

SEQ ID NO: 147294 - DNA, 25 bp, Probe Sequence
accgtcacgcaaacccaagaggcgg

SEQ ID NO: 147295 - DNA, 25 bp, Probe Sequence
aacttccaggaagctaaagggagca

SEQ ID NO: 147296 - DNA, 25 bp, Probe Sequence
aacttctcgcgcactcgaaagggaa

SEQ ID NO: 147297 - DNA, 25 bp, Probe Sequence
aaaattcggcctcctgaaatgacag

SEQ ID NO: 147298 - DNA, 25 bp, Probe Sequence
acgaatttcccattctgaaatacaa

SEQ ID NO: 147299 - DNA, 25 bp, Probe Sequence
accccttcctgcagatacaaacaaa

SEQ ID NO: 147300 - DNA, 25 bp, Probe Sequence
accccaacgagcagtacaaggcaca

SEQ ID NO: 147301 - DNA, 25 bp, Probe Sequence
acccctaagcatgttacaagcaaac

SEQ ID NO: 147302 - DNA, 25 bp, Probe Sequence
acggccttagatctctcgccgccaa

SEQ ID NO: 147303 - DNA, 25 bp, Probe Sequence
acgaccttaatggtcatgctgccgc

SEQ ID NO: 147304 - DNA, 25 bp, Probe Sequence
accccatttgtggtcacagccatga

SEQ ID NO: 147305 - DNA, 25 bp, Probe Sequence
accccttgctgtctcagcagatggg

SEQ ID NO: 147306 - DNA, 25 bp, Probe Sequence
accccttgctgtctcagcagatggg

SEQ ID NO: 147307 - DNA, 25 bp, Probe Sequence
accgccttattagccagattgtgtc

SEQ ID NO: 147308 - DNA, 25 bp, Probe Sequence
accgcgcattgagtagaccaagtga

SEQ ID NO: 147309 - DNA, 25 bp, Probe Sequence
acccgagtgatgaatagccgaggca

SEQ ID NO: 147310 - DNA, 25 bp, Probe Sequence
accctaaggtgaaggctcatggcaa

SEQ ID NO: 147311 - DNA, 25 bp, Probe Sequence
accgtacgaaagaagcctgatccaa

SEQ ID NO: 147312 - DNA, 25 bp, Probe Sequence
accgaagcgaacgcagcctttgaga

SEQ ID NO: 147313 - DNA, 25 bp, Probe Sequence
acccaagcctcagcagttctttgga

SEQ ID NO: 147314 - DNA, 25 bp, Probe Sequence
acccaaccatgcggcagtgcagtta

SEQ ID NO: 147315 - DNA, 25 bp, Probe Sequence
acgcaatagcgacgcgctggcgtta

SEQ ID NO: 147316 - DNA, 25 bp, Probe Sequence
acgcgtcagaatcgcctggagacgc

SEQ ID NO: 147317 - DNA, 25 bp, Probe Sequence
acgcggagagcacgccatgaaggcc

SEQ ID NO: 147318 - DNA, 25 bp, Probe Sequence
acgggaacgatgccaattgtgctta

SEQ ID NO: 147319 - DNA, 25 bp, Probe Sequence
accgcgacaacaacaagtgtgcctt

SEQ ID NO: 147320 - DNA, 25 bp, Probe Sequence
accccagaaatgcctgctgggcctt

SEQ ID NO: 147321 - DNA, 25 bp, Probe Sequence
acccagcacaagggctgctggccca

SEQ ID NO: 147322 - DNA, 25 bp, Probe Sequence
acgacagtcaagacagcctggctag

SEQ ID NO: 147323 - DNA, 25 bp, Probe Sequence
acgagcaccaatgagcttactaccc

SEQ ID NO: 147324 - DNA, 25 bp, Probe Sequence
acgatgcccattaactggtttgtgg

SEQ ID NO: 147325 - DNA, 25 bp, Probe Sequence
acgacctctctgcccgttgtggtga

SEQ ID NO: 147326 - DNA, 25 bp, Probe Sequence
acgccggctctgccaagaatatctg

SEQ ID NO: 147327 - DNA, 25 bp, Probe Sequence
accgcttcactgcaaagagactggt

SEQ ID NO: 147328 - DNA, 25 bp, Probe Sequence
acccttctcagccaagcgaggtggc

SEQ ID NO: 147329 - DNA, 25 bp, Probe Sequence
accctactgccagcacagaggctat

SEQ ID NO: 147330 - DNA, 25 bp, Probe Sequence
accccactggcaggacaattcacag

SEQ ID NO: 147331 - DNA, 25 bp, Probe Sequence
accctcagcggatgataatctcaag

SEQ ID NO: 147332 - DNA, 25 bp, Probe Sequence
accctcagcggatgataatctcaag

SEQ ID NO: 147333 - DNA, 25 bp, Probe Sequence
acgatccagtggtcatcatttcctt

SEQ ID NO: 147334 - DNA, 25 bp, Probe Sequence
acgtcggacagatactctcgtgcaa

SEQ ID NO: 147335 - DNA, 25 bp, Probe Sequence
acccgctacagacaagctttctggg

SEQ ID NO: 147336 - DNA, 25 bp, Probe Sequence
acccacttcaaaagcagccttcatg

SEQ ID NO: 147337 - DNA, 25 bp, Probe Sequence
acccaattcaaaacattgtgccatg

SEQ ID NO: 147338 - DNA, 25 bp, Probe Sequence
acccatcattaatttatgtctctgt

SEQ ID NO: 147339 - DNA, 25 bp, Probe Sequence
acccatcgggtaagatgctcctggt

SEQ ID NO: 147340 - DNA, 25 bp, Probe Sequence
acgcctagggatgacgtcacgcagt

SEQ ID NO: 147341 - DNA, 25 bp, Probe Sequence
actcctagggctgccagacatacgc

SEQ ID NO: 147342 - DNA, 25 bp, Probe Sequence
acccgggcttgccaagagcagaggc

SEQ ID NO: 147343 - DNA, 25 bp, Probe Sequence
acccggtctgagtacgacaggggcg

SEQ ID NO: 147344 - DNA, 25 bp, Probe Sequence
accccagcgccagtagtgacagggg

SEQ ID NO: 147345 - DNA, 25 bp, Probe Sequence
acccctcccattaggacaatcagtc

SEQ ID NO: 147346 - DNA, 25 bp, Probe Sequence
accccatctctactgaaaatacaaa

SEQ ID NO: 147347 - DNA, 25 bp, Probe Sequence
accccatctctactaaacatacaaa

SEQ ID NO: 147348 - DNA, 25 bp, Probe Sequence
accccatctctactaagaatacaaa

SEQ ID NO: 147349 - DNA, 25 bp, Probe Sequence
accccacttgcaacaatgaacacat

SEQ ID NO: 147350 - DNA, 25 bp, Probe Sequence
actgtccgtcgcaaaatccaacatg

SEQ ID NO: 147351 - DNA, 25 bp, Probe Sequence
acccctgtctgtagagtgccgaagg

SEQ ID NO: 147352 - DNA, 25 bp, Probe Sequence
acgacttctgcctggtgtcgaaggt

SEQ ID NO: 147353 - DNA, 25 bp, Probe Sequence
acgtttctgcatttggactgaaagt

SEQ ID NO: 147354 - DNA, 25 bp, Probe Sequence
acgaatctgcctttgagatgctggc

SEQ ID NO: 147355 - DNA, 25 bp, Probe Sequence
acccgctcactggctgagagcgagc

SEQ ID NO: 147356 - DNA, 25 bp, Probe Sequence
accgcccgctgaggagatggatgag

SEQ ID NO: 147357 - DNA, 25 bp, Probe Sequence
acccctcagctgaaagtggtggggc

SEQ ID NO: 147358 - DNA, 25 bp, Probe Sequence
acccattctgtacagggagtgagga

SEQ ID NO: 147359 - DNA, 25 bp, Probe Sequence
accgaattctagtttagaggcggat

SEQ ID NO: 147360 - DNA, 25 bp, Probe Sequence
accgaattccagtttagaggcagat

SEQ ID NO: 147361 - DNA, 25 bp, Probe Sequence
accgagacccaaatgtggtgccagg

SEQ ID NO: 147362 - DNA, 25 bp, Probe Sequence
accgagcactcatcagggaggacag

SEQ ID NO: 147363 - DNA, 25 bp, Probe Sequence
accgccagctacatgaagaagcacg

SEQ ID NO: 147364 - DNA, 25 bp, Probe Sequence
aacccagtgacccagggacacgtgg

SEQ ID NO: 147365 - DNA, 25 bp, Probe Sequence
accccgctgagcagcagggcaaggg

SEQ ID NO: 147366 - DNA, 25 bp, Probe Sequence
accccagtggaccttggcaagaggc

SEQ ID NO: 147367 - DNA, 25 bp, Probe Sequence
accccatgggagctttggctgagtg

SEQ ID NO: 147368 - DNA, 25 bp, Probe Sequence
ccgacgatggggtatttggctttgt

SEQ ID NO: 147369 - DNA, 25 bp, Probe Sequence
acgacgtgggaatttcaatgcgttt

SEQ ID NO: 147370 - DNA, 25 bp, Probe Sequence
actgggttaaatgtacactgttgag

SEQ ID NO: 147371 - DNA, 25 bp, Probe Sequence
actgggttaaatgtacactgttgag

SEQ ID NO: 147372 - DNA, 25 bp, Probe Sequence
acaggttttacagattcctgtggca

SEQ ID NO: 147373 - DNA, 25 bp, Probe Sequence
actggtttttactgtactgaagcaa

SEQ ID NO: 147374 - DNA, 25 bp, Probe Sequence
accgcttttctacagtttgtgagga

SEQ ID NO: 147375 - DNA, 25 bp, Probe Sequence
accctaattaagaagttgtgagctg

SEQ ID NO: 147376 - DNA, 25 bp, Probe Sequence
acccagagttatttcagcgtgtagg

SEQ ID NO: 147377 - DNA, 25 bp, Probe Sequence
acccagccttgtatcactgttgggc

SEQ ID NO: 147378 - DNA, 25 bp, Probe Sequence
accccgatttagacctgcgggtgct

SEQ ID NO: 147379 - DNA, 25 bp, Probe Sequence
accccgtccatggtgctaagcgggc

SEQ ID NO: 147380 - DNA, 25 bp, Probe Sequence
accccgtccatggtgctaagcgggc

SEQ ID NO: 147381 - DNA, 25 bp, Probe Sequence
acggccgctacacgtgtacggccgc

SEQ ID NO: 147382 - DNA, 25 bp, Probe Sequence
acgtccttacaactggacaggcggc

SEQ ID NO: 147383 - DNA, 25 bp, Probe Sequence
acgctccttcacaagatggcaaaga

SEQ ID NO: 147384 - DNA, 25 bp, Probe Sequence
acgagccttgagccagggagacaag

SEQ ID NO: 147385 - DNA, 25 bp, Probe Sequence
actgacctggcagcgggatggggag

SEQ ID NO: 147386 - DNA, 25 bp, Probe Sequence
acgacactgtccaggttggaggcat

SEQ ID NO: 147387 - DNA, 25 bp, Probe Sequence
acccactgatccattttgttgactt

SEQ ID NO: 147388 - DNA, 25 bp, Probe Sequence
acgcccgatacgctgagtgtggttt

SEQ ID NO: 147389 - DNA, 25 bp, Probe Sequence
accccgtactggcaggcatggagcc

SEQ ID NO: 147390 - DNA, 25 bp, Probe Sequence
accccttacttgcatgctgtgagaa

SEQ ID NO: 147391 - DNA, 25 bp, Probe Sequence
accgccatgaagctgggcttcagta

SEQ ID NO: 147392 - DNA, 25 bp, Probe Sequence
acccaggaggcggaggttgcagtga

SEQ ID NO: 147393 - DNA, 25 bp, Probe Sequence
acccatggacaagagcgcaggcagt

SEQ ID NO: 147394 - DNA, 25 bp, Probe Sequence
acccaggatcacaaagccagtaggt

SEQ ID NO: 147395 - DNA, 25 bp, Probe Sequence
acccagacccgaagcacgtgaggat

SEQ ID NO: 147396 - DNA, 25 bp, Probe Sequence
acccaaagccagacatagagcggga

SEQ ID NO: 147397 - DNA, 25 bp, Probe Sequence
acggataagacaccaagacgtagac

SEQ ID NO: 147398 - DNA, 25 bp, Probe Sequence
acggcaaagtccagtgcacgccgca

SEQ ID NO: 147399 - DNA, 25 bp, Probe Sequence
acccaaactgtctggcagtcactgc

SEQ ID NO: 147400 - DNA, 25 bp, Probe Sequence
accccacactgtaggtgcagtgggc

SEQ ID NO: 147401 - DNA, 25 bp, Probe Sequence
acccgcagcacgagtgtctcgggct

SEQ ID NO: 147402 - DNA, 25 bp, Probe Sequence
acccacacacgaaggaaagcaggac

SEQ ID NO: 147403 - DNA, 25 bp, Probe Sequence
acgccgcatacgtggagaacgtgct

SEQ ID NO: 147404 - DNA, 25 bp, Probe Sequence
acgccgcatacgtggagaacgtgct

SEQ ID NO: 147405 - DNA, 25 bp, Probe Sequence
acgcactatcgatagggcaccgcgt

SEQ ID NO: 147406 - DNA, 25 bp, Probe Sequence
acgctttgcgtatgattcaatcggc

SEQ ID NO: 147407 - DNA, 25 bp, Probe Sequence
acgtaagcgctacagctacttgact

SEQ ID NO: 147408 - DNA, 25 bp, Probe Sequence
acgttagccttggagtccattggtg

SEQ ID NO: 147409 - DNA, 25 bp, Probe Sequence
acagttagacttgccacgttgggtc

SEQ ID NO: 147410 - DNA, 25 bp, Probe Sequence
acattaatgcctacctaagtgggat

SEQ ID NO: 147411 - DNA, 25 bp, Probe Sequence
actgtgaatccgctctttgtcggaa

SEQ ID NO: 147412 - DNA, 25 bp, Probe Sequence
gatttatcctagcccgggacggata

SEQ ID NO: 147413 - DNA, 25 bp, Probe Sequence
actctagctaagccgcgggacggat

SEQ ID NO: 147414 - DNA, 25 bp, Probe Sequence
acccaccaggcagcggagacatgtg

SEQ ID NO: 147415 - DNA, 25 bp, Probe Sequence
acgcccctgctaacgggaatgctaa

SEQ ID NO: 147416 - DNA, 25 bp, Probe Sequence
acgcccctgctaacgggatatgctg

SEQ ID NO: 147417 - DNA, 25 bp, Probe Sequence
accccaagctcatccgagatgtctg

SEQ ID NO: 147418 - DNA, 25 bp, Probe Sequence
accccaattcattacatggaggctc

SEQ ID NO: 147419 - DNA, 25 bp, Probe Sequence
accccaactatgtcactgcggggct

SEQ ID NO: 147420 - DNA, 25 bp, Probe Sequence
accctccacatctcactggtgtggg

SEQ ID NO: 147421 - DNA, 25 bp, Probe Sequence
accctccccaggacggtgaggatga

SEQ ID NO: 147422 - DNA, 25 bp, Probe Sequence
acccaccccatagctgaggaggagt

SEQ ID NO: 147423 - DNA, 25 bp, Probe Sequence
acccaccccatagctgaggaggagt

SEQ ID NO: 147424 - DNA, 25 bp, Probe Sequence
acccaagcctcttggctgagggtga

SEQ ID NO: 147425 - DNA, 25 bp, Probe Sequence
acccaggctctacgagaagcggggt

SEQ ID NO: 147426 - DNA, 25 bp, Probe Sequence
accctggcctcaggatgagagctgt

SEQ ID NO: 147427 - DNA, 25 bp, Probe Sequence
acgccatccctaggaggatctctgt

SEQ ID NO: 147428 - DNA, 25 bp, Probe Sequence
acgcgcagacctaaactgatcctaa

SEQ ID NO: 147429 - DNA, 25 bp, Probe Sequence
acccaactctaatgctgcatcttgg

SEQ ID NO: 147430 - DNA, 25 bp, Probe Sequence
acccacatgatatgaagccatccgc

SEQ ID NO: 147431 - DNA, 25 bp, Probe Sequence
acccgcatgtgtaacaacagccgct

SEQ ID NO: 147432 - DNA, 25 bp, Probe Sequence
acccagcagaggagctaggccagtc

SEQ ID NO: 147433 - DNA, 25 bp, Probe Sequence
accctggagagttcaatggctgctg

SEQ ID NO: 147434 - DNA, 25 bp, Probe Sequence
accctgggtgtatgtgagtgtgcaa

SEQ ID NO: 147435 - DNA, 25 bp, Probe Sequence
acccctggaccatctgaatggagca

SEQ ID NO: 147436 - DNA, 25 bp, Probe Sequence
acccctatgacttcagtgacacaga

SEQ ID NO: 147437 - DNA, 25 bp, Probe Sequence
acccccatctctacgtgaagatacc

SEQ ID NO: 147438 - DNA, 25 bp, Probe Sequence
acccgctcctctatatgacagaatg

SEQ ID NO: 147439 - DNA, 25 bp, Probe Sequence
acgccagtccctgaggacaaagggc

SEQ ID NO: 147440 - DNA, 25 bp, Probe Sequence
acggcagatccctcaggaaacctgc

SEQ ID NO: 147441 - DNA, 25 bp, Probe Sequence
acgagaacccagtggacatcctcat

SEQ ID NO: 147442 - DNA, 25 bp, Probe Sequence
acgtggaccaagtgaccaccgtgaa

SEQ ID NO: 147443 - DNA, 25 bp, Probe Sequence
acggtaaaactgcgccacttggcag

SEQ ID NO: 147444 - DNA, 25 bp, Probe Sequence
acgaacaaaacgcagcgcatggtac

SEQ ID NO: 147445 - DNA, 25 bp, Probe Sequence
acgaacactcaatccagtttgctga

SEQ ID NO: 147446 - DNA, 25 bp, Probe Sequence
acgtagatctgctttcactttttgg

SEQ ID NO: 147447 - DNA, 25 bp, Probe Sequence
acccagatgctctttcatattcttt

SEQ ID NO: 147448 - DNA, 25 bp, Probe Sequence
accctgtcctgtatattttctacat

SEQ ID NO: 147449 - DNA, 25 bp, Probe Sequence
acccttcttttaagatgtgtcttca

SEQ ID NO: 147450 - DNA, 25 bp, Probe Sequence
accctacttggttgtgatgttatcc

SEQ ID NO: 147451 - DNA, 25 bp, Probe Sequence
accctactgatgatgtgttgttgcc

SEQ ID NO: 147452 - DNA, 25 bp, Probe Sequence
acgcctaagatcattttgctgtcct

SEQ ID NO: 147453 - DNA, 25 bp, Probe Sequence
accctccagtttgtgtcatgacttc

SEQ ID NO: 147454 - DNA, 25 bp, Probe Sequence
accctgccaggcaattttaaattct

SEQ ID NO: 147455 - DNA, 25 bp, Probe Sequence
acccctcagacagtttgcttatttt

SEQ ID NO: 147456 - DNA, 25 bp, Probe Sequence
acccaccactaggtcatcttatttg

SEQ ID NO: 147457 - DNA, 25 bp, Probe Sequence
actaggctaccaggtctctaggggc

SEQ ID NO: 147458 - DNA, 25 bp, Probe Sequence
acatcaggttctcagtcccaaggag

SEQ ID NO: 147459 - DNA, 25 bp, Probe Sequence
accctgttttgactcagctctagga

SEQ ID NO: 147460 - DNA, 25 bp, Probe Sequence
actgcacttgatttgggccttgaag

SEQ ID NO: 147461 - DNA, 25 bp, Probe Sequence
acccttgtcaggagccattgacgac

SEQ ID NO: 147462 - DNA, 25 bp, Probe Sequence
accctagttagcacgcatgggcgcc

SEQ ID NO: 147463 - DNA, 25 bp, Probe Sequence
acccaaccaggtcgcgatgagggcc

SEQ ID NO: 147464 - DNA, 25 bp, Probe Sequence
acccaacacaggcatgctcataagg

SEQ ID NO: 147465 - DNA, 25 bp, Probe Sequence
acgccagaacaaggagcttaaggtc

SEQ ID NO: 147466 - DNA, 25 bp, Probe Sequence
acgccaaattgggcctgtaaggccg

SEQ ID NO: 147467 - DNA, 25 bp, Probe Sequence
acgtcggtctgggtgttaagtgctc

SEQ ID NO: 147468 - DNA, 25 bp, Probe Sequence
acgcggggctcggatctgaaaggcg

SEQ ID NO: 147469 - DNA, 25 bp, Probe Sequence
acccggcgctccattaaatagccgt

SEQ ID NO: 147470 - DNA, 25 bp, Probe Sequence
acccgggcttctgtgaaacatggcg

SEQ ID NO: 147471 - DNA, 25 bp, Probe Sequence
acccgggctgcttccgagaaattga

SEQ ID NO: 147472 - DNA, 25 bp, Probe Sequence
acccgggtgccctaatcaaatatgg

SEQ ID NO: 147473 - DNA, 25 bp, Probe Sequence
accctcggatacgatagaaaatgta

SEQ ID NO: 147474 - DNA, 25 bp, Probe Sequence
accctcgtccgcgaagatgacaaaa

SEQ ID NO: 147475 - DNA, 25 bp, Probe Sequence
acgctcacagtagccatagctgaca

SEQ ID NO: 147476 - DNA, 25 bp, Probe Sequence
acgcacctgtagtccaagctactta

SEQ ID NO: 147477 - DNA, 25 bp, Probe Sequence
accctcatgaagtacaaccagcata

SEQ ID NO: 147478 - DNA, 25 bp, Probe Sequence
acccctggaaacactcatgcataaa

SEQ ID NO: 147479 - DNA, 25 bp, Probe Sequence
acccagtggacatcctcatcatgga

SEQ ID NO: 147480 - DNA, 25 bp, Probe Sequence
acccgtgggaaggcgcacgcagagg

SEQ ID NO: 147481 - DNA, 25 bp, Probe Sequence
accccttgtgaagcccaagatcgtc

SEQ ID NO: 147482 - DNA, 25 bp, Probe Sequence
accccattcgaagcacataacctgt

SEQ ID NO: 147483 - DNA, 25 bp, Probe Sequence
accccattctttgcttgaacacagt

SEQ ID NO: 147484 - DNA, 25 bp, Probe Sequence
accccattctttgcttgaacacagt

SEQ ID NO: 147485 - DNA, 25 bp, Probe Sequence
acccagcttttttcttgctataaat

SEQ ID NO: 147486 - DNA, 25 bp, Probe Sequence
acccagttcttcatttggaggaatc

SEQ ID NO: 147487 - DNA, 25 bp, Probe Sequence
acccttttatcctttctaggcacat

SEQ ID NO: 147488 - DNA, 25 bp, Probe Sequence
acccgctcttcaagcgctttaggaa

SEQ ID NO: 147489 - DNA, 25 bp, Probe Sequence
accctgtctccaagtctttggttga

SEQ ID NO: 147490 - DNA, 25 bp, Probe Sequence
accctctgccgatggcatttgtgtt

SEQ ID NO: 147491 - DNA, 25 bp, Probe Sequence
accctcttccacacatgtatgtgat

SEQ ID NO: 147492 - DNA, 25 bp, Probe Sequence
acccttattccagatgctgagagtg

SEQ ID NO: 147493 - DNA, 25 bp, Probe Sequence
accctctgctattctgttgccagag

SEQ ID NO: 147494 - DNA, 25 bp, Probe Sequence
acccctgctgataagtgacttgaga

SEQ ID NO: 147495 - DNA, 25 bp, Probe Sequence
acccaggcttctcatacttgatgat

SEQ ID NO: 147496 - DNA, 25 bp, Probe Sequence
acccagtgctttccattcgtgaaaa

SEQ ID NO: 147497 - DNA, 25 bp, Probe Sequence
acccaggctctgaagattcccagaa

SEQ ID NO: 147498 - DNA, 25 bp, Probe Sequence
acgctgcggtggatataccctgaaa

SEQ ID NO: 147499 - DNA, 25 bp, Probe Sequence
acgctggtgtggctggtcgtaaaca

SEQ ID NO: 147500 - DNA, 25 bp, Probe Sequence
acgtggttagtcatcgcgtagtagc

SEQ ID NO: 147501 - DNA, 25 bp, Probe Sequence
acgcttttgaacttgcaggctgatt

SEQ ID NO: 147502 - DNA, 25 bp, Probe Sequence
acgtcttacaactcagttgttttga

SEQ ID NO: 147503 - DNA, 25 bp, Probe Sequence
acgtttgccatatcccattggttaa

SEQ ID NO: 147504 - DNA, 25 bp, Probe Sequence
tacgtagtcggtttaattgatttag

SEQ ID NO: 147505 - DNA, 25 bp, Probe Sequence
acgtggtcccctaaattgttgcaca

SEQ ID NO: 147506 - DNA, 25 bp, Probe Sequence
acgctgacaaccattcatatttaca

SEQ ID NO: 147507 - DNA, 25 bp, Probe Sequence
actggcacacccagtactcgaacaa

SEQ ID NO: 147508 - DNA, 25 bp, Probe Sequence
acggatgcacccgtctttagaacca

SEQ ID NO: 147509 - DNA, 25 bp, Probe Sequence
acgctggttctcctcttatataacc

SEQ ID NO: 147510 - DNA, 25 bp, Probe Sequence
actgtccttctcattaaaaacccag

SEQ ID NO: 147511 - DNA, 25 bp, Probe Sequence
acgtttgtctatgtaaaaacctgca

SEQ ID NO: 147512 - DNA, 25 bp, Probe Sequence
accctgccttcatatcaaaaaccaa

SEQ ID NO: 147513 - DNA, 25 bp, Probe Sequence
accctgctctttactcaatggtacc

SEQ ID NO: 147514 - DNA, 25 bp, Probe Sequence
accctgtcattacgtcaacgcaacg

SEQ ID NO: 147515 - DNA, 25 bp, Probe Sequence
accctggagtacctgcacagccagg

SEQ ID NO: 147516 - DNA, 25 bp, Probe Sequence
accctggcctagaccagcagacaga

SEQ ID NO: 147517 - DNA, 25 bp, Probe Sequence
acgcgctggcgttacagcgcaacag

SEQ ID NO: 147518 - DNA, 25 bp, Probe Sequence
acgcgcttcggaatagcagccaagt

SEQ ID NO: 147519 - DNA, 25 bp, Probe Sequence
acccttcgagaagtgctccatttac

SEQ ID NO: 147520 - DNA, 25 bp, Probe Sequence
acccttgtggaagatatgattagac

SEQ ID NO: 147521 - DNA, 25 bp, Probe Sequence
accctttgtctagtgatcttgtaaa

SEQ ID NO: 147522 - DNA, 25 bp, Probe Sequence
accctatttcgccgtcctataatag

SEQ ID NO: 147523 - DNA, 25 bp, Probe Sequence
acccatccttggggacctgagaaag

SEQ ID NO: 147524 - DNA, 25 bp, Probe Sequence
actcttcttctgggggactgagaac

SEQ ID NO: 147525 - DNA, 25 bp, Probe Sequence
actgctactttgtgagtaaagaaaa

SEQ ID NO: 147526 - DNA, 25 bp, Probe Sequence
acgtaccatggtagcttaagatgac

SEQ ID NO: 147527 - DNA, 25 bp, Probe Sequence
acgttcattggttcctttgatagcc

SEQ ID NO: 147528 - DNA, 25 bp, Probe Sequence
acggtcacatcctccttgggagggt

SEQ ID NO: 147529 - DNA, 25 bp, Probe Sequence
cagggtttacccagtgggacagagg

SEQ ID NO: 147530 - DNA, 25 bp, Probe Sequence
cacggttatcccaggagggactgga

SEQ ID NO: 147531 - DNA, 25 bp, Probe Sequence
cacgttttccacatccgggaggaag

SEQ ID NO: 147532 - DNA, 25 bp, Probe Sequence
cacgtgttttccaccatttcgtaat

SEQ ID NO: 147533 - DNA, 25 bp, Probe Sequence
acgtccttgttcaccaaacagctag

SEQ ID NO: 147534 - DNA, 25 bp, Probe Sequence
acgtcctcgtaactcagcggaaggg

SEQ ID NO: 147535 - DNA, 25 bp, Probe Sequence
acgctcagacgttcaacctggaggg

SEQ ID NO: 147536 - DNA, 25 bp, Probe Sequence
accctgcctgtactactctagggag

SEQ ID NO: 147537 - DNA, 25 bp, Probe Sequence
acccccatgtatgcctatatgtgta

SEQ ID NO: 147538 - DNA, 25 bp, Probe Sequence
acccctcacataccctatgaagtaa

SEQ ID NO: 147539 - DNA, 25 bp, Probe Sequence
accctatgccaactcctaaacatat

SEQ ID NO: 147540 - DNA, 25 bp, Probe Sequence
acccttggcaacactagaagaaaat

SEQ ID NO: 147541 - DNA, 25 bp, Probe Sequence
acccttggacaagctgtgagaccaa

SEQ ID NO: 147542 - DNA, 25 bp, Probe Sequence
accctcctcaaagtctggatacctc

SEQ ID NO: 147543 - DNA, 25 bp, Probe Sequence
acccatgcctcttcaggctggaaac

SEQ ID NO: 147544 - DNA, 25 bp, Probe Sequence
accctggctccttgtgccagagaac

SEQ ID NO: 147545 - DNA, 25 bp, Probe Sequence
acccggtgcacttctcagaagcaat

SEQ ID NO: 147546 - DNA, 25 bp, Probe Sequence
accctgtgtgcctgtcagtatgaaa

SEQ ID NO: 147547 - DNA, 25 bp, Probe Sequence
acgccattgtactccagcttgggag

SEQ ID NO: 147548 - DNA, 25 bp, Probe Sequence
acccgtgtgggggcactgtgggaag

SEQ ID NO: 147549 - DNA, 25 bp, Probe Sequence
accctggtggtccaccattggataa

SEQ ID NO: 147550 - DNA, 25 bp, Probe Sequence
acccctgtctgcacaccagggatca

SEQ ID NO: 147551 - DNA, 25 bp, Probe Sequence
acccgcactcgatatccagtgagct

SEQ ID NO: 147552 - DNA, 25 bp, Probe Sequence
accctcaatagctatgtccagctgg

SEQ ID NO: 147553 - DNA, 25 bp, Probe Sequence
accctcaatcagttccagcgatgag

SEQ ID NO: 147554 - DNA, 25 bp, Probe Sequence
acccatcctagaggccaggcaggag

SEQ ID NO: 147555 - DNA, 25 bp, Probe Sequence
acccatcttccaggtaagcagttta

SEQ ID NO: 147556 - DNA, 25 bp, Probe Sequence
acccatttcagctcattacatttat

SEQ ID NO: 147557 - DNA, 25 bp, Probe Sequence
accctgtgttcatctgtgacattaa

SEQ ID NO: 147558 - DNA, 25 bp, Probe Sequence
accctattgtggctgtgagcaacca

SEQ ID NO: 147559 - DNA, 25 bp, Probe Sequence
accctttctgggatgcaatactagg

SEQ ID NO: 147560 - DNA, 25 bp, Probe Sequence
acccttacagtgccgtacagaatag

SEQ ID NO: 147561 - DNA, 25 bp, Probe Sequence
acccttagaagccaccatagagaag

SEQ ID NO: 147562 - DNA, 25 bp, Probe Sequence
accctgtgaggtggccctgagaagg

SEQ ID NO: 147563 - DNA, 25 bp, Probe Sequence
acccaggacgtggagctcgtggaga

SEQ ID NO: 147564 - DNA, 25 bp, Probe Sequence
acccaggacgtggagctcgtggaga

SEQ ID NO: 147565 - DNA, 25 bp, Probe Sequence
acccgaactgcatcaggcgtggcag

SEQ ID NO: 147566 - DNA, 25 bp, Probe Sequence
actcttaactgctacccttgtgagt

SEQ ID NO: 147567 - DNA, 25 bp, Probe Sequence
actgaggattctgaccctgtgtagg

SEQ ID NO: 147568 - DNA, 25 bp, Probe Sequence
acagcaaatcctgttccggcattgg

SEQ ID NO: 147569 - DNA, 25 bp, Probe Sequence
acgcaatttctacctccagtattgg

SEQ ID NO: 147570 - DNA, 25 bp, Probe Sequence
acgagagggctgtttccaaactgca

SEQ ID NO: 147571 - DNA, 25 bp, Probe Sequence
acgaaatgctgttattcctcagtac

SEQ ID NO: 147572 - DNA, 25 bp, Probe Sequence
acgaaaatcatgtctttcctgtatt

SEQ ID NO: 147573 - DNA, 25 bp, Probe Sequence
acgagatcatgaattcttttccctt

SEQ ID NO: 147574 - DNA, 25 bp, Probe Sequence
acgaactgttagattctccaccatc

SEQ ID NO: 147575 - DNA, 25 bp, Probe Sequence
acgacagctgacaagacatgccctc

SEQ ID NO: 147576 - DNA, 25 bp, Probe Sequence
acgacgctctctgagagaccatccc

SEQ ID NO: 147577 - DNA, 25 bp, Probe Sequence
acccagcttcattagatgtctacct

SEQ ID NO: 147578 - DNA, 25 bp, Probe Sequence
acgccctatttctatgtcattttta

SEQ ID NO: 147579 - DNA, 25 bp, Probe Sequence
acgccctatttctatgtcattttta

SEQ ID NO: 147580 - DNA, 25 bp, Probe Sequence
acgccctatttttgcaatggctata

SEQ ID NO: 147581 - DNA, 25 bp, Probe Sequence
acgcccctggcaaacatcaggtata

SEQ ID NO: 147582 - DNA, 25 bp, Probe Sequence
accccctgacatagtctcagagatc

SEQ ID NO: 147583 - DNA, 25 bp, Probe Sequence
acgccccgagtgacgtcaatgacgg

SEQ ID NO: 147584 - DNA, 25 bp, Probe Sequence
acgtcaccgaggagaagtaccagga

SEQ ID NO: 147585 - DNA, 25 bp, Probe Sequence
acgtcccaacgaagagaccacctgt

SEQ ID NO: 147586 - DNA, 25 bp, Probe Sequence
acaggtttactgacagaaccagcct

SEQ ID NO: 147587 - DNA, 25 bp, Probe Sequence
acgtggtcttggacacaaccatgcg

SEQ ID NO: 147588 - DNA, 25 bp, Probe Sequence
acgtggtcttggacacaaccatgcg

SEQ ID NO: 147589 - DNA, 25 bp, Probe Sequence
actggttctaggtaccagcctctgg

SEQ ID NO: 147590 - DNA, 25 bp, Probe Sequence
actggtttagtctgcagtctccgag

SEQ ID NO: 147591 - DNA, 25 bp, Probe Sequence
acccttctagacttcagaccacaga

SEQ ID NO: 147592 - DNA, 25 bp, Probe Sequence
accctttgagagttccacaagtggt

SEQ ID NO: 147593 - DNA, 25 bp, Probe Sequence
acccatttgaggttcttcagataga

SEQ ID NO: 147594 - DNA, 25 bp, Probe Sequence
acccgttgccatgattaagagagaa

SEQ ID NO: 147595 - DNA, 25 bp, Probe Sequence
acgcctccgtctctatataaggaat

SEQ ID NO: 147596 - DNA, 25 bp, Probe Sequence
acgcccggatctcagtcaaaggcat

SEQ ID NO: 147597 - DNA, 25 bp, Probe Sequence
acccattggattaagtagagttgtt

SEQ ID NO: 147598 - DNA, 25 bp, Probe Sequence
acccttggcattgggatcaatgttg

SEQ ID NO: 147599 - DNA, 25 bp, Probe Sequence
acgcctcaggcaattagacactttg

SEQ ID NO: 147600 - DNA, 25 bp, Probe Sequence
accctgcaagtaatcaacacatatt

SEQ ID NO: 147601 - DNA, 25 bp, Probe Sequence
acgcctgtagtcccaacacttaggg

SEQ ID NO: 147602 - DNA, 25 bp, Probe Sequence
acgtgatttgtccagcgacactcat

SEQ ID NO: 147603 - DNA, 25 bp, Probe Sequence
acgccaatggctcagcagtcacaat

SEQ ID NO: 147604 - DNA, 25 bp, Probe Sequence
acccacatgacttagttagtgcata

SEQ ID NO: 147605 - DNA, 25 bp, Probe Sequence
acccagcagccaaaggtaggctgtt

SEQ ID NO: 147606 - DNA, 25 bp, Probe Sequence
acccagcccatgtgtgataggattt

SEQ ID NO: 147607 - DNA, 25 bp, Probe Sequence
acccacctctggctgaaggtgctca

SEQ ID NO: 147608 - DNA, 25 bp, Probe Sequence
acccactcactacatgaagtcctga

SEQ ID NO: 147609 - DNA, 25 bp, Probe Sequence
accctgacatcccgagaagtccaga

SEQ ID NO: 147610 - DNA, 25 bp, Probe Sequence
accctggcaccggaaggccagcaga

SEQ ID NO: 147611 - DNA, 25 bp, Probe Sequence
acccagcaacctgagaagcacagag

SEQ ID NO: 147612 - DNA, 25 bp, Probe Sequence
acccatagaactgaacacacatgtt

SEQ ID NO: 147613 - DNA, 25 bp, Probe Sequence
acccaagctaatcagagacacttca

SEQ ID NO: 147614 - DNA, 25 bp, Probe Sequence
acccttgctttccaggaaccatgca

SEQ ID NO: 147615 - DNA, 25 bp, Probe Sequence
accctatcttgtcaataaacagcat

SEQ ID NO: 147616 - DNA, 25 bp, Probe Sequence
accctgtctctactgaaaaacaaca

SEQ ID NO: 147617 - DNA, 25 bp, Probe Sequence
accctttctaagttatatacagatc

SEQ ID NO: 147618 - DNA, 25 bp, Probe Sequence
acccttttccagaaagtaatacatg

SEQ ID NO: 147619 - DNA, 25 bp, Probe Sequence
accctgttgtggcccgagtaaatcg

SEQ ID NO: 147620 - DNA, 25 bp, Probe Sequence
acccactctgggcactgagttcagt

SEQ ID NO: 147621 - DNA, 25 bp, Probe Sequence
acccaggtgtgactcacatggcatt

SEQ ID NO: 147622 - DNA, 25 bp, Probe Sequence
acccaggctggagtgcagtggtgca

SEQ ID NO: 147623 - DNA, 25 bp, Probe Sequence
acccatggctggcatgcatgttggc

SEQ ID NO: 147624 - DNA, 25 bp, Probe Sequence
acccaggctggagtgtggtggcacc

SEQ ID NO: 147625 - DNA, 25 bp, Probe Sequence
acccactgctgacgggtgtggagat

SEQ ID NO: 147626 - DNA, 25 bp, Probe Sequence
acggcaatgcggctgcactggtgga

SEQ ID NO: 147627 - DNA, 25 bp, Probe Sequence
acccacatgtacctgcagtcagatg

SEQ ID NO: 147628 - DNA, 25 bp, Probe Sequence
acccattaatcactgcagtatttct

SEQ ID NO: 147629 - DNA, 25 bp, Probe Sequence
accctagaatgcttaaatgtgctgt

SEQ ID NO: 147630 - DNA, 25 bp, Probe Sequence
acgcctagatccttagatgaatcgt

SEQ ID NO: 147631 - DNA, 25 bp, Probe Sequence
acgcttttccttaggtatgccgagc

SEQ ID NO: 147632 - DNA, 25 bp, Probe Sequence
acgtaatattttatggctgcctggc

SEQ ID NO: 147633 - DNA, 25 bp, Probe Sequence
acgtccaatagtgacttgtcgcatg

SEQ ID NO: 147634 - DNA, 25 bp, Probe Sequence
acgagtcacatctgaaggttcacag

SEQ ID NO: 147635 - DNA, 25 bp, Probe Sequence
acgtacaacagccacaggtaccaca

SEQ ID NO: 147636 - DNA, 25 bp, Probe Sequence
acggaatgcacacgacggttctgcc

SEQ ID NO: 147637 - DNA, 25 bp, Probe Sequence
acgggagacaggtctgtcttctgcc

SEQ ID NO: 147638 - DNA, 25 bp, Probe Sequence
acgctggcattcttgggactttgcc

SEQ ID NO: 147639 - DNA, 25 bp, Probe Sequence
acgctgtattgagcatgccgtcttc

SEQ ID NO: 147640 - DNA, 25 bp, Probe Sequence
acgctgtcattagtcatgagctctt

SEQ ID NO: 147641 - DNA, 25 bp, Probe Sequence
acgctgcatgatctgtgtgactgat

SEQ ID NO: 147642 - DNA, 25 bp, Probe Sequence
acgctgctgaacatgctcaacatct

SEQ ID NO: 147643 - DNA, 25 bp, Probe Sequence
acgacttcaactgcaacatctggga

SEQ ID NO: 147644 - DNA, 25 bp, Probe Sequence
acccttccaagttgactgtggtgag

SEQ ID NO: 147645 - DNA, 25 bp, Probe Sequence
acgccttctcaaggagggattcgag

SEQ ID NO: 147646 - DNA, 25 bp, Probe Sequence
accctgtctgccaggggttatatat

SEQ ID NO: 147647 - DNA, 25 bp, Probe Sequence
acccatttgtgcattgagttttctt

SEQ ID NO: 147648 - DNA, 25 bp, Probe Sequence
acccataaatcaatgggccctttat

SEQ ID NO: 147649 - DNA, 25 bp, Probe Sequence
acgcgcaaatataaggtccctgact

SEQ ID NO: 147650 - DNA, 25 bp, Probe Sequence
acggttatatgtgtgtccctcattc

SEQ ID NO: 147651 - DNA, 25 bp, Probe Sequence
acggatttgattgtgcaggacggac

SEQ ID NO: 147652 - DNA, 25 bp, Probe Sequence
acggattcttgcgggaagcgcggac

SEQ ID NO: 147653 - DNA, 25 bp, Probe Sequence
acgagctatagtggcgcacaagcgc

SEQ ID NO: 147654 - DNA, 25 bp, Probe Sequence
acgcattaactggcgaacagtgctg

SEQ ID NO: 147655 - DNA, 25 bp, Probe Sequence
acgcatgaagtttcgcaacatggag

SEQ ID NO: 147656 - DNA, 25 bp, Probe Sequence
acgcagaccttcggcatcgagaagt

SEQ ID NO: 147657 - DNA, 25 bp, Probe Sequence
acgagacctccgtacagggaagaag

SEQ ID NO: 147658 - DNA, 25 bp, Probe Sequence
acaggaacgccttctcaaggaggga

SEQ ID NO: 147659 - DNA, 25 bp, Probe Sequence
acggctaccacatccaaggaaggca

SEQ ID NO: 147660 - DNA, 25 bp, Probe Sequence
acggctaccacatccaaggaaggca

SEQ ID NO: 147661 - DNA, 25 bp, Probe Sequence
acgtccttcactcccaaaatgaggc

SEQ ID NO: 147662 - DNA, 25 bp, Probe Sequence
acgccagttccccagcaaagaggcg

SEQ ID NO: 147663 - DNA, 25 bp, Probe Sequence
acccagtgcatccaacagaaacagc

SEQ ID NO: 147664 - DNA, 25 bp, Probe Sequence
acccatagcttccatgagaacagca

SEQ ID NO: 147665 - DNA, 25 bp, Probe Sequence
acccagcgcttctatgaggcagagg

SEQ ID NO: 147666 - DNA, 25 bp, Probe Sequence
acccagcatctggcacagaggcttg

SEQ ID NO: 147667 - DNA, 25 bp, Probe Sequence
acccagcttgtgcctgtggttaaca

SEQ ID NO: 147668 - DNA, 25 bp, Probe Sequence
acccagcagtgtcctggggagaagg

SEQ ID NO: 147669 - DNA, 25 bp, Probe Sequence
accctgcagttgctcgaggacaagt

SEQ ID NO: 147670 - DNA, 25 bp, Probe Sequence
accctgctggtaccagaggaaatgc

SEQ ID NO: 147671 - DNA, 25 bp, Probe Sequence
acccttgactggccagggataaggt

SEQ ID NO: 147672 - DNA, 25 bp, Probe Sequence
accctctaagtgtgatggatacatg

SEQ ID NO: 147673 - DNA, 25 bp, Probe Sequence
accctctagcggtgaagctccaggg

SEQ ID NO: 147674 - DNA, 25 bp, Probe Sequence
caccccggaagctgaacctgaggga

SEQ ID NO: 147675 - DNA, 25 bp, Probe Sequence
accctgcggaactgctactcatggg

SEQ ID NO: 147676 - DNA, 25 bp, Probe Sequence
acgcttccgaaatgcactccagaag

SEQ ID NO: 147677 - DNA, 25 bp, Probe Sequence
acgcttctaccaatgggctcatcaa

SEQ ID NO: 147678 - DNA, 25 bp, Probe Sequence
acgtggtacctgacgggcatcgtca

SEQ ID NO: 147679 - DNA, 25 bp, Probe Sequence
acgcggttctggaaaggcacttgcc

SEQ ID NO: 147680 - DNA, 25 bp, Probe Sequence
acgctggtgtctgaatcaggggctg

SEQ ID NO: 147681 - DNA, 25 bp, Probe Sequence
acgctggcctatatatcagggacca

SEQ ID NO: 147682 - DNA, 25 bp, Probe Sequence
acgtggctctagtgtctggagacac

SEQ ID NO: 147683 - DNA, 25 bp, Probe Sequence
acgctggctgctcaagtactagccc

SEQ ID NO: 147684 - DNA, 25 bp, Probe Sequence
acgtctgcagctggatttagcttgc

SEQ ID NO: 147685 - DNA, 25 bp, Probe Sequence
acgctgcggcaccatagtggattgc

SEQ ID NO: 147686 - DNA, 25 bp, Probe Sequence
acgctgggcacgttgagtgaatctc

SEQ ID NO: 147687 - DNA, 25 bp, Probe Sequence
acgttgtcagcgctcaggaatgtgc

SEQ ID NO: 147688 - DNA, 25 bp, Probe Sequence
actcttacaggcccaggactggagc

SEQ ID NO: 147689 - DNA, 25 bp, Probe Sequence
actgtgtacatgaaggtggacggag

SEQ ID NO: 147690 - DNA, 25 bp, Probe Sequence
actgtgtacatgaaggtggacggag

SEQ ID NO: 147691 - DNA, 25 bp, Probe Sequence
acgtgatcatggtgtgggacgtggg

SEQ ID NO: 147692 - DNA, 25 bp, Probe Sequence
acgctgtcattgccgtggatgggat

SEQ ID NO: 147693 - DNA, 25 bp, Probe Sequence
acggcattgctccagtggatggtat

SEQ ID NO: 147694 - DNA, 25 bp, Probe Sequence
acgctcactgcgaaggcaggttatt

SEQ ID NO: 147695 - DNA, 25 bp, Probe Sequence
acggctccgagagcaggttcttcgt

SEQ ID NO: 147696 - DNA, 25 bp, Probe Sequence
actggctaccgttcggactatttgt

SEQ ID NO: 147697 - DNA, 25 bp, Probe Sequence
acggctacaagtgccgactcctgaa

SEQ ID NO: 147698 - DNA, 25 bp, Probe Sequence
actggctcagcgtgtgcctacccta

SEQ ID NO: 147699 - DNA, 25 bp, Probe Sequence
actgatggctcctttgccaataagc

SEQ ID NO: 147700 - DNA, 25 bp, Probe Sequence
acgatgtcacgtattgccaagagct

SEQ ID NO: 147701 - DNA, 25 bp, Probe Sequence
acggctcctacacgtgcgaagatgt

SEQ ID NO: 147702 - DNA, 25 bp, Probe Sequence
acggcccatgtcagacgaaggctca

SEQ ID NO: 147703 - DNA, 25 bp, Probe Sequence
acaggcggcttcggggcaaagaagc

SEQ ID NO: 147704 - DNA, 25 bp, Probe Sequence
acggctgtttcctcttattcaagcc

SEQ ID NO: 147705 - DNA, 25 bp, Probe Sequence
acgggaatgaaggagctgtttcaag

SEQ ID NO: 147706 - DNA, 25 bp, Probe Sequence
acgagtggtcgagtgaagattgaaa

SEQ ID NO: 147707 - DNA, 25 bp, Probe Sequence
acgcaaggactggtgatgagtagag

SEQ ID NO: 147708 - DNA, 25 bp, Probe Sequence
acggcagcgacgaagagcagtgcca

SEQ ID NO: 147709 - DNA, 25 bp, Probe Sequence
acgcggcagaagaagcggctccagg

SEQ ID NO: 147710 - DNA, 25 bp, Probe Sequence
acgcgcgctgggagcagtttgcagc

SEQ ID NO: 147711 - DNA, 25 bp, Probe Sequence
acgcgtgtgagtgtgcatgtgtgtg

SEQ ID NO: 147712 - DNA, 25 bp, Probe Sequence
actgtgatgctgcaccgataggttt

SEQ ID NO: 147713 - DNA, 25 bp, Probe Sequence
acgtgatctgagttcagaccggagt

SEQ ID NO: 147714 - DNA, 25 bp, Probe Sequence
acggattactacggccggagcagat

SEQ ID NO: 147715 - DNA, 25 bp, Probe Sequence
acgagaatgaattgccccaggagtg

SEQ ID NO: 147716 - DNA, 25 bp, Probe Sequence
acgaatgttaccaggcatggcagtg

SEQ ID NO: 147717 - DNA, 25 bp, Probe Sequence
acgacgtgtttgagcagctggcgtg

SEQ ID NO: 147718 - DNA, 25 bp, Probe Sequence
acgcagggtcgtagacgtgtctgta

SEQ ID NO: 147719 - DNA, 25 bp, Probe Sequence
acgcgggttgtggacctggctggat

SEQ ID NO: 147720 - DNA, 25 bp, Probe Sequence
acggggtgttggatatggaggagga

SEQ ID NO: 147721 - DNA, 25 bp, Probe Sequence
acgagcttttttctcaggtggatga

SEQ ID NO: 147722 - DNA, 25 bp, Probe Sequence
acacgtttgtttcttcgtgcctgtt

SEQ ID NO: 147723 - DNA, 25 bp, Probe Sequence
aagcgggaatttcctacagtgccct

SEQ ID NO: 147724 - DNA, 25 bp, Probe Sequence
aacggggacgtcctgatagatcctc

SEQ ID NO: 147725 - DNA, 25 bp, Probe Sequence
acgcgcaggtgacggccttagatct

SEQ ID NO: 147726 - DNA, 25 bp, Probe Sequence
acgccaagatggcgccactacactc

SEQ ID NO: 147727 - DNA, 25 bp, Probe Sequence
acgccaggagctcaaactattctct

SEQ ID NO: 147728 - DNA, 25 bp, Probe Sequence
acgaatagacatcaaactcaatgct

SEQ ID NO: 147729 - DNA, 25 bp, Probe Sequence
acgattcgagccttacactctatct

SEQ ID NO: 147730 - DNA, 25 bp, Probe Sequence
acgttctagcaggtcatcggtgctt

SEQ ID NO: 147731 - DNA, 25 bp, Probe Sequence
acttttagggttgtgactggctttg

SEQ ID NO: 147732 - DNA, 25 bp, Probe Sequence
acgatttcccgtcttgactgagttc

SEQ ID NO: 147733 - DNA, 25 bp, Probe Sequence
acttttctggttcttatccattatc

SEQ ID NO: 147734 - DNA, 25 bp, Probe Sequence
acgatgctttggatgttgccaacaa

SEQ ID NO: 147735 - DNA, 25 bp, Probe Sequence
acgacatctgatgtttcaggccaaa

SEQ ID NO: 147736 - DNA, 25 bp, Probe Sequence
acgaacattcacattagggataagc

SEQ ID NO: 147737 - DNA, 25 bp, Probe Sequence
acgtaactcaatcaggaggaagaga

SEQ ID NO: 147738 - DNA, 25 bp, Probe Sequence
acgcttaggctctctggggaagaag

SEQ ID NO: 147739 - DNA, 25 bp, Probe Sequence
acgccatgaccctgtggatgggaga

SEQ ID NO: 147740 - DNA, 25 bp, Probe Sequence
acgtgaggcaactgtggcagggaaa

SEQ ID NO: 147741 - DNA, 25 bp, Probe Sequence
acggtgtgaacaggtcaagaataac

SEQ ID NO: 147742 - DNA, 25 bp, Probe Sequence
acaggtgataactcagaaaaaccaa

SEQ ID NO: 147743 - DNA, 25 bp, Probe Sequence
acaacgtacacataatggaaggcta

SEQ ID NO: 147744 - DNA, 25 bp, Probe Sequence
actgggaaatcaaaatggtcaccgt

SEQ ID NO: 147745 - DNA, 25 bp, Probe Sequence
acgggatctacaccaaggtcaccgc

SEQ ID NO: 147746 - DNA, 25 bp, Probe Sequence
acgtggcctactttgaggcctcggc

SEQ ID NO: 147747 - DNA, 25 bp, Probe Sequence
actgcggttgtttgtggaccactgc

SEQ ID NO: 147748 - DNA, 25 bp, Probe Sequence
acaggggttggactggactaccaga

SEQ ID NO: 147749 - DNA, 25 bp, Probe Sequence
acagggctatttctccaatgtacaa

SEQ ID NO: 147750 - DNA, 25 bp, Probe Sequence
acgtgactttggttcctttgacaag

SEQ ID NO: 147751 - DNA, 25 bp, Probe Sequence
acgtaactgagatgctcctttaaat

SEQ ID NO: 147752 - DNA, 25 bp, Probe Sequence
actgtgcacctagagcttttttata

SEQ ID NO: 147753 - DNA, 25 bp, Probe Sequence
acgtgatcacgagggagtttcgttc

SEQ ID NO: 147754 - DNA, 25 bp, Probe Sequence
acgcctcatctgagggagcttcact

SEQ ID NO: 147755 - DNA, 25 bp, Probe Sequence
acgcccacttggcagacatcaagtg

SEQ ID NO: 147756 - DNA, 25 bp, Probe Sequence
acccaaatatcgtcatagccaagat

SEQ ID NO: 147757 - DNA, 25 bp, Probe Sequence
acccacagctgacatcatacctaat

SEQ ID NO: 147758 - DNA, 25 bp, Probe Sequence
acccaggtggaaaacatgctatatc

SEQ ID NO: 147759 - DNA, 25 bp, Probe Sequence
acgccaggcccagttaatgctagtc

SEQ ID NO: 147760 - DNA, 25 bp, Probe Sequence
acgccaggtgcttattaggccgtgc

SEQ ID NO: 147761 - DNA, 25 bp, Probe Sequence
gacccacatgtgctttgcagaggcc

SEQ ID NO: 147762 - DNA, 25 bp, Probe Sequence
acccagctctgttccaaggtgagtc

SEQ ID NO: 147763 - DNA, 25 bp, Probe Sequence
acccagctctgagttcatggatgtt

SEQ ID NO: 147764 - DNA, 25 bp, Probe Sequence
acccacactatcatagatttcttag

SEQ ID NO: 147765 - DNA, 25 bp, Probe Sequence
acccaacctggtaattatcctcaag

SEQ ID NO: 147766 - DNA, 25 bp, Probe Sequence
acgacaaagctgctaaatctcctat

SEQ ID NO: 147767 - DNA, 25 bp, Probe Sequence
acccttcagctgctaagatccaaga

SEQ ID NO: 147768 - DNA, 25 bp, Probe Sequence
acgccttactggcaatgcttccaca

SEQ ID NO: 147769 - DNA, 25 bp, Probe Sequence
acgcctcatagcacaaattgtagca

SEQ ID NO: 147770 - DNA, 25 bp, Probe Sequence
acccatcaatgcagagcactccagg

SEQ ID NO: 147771 - DNA, 25 bp, Probe Sequence
acccacaattgaacttccaggaaag

SEQ ID NO: 147772 - DNA, 25 bp, Probe Sequence
acccttgattatactctgttggaca

SEQ ID NO: 147773 - DNA, 25 bp, Probe Sequence
acccttgtctctatctgtacataat

SEQ ID NO: 147774 - DNA, 25 bp, Probe Sequence
acccttgactttgctgaaatttgct

SEQ ID NO: 147775 - DNA, 25 bp, Probe Sequence
acccttagctttcccataagagctc

SEQ ID NO: 147776 - DNA, 25 bp, Probe Sequence
acacgcttagtgtctctaaaaaccg

SEQ ID NO: 147777 - DNA, 25 bp, Probe Sequence
acgtcatgtcagtactccaaaagtt

SEQ ID NO: 147778 - DNA, 25 bp, Probe Sequence
acgtatgtctggttctcaattccaa

SEQ ID NO: 147779 - DNA, 25 bp, Probe Sequence
acgtttcatctttcctggatcacta

SEQ ID NO: 147780 - DNA, 25 bp, Probe Sequence
acgtattgccaagagcttgaagctc

SEQ ID NO: 147781 - DNA, 25 bp, Probe Sequence
acgaattccaacttgtttcacgcta

SEQ ID NO: 147782 - DNA, 25 bp, Probe Sequence
acgcaatggccgtagcgtttacgtg

SEQ ID NO: 147783 - DNA, 25 bp, Probe Sequence
acgcctggcatagaggttgggctgg

SEQ ID NO: 147784 - DNA, 25 bp, Probe Sequence
acgtctgatcttgatgggggcactg

SEQ ID NO: 147785 - DNA, 25 bp, Probe Sequence
acgatcatagtcttaggagttcatt

SEQ ID NO: 147786 - DNA, 25 bp, Probe Sequence
acgagctagttaaacagtgccattg

SEQ ID NO: 147787 - DNA, 25 bp, Probe Sequence
acgagtcatgtcaacacagcgtgtt

SEQ ID NO: 147788 - DNA, 25 bp, Probe Sequence
acggactgtgaatccgctctttgtc

SEQ ID NO: 147789 - DNA, 25 bp, Probe Sequence
acttggactggatccaccactatgt

SEQ ID NO: 147790 - DNA, 25 bp, Probe Sequence
acttggactggatccaccactatgt

SEQ ID NO: 147791 - DNA, 25 bp, Probe Sequence
acttggactggatccaccactatgt

SEQ ID NO: 147792 - DNA, 25 bp, Probe Sequence
actaggtcaagatctagcgataatg

SEQ ID NO: 147793 - DNA, 25 bp, Probe Sequence
actcggttcgctaccagtgtaagaa

SEQ ID NO: 147794 - DNA, 25 bp, Probe Sequence
actgccaaatagacccgtgtacaat

SEQ ID NO: 147795 - DNA, 25 bp, Probe Sequence
cctggaatctacaccctgttaacca

SEQ ID NO: 147796 - DNA, 25 bp, Probe Sequence
cacggaattactctgcctctaaaga

SEQ ID NO: 147797 - DNA, 25 bp, Probe Sequence
acgcgtatttacagccagtgggaga

SEQ ID NO: 147798 - DNA, 25 bp, Probe Sequence
actggtatattagatcccatgggag

SEQ ID NO: 147799 - DNA, 25 bp, Probe Sequence
actagaaatagagagcccacgttgt

SEQ ID NO: 147800 - DNA, 25 bp, Probe Sequence
actaaaaaattaatgccaggtgtgg

SEQ ID NO: 147801 - DNA, 25 bp, Probe Sequence
actagcactatataattccggtcag

SEQ ID NO: 147802 - DNA, 25 bp, Probe Sequence
actggctcaacatggttcgggccgg

SEQ ID NO: 147803 - DNA, 25 bp, Probe Sequence
acccatgaagtaagtgccgaggcct

SEQ ID NO: 147804 - DNA, 25 bp, Probe Sequence
acgccagatttgtttgccagaagcc

SEQ ID NO: 147805 - DNA, 25 bp, Probe Sequence
acgctctgagacgtttgccatgagg

SEQ ID NO: 147806 - DNA, 25 bp, Probe Sequence
acgtctcgaactttctatgtgcagg

SEQ ID NO: 147807 - DNA, 25 bp, Probe Sequence
acgtccaagcctatcatcttgcgtt

SEQ ID NO: 147808 - DNA, 25 bp, Probe Sequence
actgtcccttccatcttggaatgtg

SEQ ID NO: 147809 - DNA, 25 bp, Probe Sequence
acgtccatctttttaagggattgct

SEQ ID NO: 147810 - DNA, 25 bp, Probe Sequence
acgtactttgttgcagactatgatt

SEQ ID NO: 147811 - DNA, 25 bp, Probe Sequence
acagatgttttgtgccaagtaagta

SEQ ID NO: 147812 - DNA, 25 bp, Probe Sequence
acgttggagttgcccacagtgaagt

SEQ ID NO: 147813 - DNA, 25 bp, Probe Sequence
actcgtggtgttgccatggcgatag

SEQ ID NO: 147814 - DNA, 25 bp, Probe Sequence
acgcggtggaatgggcagcgctgga

SEQ ID NO: 147815 - DNA, 25 bp, Probe Sequence
acgggcggatctcgagatcacggag

SEQ ID NO: 147816 - DNA, 25 bp, Probe Sequence
actggtgcagcgaccaggtcatcgt

SEQ ID NO: 147817 - DNA, 25 bp, Probe Sequence
acggtgagggccgatgtctgggaac

SEQ ID NO: 147818 - DNA, 25 bp, Probe Sequence
acgggaggttcggctgatgcggaac

SEQ ID NO: 147819 - DNA, 25 bp, Probe Sequence
actggaggagtaagggggctgtcac

SEQ ID NO: 147820 - DNA, 25 bp, Probe Sequence
acgtgggagtgtttggctgccccac

SEQ ID NO: 147821 - DNA, 25 bp, Probe Sequence
acgaggactgtgatgaggagcccca

SEQ ID NO: 147822 - DNA, 25 bp, Probe Sequence
cacgtggaccaagtgaccaccgtga

SEQ ID NO: 147823 - DNA, 25 bp, Probe Sequence
acgattgtagatactagtccctgtg

SEQ ID NO: 147824 - DNA, 25 bp, Probe Sequence
acgggtatgattacagtagctttgt

SEQ ID NO: 147825 - DNA, 25 bp, Probe Sequence
acgcctgtagttccagctactcagg

SEQ ID NO: 147826 - DNA, 25 bp, Probe Sequence
acgcctgttatcacagctacttggg

SEQ ID NO: 147827 - DNA, 25 bp, Probe Sequence
acgcctgttatcacagctacttggg

SEQ ID NO: 147828 - DNA, 25 bp, Probe Sequence
acgcctgtaatcccagcactttggg

SEQ ID NO: 147829 - DNA, 25 bp, Probe Sequence
acgcctgtaattccatcattttggg

SEQ ID NO: 147830 - DNA, 25 bp, Probe Sequence
acccaggatagtcttgcttcttgag

SEQ ID NO: 147831 - DNA, 25 bp, Probe Sequence
acccaggatgatgtgtgtttgattg

SEQ ID NO: 147832 - DNA, 25 bp, Probe Sequence
acccatgcctgaattttttgagatt

SEQ ID NO: 147833 - DNA, 25 bp, Probe Sequence
acccatcggtgtccatttatagaat

SEQ ID NO: 147834 - DNA, 25 bp, Probe Sequence
acccaccatagggcatgattaacaa

SEQ ID NO: 147835 - DNA, 25 bp, Probe Sequence
acgcacccattggcctggaagaaag

SEQ ID NO: 147836 - DNA, 25 bp, Probe Sequence
acccagccattgtcttccaatgaga

SEQ ID NO: 147837 - DNA, 25 bp, Probe Sequence
acccagcgtatatcccatgatgagg

SEQ ID NO: 147838 - DNA, 25 bp, Probe Sequence
acccacgatatcatcaccaagttcc

SEQ ID NO: 147839 - DNA, 25 bp, Probe Sequence
acccacgtctacatgtacgtgttca

SEQ ID NO: 147840 - DNA, 25 bp, Probe Sequence
acgtaagtccacatatacttctata

SEQ ID NO: 147841 - DNA, 25 bp, Probe Sequence
acgacaggttcatctctatttaaag

SEQ ID NO: 147842 - DNA, 25 bp, Probe Sequence
actgactagttcccctaataatcgg

SEQ ID NO: 147843 - DNA, 25 bp, Probe Sequence
actgactaaatgacacccaaaatgg

SEQ ID NO: 147844 - DNA, 25 bp, Probe Sequence
acgactcaaaatttccaagaagcca

SEQ ID NO: 147845 - DNA, 25 bp, Probe Sequence
acgactcaaaatttccaagaagcca

SEQ ID NO: 147846 - DNA, 25 bp, Probe Sequence
actgacccaaaggccctgaagtaca

SEQ ID NO: 147847 - DNA, 25 bp, Probe Sequence
actggccaagaagggccttactcct

SEQ ID NO: 147848 - DNA, 25 bp, Probe Sequence
acgtccaagaagtagttcaccccag

SEQ ID NO: 147849 - DNA, 25 bp, Probe Sequence
acgttcgagagagagtcttcgggag

SEQ ID NO: 147850 - DNA, 25 bp, Probe Sequence
cacgttctccgagggtttgggaatg

SEQ ID NO: 147851 - DNA, 25 bp, Probe Sequence
acgatattcacctcagtttgtaaag

SEQ ID NO: 147852 - DNA, 25 bp, Probe Sequence
acgatattcacctcagtttgtaaag

SEQ ID NO: 147853 - DNA, 25 bp, Probe Sequence
acgagttactatgctgtttctggga

SEQ ID NO: 147854 - DNA, 25 bp, Probe Sequence
acgagttacctcgtccgagtggtga

SEQ ID NO: 147855 - DNA, 25 bp, Probe Sequence
acgggtacctgtggagcgaggtgta

SEQ ID NO: 147856 - DNA, 25 bp, Probe Sequence
acggggagcctgatgaggacgctta

SEQ ID NO: 147857 - DNA, 25 bp, Probe Sequence
acgagagttactcctactaccagta

SEQ ID NO: 147858 - DNA, 25 bp, Probe Sequence
acgaacctgatctcttatactagta

SEQ ID NO: 147859 - DNA, 25 bp, Probe Sequence
acgctacctgacaactcaattctgg

SEQ ID NO: 147860 - DNA, 25 bp, Probe Sequence
acgtcacgctgaatatatgaccacg

SEQ ID NO: 147861 - DNA, 25 bp, Probe Sequence
acgaactggactgtgtgcaacgctt

SEQ ID NO: 147862 - DNA, 25 bp, Probe Sequence
acgacagatgatgcttttcgaaatt

SEQ ID NO: 147863 - DNA, 25 bp, Probe Sequence
acgcataatgacgtatggtccatag

SEQ ID NO: 147864 - DNA, 25 bp, Probe Sequence
acgctggtgattgacctccatagaa

SEQ ID NO: 147865 - DNA, 25 bp, Probe Sequence
acgctgcggcaagccgtcaagatga

SEQ ID NO: 147866 - DNA, 25 bp, Probe Sequence
aacaatggcacatccgtggaggacg

SEQ ID NO: 147867 - DNA, 25 bp, Probe Sequence
aacttggacagcaacagggacaacg

SEQ ID NO: 147868 - DNA, 25 bp, Probe Sequence
acagctgggagaaactgggaaacaa

SEQ ID NO: 147869 - DNA, 25 bp, Probe Sequence
aacgggaaaggcatgggaatgtagc

SEQ ID NO: 147870 - DNA, 25 bp, Probe Sequence
aaagccgaagttatggaccgctagc

SEQ ID NO: 147871 - DNA, 25 bp, Probe Sequence
aaagacgcctttcagaacgcctatt

SEQ ID NO: 147872 - DNA, 25 bp, Probe Sequence
aaattcgtctttgagatcacccagc

SEQ ID NO: 147873 - DNA, 25 bp, Probe Sequence
aaattgcccggggaatctgtcgaca

SEQ ID NO: 147874 - DNA, 25 bp, Probe Sequence
acgttgcccggcagattaccaaaga

SEQ ID NO: 147875 - DNA, 25 bp, Probe Sequence
acgttgcccggcagattaccaaaga

SEQ ID NO: 147876 - DNA, 25 bp, Probe Sequence
cacgggccacgggaagaaccaagcg

SEQ ID NO: 147877 - DNA, 25 bp, Probe Sequence
ctcgaggactggccgggaaccgagg

SEQ ID NO: 147878 - DNA, 25 bp, Probe Sequence
acgtggtggtgactcggaaccgaag

SEQ ID NO: 147879 - DNA, 25 bp, Probe Sequence
acgggggaggtccatgaaaatccag

SEQ ID NO: 147880 - DNA, 25 bp, Probe Sequence
acgctggggatgctggtacaagttg

SEQ ID NO: 147881 - DNA, 25 bp, Probe Sequence
acccagagagagctggtctccaggc

SEQ ID NO: 147882 - DNA, 25 bp, Probe Sequence
acccagagattgctgctgttctatt

SEQ ID NO: 147883 - DNA, 25 bp, Probe Sequence
acccaagcatatctttacttgtaac

SEQ ID NO: 147884 - DNA, 25 bp, Probe Sequence
acccaacatcaggtattcctttaga

SEQ ID NO: 147885 - DNA, 25 bp, Probe Sequence
acccaagaagcagaatctcattcag

SEQ ID NO: 147886 - DNA, 25 bp, Probe Sequence
acccaaggaggaacacctgctgcag

SEQ ID NO: 147887 - DNA, 25 bp, Probe Sequence
acccaagggagcacacagctcttct

SEQ ID NO: 147888 - DNA, 25 bp, Probe Sequence
acggaaggtagtgccaccttctcct

SEQ ID NO: 147889 - DNA, 25 bp, Probe Sequence
acggcacttggcgtaaagccgcttc

SEQ ID NO: 147890 - DNA, 25 bp, Probe Sequence
acggacatgcggataaggccctgct

SEQ ID NO: 147891 - DNA, 25 bp, Probe Sequence
acggaccgctatccagaaggccgtc

SEQ ID NO: 147892 - DNA, 25 bp, Probe Sequence
acgtcagcgccaaaagaaggctcgg

SEQ ID NO: 147893 - DNA, 25 bp, Probe Sequence
acgtcacccaaagtagatgttagaa

SEQ ID NO: 147894 - DNA, 25 bp, Probe Sequence
acgtcatcgagctcctggatgttga

SEQ ID NO: 147895 - DNA, 25 bp, Probe Sequence
acgacctggcgactctggatggtca

SEQ ID NO: 147896 - DNA, 25 bp, Probe Sequence
acgcacgggtgtttctgtgtgctag

SEQ ID NO: 147897 - DNA, 25 bp, Probe Sequence
acccaacatttcttagcatgagcta

SEQ ID NO: 147898 - DNA, 25 bp, Probe Sequence
acccacactacttctacagatgatt

SEQ ID NO: 147899 - DNA, 25 bp, Probe Sequence
acccacatcacctgctacatgatgg

SEQ ID NO: 147900 - DNA, 25 bp, Probe Sequence
acgctcacaccattggctgcaatgc

SEQ ID NO: 147901 - DNA, 25 bp, Probe Sequence
acgccacagccaaagctgttgcggt

SEQ ID NO: 147902 - DNA, 25 bp, Probe Sequence
acgcgagcagccaaggtgttggagc

SEQ ID NO: 147903 - DNA, 25 bp, Probe Sequence
acgcgagagacgtgcttccgaagga

SEQ ID NO: 147904 - DNA, 25 bp, Probe Sequence
acgggtgcatctgcgtgaacgtagg

SEQ ID NO: 147905 - DNA, 25 bp, Probe Sequence
cactgggtatccgttagaggtaagg

SEQ ID NO: 147906 - DNA, 25 bp, Probe Sequence
acgggttgtgcctggaggtggaggg

SEQ ID NO: 147907 - DNA, 25 bp, Probe Sequence
actgggcttttctggggagctgagg

SEQ ID NO: 147908 - DNA, 25 bp, Probe Sequence
acgggttcctctctgagcgagcgga

SEQ ID NO: 147909 - DNA, 25 bp, Probe Sequence
acgggaatacccagatggcactgtt

SEQ ID NO: 147910 - DNA, 25 bp, Probe Sequence
acggggatatcgtctttcatcacgt

SEQ ID NO: 147911 - DNA, 25 bp, Probe Sequence
acgcggtgtacatctgttcatgcat

SEQ ID NO: 147912 - DNA, 25 bp, Probe Sequence
acgaagccgacatgctgttctctgt

SEQ ID NO: 147913 - DNA, 25 bp, Probe Sequence
acgaagccgacatgctgttctctgt

SEQ ID NO: 147914 - DNA, 25 bp, Probe Sequence
acgacagtaccattgagttgtgcgt

SEQ ID NO: 147915 - DNA, 25 bp, Probe Sequence
acgaacagactcaggcgatgtgctt

SEQ ID NO: 147916 - DNA, 25 bp, Probe Sequence
acgaccaagtgacagcaatgctgtt

SEQ ID NO: 147917 - DNA, 25 bp, Probe Sequence
acgcaccaagcggaactgcgcttaa

SEQ ID NO: 147918 - DNA, 25 bp, Probe Sequence
acgacctgggcttgatgggctatgt

SEQ ID NO: 147919 - DNA, 25 bp, Probe Sequence
acgacgtggcatctgaggtgtacaa

SEQ ID NO: 147920 - DNA, 25 bp, Probe Sequence
actccatgggctggcatggggctcc

SEQ ID NO: 147921 - DNA, 25 bp, Probe Sequence
acgccagcaggcgtcagaggcggac

SEQ ID NO: 147922 - DNA, 25 bp, Probe Sequence
acgccagagtgatggggcgagactc

SEQ ID NO: 147923 - DNA, 25 bp, Probe Sequence
acgacagcatggatcggtgaaacca

SEQ ID NO: 147924 - DNA, 25 bp, Probe Sequence
acgacgagcaggacagggttcctcc

SEQ ID NO: 147925 - DNA, 25 bp, Probe Sequence
acgggagggacaaggcttctctgtc

SEQ ID NO: 147926 - DNA, 25 bp, Probe Sequence
acgatggcgggaaaatgttatttgc

SEQ ID NO: 147927 - DNA, 25 bp, Probe Sequence
acgatggtgggcacttgtagtccca

SEQ ID NO: 147928 - DNA, 25 bp, Probe Sequence
actgggtgtgtgaggttcaggccca

SEQ ID NO: 147929 - DNA, 25 bp, Probe Sequence
acgatggctgttgaggaattggtcc

SEQ ID NO: 147930 - DNA, 25 bp, Probe Sequence
acgtgtcagattgcaggaagggttc

SEQ ID NO: 147931 - DNA, 25 bp, Probe Sequence
actgtgaagtcatccaaaggtggtc

SEQ ID NO: 147932 - DNA, 25 bp, Probe Sequence
acgtgaaatctaaagtccggagtct

SEQ ID NO: 147933 - DNA, 25 bp, Probe Sequence
actggaagcctaagtgttaggtgga

SEQ ID NO: 147934 - DNA, 25 bp, Probe Sequence
acgggccctagacaatacgatggaa

SEQ ID NO: 147935 - DNA, 25 bp, Probe Sequence
acgagaacctggccttgaacgagtg

SEQ ID NO: 147936 - DNA, 25 bp, Probe Sequence
acgagaatgctcggcagcagctgga

SEQ ID NO: 147937 - DNA, 25 bp, Probe Sequence
acgagagcagcttgatggcctagaa

SEQ ID NO: 147938 - DNA, 25 bp, Probe Sequence
acgggcaagcgggcagctgaagatg

SEQ ID NO: 147939 - DNA, 25 bp, Probe Sequence
acggctttgcccgatgatcaaatga

SEQ ID NO: 147940 - DNA, 25 bp, Probe Sequence
acgacttgatcgtgactagagatga

SEQ ID NO: 147941 - DNA, 25 bp, Probe Sequence
acgcactgcttcaaagactggaaag

SEQ ID NO: 147942 - DNA, 25 bp, Probe Sequence
acgacttcatgatctactgcgacaa

SEQ ID NO: 147943 - DNA, 25 bp, Probe Sequence
acgtattcattgtctacctgctaag

SEQ ID NO: 147944 - DNA, 25 bp, Probe Sequence
acggatcacgatttcacactgggta

SEQ ID NO: 147945 - DNA, 25 bp, Probe Sequence
acggagccagcatttgaaccttgta

SEQ ID NO: 147946 - DNA, 25 bp, Probe Sequence
acgaagcagcgttggaaaatggaat

SEQ ID NO: 147947 - DNA, 25 bp, Probe Sequence
acgtatgcaggttgtaatcagaaat

SEQ ID NO: 147948 - DNA, 25 bp, Probe Sequence
acgtctcagagtcgtcagtgcagat

SEQ ID NO: 147949 - DNA, 25 bp, Probe Sequence
acgtgatcagcgcagacctgcagtc

SEQ ID NO: 147950 - DNA, 25 bp, Probe Sequence
actggcatggcaagagcccagcttc

SEQ ID NO: 147951 - DNA, 25 bp, Probe Sequence
actggcatggccttccgtgtcccca

SEQ ID NO: 147952 - DNA, 25 bp, Probe Sequence
actggcatggccttccgtgtcccca

SEQ ID NO: 147953 - DNA, 25 bp, Probe Sequence
actggcagctggggccgatgctgcc

SEQ ID NO: 147954 - DNA, 25 bp, Probe Sequence
acgtgagcgtgcgagtgcacgtccg

SEQ ID NO: 147955 - DNA, 25 bp, Probe Sequence
acgctgagcgaggtggactatgccc

SEQ ID NO: 147956 - DNA, 25 bp, Probe Sequence
acgctgagcacgaaggcaaacccta

SEQ ID NO: 147957 - DNA, 25 bp, Probe Sequence
acgcatgccacacaagaaggacctg

SEQ ID NO: 147958 - DNA, 25 bp, Probe Sequence
acggccaggcaatgacggtccgagt

SEQ ID NO: 147959 - DNA, 25 bp, Probe Sequence
acgtccagcacacagatgcggttca

SEQ ID NO: 147960 - DNA, 25 bp, Probe Sequence
acgacacgcaattcctgcggttcga

SEQ ID NO: 147961 - DNA, 25 bp, Probe Sequence
acgacacgtatgccgtacagtactc

SEQ ID NO: 147962 - DNA, 25 bp, Probe Sequence
acgaaccttgacgttgcagtgcagt

SEQ ID NO: 147963 - DNA, 25 bp, Probe Sequence
acgaaccttgacgttgcagtgcagt

SEQ ID NO: 147964 - DNA, 25 bp, Probe Sequence
acgaaccttgacgttgcagtgcagt

SEQ ID NO: 147965 - DNA, 25 bp, Probe Sequence
acgtggactttagcatgcagagcag

SEQ ID NO: 147966 - DNA, 25 bp, Probe Sequence
acgagctgactatgaagctgagcgt

SEQ ID NO: 147967 - DNA, 25 bp, Probe Sequence
acggtgagctgctcacccaggtctc

SEQ ID NO: 147968 - DNA, 25 bp, Probe Sequence
acgagaagcgagaactcctgggccg

SEQ ID NO: 147969 - DNA, 25 bp, Probe Sequence
acgagaaggagggctcagccttgct

SEQ ID NO: 147970 - DNA, 25 bp, Probe Sequence
acgagcaagtgagcagatcctccga

SEQ ID NO: 147971 - DNA, 25 bp, Probe Sequence
acgcacacgagaacatgcctctcgc

SEQ ID NO: 147972 - DNA, 25 bp, Probe Sequence
acgccatgattcttataaccgtgct

SEQ ID NO: 147973 - DNA, 25 bp, Probe Sequence
acgctcactccgaattagcggtgta

SEQ ID NO: 147974 - DNA, 25 bp, Probe Sequence
acgcttctccttgtgcatgtgagtt

SEQ ID NO: 147975 - DNA, 25 bp, Probe Sequence
acgttttcatccatgcttagcatct

SEQ ID NO: 147976 - DNA, 25 bp, Probe Sequence
acgctttttagctgcatgcatgact

SEQ ID NO: 147977 - DNA, 25 bp, Probe Sequence
acgctgatggtggccaggatgctca

SEQ ID NO: 147978 - DNA, 25 bp, Probe Sequence
acgctgatggcttggcagagcacct

SEQ ID NO: 147979 - DNA, 25 bp, Probe Sequence
acgctatgaggacatggcagccttc

SEQ ID NO: 147980 - DNA, 25 bp, Probe Sequence
acgcttgagttgtatgtgagtctgt

SEQ ID NO: 147981 - DNA, 25 bp, Probe Sequence
acgctatggcttggattcagatctc

SEQ ID NO: 147982 - DNA, 25 bp, Probe Sequence
acgctatgacgcagctgtgatatgc

SEQ ID NO: 147983 - DNA, 25 bp, Probe Sequence
acgctagtcctgctgatgggcaaag

SEQ ID NO: 147984 - DNA, 25 bp, Probe Sequence
acgggctccttcctgagagcaaagg

SEQ ID NO: 147985 - DNA, 25 bp, Probe Sequence
acgggctccttcctgagagcaaagg

SEQ ID NO: 147986 - DNA, 25 bp, Probe Sequence
actgggtcctttggagttactgcag

SEQ ID NO: 147987 - DNA, 25 bp, Probe Sequence
actggtgtaattggcaaataactca

SEQ ID NO: 147988 - DNA, 25 bp, Probe Sequence
actggtgatacctcacattcaatgc

SEQ ID NO: 147989 - DNA, 25 bp, Probe Sequence
actgggatattgcccacatgatcag

SEQ ID NO: 147990 - DNA, 25 bp, Probe Sequence
actggtgatgttctcggtcgagtct

SEQ ID NO: 147991 - DNA, 25 bp, Probe Sequence
actggagattatttgatgttaggta

SEQ ID NO: 147992 - DNA, 25 bp, Probe Sequence
actggacataaagtgcagggatggg

SEQ ID NO: 147993 - DNA, 25 bp, Probe Sequence
acgaatgcaaagtcaagtggagggc

SEQ ID NO: 147994 - DNA, 25 bp, Probe Sequence
acgagatcaaggacagtgtggtggc

SEQ ID NO: 147995 - DNA, 25 bp, Probe Sequence
acgtgaccacgcagtctgtgatggg

SEQ ID NO: 147996 - DNA, 25 bp, Probe Sequence
acgattcgcacgatgagtgtaaaga

SEQ ID NO: 147997 - DNA, 25 bp, Probe Sequence
acgagtccacgggcctgaagaagat

SEQ ID NO: 147998 - DNA, 25 bp, Probe Sequence
acgaaccccgcagggagcaagcagt

SEQ ID NO: 147999 - DNA, 25 bp, Probe Sequence
acgagaccctggctggaggagcagc

SEQ ID NO: 148000 - DNA, 25 bp, Probe Sequence
acgagagagacgggcggtgtgacag

SEQ ID NO: 148001 - DNA, 25 bp, Probe Sequence
acgagaagacgatgcagaaagcccg

SEQ ID NO: 148002 - DNA, 25 bp, Probe Sequence
acgaagcgggtggaaaatcccgcag

SEQ ID NO: 148003 - DNA, 25 bp, Probe Sequence
acgaacgggtgtttgaccacaagca

SEQ ID NO: 148004 - DNA, 25 bp, Probe Sequence
acgagacgggtgcatctgcgtgaac

SEQ ID NO: 148005 - DNA, 25 bp, Probe Sequence
acggccggtgggaggtgcatggcat

SEQ ID NO: 148006 - DNA, 25 bp, Probe Sequence
acgcccaggcaacaagggctgagct

SEQ ID NO: 148007 - DNA, 25 bp, Probe Sequence
acgtcgccgagatgaagggcgcata

SEQ ID NO: 148008 - DNA, 25 bp, Probe Sequence
actggccctgatcacgttgggcatc

SEQ ID NO: 148009 - DNA, 25 bp, Probe Sequence
acgcccttgtggaatttgggtcatt

SEQ ID NO: 148010 - DNA, 25 bp, Probe Sequence
acgtctttgctaatttggccacctt

SEQ ID NO: 148011 - DNA, 25 bp, Probe Sequence
actgtcttacttatttctcggtgct

SEQ ID NO: 148012 - DNA, 25 bp, Probe Sequence
acgttttctgctatggtctgtggtt

SEQ ID NO: 148013 - DNA, 25 bp, Probe Sequence
acgcctctactgatacatgtctgtg

SEQ ID NO: 148014 - DNA, 25 bp, Probe Sequence
acgcgctcaagtacaccagggtgcg

SEQ ID NO: 148015 - DNA, 25 bp, Probe Sequence
acggctagagttcccagtttggcct

SEQ ID NO: 148016 - DNA, 25 bp, Probe Sequence
acggtagttttgtgtgttggctgct

SEQ ID NO: 148017 - DNA, 25 bp, Probe Sequence
acggtagttttgtgtgttggctgct

SEQ ID NO: 148018 - DNA, 25 bp, Probe Sequence
acggtagttttgtgtgttggctgct

SEQ ID NO: 148019 - DNA, 25 bp, Probe Sequence
acgaggagctggaggcggaggagtg

SEQ ID NO: 148020 - DNA, 25 bp, Probe Sequence
actgagggtagggtgtggaggtgtg

SEQ ID NO: 148021 - DNA, 25 bp, Probe Sequence
acgagcagcgttctctgaggatggg

SEQ ID NO: 148022 - DNA, 25 bp, Probe Sequence
acgagccttcacgcataagaggcag

SEQ ID NO: 148023 - DNA, 25 bp, Probe Sequence
acggccgagcaggcctgcaaggaga

SEQ ID NO: 148024 - DNA, 25 bp, Probe Sequence
acggacgacggacaggcggatgtgt

SEQ ID NO: 148025 - DNA, 25 bp, Probe Sequence
actggactgacctaaacgtggaatg

SEQ ID NO: 148026 - DNA, 25 bp, Probe Sequence
actggaccttccagatcctggtgat

SEQ ID NO: 148027 - DNA, 25 bp, Probe Sequence
acggcacctactacgtctatgggat

SEQ ID NO: 148028 - DNA, 25 bp, Probe Sequence
actggacctatgtggtgtattgtta

SEQ ID NO: 148029 - DNA, 25 bp, Probe Sequence
cactggaccttgcggaatttgctaa

SEQ ID NO: 148030 - DNA, 25 bp, Probe Sequence
acgtggtcttggagcttctgactag

SEQ ID NO: 148031 - DNA, 25 bp, Probe Sequence
acgcaattctcgattctttgaagag

SEQ ID NO: 148032 - DNA, 25 bp, Probe Sequence
acgaatgcttaacttctttacacag

SEQ ID NO: 148033 - DNA, 25 bp, Probe Sequence
actggagcgtaactgccacttaagc

SEQ ID NO: 148034 - DNA, 25 bp, Probe Sequence
actgagaggctgtagctcgacctag

SEQ ID NO: 148035 - DNA, 25 bp, Probe Sequence
acgatgtgagagtaccaagcctgca

SEQ ID NO: 148036 - DNA, 25 bp, Probe Sequence
actgggagagctcccggcattcaag

SEQ ID NO: 148037 - DNA, 25 bp, Probe Sequence
acggcaagagtgtccagtatgtaaa

SEQ ID NO: 148038 - DNA, 25 bp, Probe Sequence
acggagtactgagtcttctgtaact

SEQ ID NO: 148039 - DNA, 25 bp, Probe Sequence
acattgggccttgattttaagttgt

SEQ ID NO: 148040 - DNA, 25 bp, Probe Sequence
acgtgggccagtggttattcagcgt

SEQ ID NO: 148041 - DNA, 25 bp, Probe Sequence
acgggagcgagttggtcaccgctct

SEQ ID NO: 148042 - DNA, 25 bp, Probe Sequence
acgtggagcctgaggatcccatgtt

SEQ ID NO: 148043 - DNA, 25 bp, Probe Sequence
acgtcagatcgcctggagacgccat

SEQ ID NO: 148044 - DNA, 25 bp, Probe Sequence
acggctgcatcgttgagaatccaca

SEQ ID NO: 148045 - DNA, 25 bp, Probe Sequence
actgattgatccaggacatccatag

SEQ ID NO: 148046 - DNA, 25 bp, Probe Sequence
actgatttccttgccaactagtaaa

SEQ ID NO: 148047 - DNA, 25 bp, Probe Sequence
acgaattgcctttcataagcatttt

SEQ ID NO: 148048 - DNA, 25 bp, Probe Sequence
acgtttccttgagaatatgtatatc

SEQ ID NO: 148049 - DNA, 25 bp, Probe Sequence
acggattccctggttatgattctga

SEQ ID NO: 148050 - DNA, 25 bp, Probe Sequence
acggaatatagggttagatgtgtgt

SEQ ID NO: 148051 - DNA, 25 bp, Probe Sequence
acgtagtcaagggtctcttcgtgtg

SEQ ID NO: 148052 - DNA, 25 bp, Probe Sequence
acgaagaaagaaatccggcatgtgg

SEQ ID NO: 148053 - DNA, 25 bp, Probe Sequence
acgagaagacaaactccggcactgg

SEQ ID NO: 148054 - DNA, 25 bp, Probe Sequence
acgcagaaggactgcctcactgagc

SEQ ID NO: 148055 - DNA, 25 bp, Probe Sequence
acggaagaatgctgcaccacttacc

SEQ ID NO: 148056 - DNA, 25 bp, Probe Sequence
actggaaaatgcaagcgccctgaac

SEQ ID NO: 148057 - DNA, 25 bp, Probe Sequence
actgtagagataatgcaccccggac

SEQ ID NO: 148058 - DNA, 25 bp, Probe Sequence
acgtgctggagaagagctcgcctgg

SEQ ID NO: 148059 - DNA, 25 bp, Probe Sequence
acgagggcagcacaggctgccgggt

SEQ ID NO: 148060 - DNA, 25 bp, Probe Sequence
acgagtgtggcctagagctggggga

SEQ ID NO: 148061 - DNA, 25 bp, Probe Sequence
acgagaacgccatgattgctgctgg

SEQ ID NO: 148062 - DNA, 25 bp, Probe Sequence
actggatacccatgactgcaagaat

SEQ ID NO: 148063 - DNA, 25 bp, Probe Sequence
acggcatcaacttggaagccagtga

SEQ ID NO: 148064 - DNA, 25 bp, Probe Sequence
acgtgcacagtcaatgagttggagt

SEQ ID NO: 148065 - DNA, 25 bp, Probe Sequence
acgctgcaagttagtgagtggagtt

SEQ ID NO: 148066 - DNA, 25 bp, Probe Sequence
acgtgcaatgttttaaggtctatct

SEQ ID NO: 148067 - DNA, 25 bp, Probe Sequence
acggcaagtatttcaagttgctgaa

SEQ ID NO: 148068 - DNA, 25 bp, Probe Sequence
acgaaatgtaaatggcctctacaga

SEQ ID NO: 148069 - DNA, 25 bp, Probe Sequence
aatcatactggacaaggcccttaga

SEQ ID NO: 148070 - DNA, 25 bp, Probe Sequence
acgcaagcatggttaacgtccctaa

SEQ ID NO: 148071 - DNA, 25 bp, Probe Sequence
acgacgatgaggtgacagtcacgga

SEQ ID NO: 148072 - DNA, 25 bp, Probe Sequence
acagacttgggtggcaattcctcaa

SEQ ID NO: 148073 - DNA, 25 bp, Probe Sequence
ccaagttgggccgcttggtcaagga

SEQ ID NO: 148074 - DNA, 25 bp, Probe Sequence
ctaaactgggggatattatgaaggg

SEQ ID NO: 148075 - DNA, 25 bp, Probe Sequence
actaaactgggggatattatgaagg

SEQ ID NO: 148076 - DNA, 25 bp, Probe Sequence
actacagtcgtcgggaaggaacaag

SEQ ID NO: 148077 - DNA, 25 bp, Probe Sequence
actaagggattaggagtgtgaacta

SEQ ID NO: 148078 - DNA, 25 bp, Probe Sequence
actccaaagattcaggtttactcac

SEQ ID NO: 148079 - DNA, 25 bp, Probe Sequence
actggcacaagacaaggttgccctc

SEQ ID NO: 148080 - DNA, 25 bp, Probe Sequence
acggaggaaccaggagcgtgccctg

SEQ ID NO: 148081 - DNA, 25 bp, Probe Sequence
actggaaggaacggatgggcctcta

SEQ ID NO: 148082 - DNA, 25 bp, Probe Sequence
actggaatagacaaggacggccatt

SEQ ID NO: 148083 - DNA, 25 bp, Probe Sequence
actgagcaacagaaacaaccccctc

SEQ ID NO: 148084 - DNA, 25 bp, Probe Sequence
actggaacagctacaacaaccgccg

SEQ ID NO: 148085 - DNA, 25 bp, Probe Sequence
acgcagcacatacttactaactgcc

SEQ ID NO: 148086 - DNA, 25 bp, Probe Sequence
acgagcgtccgcatgctaatcgctt

SEQ ID NO: 148087 - DNA, 25 bp, Probe Sequence
acgatcgtctgcctttataggcctc

SEQ ID NO: 148088 - DNA, 25 bp, Probe Sequence
actgtggtctgggctttaggcccct

SEQ ID NO: 148089 - DNA, 25 bp, Probe Sequence
acggatttggtcgtattgggcgcct

SEQ ID NO: 148090 - DNA, 25 bp, Probe Sequence
acggatttggtcgtattgggcgcct

SEQ ID NO: 148091 - DNA, 25 bp, Probe Sequence
acggttaggtctgtttgtgctcagt

SEQ ID NO: 148092 - DNA, 25 bp, Probe Sequence
acgagtctcagatcattttcagtga

SEQ ID NO: 148093 - DNA, 25 bp, Probe Sequence
acgagtccacattcctgtttgtaat

SEQ ID NO: 148094 - DNA, 25 bp, Probe Sequence
acgtgtccaatgacgacatgttgat

SEQ ID NO: 148095 - DNA, 25 bp, Probe Sequence
acgtgttcaataccatccttaccac

SEQ ID NO: 148096 - DNA, 25 bp, Probe Sequence
acgctgttttgacctccatagaaga

SEQ ID NO: 148097 - DNA, 25 bp, Probe Sequence
acgctgttttgacctccatagaaga

SEQ ID NO: 148098 - DNA, 25 bp, Probe Sequence
acgctgttttgacctccatagaaga

SEQ ID NO: 148099 - DNA, 25 bp, Probe Sequence
acgctgttttgacctccatagaaga

SEQ ID NO: 148100 - DNA, 25 bp, Probe Sequence
acgctgttttgacctccatagaaga

SEQ ID NO: 148101 - DNA, 25 bp, Probe Sequence
acgctgttttgacctccatagaaga

SEQ ID NO: 148102 - DNA, 25 bp, Probe Sequence
acgctgttttgacctccatagaaga

SEQ ID NO: 148103 - DNA, 25 bp, Probe Sequence
acgctgttttgacctccatagaaga

SEQ ID NO: 148104 - DNA, 25 bp, Probe Sequence
acgctgttttgacctccatagaaga

SEQ ID NO: 148105 - DNA, 25 bp, Probe Sequence
acgctgttttgacctccatagaaga

SEQ ID NO: 148106 - DNA, 25 bp, Probe Sequence
acgctgttttgacctccatagaaga

SEQ ID NO: 148107 - DNA, 25 bp, Probe Sequence
acgctgttttgacctccatagaaga

SEQ ID NO: 148108 - DNA, 25 bp, Probe Sequence
acgctgttttgacctccatagaaga

SEQ ID NO: 148109 - DNA, 25 bp, Probe Sequence
acgctgttttgacctccatagaaga

SEQ ID NO: 148110 - DNA, 25 bp, Probe Sequence
acgctgttttgacctccatagaaga

SEQ ID NO: 148111 - DNA, 25 bp, Probe Sequence
acgctgttttgacctccatagaaga

SEQ ID NO: 148112 - DNA, 25 bp, Probe Sequence
acgctgttttgacctccatagaaga

SEQ ID NO: 148113 - DNA, 25 bp, Probe Sequence
acgctgttttgacctccatagaaga

SEQ ID NO: 148114 - DNA, 25 bp, Probe Sequence
acgctgttttgacctccatagaaga

SEQ ID NO: 148115 - DNA, 25 bp, Probe Sequence
acgctgttttgacctccatagaaga

SEQ ID NO: 148116 - DNA, 25 bp, Probe Sequence
acgctgttttgacctccatagaaga

SEQ ID NO: 148117 - DNA, 25 bp, Probe Sequence
acgctgttttgacctccatagaaga

SEQ ID NO: 148118 - DNA, 25 bp, Probe Sequence
acgctgttttgacctccatagaaga

SEQ ID NO: 148119 - DNA, 25 bp, Probe Sequence
acgctgttttgacctccatagaaga

SEQ ID NO: 148120 - DNA, 25 bp, Probe Sequence
acgctgttttgacctccatagaaga

SEQ ID NO: 148121 - DNA, 25 bp, Probe Sequence
acgctgttttgacctccatagaaga

SEQ ID NO: 148122 - DNA, 25 bp, Probe Sequence
acgctgttttgacctccatagaaga

SEQ ID NO: 148123 - DNA, 25 bp, Probe Sequence
acgctgttttgacctccatagaaga

SEQ ID NO: 148124 - DNA, 25 bp, Probe Sequence
acgctgttttgacctccatagaaga

SEQ ID NO: 148125 - DNA, 25 bp, Probe Sequence
acgctgttttgacctccatagaaga

SEQ ID NO: 148126 - DNA, 25 bp, Probe Sequence
acgctgttttgacctccatagaaga

SEQ ID NO: 148127 - DNA, 25 bp, Probe Sequence
acgctgttttgacctccatagaaga

SEQ ID NO: 148128 - DNA, 25 bp, Probe Sequence
acgctgttttgacctccatagaaga

SEQ ID NO: 148129 - DNA, 25 bp, Probe Sequence
acgctgttttgacctccatagaaga

SEQ ID NO: 148130 - DNA, 25 bp, Probe Sequence
acgctgttttgacctccatagaaga

SEQ ID NO: 148131 - DNA, 25 bp, Probe Sequence
acgctgttttgacctccatagaaga

SEQ ID NO: 148132 - DNA, 25 bp, Probe Sequence
acgctgttttgacctccatagaaga

SEQ ID NO: 148133 - DNA, 25 bp, Probe Sequence
acgctgttttgacctccatagaaga

SEQ ID NO: 148134 - DNA, 25 bp, Probe Sequence
acgctgttttgacctccatagaaga

SEQ ID NO: 148135 - DNA, 25 bp, Probe Sequence
acgctgttttgacctccatagaaga

SEQ ID NO: 148136 - DNA, 25 bp, Probe Sequence
acgctgttttgacctccatagaaga

SEQ ID NO: 148137 - DNA, 25 bp, Probe Sequence
acgctgttttgacctccatagaaga

SEQ ID NO: 148138 - DNA, 25 bp, Probe Sequence
acgctgttttgacctccatagaaga

SEQ ID NO: 148139 - DNA, 25 bp, Probe Sequence
acgctgttttgacctccatagaaga

SEQ ID NO: 148140 - DNA, 25 bp, Probe Sequence
acgctgttttgacctccatagaaga

SEQ ID NO: 148141 - DNA, 25 bp, Probe Sequence
acgctgttttgacctccatagaaga

SEQ ID NO: 148142 - DNA, 25 bp, Probe Sequence
acgctgttttgacctccatagaaga

SEQ ID NO: 148143 - DNA, 25 bp, Probe Sequence
acgctgttttgacctccatagaaga

SEQ ID NO: 148144 - DNA, 25 bp, Probe Sequence
acgctgttttgacctccatagaaga

SEQ ID NO: 148145 - DNA, 25 bp, Probe Sequence
acgctgttttgacctccatagaaga

SEQ ID NO: 148146 - DNA, 25 bp, Probe Sequence
acgctgttttgacctccatagaaga

SEQ ID NO: 148147 - DNA, 25 bp, Probe Sequence
acgctgttttgacctccatagaaga

SEQ ID NO: 148148 - DNA, 25 bp, Probe Sequence
acgctgttttgacctccatagaaga

SEQ ID NO: 148149 - DNA, 25 bp, Probe Sequence
acgctgttttgacctccatagaaga

SEQ ID NO: 148150 - DNA, 25 bp, Probe Sequence
acgctgttttgacctccatagaaga

SEQ ID NO: 148151 - DNA, 25 bp, Probe Sequence
acgctgttttgacctccatagaaga

SEQ ID NO: 148152 - DNA, 25 bp, Probe Sequence
acgctgttttgacctccatagaaga

SEQ ID NO: 148153 - DNA, 25 bp, Probe Sequence
acgctgttttgacctccatagaaga

SEQ ID NO: 148154 - DNA, 25 bp, Probe Sequence
acgctgttttgacctccatagaaga

SEQ ID NO: 148155 - DNA, 25 bp, Probe Sequence
acgctgttttgacctccatagaaga

SEQ ID NO: 148156 - DNA, 25 bp, Probe Sequence
acgctgttttgacctccatagaaga

SEQ ID NO: 148157 - DNA, 25 bp, Probe Sequence
acgctgttttgacctccatagaaga

SEQ ID NO: 148158 - DNA, 25 bp, Probe Sequence
acgctgttttgacctccatagaaga

SEQ ID NO: 148159 - DNA, 25 bp, Probe Sequence
acgctgttttgacctccatagaaga

SEQ ID NO: 148160 - DNA, 25 bp, Probe Sequence
acgctgttttgacctccatagaaga

SEQ ID NO: 148161 - DNA, 25 bp, Probe Sequence
acgctgttttgacctccatagaaga

SEQ ID NO: 148162 - DNA, 25 bp, Probe Sequence
acgctgttttgacctccatagaaga

SEQ ID NO: 148163 - DNA, 25 bp, Probe Sequence
acgctgttttgacctccatagaaga

SEQ ID NO: 148164 - DNA, 25 bp, Probe Sequence
acgctgttttgacctccatagaaga

SEQ ID NO: 148165 - DNA, 25 bp, Probe Sequence
acgctgttttgacctccatagaaga

SEQ ID NO: 148166 - DNA, 25 bp, Probe Sequence
acgctgttttgacctccatagaaga

SEQ ID NO: 148167 - DNA, 25 bp, Probe Sequence
acgctgttttgacctccatagaaga

SEQ ID NO: 148168 - DNA, 25 bp, Probe Sequence
acgctgttttgacctccatagaaga

SEQ ID NO: 148169 - DNA, 25 bp, Probe Sequence
acgctgttttgacctccatagaaga

SEQ ID NO: 148170 - DNA, 25 bp, Probe Sequence
acgctgttttgacctccatagaaga

SEQ ID NO: 148171 - DNA, 25 bp, Probe Sequence
acgctgttttgacctccatagaaga

SEQ ID NO: 148172 - DNA, 25 bp, Probe Sequence
acgctgttttgacctccatagaaga

SEQ ID NO: 148173 - DNA, 25 bp, Probe Sequence
acgctgttttgacctccatagaaga

SEQ ID NO: 148174 - DNA, 25 bp, Probe Sequence
acgctgttttgacctccatagaaga

SEQ ID NO: 148175 - DNA, 25 bp, Probe Sequence
acgctgttttgacctccatagaaga

SEQ ID NO: 148176 - DNA, 25 bp, Probe Sequence
acgctgttttgacctccatagaaga

SEQ ID NO: 148177 - DNA, 25 bp, Probe Sequence
acgctgttttgacctccatagaaga

SEQ ID NO: 148178 - DNA, 25 bp, Probe Sequence
acgctgttttgacctccatagaaga

SEQ ID NO: 148179 - DNA, 25 bp, Probe Sequence
acgctgttttgacctccatagaaga

SEQ ID NO: 148180 - DNA, 25 bp, Probe Sequence
acgctgttttgacctccatagaaga

SEQ ID NO: 148181 - DNA, 25 bp, Probe Sequence
acgctgttttgacctccatagaaga

SEQ ID NO: 148182 - DNA, 25 bp, Probe Sequence
acgctgttttgacctccatagaaga

SEQ ID NO: 148183 - DNA, 25 bp, Probe Sequence
acgctgttttgacctccatagaaga

SEQ ID NO: 148184 - DNA, 25 bp, Probe Sequence
acgctgttttgacctccatagaaga

SEQ ID NO: 148185 - DNA, 25 bp, Probe Sequence
acgctgttttgacctccatagaaga

SEQ ID NO: 148186 - DNA, 25 bp, Probe Sequence
acgctgttttgacctccatagaaga

SEQ ID NO: 148187 - DNA, 25 bp, Probe Sequence
acgctgttttgacctccatagaaga

SEQ ID NO: 148188 - DNA, 25 bp, Probe Sequence
acgctgttttgacctccatagaaga

SEQ ID NO: 148189 - DNA, 25 bp, Probe Sequence
acgctgttttgacctccatagaaga

SEQ ID NO: 148190 - DNA, 25 bp, Probe Sequence
acgctgttttgacctccatagaaga

SEQ ID NO: 148191 - DNA, 25 bp, Probe Sequence
acgctgttttgacctccatagaaga

SEQ ID NO: 148192 - DNA, 25 bp, Probe Sequence
acgctgttttgacctccatagaaga

SEQ ID NO: 148193 - DNA, 25 bp, Probe Sequence
acgctgttttgacctccatagaaga

SEQ ID NO: 148194 - DNA, 25 bp, Probe Sequence
acgctgttttgacctccatagaaga

SEQ ID NO: 148195 - DNA, 25 bp, Probe Sequence
acgctgttttgacctccatagaaga

SEQ ID NO: 148196 - DNA, 25 bp, Probe Sequence
acgctgttttgacctccatagaaga

SEQ ID NO: 148197 - DNA, 25 bp, Probe Sequence
acgctgttttgacctccatagaaga

SEQ ID NO: 148198 - DNA, 25 bp, Probe Sequence
acgctgttttgacctccatagaaga

SEQ ID NO: 148199 - DNA, 25 bp, Probe Sequence
acgctgttttgacctccatagaaga

SEQ ID NO: 148200 - DNA, 25 bp, Probe Sequence
acgctgttttgacctccatagaaga

SEQ ID NO: 148201 - DNA, 25 bp, Probe Sequence
acgctgttttgacctccatagaaga

SEQ ID NO: 148202 - DNA, 25 bp, Probe Sequence
acgctgttttgacctccatagaaga

SEQ ID NO: 148203 - DNA, 25 bp, Probe Sequence
acgctgttttgacctccatagaaga

SEQ ID NO: 148204 - DNA, 25 bp, Probe Sequence
acgctgttttgacctccatagaaga

SEQ ID NO: 148205 - DNA, 25 bp, Probe Sequence
acgctgttttgacctccatagaaga

SEQ ID NO: 148206 - DNA, 25 bp, Probe Sequence
acgctgttttgacctccatagaaga

SEQ ID NO: 148207 - DNA, 25 bp, Probe Sequence
acgctgttttgacctccatagaaga

SEQ ID NO: 148208 - DNA, 25 bp, Probe Sequence
acgctgttttgacctccatagaaga

SEQ ID NO: 148209 - DNA, 25 bp, Probe Sequence
acgctgttttgacctccatagaaga

SEQ ID NO: 148210 - DNA, 25 bp, Probe Sequence
acgctgttttgacctccatagaaca

SEQ ID NO: 148211 - DNA, 25 bp, Probe Sequence
actggttttccctcaacaacatata

SEQ ID NO: 148212 - DNA, 25 bp, Probe Sequence
actggatttttatctctctcaactt

SEQ ID NO: 148213 - DNA, 25 bp, Probe Sequence
actggcttctctatattcccaaatt

SEQ ID NO: 148214 - DNA, 25 bp, Probe Sequence
actggaatctctccaagtcccaatt

SEQ ID NO: 148215 - DNA, 25 bp, Probe Sequence
acgctgaatcctgctatggtaccat

SEQ ID NO: 148216 - DNA, 25 bp, Probe Sequence
acggtacaatccaagtgtatcatat

SEQ ID NO: 148217 - DNA, 25 bp, Probe Sequence
actgtcataatctctggggtcatca

SEQ ID NO: 148218 - DNA, 25 bp, Probe Sequence
actgagaaatatggctgtgggaaaa

SEQ ID NO: 148219 - DNA, 25 bp, Probe Sequence
actcatacgtgattgcagccgggca

SEQ ID NO: 148220 - DNA, 25 bp, Probe Sequence
acgcacacagtgagcagctgcaggc

SEQ ID NO: 148221 - DNA, 25 bp, Probe Sequence
actgcaaccatgaatgggcaccccc

SEQ ID NO: 148222 - DNA, 25 bp, Probe Sequence
actgtacctatcaggactatacctc

SEQ ID NO: 148223 - DNA, 25 bp, Probe Sequence
acgtaacctgcaatgtcgcttacct

SEQ ID NO: 148224 - DNA, 25 bp, Probe Sequence
acgtaacctgcttagtattgacact

SEQ ID NO: 148225 - DNA, 25 bp, Probe Sequence
actggaatgtcagaattttgccact

SEQ ID NO: 148226 - DNA, 25 bp, Probe Sequence
acgagagatgttgagtggtttcctt

SEQ ID NO: 148227 - DNA, 25 bp, Probe Sequence
actgagtagtctcagttccttccct

SEQ ID NO: 148228 - DNA, 25 bp, Probe Sequence
actggtcttgctcaggtttcccagt

SEQ ID NO: 148229 - DNA, 25 bp, Probe Sequence
acggctgttgcagcaggctttccgg

SEQ ID NO: 148230 - DNA, 25 bp, Probe Sequence
acggcatttgatgaagcaattgctg

SEQ ID NO: 148231 - DNA, 25 bp, Probe Sequence
acggcatttgatgaagcaattgctg

SEQ ID NO: 148232 - DNA, 25 bp, Probe Sequence
acggtttgcagacatcaatggcgtg

SEQ ID NO: 148233 - DNA, 25 bp, Probe Sequence
actggttctgggcagcagtgtcagg

SEQ ID NO: 148234 - DNA, 25 bp, Probe Sequence
acggtctgggcaggcagcttaagtg

SEQ ID NO: 148235 - DNA, 25 bp, Probe Sequence
actggttgtcgggacattccactgg

SEQ ID NO: 148236 - DNA, 25 bp, Probe Sequence
actggctgggggtacatcaaagagg

SEQ ID NO: 148237 - DNA, 25 bp, Probe Sequence
acggacaggtggtgctcatcaagca

SEQ ID NO: 148238 - DNA, 25 bp, Probe Sequence
actggatcaatgtgggtcagctaca

SEQ ID NO: 148239 - DNA, 25 bp, Probe Sequence
acggacatagtcgtggatcactaca

SEQ ID NO: 148240 - DNA, 25 bp, Probe Sequence
actgggtcccaatgatcaatacaag

SEQ ID NO: 148241 - DNA, 25 bp, Probe Sequence
actggttgcgcgtagttgctaacag

SEQ ID NO: 148242 - DNA, 25 bp, Probe Sequence
acggttgcatctgcatatcctaaga

SEQ ID NO: 148243 - DNA, 25 bp, Probe Sequence
acgatgtcctcaggttatcataaac

SEQ ID NO: 148244 - DNA, 25 bp, Probe Sequence
acgatttctgcaggctgtgtaagca

SEQ ID NO: 148245 - DNA, 25 bp, Probe Sequence
acgatgccctgggctatgtgacccg

SEQ ID NO: 148246 - DNA, 25 bp, Probe Sequence
acgatgccctgggctatgtgacccg

SEQ ID NO: 148247 - DNA, 25 bp, Probe Sequence
acgtctgacagagggatgtggccgg

SEQ ID NO: 148248 - DNA, 25 bp, Probe Sequence
acgttgtaacggtggggcatctgtg

SEQ ID NO: 148249 - DNA, 25 bp, Probe Sequence
actgttgaaccaattgggtggattt

SEQ ID NO: 148250 - DNA, 25 bp, Probe Sequence
actgcttaaccgatggctctgatgt

SEQ ID NO: 148251 - DNA, 25 bp, Probe Sequence
acgtctcaccactgtggttgattca

SEQ ID NO: 148252 - DNA, 25 bp, Probe Sequence
acgtggcactaatctggtgtcactc

SEQ ID NO: 148253 - DNA, 25 bp, Probe Sequence
acgtccactaatccgggtcaatgtt

SEQ ID NO: 148254 - DNA, 25 bp, Probe Sequence
actgtccccgaagggtacacattcg

SEQ ID NO: 148255 - DNA, 25 bp, Probe Sequence
actggcctgacttaagataaccatt

SEQ ID NO: 148256 - DNA, 25 bp, Probe Sequence
acggattggttaaaaaatgcttcat

SEQ ID NO: 148257 - DNA, 25 bp, Probe Sequence
acgtgtttgtctaacgaagtcactc

SEQ ID NO: 148258 - DNA, 25 bp, Probe Sequence
acggctttggcagacagtaacgtca

SEQ ID NO: 148259 - DNA, 25 bp, Probe Sequence
acgtgcttttgagatgattaagaaa

SEQ ID NO: 148260 - DNA, 25 bp, Probe Sequence
acgagctttggtttttacagattca

SEQ ID NO: 148261 - DNA, 25 bp, Probe Sequence
acgactttgcaggatctaataggat

SEQ ID NO: 148262 - DNA, 25 bp, Probe Sequence
acgtctgggaggtctatgatagagc

SEQ ID NO: 148263 - DNA, 25 bp, Probe Sequence
acgtgtctgtggccaccatgaaggc

SEQ ID NO: 148264 - DNA, 25 bp, Probe Sequence
acgtgcttggcctcaatgcaggcct

SEQ ID NO: 148265 - DNA, 25 bp, Probe Sequence
acgtctgcgtccaacaatgagacct

SEQ ID NO: 148266 - DNA, 25 bp, Probe Sequence
acgtctgcaatctagatgcatattt

SEQ ID NO: 148267 - DNA, 25 bp, Probe Sequence
actgtcaaatgatgtgcaaaacctt

SEQ ID NO: 148268 - DNA, 25 bp, Probe Sequence
acggctgcaatgtggaggaagcctt

SEQ ID NO: 148269 - DNA, 25 bp, Probe Sequence
acgtcgcttatattgggatgacctg

SEQ ID NO: 148270 - DNA, 25 bp, Probe Sequence
acgtccagatgtttgtgcagtagcc

SEQ ID NO: 148271 - DNA, 25 bp, Probe Sequence
acgtccagatcggtgacatcgtcac

SEQ ID NO: 148272 - DNA, 25 bp, Probe Sequence
acgtccagatcggtgacatcgtcac

SEQ ID NO: 148273 - DNA, 25 bp, Probe Sequence
acgtggcaatgccgctgaacttcac

SEQ ID NO: 148274 - DNA, 25 bp, Probe Sequence
acgggcacatacggattcttgctgc

SEQ ID NO: 148275 - DNA, 25 bp, Probe Sequence
acgggcaattcaaaactggctgatg

SEQ ID NO: 148276 - DNA, 25 bp, Probe Sequence
acgaggcgcaaggtggactggctga

SEQ ID NO: 148277 - DNA, 25 bp, Probe Sequence
acgtgggaatggcagactccggtca

SEQ ID NO: 148278 - DNA, 25 bp, Probe Sequence
acgtggtgagtcctgagttccactg

SEQ ID NO: 148279 - DNA, 25 bp, Probe Sequence
acggtgatcgtgctgcagtaccacc

SEQ ID NO: 148280 - DNA, 25 bp, Probe Sequence
acggtgatcttgggcagaacatacc

SEQ ID NO: 148281 - DNA, 25 bp, Probe Sequence
acggcgtgcattatcaacatcatat

SEQ ID NO: 148282 - DNA, 25 bp, Probe Sequence
acgtgctgttctaccaactgatgca

SEQ ID NO: 148283 - DNA, 25 bp, Probe Sequence
acggcgttgtacggtggatgtctat

SEQ ID NO: 148284 - DNA, 25 bp, Probe Sequence
acgttttatccttgtgggtcagatt

SEQ ID NO: 148285 - DNA, 25 bp, Probe Sequence
acgtggtttgcctgaggctgtaact

SEQ ID NO: 148286 - DNA, 25 bp, Probe Sequence
actgttgatgttcaggtggactaca

SEQ ID NO: 148287 - DNA, 25 bp, Probe Sequence
actgcctagcacccaggattgttac

SEQ ID NO: 148288 - DNA, 25 bp, Probe Sequence
actggtatagcacccttatgttact

SEQ ID NO: 148289 - DNA, 25 bp, Probe Sequence
actgggcatcaatcagccttgtcta

SEQ ID NO: 148290 - DNA, 25 bp, Probe Sequence
actggcacctgatcaagctttcggt

SEQ ID NO: 148291 - DNA, 25 bp, Probe Sequence
actggcagtacatcaagtgtatcat

SEQ ID NO: 148292 - DNA, 25 bp, Probe Sequence
actgtggtcagctcaggtcaaatgt

SEQ ID NO: 148293 - DNA, 25 bp, Probe Sequence
acgtgtgccgtgaggctcatagttg

SEQ ID NO: 148294 - DNA, 25 bp, Probe Sequence
acggtcactgttggtgcgagacttg

SEQ ID NO: 148295 - DNA, 25 bp, Probe Sequence
acgttcgatcttgcatggagcaatc

SEQ ID NO: 148296 - DNA, 25 bp, Probe Sequence
acgttcgatcttgcatggagcaatc

SEQ ID NO: 148297 - DNA, 25 bp, Probe Sequence
acgttctgctcttcaaggaggaggg

SEQ ID NO: 148298 - DNA, 25 bp, Probe Sequence
acgttggtcaccttcgagtagagag

SEQ ID NO: 148299 - DNA, 25 bp, Probe Sequence
acgtggagtcaccttacagatatag

SEQ ID NO: 148300 - DNA, 25 bp, Probe Sequence
acggagacatctcttcaagaacatg

SEQ ID NO: 148301 - DNA, 25 bp, Probe Sequence
acggagtgcttgcatctggaaagat

SEQ ID NO: 148302 - DNA, 25 bp, Probe Sequence
acgtgagagtctggtaggcaaagca

SEQ ID NO: 148303 - DNA, 25 bp, Probe Sequence
acgtatgttcgccatagtaaccgcc

SEQ ID NO: 148304 - DNA, 25 bp, Probe Sequence
acgtgagattgcccattgaaatgcc

SEQ ID NO: 148305 - DNA, 25 bp, Probe Sequence
acgtcagttgatgctggaacatgac

SEQ ID NO: 148306 - DNA, 25 bp, Probe Sequence
acgtctgtatgagttgaaagctgca

SEQ ID NO: 148307 - DNA, 25 bp, Probe Sequence
acgttgatgccggtgaacgtgcaaa

SEQ ID NO: 148308 - DNA, 25 bp, Probe Sequence
acgtatggactggataactctgaga

SEQ ID NO: 148309 - DNA, 25 bp, Probe Sequence
acgttggccaggctggtctcgaact

SEQ ID NO: 148310 - DNA, 25 bp, Probe Sequence
acgtttggagccttggcatcatcgt

SEQ ID NO: 148311 - DNA, 25 bp, Probe Sequence
actggtctgagtgctctagcacctg

SEQ ID NO: 148312 - DNA, 25 bp, Probe Sequence
acgagtcgggtcctgagaccaggtc

SEQ ID NO: 148313 - DNA, 25 bp, Probe Sequence
actggtgcggaatctgaactcggat

SEQ ID NO: 148314 - DNA, 25 bp, Probe Sequence
acggtctggacaacgagctccgtga

SEQ ID NO: 148315 - DNA, 25 bp, Probe Sequence
acgtctctacctaccagtacgatga

SEQ ID NO: 148316 - DNA, 25 bp, Probe Sequence
acgtatgttcccatagtgacgccat

SEQ ID NO: 148317 - DNA, 25 bp, Probe Sequence
acagtagttcccagggcagcagaaa

SEQ ID NO: 148318 - DNA, 25 bp, Probe Sequence
actgctagtgttcccgggacacaag

SEQ ID NO: 148319 - DNA, 25 bp, Probe Sequence
actgctagtgttcccgggacacaag

SEQ ID NO: 148320 - DNA, 25 bp, Probe Sequence
actgtactccagcgtgggcaacaga

SEQ ID NO: 148321 - DNA, 25 bp, Probe Sequence
acgtggcggcaggggaggacgaggt

SEQ ID NO: 148322 - DNA, 25 bp, Probe Sequence
acgtgtcagagggagctggtacagt

SEQ ID NO: 148323 - DNA, 25 bp, Probe Sequence
acgtgtgaagtgtagtggcatccat

SEQ ID NO: 148324 - DNA, 25 bp, Probe Sequence
acgtggacatggacgtgctcaccac

SEQ ID NO: 148325 - DNA, 25 bp, Probe Sequence
acgtggacatggacgtgctcaccac

SEQ ID NO: 148326 - DNA, 25 bp, Probe Sequence
acgtggacaataatgtgcacctgcc

SEQ ID NO: 148327 - DNA, 25 bp, Probe Sequence
actgtgtacaattctgaagacactc

SEQ ID NO: 148328 - DNA, 25 bp, Probe Sequence
actggtgcactttgtaaattccctg

SEQ ID NO: 148329 - DNA, 25 bp, Probe Sequence
acgtgtcacggggaagagctccctg

SEQ ID NO: 148330 - DNA, 25 bp, Probe Sequence
acgtgtcagtggtggacctgacctg

SEQ ID NO: 148331 - DNA, 25 bp, Probe Sequence
acggctgcgtggtgaagcgctacgg

SEQ ID NO: 148332 - DNA, 25 bp, Probe Sequence
actggtggtggagtggcaacttcag

SEQ ID NO: 148333 - DNA, 25 bp, Probe Sequence
acggtggcgcgattgggacagtcgc

SEQ ID NO: 148334 - DNA, 25 bp, Probe Sequence
acggtctctcagtatctaaagtcct

SEQ ID NO: 148335 - DNA, 25 bp, Probe Sequence
acgtgtccattatcctgaagttgct

SEQ ID NO: 148336 - DNA, 25 bp, Probe Sequence
actggatcccagtacctgaatcctg

SEQ ID NO: 148337 - DNA, 25 bp, Probe Sequence
actggatcccagtacctgaatcctg

SEQ ID NO: 148338 - DNA, 25 bp, Probe Sequence
actggtctcactggaaccagaactt

SEQ ID NO: 148339 - DNA, 25 bp, Probe Sequence
acggtccctgagagtcagaggcctc

SEQ ID NO: 148340 - DNA, 25 bp, Probe Sequence
acgactccctgctggtcaaagtcat

SEQ ID NO: 148341 - DNA, 25 bp, Probe Sequence
acggtcagcttgttggtgccaagaa

SEQ ID NO: 148342 - DNA, 25 bp, Probe Sequence
acgggatgtatgcggactcagaaat

SEQ ID NO: 148343 - DNA, 25 bp, Probe Sequence
acgggattacactggctgcagtaca

SEQ ID NO: 148344 - DNA, 25 bp, Probe Sequence
acgggagtacaaaggccaatgcagc

SEQ ID NO: 148345 - DNA, 25 bp, Probe Sequence
actgatgggctaggtagttcaatcc

SEQ ID NO: 148346 - DNA, 25 bp, Probe Sequence
actgtggctcaagggagtcaccttc

SEQ ID NO: 148347 - DNA, 25 bp, Probe Sequence
actgttggcaggggagtccctctga

SEQ ID NO: 148348 - DNA, 25 bp, Probe Sequence
acgactgtgaaccgatgtcacacca

SEQ ID NO: 148349 - DNA, 25 bp, Probe Sequence
acgattgctgagtacagatgctgaa

SEQ ID NO: 148350 - DNA, 25 bp, Probe Sequence
acgagtgtggcaacagcatgcaggt

SEQ ID NO: 148351 - DNA, 25 bp, Probe Sequence
acgagtgtgagttctgtggcagctg

SEQ ID NO: 148352 - DNA, 25 bp, Probe Sequence
acgagatggagttcaccgaggccga

SEQ ID NO: 148353 - DNA, 25 bp, Probe Sequence
acgagatggagttcaccgaggccga

SEQ ID NO: 148354 - DNA, 25 bp, Probe Sequence
acgagtgtgatgaggccgaggctgc

SEQ ID NO: 148355 - DNA, 25 bp, Probe Sequence
acgagtgtgatgaggccgaggctgc

SEQ ID NO: 148356 - DNA, 25 bp, Probe Sequence
actgtgggaatgctgcccatggcat

SEQ ID NO: 148357 - DNA, 25 bp, Probe Sequence
actgtgtgtgacatggcccaggttc

SEQ ID NO: 148358 - DNA, 25 bp, Probe Sequence
acggtggtgcttggtacagcgtacc

SEQ ID NO: 148359 - DNA, 25 bp, Probe Sequence
acagcgtgggtatcgaggcggacga

SEQ ID NO: 148360 - DNA, 25 bp, Probe Sequence
acagcgtgggtatcgaggcggacga

SEQ ID NO: 148361 - DNA, 25 bp, Probe Sequence
aactggtgaatatcctggttgggac

SEQ ID NO: 148362 - DNA, 25 bp, Probe Sequence
gaacgggaaacacacgcttggggag

SEQ ID NO: 148363 - DNA, 25 bp, Probe Sequence
acacgggaaagaaactctgcgagtc

SEQ ID NO: 148364 - DNA, 25 bp, Probe Sequence
actcgcggaagagccacctgatttt

SEQ ID NO: 148365 - DNA, 25 bp, Probe Sequence
acgttgctaggaaactgccttttat

SEQ ID NO: 148366 - DNA, 25 bp, Probe Sequence
actgcattctagaagcacacctctt

SEQ ID NO: 148367 - DNA, 25 bp, Probe Sequence
acgatactgtgcaatcatcacctct

SEQ ID NO: 148368 - DNA, 25 bp, Probe Sequence
acgattctgtgcatcaacagtctgt

SEQ ID NO: 148369 - DNA, 25 bp, Probe Sequence
acgattggagaatactttgcttcat

SEQ ID NO: 148370 - DNA, 25 bp, Probe Sequence
acgttctatgaatttcgtacttatt

SEQ ID NO: 148371 - DNA, 25 bp, Probe Sequence
acgttaatggtttcttatgctcttt

SEQ ID NO: 148372 - DNA, 25 bp, Probe Sequence
acgtttgatggaatcactgtgcacc

SEQ ID NO: 148373 - DNA, 25 bp, Probe Sequence
acgttattgctaatcagtggtctca

SEQ ID NO: 148374 - DNA, 25 bp, Probe Sequence
acgttattcatgattgatggctact

SEQ ID NO: 148375 - DNA, 25 bp, Probe Sequence
acgtctttgaagttgtggctgagaa

SEQ ID NO: 148376 - DNA, 25 bp, Probe Sequence
acgtgtttgagcagctggcgtgtga

SEQ ID NO: 148377 - DNA, 25 bp, Probe Sequence
acgttgtgtatcagtgggaatggaa

SEQ ID NO: 148378 - DNA, 25 bp, Probe Sequence
actgggcttatcactgggaaaacac

SEQ ID NO: 148379 - DNA, 25 bp, Probe Sequence
actgggcttatcactgggaaaacac

SEQ ID NO: 148380 - DNA, 25 bp, Probe Sequence
actgggcttatcactgggaaaacac

SEQ ID NO: 148381 - DNA, 25 bp, Probe Sequence
actgacctgaaaacttgtgacaaga

SEQ ID NO: 148382 - DNA, 25 bp, Probe Sequence
actgagcctaaagtcaagctgcccc

SEQ ID NO: 148383 - DNA, 25 bp, Probe Sequence
actggaactacagtcatagcgcccc

SEQ ID NO: 148384 - DNA, 25 bp, Probe Sequence
acgtggcctacggcgagagccacct

SEQ ID NO: 148385 - DNA, 25 bp, Probe Sequence
acgtggcctacggcgagagccacct

SEQ ID NO: 148386 - DNA, 25 bp, Probe Sequence
actggggttccaagagagccaactt

SEQ ID NO: 148387 - DNA, 25 bp, Probe Sequence
actggcatggttcaaagaggggcta

SEQ ID NO: 148388 - DNA, 25 bp, Probe Sequence
actggcaggattcacttatgggtaa

SEQ ID NO: 148389 - DNA, 25 bp, Probe Sequence
actccaggcttcacgtttggaaatc

SEQ ID NO: 148390 - DNA, 25 bp, Probe Sequence
actgattgacccagcgctttggaaa

SEQ ID NO: 148391 - DNA, 25 bp, Probe Sequence
acgtgtgaagccaggatttcctaaa

SEQ ID NO: 148392 - DNA, 25 bp, Probe Sequence
acgtctacatgtacgtgttcatcct

SEQ ID NO: 148393 - DNA, 25 bp, Probe Sequence
actgtgctactatgatggttctgag

SEQ ID NO: 148394 - DNA, 25 bp, Probe Sequence
actgcactacatcagtataactgca

SEQ ID NO: 148395 - DNA, 25 bp, Probe Sequence
aatgtctactgaagcttaaccgaag

SEQ ID NO: 148396 - DNA, 25 bp, Probe Sequence
acggctactgaggataaactggaat

SEQ ID NO: 148397 - DNA, 25 bp, Probe Sequence
acgtggctccagatcaaagcggcca

SEQ ID NO: 148398 - DNA, 25 bp, Probe Sequence
caccgtgtccaaaaagggcttcaag

SEQ ID NO: 148399 - DNA, 25 bp, Probe Sequence
acggctgaccagagaaggtgcttca

SEQ ID NO: 148400 - DNA, 25 bp, Probe Sequence
actggatgccacttggaaggtgact

SEQ ID NO: 148401 - DNA, 25 bp, Probe Sequence
acgagtgcctcatttgatgggtgat

SEQ ID NO: 148402 - DNA, 25 bp, Probe Sequence
acgagtgcctcattttgtagtcatg

SEQ ID NO: 148403 - DNA, 25 bp, Probe Sequence
acggctctctcttttataggtgtaa

SEQ ID NO: 148404 - DNA, 25 bp, Probe Sequence
actgagtccactttattctggggca

SEQ ID NO: 148405 - DNA, 25 bp, Probe Sequence
actggactagccttatttgcaagtg

SEQ ID NO: 148406 - DNA, 25 bp, Probe Sequence
acgtggtagccacaattgcacaata

SEQ ID NO: 148407 - DNA, 25 bp, Probe Sequence
acgttatacagacaatgtcatgcaa

SEQ ID NO: 148408 - DNA, 25 bp, Probe Sequence
actgagctcaaatctaagtgcagca

SEQ ID NO: 148409 - DNA, 25 bp, Probe Sequence
actggccaatgatgcaatctgcaca

SEQ ID NO: 148410 - DNA, 25 bp, Probe Sequence
actggccaggaggctgttgctgaag

SEQ ID NO: 148411 - DNA, 25 bp, Probe Sequence
acgggggatgccatcagtgtcatgt

SEQ ID NO: 148412 - DNA, 25 bp, Probe Sequence
acgggaatgtctgcctgatgtagtc

SEQ ID NO: 148413 - DNA, 25 bp, Probe Sequence
acgtagtagttgtctgctctttgtc

SEQ ID NO: 148414 - DNA, 25 bp, Probe Sequence
acgtattagtcatctgctagttacc

SEQ ID NO: 148415 - DNA, 25 bp, Probe Sequence
acgtattagtcatcgctattaccat

SEQ ID NO: 148416 - DNA, 25 bp, Probe Sequence
acgtattagtcatcgctattaccat

SEQ ID NO: 148417 - DNA, 25 bp, Probe Sequence
acgtattagtcatcgctattaccat

SEQ ID NO: 148418 - DNA, 25 bp, Probe Sequence
acgtattagtcatcgctattaccat

SEQ ID NO: 148419 - DNA, 25 bp, Probe Sequence
acgtattagtcatcgctattaccat

SEQ ID NO: 148420 - DNA, 25 bp, Probe Sequence
acgtattagtcatcgctataaccat

SEQ ID NO: 148421 - DNA, 25 bp, Probe Sequence
acgtcttgaacaggcgctgatgacc

SEQ ID NO: 148422 - DNA, 25 bp, Probe Sequence
acgatcttagcatcagcagggcagc

SEQ ID NO: 148423 - DNA, 25 bp, Probe Sequence
acgtcattcagcttcacggtgatga

SEQ ID NO: 148424 - DNA, 25 bp, Probe Sequence
acgtgcattgtgctccagtgtggag

SEQ ID NO: 148425 - DNA, 25 bp, Probe Sequence
acgtgcattgtgctccagtgtggag

SEQ ID NO: 148426 - DNA, 25 bp, Probe Sequence
acgtgcttgatgctgagcaagttca

SEQ ID NO: 148427 - DNA, 25 bp, Probe Sequence
acgtttgtggtgacagtcatataaa

SEQ ID NO: 148428 - DNA, 25 bp, Probe Sequence
acgtgccttggactcatgtttgaat

SEQ ID NO: 148429 - DNA, 25 bp, Probe Sequence
actgtggcttggactagaactggac

SEQ ID NO: 148430 - DNA, 25 bp, Probe Sequence
actgggcttatgaccaaggaatcag

SEQ ID NO: 148431 - DNA, 25 bp, Probe Sequence
actgggaggcatgacaagtaaagaa

SEQ ID NO: 148432 - DNA, 25 bp, Probe Sequence
actgaccaggcactaccgtaaacac

SEQ ID NO: 148433 - DNA, 25 bp, Probe Sequence
actgcaccagaacttcccattaaaa

SEQ ID NO: 148434 - DNA, 25 bp, Probe Sequence
acggcagcagaactgtctcttctga

SEQ ID NO: 148435 - DNA, 25 bp, Probe Sequence
acgtgcaaaacaggctctagcgttc

SEQ ID NO: 148436 - DNA, 25 bp, Probe Sequence
acgtcaagaagccgatcatcctggt

SEQ ID NO: 148437 - DNA, 25 bp, Probe Sequence
acgtagaaaacgcatccttgaatta

SEQ ID NO: 148438 - DNA, 25 bp, Probe Sequence
actggaataaactttgccttttctg

SEQ ID NO: 148439 - DNA, 25 bp, Probe Sequence
actggactaatatgtatctttctgt

SEQ ID NO: 148440 - DNA, 25 bp, Probe Sequence
actggagattaacgtactgtggctg

SEQ ID NO: 148441 - DNA, 25 bp, Probe Sequence
acgtagtttatgttcctgaggcagc

SEQ ID NO: 148442 - DNA, 25 bp, Probe Sequence
acgttgatttcttattgctgtacat

SEQ ID NO: 148443 - DNA, 25 bp, Probe Sequence
actgctgtgaccagacttgtatact

SEQ ID NO: 148444 - DNA, 25 bp, Probe Sequence
actgatataaacacttccaaataaa

SEQ ID NO: 148445 - DNA, 25 bp, Probe Sequence
actgttcaaggcactctgcaatgga

SEQ ID NO: 148446 - DNA, 25 bp, Probe Sequence
actgttacctacacatgcatcggat

SEQ ID NO: 148447 - DNA, 25 bp, Probe Sequence
actgtaagctcatcaccttgggagg

SEQ ID NO: 148448 - DNA, 25 bp, Probe Sequence
actggtactctttctaatcctgagg

SEQ ID NO: 148449 - DNA, 25 bp, Probe Sequence
actgtaagtagttgtcatattctgg

SEQ ID NO: 148450 - DNA, 25 bp, Probe Sequence
actgtcattcattttgcacaattct

SEQ ID NO: 148451 - DNA, 25 bp, Probe Sequence
actgtgactgcttcccaatatttat

SEQ ID NO: 148452 - DNA, 25 bp, Probe Sequence
actgtgaagcttcagacaccttgaa

SEQ ID NO: 148453 - DNA, 25 bp, Probe Sequence
actggatactttttgtcgctggaac

SEQ ID NO: 148454 - DNA, 25 bp, Probe Sequence
actgggcactttcttatcgagatag

SEQ ID NO: 148455 - DNA, 25 bp, Probe Sequence
actgtaaatgttttatttgtaagat

SEQ ID NO: 148456 - DNA, 25 bp, Probe Sequence
acgtcaaatgtttgctttgttacct

SEQ ID NO: 148457 - DNA, 25 bp, Probe Sequence
acgtaggcttttggttgttcctcag

SEQ ID NO: 148458 - DNA, 25 bp, Probe Sequence
acgtaggctttgatgctcatgcgtc

SEQ ID NO: 148459 - DNA, 25 bp, Probe Sequence
actgaagactggagcgctcagcctg

SEQ ID NO: 148460 - DNA, 25 bp, Probe Sequence
actgaagactggagcgctcagcctg

SEQ ID NO: 148461 - DNA, 25 bp, Probe Sequence
actgaagactggagcgctcagcctg

SEQ ID NO: 148462 - DNA, 25 bp, Probe Sequence
acagaatactggctttggcactact

SEQ ID NO: 148463 - DNA, 25 bp, Probe Sequence
acggtgactggaccttccagatcct

SEQ ID NO: 148464 - DNA, 25 bp, Probe Sequence
acgtgtggcgggactttgattgcta

SEQ ID NO: 148465 - DNA, 25 bp, Probe Sequence
actgtttggaattgctcttgattgt

SEQ ID NO: 148466 - DNA, 25 bp, Probe Sequence
acgtttacaatgactcttgtgtctc

SEQ ID NO: 148467 - DNA, 25 bp, Probe Sequence
actgagtgtcaatggcttttttccc

SEQ ID NO: 148468 - DNA, 25 bp, Probe Sequence
actgagttctagtttttattcacac

SEQ ID NO: 148469 - DNA, 25 bp, Probe Sequence
actgggatagatgcttgtttgtaaa

SEQ ID NO: 148470 - DNA, 25 bp, Probe Sequence
actggtgcgtgtgtcttttgaaaca

SEQ ID NO: 148471 - DNA, 25 bp, Probe Sequence
acggctggtgttcctcttaagaaag

SEQ ID NO: 148472 - DNA, 25 bp, Probe Sequence
actatgggttgtaatttgaataaag

SEQ ID NO: 148473 - DNA, 25 bp, Probe Sequence
actgaggcttctcttatgaaacaaa

SEQ ID NO: 148474 - DNA, 25 bp, Probe Sequence
actcaagtatcgttcttaaaccaca

SEQ ID NO: 148475 - DNA, 25 bp, Probe Sequence
actcaggtatatatcccagtacgcc

SEQ ID NO: 148476 - DNA, 25 bp, Probe Sequence
actagttataactgcacaggttgcc

SEQ ID NO: 148477 - DNA, 25 bp, Probe Sequence
acgtcttgaaacttaaactctgtgc

SEQ ID NO: 148478 - DNA, 25 bp, Probe Sequence
acgttctgctccatttaatttgtgc

SEQ ID NO: 148479 - DNA, 25 bp, Probe Sequence
acgtgcggtcacattctaagtctag

SEQ ID NO: 148480 - DNA, 25 bp, Probe Sequence
acggcgatgaacgtcttacaactca

SEQ ID NO: 148481 - DNA, 25 bp, Probe Sequence
actgggaaacaaacgatatatctca

SEQ ID NO: 148482 - DNA, 25 bp, Probe Sequence
actgaaacataaatccgcaagtcac

SEQ ID NO: 148483 - DNA, 25 bp, Probe Sequence
acgggcctgcaaactcgacaggacc

SEQ ID NO: 148484 - DNA, 25 bp, Probe Sequence
acagagcccaagagctgcggggccc

SEQ ID NO: 148485 - DNA, 25 bp, Probe Sequence
acagagcccaagagctgcggggccc

SEQ ID NO: 148486 - DNA, 25 bp, Probe Sequence
actgtcagcataaacctgggggccc

SEQ ID NO: 148487 - DNA, 25 bp, Probe Sequence
acgtcaatggattttgttgggcacc

SEQ ID NO: 148488 - DNA, 25 bp, Probe Sequence
acgtcaagggatttgtttggcacca

SEQ ID NO: 148489 - DNA, 25 bp, Probe Sequence
acgtgaaagcgctttgctttcctca

SEQ ID NO: 148490 - DNA, 25 bp, Probe Sequence
actggcaaatgccttagtttcttaa

SEQ ID NO: 148491 - DNA, 25 bp, Probe Sequence
actggtaatggcttcattctttcta

SEQ ID NO: 148492 - DNA, 25 bp, Probe Sequence
actgggattggttatcacttttctg

SEQ ID NO: 148493 - DNA, 25 bp, Probe Sequence
actggctattcatcttgcacttttc

SEQ ID NO: 148494 - DNA, 25 bp, Probe Sequence
actggctgtagccacttcagtccat

SEQ ID NO: 148495 - DNA, 25 bp, Probe Sequence
actggctgtagccacttcagtccat

SEQ ID NO: 148496 - DNA, 25 bp, Probe Sequence
acggcatctagccatgcttaaacat

SEQ ID NO: 148497 - DNA, 25 bp, Probe Sequence
acggcagcacagctgtccaagactt

SEQ ID NO: 148498 - DNA, 25 bp, Probe Sequence
acgtcaccgtcattatcacagactt

SEQ ID NO: 148499 - DNA, 25 bp, Probe Sequence
cactgtactgggcttccaagctttg

SEQ ID NO: 148500 - DNA, 25 bp, Probe Sequence
actgggtgagctgttcacggtctta

SEQ ID NO: 148501 - DNA, 25 bp, Probe Sequence
actgatgatgaaatccttcacgcat

SEQ ID NO: 148502 - DNA, 25 bp, Probe Sequence
actgcaatgtgaaacctctcgctgc

SEQ ID NO: 148503 - DNA, 25 bp, Probe Sequence
actgacaggaaaccttccgtcgtga

SEQ ID NO: 148504 - DNA, 25 bp, Probe Sequence
acggcaggaagacccttactactgt

SEQ ID NO: 148505 - DNA, 25 bp, Probe Sequence
cactcctggaagccccttaccagga

SEQ ID NO: 148506 - DNA, 25 bp, Probe Sequence
acaggctggaacacctgtacctcga

SEQ ID NO: 148507 - DNA, 25 bp, Probe Sequence
acaccttgaaagtcctaacattaga

SEQ ID NO: 148508 - DNA, 25 bp, Probe Sequence
aaagtggtaagctctaaattgacag

SEQ ID NO: 148509 - DNA, 25 bp, Probe Sequence
aaatctggttacagcataactagga

SEQ ID NO: 148510 - DNA, 25 bp, Probe Sequence
aaatctgagtaagtctaaagttggc

SEQ ID NO: 148511 - DNA, 25 bp, Probe Sequence
aaattcgctggggataaaggctact

SEQ ID NO: 148512 - DNA, 25 bp, Probe Sequence
aaaaccgggtaatagtgcacacagt

SEQ ID NO: 148513 - DNA, 25 bp, Probe Sequence
caccaacacggaatgtaaaggaaag

SEQ ID NO: 148514 - DNA, 25 bp, Probe Sequence
cacccacgggggagacggagagata

SEQ ID NO: 148515 - DNA, 25 bp, Probe Sequence
cccacgtgggggaggaggaggcagg

SEQ ID NO: 148516 - DNA, 25 bp, Probe Sequence
acgtgggggaggaggaggcaggcag

SEQ ID NO: 148517 - DNA, 25 bp, Probe Sequence
acggggggatttgcagacaggccag

SEQ ID NO: 148518 - DNA, 25 bp, Probe Sequence
acgtggccgaggttgacaaggtcac

SEQ ID NO: 148519 - DNA, 25 bp, Probe Sequence
actgcgtctcaacgtggacgaggct

SEQ ID NO: 148520 - DNA, 25 bp, Probe Sequence
actggtgcccaggtgtacttgagct

SEQ ID NO: 148521 - DNA, 25 bp, Probe Sequence
actcagaccgacagtcactttgctg

SEQ ID NO: 148522 - DNA, 25 bp, Probe Sequence
actctgaacaggcttacttttgaag

SEQ ID NO: 148523 - DNA, 25 bp, Probe Sequence
actgcccttgggctgacttttgata

SEQ ID NO: 148524 - DNA, 25 bp, Probe Sequence
actggctttggcactactagtggag

SEQ ID NO: 148525 - DNA, 25 bp, Probe Sequence
actggctggggcagccccagtgagg

SEQ ID NO: 148526 - DNA, 25 bp, Probe Sequence
acggagaggtgaatccccagtacga

SEQ ID NO: 148527 - DNA, 25 bp, Probe Sequence
cagtgaaaaggactacccgttccag

SEQ ID NO: 148528 - DNA, 25 bp, Probe Sequence
catgtaccgggaataccgggacctg

SEQ ID NO: 148529 - DNA, 25 bp, Probe Sequence
actgatcacgggaacagccggctca

SEQ ID NO: 148530 - DNA, 25 bp, Probe Sequence
actgatcacgggaacagccggctca

SEQ ID NO: 148531 - DNA, 25 bp, Probe Sequence
actgtcaggggaagacctacctctt

SEQ ID NO: 148532 - DNA, 25 bp, Probe Sequence
actgtgggagggaccatctactgcc

SEQ ID NO: 148533 - DNA, 25 bp, Probe Sequence
actgagggggagctgtcttgtcatc

SEQ ID NO: 148534 - DNA, 25 bp, Probe Sequence
acgtcttggtgccttttgtgtgatg

SEQ ID NO: 148535 - DNA, 25 bp, Probe Sequence
acgtcttgcttgtcattctgtttgc

SEQ ID NO: 148536 - DNA, 25 bp, Probe Sequence
acgtcttgctctcattatctgcaat

SEQ ID NO: 148537 - DNA, 25 bp, Probe Sequence
acggctgtcaggtttgatctcagtg

SEQ ID NO: 148538 - DNA, 25 bp, Probe Sequence
actgtttccgcctgactcaggaatt

SEQ ID NO: 148539 - DNA, 25 bp, Probe Sequence
acgtgcttcccatcagacacatggg

SEQ ID NO: 148540 - DNA, 25 bp, Probe Sequence
acggcactccgcgagctgtatcggg

SEQ ID NO: 148541 - DNA, 25 bp, Probe Sequence
acgtcactgcaggaactgcttctga

SEQ ID NO: 148542 - DNA, 25 bp, Probe Sequence
acgtcacgcagttctcttacgtgga

SEQ ID NO: 148543 - DNA, 25 bp, Probe Sequence
actgtcccagtcctatgtcagggac

SEQ ID NO: 148544 - DNA, 25 bp, Probe Sequence
acgtcctgcctcgcaatgagggagc

SEQ ID NO: 148545 - DNA, 25 bp, Probe Sequence
actggtctaccccacatgggagcag

SEQ ID NO: 148546 - DNA, 25 bp, Probe Sequence
acggtgatcccaccaatggagggaa

SEQ ID NO: 148547 - DNA, 25 bp, Probe Sequence
acggagctgtcccctagtgagggac

SEQ ID NO: 148548 - DNA, 25 bp, Probe Sequence
actggggtcacttgggaagaggact

SEQ ID NO: 148549 - DNA, 25 bp, Probe Sequence
actgcgtggaaccggacatcaagga

SEQ ID NO: 148550 - DNA, 25 bp, Probe Sequence
actgcaagaatactggcagttcact

SEQ ID NO: 148551 - DNA, 25 bp, Probe Sequence
actaagtacgtatgttcatctacag

SEQ ID NO: 148552 - DNA, 25 bp, Probe Sequence
actgacgtaccatggtagcttaaga

SEQ ID NO: 148553 - DNA, 25 bp, Probe Sequence
actgacgtccccagaagtttctggg

SEQ ID NO: 148554 - DNA, 25 bp, Probe Sequence
actacgaccgggacaagctcttcgg

SEQ ID NO: 148555 - DNA, 25 bp, Probe Sequence
actactgactcaggaatcggctctc

SEQ ID NO: 148556 - DNA, 25 bp, Probe Sequence
actggctcagtagtgcctttgcatt

SEQ ID NO: 148557 - DNA, 25 bp, Probe Sequence
actggcaaggaggctcaggtgcttc

SEQ ID NO: 148558 - DNA, 25 bp, Probe Sequence
actggaaatgagggtgggcgtcttc

SEQ ID NO: 148559 - DNA, 25 bp, Probe Sequence
acagggacaacgaggtggacttcca

SEQ ID NO: 148560 - DNA, 25 bp, Probe Sequence
actttgaggacgatggtggccccta

SEQ ID NO: 148561 - DNA, 25 bp, Probe Sequence
actttaggcatcctctggaaaaccg

SEQ ID NO: 148562 - DNA, 25 bp, Probe Sequence
actgattagtcaacagtggaaaatc

SEQ ID NO: 148563 - DNA, 25 bp, Probe Sequence
actgcatgggaagcacggaatatag

SEQ ID NO: 148564 - DNA, 25 bp, Probe Sequence
actgcatggagttggccctattcat

SEQ ID NO: 148565 - DNA, 25 bp, Probe Sequence
actgatgtggtagggtaatcttgtt

SEQ ID NO: 148566 - DNA, 25 bp, Probe Sequence
actgtagctgtatctgtatacctgt

SEQ ID NO: 148567 - DNA, 25 bp, Probe Sequence
acgtcaggcttggctgcaaacactt

SEQ ID NO: 148568 - DNA, 25 bp, Probe Sequence
acggtgctgcttgcaataaactttc

SEQ ID NO: 148569 - DNA, 25 bp, Probe Sequence
actggggctgtgatcaagaaggttc

SEQ ID NO: 148570 - DNA, 25 bp, Probe Sequence
actgggagacgtacaagcaagggtt

SEQ ID NO: 148571 - DNA, 25 bp, Probe Sequence
actgtggacacttaaataatgggct

SEQ ID NO: 148572 - DNA, 25 bp, Probe Sequence
actgggacccaaaactcagagtgtg

SEQ ID NO: 148573 - DNA, 25 bp, Probe Sequence
actgaagagcctgagtcccaggagg

SEQ ID NO: 148574 - DNA, 25 bp, Probe Sequence
actggagactcggggcagccaggtg

SEQ ID NO: 148575 - DNA, 25 bp, Probe Sequence
actggagcccgagggcctgacaggt

SEQ ID NO: 148576 - DNA, 25 bp, Probe Sequence
acggtgcaccggggcatcaaaggtg

SEQ ID NO: 148577 - DNA, 25 bp, Probe Sequence
actggcaggcctcggcctaaaggtc

SEQ ID NO: 148578 - DNA, 25 bp, Probe Sequence
actggcaggcctcggcctaaaggtc

SEQ ID NO: 148579 - DNA, 25 bp, Probe Sequence
actgaccagtcttggccttaagctg

SEQ ID NO: 148580 - DNA, 25 bp, Probe Sequence
actgcagatttctcacctgtaagat

SEQ ID NO: 148581 - DNA, 25 bp, Probe Sequence
actgtattttgaatccttaaaggtg

SEQ ID NO: 148582 - DNA, 25 bp, Probe Sequence
actgtaacaagtactcattaaagga

SEQ ID NO: 148583 - DNA, 25 bp, Probe Sequence
actgtacacataattatcatgttga

SEQ ID NO: 148584 - DNA, 25 bp, Probe Sequence
actgtagcactttttacactgaaac

SEQ ID NO: 148585 - DNA, 25 bp, Probe Sequence
actggctcattttatgtgcaaagaa

SEQ ID NO: 148586 - DNA, 25 bp, Probe Sequence
acgtgtcctgctttggcagagagaa

SEQ ID NO: 148587 - DNA, 25 bp, Probe Sequence
actgttccttcagccaaagaaacaa

SEQ ID NO: 148588 - DNA, 25 bp, Probe Sequence
actgagggcagtgaccaagagaaag

SEQ ID NO: 148589 - DNA, 25 bp, Probe Sequence
actgatggatctcaagctaaagcaa

SEQ ID NO: 148590 - DNA, 25 bp, Probe Sequence
actctgggctgctggaataggacac

SEQ ID NO: 148591 - DNA, 25 bp, Probe Sequence
acggcggtgaagcagtgggagcagc

SEQ ID NO: 148592 - DNA, 25 bp, Probe Sequence
acggcggtgaagcagtgggagcagc

SEQ ID NO: 148593 - DNA, 25 bp, Probe Sequence
acggcggtgaagcagtgggagcagc

SEQ ID NO: 148594 - DNA, 25 bp, Probe Sequence
acgtgagggtgaggagcgggacgaa

SEQ ID NO: 148595 - DNA, 25 bp, Probe Sequence
acgggagtgtgcagtcagggcctgc

SEQ ID NO: 148596 - DNA, 25 bp, Probe Sequence
acggccattgagctttgggcctgac

SEQ ID NO: 148597 - DNA, 25 bp, Probe Sequence
actgtcccatagcctcattgggctc

SEQ ID NO: 148598 - DNA, 25 bp, Probe Sequence
actgaccctaagtcatcaaggtgga

SEQ ID NO: 148599 - DNA, 25 bp, Probe Sequence
actgtccggaaattcatggttggct

SEQ ID NO: 148600 - DNA, 25 bp, Probe Sequence
actgtgtcaggtatactgttttata

SEQ ID NO: 148601 - DNA, 25 bp, Probe Sequence
acgtggacatttccacttgtgttta

SEQ ID NO: 148602 - DNA, 25 bp, Probe Sequence
acgggatctttccattatgtcgtta

SEQ ID NO: 148603 - DNA, 25 bp, Probe Sequence
acggtgactttcctgtgttgatggt

SEQ ID NO: 148604 - DNA, 25 bp, Probe Sequence
actggctacttggacattgaagagg

SEQ ID NO: 148605 - DNA, 25 bp, Probe Sequence
actgcctagtgtaacaatgaaacca

SEQ ID NO: 148606 - DNA, 25 bp, Probe Sequence
actggctgaagctttgcccaaacaa

SEQ ID NO: 148607 - DNA, 25 bp, Probe Sequence
actgagtgggcagctcccaatgtct

SEQ ID NO: 148608 - DNA, 25 bp, Probe Sequence
actgtgccgagatcgctcacaatgt

SEQ ID NO: 148609 - DNA, 25 bp, Probe Sequence
actgtgacgagttcagtgctaagaa

SEQ ID NO: 148610 - DNA, 25 bp, Probe Sequence
acgtgatattccttgaagtagatgt

SEQ ID NO: 148611 - DNA, 25 bp, Probe Sequence
actgtgtgatctgttaaggggtgga

SEQ ID NO: 148612 - DNA, 25 bp, Probe Sequence
actgttactggttatagaggtcttt

SEQ ID NO: 148613 - DNA, 25 bp, Probe Sequence
actgttttagttgctcggcactgtt

SEQ ID NO: 148614 - DNA, 25 bp, Probe Sequence
actgctattttgaaacctggaggat

SEQ ID NO: 148615 - DNA, 25 bp, Probe Sequence
actgggtttgaatgccggtgtggaa

SEQ ID NO: 148616 - DNA, 25 bp, Probe Sequence
actgggtttgaatgccggtgtggaa

SEQ ID NO: 148617 - DNA, 25 bp, Probe Sequence
actgtgcgtgtatatacgcgtgtgt

SEQ ID NO: 148618 - DNA, 25 bp, Probe Sequence
actgagggttactccagttgctctg

SEQ ID NO: 148619 - DNA, 25 bp, Probe Sequence
acgtgaggatccgatcccagttcct

SEQ ID NO: 148620 - DNA, 25 bp, Probe Sequence
actgtgagaaccagccaatgcttcc

SEQ ID NO: 148621 - DNA, 25 bp, Probe Sequence
actgtagacactatctcggagaccc

SEQ ID NO: 148622 - DNA, 25 bp, Probe Sequence
actgaagaacttttccatgcaacca

SEQ ID NO: 148623 - DNA, 25 bp, Probe Sequence
acgggagactgtcatgctcatgcat

SEQ ID NO: 148624 - DNA, 25 bp, Probe Sequence
acgtgggagctaatcattgcatgtg

SEQ ID NO: 148625 - DNA, 25 bp, Probe Sequence
actgtgggcaataatatggcattta

SEQ ID NO: 148626 - DNA, 25 bp, Probe Sequence
actgtggtacatataagcaacttta

SEQ ID NO: 148627 - DNA, 25 bp, Probe Sequence
acggtgtacatttccagagccttgt

SEQ ID NO: 148628 - DNA, 25 bp, Probe Sequence
acggatgttcatattcgggttttca

SEQ ID NO: 148629 - DNA, 25 bp, Probe Sequence
acggatgttcatattcgggttttca

SEQ ID NO: 148630 - DNA, 25 bp, Probe Sequence
acggatgataccatcggggacctta

SEQ ID NO: 148631 - DNA, 25 bp, Probe Sequence
actgggaacctgttggctaaccatt

SEQ ID NO: 148632 - DNA, 25 bp, Probe Sequence
actgtgggactttgtgggtactatt

SEQ ID NO: 148633 - DNA, 25 bp, Probe Sequence
actgtaccacttttgtgttttcttg

SEQ ID NO: 148634 - DNA, 25 bp, Probe Sequence
actgctacccttgtgagttaccatt

SEQ ID NO: 148635 - DNA, 25 bp, Probe Sequence
actgtctcgggtgtcagcttaacat

SEQ ID NO: 148636 - DNA, 25 bp, Probe Sequence
actgatctcaggctggggccgaaca

SEQ ID NO: 148637 - DNA, 25 bp, Probe Sequence
actgaccacctaggtggctgccacc

SEQ ID NO: 148638 - DNA, 25 bp, Probe Sequence
actgactggctcagcgtgtgcctac

SEQ ID NO: 148639 - DNA, 25 bp, Probe Sequence
actgactatgccagaggaaccgccc

SEQ ID NO: 148640 - DNA, 25 bp, Probe Sequence
actgggcaggattggcaacaccccc

SEQ ID NO: 148641 - DNA, 25 bp, Probe Sequence
actgtacaggtctggaaccaccgag

SEQ ID NO: 148642 - DNA, 25 bp, Probe Sequence
actcaacggtttggatcctagaagg

SEQ ID NO: 148643 - DNA, 25 bp, Probe Sequence
actcctaggtatgtatcctagagag

SEQ ID NO: 148644 - DNA, 25 bp, Probe Sequence
actcccaggaattcaatccttaatt

SEQ ID NO: 148645 - DNA, 25 bp, Probe Sequence
acatctagaggaataaatcgtaaca

SEQ ID NO: 148646 - DNA, 25 bp, Probe Sequence
actctgcagtggacataagcattgg

SEQ ID NO: 148647 - DNA, 25 bp, Probe Sequence
actctcctgggataatggggtcctg

SEQ ID NO: 148648 - DNA, 25 bp, Probe Sequence
aaatcctgttaagctgggcgttgtg

SEQ ID NO: 148649 - DNA, 25 bp, Probe Sequence
actacttgtttgcgctaggcgttta

SEQ ID NO: 148650 - DNA, 25 bp, Probe Sequence
actatttgtctttcaggaccttttg

SEQ ID NO: 148651 - DNA, 25 bp, Probe Sequence
actgtttagctcttcattacttttg

SEQ ID NO: 148652 - DNA, 25 bp, Probe Sequence
actgttgccagtgatcaggatcttt

SEQ ID NO: 148653 - DNA, 25 bp, Probe Sequence
actgtcgccagttgtgcacttttac

SEQ ID NO: 148654 - DNA, 25 bp, Probe Sequence
actgttccaatgataattattactt

SEQ ID NO: 148655 - DNA, 25 bp, Probe Sequence
actgtgtccattataatctttctct

SEQ ID NO: 148656 - DNA, 25 bp, Probe Sequence
actggttcattttaatgtgcttgtt

SEQ ID NO: 148657 - DNA, 25 bp, Probe Sequence
actggaccactcgaagatggcattg

SEQ ID NO: 148658 - DNA, 25 bp, Probe Sequence
actggcagcgccatgagattgtgca

SEQ ID NO: 148659 - DNA, 25 bp, Probe Sequence
actggcgctgccaaggctgtgggca

SEQ ID NO: 148660 - DNA, 25 bp, Probe Sequence
actgagccccagcagctgagggcca

SEQ ID NO: 148661 - DNA, 25 bp, Probe Sequence
actggccgaacatcaagggatcata

SEQ ID NO: 148662 - DNA, 25 bp, Probe Sequence
actggcactggacttcaagcgaaag

SEQ ID NO: 148663 - DNA, 25 bp, Probe Sequence
actggcctggccgcaacagcagggg

SEQ ID NO: 148664 - DNA, 25 bp, Probe Sequence
acggcaagaccttcaaccaggtgga

SEQ ID NO: 148665 - DNA, 25 bp, Probe Sequence
acggcaagtggttcgacaagcgctg

SEQ ID NO: 148666 - DNA, 25 bp, Probe Sequence
actggccgggccggacagagcagat

SEQ ID NO: 148667 - DNA, 25 bp, Probe Sequence
actggcaccagtgggggatggagat

SEQ ID NO: 148668 - DNA, 25 bp, Probe Sequence
actggattcagtgcaggtttggata

SEQ ID NO: 148669 - DNA, 25 bp, Probe Sequence
acgggttatgtacgtcatgttgata

SEQ ID NO: 148670 - DNA, 25 bp, Probe Sequence
acggctttattgagctatcattcac

SEQ ID NO: 148671 - DNA, 25 bp, Probe Sequence
acggcttgtaaatgtgacaccccgg

SEQ ID NO: 148672 - DNA, 25 bp, Probe Sequence
acggttgcaaactgctgaccacgcc

SEQ ID NO: 148673 - DNA, 25 bp, Probe Sequence
acggatgattgatatccagaccagg

SEQ ID NO: 148674 - DNA, 25 bp, Probe Sequence
acggcaatatcatcaccacacgcac

SEQ ID NO: 148675 - DNA, 25 bp, Probe Sequence
actggaaatggactccacagcagac

SEQ ID NO: 148676 - DNA, 25 bp, Probe Sequence
actggtatcacgaccctagaacctt

SEQ ID NO: 148677 - DNA, 25 bp, Probe Sequence
actggcaatgcctcctaatgaaact

SEQ ID NO: 148678 - DNA, 25 bp, Probe Sequence
actggcaatgcctcctaatgaaact

SEQ ID NO: 148679 - DNA, 25 bp, Probe Sequence
actgaaaccactgctaagcatttta

SEQ ID NO: 148680 - DNA, 25 bp, Probe Sequence
actgataaatcagatcgtgcctctt

SEQ ID NO: 148681 - DNA, 25 bp, Probe Sequence
actgattaatcagcctatgtgcctg

SEQ ID NO: 148682 - DNA, 25 bp, Probe Sequence
actgttttgagggcttccagctgga

SEQ ID NO: 148683 - DNA, 25 bp, Probe Sequence
actgtttctcagtattaccacttga

SEQ ID NO: 148684 - DNA, 25 bp, Probe Sequence
actgttgtctcttttcaaaccaaat

SEQ ID NO: 148685 - DNA, 25 bp, Probe Sequence
actgcactttctttatataatcgtt

SEQ ID NO: 148686 - DNA, 25 bp, Probe Sequence
actgactttccatcaaatagtgctt

SEQ ID NO: 148687 - DNA, 25 bp, Probe Sequence
actggctattacttaatctgtgtgt

SEQ ID NO: 148688 - DNA, 25 bp, Probe Sequence
actggtatttggtgcatttgcttgt

SEQ ID NO: 148689 - DNA, 25 bp, Probe Sequence
actggtgaagggggctttgtctgtt

SEQ ID NO: 148690 - DNA, 25 bp, Probe Sequence
actgatgtaaaacggttttcttgtg

SEQ ID NO: 148691 - DNA, 25 bp, Probe Sequence
actgattaaaatcgtgtctggcact

SEQ ID NO: 148692 - DNA, 25 bp, Probe Sequence
actgttaacgattgtctgcccatgt

SEQ ID NO: 148693 - DNA, 25 bp, Probe Sequence
actgtctatcagtacgtcggcaatg

SEQ ID NO: 148694 - DNA, 25 bp, Probe Sequence
actgtgcgacatttggcctgcagaa

SEQ ID NO: 148695 - DNA, 25 bp, Probe Sequence
actatgtgcatgtatcttgcctcag

SEQ ID NO: 148696 - DNA, 25 bp, Probe Sequence
actgtgatgcgaaatgatcagtctg

SEQ ID NO: 148697 - DNA, 25 bp, Probe Sequence
actgttgctgataagatcctgtggg

SEQ ID NO: 148698 - DNA, 25 bp, Probe Sequence
actgtgtgctgatcagagactggag

SEQ ID NO: 148699 - DNA, 25 bp, Probe Sequence
actgggttgcagggactgtggtctc

SEQ ID NO: 148700 - DNA, 25 bp, Probe Sequence
actggagcactgccatggactgtgg

SEQ ID NO: 148701 - DNA, 25 bp, Probe Sequence
actggaacgctgagaagaggtcccc

SEQ ID NO: 148702 - DNA, 25 bp, Probe Sequence
acggtgactgcggtgaagaatgctc

SEQ ID NO: 148703 - DNA, 25 bp, Probe Sequence
actggctagctccgtaatgaatgtt

SEQ ID NO: 148704 - DNA, 25 bp, Probe Sequence
actggctcatgttgtaagaaattat

SEQ ID NO: 148705 - DNA, 25 bp, Probe Sequence
actggccgccatgaggaaagctgct

SEQ ID NO: 148706 - DNA, 25 bp, Probe Sequence
actgaccagccagaggaacctgagt

SEQ ID NO: 148707 - DNA, 25 bp, Probe Sequence
cactccaattcagcggtatccgaat

SEQ ID NO: 148708 - DNA, 25 bp, Probe Sequence
actctacatggggggccatggcagt

SEQ ID NO: 148709 - DNA, 25 bp, Probe Sequence
actgtacgagtgaggcctgtgagag

SEQ ID NO: 148710 - DNA, 25 bp, Probe Sequence
actgatccctcgagagcatctggaa

SEQ ID NO: 148711 - DNA, 25 bp, Probe Sequence
actgtgttgtggcagagcctgagaa

SEQ ID NO: 148712 - DNA, 25 bp, Probe Sequence
actgatttggggcaatgaggaatat

SEQ ID NO: 148713 - DNA, 25 bp, Probe Sequence
actgatgttcatgggtaaaataata

SEQ ID NO: 148714 - DNA, 25 bp, Probe Sequence
actagttccaagcaacaaactcctt

SEQ ID NO: 148715 - DNA, 25 bp, Probe Sequence
actgacacccattggaaatgaacca

SEQ ID NO: 148716 - DNA, 25 bp, Probe Sequence
actgcaagtcagtgtaagtccccag

SEQ ID NO: 148717 - DNA, 25 bp, Probe Sequence
actgacaggaagctcaagttccccc

SEQ ID NO: 148718 - DNA, 25 bp, Probe Sequence
actactagaacttaagatggcccca

SEQ ID NO: 148719 - DNA, 25 bp, Probe Sequence
actgctctgggactgtaatttgcca

SEQ ID NO: 148720 - DNA, 25 bp, Probe Sequence
actgtcttgaaattgaatctgtcca

SEQ ID NO: 148721 - DNA, 25 bp, Probe Sequence
actgtgttgaaatcaaacctgccgc

SEQ ID NO: 148722 - DNA, 25 bp, Probe Sequence
actgtgttgaaatcaaacctgccgc

SEQ ID NO: 148723 - DNA, 25 bp, Probe Sequence
actgatgactgatagaaagccctct

SEQ ID NO: 148724 - DNA, 25 bp, Probe Sequence
actgaacgcaaatcagccactttaa

SEQ ID NO: 148725 - DNA, 25 bp, Probe Sequence
actgttccagaatacactttcttat

SEQ ID NO: 148726 - DNA, 25 bp, Probe Sequence
actgtattctgacaactctttgctt

SEQ ID NO: 148727 - DNA, 25 bp, Probe Sequence
actgtatgtccagatcctttttctc

SEQ ID NO: 148728 - DNA, 25 bp, Probe Sequence
cactgtgttccagaccgtgtctgac

SEQ ID NO: 148729 - DNA, 25 bp, Probe Sequence
actgagtggcaagtccctttgtgac

SEQ ID NO: 148730 - DNA, 25 bp, Probe Sequence
actgagtggcaagtccctttgtgac

SEQ ID NO: 148731 - DNA, 25 bp, Probe Sequence
actgagtggcaagtccctttgtgac

SEQ ID NO: 148732 - DNA, 25 bp, Probe Sequence
actggcttggattgccctttgtgac

SEQ ID NO: 148733 - DNA, 25 bp, Probe Sequence
actggctgtgtgaactttttgtatc

SEQ ID NO: 148734 - DNA, 25 bp, Probe Sequence
actgagtggagtctgattaaggatt

SEQ ID NO: 148735 - DNA, 25 bp, Probe Sequence
actgagttgtgaatctgtaaagggg

SEQ ID NO: 148736 - DNA, 25 bp, Probe Sequence
actgatgcctcttctgcattcaaag

SEQ ID NO: 148737 - DNA, 25 bp, Probe Sequence
actgagcactcttctgtgcactagc

SEQ ID NO: 148738 - DNA, 25 bp, Probe Sequence
actgtgcaataatatgcagccacag

SEQ ID NO: 148739 - DNA, 25 bp, Probe Sequence
actgtgcattgcattatggacagca

SEQ ID NO: 148740 - DNA, 25 bp, Probe Sequence
actgtgcactccatcatcagcaaaa

SEQ ID NO: 148741 - DNA, 25 bp, Probe Sequence
actgctgaccacgccgaatccggaa

SEQ ID NO: 148742 - DNA, 25 bp, Probe Sequence
actgcgatgaactccgcaaggcctg

SEQ ID NO: 148743 - DNA, 25 bp, Probe Sequence
actgcagagagaaccaagggagcct

SEQ ID NO: 148744 - DNA, 25 bp, Probe Sequence
actgcagagagaaccaagggagcct

SEQ ID NO: 148745 - DNA, 25 bp, Probe Sequence
actcggatggcagcaaggactcctg

SEQ ID NO: 148746 - DNA, 25 bp, Probe Sequence
actctaggacatgcaacacagccgc

SEQ ID NO: 148747 - DNA, 25 bp, Probe Sequence
actgaaagatccgaacacagcggtc

SEQ ID NO: 148748 - DNA, 25 bp, Probe Sequence
actgtagtgacacaacctgggctct

SEQ ID NO: 148749 - DNA, 25 bp, Probe Sequence
actgtcagtaaatgctttggagaag

SEQ ID NO: 148750 - DNA, 25 bp, Probe Sequence
actgttgctacaaacgtctggagaa

SEQ ID NO: 148751 - DNA, 25 bp, Probe Sequence
actgttccgatttgcctctgagaac

SEQ ID NO: 148752 - DNA, 25 bp, Probe Sequence
actgtatgaagcttgtcctctgact

SEQ ID NO: 148753 - DNA, 25 bp, Probe Sequence
actgtaaatgaagtaggctgccata

SEQ ID NO: 148754 - DNA, 25 bp, Probe Sequence
actgagcaaggttgggtgcttcatt

SEQ ID NO: 148755 - DNA, 25 bp, Probe Sequence
actgtggggtggggctgttgatatt

SEQ ID NO: 148756 - DNA, 25 bp, Probe Sequence
actgtaggggtaatgctttgatatt

SEQ ID NO: 148757 - DNA, 25 bp, Probe Sequence
actgaagggcgtaatgcacttatcc

SEQ ID NO: 148758 - DNA, 25 bp, Probe Sequence
actgagttgtcctacatgcaagtac

SEQ ID NO: 148759 - DNA, 25 bp, Probe Sequence
actacttggactggatccaccacta

SEQ ID NO: 148760 - DNA, 25 bp, Probe Sequence
actacttggactggatccaccacta

SEQ ID NO: 148761 - DNA, 25 bp, Probe Sequence
actacttggactggatccaccacta

SEQ ID NO: 148762 - DNA, 25 bp, Probe Sequence
actgactgtggggtgggcccaggat

SEQ ID NO: 148763 - DNA, 25 bp, Probe Sequence
actggtgtgggaggggagcgcacga

SEQ ID NO: 148764 - DNA, 25 bp, Probe Sequence
actggttgtaggcgtagctgcactc

SEQ ID NO: 148765 - DNA, 25 bp, Probe Sequence
acggtatggaggtttcctgaagcgc

SEQ ID NO: 148766 - DNA, 25 bp, Probe Sequence
actggctgaggaggacttcctggcg

SEQ ID NO: 148767 - DNA, 25 bp, Probe Sequence
actggcaaggagaagctcccgcggt

SEQ ID NO: 148768 - DNA, 25 bp, Probe Sequence
actggcaaggagaagctcccgcggt

SEQ ID NO: 148769 - DNA, 25 bp, Probe Sequence
actggaaagagtgccagtcagcagt

SEQ ID NO: 148770 - DNA, 25 bp, Probe Sequence
actggaaacagtggcatggttcgtg

SEQ ID NO: 148771 - DNA, 25 bp, Probe Sequence
acggaaacagtttcatgttcttctt

SEQ ID NO: 148772 - DNA, 25 bp, Probe Sequence
actggtcaacagaatgcacatgctt

SEQ ID NO: 148773 - DNA, 25 bp, Probe Sequence
actggagcaatcagatcacacggcg

SEQ ID NO: 148774 - DNA, 25 bp, Probe Sequence
actggatccatcggatcatccccaa

SEQ ID NO: 148775 - DNA, 25 bp, Probe Sequence
actggatcgatggtgttctcaacaa

SEQ ID NO: 148776 - DNA, 25 bp, Probe Sequence
actgatgatcgagatggatggaaca

SEQ ID NO: 148777 - DNA, 25 bp, Probe Sequence
actgcagactgagcggtggaccgaa

SEQ ID NO: 148778 - DNA, 25 bp, Probe Sequence
actggaatgttcttgggtgctcaga

SEQ ID NO: 148779 - DNA, 25 bp, Probe Sequence
actggaatcttcataggtcatattg

SEQ ID NO: 148780 - DNA, 25 bp, Probe Sequence
actggcagtctacttctaccatagt

SEQ ID NO: 148781 - DNA, 25 bp, Probe Sequence
actggcgtcttcaccaccatggaga

SEQ ID NO: 148782 - DNA, 25 bp, Probe Sequence
actgggtaacctgatcgtggagagt

SEQ ID NO: 148783 - DNA, 25 bp, Probe Sequence
actgggtaatttcctctgaggattt

SEQ ID NO: 148784 - DNA, 25 bp, Probe Sequence
actagggaatttgctcctgttctgt

SEQ ID NO: 148785 - DNA, 25 bp, Probe Sequence
actgaggtggatgcagcctccgttt

SEQ ID NO: 148786 - DNA, 25 bp, Probe Sequence
actgaggtggaaagcaccccacccg

SEQ ID NO: 148787 - DNA, 25 bp, Probe Sequence
actggaatgttaaactcccgcgtca

SEQ ID NO: 148788 - DNA, 25 bp, Probe Sequence
actggaagttgacagcttggctgcc

SEQ ID NO: 148789 - DNA, 25 bp, Probe Sequence
actggccagttggtgactctgtgac

SEQ ID NO: 148790 - DNA, 25 bp, Probe Sequence
actgggcatgtatggaggtgtgatt

SEQ ID NO: 148791 - DNA, 25 bp, Probe Sequence
actggccatgaagtgaggagatggt

SEQ ID NO: 148792 - DNA, 25 bp, Probe Sequence
actggtctatggggaggaggtgggc

SEQ ID NO: 148793 - DNA, 25 bp, Probe Sequence
actggcttggtcgcagtgactgtgg

SEQ ID NO: 148794 - DNA, 25 bp, Probe Sequence
actggcttggttccaggagcagctg

SEQ ID NO: 148795 - DNA, 25 bp, Probe Sequence
actagattccctaattacagtgaaa

SEQ ID NO: 148796 - DNA, 25 bp, Probe Sequence
actgtgtctgccctttagaagctaa

SEQ ID NO: 148797 - DNA, 25 bp, Probe Sequence
actggattgacaaaatcatgaggct

SEQ ID NO: 148798 - DNA, 25 bp, Probe Sequence
actggcaaaatagttctgcaggttg

SEQ ID NO: 148799 - DNA, 25 bp, Probe Sequence
actgcaaaaacctgctctgttgtgc

SEQ ID NO: 148800 - DNA, 25 bp, Probe Sequence
actgcaaaaacctgctctgttgtgc

SEQ ID NO: 148801 - DNA, 25 bp, Probe Sequence
actcaacagaagcacctttaggcga

SEQ ID NO: 148802 - DNA, 25 bp, Probe Sequence
actcaggacgggttgttccaggcta

SEQ ID NO: 148803 - DNA, 25 bp, Probe Sequence
actgcggaagggcgtacgcgatcgc

SEQ ID NO: 148804 - DNA, 25 bp, Probe Sequence
actgtggaatgggaagctgccgcct

SEQ ID NO: 148805 - DNA, 25 bp, Probe Sequence
actgtggaatgggaagctgccgcct

SEQ ID NO: 148806 - DNA, 25 bp, Probe Sequence
actgtgctgacttggaaggtgccct

SEQ ID NO: 148807 - DNA, 25 bp, Probe Sequence
actggctgactgagaagatgcatgc

SEQ ID NO: 148808 - DNA, 25 bp, Probe Sequence
actggatgagctgaattggcagcag

SEQ ID NO: 148809 - DNA, 25 bp, Probe Sequence
actggaagcagctgactgtgcgcac

SEQ ID NO: 148810 - DNA, 25 bp, Probe Sequence
actggacagcacagacttcaccagc

SEQ ID NO: 148811 - DNA, 25 bp, Probe Sequence
actggcacgaagtgcctcatctctg

SEQ ID NO: 148812 - DNA, 25 bp, Probe Sequence
actgagcaccaggtggtctcctctg

SEQ ID NO: 148813 - DNA, 25 bp, Probe Sequence
actgaagccagggggtctcctgaaa

SEQ ID NO: 148814 - DNA, 25 bp, Probe Sequence
actgtcaaaggccgtgttccattca

SEQ ID NO: 148815 - DNA, 25 bp, Probe Sequence
actggcaacaagcggtgactatctc

SEQ ID NO: 148816 - DNA, 25 bp, Probe Sequence
actggcaagtcacatgttatcacct

SEQ ID NO: 148817 - DNA, 25 bp, Probe Sequence
actgcccagtacttttcaaactctc

SEQ ID NO: 148818 - DNA, 25 bp, Probe Sequence
actgcccagtacttttcaaactctc

SEQ ID NO: 148819 - DNA, 25 bp, Probe Sequence
actgcccagtacttttcaaactctc

SEQ ID NO: 148820 - DNA, 25 bp, Probe Sequence
actggccagcagttatttcgtcact

SEQ ID NO: 148821 - DNA, 25 bp, Probe Sequence
actgatgcgacttgttttgctgctt

SEQ ID NO: 148822 - DNA, 25 bp, Probe Sequence
actggcagatgtggtttgcagccct

SEQ ID NO: 148823 - DNA, 25 bp, Probe Sequence
actggtatgtgtggatgatgctgcc

SEQ ID NO: 148824 - DNA, 25 bp, Probe Sequence
actggcattttgtagatgtggtttg

SEQ ID NO: 148825 - DNA, 25 bp, Probe Sequence
actggcattttgtagatgtggtttg

SEQ ID NO: 148826 - DNA, 25 bp, Probe Sequence
actgcagaaattcagtgtgtttcta

SEQ ID NO: 148827 - DNA, 25 bp, Probe Sequence
actgcaagacatgtactgaattcca

SEQ ID NO: 148828 - DNA, 25 bp, Probe Sequence
actgcaaatactacagataattctg

SEQ ID NO: 148829 - DNA, 25 bp, Probe Sequence
actggctgatgaggaaatgacatta

SEQ ID NO: 148830 - DNA, 25 bp, Probe Sequence
actggctgtcagaacaagaagatat

SEQ ID NO: 148831 - DNA, 25 bp, Probe Sequence
actgtgctgtcgcagagcagaaggg

SEQ ID NO: 148832 - DNA, 25 bp, Probe Sequence
actggctccgcacggagaacgagct

SEQ ID NO: 148833 - DNA, 25 bp, Probe Sequence
acatggcctccaaggagtaagaccc

SEQ ID NO: 148834 - DNA, 25 bp, Probe Sequence
actgtcctccaaggctacaggaccc

SEQ ID NO: 148835 - DNA, 25 bp, Probe Sequence
actggcactccaaactaagggcttc

SEQ ID NO: 148836 - DNA, 25 bp, Probe Sequence
actggttcccaactagatgcttgtt

SEQ ID NO: 148837 - DNA, 25 bp, Probe Sequence
actgtgttctcggacatagtaagta

SEQ ID NO: 148838 - DNA, 25 bp, Probe Sequence
actgattttggctctcatttcactc

SEQ ID NO: 148839 - DNA, 25 bp, Probe Sequence
actgattttggctctcatttcactc

SEQ ID NO: 148840 - DNA, 25 bp, Probe Sequence
actgattttggctctcatttcactc

SEQ ID NO: 148841 - DNA, 25 bp, Probe Sequence
actgattttggctctcatttcactc

SEQ ID NO: 148842 - DNA, 25 bp, Probe Sequence
actgattttggctctcatttcactc

SEQ ID NO: 148843 - DNA, 25 bp, Probe Sequence
actgattttggctctcatttcactc

SEQ ID NO: 148844 - DNA, 25 bp, Probe Sequence
actgcatataagagttatgttagcc

SEQ ID NO: 148845 - DNA, 25 bp, Probe Sequence
actgcaacagagaggctttcgacgt

SEQ ID NO: 148846 - DNA, 25 bp, Probe Sequence
actgaccagtggctttttgattgat

SEQ ID NO: 148847 - DNA, 25 bp, Probe Sequence
actcacaaggtggttctttccagtt

SEQ ID NO: 148848 - DNA, 25 bp, Probe Sequence
actcgtacggcaagtatttcaagtt

SEQ ID NO: 148849 - DNA, 25 bp, Probe Sequence
actctgtaaggaagttcccaactat

SEQ ID NO: 148850 - DNA, 25 bp, Probe Sequence
actgttatattaccttctccaggaa

SEQ ID NO: 148851 - DNA, 25 bp, Probe Sequence
actgggtgcttacagtctccatgga

SEQ ID NO: 148852 - DNA, 25 bp, Probe Sequence
actgaggtctatgccagttcctgat

SEQ ID NO: 148853 - DNA, 25 bp, Probe Sequence
actgctgggcaatccagttgacttt

SEQ ID NO: 148854 - DNA, 25 bp, Probe Sequence
actgtttcgtcacagttgaatttcc

SEQ ID NO: 148855 - DNA, 25 bp, Probe Sequence
actctttcctcacagggaaggcgcc

SEQ ID NO: 148856 - DNA, 25 bp, Probe Sequence
actgttactgtccttggcgaatcga

SEQ ID NO: 148857 - DNA, 25 bp, Probe Sequence
actgtccagctgtccactggggaag

SEQ ID NO: 148858 - DNA, 25 bp, Probe Sequence
actgctcgcagctggagtgagaggc

SEQ ID NO: 148859 - DNA, 25 bp, Probe Sequence
acatgccccaaatggaaggcaccga

SEQ ID NO: 148860 - DNA, 25 bp, Probe Sequence
actgtcccttatttgaaggcatcta

SEQ ID NO: 148861 - DNA, 25 bp, Probe Sequence
actgtctccttttatatattattat

SEQ ID NO: 148862 - DNA, 25 bp, Probe Sequence
actgtccctgctttctggtataaag

SEQ ID NO: 148863 - DNA, 25 bp, Probe Sequence
actgtacaccatgttgttgtcccag

SEQ ID NO: 148864 - DNA, 25 bp, Probe Sequence
actgagaatctcttcttttgtccct

SEQ ID NO: 148865 - DNA, 25 bp, Probe Sequence
actgagacactgaggcttcgtcctt

SEQ ID NO: 148866 - DNA, 25 bp, Probe Sequence
actgacatgaccaggattttccttt

SEQ ID NO: 148867 - DNA, 25 bp, Probe Sequence
actggcatgaacacgtctttgaagt

SEQ ID NO: 148868 - DNA, 25 bp, Probe Sequence
actggtcaacaagtgtgctttggac

SEQ ID NO: 148869 - DNA, 25 bp, Probe Sequence
actgtgctccctttggttatggaca

SEQ ID NO: 148870 - DNA, 25 bp, Probe Sequence
actggcttgtctttggtatgaagga

SEQ ID NO: 148871 - DNA, 25 bp, Probe Sequence
actggatttgctcctgtcaatgaag

SEQ ID NO: 148872 - DNA, 25 bp, Probe Sequence
actgtgattgtggctctcctaagga

SEQ ID NO: 148873 - DNA, 25 bp, Probe Sequence
actggatgggcagcttttgcagcca

SEQ ID NO: 148874 - DNA, 25 bp, Probe Sequence
actgcgaaggcaggttattagaaga

SEQ ID NO: 148875 - DNA, 25 bp, Probe Sequence
actgcgggatgctaaacattgaaag

SEQ ID NO: 148876 - DNA, 25 bp, Probe Sequence
actggcctgatctaacaatgaaaaa

SEQ ID NO: 148877 - DNA, 25 bp, Probe Sequence
actgggcatatcaacaggtccaaca

SEQ ID NO: 148878 - DNA, 25 bp, Probe Sequence
actgggcctgctacaaggtgcaaca

SEQ ID NO: 148879 - DNA, 25 bp, Probe Sequence
actgggcacatggtagaggctcaca

SEQ ID NO: 148880 - DNA, 25 bp, Probe Sequence
actgtggctatgcaacagctctcac

SEQ ID NO: 148881 - DNA, 25 bp, Probe Sequence
actgtgccatgtcagcaagtcatat

SEQ ID NO: 148882 - DNA, 25 bp, Probe Sequence
actgacagctggcctaggctcaatg

SEQ ID NO: 148883 - DNA, 25 bp, Probe Sequence
actgacctgctggccagaggcattg

SEQ ID NO: 148884 - DNA, 25 bp, Probe Sequence
actgtccttggcgaatcgataatca

SEQ ID NO: 148885 - DNA, 25 bp, Probe Sequence
actgtctgcgtgccgagatggaaca

SEQ ID NO: 148886 - DNA, 25 bp, Probe Sequence
actgtctgtggactgggaaacaaag

SEQ ID NO: 148887 - DNA, 25 bp, Probe Sequence
actgtttcatgactgactgactaaa

SEQ ID NO: 148888 - DNA, 25 bp, Probe Sequence
actgttttcaagtcagcctatacaa

SEQ ID NO: 148889 - DNA, 25 bp, Probe Sequence
actgcacttccagccaggcttaaaa

SEQ ID NO: 148890 - DNA, 25 bp, Probe Sequence
acatccttcgagaccggttcaagag

SEQ ID NO: 148891 - DNA, 25 bp, Probe Sequence
actccttcacagatcggtgtaatcc

SEQ ID NO: 148892 - DNA, 25 bp, Probe Sequence
actgtctctcagtgttggttcagat

SEQ ID NO: 148893 - DNA, 25 bp, Probe Sequence
actggcagctcatttttggtatgaa

SEQ ID NO: 148894 - DNA, 25 bp, Probe Sequence
actgccaggttaatttccagaattc

SEQ ID NO: 148895 - DNA, 25 bp, Probe Sequence
actgactttcatatttggataacct

SEQ ID NO: 148896 - DNA, 25 bp, Probe Sequence
actggtttctgtctatgtctaccct

SEQ ID NO: 148897 - DNA, 25 bp, Probe Sequence
actggtatttatttatgttagctcc

SEQ ID NO: 148898 - DNA, 25 bp, Probe Sequence
actggtatttatttatgttagctcc

SEQ ID NO: 148899 - DNA, 25 bp, Probe Sequence
actggtgtttcttgttcattgactt

SEQ ID NO: 148900 - DNA, 25 bp, Probe Sequence
actggtttagcttgcctgcaggatc

SEQ ID NO: 148901 - DNA, 25 bp, Probe Sequence
actggtctgtactccttggatttgc

SEQ ID NO: 148902 - DNA, 25 bp, Probe Sequence
actggtctgtactccttggatttgc

SEQ ID NO: 148903 - DNA, 25 bp, Probe Sequence
actgtgtcttattccatctatgagc

SEQ ID NO: 148904 - DNA, 25 bp, Probe Sequence
actgccatatataagcacatccatg

SEQ ID NO: 148905 - DNA, 25 bp, Probe Sequence
actgcttaatggccacatgccagtg

SEQ ID NO: 148906 - DNA, 25 bp, Probe Sequence
actggtgcaagcaggtgcagatgtg

SEQ ID NO: 148907 - DNA, 25 bp, Probe Sequence
actggtatactcatgtcaatattct

SEQ ID NO: 148908 - DNA, 25 bp, Probe Sequence
actgggatgtacatgctcaataccc

SEQ ID NO: 148909 - DNA, 25 bp, Probe Sequence
actgggagcctctgcacagtggctc

SEQ ID NO: 148910 - DNA, 25 bp, Probe Sequence
actgggcagccaggcagaggggctc

SEQ ID NO: 148911 - DNA, 25 bp, Probe Sequence
acagtgtcctatggctgggggcact

SEQ ID NO: 148912 - DNA, 25 bp, Probe Sequence
actgtgactgtagctggagtggcac

SEQ ID NO: 148913 - DNA, 25 bp, Probe Sequence
actggagcgatgtgttgactggact

SEQ ID NO: 148914 - DNA, 25 bp, Probe Sequence
actgagccaagacatttctggagct

SEQ ID NO: 148915 - DNA, 25 bp, Probe Sequence
actgtgcctaagaagaggtgctggt

SEQ ID NO: 148916 - DNA, 25 bp, Probe Sequence
actgtgtgtacaccagggatctgtt

SEQ ID NO: 148917 - DNA, 25 bp, Probe Sequence
actgtgtgttctccatggtcatagg

SEQ ID NO: 148918 - DNA, 25 bp, Probe Sequence
actggatgtgtccatcgagatgcca

SEQ ID NO: 148919 - DNA, 25 bp, Probe Sequence
actgatgagtatctaggatgccatg

SEQ ID NO: 148920 - DNA, 25 bp, Probe Sequence
actgtggatcatcatcctagccatc

SEQ ID NO: 148921 - DNA, 25 bp, Probe Sequence
actgctggtttaacaatgcatgcat

SEQ ID NO: 148922 - DNA, 25 bp, Probe Sequence
actgtgacttctaatttgtgtaaat

SEQ ID NO: 148923 - DNA, 25 bp, Probe Sequence
actggagtatccaacttgtgcaaaa

SEQ ID NO: 148924 - DNA, 25 bp, Probe Sequence
actcggtgatcatagttgataagaa

SEQ ID NO: 148925 - DNA, 25 bp, Probe Sequence
actgacttgagaccagttgaataaa

SEQ ID NO: 148926 - DNA, 25 bp, Probe Sequence
actgactctgggcagcattggtgat

SEQ ID NO: 148927 - DNA, 25 bp, Probe Sequence
actgagactggaaatgcatgttgct

SEQ ID NO: 148928 - DNA, 25 bp, Probe Sequence
actgtgactggcagctcatttttgg

SEQ ID NO: 148929 - DNA, 25 bp, Probe Sequence
actgggctggaagatattcctgagt

SEQ ID NO: 148930 - DNA, 25 bp, Probe Sequence
actgtggttaatattgagccaagtt

SEQ ID NO: 148931 - DNA, 25 bp, Probe Sequence
actgggcagtagtatttacgtggtt

SEQ ID NO: 148932 - DNA, 25 bp, Probe Sequence
actgggaggcttatctcactgagtg

SEQ ID NO: 148933 - DNA, 25 bp, Probe Sequence
actgggctggctgtatgatcatcgt

SEQ ID NO: 148934 - DNA, 25 bp, Probe Sequence
actggttgcacttatgatttcatgt

SEQ ID NO: 148935 - DNA, 25 bp, Probe Sequence
actgtggctcctagtgatgtggact

SEQ ID NO: 148936 - DNA, 25 bp, Probe Sequence
actgggccatctatgttggcgatgg

SEQ ID NO: 148937 - DNA, 25 bp, Probe Sequence
actgggccatgctgtttgccagtgg

SEQ ID NO: 148938 - DNA, 25 bp, Probe Sequence
actgggcttccgttacaagatgagg

SEQ ID NO: 148939 - DNA, 25 bp, Probe Sequence
actggacttctggactacatataga

SEQ ID NO: 148940 - DNA, 25 bp, Probe Sequence
actggaccctgatgagaagatagca

SEQ ID NO: 148941 - DNA, 25 bp, Probe Sequence
actgaacctctatacatgcaacgac

SEQ ID NO: 148942 - DNA, 25 bp, Probe Sequence
actgacaggttttacagactggaaa

SEQ ID NO: 148943 - DNA, 25 bp, Probe Sequence
actgcaagtgtagagaaggcttctg

SEQ ID NO: 148944 - DNA, 25 bp, Probe Sequence
actgaatgttactgaggatgctttg

SEQ ID NO: 148945 - DNA, 25 bp, Probe Sequence
actgaaggagccccgagatgtggtc

SEQ ID NO: 148946 - DNA, 25 bp, Probe Sequence
actgtaggactctttgagcatgcta

SEQ ID NO: 148947 - DNA, 25 bp, Probe Sequence
actgtatgggcaagttgcagctgct

SEQ ID NO: 148948 - DNA, 25 bp, Probe Sequence
actgtggggactatgagctcttcgt

SEQ ID NO: 148949 - DNA, 25 bp, Probe Sequence
actggaggggctctagtgctaaata

SEQ ID NO: 148950 - DNA, 25 bp, Probe Sequence
actgaggtggttctttctatcctag

SEQ ID NO: 148951 - DNA, 25 bp, Probe Sequence
actggtttgtgtctttgctatgctt

SEQ ID NO: 148952 - DNA, 25 bp, Probe Sequence
actgtgtttgatgtcctttattgat

SEQ ID NO: 148953 - DNA, 25 bp, Probe Sequence
actgcatttataggaccttctggtg

SEQ ID NO: 148954 - DNA, 25 bp, Probe Sequence
actgcttgcttagccctagtcaaga

SEQ ID NO: 148955 - DNA, 25 bp, Probe Sequence
actgttgtatacgcttattgagaaa

SEQ ID NO: 148956 - DNA, 25 bp, Probe Sequence
actgttttacttatgagcagataca

SEQ ID NO: 148957 - DNA, 25 bp, Probe Sequence
actgattttactacagggagacaga

SEQ ID NO: 148958 - DNA, 25 bp, Probe Sequence
actgtttctgcaatggcgaggtaca

SEQ ID NO: 148959 - DNA, 25 bp, Probe Sequence
actgtgggatgccgaggagggcaga

SEQ ID NO: 148960 - DNA, 25 bp, Probe Sequence
actggagggcacaaggatggaagca

SEQ ID NO: 148961 - DNA, 25 bp, Probe Sequence
actggtggagcagtcaagagccaag

SEQ ID NO: 148962 - DNA, 25 bp, Probe Sequence
actgcttggacactacattccaagc

SEQ ID NO: 148963 - DNA, 25 bp, Probe Sequence
actgctgtggatcttcacttgtagc

SEQ ID NO: 148964 - DNA, 25 bp, Probe Sequence
actgtgtggtgctattcattcctcc

SEQ ID NO: 148965 - DNA, 25 bp, Probe Sequence
actgtgctggctccagtgggattcc

SEQ ID NO: 148966 - DNA, 25 bp, Probe Sequence
actgatgtccttttggtgctcatcc

SEQ ID NO: 148967 - DNA, 25 bp, Probe Sequence
actggtcctggaatcagagactcct

SEQ ID NO: 148968 - DNA, 25 bp, Probe Sequence
actgtgctcctaaaggcagcaacca

SEQ ID NO: 148969 - DNA, 25 bp, Probe Sequence
actgtctgcctaaaatatgcaactc

SEQ ID NO: 148970 - DNA, 25 bp, Probe Sequence
actgtatgtggaaagtgtcaattgc

SEQ ID NO: 148971 - DNA, 25 bp, Probe Sequence
actgtggtgtgaaagtgtcatcttc

SEQ ID NO: 148972 - DNA, 25 bp, Probe Sequence
actgtgctttgtgtctgaatttctc

SEQ ID NO: 148973 - DNA, 25 bp, Probe Sequence
actgtgcttattttgtttcaatctc

SEQ ID NO: 148974 - DNA, 25 bp, Probe Sequence
actgtctcttactgtctgttgacct

SEQ ID NO: 148975 - DNA, 25 bp, Probe Sequence
actgctactgtcatagcctgttctc

SEQ ID NO: 148976 - DNA, 25 bp, Probe Sequence
actgcagcatttacaagaagtatcc

SEQ ID NO: 148977 - DNA, 25 bp, Probe Sequence
actgctgcttctacagtggactttc

SEQ ID NO: 148978 - DNA, 25 bp, Probe Sequence
actgcagctgcaccagcaggtgcca

SEQ ID NO: 148979 - DNA, 25 bp, Probe Sequence
actgcagctgcaccagcaggtgcca

SEQ ID NO: 148980 - DNA, 25 bp, Probe Sequence
actgatatgcagtacaggaacaagg

SEQ ID NO: 148981 - DNA, 25 bp, Probe Sequence
actgattagtaaccatcatcaagat

SEQ ID NO: 148982 - DNA, 25 bp, Probe Sequence
actccttgtagactttcacgtcact

SEQ ID NO: 148983 - DNA, 25 bp, Probe Sequence
actgcgtgaggaagccttccctcaa

SEQ ID NO: 148984 - DNA, 25 bp, Probe Sequence
actgcgtgaggaagccttccctcaa

SEQ ID NO: 148985 - DNA, 25 bp, Probe Sequence
actgcgtatgcagtttttcctccaa

SEQ ID NO: 148986 - DNA, 25 bp, Probe Sequence
actgcgtatgcagtttttcctccaa

SEQ ID NO: 148987 - DNA, 25 bp, Probe Sequence
actgcagggcatatttgtcacattc

SEQ ID NO: 148988 - DNA, 25 bp, Probe Sequence
actgaggctgtcattgctgccttgc

SEQ ID NO: 148989 - DNA, 25 bp, Probe Sequence
actgaggctgtcattgctgccttgc

SEQ ID NO: 148990 - DNA, 25 bp, Probe Sequence
actgatggtgtttgtgctgtagctg

SEQ ID NO: 148991 - DNA, 25 bp, Probe Sequence
actgtgttgctgtaccttagctgtg

SEQ ID NO: 148992 - DNA, 25 bp, Probe Sequence
acttttgggcccaacacttgcagtt

SEQ ID NO: 148993 - DNA, 25 bp, Probe Sequence
actggtttggctgccaagtctgttt

SEQ ID NO: 148994 - DNA, 25 bp, Probe Sequence
actggttttctgaccacgactttgc

SEQ ID NO: 148995 - DNA, 25 bp, Probe Sequence
actggattttatacccttgtgtctg

SEQ ID NO: 148996 - DNA, 25 bp, Probe Sequence
actgttttctatagctactttattt

SEQ ID NO: 148997 - DNA, 25 bp, Probe Sequence
actgcttcatttgtctagccttaac

SEQ ID NO: 148998 - DNA, 25 bp, Probe Sequence
actgcgtgcttatgaccaacattca

SEQ ID NO: 148999 - DNA, 25 bp, Probe Sequence
actggtgaccaagctgcagaattca

SEQ ID NO: 149000 - DNA, 25 bp, Probe Sequence
actgggaacaacacagccgtccagg

SEQ ID NO: 149001 - DNA, 25 bp, Probe Sequence
actggtggaaccatgaacgctgcct

SEQ ID NO: 149002 - DNA, 25 bp, Probe Sequence
actgcgagagaagctaaacgtgttt

SEQ ID NO: 149003 - DNA, 25 bp, Probe Sequence
actcggatggagtgaagggttttca

SEQ ID NO: 149004 - DNA, 25 bp, Probe Sequence
actcggatcgcttcttaggagtatc

SEQ ID NO: 149005 - DNA, 25 bp, Probe Sequence
actgctcctagttcaaagggatatt

SEQ ID NO: 149006 - DNA, 25 bp, Probe Sequence
actgtgctgctgccttaacagggaa

SEQ ID NO: 149007 - DNA, 25 bp, Probe Sequence
actgtctctgtcataacttgtcaac

SEQ ID NO: 149008 - DNA, 25 bp, Probe Sequence
actgacacttacatacttggaccaa

SEQ ID NO: 149009 - DNA, 25 bp, Probe Sequence
actctccttacctagttatctacaa

SEQ ID NO: 149010 - DNA, 25 bp, Probe Sequence
actcccttacattatgcagcttcga

SEQ ID NO: 149011 - DNA, 25 bp, Probe Sequence
actccttaagtcgaatgtattggtg

SEQ ID NO: 149012 - DNA, 25 bp, Probe Sequence
aaacttgaagtggttgtgttgtagg

SEQ ID NO: 149013 - DNA, 25 bp, Probe Sequence
actccgaagtgtgtgggttgctaga

SEQ ID NO: 149014 - DNA, 25 bp, Probe Sequence
actcctcaaccatctgtggtatgga

SEQ ID NO: 149015 - DNA, 25 bp, Probe Sequence
actctcctaccaaggagtgtcttca

SEQ ID NO: 149016 - DNA, 25 bp, Probe Sequence
actcctctgacgaatgggtatattg

SEQ ID NO: 149017 - DNA, 25 bp, Probe Sequence
actgtcactgacctagtggagtata

SEQ ID NO: 149018 - DNA, 25 bp, Probe Sequence
actgagagctacctattggcataaa

SEQ ID NO: 149019 - DNA, 25 bp, Probe Sequence
actgagtcatgatccttgctgataa

SEQ ID NO: 149020 - DNA, 25 bp, Probe Sequence
actgatgtcatcttgagctcttcat

SEQ ID NO: 149021 - DNA, 25 bp, Probe Sequence
actgtgctagcaagcatgctctccg

SEQ ID NO: 149022 - DNA, 25 bp, Probe Sequence
actgtgcactgaactgtctgccgag

SEQ ID NO: 149023 - DNA, 25 bp, Probe Sequence
actgtcatcagaatctgtcggccaa

SEQ ID NO: 149024 - DNA, 25 bp, Probe Sequence
actgtcagatggtctgcagcgagtc

SEQ ID NO: 149025 - DNA, 25 bp, Probe Sequence
actggtgagtgactgcacagagttc

SEQ ID NO: 149026 - DNA, 25 bp, Probe Sequence
actcgtggatcagcacagagtgctc

SEQ ID NO: 149027 - DNA, 25 bp, Probe Sequence
actcctagctctgccagttgctagc

SEQ ID NO: 149028 - DNA, 25 bp, Probe Sequence
actgagctaacagttcagtttgact

SEQ ID NO: 149029 - DNA, 25 bp, Probe Sequence
actgcactaagatttggtttgccaa

SEQ ID NO: 149030 - DNA, 25 bp, Probe Sequence
actgcactaagatttggtttgccaa

SEQ ID NO: 149031 - DNA, 25 bp, Probe Sequence
actgcccaagtgaggtttggtcaca

SEQ ID NO: 149032 - DNA, 25 bp, Probe Sequence
actgcccaaggtaatttatggattc

SEQ ID NO: 149033 - DNA, 25 bp, Probe Sequence
actcccagcaggcttaccaggaagc

SEQ ID NO: 149034 - DNA, 25 bp, Probe Sequence
actcccagcaggcttaccaggaagc

SEQ ID NO: 149035 - DNA, 25 bp, Probe Sequence
actccaagctggtcattatcacggc

SEQ ID NO: 149036 - DNA, 25 bp, Probe Sequence
actcgagatgacctcatctacaccc

SEQ ID NO: 149037 - DNA, 25 bp, Probe Sequence
actacagaagcggagctcacggcac

SEQ ID NO: 149038 - DNA, 25 bp, Probe Sequence
aaagcacaagcgtaccaaacgggca

SEQ ID NO: 149039 - DNA, 25 bp, Probe Sequence
actctgcatcaactgaacgcaaatc

SEQ ID NO: 149040 - DNA, 25 bp, Probe Sequence
actgcatctcgagggatctgaccta

SEQ ID NO: 149041 - DNA, 25 bp, Probe Sequence
actgctactgacttgttgaactggc

SEQ ID NO: 149042 - DNA, 25 bp, Probe Sequence
actgcaagcggctgcttgtggggcc

SEQ ID NO: 149043 - DNA, 25 bp, Probe Sequence
actgccctgaggctaggggcggctt

SEQ ID NO: 149044 - DNA, 25 bp, Probe Sequence
actgcctggaagggacccacgagtt

SEQ ID NO: 149045 - DNA, 25 bp, Probe Sequence
actgcctgaaaggtttgtacagatg

SEQ ID NO: 149046 - DNA, 25 bp, Probe Sequence
actcctaaattgcatcagtgatcct

SEQ ID NO: 149047 - DNA, 25 bp, Probe Sequence
actcctgagataacaatccaatccc

SEQ ID NO: 149048 - DNA, 25 bp, Probe Sequence
actcccaagagcaaatccacattcc

SEQ ID NO: 149049 - DNA, 25 bp, Probe Sequence
actgccacaaagcttcacagacagc

SEQ ID NO: 149050 - DNA, 25 bp, Probe Sequence
actcgaaaattgtccaagaagccaa

SEQ ID NO: 149051 - DNA, 25 bp, Probe Sequence
actcggcacctttccgagtgcagct

SEQ ID NO: 149052 - DNA, 25 bp, Probe Sequence
actcaggccacactcttagaggtct

SEQ ID NO: 149053 - DNA, 25 bp, Probe Sequence
actgcgtccagcctctaaatggaat

SEQ ID NO: 149054 - DNA, 25 bp, Probe Sequence
actgcgcccaggacttcaataatta

SEQ ID NO: 149055 - DNA, 25 bp, Probe Sequence
actgagccagccagcattagtaatt

SEQ ID NO: 149056 - DNA, 25 bp, Probe Sequence
actgagcccattcatgtagctacag

SEQ ID NO: 149057 - DNA, 25 bp, Probe Sequence
actgagaacattgacatcactacag

SEQ ID NO: 149058 - DNA, 25 bp, Probe Sequence
actgagaaagctaagccctacattt

SEQ ID NO: 149059 - DNA, 25 bp, Probe Sequence
actgtggaatatagacccataatcg

SEQ ID NO: 149060 - DNA, 25 bp, Probe Sequence
actgtagctcataagaccctcattc

SEQ ID NO: 149061 - DNA, 25 bp, Probe Sequence
actccagcttgaatgtcatcgccat

SEQ ID NO: 149062 - DNA, 25 bp, Probe Sequence
actgtatctggaatgctttgtaata

SEQ ID NO: 149063 - DNA, 25 bp, Probe Sequence
actgttcgagatggcaaagctgagt

SEQ ID NO: 149064 - DNA, 25 bp, Probe Sequence
actgttctggggaagacgctgctcc

SEQ ID NO: 149065 - DNA, 25 bp, Probe Sequence
actgtcctgtgtgtgatgacctaac

SEQ ID NO: 149066 - DNA, 25 bp, Probe Sequence
actgtcctgtgtgtgatgacctaac

SEQ ID NO: 149067 - DNA, 25 bp, Probe Sequence
actgtcctgtgtgtgatgacctaac

SEQ ID NO: 149068 - DNA, 25 bp, Probe Sequence
actgctgcagtcaatccgataacta

SEQ ID NO: 149069 - DNA, 25 bp, Probe Sequence
actgctggccagtcccaaaatggaa

SEQ ID NO: 149070 - DNA, 25 bp, Probe Sequence
actgccacttgctgtgccaaatgga

SEQ ID NO: 149071 - DNA, 25 bp, Probe Sequence
actgccactctggacctaatagctg

SEQ ID NO: 149072 - DNA, 25 bp, Probe Sequence
actccactgctgaatcctcaatgga

SEQ ID NO: 149073 - DNA, 25 bp, Probe Sequence
actccacagtactaccagcagttta

SEQ ID NO: 149074 - DNA, 25 bp, Probe Sequence
actccagggagctacgtctgtgtgt

SEQ ID NO: 149075 - DNA, 25 bp, Probe Sequence
actccatggggccaaatctgcctga

SEQ ID NO: 149076 - DNA, 25 bp, Probe Sequence
actccatggggccaaatctgcctga

SEQ ID NO: 149077 - DNA, 25 bp, Probe Sequence
actccatcgacgccataagcatgtt

SEQ ID NO: 149078 - DNA, 25 bp, Probe Sequence
actccgcgaggtggacacggtctag

SEQ ID NO: 149079 - DNA, 25 bp, Probe Sequence
actccaggggtgccttatggtcaga

SEQ ID NO: 149080 - DNA, 25 bp, Probe Sequence
actgtcgggcttcttatgtatctac

SEQ ID NO: 149081 - DNA, 25 bp, Probe Sequence
actgttgggctttcatgtgtgtact

SEQ ID NO: 149082 - DNA, 25 bp, Probe Sequence
actgttggaattgctctgtcataat

SEQ ID NO: 149083 - DNA, 25 bp, Probe Sequence
actgtctggcagttgcctatgttta

SEQ ID NO: 149084 - DNA, 25 bp, Probe Sequence
actgtctacatctccatatgttgta

SEQ ID NO: 149085 - DNA, 25 bp, Probe Sequence
actgtaactcagtccacattttcat

SEQ ID NO: 149086 - DNA, 25 bp, Probe Sequence
actgtatttatgttgctattggtca

SEQ ID NO: 149087 - DNA, 25 bp, Probe Sequence
actgagacttcttagctttggtact

SEQ ID NO: 149088 - DNA, 25 bp, Probe Sequence
actgcagagcttttatccatatggt

SEQ ID NO: 149089 - DNA, 25 bp, Probe Sequence
actgcagtgctgtaatacacatgtt

SEQ ID NO: 149090 - DNA, 25 bp, Probe Sequence
actcgtagcgagcaacatgttaaac

SEQ ID NO: 149091 - DNA, 25 bp, Probe Sequence
actccaacgatgcctttgttctgaa

SEQ ID NO: 149092 - DNA, 25 bp, Probe Sequence
actcctcaaatggttttctggaagg

SEQ ID NO: 149093 - DNA, 25 bp, Probe Sequence
actgcttaaatgttttgtcggggca

SEQ ID NO: 149094 - DNA, 25 bp, Probe Sequence
actgcttacaatatctttaggttcc

SEQ ID NO: 149095 - DNA, 25 bp, Probe Sequence
actgccccaatttctattatgttct

SEQ ID NO: 149096 - DNA, 25 bp, Probe Sequence
actgtacccatgatctcttggtgtt

SEQ ID NO: 149097 - DNA, 25 bp, Probe Sequence
actgtttacatgacctatttgtgtg

SEQ ID NO: 149098 - DNA, 25 bp, Probe Sequence
actgtttagggccctgatttgctgg

SEQ ID NO: 149099 - DNA, 25 bp, Probe Sequence
actgattggagggccctatcttgtg

SEQ ID NO: 149100 - DNA, 25 bp, Probe Sequence
actgagataggggttcctggatgag

SEQ ID NO: 149101 - DNA, 25 bp, Probe Sequence
actaggagtgggatccaggctcctc

SEQ ID NO: 149102 - DNA, 25 bp, Probe Sequence
actcacggggatttccaagtctcca

SEQ ID NO: 149103 - DNA, 25 bp, Probe Sequence
actcacggggatttccaagtctcca

SEQ ID NO: 149104 - DNA, 25 bp, Probe Sequence
actcacggggatttccaagtctcca

SEQ ID NO: 149105 - DNA, 25 bp, Probe Sequence
actcacggggatttccaagtctcca

SEQ ID NO: 149106 - DNA, 25 bp, Probe Sequence
actcacggggatttccaagtctcca

SEQ ID NO: 149107 - DNA, 25 bp, Probe Sequence
actcacggggatttccaagtctcca

SEQ ID NO: 149108 - DNA, 25 bp, Probe Sequence
actcacggggatttccaagtctcca

SEQ ID NO: 149109 - DNA, 25 bp, Probe Sequence
actcacggggatttccaagtctcca

SEQ ID NO: 149110 - DNA, 25 bp, Probe Sequence
actcacggggatttccaagtctcca

SEQ ID NO: 149111 - DNA, 25 bp, Probe Sequence
actcacggggatttccaagtctcca

SEQ ID NO: 149112 - DNA, 25 bp, Probe Sequence
actcacggggatttccaagtctcca

SEQ ID NO: 149113 - DNA, 25 bp, Probe Sequence
actcacggggatttccaagtctcca

SEQ ID NO: 149114 - DNA, 25 bp, Probe Sequence
actcacggggatttccaagtctcca

SEQ ID NO: 149115 - DNA, 25 bp, Probe Sequence
actcacggggatttccaagtctcca

SEQ ID NO: 149116 - DNA, 25 bp, Probe Sequence
actcacggggatttccaagtctcca

SEQ ID NO: 149117 - DNA, 25 bp, Probe Sequence
actcacggggatttccaagtctcca

SEQ ID NO: 149118 - DNA, 25 bp, Probe Sequence
actcacggggatttccaagtctcca

SEQ ID NO: 149119 - DNA, 25 bp, Probe Sequence
actcacggggatttccaagtctcca

SEQ ID NO: 149120 - DNA, 25 bp, Probe Sequence
actcacggggatttccaagtctcca

SEQ ID NO: 149121 - DNA, 25 bp, Probe Sequence
actcacggggatttccaagtctcca

SEQ ID NO: 149122 - DNA, 25 bp, Probe Sequence
actcacggggatttccaagtctcca

SEQ ID NO: 149123 - DNA, 25 bp, Probe Sequence
actcacggggatttccaagtctcca

SEQ ID NO: 149124 - DNA, 25 bp, Probe Sequence
actcacggggatttccaagtctcca

SEQ ID NO: 149125 - DNA, 25 bp, Probe Sequence
actcacggggatttccaagtctcca

SEQ ID NO: 149126 - DNA, 25 bp, Probe Sequence
actcacggggatttccaagtctcca

SEQ ID NO: 149127 - DNA, 25 bp, Probe Sequence
actcacggggatttccaagtctcca

SEQ ID NO: 149128 - DNA, 25 bp, Probe Sequence
actcacggggatttccaagtctcca

SEQ ID NO: 149129 - DNA, 25 bp, Probe Sequence
actcacggggatttccaagtctcca

SEQ ID NO: 149130 - DNA, 25 bp, Probe Sequence
actcacggggatttccaagtctcca

SEQ ID NO: 149131 - DNA, 25 bp, Probe Sequence
actcacggggatttccaagtctcca

SEQ ID NO: 149132 - DNA, 25 bp, Probe Sequence
actcacggggatttccaagtctcca

SEQ ID NO: 149133 - DNA, 25 bp, Probe Sequence
actcacggggatttccaagtctcca

SEQ ID NO: 149134 - DNA, 25 bp, Probe Sequence
actcacggggatttccaagtctcca

SEQ ID NO: 149135 - DNA, 25 bp, Probe Sequence
actcacggggatttccaagtctcca

SEQ ID NO: 149136 - DNA, 25 bp, Probe Sequence
actcacggggatttccaagtctcca

SEQ ID NO: 149137 - DNA, 25 bp, Probe Sequence
actcacggggatttccaagtctcca

SEQ ID NO: 149138 - DNA, 25 bp, Probe Sequence
actcacggggatttccaagtctcca

SEQ ID NO: 149139 - DNA, 25 bp, Probe Sequence
actcacggggatttccaagtctcca

SEQ ID NO: 149140 - DNA, 25 bp, Probe Sequence
actcacggggatttccaagtctcca

SEQ ID NO: 149141 - DNA, 25 bp, Probe Sequence
actcacggggatttccaagtctcca

SEQ ID NO: 149142 - DNA, 25 bp, Probe Sequence
actcacggggatttccaagtctcca

SEQ ID NO: 149143 - DNA, 25 bp, Probe Sequence
actcacggggatttccaagtctcca

SEQ ID NO: 149144 - DNA, 25 bp, Probe Sequence
actcacggggatttccaagtctcca

SEQ ID NO: 149145 - DNA, 25 bp, Probe Sequence
actcacggggatttccaagtctcca

SEQ ID NO: 149146 - DNA, 25 bp, Probe Sequence
actcacggggatttccaagtctcca

SEQ ID NO: 149147 - DNA, 25 bp, Probe Sequence
actcacggggatttccaagtctcca

SEQ ID NO: 149148 - DNA, 25 bp, Probe Sequence
actcacggggatttccaagtctcca

SEQ ID NO: 149149 - DNA, 25 bp, Probe Sequence
actcacggggatttccaagtctcca

SEQ ID NO: 149150 - DNA, 25 bp, Probe Sequence
actcacggggatttccaagtctcca

SEQ ID NO: 149151 - DNA, 25 bp, Probe Sequence
actcacggggatttccaagtctcca

SEQ ID NO: 149152 - DNA, 25 bp, Probe Sequence
actcacggggatttccaagtctcca

SEQ ID NO: 149153 - DNA, 25 bp, Probe Sequence
actcacggggatttccaagtctcca

SEQ ID NO: 149154 - DNA, 25 bp, Probe Sequence
actcacggggatttccaagtctcca

SEQ ID NO: 149155 - DNA, 25 bp, Probe Sequence
actcacggggatttccaagtctcca

SEQ ID NO: 149156 - DNA, 25 bp, Probe Sequence
actcacggggatttccaagtctcca

SEQ ID NO: 149157 - DNA, 25 bp, Probe Sequence
actcacggggatttccaagtctcca

SEQ ID NO: 149158 - DNA, 25 bp, Probe Sequence
actcacggggatttccaagtctcca

SEQ ID NO: 149159 - DNA, 25 bp, Probe Sequence
actcacggggatttccaagtctcca

SEQ ID NO: 149160 - DNA, 25 bp, Probe Sequence
actcacggggatttccaagtctcca

SEQ ID NO: 149161 - DNA, 25 bp, Probe Sequence
actcacggggatttccaagtctcca

SEQ ID NO: 149162 - DNA, 25 bp, Probe Sequence
actcacggggatttccaagtctcca

SEQ ID NO: 149163 - DNA, 25 bp, Probe Sequence
actcacggggatttccaagtctcca

SEQ ID NO: 149164 - DNA, 25 bp, Probe Sequence
actcacggggatttccaagtctcca

SEQ ID NO: 149165 - DNA, 25 bp, Probe Sequence
actcacggggatttccaagtctcca

SEQ ID NO: 149166 - DNA, 25 bp, Probe Sequence
actcacggggatttccaagtctcca

SEQ ID NO: 149167 - DNA, 25 bp, Probe Sequence
actcacggggatttccaagtctcca

SEQ ID NO: 149168 - DNA, 25 bp, Probe Sequence
actcacggggatttccaagtctcca

SEQ ID NO: 149169 - DNA, 25 bp, Probe Sequence
actcacggggatttccaagtctcca

SEQ ID NO: 149170 - DNA, 25 bp, Probe Sequence
actcacggggatttccaagtctcca

SEQ ID NO: 149171 - DNA, 25 bp, Probe Sequence
actcacggggatttccaagtctcca

SEQ ID NO: 149172 - DNA, 25 bp, Probe Sequence
actcacggggatttccaagtctcca

SEQ ID NO: 149173 - DNA, 25 bp, Probe Sequence
actcacggggatttccaagtctcca

SEQ ID NO: 149174 - DNA, 25 bp, Probe Sequence
actgcatctggcctataatgcccgt

SEQ ID NO: 149175 - DNA, 25 bp, Probe Sequence
actgctcggaaatatgcccacttgg

SEQ ID NO: 149176 - DNA, 25 bp, Probe Sequence
actgccaatacaaaagcccactgat

SEQ ID NO: 149177 - DNA, 25 bp, Probe Sequence
actgtcctccagaataccaagtatt

SEQ ID NO: 149178 - DNA, 25 bp, Probe Sequence
actgtcctcgaaaagacacagctgg

SEQ ID NO: 149179 - DNA, 25 bp, Probe Sequence
actgtcacacgcatagatccacgag

SEQ ID NO: 149180 - DNA, 25 bp, Probe Sequence
actgccaagcgtacagactgatcca

SEQ ID NO: 149181 - DNA, 25 bp, Probe Sequence
actgctcacagaacggatcatgtcc

SEQ ID NO: 149182 - DNA, 25 bp, Probe Sequence
actgtcactgcaaccatgaatgggc

SEQ ID NO: 149183 - DNA, 25 bp, Probe Sequence
actgtcagtcattctcatagggtga

SEQ ID NO: 149184 - DNA, 25 bp, Probe Sequence
actgctcaggccatcaagggtatgc

SEQ ID NO: 149185 - DNA, 25 bp, Probe Sequence
actccaggccctgggatgtgggctt

SEQ ID NO: 149186 - DNA, 25 bp, Probe Sequence
actcgcacctcctgggtgctgtagt

SEQ ID NO: 149187 - DNA, 25 bp, Probe Sequence
actccatgctcccggaaatcgagag

SEQ ID NO: 149188 - DNA, 25 bp, Probe Sequence
actcaaaaatgctgacaatccagag

SEQ ID NO: 149189 - DNA, 25 bp, Probe Sequence
actacattagtacacagcaccagaa

SEQ ID NO: 149190 - DNA, 25 bp, Probe Sequence
actcaaggataacacggcgatgaac

SEQ ID NO: 149191 - DNA, 25 bp, Probe Sequence
actcaagaccaagaccggatcccag

SEQ ID NO: 149192 - DNA, 25 bp, Probe Sequence
actaagacacaaataacctttgcaa

SEQ ID NO: 149193 - DNA, 25 bp, Probe Sequence
actaagacacaaataacctttgcaa

SEQ ID NO: 149194 - DNA, 25 bp, Probe Sequence
actctcacccaaatttccatttaga

SEQ ID NO: 149195 - DNA, 25 bp, Probe Sequence
actctgcaaccagtgttgcctgcct

SEQ ID NO: 149196 - DNA, 25 bp, Probe Sequence
actgctggaaagtatgtgtctgcgt

SEQ ID NO: 149197 - DNA, 25 bp, Probe Sequence
actgctgaaaagttaggtggatcct

SEQ ID NO: 149198 - DNA, 25 bp, Probe Sequence
actctggtaacttcagggagtcctg

SEQ ID NO: 149199 - DNA, 25 bp, Probe Sequence
acattctcgacctgcaggtagtcct

SEQ ID NO: 149200 - DNA, 25 bp, Probe Sequence
actgttcacactgagcaagagagtc

SEQ ID NO: 149201 - DNA, 25 bp, Probe Sequence
actgtcaacccaacacaggcatgct

SEQ ID NO: 149202 - DNA, 25 bp, Probe Sequence
actgaagacccaaccgagacaattt

SEQ ID NO: 149203 - DNA, 25 bp, Probe Sequence
actgttgacccttgtggaagatatg

SEQ ID NO: 149204 - DNA, 25 bp, Probe Sequence
actgtcatgaccagtgtttcagtca

SEQ ID NO: 149205 - DNA, 25 bp, Probe Sequence
actgttggccatgtcttcatcagtg

SEQ ID NO: 149206 - DNA, 25 bp, Probe Sequence
actgttgactctgcatatttatttt

SEQ ID NO: 149207 - DNA, 25 bp, Probe Sequence
actgttggctcgatatttgaatatt

SEQ ID NO: 149208 - DNA, 25 bp, Probe Sequence
actgctggacccgtatctatgcaaa

SEQ ID NO: 149209 - DNA, 25 bp, Probe Sequence
acagggcccaccaatcgagaaagcc

SEQ ID NO: 149210 - DNA, 25 bp, Probe Sequence
acagtggccctagttagcaaagtgg

SEQ ID NO: 149211 - DNA, 25 bp, Probe Sequence
actgatgggctcacatatacgaatg

SEQ ID NO: 149212 - DNA, 25 bp, Probe Sequence
actgagggctcctatgagtgccgag

SEQ ID NO: 149213 - DNA, 25 bp, Probe Sequence
actcggcgctcggtggatggaagcc

SEQ ID NO: 149214 - DNA, 25 bp, Probe Sequence
actgcaggagtccgtcagcaagaag

SEQ ID NO: 149215 - DNA, 25 bp, Probe Sequence
actgcatgcagagtccagaccagaa

SEQ ID NO: 149216 - DNA, 25 bp, Probe Sequence
actcatgaagcccaggacgattcag

SEQ ID NO: 149217 - DNA, 25 bp, Probe Sequence
actgacaagcagcctgggcgtacgg

SEQ ID NO: 149218 - DNA, 25 bp, Probe Sequence
actgcactgcaatctgggttacgga

SEQ ID NO: 149219 - DNA, 25 bp, Probe Sequence
actcctgaatacatggcggaaggaa

SEQ ID NO: 149220 - DNA, 25 bp, Probe Sequence
actcctgttacttacctaaacagat

SEQ ID NO: 149221 - DNA, 25 bp, Probe Sequence
actgttctgctaaatgacctaaaaa

SEQ ID NO: 149222 - DNA, 25 bp, Probe Sequence
actgactgactaaatgacacccaaa

SEQ ID NO: 149223 - DNA, 25 bp, Probe Sequence
actgactcacagtgtgacctgcaaa

SEQ ID NO: 149224 - DNA, 25 bp, Probe Sequence
actgcctccagctgtactatgtaaa

SEQ ID NO: 149225 - DNA, 25 bp, Probe Sequence
actccaccacccactatatgagaac

SEQ ID NO: 149226 - DNA, 25 bp, Probe Sequence
actaccgcctccacttggagggcta

SEQ ID NO: 149227 - DNA, 25 bp, Probe Sequence
actactccccatatctaacaacgta

SEQ ID NO: 149228 - DNA, 25 bp, Probe Sequence
actcctgtcccatagataaacacct

SEQ ID NO: 149229 - DNA, 25 bp, Probe Sequence
actgccctatccaaaaagacaagac

SEQ ID NO: 149230 - DNA, 25 bp, Probe Sequence
actgccggtcccagaagaacgacga

SEQ ID NO: 149231 - DNA, 25 bp, Probe Sequence
actccggtccagatggcaggcaaga

SEQ ID NO: 149232 - DNA, 25 bp, Probe Sequence
actctgggtcccaggaggagggata

SEQ ID NO: 149233 - DNA, 25 bp, Probe Sequence
actcagggacccagcactgggctgg

SEQ ID NO: 149234 - DNA, 25 bp, Probe Sequence
actctggtcagagatacctggcctg

SEQ ID NO: 149235 - DNA, 25 bp, Probe Sequence
actatggccatgtgtacgcggtgtt

SEQ ID NO: 149236 - DNA, 25 bp, Probe Sequence
actatggccatgtgtacgcggtgtt

SEQ ID NO: 149237 - DNA, 25 bp, Probe Sequence
actgaaccagtagtccagggtggct

SEQ ID NO: 149238 - DNA, 25 bp, Probe Sequence
actgacctggtgttcacggtgttgc

SEQ ID NO: 149239 - DNA, 25 bp, Probe Sequence
actgcaatctgggttacggagtgag

SEQ ID NO: 149240 - DNA, 25 bp, Probe Sequence
actgcatatggtgtggacttcctgg

SEQ ID NO: 149241 - DNA, 25 bp, Probe Sequence
actgactggtcttaagctgttcttg

SEQ ID NO: 149242 - DNA, 25 bp, Probe Sequence
actgacagatgttaaagctttctgg

SEQ ID NO: 149243 - DNA, 25 bp, Probe Sequence
acagaccgtgtctcagtaactggcc

SEQ ID NO: 149244 - DNA, 25 bp, Probe Sequence
actgagccggtgtacatctaaataa

SEQ ID NO: 149245 - DNA, 25 bp, Probe Sequence
actgagactggtcccctcaaaaggt

SEQ ID NO: 149246 - DNA, 25 bp, Probe Sequence
actgaacgggccattgaacaagtat

SEQ ID NO: 149247 - DNA, 25 bp, Probe Sequence
actgataagttcgtctttcaaagta

SEQ ID NO: 149248 - DNA, 25 bp, Probe Sequence
actgtattgttctagaaatatgctt

SEQ ID NO: 149249 - DNA, 25 bp, Probe Sequence
actgtttttaagtcagtgattttag

SEQ ID NO: 149250 - DNA, 25 bp, Probe Sequence
actgttttgtaaatgctagtagttt

SEQ ID NO: 149251 - DNA, 25 bp, Probe Sequence
actgtttttactaattgtatgcttc

SEQ ID NO: 149252 - DNA, 25 bp, Probe Sequence
actgtattgttttatttgtattatg

SEQ ID NO: 149253 - DNA, 25 bp, Probe Sequence
actaagtttttatggcttttgtgca

SEQ ID NO: 149254 - DNA, 25 bp, Probe Sequence
actaggccttttaatcctatcaggt

SEQ ID NO: 149255 - DNA, 25 bp, Probe Sequence
acttcaggcttgataatacttaggt

SEQ ID NO: 149256 - DNA, 25 bp, Probe Sequence
actccagacttgattaaatgtcctt

SEQ ID NO: 149257 - DNA, 25 bp, Probe Sequence
actcgagaccttttcaacttggctt

SEQ ID NO: 149258 - DNA, 25 bp, Probe Sequence
actagacacccttgaagatttggcc

SEQ ID NO: 149259 - DNA, 25 bp, Probe Sequence
actgcgtccccatgggagtacagac

SEQ ID NO: 149260 - DNA, 25 bp, Probe Sequence
actgcttggccctggctgatgataa

SEQ ID NO: 149261 - DNA, 25 bp, Probe Sequence
actcatcaggccctcgactgaaaag

SEQ ID NO: 149262 - DNA, 25 bp, Probe Sequence
actgctctgggcctcaaggcaatga

SEQ ID NO: 149263 - DNA, 25 bp, Probe Sequence
actgctctgggcctcaaggcaatga

SEQ ID NO: 149264 - DNA, 25 bp, Probe Sequence
actgctctgggcctcaaggcaatga

SEQ ID NO: 149265 - DNA, 25 bp, Probe Sequence
actgccgagcaattccaggaagagc

SEQ ID NO: 149266 - DNA, 25 bp, Probe Sequence
actgctccatatttgccagtggagg

SEQ ID NO: 149267 - DNA, 25 bp, Probe Sequence
actgcgcagatatttccgtgggtta

SEQ ID NO: 149268 - DNA, 25 bp, Probe Sequence
actgctcattaatcctgggagtctt

SEQ ID NO: 149269 - DNA, 25 bp, Probe Sequence
actgctttgagatcacgctggaact

SEQ ID NO: 149270 - DNA, 25 bp, Probe Sequence
actgcgtatgtcctaagctggagtt

SEQ ID NO: 149271 - DNA, 25 bp, Probe Sequence
actgcagtagttgactttgctgtat

SEQ ID NO: 149272 - DNA, 25 bp, Probe Sequence
actgcgacgttcgatcttgcatgga

SEQ ID NO: 149273 - DNA, 25 bp, Probe Sequence
actgagagctgctcctttgggggaa

SEQ ID NO: 149274 - DNA, 25 bp, Probe Sequence
actgatgcttgctggatttagggag

SEQ ID NO: 149275 - DNA, 25 bp, Probe Sequence
acagagcttcgggagttcaggccag

SEQ ID NO: 149276 - DNA, 25 bp, Probe Sequence
acagagctcttttagtgaacgtcag

SEQ ID NO: 149277 - DNA, 25 bp, Probe Sequence
actgccttgtgttcagtgaacccaa

SEQ ID NO: 149278 - DNA, 25 bp, Probe Sequence
actctgtagtcttcagtgctaccgc

SEQ ID NO: 149279 - DNA, 25 bp, Probe Sequence
actcttcgcagtcaggtaagcaggt

SEQ ID NO: 149280 - DNA, 25 bp, Probe Sequence
actccccacgaatgtgaagaggcct

SEQ ID NO: 149281 - DNA, 25 bp, Probe Sequence
actcccgcctgggcaaaagagcgag

SEQ ID NO: 149282 - DNA, 25 bp, Probe Sequence
actaaccaagctgcgaaaatggagt

SEQ ID NO: 149283 - DNA, 25 bp, Probe Sequence
actgaatgcctacaggacaaagtga

SEQ ID NO: 149284 - DNA, 25 bp, Probe Sequence
actgaagagcaatagccacttgagt

SEQ ID NO: 149285 - DNA, 25 bp, Probe Sequence
actgaagtaatgtcctatgttgagc

SEQ ID NO: 149286 - DNA, 25 bp, Probe Sequence
actgaagccttgacgctgtgggcac

SEQ ID NO: 149287 - DNA, 25 bp, Probe Sequence
actgaatacttactatgtatcaggc

SEQ ID NO: 149288 - DNA, 25 bp, Probe Sequence
actgaatatgtgcttagaactgcca

SEQ ID NO: 149289 - DNA, 25 bp, Probe Sequence
actgaatcatagcttctacctcagc

SEQ ID NO: 149290 - DNA, 25 bp, Probe Sequence
actaatcaacgcccataatcatacc

SEQ ID NO: 149291 - DNA, 25 bp, Probe Sequence
actgataccagccgctgcaaaatca

SEQ ID NO: 149292 - DNA, 25 bp, Probe Sequence
actgcaagtcggtcgaggagatctc

SEQ ID NO: 149293 - DNA, 25 bp, Probe Sequence
actcaaaccacttagcgatgacccc

SEQ ID NO: 149294 - DNA, 25 bp, Probe Sequence
actcgaataccttgacttgagcttc

SEQ ID NO: 149295 - DNA, 25 bp, Probe Sequence
actgctacactgctctgtttggtgt

SEQ ID NO: 149296 - DNA, 25 bp, Probe Sequence
actgctcaccctcttctgtgagcag

SEQ ID NO: 149297 - DNA, 25 bp, Probe Sequence
actgttcacctgcatctttcagcag

SEQ ID NO: 149298 - DNA, 25 bp, Probe Sequence
actgaaggcctgcatggattccatg

SEQ ID NO: 149299 - DNA, 25 bp, Probe Sequence
actgcacggccaccatgaagtctgg

SEQ ID NO: 149300 - DNA, 25 bp, Probe Sequence
actgaatgaacatatgagagctcat

SEQ ID NO: 149301 - DNA, 25 bp, Probe Sequence
actgatttgtattctgtgagcatgt

SEQ ID NO: 149302 - DNA, 25 bp, Probe Sequence
actgcttattcattctggacactgc

SEQ ID NO: 149303 - DNA, 25 bp, Probe Sequence
actgcatgtatgggtgggcacctcc

SEQ ID NO: 149304 - DNA, 25 bp, Probe Sequence
actgaatgtggattcaggcaccatc

SEQ ID NO: 149305 - DNA, 25 bp, Probe Sequence
actgaagtggccgggcccagacatg

SEQ ID NO: 149306 - DNA, 25 bp, Probe Sequence
actgagagccgtcaggcctgtaatc

SEQ ID NO: 149307 - DNA, 25 bp, Probe Sequence
actgcagagttacaggatcgtgaac

SEQ ID NO: 149308 - DNA, 25 bp, Probe Sequence
actgcagagttattccgatagtact

SEQ ID NO: 149309 - DNA, 25 bp, Probe Sequence
actgcagcgttggaacgtgagcctc

SEQ ID NO: 149310 - DNA, 25 bp, Probe Sequence
actgctgcggcagaaggctgaggcc

SEQ ID NO: 149311 - DNA, 25 bp, Probe Sequence
actgctgcatggataacatgctgac

SEQ ID NO: 149312 - DNA, 25 bp, Probe Sequence
actgctcagcagataaccaaggtgc

SEQ ID NO: 149313 - DNA, 25 bp, Probe Sequence
actgccaacatgagaccaaagtgtg

SEQ ID NO: 149314 - DNA, 25 bp, Probe Sequence
actgcagcaaatctctccttagttg

SEQ ID NO: 149315 - DNA, 25 bp, Probe Sequence
actgaaacagcattctacttcttgt

SEQ ID NO: 149316 - DNA, 25 bp, Probe Sequence
actgcagaaccatttcttatccttc

SEQ ID NO: 149317 - DNA, 25 bp, Probe Sequence
actgaaaccattattacaatgatct

SEQ ID NO: 149318 - DNA, 25 bp, Probe Sequence
actgaacaagctctgttaagacctc

SEQ ID NO: 149319 - DNA, 25 bp, Probe Sequence
actgaccaacatatctcatgaatat

SEQ ID NO: 149320 - DNA, 25 bp, Probe Sequence
actgatttcatcaagttcgacactg

SEQ ID NO: 149321 - DNA, 25 bp, Probe Sequence
actgatttcatcaagttcgacactg

SEQ ID NO: 149322 - DNA, 25 bp, Probe Sequence
actgatatatttgctctctacaccc

SEQ ID NO: 149323 - DNA, 25 bp, Probe Sequence
actgatttctatggctttcaaagct

SEQ ID NO: 149324 - DNA, 25 bp, Probe Sequence
actgcttttgcccatataaaatgct

SEQ ID NO: 149325 - DNA, 25 bp, Probe Sequence
actccttttcctgcaagagatgatg

SEQ ID NO: 149326 - DNA, 25 bp, Probe Sequence
actccataatgttctccatagtggc

SEQ ID NO: 149327 - DNA, 25 bp, Probe Sequence
actgcacgaatgacactagcaagtt

SEQ ID NO: 149328 - DNA, 25 bp, Probe Sequence
actgccgtcagccattgatgatcgt

SEQ ID NO: 149329 - DNA, 25 bp, Probe Sequence
actgacgtagactgtgtctatatga

SEQ ID NO: 149330 - DNA, 25 bp, Probe Sequence
actgaagataactggtgctggatag

SEQ ID NO: 149331 - DNA, 25 bp, Probe Sequence
actgccagtcgaggcctggctggag

SEQ ID NO: 149332 - DNA, 25 bp, Probe Sequence
actgccagtgcaagctggtggtcga

SEQ ID NO: 149333 - DNA, 25 bp, Probe Sequence
actgaactgcaactgtggcagatgg

SEQ ID NO: 149334 - DNA, 25 bp, Probe Sequence
actgaactctgggtgccgagagatg

SEQ ID NO: 149335 - DNA, 25 bp, Probe Sequence
actgcaggcctgggatacggatcat

SEQ ID NO: 149336 - DNA, 25 bp, Probe Sequence
actgagtgactggagacagggatga

SEQ ID NO: 149337 - DNA, 25 bp, Probe Sequence
actgcggccgggaggctatgagcga

SEQ ID NO: 149338 - DNA, 25 bp, Probe Sequence
actcggcacggttgcagtggaaaga

SEQ ID NO: 149339 - DNA, 25 bp, Probe Sequence
actcgagaggctgagagaggagaat

SEQ ID NO: 149340 - DNA, 25 bp, Probe Sequence
actgcctgggctggaggaggagctg

SEQ ID NO: 149341 - DNA, 25 bp, Probe Sequence
actgcctgggctggaggaggagctg

SEQ ID NO: 149342 - DNA, 25 bp, Probe Sequence
actgctcttggtgaaggtatgtggg

SEQ ID NO: 149343 - DNA, 25 bp, Probe Sequence
actccctgctggtcaaagtcattgc

SEQ ID NO: 149344 - DNA, 25 bp, Probe Sequence
actgcccctcgaagaattttgcaaa

SEQ ID NO: 149345 - DNA, 25 bp, Probe Sequence
actccagcatctattgtattttaaa

SEQ ID NO: 149346 - DNA, 25 bp, Probe Sequence
actctacgtttggttttcacataca

SEQ ID NO: 149347 - DNA, 25 bp, Probe Sequence
actgcatatcttctggtttacatga

SEQ ID NO: 149348 - DNA, 25 bp, Probe Sequence
actgctccattcctagtcttaatta

SEQ ID NO: 149349 - DNA, 25 bp, Probe Sequence
actctactttgggtcccagatgtag

SEQ ID NO: 149350 - DNA, 25 bp, Probe Sequence
actcaagctctgaggtccacagact

SEQ ID NO: 149351 - DNA, 25 bp, Probe Sequence
actgcagacttcattagcacacaga

SEQ ID NO: 149352 - DNA, 25 bp, Probe Sequence
actgatgatttcaagctaaagcaaa

SEQ ID NO: 149353 - DNA, 25 bp, Probe Sequence
actgatgttcctagtgaaagaggca

SEQ ID NO: 149354 - DNA, 25 bp, Probe Sequence
actgcattttctggaaggacaccga

SEQ ID NO: 149355 - DNA, 25 bp, Probe Sequence
actgcagtgtttcatacgaaccatc

SEQ ID NO: 149356 - DNA, 25 bp, Probe Sequence
actgcagtccttcaaagatgaccac

SEQ ID NO: 149357 - DNA, 25 bp, Probe Sequence
acagcattccaataaagcatacggg

SEQ ID NO: 149358 - DNA, 25 bp, Probe Sequence
actcttctaaaatatctaccagcaa

SEQ ID NO: 149359 - DNA, 25 bp, Probe Sequence
actctttaagacaaattcccatcca

SEQ ID NO: 149360 - DNA, 25 bp, Probe Sequence
actgcatttgcataaaaactactct

SEQ ID NO: 149361 - DNA, 25 bp, Probe Sequence
actgctacatgacaaaaaccacacc

SEQ ID NO: 149362 - DNA, 25 bp, Probe Sequence
actctacaaccggagaactacaaga

SEQ ID NO: 149363 - DNA, 25 bp, Probe Sequence
actgctagccagacttaataaaaaa

SEQ ID NO: 149364 - DNA, 25 bp, Probe Sequence
actgcttccggtgctaaaatgaaca

SEQ ID NO: 149365 - DNA, 25 bp, Probe Sequence
actgcttgcaagcttctgttactag

SEQ ID NO: 149366 - DNA, 25 bp, Probe Sequence
actgctgtacgtccttggctacaga

SEQ ID NO: 149367 - DNA, 25 bp, Probe Sequence
actcagcaaagtctggcgtgatcaa

SEQ ID NO: 149368 - DNA, 25 bp, Probe Sequence
actccaaagtccatggattcaatgg

SEQ ID NO: 149369 - DNA, 25 bp, Probe Sequence
actgccaaatgaccttggaccattc

SEQ ID NO: 149370 - DNA, 25 bp, Probe Sequence
actgccaataacattcttcgatctc

SEQ ID NO: 149371 - DNA, 25 bp, Probe Sequence
actgagctataacttacttctgtat

SEQ ID NO: 149372 - DNA, 25 bp, Probe Sequence
actgagtataatgttctcacagttc

SEQ ID NO: 149373 - DNA, 25 bp, Probe Sequence
actgcagcttggagtctctctaggt

SEQ ID NO: 149374 - DNA, 25 bp, Probe Sequence
actgcagcttggagtctctctaggt

SEQ ID NO: 149375 - DNA, 25 bp, Probe Sequence
actgcatctgattggcagtcacttc

SEQ ID NO: 149376 - DNA, 25 bp, Probe Sequence
actgactgaaggcctgcatggattc

SEQ ID NO: 149377 - DNA, 25 bp, Probe Sequence
actgcagctcagatgtctcaggcac

SEQ ID NO: 149378 - DNA, 25 bp, Probe Sequence
actgcatgaagctttctcagatggc

SEQ ID NO: 149379 - DNA, 25 bp, Probe Sequence
actgcataggaggctctcgatagca

SEQ ID NO: 149380 - DNA, 25 bp, Probe Sequence
actgcacaaagggctccatacagca

SEQ ID NO: 149381 - DNA, 25 bp, Probe Sequence
actcgagacatgggcggctacagca

SEQ ID NO: 149382 - DNA, 25 bp, Probe Sequence
actcgagacatgggcggctacagca

SEQ ID NO: 149383 - DNA, 25 bp, Probe Sequence
actctgggtgagaggctacagtgtg

SEQ ID NO: 149384 - DNA, 25 bp, Probe Sequence
actctgggtcagagagctctggtct

SEQ ID NO: 149385 - DNA, 25 bp, Probe Sequence
actctgggagcagcgactccgagtc

SEQ ID NO: 149386 - DNA, 25 bp, Probe Sequence
actctgggagcagcgactccgagtc

SEQ ID NO: 149387 - DNA, 25 bp, Probe Sequence
actctggagatcaccttcgaggtta

SEQ ID NO: 149388 - DNA, 25 bp, Probe Sequence
actctgaggcactctgttggggttt

SEQ ID NO: 149389 - DNA, 25 bp, Probe Sequence
acattgactcaatcagttgggggtc

SEQ ID NO: 149390 - DNA, 25 bp, Probe Sequence
actctatgcatagaacttctgggag

SEQ ID NO: 149391 - DNA, 25 bp, Probe Sequence
actctacaagtgaccattgccctag

SEQ ID NO: 149392 - DNA, 25 bp, Probe Sequence
actaacactggaccattggatcgat

SEQ ID NO: 149393 - DNA, 25 bp, Probe Sequence
actgaacttagacctctcaacacag

SEQ ID NO: 149394 - DNA, 25 bp, Probe Sequence
actgactcctaggcttctgaacaat

SEQ ID NO: 149395 - DNA, 25 bp, Probe Sequence
actgaattgtcaggctttgattgat

SEQ ID NO: 149396 - DNA, 25 bp, Probe Sequence
actgcagattgacatatttgaggat

SEQ ID NO: 149397 - DNA, 25 bp, Probe Sequence
actgcgcttgcaaaataagagctat

SEQ ID NO: 149398 - DNA, 25 bp, Probe Sequence
actgcagtctgaatctagacatcgc

SEQ ID NO: 149399 - DNA, 25 bp, Probe Sequence
actcagctccagactctgatactgc

SEQ ID NO: 149400 - DNA, 25 bp, Probe Sequence
actgcaggatggactcttgcacatc

SEQ ID NO: 149401 - DNA, 25 bp, Probe Sequence
actgcaggatggactcttgcacatc

SEQ ID NO: 149402 - DNA, 25 bp, Probe Sequence
actgcaggtgtgagatgtggatccc

SEQ ID NO: 149403 - DNA, 25 bp, Probe Sequence
actgcattgtggagcatgcggggga

SEQ ID NO: 149404 - DNA, 25 bp, Probe Sequence
actgctggggattgatgtgtgggag

SEQ ID NO: 149405 - DNA, 25 bp, Probe Sequence
actgctgtgaagtgctgtgtggccc

SEQ ID NO: 149406 - DNA, 25 bp, Probe Sequence
actgcctgaagttgcagttcccctt

SEQ ID NO: 149407 - DNA, 25 bp, Probe Sequence
actgctataaaatctctttccattg

SEQ ID NO: 149408 - DNA, 25 bp, Probe Sequence
actccataaaaggtgtgttgaattg

SEQ ID NO: 149409 - DNA, 25 bp, Probe Sequence
actcccaaaatgaggcttttctgaa

SEQ ID NO: 149410 - DNA, 25 bp, Probe Sequence
actcattcataaggtaggttttctt

SEQ ID NO: 149411 - DNA, 25 bp, Probe Sequence
actcatatttaggtaagctgtttct

SEQ ID NO: 149412 - DNA, 25 bp, Probe Sequence
actaatttggcttcaagtttcatga

SEQ ID NO: 149413 - DNA, 25 bp, Probe Sequence
actaattttgccctatgtatccgta

SEQ ID NO: 149414 - DNA, 25 bp, Probe Sequence
actaagaactacctgagctacctga

SEQ ID NO: 149415 - DNA, 25 bp, Probe Sequence
acataagattccgatcagaccccaa

SEQ ID NO: 149416 - DNA, 25 bp, Probe Sequence
actgaattctccaacagactctacc

SEQ ID NO: 149417 - DNA, 25 bp, Probe Sequence
actacaatctcacagaagtccacta

SEQ ID NO: 149418 - DNA, 25 bp, Probe Sequence
actaccattatgacactactccaga

SEQ ID NO: 149419 - DNA, 25 bp, Probe Sequence
actctcctaagcacctctcaggaga

SEQ ID NO: 149420 - DNA, 25 bp, Probe Sequence
actcggctaagcagattggtggaat

SEQ ID NO: 149421 - DNA, 25 bp, Probe Sequence
actcaactactgcgtatggcgggac

SEQ ID NO: 149422 - DNA, 25 bp, Probe Sequence
actcaagtccacgtttcctgaggag

SEQ ID NO: 149423 - DNA, 25 bp, Probe Sequence
actcaatagccagccttcctggaat

SEQ ID NO: 149424 - DNA, 25 bp, Probe Sequence
actcaatgagcaggtccctcactac

SEQ ID NO: 149425 - DNA, 25 bp, Probe Sequence
actccaatgaggacacactctctgt

SEQ ID NO: 149426 - DNA, 25 bp, Probe Sequence
actccaatgaggacacactctctgt

SEQ ID NO: 149427 - DNA, 25 bp, Probe Sequence
actgccaaatagtactctatctgac

SEQ ID NO: 149428 - DNA, 25 bp, Probe Sequence
actgcacagaatgtcaccttctcat

SEQ ID NO: 149429 - DNA, 25 bp, Probe Sequence
actgcatgcaaatctacaatggtct

SEQ ID NO: 149430 - DNA, 25 bp, Probe Sequence
actcatctcaatgcctgattggatt

SEQ ID NO: 149431 - DNA, 25 bp, Probe Sequence
actccacagagcccgagggatgatc

SEQ ID NO: 149432 - DNA, 25 bp, Probe Sequence
actcccaggacttcatggatgagat

SEQ ID NO: 149433 - DNA, 25 bp, Probe Sequence
actccaaagcaatgcatgtggcagg

SEQ ID NO: 149434 - DNA, 25 bp, Probe Sequence
actccagaccagtttatgacagctg

SEQ ID NO: 149435 - DNA, 25 bp, Probe Sequence
actccatcttagtgtatagcctgga

SEQ ID NO: 149436 - DNA, 25 bp, Probe Sequence
actgccctgatatctttatcctgta

SEQ ID NO: 149437 - DNA, 25 bp, Probe Sequence
actgctcttacatggtttcctggat

SEQ ID NO: 149438 - DNA, 25 bp, Probe Sequence
actgccttagacccacttggggata

SEQ ID NO: 149439 - DNA, 25 bp, Probe Sequence
actcctagagcggtccttggggaga

SEQ ID NO: 149440 - DNA, 25 bp, Probe Sequence
actctggacactggatccttgggga

SEQ ID NO: 149441 - DNA, 25 bp, Probe Sequence
actgctgtaaatgccgccatggaga

SEQ ID NO: 149442 - DNA, 25 bp, Probe Sequence
actgctgaacagatacgccgtggag

SEQ ID NO: 149443 - DNA, 25 bp, Probe Sequence
actgctacaagtaccgcatccaggt

SEQ ID NO: 149444 - DNA, 25 bp, Probe Sequence
actctatagcagtattacagtcagt

SEQ ID NO: 149445 - DNA, 25 bp, Probe Sequence
actgcttacagcttgataggccact

SEQ ID NO: 149446 - DNA, 25 bp, Probe Sequence
actgcttgtcacttgaatcccgtga

SEQ ID NO: 149447 - DNA, 25 bp, Probe Sequence
actgcggcatcctggatgcctgctg

SEQ ID NO: 149448 - DNA, 25 bp, Probe Sequence
actcggcatgctcgatgaagtcgcc

SEQ ID NO: 149449 - DNA, 25 bp, Probe Sequence
actgctgagagcaagatgggtcacc

SEQ ID NO: 149450 - DNA, 25 bp, Probe Sequence
actcgcagacaatgatggtcctggt

SEQ ID NO: 149451 - DNA, 25 bp, Probe Sequence
actgcacgcaagagtgcgtctcgga

SEQ ID NO: 149452 - DNA, 25 bp, Probe Sequence
actgccgctgagaagggttgatcct

SEQ ID NO: 149453 - DNA, 25 bp, Probe Sequence
actgccaggcagaaggggacatcct

SEQ ID NO: 149454 - DNA, 25 bp, Probe Sequence
actgccagctgactacagtggcctt

SEQ ID NO: 149455 - DNA, 25 bp, Probe Sequence
actgccgtgacatcattcagcgcat

SEQ ID NO: 149456 - DNA, 25 bp, Probe Sequence
actgcctgcttctatgatgtttcat

SEQ ID NO: 149457 - DNA, 25 bp, Probe Sequence
actgcctgcactggaatgttaaaca

SEQ ID NO: 149458 - DNA, 25 bp, Probe Sequence
actcctgagggctatttaggacaac

SEQ ID NO: 149459 - DNA, 25 bp, Probe Sequence
actgcacagagggctacttcatgga

SEQ ID NO: 149460 - DNA, 25 bp, Probe Sequence
actgacagcagtgcttacatcaaat

SEQ ID NO: 149461 - DNA, 25 bp, Probe Sequence
actgaatcaggacctcactcagaaa

SEQ ID NO: 149462 - DNA, 25 bp, Probe Sequence
actgaagtgctcactactcagtgat

SEQ ID NO: 149463 - DNA, 25 bp, Probe Sequence
actgaagttgcatccacatggcatt

SEQ ID NO: 149464 - DNA, 25 bp, Probe Sequence
actgaagaactgtcagctcagcgtt

SEQ ID NO: 149465 - DNA, 25 bp, Probe Sequence
actgcattaacttcagccacgactc

SEQ ID NO: 149466 - DNA, 25 bp, Probe Sequence
actgcattaacttcagccacgactc

SEQ ID NO: 149467 - DNA, 25 bp, Probe Sequence
actaaggactgaagccactacatac

SEQ ID NO: 149468 - DNA, 25 bp, Probe Sequence
actcctggtctgagcccaataaaga

SEQ ID NO: 149469 - DNA, 25 bp, Probe Sequence
actcctggtctgagcccaataaaga

SEQ ID NO: 149470 - DNA, 25 bp, Probe Sequence
actcctagcctttgttaagatgtaa

SEQ ID NO: 149471 - DNA, 25 bp, Probe Sequence
actccagacctttttcaagttgaat

SEQ ID NO: 149472 - DNA, 25 bp, Probe Sequence
actccaggccaataccacagttgat

SEQ ID NO: 149473 - DNA, 25 bp, Probe Sequence
actccaccaacaagtaccagttgtc

SEQ ID NO: 149474 - DNA, 25 bp, Probe Sequence
actccattcccaactagacattacc

SEQ ID NO: 149475 - DNA, 25 bp, Probe Sequence
actgctcttccagcctatgaatatt

SEQ ID NO: 149476 - DNA, 25 bp, Probe Sequence
actgcttatctctgccatgtagaat

SEQ ID NO: 149477 - DNA, 25 bp, Probe Sequence
actgctttgcatttctcctatagat

SEQ ID NO: 149478 - DNA, 25 bp, Probe Sequence
actgctttctgtactcttgcaaaca

SEQ ID NO: 149479 - DNA, 25 bp, Probe Sequence
actcggatgtgtcctttctgaacaa

SEQ ID NO: 149480 - DNA, 25 bp, Probe Sequence
actgcagaagtgttcctttagacaa

SEQ ID NO: 149481 - DNA, 25 bp, Probe Sequence
acatgaaagtgcatcctttccctcc

SEQ ID NO: 149482 - DNA, 25 bp, Probe Sequence
actagaagttacctattctccacct

SEQ ID NO: 149483 - DNA, 25 bp, Probe Sequence
actaaaatacagctttgtgcctttt

SEQ ID NO: 149484 - DNA, 25 bp, Probe Sequence
actgccaaatacattttgtccttct

SEQ ID NO: 149485 - DNA, 25 bp, Probe Sequence
actccaggaaccattttcacctatt

SEQ ID NO: 149486 - DNA, 25 bp, Probe Sequence
actccagggtatgttcatatacttt

SEQ ID NO: 149487 - DNA, 25 bp, Probe Sequence
actccaagagtaagttctgctacct

SEQ ID NO: 149488 - DNA, 25 bp, Probe Sequence
actccatgaggtatttcagcgccgc

SEQ ID NO: 149489 - DNA, 25 bp, Probe Sequence
actgcacaggtaatacaacacgccg

SEQ ID NO: 149490 - DNA, 25 bp, Probe Sequence
actccgattactgagatgcacctct

SEQ ID NO: 149491 - DNA, 25 bp, Probe Sequence
acttccactacgaggagcacctgga

SEQ ID NO: 149492 - DNA, 25 bp, Probe Sequence
actaccttacagtgagggctataca

SEQ ID NO: 149493 - DNA, 25 bp, Probe Sequence
actccttccaaggctgagggggtca

SEQ ID NO: 149494 - DNA, 25 bp, Probe Sequence
actccttcgtgatctggggatgtgc

SEQ ID NO: 149495 - DNA, 25 bp, Probe Sequence
actcatcggcggacagtggggaagc

SEQ ID NO: 149496 - DNA, 25 bp, Probe Sequence
actgccaacgtgtcagtggtggacc

SEQ ID NO: 149497 - DNA, 25 bp, Probe Sequence
actgccaacgtgtcagtggtggacc

SEQ ID NO: 149498 - DNA, 25 bp, Probe Sequence
actgccctctgtttggaataagcca

SEQ ID NO: 149499 - DNA, 25 bp, Probe Sequence
actgccaatctataggaatacataa

SEQ ID NO: 149500 - DNA, 25 bp, Probe Sequence
actgccagctctgaactgagtccaa

SEQ ID NO: 149501 - DNA, 25 bp, Probe Sequence
actgcttcatccattaggtccagat

SEQ ID NO: 149502 - DNA, 25 bp, Probe Sequence
actgcagtgtccgttatgagtgcca

SEQ ID NO: 149503 - DNA, 25 bp, Probe Sequence
actgcaagtcttttgatagatgtca

SEQ ID NO: 149504 - DNA, 25 bp, Probe Sequence
actccagtgtcatgtcatagaccat

SEQ ID NO: 149505 - DNA, 25 bp, Probe Sequence
actccattgtactctagcctgggtg

SEQ ID NO: 149506 - DNA, 25 bp, Probe Sequence
actctctttagccccaggggagcag

SEQ ID NO: 149507 - DNA, 25 bp, Probe Sequence
actcctggaatcacagaggggtcag

SEQ ID NO: 149508 - DNA, 25 bp, Probe Sequence
actccaaaatcgtcgcaggggtact

SEQ ID NO: 149509 - DNA, 25 bp, Probe Sequence
actccaacttgcaattcagggggca

SEQ ID NO: 149510 - DNA, 25 bp, Probe Sequence
actgccaatatgtctgttaggggat

SEQ ID NO: 149511 - DNA, 25 bp, Probe Sequence
actgctgcgtatgtgtttggagaga

SEQ ID NO: 149512 - DNA, 25 bp, Probe Sequence
actgctaatgtggctgctttgtagg

SEQ ID NO: 149513 - DNA, 25 bp, Probe Sequence
actgctggcatgtaatgcttagttt

SEQ ID NO: 149514 - DNA, 25 bp, Probe Sequence
actgctgcctgaaatgctttgacaa

SEQ ID NO: 149515 - DNA, 25 bp, Probe Sequence
actgcactctagcctgggtgacaga

SEQ ID NO: 149516 - DNA, 25 bp, Probe Sequence
actgcactccagcctgggcgacaga

SEQ ID NO: 149517 - DNA, 25 bp, Probe Sequence
actgcattccagcctgggcaacaga

SEQ ID NO: 149518 - DNA, 25 bp, Probe Sequence
actgctgcctcaccagtggcagcac

SEQ ID NO: 149519 - DNA, 25 bp, Probe Sequence
actgctcacatgaccagatgggaga

SEQ ID NO: 149520 - DNA, 25 bp, Probe Sequence
actccagcatgatcgcagatgcggt

SEQ ID NO: 149521 - DNA, 25 bp, Probe Sequence
actgccatgctgttccagtttgtga

SEQ ID NO: 149522 - DNA, 25 bp, Probe Sequence
actcgcagctggaccttttggaaat

SEQ ID NO: 149523 - DNA, 25 bp, Probe Sequence
actcctcggcttaattggtgaaatc

SEQ ID NO: 149524 - DNA, 25 bp, Probe Sequence
actcctctgatggttttagtctcga

SEQ ID NO: 149525 - DNA, 25 bp, Probe Sequence
actcttctaggtcccaagtagcgag

SEQ ID NO: 149526 - DNA, 25 bp, Probe Sequence
actcttcttgggccatgggtaccaa

SEQ ID NO: 149527 - DNA, 25 bp, Probe Sequence
actctattaggtgcagagcaactcc

SEQ ID NO: 149528 - DNA, 25 bp, Probe Sequence
actcctttggctgctagaactcatc

SEQ ID NO: 149529 - DNA, 25 bp, Probe Sequence
actccttctcagtgggacagtgatc

SEQ ID NO: 149530 - DNA, 25 bp, Probe Sequence
actccatcttgagtgagggctagga

SEQ ID NO: 149531 - DNA, 25 bp, Probe Sequence
actccatccagagtgacacagtgag

SEQ ID NO: 149532 - DNA, 25 bp, Probe Sequence
actcaagcgggtctcagagcagttt

SEQ ID NO: 149533 - DNA, 25 bp, Probe Sequence
actcagctgcttctcagtcatgaat

SEQ ID NO: 149534 - DNA, 25 bp, Probe Sequence
actcagatggtgcatatgctccctc

SEQ ID NO: 149535 - DNA, 25 bp, Probe Sequence
actcagaaggcaacattccctgaac

SEQ ID NO: 149536 - DNA, 25 bp, Probe Sequence
actcccaggcagagttgtctgaatc

SEQ ID NO: 149537 - DNA, 25 bp, Probe Sequence
actcccaacatgcagttcgtggcac

SEQ ID NO: 149538 - DNA, 25 bp, Probe Sequence
actccctacagtccttcaatggaaa

SEQ ID NO: 149539 - DNA, 25 bp, Probe Sequence
actcaatttagcactgccaatggac

SEQ ID NO: 149540 - DNA, 25 bp, Probe Sequence
acatcgtattacacctgaggaggcc

SEQ ID NO: 149541 - DNA, 25 bp, Probe Sequence
acatcgtattacacctgaggaggcc

SEQ ID NO: 149542 - DNA, 25 bp, Probe Sequence
actctgctattatggactcagaagg

SEQ ID NO: 149543 - DNA, 25 bp, Probe Sequence
actcattgtctatgcacaccaggaa

SEQ ID NO: 149544 - DNA, 25 bp, Probe Sequence
actgcctcctcttgtcaggcaggga

SEQ ID NO: 149545 - DNA, 25 bp, Probe Sequence
actgccttcttgttccagctaggca

SEQ ID NO: 149546 - DNA, 25 bp, Probe Sequence
actgcctgattcattcaacatacca

SEQ ID NO: 149547 - DNA, 25 bp, Probe Sequence
acagactgactcctaaactgatgga

SEQ ID NO: 149548 - DNA, 25 bp, Probe Sequence
actcacgccctaataaggagcgaat

SEQ ID NO: 149549 - DNA, 25 bp, Probe Sequence
actttggctagtgacagggctaatt

SEQ ID NO: 149550 - DNA, 25 bp, Probe Sequence
actctatggtagaactaaggccttt

SEQ ID NO: 149551 - DNA, 25 bp, Probe Sequence
actaagaggaaacaaagcgttctgc

SEQ ID NO: 149552 - DNA, 25 bp, Probe Sequence
actaaaggagaacttcatccgcttc

SEQ ID NO: 149553 - DNA, 25 bp, Probe Sequence
actccacggagatcattatcaccac

SEQ ID NO: 149554 - DNA, 25 bp, Probe Sequence
actgctactttgaaaatatcctatc

SEQ ID NO: 149555 - DNA, 25 bp, Probe Sequence
actctggctttgtgactgatacaat

SEQ ID NO: 149556 - DNA, 25 bp, Probe Sequence
actgctggggagtccctgccacact

SEQ ID NO: 149557 - DNA, 25 bp, Probe Sequence
actctacagaagttgcctgccatcc

SEQ ID NO: 149558 - DNA, 25 bp, Probe Sequence
actcatgaccacagtccatgccatc

SEQ ID NO: 149559 - DNA, 25 bp, Probe Sequence
actgcggtcacattgtcacatcatt

SEQ ID NO: 149560 - DNA, 25 bp, Probe Sequence
actgctgccatctagtgatacactt

SEQ ID NO: 149561 - DNA, 25 bp, Probe Sequence
actgctgatatctgatgactgcttt

SEQ ID NO: 149562 - DNA, 25 bp, Probe Sequence
actgcatgcaatttatagtctgtct

SEQ ID NO: 149563 - DNA, 25 bp, Probe Sequence
actgcataatgatttcattttgata

SEQ ID NO: 149564 - DNA, 25 bp, Probe Sequence
actctctatgcacggtttgtgatca

SEQ ID NO: 149565 - DNA, 25 bp, Probe Sequence
actccattccagtaatggtatcact

SEQ ID NO: 149566 - DNA, 25 bp, Probe Sequence
actctgttccagcctatggctttag

SEQ ID NO: 149567 - DNA, 25 bp, Probe Sequence
actcctgtaatcctagcactttagg

SEQ ID NO: 149568 - DNA, 25 bp, Probe Sequence
actcgggaaccgagcactcatcagg

SEQ ID NO: 149569 - DNA, 25 bp, Probe Sequence
actcaggaatagcttccctctggac

SEQ ID NO: 149570 - DNA, 25 bp, Probe Sequence
actgcatgggtcatttcccagcatg

SEQ ID NO: 149571 - DNA, 25 bp, Probe Sequence
actgcaggcagtgctatttcttgtg

SEQ ID NO: 149572 - DNA, 25 bp, Probe Sequence
actgctgtaggggatatctcttgct

SEQ ID NO: 149573 - DNA, 25 bp, Probe Sequence
actgctgtcacggagaatctgggaa

SEQ ID NO: 149574 - DNA, 25 bp, Probe Sequence
actgctgtgccttaacttggctgtg

SEQ ID NO: 149575 - DNA, 25 bp, Probe Sequence
actgctctccagcatacatttctgg

SEQ ID NO: 149576 - DNA, 25 bp, Probe Sequence
actctcccattctactgatatcggg

SEQ ID NO: 149577 - DNA, 25 bp, Probe Sequence
actcaaccctctactgaaccagtag

SEQ ID NO: 149578 - DNA, 25 bp, Probe Sequence
actcctcccttagctactcaggagg

SEQ ID NO: 149579 - DNA, 25 bp, Probe Sequence
actcctcccttagctactcaggagg

SEQ ID NO: 149580 - DNA, 25 bp, Probe Sequence
actccacgttttgctaccagaagaa

SEQ ID NO: 149581 - DNA, 25 bp, Probe Sequence
actccttggggtgctgatctcgagt

SEQ ID NO: 149582 - DNA, 25 bp, Probe Sequence
actcctgtagaagtctttgctttgt

SEQ ID NO: 149583 - DNA, 25 bp, Probe Sequence
actccagccaacttccttgatgttg

SEQ ID NO: 149584 - DNA, 25 bp, Probe Sequence
actccagaggaagccttgatatctg

SEQ ID NO: 149585 - DNA, 25 bp, Probe Sequence
actctggtggattgttctagtactg

SEQ ID NO: 149586 - DNA, 25 bp, Probe Sequence
actctggatgagttggtcctttcag

SEQ ID NO: 149587 - DNA, 25 bp, Probe Sequence
actcgggagagtgatcctgtacgtg

SEQ ID NO: 149588 - DNA, 25 bp, Probe Sequence
acaggggggctttggatggcactgg

SEQ ID NO: 149589 - DNA, 25 bp, Probe Sequence
acaggtgtaggtataggaggtcaag

SEQ ID NO: 149590 - DNA, 25 bp, Probe Sequence
ccagggaatgtcactacggattaat

SEQ ID NO: 149591 - DNA, 25 bp, Probe Sequence
acactggaattcactcccgggagtg

SEQ ID NO: 149592 - DNA, 25 bp, Probe Sequence
actctggatttcagcctcttaggag

SEQ ID NO: 149593 - DNA, 25 bp, Probe Sequence
actctagtccaagccatcattacta

SEQ ID NO: 149594 - DNA, 25 bp, Probe Sequence
actccttcctcaagatctggaacta

SEQ ID NO: 149595 - DNA, 25 bp, Probe Sequence
actacattttctgaggctgaacaac

SEQ ID NO: 149596 - DNA, 25 bp, Probe Sequence
actcctttcttctgagttgagcaga

SEQ ID NO: 149597 - DNA, 25 bp, Probe Sequence
actccttcgggcaggatatgtgcag

SEQ ID NO: 149598 - DNA, 25 bp, Probe Sequence
actgcctttgggagtgcagagacag

SEQ ID NO: 149599 - DNA, 25 bp, Probe Sequence
actgcctgtctggtgaagctggaaa

SEQ ID NO: 149600 - DNA, 25 bp, Probe Sequence
actgctctggggtagatgcctgaag

SEQ ID NO: 149601 - DNA, 25 bp, Probe Sequence
actcctggtgcttatagctctgacc

SEQ ID NO: 149602 - DNA, 25 bp, Probe Sequence
actcgtggtgactatcactgctcgg

SEQ ID NO: 149603 - DNA, 25 bp, Probe Sequence
actcctttggcatgtgtgcactgga

SEQ ID NO: 149604 - DNA, 25 bp, Probe Sequence
actcctctgtagatgtgtgcccagt

SEQ ID NO: 149605 - DNA, 25 bp, Probe Sequence
actcctctttgtgcagagaccagcc

SEQ ID NO: 149606 - DNA, 25 bp, Probe Sequence
actcctctttgtgcagagaccagcc

SEQ ID NO: 149607 - DNA, 25 bp, Probe Sequence
actcctctttgtgcagagaccagcc

SEQ ID NO: 149608 - DNA, 25 bp, Probe Sequence
actctgctttggtacatcacagcaa

SEQ ID NO: 149609 - DNA, 25 bp, Probe Sequence
actcggctgtattaatcacgcgatg

SEQ ID NO: 149610 - DNA, 25 bp, Probe Sequence
actgctggttattcttaccctgtga

SEQ ID NO: 149611 - DNA, 25 bp, Probe Sequence
actccagtttcactgggcatcctgt

SEQ ID NO: 149612 - DNA, 25 bp, Probe Sequence
actccacattccagagttctatgtt

SEQ ID NO: 149613 - DNA, 25 bp, Probe Sequence
actccaattctaggaatctgtcatc

SEQ ID NO: 149614 - DNA, 25 bp, Probe Sequence
actccatttctactgagactttcag

SEQ ID NO: 149615 - DNA, 25 bp, Probe Sequence
actccatttgcaagtcatgcttttc

SEQ ID NO: 149616 - DNA, 25 bp, Probe Sequence
actcacgtgtgaagccaggatttcc

SEQ ID NO: 149617 - DNA, 25 bp, Probe Sequence
actcactcgtcaagggaagttacct

SEQ ID NO: 149618 - DNA, 25 bp, Probe Sequence
actacacggctcccgaaagtatgca

SEQ ID NO: 149619 - DNA, 25 bp, Probe Sequence
actacaatcttcccatgcacaagat

SEQ ID NO: 149620 - DNA, 25 bp, Probe Sequence
actcctgtcttgctagacaaggttg

SEQ ID NO: 149621 - DNA, 25 bp, Probe Sequence
actcctgatctaactgatgaaaatt

SEQ ID NO: 149622 - DNA, 25 bp, Probe Sequence
actcatctgacaaagggctaatatc

SEQ ID NO: 149623 - DNA, 25 bp, Probe Sequence
acatatctacgttgaatgtactacc

SEQ ID NO: 149624 - DNA, 25 bp, Probe Sequence
actactagctttagattacccctat

SEQ ID NO: 149625 - DNA, 25 bp, Probe Sequence
actcctgggttgctgataaaactaa

SEQ ID NO: 149626 - DNA, 25 bp, Probe Sequence
actcctggacagttggaaagaccta

SEQ ID NO: 149627 - DNA, 25 bp, Probe Sequence
actacgttcgttcaacaggcagtat

SEQ ID NO: 149628 - DNA, 25 bp, Probe Sequence
acagagggtagacaaacggactaag

SEQ ID NO: 149629 - DNA, 25 bp, Probe Sequence
aagagtggctaacaaaatgaaatac

SEQ ID NO: 149630 - DNA, 25 bp, Probe Sequence
acatattcccaacaaaattaatata

SEQ ID NO: 149631 - DNA, 25 bp, Probe Sequence
ccttcttcgctacaagttcctaaat

SEQ ID NO: 149632 - DNA, 25 bp, Probe Sequence
gtatccttccttcagggtttaatag

SEQ ID NO: 149633 - DNA, 25 bp, Probe Sequence
ttaacttggtttcttgtttttgctg

SEQ ID NO: 149634 - DNA, 25 bp, Probe Sequence
acaacttggtttaacatgtttactg

SEQ ID NO: 149635 - DNA, 25 bp, Probe Sequence
actctttggtctcaacctttaccat

SEQ ID NO: 149636 - DNA, 25 bp, Probe Sequence
acttttcggatgatcccttatccct

SEQ ID NO: 149637 - DNA, 25 bp, Probe Sequence
cacggtgaccgagataacgtcctcc

SEQ ID NO: 149638 - DNA, 25 bp, Probe Sequence
cacttcagacaccctaaacgttctg

SEQ ID NO: 149639 - DNA, 25 bp, Probe Sequence
acttaggaagcccacaaggttctgg

SEQ ID NO: 149640 - DNA, 25 bp, Probe Sequence
acagcagggaaggtttagactttgg

SEQ ID NO: 149641 - DNA, 25 bp, Probe Sequence
actaggagaatgggtaggcctttgt

SEQ ID NO: 149642 - DNA, 25 bp, Probe Sequence
actagaaggctgtttgaacttttga

SEQ ID NO: 149643 - DNA, 25 bp, Probe Sequence
actaaaagcttcagggttatgtcta

SEQ ID NO: 149644 - DNA, 25 bp, Probe Sequence
actaggtttgaatgcggtgtagaaa

SEQ ID NO: 149645 - DNA, 25 bp, Probe Sequence
actatcgctttggacaggtttacac

SEQ ID NO: 149646 - DNA, 25 bp, Probe Sequence
actaactgttgagacgtgcttccca

SEQ ID NO: 149647 - DNA, 25 bp, Probe Sequence
actaactgggcaaacctcccagcct

SEQ ID NO: 149648 - DNA, 25 bp, Probe Sequence
actacacggcgcagaacttggacca

SEQ ID NO: 149649 - DNA, 25 bp, Probe Sequence
actactcgggcgcagaacttgggac

SEQ ID NO: 149650 - DNA, 25 bp, Probe Sequence
taatattcggcccaaacctttcgtg

SEQ ID NO: 149651 - DNA, 25 bp, Probe Sequence
aataccgtgccctgaggttggacgt

SEQ ID NO: 149652 - DNA, 25 bp, Probe Sequence
aataccgtgccctgaggttggacgt

SEQ ID NO: 149653 - DNA, 25 bp, Probe Sequence
aaggacgggcatgaggttcggacct

SEQ ID NO: 149654 - DNA, 25 bp, Probe Sequence
acagcagacgggaggtgtctactga

SEQ ID NO: 149655 - DNA, 25 bp, Probe Sequence
acagaaggctggtgggtttttgatg

SEQ ID NO: 149656 - DNA, 25 bp, Probe Sequence
actcacggcggctttggtttattgt

SEQ ID NO: 149657 - DNA, 25 bp, Probe Sequence
actaccgtggcctggtaccaggtga

SEQ ID NO: 149658 - DNA, 25 bp, Probe Sequence
actaccgtggcctggtaccaggtga

SEQ ID NO: 149659 - DNA, 25 bp, Probe Sequence
actaccgtggcctggtaccaggtga

SEQ ID NO: 149660 - DNA, 25 bp, Probe Sequence
acttccgctgtcacggtaaagtccg

SEQ ID NO: 149661 - DNA, 25 bp, Probe Sequence
acttcaggtacagcagagataaaac

SEQ ID NO: 149662 - DNA, 25 bp, Probe Sequence
actactgcgtatggcgggacaacca

SEQ ID NO: 149663 - DNA, 25 bp, Probe Sequence
actcctgcaggagcactggacacaa

SEQ ID NO: 149664 - DNA, 25 bp, Probe Sequence
actgccgcaagaccagggtcactgg

SEQ ID NO: 149665 - DNA, 25 bp, Probe Sequence
actccacacagtcagcaatgtccag

SEQ ID NO: 149666 - DNA, 25 bp, Probe Sequence
actcaacagaatcagccatccacgt

SEQ ID NO: 149667 - DNA, 25 bp, Probe Sequence
actagcacgagacactatcaaggat

SEQ ID NO: 149668 - DNA, 25 bp, Probe Sequence
actccacagaatcttatcacagtga

SEQ ID NO: 149669 - DNA, 25 bp, Probe Sequence
acaccaaaatttacagtaggaatag

SEQ ID NO: 149670 - DNA, 25 bp, Probe Sequence
actaaaacgtgaatcctaaaatgag

SEQ ID NO: 149671 - DNA, 25 bp, Probe Sequence
actcaaaacgtcctacagcaaaaga

SEQ ID NO: 149672 - DNA, 25 bp, Probe Sequence
actccacgatcttcctgaagaagag

SEQ ID NO: 149673 - DNA, 25 bp, Probe Sequence
actccactgcatgttccaagacagt

SEQ ID NO: 149674 - DNA, 25 bp, Probe Sequence
actcatgcacaagcttcaatagccg

SEQ ID NO: 149675 - DNA, 25 bp, Probe Sequence
acatatcactggggctctacagccc

SEQ ID NO: 149676 - DNA, 25 bp, Probe Sequence
acacttcggcgagtgcttaacctac

SEQ ID NO: 149677 - DNA, 25 bp, Probe Sequence
actctgtcagtggactcagtaatct

SEQ ID NO: 149678 - DNA, 25 bp, Probe Sequence
actctgtctatggagtatctattct

SEQ ID NO: 149679 - DNA, 25 bp, Probe Sequence
actctgtggataagcttgtcattca

SEQ ID NO: 149680 - DNA, 25 bp, Probe Sequence
actcaggcgatgtgctttatggcag

SEQ ID NO: 149681 - DNA, 25 bp, Probe Sequence
actcctctgatgtggttggggggtc

SEQ ID NO: 149682 - DNA, 25 bp, Probe Sequence
actcctctgagaaggacgggcaggt

SEQ ID NO: 149683 - DNA, 25 bp, Probe Sequence
actcctggaacactgactggggtga

SEQ ID NO: 149684 - DNA, 25 bp, Probe Sequence
actccagcgcaatttgatgctgatg

SEQ ID NO: 149685 - DNA, 25 bp, Probe Sequence
actccaccaaagttctcatgcacta

SEQ ID NO: 149686 - DNA, 25 bp, Probe Sequence
actccatctaccttttcatgttatt

SEQ ID NO: 149687 - DNA, 25 bp, Probe Sequence
actccatctacagttttagtggctg

SEQ ID NO: 149688 - DNA, 25 bp, Probe Sequence
actcctattattatcaagtagctgg

SEQ ID NO: 149689 - DNA, 25 bp, Probe Sequence
actctcaaaggtaaaatgtcacagg

SEQ ID NO: 149690 - DNA, 25 bp, Probe Sequence
actcgccgacggcaaagtccagtgc

SEQ ID NO: 149691 - DNA, 25 bp, Probe Sequence
cactcgtaacagcgaacggtcagtc

SEQ ID NO: 149692 - DNA, 25 bp, Probe Sequence
actcgtcaacagcttaaatctggat

SEQ ID NO: 149693 - DNA, 25 bp, Probe Sequence
actcggcacaacaatctagacctgg

SEQ ID NO: 149694 - DNA, 25 bp, Probe Sequence
actcggcacaacaatctagacctgg

SEQ ID NO: 149695 - DNA, 25 bp, Probe Sequence
actcggcacaacaatctagacctgg

SEQ ID NO: 149696 - DNA, 25 bp, Probe Sequence
actcagaagttcaagctaaatattg

SEQ ID NO: 149697 - DNA, 25 bp, Probe Sequence
acataagcacttaagcaccaaattg

SEQ ID NO: 149698 - DNA, 25 bp, Probe Sequence
actaagacttctgactccaatttaa

SEQ ID NO: 149699 - DNA, 25 bp, Probe Sequence
actcaagacttttgactgccatttt

SEQ ID NO: 149700 - DNA, 25 bp, Probe Sequence
actacactgcttacgttgccatgat

SEQ ID NO: 149701 - DNA, 25 bp, Probe Sequence
actacctgctacctgtcatgcagca

SEQ ID NO: 149702 - DNA, 25 bp, Probe Sequence
actccctgaatgacgacatcagcct

SEQ ID NO: 149703 - DNA, 25 bp, Probe Sequence
actccctgcagagatggcacagact

SEQ ID NO: 149704 - DNA, 25 bp, Probe Sequence
actccctgcgacaaggactgtgtac

SEQ ID NO: 149705 - DNA, 25 bp, Probe Sequence
actctccggacatgaaccataacca

SEQ ID NO: 149706 - DNA, 25 bp, Probe Sequence
actctctcctaaagaagcaaagacc

SEQ ID NO: 149707 - DNA, 25 bp, Probe Sequence
acttcccatggatacaaaaacaaat

SEQ ID NO: 149708 - DNA, 25 bp, Probe Sequence
actccacctgagttacaaagacaga

SEQ ID NO: 149709 - DNA, 25 bp, Probe Sequence
actccagcctgggtgacagctagac

SEQ ID NO: 149710 - DNA, 25 bp, Probe Sequence
actccagcctgggcagctgaacaag

SEQ ID NO: 149711 - DNA, 25 bp, Probe Sequence
actccatcctgggtgacacagcaag

SEQ ID NO: 149712 - DNA, 25 bp, Probe Sequence
actccagcctgggcgacagagcgag

SEQ ID NO: 149713 - DNA, 25 bp, Probe Sequence
actccagcctggacaacagcgagag

SEQ ID NO: 149714 - DNA, 25 bp, Probe Sequence
actccagcctgggcaacaagagtga

SEQ ID NO: 149715 - DNA, 25 bp, Probe Sequence
actccagcgtgggcaacagagtaag

SEQ ID NO: 149716 - DNA, 25 bp, Probe Sequence
actccagcctgggcagaagagtgaa

SEQ ID NO: 149717 - DNA, 25 bp, Probe Sequence
actccagcctgggcaacaagtcaaa

SEQ ID NO: 149718 - DNA, 25 bp, Probe Sequence
actccaggcctggtgacataccaag

SEQ ID NO: 149719 - DNA, 25 bp, Probe Sequence
actaatgcgacttatggtagccaag

SEQ ID NO: 149720 - DNA, 25 bp, Probe Sequence
actcctgtagcctaggctacttagg

SEQ ID NO: 149721 - DNA, 25 bp, Probe Sequence
actctcttcacccaaatatgcttga

SEQ ID NO: 149722 - DNA, 25 bp, Probe Sequence
actccatgtctctgagcattagatt

SEQ ID NO: 149723 - DNA, 25 bp, Probe Sequence
actgcctcaccagacactagatgtg

SEQ ID NO: 149724 - DNA, 25 bp, Probe Sequence
actgcctcctcaaatcacatttgtg

SEQ ID NO: 149725 - DNA, 25 bp, Probe Sequence
actctcacccataaacagtaatgac

SEQ ID NO: 149726 - DNA, 25 bp, Probe Sequence
actgccacccagaagactgtggatg

SEQ ID NO: 149727 - DNA, 25 bp, Probe Sequence
actgcctgcaaacagactgggatct

SEQ ID NO: 149728 - DNA, 25 bp, Probe Sequence
actcctgcagaagtcaactgtgtga

SEQ ID NO: 149729 - DNA, 25 bp, Probe Sequence
actccatcacaaatgagtctgtgga

SEQ ID NO: 149730 - DNA, 25 bp, Probe Sequence
actctatagctctaactggctagaa

SEQ ID NO: 149731 - DNA, 25 bp, Probe Sequence
actctgcctgcttaattgtgctaga

SEQ ID NO: 149732 - DNA, 25 bp, Probe Sequence
actcctgccctgttgtgtatagatg

SEQ ID NO: 149733 - DNA, 25 bp, Probe Sequence
actccagccatttgctgtctttgtg

SEQ ID NO: 149734 - DNA, 25 bp, Probe Sequence
actctaatattgcttcttgtgtttt

SEQ ID NO: 149735 - DNA, 25 bp, Probe Sequence
actctaatattgcttcttgtgtttt

SEQ ID NO: 149736 - DNA, 25 bp, Probe Sequence
actcagttatggcttctacggctgc

SEQ ID NO: 149737 - DNA, 25 bp, Probe Sequence
actattgtaggcatctgtaaattct

SEQ ID NO: 149738 - DNA, 25 bp, Probe Sequence
actagtgtaactccttcatgcaata

SEQ ID NO: 149739 - DNA, 25 bp, Probe Sequence
actaatgacatccagtgtctccaaa

SEQ ID NO: 149740 - DNA, 25 bp, Probe Sequence
actataacgctgctttagaatgaag

SEQ ID NO: 149741 - DNA, 25 bp, Probe Sequence
actcatacacctcctatgaaaaaac

SEQ ID NO: 149742 - DNA, 25 bp, Probe Sequence
actctgagagactacttatgaataa

SEQ ID NO: 149743 - DNA, 25 bp, Probe Sequence
actctgaggaatccttttcatatga

SEQ ID NO: 149744 - DNA, 25 bp, Probe Sequence
actctgcctgactgcatactttggc

SEQ ID NO: 149745 - DNA, 25 bp, Probe Sequence
actcatgccacctgccaggtagtgt

SEQ ID NO: 149746 - DNA, 25 bp, Probe Sequence
actatggaccactccgaagtgtgtg

SEQ ID NO: 149747 - DNA, 25 bp, Probe Sequence
actcatgtcccatacactgaacttt

SEQ ID NO: 149748 - DNA, 25 bp, Probe Sequence
actctggcccattgacagatgagag

SEQ ID NO: 149749 - DNA, 25 bp, Probe Sequence
actcggatccattagccaagggcag

SEQ ID NO: 149750 - DNA, 25 bp, Probe Sequence
acttggggaaatcaggtgcagcggc

SEQ ID NO: 149751 - DNA, 25 bp, Probe Sequence
acttgggtaacatggcttgggcctt

SEQ ID NO: 149752 - DNA, 25 bp, Probe Sequence
actttggtaggtctgtctgggagct

SEQ ID NO: 149753 - DNA, 25 bp, Probe Sequence
actttcgttcgttgcttgtgggaat

SEQ ID NO: 149754 - DNA, 25 bp, Probe Sequence
actctgtgcatgatcgtggtggtag

SEQ ID NO: 149755 - DNA, 25 bp, Probe Sequence
acttgttggctcgcgggattgatgt

SEQ ID NO: 149756 - DNA, 25 bp, Probe Sequence
actatttccaggtgccagatcggct

SEQ ID NO: 149757 - DNA, 25 bp, Probe Sequence
actcaccctagttagcacgcatggg

SEQ ID NO: 149758 - DNA, 25 bp, Probe Sequence
actcccgtaatccagccatgtagga

SEQ ID NO: 149759 - DNA, 25 bp, Probe Sequence
actaccttaatacatttgaggcact

SEQ ID NO: 149760 - DNA, 25 bp, Probe Sequence
acaggggtatattagtttgaggact

SEQ ID NO: 149761 - DNA, 25 bp, Probe Sequence
acaggttgtaccatttcggcaactt

SEQ ID NO: 149762 - DNA, 25 bp, Probe Sequence
acagagatttgaacttgtttggaac

SEQ ID NO: 149763 - DNA, 25 bp, Probe Sequence
acagcacaccgtaccgacagtggta

SEQ ID NO: 149764 - DNA, 25 bp, Probe Sequence
acagcacaccgtaccgacagtggta

SEQ ID NO: 149765 - DNA, 25 bp, Probe Sequence
actaccacgtatgtacatgggtacc

SEQ ID NO: 149766 - DNA, 25 bp, Probe Sequence
actaccgttacctactgttgtcatt

SEQ ID NO: 149767 - DNA, 25 bp, Probe Sequence
actcatccgtgtctcattttgtgtt

SEQ ID NO: 149768 - DNA, 25 bp, Probe Sequence
actccacactctatatttctgtgtg

SEQ ID NO: 149769 - DNA, 25 bp, Probe Sequence
actccaacatcttttgtactctttc

SEQ ID NO: 149770 - DNA, 25 bp, Probe Sequence
actacagaacattttgtcccagctt

SEQ ID NO: 149771 - DNA, 25 bp, Probe Sequence
acttctaaactttatcccatcgctt

SEQ ID NO: 149772 - DNA, 25 bp, Probe Sequence
actctttaatccattacctggcact

SEQ ID NO: 149773 - DNA, 25 bp, Probe Sequence
actcttcacagtgcaaattccccac

SEQ ID NO: 149774 - DNA, 25 bp, Probe Sequence
actcctccattgaaataactcctcc

SEQ ID NO: 149775 - DNA, 25 bp, Probe Sequence
actcctcagggaagtcaggtacttc

SEQ ID NO: 149776 - DNA, 25 bp, Probe Sequence
actccctgacaaagccagttgacct

SEQ ID NO: 149777 - DNA, 25 bp, Probe Sequence
actctcctgaaaaggcctgtagcct

SEQ ID NO: 149778 - DNA, 25 bp, Probe Sequence
actctcctgaaaaggcctgtagcct

SEQ ID NO: 149779 - DNA, 25 bp, Probe Sequence
actcgcctgaaacaaatgcatattt

SEQ ID NO: 149780 - DNA, 25 bp, Probe Sequence
actcggcatgaacctgatgaatgaa

SEQ ID NO: 149781 - DNA, 25 bp, Probe Sequence
actcggcaccacttgatattcaaca

SEQ ID NO: 149782 - DNA, 25 bp, Probe Sequence
actccgtctcaagcatattaacagg

SEQ ID NO: 149783 - DNA, 25 bp, Probe Sequence
actcctgatctcaggcaatccaccc

SEQ ID NO: 149784 - DNA, 25 bp, Probe Sequence
actcatgatgagcaagtcaacccca

SEQ ID NO: 149785 - DNA, 25 bp, Probe Sequence
actcaagagccacaaacgcatccac

SEQ ID NO: 149786 - DNA, 25 bp, Probe Sequence
actcctgtgtctcaaacatgcttct

SEQ ID NO: 149787 - DNA, 25 bp, Probe Sequence
actccttgagctcaagtcatcctcc

SEQ ID NO: 149788 - DNA, 25 bp, Probe Sequence
actccccagataaagtctgctctct

SEQ ID NO: 149789 - DNA, 25 bp, Probe Sequence
actcctgacagtcttgtgcttttcc

SEQ ID NO: 149790 - DNA, 25 bp, Probe Sequence
actccagacagttattccataaagc

SEQ ID NO: 149791 - DNA, 25 bp, Probe Sequence
actctcaatcactcagctcttaaag

SEQ ID NO: 149792 - DNA, 25 bp, Probe Sequence
actcacttcacaagaccgtcaagag

SEQ ID NO: 149793 - DNA, 25 bp, Probe Sequence
actcatcgccaaagcatcctggcaa

SEQ ID NO: 149794 - DNA, 25 bp, Probe Sequence
acacaatgccaagacttcgaaaatg

SEQ ID NO: 149795 - DNA, 25 bp, Probe Sequence
acatacaggccatactttacaaagt

SEQ ID NO: 149796 - DNA, 25 bp, Probe Sequence
actcacagcctttattcttagaaca

SEQ ID NO: 149797 - DNA, 25 bp, Probe Sequence
actactacttacatctaacagacac

SEQ ID NO: 149798 - DNA, 25 bp, Probe Sequence
actactgacaccaaccaaagcggag

SEQ ID NO: 149799 - DNA, 25 bp, Probe Sequence
actcctcacaacaaccacgtgaaga

SEQ ID NO: 149800 - DNA, 25 bp, Probe Sequence
actccttggccaaccacgatagaga

SEQ ID NO: 149801 - DNA, 25 bp, Probe Sequence
actctttccacaacatccttaggga

SEQ ID NO: 149802 - DNA, 25 bp, Probe Sequence
actccgccccattgacgcaaatggg

SEQ ID NO: 149803 - DNA, 25 bp, Probe Sequence
actccgccccattgacgcaaatggg

SEQ ID NO: 149804 - DNA, 25 bp, Probe Sequence
actccgccccattgacgcaaatggg

SEQ ID NO: 149805 - DNA, 25 bp, Probe Sequence
actccgccccattgacgcaaatggg

SEQ ID NO: 149806 - DNA, 25 bp, Probe Sequence
actccgccccattgacgcaaatggg

SEQ ID NO: 149807 - DNA, 25 bp, Probe Sequence
actccgccccattgacgcaaatggg

SEQ ID NO: 149808 - DNA, 25 bp, Probe Sequence
actccgccccattgacgcaaatggg

SEQ ID NO: 149809 - DNA, 25 bp, Probe Sequence
actccgccccattgacgcaaatggg

SEQ ID NO: 149810 - DNA, 25 bp, Probe Sequence
actccgccccattgacgcaaatggg

SEQ ID NO: 149811 - DNA, 25 bp, Probe Sequence
actccgccccattgacgcaaatggg

SEQ ID NO: 149812 - DNA, 25 bp, Probe Sequence
actccgccccattgacgcaaatggg

SEQ ID NO: 149813 - DNA, 25 bp, Probe Sequence
actccgccccattgacgcaaatggg

SEQ ID NO: 149814 - DNA, 25 bp, Probe Sequence
actccgccccattgacgcaaatggg

SEQ ID NO: 149815 - DNA, 25 bp, Probe Sequence
actccgccccattgacgcaaatggg

SEQ ID NO: 149816 - DNA, 25 bp, Probe Sequence
actccgccccattgacgcaaatggg

SEQ ID NO: 149817 - DNA, 25 bp, Probe Sequence
actccgccccattgacgcaaatggg

SEQ ID NO: 149818 - DNA, 25 bp, Probe Sequence
actccgccccattgacgcaaatggg

SEQ ID NO: 149819 - DNA, 25 bp, Probe Sequence
actccgccccattgacgcaaatggg

SEQ ID NO: 149820 - DNA, 25 bp, Probe Sequence
actccgccccattgacgcaaatggg

SEQ ID NO: 149821 - DNA, 25 bp, Probe Sequence
actccgccccattgacgcaaatggg

SEQ ID NO: 149822 - DNA, 25 bp, Probe Sequence
actccgccccattgacgcaaatggg

SEQ ID NO: 149823 - DNA, 25 bp, Probe Sequence
actccgccccattgacgcaaatggg

SEQ ID NO: 149824 - DNA, 25 bp, Probe Sequence
actccgccccattgacgcaaatggg

SEQ ID NO: 149825 - DNA, 25 bp, Probe Sequence
actccgccccattgacgcaaatggg

SEQ ID NO: 149826 - DNA, 25 bp, Probe Sequence
actccgccccattgacgcaaatggg

SEQ ID NO: 149827 - DNA, 25 bp, Probe Sequence
actccgccccattgacgcaaatggg

SEQ ID NO: 149828 - DNA, 25 bp, Probe Sequence
actccgccccattgacgcaaatggg

SEQ ID NO: 149829 - DNA, 25 bp, Probe Sequence
actccgccccattgacgcaaatggg

SEQ ID NO: 149830 - DNA, 25 bp, Probe Sequence
actccgccccattgacgcaaatggg

SEQ ID NO: 149831 - DNA, 25 bp, Probe Sequence
actccgccccattgacgcaaatggg

SEQ ID NO: 149832 - DNA, 25 bp, Probe Sequence
actccgccccattgacgcaaatggg

SEQ ID NO: 149833 - DNA, 25 bp, Probe Sequence
actccgccccattgacgcaaatggg

SEQ ID NO: 149834 - DNA, 25 bp, Probe Sequence
actccgccccattgacgcaaatggg

SEQ ID NO: 149835 - DNA, 25 bp, Probe Sequence
actccgccccattgacgcaaatggg

SEQ ID NO: 149836 - DNA, 25 bp, Probe Sequence
actccgccccattgacgcaaatggg

SEQ ID NO: 149837 - DNA, 25 bp, Probe Sequence
actccgccccattgacgcaaatggg

SEQ ID NO: 149838 - DNA, 25 bp, Probe Sequence
actccgccccattgacgcaaatggg

SEQ ID NO: 149839 - DNA, 25 bp, Probe Sequence
actccgccccattgacgcaaatggg

SEQ ID NO: 149840 - DNA, 25 bp, Probe Sequence
actccgccccattgacgcaaatggg

SEQ ID NO: 149841 - DNA, 25 bp, Probe Sequence
actccgccccattgacgcaaatggg

SEQ ID NO: 149842 - DNA, 25 bp, Probe Sequence
actccgccccattgacgcaaatggg

SEQ ID NO: 149843 - DNA, 25 bp, Probe Sequence
actccgccccattgacgcaaatggg

SEQ ID NO: 149844 - DNA, 25 bp, Probe Sequence
actccgccccattgacgcaaatggg

SEQ ID NO: 149845 - DNA, 25 bp, Probe Sequence
actccgccccattgacgcaaatggg

SEQ ID NO: 149846 - DNA, 25 bp, Probe Sequence
actccgccccattgacgcaaatggg

SEQ ID NO: 149847 - DNA, 25 bp, Probe Sequence
actccgccccattgacgcaaatggg

SEQ ID NO: 149848 - DNA, 25 bp, Probe Sequence
actccgccccattgacgcaaatggg

SEQ ID NO: 149849 - DNA, 25 bp, Probe Sequence
actccgccccattgacgcaaatggg

SEQ ID NO: 149850 - DNA, 25 bp, Probe Sequence
actccgccccattgacgcaaatggg

SEQ ID NO: 149851 - DNA, 25 bp, Probe Sequence
actccgccccattgacgcaaatggg

SEQ ID NO: 149852 - DNA, 25 bp, Probe Sequence
actccgccccattgacgcaaatggg

SEQ ID NO: 149853 - DNA, 25 bp, Probe Sequence
actccgccccattgacgcaaatggg

SEQ ID NO: 149854 - DNA, 25 bp, Probe Sequence
actccgccccattgacgcaaatggg

SEQ ID NO: 149855 - DNA, 25 bp, Probe Sequence
actccgccccattgacgcaaatggg

SEQ ID NO: 149856 - DNA, 25 bp, Probe Sequence
actccgccccattgacgcaaatggg

SEQ ID NO: 149857 - DNA, 25 bp, Probe Sequence
actccgccccattgacgcaaatggg

SEQ ID NO: 149858 - DNA, 25 bp, Probe Sequence
actccgccccattgacgcaaatggg

SEQ ID NO: 149859 - DNA, 25 bp, Probe Sequence
actccgccccattgacgcaaatggg

SEQ ID NO: 149860 - DNA, 25 bp, Probe Sequence
actccgccccattgacgcaaatggg

SEQ ID NO: 149861 - DNA, 25 bp, Probe Sequence
actccgccccattgacgcaaatggg

SEQ ID NO: 149862 - DNA, 25 bp, Probe Sequence
actccgccccattgacgcaaatggg

SEQ ID NO: 149863 - DNA, 25 bp, Probe Sequence
actccgccccattgacgcaaatggg

SEQ ID NO: 149864 - DNA, 25 bp, Probe Sequence
actccgccccattgacgcaaatggg

SEQ ID NO: 149865 - DNA, 25 bp, Probe Sequence
actccgccccattgacgcaaatggg

SEQ ID NO: 149866 - DNA, 25 bp, Probe Sequence
actccgccccattgacgcaaatggg

SEQ ID NO: 149867 - DNA, 25 bp, Probe Sequence
actccgccccattgacgcaaatggg

SEQ ID NO: 149868 - DNA, 25 bp, Probe Sequence
actccgccccattgacgcaaatggg

SEQ ID NO: 149869 - DNA, 25 bp, Probe Sequence
actccgccccattgacgcaaatggg

SEQ ID NO: 149870 - DNA, 25 bp, Probe Sequence
actccgccccattgacgcaaatggg

SEQ ID NO: 149871 - DNA, 25 bp, Probe Sequence
actccgccccattgacgcaaatggg

SEQ ID NO: 149872 - DNA, 25 bp, Probe Sequence
actccgccccattgacgcaaatggg

SEQ ID NO: 149873 - DNA, 25 bp, Probe Sequence
actccgccccattgacgcaaatggg

SEQ ID NO: 149874 - DNA, 25 bp, Probe Sequence
actccgccccattgacgcaaatggg

SEQ ID NO: 149875 - DNA, 25 bp, Probe Sequence
actccgccccattgacgcaaatggg

SEQ ID NO: 149876 - DNA, 25 bp, Probe Sequence
actccgccccattgacgcaaatggg

SEQ ID NO: 149877 - DNA, 25 bp, Probe Sequence
actccgccccattgacgcaaatggg

SEQ ID NO: 149878 - DNA, 25 bp, Probe Sequence
actcgggcccatggaaacagtggca

SEQ ID NO: 149879 - DNA, 25 bp, Probe Sequence
actcggggagcagaatcacctgtgc

SEQ ID NO: 149880 - DNA, 25 bp, Probe Sequence
actcggggagcagaatcacctgtgc

SEQ ID NO: 149881 - DNA, 25 bp, Probe Sequence
actcatgcgggacccagctaacttg

SEQ ID NO: 149882 - DNA, 25 bp, Probe Sequence
actacggtcaatgctctgaaatctg

SEQ ID NO: 149883 - DNA, 25 bp, Probe Sequence
actaatagaatatctctgaagctgg

SEQ ID NO: 149884 - DNA, 25 bp, Probe Sequence
actaaatgtattttcgagcaaagag

SEQ ID NO: 149885 - DNA, 25 bp, Probe Sequence
actaacagctgatctctcggcagaa

SEQ ID NO: 149886 - DNA, 25 bp, Probe Sequence
actctacagtgtcttaagcaatatt

SEQ ID NO: 149887 - DNA, 25 bp, Probe Sequence
gtggtccttggaaccgaggatttgg

SEQ ID NO: 149888 - DNA, 25 bp, Probe Sequence
gttgactttggatacaaggtttggc

SEQ ID NO: 149889 - DNA, 25 bp, Probe Sequence
gttacttttaacattgcctcgtggc

SEQ ID NO: 149890 - DNA, 25 bp, Probe Sequence
acttcttttccgatgggatccggct

SEQ ID NO: 149891 - DNA, 25 bp, Probe Sequence
actttttttcttatgcaaacgtcat

SEQ ID NO: 149892 - DNA, 25 bp, Probe Sequence
actttttttcttatgcaaacgtcat

SEQ ID NO: 149893 - DNA, 25 bp, Probe Sequence
actcttgtttacttatgagcataat

SEQ ID NO: 149894 - DNA, 25 bp, Probe Sequence
actttctcctaactaaatatttgat

SEQ ID NO: 149895 - DNA, 25 bp, Probe Sequence
actttctcctaactaaatatttgat

SEQ ID NO: 149896 - DNA, 25 bp, Probe Sequence
acttacactttacaaaaggctgctg

SEQ ID NO: 149897 - DNA, 25 bp, Probe Sequence
aactgacatctagaggaataaatcg

SEQ ID NO: 149898 - DNA, 25 bp, Probe Sequence
acatctacttacaagccaaaaatgg

SEQ ID NO: 149899 - DNA, 25 bp, Probe Sequence
actatgatctcatcccaataaaatg

SEQ ID NO: 149900 - DNA, 25 bp, Probe Sequence
actagctgagcttcccataagtcta

SEQ ID NO: 149901 - DNA, 25 bp, Probe Sequence
actcatggcaggttctagagactta

SEQ ID NO: 149902 - DNA, 25 bp, Probe Sequence
actctgcgcgcagtgggcgagatct

SEQ ID NO: 149903 - DNA, 25 bp, Probe Sequence
actcgctgctcattgcaggccagat

SEQ ID NO: 149904 - DNA, 25 bp, Probe Sequence
acattgcatgtattgcaggcaaggc

SEQ ID NO: 149905 - DNA, 25 bp, Probe Sequence
acttattcaatgaagcggagctgga

SEQ ID NO: 149906 - DNA, 25 bp, Probe Sequence
actcaattcctcaattgggctggcc

SEQ ID NO: 149907 - DNA, 25 bp, Probe Sequence
actctcctccaaattcgcgaggctc

SEQ ID NO: 149908 - DNA, 25 bp, Probe Sequence
actctgtcacccaggctggagtgca

SEQ ID NO: 149909 - DNA, 25 bp, Probe Sequence
actctgtcacccaggctggagtgca

SEQ ID NO: 149910 - DNA, 25 bp, Probe Sequence
actctctcttcgcaagtgaggatca

SEQ ID NO: 149911 - DNA, 25 bp, Probe Sequence
actcatccttgcccaggtgagggaa

SEQ ID NO: 149912 - DNA, 25 bp, Probe Sequence
actacctcggccatgtcatggtaaa

SEQ ID NO: 149913 - DNA, 25 bp, Probe Sequence
actaccataaccagtttgcgagtca

SEQ ID NO: 149914 - DNA, 25 bp, Probe Sequence
actcccaaagacttctatgttgatg

SEQ ID NO: 149915 - DNA, 25 bp, Probe Sequence
actcccttttgcttatagtgtgcat

SEQ ID NO: 149916 - DNA, 25 bp, Probe Sequence
actccctgataacttcatagctgcc

SEQ ID NO: 149917 - DNA, 25 bp, Probe Sequence
actcccgcagcttatgtctagcgtg

SEQ ID NO: 149918 - DNA, 25 bp, Probe Sequence
actcccaggtattgttgcagaaggc

SEQ ID NO: 149919 - DNA, 25 bp, Probe Sequence
actcccacgtctggttcgtgatggg

SEQ ID NO: 149920 - DNA, 25 bp, Probe Sequence
actctcccgtggatgacggatgagg

SEQ ID NO: 149921 - DNA, 25 bp, Probe Sequence
actctgtcctggaggcactgggaag

SEQ ID NO: 149922 - DNA, 25 bp, Probe Sequence
acatttccatagagaccgtgtggtt

SEQ ID NO: 149923 - DNA, 25 bp, Probe Sequence
actattccaataaacacgtgcagag

SEQ ID NO: 149924 - DNA, 25 bp, Probe Sequence
actatacctattattcggcgcatga

SEQ ID NO: 149925 - DNA, 25 bp, Probe Sequence
actaacacttgggttctatgctcag

SEQ ID NO: 149926 - DNA, 25 bp, Probe Sequence
actactcctggtgcttatagctctg

SEQ ID NO: 149927 - DNA, 25 bp, Probe Sequence
actacatcttggacctgcagatcgc

SEQ ID NO: 149928 - DNA, 25 bp, Probe Sequence
acttcagccagtggcctcaatggcc

SEQ ID NO: 149929 - DNA, 25 bp, Probe Sequence
acttgagctcagacctctaaaccct

SEQ ID NO: 149930 - DNA, 25 bp, Probe Sequence
actctgagctcccacgagaaacact

SEQ ID NO: 149931 - DNA, 25 bp, Probe Sequence
catttaatcaccatgggaaactgtt

SEQ ID NO: 149932 - DNA, 25 bp, Probe Sequence
actcccatcatcctagtgggaacta

SEQ ID NO: 149933 - DNA, 25 bp, Probe Sequence
actctcacattccaggcgttgaact

SEQ ID NO: 149934 - DNA, 25 bp, Probe Sequence
actcgatcaccaagatgcttctgaa

SEQ ID NO: 149935 - DNA, 25 bp, Probe Sequence
actcagatcccaagcagtattgaag

SEQ ID NO: 149936 - DNA, 25 bp, Probe Sequence
actagctcaccagcagtgaatccaa

SEQ ID NO: 149937 - DNA, 25 bp, Probe Sequence
actatgtgcccagcattgactaatg

SEQ ID NO: 149938 - DNA, 25 bp, Probe Sequence
actcatgtaaattatggagcacaat

SEQ ID NO: 149939 - DNA, 25 bp, Probe Sequence
actctcatcatgcaaattagccaat

SEQ ID NO: 149940 - DNA, 25 bp, Probe Sequence
actctagatgctttatggacaatat

SEQ ID NO: 149941 - DNA, 25 bp, Probe Sequence
actcgctgtgcccatgatggacaca

SEQ ID NO: 149942 - DNA, 25 bp, Probe Sequence
actcagtgtttaaggcacaccctgc

SEQ ID NO: 149943 - DNA, 25 bp, Probe Sequence
actagtgatactactgggacccatg

SEQ ID NO: 149944 - DNA, 25 bp, Probe Sequence
actaggaccgacagtgacttcacca

SEQ ID NO: 149945 - DNA, 25 bp, Probe Sequence
actaaatacagaaagatacttcctc

SEQ ID NO: 149946 - DNA, 25 bp, Probe Sequence
actaaactgactaagataatactct

SEQ ID NO: 149947 - DNA, 25 bp, Probe Sequence
actaacttcactgggataatcagca

SEQ ID NO: 149948 - DNA, 25 bp, Probe Sequence
actcacagttccagggatagcaact

SEQ ID NO: 149949 - DNA, 25 bp, Probe Sequence
actacagttgtcaagaatgcatcaa

SEQ ID NO: 149950 - DNA, 25 bp, Probe Sequence
actaaggtgtctaccatgattattt

SEQ ID NO: 149951 - DNA, 25 bp, Probe Sequence
actacagacgtcttccagatcggtc

SEQ ID NO: 149952 - DNA, 25 bp, Probe Sequence
actagagacgtcttccagatcggtc

SEQ ID NO: 149953 - DNA, 25 bp, Probe Sequence
actagaacgctcttcttttagtgtt

SEQ ID NO: 149954 - DNA, 25 bp, Probe Sequence
actttccgctatcttttgggttcat

SEQ ID NO: 149955 - DNA, 25 bp, Probe Sequence
acatttaccgaataataggacctat

SEQ ID NO: 149956 - DNA, 25 bp, Probe Sequence
cactttaccgtagctaaacccagct

SEQ ID NO: 149957 - DNA, 25 bp, Probe Sequence
cattttaccgtacaaatatcctggt

SEQ ID NO: 149958 - DNA, 25 bp, Probe Sequence
cacttttccctgtctaaactccagg

SEQ ID NO: 149959 - DNA, 25 bp, Probe Sequence
actctttcaccctactaaattcaag

SEQ ID NO: 149960 - DNA, 25 bp, Probe Sequence
actctttctccctttgcaaaaatgg

SEQ ID NO: 149961 - DNA, 25 bp, Probe Sequence
actctttctccctttgcaaaaatgg

SEQ ID NO: 149962 - DNA, 25 bp, Probe Sequence
actctttctccctttgcaaaaatgg

SEQ ID NO: 149963 - DNA, 25 bp, Probe Sequence
actctgttttccggactgttattag

SEQ ID NO: 149964 - DNA, 25 bp, Probe Sequence
actcgattttacatgatattttgat

SEQ ID NO: 149965 - DNA, 25 bp, Probe Sequence
actccccttattgctgatgtttatt

SEQ ID NO: 149966 - DNA, 25 bp, Probe Sequence
actccccttattgctgatgtttatt

SEQ ID NO: 149967 - DNA, 25 bp, Probe Sequence
gacaatcaatcagtcagtctttact

SEQ ID NO: 149968 - DNA, 25 bp, Probe Sequence
actacacaaagcaggcttgcccagt

SEQ ID NO: 149969 - DNA, 25 bp, Probe Sequence
actaccacgagcccagatgtgacct

SEQ ID NO: 149970 - DNA, 25 bp, Probe Sequence
actacagccgagagagagtgcaatt

SEQ ID NO: 149971 - DNA, 25 bp, Probe Sequence
actcaaggcaaggtgcggtggctca

SEQ ID NO: 149972 - DNA, 25 bp, Probe Sequence
acttagtgtagctccagcatggatc

SEQ ID NO: 149973 - DNA, 25 bp, Probe Sequence
actcacagagactatctccagcagg

SEQ ID NO: 149974 - DNA, 25 bp, Probe Sequence
actagaagcacttgccagctcagag

SEQ ID NO: 149975 - DNA, 25 bp, Probe Sequence
actactaagtggctgctgcgaggga

SEQ ID NO: 149976 - DNA, 25 bp, Probe Sequence
acttgtaaggacagtgcctgggaac

SEQ ID NO: 149977 - DNA, 25 bp, Probe Sequence
acttcgaagccatagggtggagaaa

SEQ ID NO: 149978 - DNA, 25 bp, Probe Sequence
actacgaggccaccaggttggaggg

SEQ ID NO: 149979 - DNA, 25 bp, Probe Sequence
actcccatggtcctgcagaggtggg

SEQ ID NO: 149980 - DNA, 25 bp, Probe Sequence
actctcccgtcttcgaggcgggagt

SEQ ID NO: 149981 - DNA, 25 bp, Probe Sequence
actccctaatcatcaagacttggaa

SEQ ID NO: 149982 - DNA, 25 bp, Probe Sequence
actctctaaatgaccaaagttggga

SEQ ID NO: 149983 - DNA, 25 bp, Probe Sequence
actctctaaattggtaaggtcatga

SEQ ID NO: 149984 - DNA, 25 bp, Probe Sequence
actcggagaattgtgcaggtgtcat

SEQ ID NO: 149985 - DNA, 25 bp, Probe Sequence
actcaacaacctgtgagggccagcc

SEQ ID NO: 149986 - DNA, 25 bp, Probe Sequence
actcgcaaaagtgttgggcatcgca

SEQ ID NO: 149987 - DNA, 25 bp, Probe Sequence
acttgaaagttcactgggactcagt

SEQ ID NO: 149988 - DNA, 25 bp, Probe Sequence
acttaggacttctactggcagacat

SEQ ID NO: 149989 - DNA, 25 bp, Probe Sequence
actacatgggcttggccgaagagct

SEQ ID NO: 149990 - DNA, 25 bp, Probe Sequence
actacatcccttcacaaagagtata

SEQ ID NO: 149991 - DNA, 25 bp, Probe Sequence
actagcccctatgtcaaagaattca

SEQ ID NO: 149992 - DNA, 25 bp, Probe Sequence
actctcctgccttgaaaaagacatt

SEQ ID NO: 149993 - DNA, 25 bp, Probe Sequence
actctggacaataaaaacgaatgta

SEQ ID NO: 149994 - DNA, 25 bp, Probe Sequence
actcaggaatgaaaaaccaacatcg

SEQ ID NO: 149995 - DNA, 25 bp, Probe Sequence
actatggcactaaccaaaaacttgc

SEQ ID NO: 149996 - DNA, 25 bp, Probe Sequence
actatttcaagagccaacaatctag

SEQ ID NO: 149997 - DNA, 25 bp, Probe Sequence
actttccaaatgtcggtacactccg

SEQ ID NO: 149998 - DNA, 25 bp, Probe Sequence
actctacacaaatccagctaacacc

SEQ ID NO: 149999 - DNA, 25 bp, Probe Sequence
actctacacaacatattttgtcacc

SEQ ID NO: 150000 - DNA, 25 bp, Probe Sequence
actctaacatctagctggctttccc

SEQ ID NO: 150001 - DNA, 25 bp, Probe Sequence
actctgaacacgctggttatctaaa

SEQ ID NO: 150002 - DNA, 25 bp, Probe Sequence
actctgatcaccccgagaaagtaaa

SEQ ID NO: 150003 - DNA, 25 bp, Probe Sequence
actcttgccctgttagaaatccaca

SEQ ID NO: 150004 - DNA, 25 bp, Probe Sequence
cactcttcacctgtaaacccgggtg

SEQ ID NO: 150005 - DNA, 25 bp, Probe Sequence
acttactagttatatcaccttgggt

SEQ ID NO: 150006 - DNA, 25 bp, Probe Sequence
acttacaaatcaaattagccgggcg

SEQ ID NO: 150007 - DNA, 25 bp, Probe Sequence
acttcacaagtgttttacttcgacg

SEQ ID NO: 150008 - DNA, 25 bp, Probe Sequence
actaactggtatattagatcccatg

SEQ ID NO: 150009 - DNA, 25 bp, Probe Sequence
actcagtttggttttagtccacatg

SEQ ID NO: 150010 - DNA, 25 bp, Probe Sequence
actcagtttagtttcatggtttata

SEQ ID NO: 150011 - DNA, 25 bp, Probe Sequence
actaagtgcaatgttgatgggttat

SEQ ID NO: 150012 - DNA, 25 bp, Probe Sequence
actcaagtgtgggtttctgtgttat

SEQ ID NO: 150013 - DNA, 25 bp, Probe Sequence
actcaggtgatggactcttcttcct

SEQ ID NO: 150014 - DNA, 25 bp, Probe Sequence
actcagttcggagtgctgtgtgccc

SEQ ID NO: 150015 - DNA, 25 bp, Probe Sequence
actatgtatcaggcatctgtgctga

SEQ ID NO: 150016 - DNA, 25 bp, Probe Sequence
actatgatgagcgtgtgctgccgtc

SEQ ID NO: 150017 - DNA, 25 bp, Probe Sequence
actctgtgatgtatcatgatagtca

SEQ ID NO: 150018 - DNA, 25 bp, Probe Sequence
actctgttgagtacatatactgaca

SEQ ID NO: 150019 - DNA, 25 bp, Probe Sequence
actctggatggtcagaactggctga

SEQ ID NO: 150020 - DNA, 25 bp, Probe Sequence
actctggtgcagcttgaatcttggt

SEQ ID NO: 150021 - DNA, 25 bp, Probe Sequence
actcttgacagttgtgcttctctag

SEQ ID NO: 150022 - DNA, 25 bp, Probe Sequence
actcgtatagcatgcatctgtttat

SEQ ID NO: 150023 - DNA, 25 bp, Probe Sequence
actctggttcccttgtttatctgag

SEQ ID NO: 150024 - DNA, 25 bp, Probe Sequence
actctgttgtccaggttggagtgca

SEQ ID NO: 150025 - DNA, 25 bp, Probe Sequence
actcgtgtaagcagtttggtggaag

SEQ ID NO: 150026 - DNA, 25 bp, Probe Sequence
acacaaaaacccatatttctgaaat

SEQ ID NO: 150027 - DNA, 25 bp, Probe Sequence
acaggaaaacctatggggaatgata

SEQ ID NO: 150028 - DNA, 25 bp, Probe Sequence
acaaacaagacggcctggggataca

SEQ ID NO: 150029 - DNA, 25 bp, Probe Sequence
acttcaaacactgatcacgggaaca

SEQ ID NO: 150030 - DNA, 25 bp, Probe Sequence
actaaaccagattctttgtggatac

SEQ ID NO: 150031 - DNA, 25 bp, Probe Sequence
actaaatacattgtccctcgatgcc

SEQ ID NO: 150032 - DNA, 25 bp, Probe Sequence
actacttctcatgaactcaccattc

SEQ ID NO: 150033 - DNA, 25 bp, Probe Sequence
actattttatctaatctccaacctt

SEQ ID NO: 150034 - DNA, 25 bp, Probe Sequence
actagttttgtgccagccgtgatgc

SEQ ID NO: 150035 - DNA, 25 bp, Probe Sequence
actcgcattttaatgatccgctatt

SEQ ID NO: 150036 - DNA, 25 bp, Probe Sequence
actcactggcttaagcatcccataa

SEQ ID NO: 150037 - DNA, 25 bp, Probe Sequence
actcagctcttaaagcaacctgtca

SEQ ID NO: 150038 - DNA, 25 bp, Probe Sequence
actcatgcctgaacaaaactcatct

SEQ ID NO: 150039 - DNA, 25 bp, Probe Sequence
actcatcgatgagaactctctcatt

SEQ ID NO: 150040 - DNA, 25 bp, Probe Sequence
actcatggtgtggctaatctacatt

SEQ ID NO: 150041 - DNA, 25 bp, Probe Sequence
actcatctcattgtgaactagtgat

SEQ ID NO: 150042 - DNA, 25 bp, Probe Sequence
actctccatgtgtataaattattga

SEQ ID NO: 150043 - DNA, 25 bp, Probe Sequence
actctgccatagttcattgattttt

SEQ ID NO: 150044 - DNA, 25 bp, Probe Sequence
actcaggaagatagcagattgtttt

SEQ ID NO: 150045 - DNA, 25 bp, Probe Sequence
actcacatacagtagatcacttttt

SEQ ID NO: 150046 - DNA, 25 bp, Probe Sequence
acatactaattacccattggatact

SEQ ID NO: 150047 - DNA, 25 bp, Probe Sequence
actattaagtcatgtcctggtaccg

SEQ ID NO: 150048 - DNA, 25 bp, Probe Sequence
actcatgtgccttcaattttggtat

SEQ ID NO: 150049 - DNA, 25 bp, Probe Sequence
actcatatttgcacacttttgtgtc

SEQ ID NO: 150050 - DNA, 25 bp, Probe Sequence
actcatgaattgctaagtgtttttt

SEQ ID NO: 150051 - DNA, 25 bp, Probe Sequence
acttaatctactgtggtgttttgtt

SEQ ID NO: 150052 - DNA, 25 bp, Probe Sequence
actatctacctcactggttttttag

SEQ ID NO: 150053 - DNA, 25 bp, Probe Sequence
actttgactccatgtgggacttttc

SEQ ID NO: 150054 - DNA, 25 bp, Probe Sequence
actttgtctccataagcctgttttt

SEQ ID NO: 150055 - DNA, 25 bp, Probe Sequence
actcaagccatcacaaactcttttt

SEQ ID NO: 150056 - DNA, 25 bp, Probe Sequence
actacctctgttgaggctcactatt

SEQ ID NO: 150057 - DNA, 25 bp, Probe Sequence
actacctatttatctgcttctagtt

SEQ ID NO: 150058 - DNA, 25 bp, Probe Sequence
actacactgacgtagactgtgtcta

SEQ ID NO: 150059 - DNA, 25 bp, Probe Sequence
actacactagcttaatctggtttac

SEQ ID NO: 150060 - DNA, 25 bp, Probe Sequence
actcaaccagtatatattttaagat

SEQ ID NO: 150061 - DNA, 25 bp, Probe Sequence
actctcccctcaaaatcattgtcaa

SEQ ID NO: 150062 - DNA, 25 bp, Probe Sequence
actctggagcccttaatgattgatc

SEQ ID NO: 150063 - DNA, 25 bp, Probe Sequence
actctggaggccctcttgtgtgtaa

SEQ ID NO: 150064 - DNA, 25 bp, Probe Sequence
actctgaggcctgaagttctgtgat

SEQ ID NO: 150065 - DNA, 25 bp, Probe Sequence
actctgactgcctaagtgtacttgt

SEQ ID NO: 150066 - DNA, 25 bp, Probe Sequence
actctaatgtcaatcgttccttatc

SEQ ID NO: 150067 - DNA, 25 bp, Probe Sequence
actctgctaaactgtcttgcttatc

SEQ ID NO: 150068 - DNA, 25 bp, Probe Sequence
actctcatgagatctattttgcctg

SEQ ID NO: 150069 - DNA, 25 bp, Probe Sequence
actctcgcgagagcgtatctgcgtg

SEQ ID NO: 150070 - DNA, 25 bp, Probe Sequence
actctcagtggagcctggcgagctt

SEQ ID NO: 150071 - DNA, 25 bp, Probe Sequence
actctcagtggagcctggcgagctt

SEQ ID NO: 150072 - DNA, 25 bp, Probe Sequence
actctcgtgcaaaaggggtgcatta

SEQ ID NO: 150073 - DNA, 25 bp, Probe Sequence
actactgtatcatgagtgggtattt

SEQ ID NO: 150074 - DNA, 25 bp, Probe Sequence
actttggtacgatggtgctttgcaa

SEQ ID NO: 150075 - DNA, 25 bp, Probe Sequence
actttgtcaaagttggtttggcaat

SEQ ID NO: 150076 - DNA, 25 bp, Probe Sequence
actactctcaaaggtgtctttaaag

SEQ ID NO: 150077 - DNA, 25 bp, Probe Sequence
actactctcacacccttttaaagat

SEQ ID NO: 150078 - DNA, 25 bp, Probe Sequence
actcttacacctgttatggaaaatg

SEQ ID NO: 150079 - DNA, 25 bp, Probe Sequence
actttaacacctgtcagagaaacgt

SEQ ID NO: 150080 - DNA, 25 bp, Probe Sequence
cactttacaggtccccgatgaacca

SEQ ID NO: 150081 - DNA, 25 bp, Probe Sequence
actttaattaccgcgcattgagtag

SEQ ID NO: 150082 - DNA, 25 bp, Probe Sequence
actcttacttaccagcagaattcag

SEQ ID NO: 150083 - DNA, 25 bp, Probe Sequence
actcttttccaggacagcaattgtg

SEQ ID NO: 150084 - DNA, 25 bp, Probe Sequence
actattgttcaagtgagcccggagt

SEQ ID NO: 150085 - DNA, 25 bp, Probe Sequence
acaccttcttcagtgaaacgggtgc

SEQ ID NO: 150086 - DNA, 25 bp, Probe Sequence
acacgactcctcagtgaactcggtg

SEQ ID NO: 150087 - DNA, 25 bp, Probe Sequence
actcaagcccgcggggacattggga

SEQ ID NO: 150088 - DNA, 25 bp, Probe Sequence
actcaagaccggaggcacagagggc

SEQ ID NO: 150089 - DNA, 25 bp, Probe Sequence
actacaaccttggtggcacagtgag

SEQ ID NO: 150090 - DNA, 25 bp, Probe Sequence
actcacacccatagcgggagagacc

SEQ ID NO: 150091 - DNA, 25 bp, Probe Sequence
actctcctacaatggtgagcaccct

SEQ ID NO: 150092 - DNA, 25 bp, Probe Sequence
actctgcctcaaacttgtgatgaac

SEQ ID NO: 150093 - DNA, 25 bp, Probe Sequence
actcatctctaacattatggtaata

SEQ ID NO: 150094 - DNA, 25 bp, Probe Sequence
actctctccatataatttctataga

SEQ ID NO: 150095 - DNA, 25 bp, Probe Sequence
acttctacagtctaatcgtcatagg

SEQ ID NO: 150096 - DNA, 25 bp, Probe Sequence
actctctgggctgtgatcgattggg

SEQ ID NO: 150097 - DNA, 25 bp, Probe Sequence
actctcagaggtagtttgcagggga

SEQ ID NO: 150098 - DNA, 25 bp, Probe Sequence
acttccaggcccacagcatggggct

SEQ ID NO: 150099 - DNA, 25 bp, Probe Sequence
actaagaggcatggccccaacggta

SEQ ID NO: 150100 - DNA, 25 bp, Probe Sequence
acttagtagctactcccaaattgtc

SEQ ID NO: 150101 - DNA, 25 bp, Probe Sequence
actaatcttcaactcctacatactt

SEQ ID NO: 150102 - DNA, 25 bp, Probe Sequence
actaatttacattttcagctatatt

SEQ ID NO: 150103 - DNA, 25 bp, Probe Sequence
actcacctctattttgtcagttcat

SEQ ID NO: 150104 - DNA, 25 bp, Probe Sequence
actctgtcttgtacgtttgttctgc

SEQ ID NO: 150105 - DNA, 25 bp, Probe Sequence
actatgtgcaggaacccttggtcac

SEQ ID NO: 150106 - DNA, 25 bp, Probe Sequence
acttgtagggatgcctttctagtcc

SEQ ID NO: 150107 - DNA, 25 bp, Probe Sequence
actctttggagatgcccattctact

SEQ ID NO: 150108 - DNA, 25 bp, Probe Sequence
actcttttcagagaactttcactca

SEQ ID NO: 150109 - DNA, 25 bp, Probe Sequence
actcttttattcaacctttgccact

SEQ ID NO: 150110 - DNA, 25 bp, Probe Sequence
actttggaaccaaaatctctgccag

SEQ ID NO: 150111 - DNA, 25 bp, Probe Sequence
acttcaaaaccaataagccttgcca

SEQ ID NO: 150112 - DNA, 25 bp, Probe Sequence
actcacaagaaccttataactttca

SEQ ID NO: 150113 - DNA, 25 bp, Probe Sequence
actcacaagaaacctataacttcac

SEQ ID NO: 150114 - DNA, 25 bp, Probe Sequence
actctccaaattcagtaactatatc

SEQ ID NO: 150115 - DNA, 25 bp, Probe Sequence
actctttttctcagtaaatcatatc

SEQ ID NO: 150116 - DNA, 25 bp, Probe Sequence
acttctattttgaggtaactgttgt

SEQ ID NO: 150117 - DNA, 25 bp, Probe Sequence
actttttttggatggggctggcatg

SEQ ID NO: 150118 - DNA, 25 bp, Probe Sequence
actttgattttggacagggacaagg

SEQ ID NO: 150119 - DNA, 25 bp, Probe Sequence
actttggtggtggtcttggacgtgg

SEQ ID NO: 150120 - DNA, 25 bp, Probe Sequence
actttggtttttcttgtcctgtgtg

SEQ ID NO: 150121 - DNA, 25 bp, Probe Sequence
actttactgattctgcctacaccag

SEQ ID NO: 150122 - DNA, 25 bp, Probe Sequence
actttactatgttactgtaccctgc

SEQ ID NO: 150123 - DNA, 25 bp, Probe Sequence
actttggtgatgcaaatttccctag

SEQ ID NO: 150124 - DNA, 25 bp, Probe Sequence
actctcatggttcatagtattcact

SEQ ID NO: 150125 - DNA, 25 bp, Probe Sequence
actctagtttgcacagttcacagct

SEQ ID NO: 150126 - DNA, 25 bp, Probe Sequence
actcatggtttcatttagcagactt

SEQ ID NO: 150127 - DNA, 25 bp, Probe Sequence
actctcctttttaacatcagtctgt

SEQ ID NO: 150128 - DNA, 25 bp, Probe Sequence
actctgccgtaactggaatcttcat

SEQ ID NO: 150129 - DNA, 25 bp, Probe Sequence
acttacctaactgacagcccaaagc

SEQ ID NO: 150130 - DNA, 25 bp, Probe Sequence
actataccataacccaaggctgaaa

SEQ ID NO: 150131 - DNA, 25 bp, Probe Sequence
actatacctgactcaagtcctggta

SEQ ID NO: 150132 - DNA, 25 bp, Probe Sequence
acagaaccagtctgcaacgcgtggc

SEQ ID NO: 150133 - DNA, 25 bp, Probe Sequence
actaacgagttcatcacctggagcc

SEQ ID NO: 150134 - DNA, 25 bp, Probe Sequence
actaaagttgtcatccgtggagcag

SEQ ID NO: 150135 - DNA, 25 bp, Probe Sequence
actaaagttgtcatccgtggagcag

SEQ ID NO: 150136 - DNA, 25 bp, Probe Sequence
actaaacttcaagcctctggagcag

SEQ ID NO: 150137 - DNA, 25 bp, Probe Sequence
actaattcttaagtgacgtggatga

SEQ ID NO: 150138 - DNA, 25 bp, Probe Sequence
actctactcctaactgacttcaata

SEQ ID NO: 150139 - DNA, 25 bp, Probe Sequence
actctattcgccttaggcatgtgca

SEQ ID NO: 150140 - DNA, 25 bp, Probe Sequence
actcttgtttcactggactctgcag

SEQ ID NO: 150141 - DNA, 25 bp, Probe Sequence
actcatttgcttattcagttgctga

SEQ ID NO: 150142 - DNA, 25 bp, Probe Sequence
actcacagtgtcactgtcagatggt

SEQ ID NO: 150143 - DNA, 25 bp, Probe Sequence
actacagatgtcaactccttggggt

SEQ ID NO: 150144 - DNA, 25 bp, Probe Sequence
actcaagtgtcacctccttggagaa

SEQ ID NO: 150145 - DNA, 25 bp, Probe Sequence
actaggcttagtacttgggtgacaa

SEQ ID NO: 150146 - DNA, 25 bp, Probe Sequence
actcacgctggatatcctggatgtg

SEQ ID NO: 150147 - DNA, 25 bp, Probe Sequence
actctcctggccttctaggaatgga

SEQ ID NO: 150148 - DNA, 25 bp, Probe Sequence
actctacgtgtgtctccagaacaaa

SEQ ID NO: 150149 - DNA, 25 bp, Probe Sequence
actctacttctggccaaagcacaat

SEQ ID NO: 150150 - DNA, 25 bp, Probe Sequence
actctccgtctggcctaaaggtgat

SEQ ID NO: 150151 - DNA, 25 bp, Probe Sequence
actcttgctcttacattaaagttgt

SEQ ID NO: 150152 - DNA, 25 bp, Probe Sequence
actcttgtgctttcatacgcacctt

SEQ ID NO: 150153 - DNA, 25 bp, Probe Sequence
actctatgtgtactccaaagttgtg

SEQ ID NO: 150154 - DNA, 25 bp, Probe Sequence
acatcaaattgacataagaggggca

SEQ ID NO: 150155 - DNA, 25 bp, Probe Sequence
actataagtttgttcagaggggctt

SEQ ID NO: 150156 - DNA, 25 bp, Probe Sequence
actaattccttgtgcagaggtgggt

SEQ ID NO: 150157 - DNA, 25 bp, Probe Sequence
actagatgttgcttgttggagagat

SEQ ID NO: 150158 - DNA, 25 bp, Probe Sequence
acataatgatgccaatgggtggaat

SEQ ID NO: 150159 - DNA, 25 bp, Probe Sequence
actaagcatgaaagaacgtgagcac

SEQ ID NO: 150160 - DNA, 25 bp, Probe Sequence
actcatagctgtagattacgtgaag

SEQ ID NO: 150161 - DNA, 25 bp, Probe Sequence
actcttgctgtggtgctacgtggaa

SEQ ID NO: 150162 - DNA, 25 bp, Probe Sequence
actctctgctggctggtacattgaa

SEQ ID NO: 150163 - DNA, 25 bp, Probe Sequence
actttgatggtgtatgtacgatgaa

SEQ ID NO: 150164 - DNA, 25 bp, Probe Sequence
actatttggtttcttgctagccaaa

SEQ ID NO: 150165 - DNA, 25 bp, Probe Sequence
actcacttctgtttctattaactaa

SEQ ID NO: 150166 - DNA, 25 bp, Probe Sequence
actcacttatggtctccacaagtat

SEQ ID NO: 150167 - DNA, 25 bp, Probe Sequence
actcatctacatttcccacaaagtc

SEQ ID NO: 150168 - DNA, 25 bp, Probe Sequence
actctatttattcccacatcaatga

SEQ ID NO: 150169 - DNA, 25 bp, Probe Sequence
actctcatttgacaagcagagaaag

SEQ ID NO: 150170 - DNA, 25 bp, Probe Sequence
actctagcctgggtgacagagcgag

SEQ ID NO: 150171 - DNA, 25 bp, Probe Sequence
acatcgacgtggagattacaggacc

SEQ ID NO: 150172 - DNA, 25 bp, Probe Sequence
acatcgccgtggagtacgtagacga

SEQ ID NO: 150173 - DNA, 25 bp, Probe Sequence
acaggccaggtaagtacacgagaag

SEQ ID NO: 150174 - DNA, 25 bp, Probe Sequence
acaggccaggcccaaaggatagaag

SEQ ID NO: 150175 - DNA, 25 bp, Probe Sequence
actcagccgcctgcaatcaggtgaa

SEQ ID NO: 150176 - DNA, 25 bp, Probe Sequence
actagcactccagcctgggtgacag

SEQ ID NO: 150177 - DNA, 25 bp, Probe Sequence
actacactccagcctgggtgataga

SEQ ID NO: 150178 - DNA, 25 bp, Probe Sequence
actcatctgtccaagttcgtggcag

SEQ ID NO: 150179 - DNA, 25 bp, Probe Sequence
actcagttctgcaggtctgtgtgcc

SEQ ID NO: 150180 - DNA, 25 bp, Probe Sequence
actcacttctgctagagtctcagag

SEQ ID NO: 150181 - DNA, 25 bp, Probe Sequence
actatcatgcttcggatgtcttgga

SEQ ID NO: 150182 - DNA, 25 bp, Probe Sequence
actacatcacgccgatgatggagct

SEQ ID NO: 150183 - DNA, 25 bp, Probe Sequence
actcactcaccaggataaacattgc

SEQ ID NO: 150184 - DNA, 25 bp, Probe Sequence
actactcccagttagatatcagtga

SEQ ID NO: 150185 - DNA, 25 bp, Probe Sequence
actactgcacaagttgacaataggt

SEQ ID NO: 150186 - DNA, 25 bp, Probe Sequence
actcactcactgtttataaatgttc

SEQ ID NO: 150187 - DNA, 25 bp, Probe Sequence
actcagattctgacttacaaagtgt

SEQ ID NO: 150188 - DNA, 25 bp, Probe Sequence
actctacttgatctcagagaaggtc

SEQ ID NO: 150189 - DNA, 25 bp, Probe Sequence
acttagcctgtattgggaaggtgcg

SEQ ID NO: 150190 - DNA, 25 bp, Probe Sequence
actacagcgtgaacggggagccggt

SEQ ID NO: 150191 - DNA, 25 bp, Probe Sequence
actacacgtgagtccaggaggtcaa

SEQ ID NO: 150192 - DNA, 25 bp, Probe Sequence
actaatctggatcctaaacctgcaa

SEQ ID NO: 150193 - DNA, 25 bp, Probe Sequence
actaatctgttgagagctaaaaatt

SEQ ID NO: 150194 - DNA, 25 bp, Probe Sequence
actcttcttcatacatgactagcaa

SEQ ID NO: 150195 - DNA, 25 bp, Probe Sequence
actcttcctcatagtcatcattgac

SEQ ID NO: 150196 - DNA, 25 bp, Probe Sequence
actcttccatattgtctgcactgaa

SEQ ID NO: 150197 - DNA, 25 bp, Probe Sequence
actatctgcactacatccgcaagta

SEQ ID NO: 150198 - DNA, 25 bp, Probe Sequence
actatctgcactacatccgcaagta

SEQ ID NO: 150199 - DNA, 25 bp, Probe Sequence
actatgatgactacaagctgatctc

SEQ ID NO: 150200 - DNA, 25 bp, Probe Sequence
actctagctctaaatgctagctcta

SEQ ID NO: 150201 - DNA, 25 bp, Probe Sequence
actcatagctgaaaattacttaagg

SEQ ID NO: 150202 - DNA, 25 bp, Probe Sequence
actcattaaaagttctcttcactgg

SEQ ID NO: 150203 - DNA, 25 bp, Probe Sequence
actctttaatgaagttctgtcacta

SEQ ID NO: 150204 - DNA, 25 bp, Probe Sequence
actcttattcatgagtccgtatcaa

SEQ ID NO: 150205 - DNA, 25 bp, Probe Sequence
actttgttcactgtcctgtgtcaga

SEQ ID NO: 150206 - DNA, 25 bp, Probe Sequence
actttgaacacccttgctttagtgc

SEQ ID NO: 150207 - DNA, 25 bp, Probe Sequence
actttaacagggtatgctgcctctg

SEQ ID NO: 150208 - DNA, 25 bp, Probe Sequence
actatgttgcctgcaatagggctct

SEQ ID NO: 150209 - DNA, 25 bp, Probe Sequence
acttggatgccctgttgggtataga

SEQ ID NO: 150210 - DNA, 25 bp, Probe Sequence
gcctttgtggaacattccgtataac

SEQ ID NO: 150211 - DNA, 25 bp, Probe Sequence
actttcggctataattccgccaaag

SEQ ID NO: 150212 - DNA, 25 bp, Probe Sequence
actttacaacacaattgcatcccaa

SEQ ID NO: 150213 - DNA, 25 bp, Probe Sequence
actcattatcacacattttcctaag

SEQ ID NO: 150214 - DNA, 25 bp, Probe Sequence
actttgtcactcgatgtcattccaa

SEQ ID NO: 150215 - DNA, 25 bp, Probe Sequence
actcttacactcttgtcattataaa

SEQ ID NO: 150216 - DNA, 25 bp, Probe Sequence
actttacccttgactttgctgaaat

SEQ ID NO: 150217 - DNA, 25 bp, Probe Sequence
actttatctctctcctagacttaat

SEQ ID NO: 150218 - DNA, 25 bp, Probe Sequence
acttctactctttcctgaaagaaat

SEQ ID NO: 150219 - DNA, 25 bp, Probe Sequence
acttctgaccgtgcctgagtaagag

SEQ ID NO: 150220 - DNA, 25 bp, Probe Sequence
actcttcaggttccacatggtatag

SEQ ID NO: 150221 - DNA, 25 bp, Probe Sequence
acttatcaggaacgcctcgatacgc

SEQ ID NO: 150222 - DNA, 25 bp, Probe Sequence
actttcagggagcccttcagcacag

SEQ ID NO: 150223 - DNA, 25 bp, Probe Sequence
actcattgagggtgctcttgccagc

SEQ ID NO: 150224 - DNA, 25 bp, Probe Sequence
actcttgagggttgattatgctgca

SEQ ID NO: 150225 - DNA, 25 bp, Probe Sequence
actcttgagggttgattatgctgca

SEQ ID NO: 150226 - DNA, 25 bp, Probe Sequence
actcttgagggttgattatgctgca

SEQ ID NO: 150227 - DNA, 25 bp, Probe Sequence
actactggtggttgattggttttat

SEQ ID NO: 150228 - DNA, 25 bp, Probe Sequence
actttgggtattctgagattttctc

SEQ ID NO: 150229 - DNA, 25 bp, Probe Sequence
acttaaagtattgttatgtgatctt

SEQ ID NO: 150230 - DNA, 25 bp, Probe Sequence
actttaattattgttatacacagct

SEQ ID NO: 150231 - DNA, 25 bp, Probe Sequence
acttaaatctaccctcttagcaatt

SEQ ID NO: 150232 - DNA, 25 bp, Probe Sequence
actagctatactccaactttactaa

SEQ ID NO: 150233 - DNA, 25 bp, Probe Sequence
actacttaatcctaattcacaataa

SEQ ID NO: 150234 - DNA, 25 bp, Probe Sequence
actacattaccaccatttaacatac

SEQ ID NO: 150235 - DNA, 25 bp, Probe Sequence
actactaatcaacgcccataatcat

SEQ ID NO: 150236 - DNA, 25 bp, Probe Sequence
actacatatgtcgagggaatgcaga

SEQ ID NO: 150237 - DNA, 25 bp, Probe Sequence
actcacgtcatccagcagagaatgg

SEQ ID NO: 150238 - DNA, 25 bp, Probe Sequence
actcttggtccaagacctgggtcag

SEQ ID NO: 150239 - DNA, 25 bp, Probe Sequence
actcttggtggaaggctctatagct

SEQ ID NO: 150240 - DNA, 25 bp, Probe Sequence
acttgggtggcaattcctcaaccac

SEQ ID NO: 150241 - DNA, 25 bp, Probe Sequence
actcttgtgtagattgtctctaaac

SEQ ID NO: 150242 - DNA, 25 bp, Probe Sequence
actcatgtttgactctgttcttaga

SEQ ID NO: 150243 - DNA, 25 bp, Probe Sequence
actcagcttgtacctatatattcgt

SEQ ID NO: 150244 - DNA, 25 bp, Probe Sequence
actcagcttgtacctatatattcgt

SEQ ID NO: 150245 - DNA, 25 bp, Probe Sequence
actcagtctttgttcaatggtcagc

SEQ ID NO: 150246 - DNA, 25 bp, Probe Sequence
actattgcttgtgtaaggctactat

SEQ ID NO: 150247 - DNA, 25 bp, Probe Sequence
actattgttggtcaaagtattggta

SEQ ID NO: 150248 - DNA, 25 bp, Probe Sequence
actatggcttgtacaaccagtcgga

SEQ ID NO: 150249 - DNA, 25 bp, Probe Sequence
actataggtcatacaatccattctt

SEQ ID NO: 150250 - DNA, 25 bp, Probe Sequence
actatagagttaacatcttcctgag

SEQ ID NO: 150251 - DNA, 25 bp, Probe Sequence
actaaagttatgtcagctacccaga

SEQ ID NO: 150252 - DNA, 25 bp, Probe Sequence
actacaaggtttagacagtccatga

SEQ ID NO: 150253 - DNA, 25 bp, Probe Sequence
actacaagtgtaggccaccattata

SEQ ID NO: 150254 - DNA, 25 bp, Probe Sequence
actagatagagatggcacacgttca

SEQ ID NO: 150255 - DNA, 25 bp, Probe Sequence
actcactaaatctgagccagtgtcc

SEQ ID NO: 150256 - DNA, 25 bp, Probe Sequence
actactacaatctcacagaagtcca

SEQ ID NO: 150257 - DNA, 25 bp, Probe Sequence
actaaactctgaggcctgaagttct

SEQ ID NO: 150258 - DNA, 25 bp, Probe Sequence
actaggactctaacaataacttctg

SEQ ID NO: 150259 - DNA, 25 bp, Probe Sequence
actagtgagctatataaaacgtatg

SEQ ID NO: 150260 - DNA, 25 bp, Probe Sequence
actagattgtacaaaataacttcat

SEQ ID NO: 150261 - DNA, 25 bp, Probe Sequence
actagttcacacataaagtcctttt

SEQ ID NO: 150262 - DNA, 25 bp, Probe Sequence
actcagtttccttataaccctctga

SEQ ID NO: 150263 - DNA, 25 bp, Probe Sequence
actcattgcctactttaacacctgt

SEQ ID NO: 150264 - DNA, 25 bp, Probe Sequence
actactggccagtcctacaaccagt

SEQ ID NO: 150265 - DNA, 25 bp, Probe Sequence
actactggccagtcctacaaccagt

SEQ ID NO: 150266 - DNA, 25 bp, Probe Sequence
actactggccagtcctacaaccagt

SEQ ID NO: 150267 - DNA, 25 bp, Probe Sequence
actattggccaatttaaaacataag

SEQ ID NO: 150268 - DNA, 25 bp, Probe Sequence
acttcatgcacctattccaaaaaaa

SEQ ID NO: 150269 - DNA, 25 bp, Probe Sequence
acattcctccttgccaacaaaaagc

SEQ ID NO: 150270 - DNA, 25 bp, Probe Sequence
actacttcctctgaccatactaaag

SEQ ID NO: 150271 - DNA, 25 bp, Probe Sequence
actatcctaatcgcccatattaata

SEQ ID NO: 150272 - DNA, 25 bp, Probe Sequence
actactcatttccttcctagtaata

SEQ ID NO: 150273 - DNA, 25 bp, Probe Sequence
cactttctttacacctaataacata

SEQ ID NO: 150274 - DNA, 25 bp, Probe Sequence
acttttttgacactcccaagaccat

SEQ ID NO: 150275 - DNA, 25 bp, Probe Sequence
actttatttagccaggacaacactc

SEQ ID NO: 150276 - DNA, 25 bp, Probe Sequence
acttttacaagccgcaaaggcagca

SEQ ID NO: 150277 - DNA, 25 bp, Probe Sequence
acttttcaacgtggcagagggcgct

SEQ ID NO: 150278 - DNA, 25 bp, Probe Sequence
actttttcacgtggattttgcttgg

SEQ ID NO: 150279 - DNA, 25 bp, Probe Sequence
actttaatccgtcaaattcttgtat

SEQ ID NO: 150280 - DNA, 25 bp, Probe Sequence
actaatcacccctgatatattttta

SEQ ID NO: 150281 - DNA, 25 bp, Probe Sequence
actaaactcttcttgcttttgcatt

SEQ ID NO: 150282 - DNA, 25 bp, Probe Sequence
actagtacttagttgccacactcat

SEQ ID NO: 150283 - DNA, 25 bp, Probe Sequence
actcatgttcttattgcagcaatta

SEQ ID NO: 150284 - DNA, 25 bp, Probe Sequence
actatattgttaatccatggttagg

SEQ ID NO: 150285 - DNA, 25 bp, Probe Sequence
actaatgctgttactaacttttcag

SEQ ID NO: 150286 - DNA, 25 bp, Probe Sequence
actacagctttcctatatcttctat

SEQ ID NO: 150287 - DNA, 25 bp, Probe Sequence
actcactttgctcatgttattgttg

SEQ ID NO: 150288 - DNA, 25 bp, Probe Sequence
actactttcttaatatcactttggt

SEQ ID NO: 150289 - DNA, 25 bp, Probe Sequence
actactttctcgttattttgtgtgc

SEQ ID NO: 150290 - DNA, 25 bp, Probe Sequence
actactttctcgttattttgtgtgc

SEQ ID NO: 150291 - DNA, 25 bp, Probe Sequence
actaacttcatacatttatcggcat

SEQ ID NO: 150292 - DNA, 25 bp, Probe Sequence
aaaactgtattcagtttcctgccca

SEQ ID NO: 150293 - DNA, 25 bp, Probe Sequence
aaagttccattttgtggtcctgcaa

SEQ ID NO: 150294 - DNA, 25 bp, Probe Sequence
actttcaccgtttgcagggttgcta

SEQ ID NO: 150295 - DNA, 25 bp, Probe Sequence
acttatacactgttaatgggaagta

SEQ ID NO: 150296 - DNA, 25 bp, Probe Sequence
actttcacagggtaattggtaggct

SEQ ID NO: 150297 - DNA, 25 bp, Probe Sequence
cactttaaggaagagtccacggtgc

SEQ ID NO: 150298 - DNA, 25 bp, Probe Sequence
actttaaggaagagtccacggtgct

SEQ ID NO: 150299 - DNA, 25 bp, Probe Sequence
ccttcggggaccagggacaagtgct

SEQ ID NO: 150300 - DNA, 25 bp, Probe Sequence
acttcgggtgggcagaggcaccttg

SEQ ID NO: 150301 - DNA, 25 bp, Probe Sequence
acttgccaggggaaggagtccctgc

SEQ ID NO: 150302 - DNA, 25 bp, Probe Sequence
acttcgggaggttgaggccggctga

SEQ ID NO: 150303 - DNA, 25 bp, Probe Sequence
actttgcctgggatatgagccggtg

SEQ ID NO: 150304 - DNA, 25 bp, Probe Sequence
acatttcaagggcaataccgtgttg

SEQ ID NO: 150305 - DNA, 25 bp, Probe Sequence
acttgccaagtacatctacagtatt

SEQ ID NO: 150306 - DNA, 25 bp, Probe Sequence
actttcagaaagtgtacgtataatc

SEQ ID NO: 150307 - DNA, 25 bp, Probe Sequence
actcaacaaatttggctacgtaaag

SEQ ID NO: 150308 - DNA, 25 bp, Probe Sequence
actaaagagcttttgcacggtagaa

SEQ ID NO: 150309 - DNA, 25 bp, Probe Sequence
actaaagtcgctctcatgggtacaa

SEQ ID NO: 150310 - DNA, 25 bp, Probe Sequence
actaagagccgaactgaaggagata

SEQ ID NO: 150311 - DNA, 25 bp, Probe Sequence
actaacatgctgcccctaagtgaat

SEQ ID NO: 150312 - DNA, 25 bp, Probe Sequence
actcagcacgagccatccagaagaa

SEQ ID NO: 150313 - DNA, 25 bp, Probe Sequence
actcagcacgagccatccagaagaa

SEQ ID NO: 150314 - DNA, 25 bp, Probe Sequence
actcaacggctacatagaaaaatcc

SEQ ID NO: 150315 - DNA, 25 bp, Probe Sequence
actcaccctgtacgacaaacacatt

SEQ ID NO: 150316 - DNA, 25 bp, Probe Sequence
actcacgtctgcttcgacagaactg

SEQ ID NO: 150317 - DNA, 25 bp, Probe Sequence
actcagctgtcctgcagcaaacact

SEQ ID NO: 150318 - DNA, 25 bp, Probe Sequence
actatgtgatggctgctgccaacct

SEQ ID NO: 150319 - DNA, 25 bp, Probe Sequence
acatagctggatgttctaccctttt

SEQ ID NO: 150320 - DNA, 25 bp, Probe Sequence
actacgtgtgtgattttcctgtttt

SEQ ID NO: 150321 - DNA, 25 bp, Probe Sequence
actacgtattcattgtctacctgct

SEQ ID NO: 150322 - DNA, 25 bp, Probe Sequence
actacgtcaagctgctgtagctcct

SEQ ID NO: 150323 - DNA, 25 bp, Probe Sequence
actaactgccagagtgtcatccttg

SEQ ID NO: 150324 - DNA, 25 bp, Probe Sequence
acttagctacagagttttatgagta

SEQ ID NO: 150325 - DNA, 25 bp, Probe Sequence
actaaatataatcttttgtgttgaa

SEQ ID NO: 150326 - DNA, 25 bp, Probe Sequence
actaatttcagtttgcttgttgtaa

SEQ ID NO: 150327 - DNA, 25 bp, Probe Sequence
acttgaaatgccattgatagtttaa

SEQ ID NO: 150328 - DNA, 25 bp, Probe Sequence
acttttagcttaggaagtcttccag

SEQ ID NO: 150329 - DNA, 25 bp, Probe Sequence
acttttagcctaggatttgtttgct

SEQ ID NO: 150330 - DNA, 25 bp, Probe Sequence
actatttaccaggtgttctttgctg

SEQ ID NO: 150331 - DNA, 25 bp, Probe Sequence
actatttgggctctctcccataaga

SEQ ID NO: 150332 - DNA, 25 bp, Probe Sequence
actacttggagttctcaacctagag

SEQ ID NO: 150333 - DNA, 25 bp, Probe Sequence
actaatcatgaaattctaacctaaa

SEQ ID NO: 150334 - DNA, 25 bp, Probe Sequence
actacacaagtaactattcccaaag

SEQ ID NO: 150335 - DNA, 25 bp, Probe Sequence
actagacaagtcacagattcatgat

SEQ ID NO: 150336 - DNA, 25 bp, Probe Sequence
actaaatatgtcaaaattgtggaga

SEQ ID NO: 150337 - DNA, 25 bp, Probe Sequence
actaaaagctcctactgtgatgtga

SEQ ID NO: 150338 - DNA, 25 bp, Probe Sequence
actaccccaccatctgtgattataa

SEQ ID NO: 150339 - DNA, 25 bp, Probe Sequence
actaccccaccatctgtgattataa

SEQ ID NO: 150340 - DNA, 25 bp, Probe Sequence
acttcccaaatctctggaggatctg

SEQ ID NO: 150341 - DNA, 25 bp, Probe Sequence
actttccagaatttgctcgctacac

SEQ ID NO: 150342 - DNA, 25 bp, Probe Sequence
actttccagaatttgctcgctacac

SEQ ID NO: 150343 - DNA, 25 bp, Probe Sequence
actttccagaatttgctcgctacac

SEQ ID NO: 150344 - DNA, 25 bp, Probe Sequence
acttccacagcagtaagccgaaagg

SEQ ID NO: 150345 - DNA, 25 bp, Probe Sequence
acttccacagcagtaagccgaaagg

SEQ ID NO: 150346 - DNA, 25 bp, Probe Sequence
actatgatccccagaaggacaagcg

SEQ ID NO: 150347 - DNA, 25 bp, Probe Sequence
acttatgacaccagaaggaacacag

SEQ ID NO: 150348 - DNA, 25 bp, Probe Sequence
actttgcccctgagagatctagtcc

SEQ ID NO: 150349 - DNA, 25 bp, Probe Sequence
acttcgcccggtggcaatagttccg

SEQ ID NO: 150350 - DNA, 25 bp, Probe Sequence
actttgcccctgggaagagcttcca

SEQ ID NO: 150351 - DNA, 25 bp, Probe Sequence
actttcttatgtgaaaacttgccaa

SEQ ID NO: 150352 - DNA, 25 bp, Probe Sequence
actttcttaaaatatgtccatgtca

SEQ ID NO: 150353 - DNA, 25 bp, Probe Sequence
actagcttctaaaaaatccctgcct

SEQ ID NO: 150354 - DNA, 25 bp, Probe Sequence
actactactaatcaacgcccataat

SEQ ID NO: 150355 - DNA, 25 bp, Probe Sequence
actaccacaactcaacggctacata

SEQ ID NO: 150356 - DNA, 25 bp, Probe Sequence
actaccagaccaacaaagccaagca

SEQ ID NO: 150357 - DNA, 25 bp, Probe Sequence
acttaccaccactaaactgcgagag

SEQ ID NO: 150358 - DNA, 25 bp, Probe Sequence
acttgtagtcccagctactcgagag

SEQ ID NO: 150359 - DNA, 25 bp, Probe Sequence
actattatgccagaacttgcgtaag

SEQ ID NO: 150360 - DNA, 25 bp, Probe Sequence
actacttgcttttacaatgtgttag

SEQ ID NO: 150361 - DNA, 25 bp, Probe Sequence
actagcttactataaattgttaact

SEQ ID NO: 150362 - DNA, 25 bp, Probe Sequence
actactgtactttgccatttttcta

SEQ ID NO: 150363 - DNA, 25 bp, Probe Sequence
actacaacactttgacatttttatg

SEQ ID NO: 150364 - DNA, 25 bp, Probe Sequence
actacacaacagcgaaggaatttgc

SEQ ID NO: 150365 - DNA, 25 bp, Probe Sequence
actactaaactgggggatattatga

SEQ ID NO: 150366 - DNA, 25 bp, Probe Sequence
actactaaaccggtggaatctgatc

SEQ ID NO: 150367 - DNA, 25 bp, Probe Sequence
actacactcaacggtttggatccta

SEQ ID NO: 150368 - DNA, 25 bp, Probe Sequence
actatcctaacaagccttggaccaa

SEQ ID NO: 150369 - DNA, 25 bp, Probe Sequence
actatcctagaaatcgctgtcgcct

SEQ ID NO: 150370 - DNA, 25 bp, Probe Sequence
actactctgtgctaattgttctgcc

SEQ ID NO: 150371 - DNA, 25 bp, Probe Sequence
actactcagccttgttttcggtgtg

SEQ ID NO: 150372 - DNA, 25 bp, Probe Sequence
actactcagccttgttttcggtgtg

SEQ ID NO: 150373 - DNA, 25 bp, Probe Sequence
actaatatctgtagctattttgttt

SEQ ID NO: 150374 - DNA, 25 bp, Probe Sequence
actactattgcttgtatattgtggt

SEQ ID NO: 150375 - DNA, 25 bp, Probe Sequence
acatactgttgtttttagctcggtc

SEQ ID NO: 150376 - DNA, 25 bp, Probe Sequence
actactattttctttcatgtcagaa

SEQ ID NO: 150377 - DNA, 25 bp, Probe Sequence
actactacatcccttcacaaagagt

SEQ ID NO: 150378 - DNA, 25 bp, Probe Sequence
actagtctcaggcttcaacatcgaa

SEQ ID NO: 150379 - DNA, 25 bp, Probe Sequence
actacccaggtattacacaagccaa

SEQ ID NO: 150380 - DNA, 25 bp, Probe Sequence
acttccggtacatatcaaagagcga

SEQ ID NO: 150381 - DNA, 25 bp, Probe Sequence
acttagatggagttggtcaaatgag

SEQ ID NO: 150382 - DNA, 25 bp, Probe Sequence
acttagtgaatgtctgtgctaggca

SEQ ID NO: 150383 - DNA, 25 bp, Probe Sequence
acttatcaggattcttgctaagact

SEQ ID NO: 150384 - DNA, 25 bp, Probe Sequence
actagatcaagacatgttaaccttt

SEQ ID NO: 150385 - DNA, 25 bp, Probe Sequence
actagctaagaaatttctacatgtt

SEQ ID NO: 150386 - DNA, 25 bp, Probe Sequence
actaccatcaatactcatcattaat

SEQ ID NO: 150387 - DNA, 25 bp, Probe Sequence
actacctgcactaccacatcaagtg

SEQ ID NO: 150388 - DNA, 25 bp, Probe Sequence
actacagccaaacgcagagcaaggg

SEQ ID NO: 150389 - DNA, 25 bp, Probe Sequence
actatctataaacctagccatggcc

SEQ ID NO: 150390 - DNA, 25 bp, Probe Sequence
actacaagaacatcggtctgggctt

SEQ ID NO: 150391 - DNA, 25 bp, Probe Sequence
actacatagttattaggtgtggcca

SEQ ID NO: 150392 - DNA, 25 bp, Probe Sequence
acttctgagcttattgggtgccatt

SEQ ID NO: 150393 - DNA, 25 bp, Probe Sequence
actttgtgacttaggcggctgtgtt

SEQ ID NO: 150394 - DNA, 25 bp, Probe Sequence
actataatactaaggcctgaagtct

SEQ ID NO: 150395 - DNA, 25 bp, Probe Sequence
actaattcatcttttcctgatcgtc

SEQ ID NO: 150396 - DNA, 25 bp, Probe Sequence
actacttcatcaaggtgcacgtcgg

SEQ ID NO: 150397 - DNA, 25 bp, Probe Sequence
actactgtccaagggatcgctgatg

SEQ ID NO: 150398 - DNA, 25 bp, Probe Sequence
actacatggtgttcggatctttgga

SEQ ID NO: 150399 - DNA, 25 bp, Probe Sequence
actatattgtgtcaggctgtcttga

SEQ ID NO: 150400 - DNA, 25 bp, Probe Sequence
actatgcttttggggttgctcatga

SEQ ID NO: 150401 - DNA, 25 bp, Probe Sequence
actacttgactgcggctgtggcatg

SEQ ID NO: 150402 - DNA, 25 bp, Probe Sequence
actaccgcctgcatgtggatggtgt

SEQ ID NO: 150403 - DNA, 25 bp, Probe Sequence
actacccctcagctgaaagtggtgg

SEQ ID NO: 150404 - DNA, 25 bp, Probe Sequence
acttcccctgggcaagagatgggac

SEQ ID NO: 150405 - DNA, 25 bp, Probe Sequence
acttccccggtatgatgattgttgg

SEQ ID NO: 150406 - DNA, 25 bp, Probe Sequence
acttcctcctgccaggggatttggg

SEQ ID NO: 150407 - DNA, 25 bp, Probe Sequence
acttcctcctgccaggggatttggg

SEQ ID NO: 150408 - DNA, 25 bp, Probe Sequence
acttcaagcactccaggggttgtgg

SEQ ID NO: 150409 - DNA, 25 bp, Probe Sequence
acttaacagctcttttgggattggg

SEQ ID NO: 150410 - DNA, 25 bp, Probe Sequence
actttgccagctcctttaagattgt

SEQ ID NO: 150411 - DNA, 25 bp, Probe Sequence
acttttggctgccaatgtgaccctg

SEQ ID NO: 150412 - DNA, 25 bp, Probe Sequence
actttttggatgtagagaccgcttc

SEQ ID NO: 150413 - DNA, 25 bp, Probe Sequence
actttggtggctggagccctcagtt

SEQ ID NO: 150414 - DNA, 25 bp, Probe Sequence
actactgcgagggtgagtgcccgag

SEQ ID NO: 150415 - DNA, 25 bp, Probe Sequence
actactcaagaccggaggcacagag

SEQ ID NO: 150416 - DNA, 25 bp, Probe Sequence
actatgccaaggcggcggcagagct

SEQ ID NO: 150417 - DNA, 25 bp, Probe Sequence
actatccgagggaagaatatgattc

SEQ ID NO: 150418 - DNA, 25 bp, Probe Sequence
actcacaagctggaaagaaactatc

SEQ ID NO: 150419 - DNA, 25 bp, Probe Sequence
actacagcatgtggaggaagaacca

SEQ ID NO: 150420 - DNA, 25 bp, Probe Sequence
actaccattgtgaaaacataactgt

SEQ ID NO: 150421 - DNA, 25 bp, Probe Sequence
actaccagtgcataacaccacactc

SEQ ID NO: 150422 - DNA, 25 bp, Probe Sequence
actagaaagaggaaactgcagccca

SEQ ID NO: 150423 - DNA, 25 bp, Probe Sequence
actaaacacgtgacacaaacacaca

SEQ ID NO: 150424 - DNA, 25 bp, Probe Sequence
acttaaacagtataaaatgcgtgaa

SEQ ID NO: 150425 - DNA, 25 bp, Probe Sequence
acttccaacttaggaccaacctgag

SEQ ID NO: 150426 - DNA, 25 bp, Probe Sequence
acttcagcaatttaagtctcccctt

SEQ ID NO: 150427 - DNA, 25 bp, Probe Sequence
actttaatggcaattgttcccctca

SEQ ID NO: 150428 - DNA, 25 bp, Probe Sequence
acttaaatggagatccagtcgacct

SEQ ID NO: 150429 - DNA, 25 bp, Probe Sequence
acttcaatgggacactttagaccat

SEQ ID NO: 150430 - DNA, 25 bp, Probe Sequence
acttctctgggacaatttcagttct

SEQ ID NO: 150431 - DNA, 25 bp, Probe Sequence
acttgcctaaggcaagtccctctcc

SEQ ID NO: 150432 - DNA, 25 bp, Probe Sequence
actattccaagccaagtgtttcttc

SEQ ID NO: 150433 - DNA, 25 bp, Probe Sequence
actacacctagctactttatttatt

SEQ ID NO: 150434 - DNA, 25 bp, Probe Sequence
actacacatgcttggaattaagttt

SEQ ID NO: 150435 - DNA, 25 bp, Probe Sequence
actacagcactctgtgttaaagact

SEQ ID NO: 150436 - DNA, 25 bp, Probe Sequence
actatcagagacttgtccttaccac

SEQ ID NO: 150437 - DNA, 25 bp, Probe Sequence
acttcggacttatactgatcccaag

SEQ ID NO: 150438 - DNA, 25 bp, Probe Sequence
acttcttactaacctgctgtcaaaa

SEQ ID NO: 150439 - DNA, 25 bp, Probe Sequence
cacttttaatgctcctcttaaccag

SEQ ID NO: 150440 - DNA, 25 bp, Probe Sequence
actttcaagtgcgttctttagacca

SEQ ID NO: 150441 - DNA, 25 bp, Probe Sequence
actactgaggtggttctttctatcc

SEQ ID NO: 150442 - DNA, 25 bp, Probe Sequence
gatttcgaccaggttcgttcactca

SEQ ID NO: 150443 - DNA, 25 bp, Probe Sequence
acttaacatcgacttcgttcacttc

SEQ ID NO: 150444 - DNA, 25 bp, Probe Sequence
acttaacggatgagcagttgcttct

SEQ ID NO: 150445 - DNA, 25 bp, Probe Sequence
acttaacagatactcagatgtgcct

SEQ ID NO: 150446 - DNA, 25 bp, Probe Sequence
acttcatgcccatttttgtggctgg

SEQ ID NO: 150447 - DNA, 25 bp, Probe Sequence
acttactgcctgaccttggaatcgt

SEQ ID NO: 150448 - DNA, 25 bp, Probe Sequence
acttgatggcagcttctgtggaacg

SEQ ID NO: 150449 - DNA, 25 bp, Probe Sequence
actagattcaatcgtctctgagtat

SEQ ID NO: 150450 - DNA, 25 bp, Probe Sequence
acatactgcaataggctctctgagc

SEQ ID NO: 150451 - DNA, 25 bp, Probe Sequence
actactgaaatgtatcttggctgtc

SEQ ID NO: 150452 - DNA, 25 bp, Probe Sequence
actatagaagagttgcctcctgtct

SEQ ID NO: 150453 - DNA, 25 bp, Probe Sequence
actataacaaacccacagtgtgctc

SEQ ID NO: 150454 - DNA, 25 bp, Probe Sequence
actaacatcaacttgtgacatctag

SEQ ID NO: 150455 - DNA, 25 bp, Probe Sequence
actacatccacattattgacttttg

SEQ ID NO: 150456 - DNA, 25 bp, Probe Sequence
actaacactcatatgctcagttttg

SEQ ID NO: 150457 - DNA, 25 bp, Probe Sequence
actaacactcatatgctcagttttg

SEQ ID NO: 150458 - DNA, 25 bp, Probe Sequence
aaaggcatcagagaccagttttaaa

SEQ ID NO: 150459 - DNA, 25 bp, Probe Sequence
actagagcaagaaaccagttgtaat

SEQ ID NO: 150460 - DNA, 25 bp, Probe Sequence
actagtgccgataaactttctcaaa

SEQ ID NO: 150461 - DNA, 25 bp, Probe Sequence
actaggactgtaaacttttgtgata

SEQ ID NO: 150462 - DNA, 25 bp, Probe Sequence
cacaatggccatgaacacctttgga

SEQ ID NO: 150463 - DNA, 25 bp, Probe Sequence
acatttgccctaaccctagggatga

SEQ ID NO: 150464 - DNA, 25 bp, Probe Sequence
actttccgttgacgtcaatgtggtg

SEQ ID NO: 150465 - DNA, 25 bp, Probe Sequence
actattcggtatctgaccatgtggt

SEQ ID NO: 150466 - DNA, 25 bp, Probe Sequence
actatacggtgactttcctgtgttg

SEQ ID NO: 150467 - DNA, 25 bp, Probe Sequence
actaaggagctttttgacatctgtt

SEQ ID NO: 150468 - DNA, 25 bp, Probe Sequence
acttaggaaatactcagcaactgtt

SEQ ID NO: 150469 - DNA, 25 bp, Probe Sequence
acttatgtggactgtaaatgtttta

SEQ ID NO: 150470 - DNA, 25 bp, Probe Sequence
actactgtggaaagacaactgtttt

SEQ ID NO: 150471 - DNA, 25 bp, Probe Sequence
actactgatgaatcgtcctcgtgct

SEQ ID NO: 150472 - DNA, 25 bp, Probe Sequence
actacgtcagcattctttcatttgt

SEQ ID NO: 150473 - DNA, 25 bp, Probe Sequence
actacgtcagcattctttcatttgt

SEQ ID NO: 150474 - DNA, 25 bp, Probe Sequence
actacgtagttggagctatttcttc

SEQ ID NO: 150475 - DNA, 25 bp, Probe Sequence
actacgtacttggctatttctctgt

SEQ ID NO: 150476 - DNA, 25 bp, Probe Sequence
actacacagacagtggcccttttgt

SEQ ID NO: 150477 - DNA, 25 bp, Probe Sequence
actaccatgcaggctactccatgtt

SEQ ID NO: 150478 - DNA, 25 bp, Probe Sequence
actttctgcatggtatttcagtgtc

SEQ ID NO: 150479 - DNA, 25 bp, Probe Sequence
actttgctgcttcatgtgtactttc

SEQ ID NO: 150480 - DNA, 25 bp, Probe Sequence
actatactgctttgagatctcattt

SEQ ID NO: 150481 - DNA, 25 bp, Probe Sequence
actatgagcaacatgcagatctaca

SEQ ID NO: 150482 - DNA, 25 bp, Probe Sequence
actatgctcaaagagttacactaac

SEQ ID NO: 150483 - DNA, 25 bp, Probe Sequence
actatgtgctaatacctgaggtaac

SEQ ID NO: 150484 - DNA, 25 bp, Probe Sequence
actattgagaaatctatggggagga

SEQ ID NO: 150485 - DNA, 25 bp, Probe Sequence
actttgcaaaaactgtcaggaggga

SEQ ID NO: 150486 - DNA, 25 bp, Probe Sequence
acttcctcctaactgtcagggtggg

SEQ ID NO: 150487 - DNA, 25 bp, Probe Sequence
acttcagtcctttcttagggaaatg

SEQ ID NO: 150488 - DNA, 25 bp, Probe Sequence
actaagcacctattttggaaaactg

SEQ ID NO: 150489 - DNA, 25 bp, Probe Sequence
acttagaccaactttaaatgaactg

SEQ ID NO: 150490 - DNA, 25 bp, Probe Sequence
acttagaccaactttaaatgaactg

SEQ ID NO: 150491 - DNA, 25 bp, Probe Sequence
acttaccttagcattgccaagaact

SEQ ID NO: 150492 - DNA, 25 bp, Probe Sequence
acttggccttaaatcctcagtggat

SEQ ID NO: 150493 - DNA, 25 bp, Probe Sequence
acttgaatttaaaccagctctagat

SEQ ID NO: 150494 - DNA, 25 bp, Probe Sequence
acttgaactttctctagccttgaaa

SEQ ID NO: 150495 - DNA, 25 bp, Probe Sequence
acttagagtttttctgaacctgata

SEQ ID NO: 150496 - DNA, 25 bp, Probe Sequence
acttcaattttttagcaacagctga

SEQ ID NO: 150497 - DNA, 25 bp, Probe Sequence
actacacttttttgaatcatactac

SEQ ID NO: 150498 - DNA, 25 bp, Probe Sequence
acttccttggttgaatgcatactaa

SEQ ID NO: 150499 - DNA, 25 bp, Probe Sequence
acttcgtgtgtgtgtaaggttgaaa

SEQ ID NO: 150500 - DNA, 25 bp, Probe Sequence
acttcgggtatacatatcagtatat

SEQ ID NO: 150501 - DNA, 25 bp, Probe Sequence
acttctgggctttgtacaatgcttt

SEQ ID NO: 150502 - DNA, 25 bp, Probe Sequence
actttgggcttggctagatcactca

SEQ ID NO: 150503 - DNA, 25 bp, Probe Sequence
acttgcatgtgatgtgcctgaatac

SEQ ID NO: 150504 - DNA, 25 bp, Probe Sequence
acttcagatacgtcatccagaatgg

SEQ ID NO: 150505 - DNA, 25 bp, Probe Sequence
caattcacatgaagacagcaacttg

SEQ ID NO: 150506 - DNA, 25 bp, Probe Sequence
actaacgaaaaggcctgcatgaaac

SEQ ID NO: 150507 - DNA, 25 bp, Probe Sequence
actattcaggaaagatgcccagaaa

SEQ ID NO: 150508 - DNA, 25 bp, Probe Sequence
actatgtctgggttgacctaggcca

SEQ ID NO: 150509 - DNA, 25 bp, Probe Sequence
actatgattgtgtatgtgccgctac

SEQ ID NO: 150510 - DNA, 25 bp, Probe Sequence
actatgattgtgtatgtgccgctac

SEQ ID NO: 150511 - DNA, 25 bp, Probe Sequence
actatggtatgctggccagcaccct

SEQ ID NO: 150512 - DNA, 25 bp, Probe Sequence
acttgcgtacttggccagtacatct

SEQ ID NO: 150513 - DNA, 25 bp, Probe Sequence
actatgcttttaggccaggcacagt

SEQ ID NO: 150514 - DNA, 25 bp, Probe Sequence
acttcttctgctttcaaggagaggc

SEQ ID NO: 150515 - DNA, 25 bp, Probe Sequence
acttcgccttgctcttgaaagtgca

SEQ ID NO: 150516 - DNA, 25 bp, Probe Sequence
acttccacttagttgtaccgagcat

SEQ ID NO: 150517 - DNA, 25 bp, Probe Sequence
actttatcaataatctaaccgacaa

SEQ ID NO: 150518 - DNA, 25 bp, Probe Sequence
acttagaaatagactagaccaagca

SEQ ID NO: 150519 - DNA, 25 bp, Probe Sequence
actagcggaattactggaggaagaa

SEQ ID NO: 150520 - DNA, 25 bp, Probe Sequence
actactggatgtcagcggagaaatg

SEQ ID NO: 150521 - DNA, 25 bp, Probe Sequence
actactagatgtctttaggcagcag

SEQ ID NO: 150522 - DNA, 25 bp, Probe Sequence
actatccagcaacatttgggccagc

SEQ ID NO: 150523 - DNA, 25 bp, Probe Sequence
actatcctgagtttctgtggatgga

SEQ ID NO: 150524 - DNA, 25 bp, Probe Sequence
actttagattgactggacactatat

SEQ ID NO: 150525 - DNA, 25 bp, Probe Sequence
acttttcagccaagaatcctatcat

SEQ ID NO: 150526 - DNA, 25 bp, Probe Sequence
actttctctgaaggaagcccatgct

SEQ ID NO: 150527 - DNA, 25 bp, Probe Sequence
acttctttaaagtgccacatttggc

SEQ ID NO: 150528 - DNA, 25 bp, Probe Sequence
acttttttgaagagctctttccaga

SEQ ID NO: 150529 - DNA, 25 bp, Probe Sequence
actttttcaaagattccttcaccat

SEQ ID NO: 150530 - DNA, 25 bp, Probe Sequence
acttaatctatatgtttccttgggt

SEQ ID NO: 150531 - DNA, 25 bp, Probe Sequence
actatttctgtatgtctccatctat

SEQ ID NO: 150532 - DNA, 25 bp, Probe Sequence
actatgtttatgcttctacatccag

SEQ ID NO: 150533 - DNA, 25 bp, Probe Sequence
acttctttgatgaaggccctccagt

SEQ ID NO: 150534 - DNA, 25 bp, Probe Sequence
actttattgatgtaggacctggtgg

SEQ ID NO: 150535 - DNA, 25 bp, Probe Sequence
acttttttgcaagcacacttgtaac

SEQ ID NO: 150536 - DNA, 25 bp, Probe Sequence
acttctttggcaacttaattagaca

SEQ ID NO: 150537 - DNA, 25 bp, Probe Sequence
acttgtttgacgacgaaaacacagc

SEQ ID NO: 150538 - DNA, 25 bp, Probe Sequence
acttgtggtactcaaaaatactgac

SEQ ID NO: 150539 - DNA, 25 bp, Probe Sequence
actacgctgatactaaaagccatac

SEQ ID NO: 150540 - DNA, 25 bp, Probe Sequence
actacgttttgcacagaggcatact

SEQ ID NO: 150541 - DNA, 25 bp, Probe Sequence
actagcctcttaaacaaggctcact

SEQ ID NO: 150542 - DNA, 25 bp, Probe Sequence
actagcaacctcaaacagacaccat

SEQ ID NO: 150543 - DNA, 25 bp, Probe Sequence
acaggcatcctcggatacgacactg

SEQ ID NO: 150544 - DNA, 25 bp, Probe Sequence
acatcaatgaccagatccagaacgc

SEQ ID NO: 150545 - DNA, 25 bp, Probe Sequence
acttcatgtctcatatccaggtcac

SEQ ID NO: 150546 - DNA, 25 bp, Probe Sequence
actacatgccacagacctgtatccc

SEQ ID NO: 150547 - DNA, 25 bp, Probe Sequence
actatgtccagcagatcgtggcacc

SEQ ID NO: 150548 - DNA, 25 bp, Probe Sequence
actatgtccagatgtgcaggctcct

SEQ ID NO: 150549 - DNA, 25 bp, Probe Sequence
acttctgccagctgtctggcatgca

SEQ ID NO: 150550 - DNA, 25 bp, Probe Sequence
acttcgccaaggttgtagcatgggc

SEQ ID NO: 150551 - DNA, 25 bp, Probe Sequence
actacccatacctgtactgcgtggg

SEQ ID NO: 150552 - DNA, 25 bp, Probe Sequence
actaccttacactgtcctgtgtgtg

SEQ ID NO: 150553 - DNA, 25 bp, Probe Sequence
actacctgttactattatctgtgct

SEQ ID NO: 150554 - DNA, 25 bp, Probe Sequence
actatccagtcaactttcagctttt

SEQ ID NO: 150555 - DNA, 25 bp, Probe Sequence
actttggtaactgcatacttgttgt

SEQ ID NO: 150556 - DNA, 25 bp, Probe Sequence
actttgggaaatgactccatttcta

SEQ ID NO: 150557 - DNA, 25 bp, Probe Sequence
acttttccaaatggactctagttca

SEQ ID NO: 150558 - DNA, 25 bp, Probe Sequence
acttcctttatgtagattctagtct

SEQ ID NO: 150559 - DNA, 25 bp, Probe Sequence
actttctttgtgtgttcctgatgga

SEQ ID NO: 150560 - DNA, 25 bp, Probe Sequence
acttcttttctctgagtggtgggac

SEQ ID NO: 150561 - DNA, 25 bp, Probe Sequence
acatttttattctgggattcggtca

SEQ ID NO: 150562 - DNA, 25 bp, Probe Sequence
acatttttattctccgttgcatttt

SEQ ID NO: 150563 - DNA, 25 bp, Probe Sequence
acttagattttctcctaggtgtttg

SEQ ID NO: 150564 - DNA, 25 bp, Probe Sequence
actatacttttctaactgagttgtc

SEQ ID NO: 150565 - DNA, 25 bp, Probe Sequence
acttactaggtttgaatgcggtgta

SEQ ID NO: 150566 - DNA, 25 bp, Probe Sequence
gatttaccacgtttgcccagtgtat

SEQ ID NO: 150567 - DNA, 25 bp, Probe Sequence
cttagacgacctgtccagatggtta

SEQ ID NO: 150568 - DNA, 25 bp, Probe Sequence
actatgactgacgtccccagaagtt

SEQ ID NO: 150569 - DNA, 25 bp, Probe Sequence
acttattactcctgtagaagtcttt

SEQ ID NO: 150570 - DNA, 25 bp, Probe Sequence
acttattagtgatgtgggaactatt

SEQ ID NO: 150571 - DNA, 25 bp, Probe Sequence
acttatttgtatgttggtagctgag

SEQ ID NO: 150572 - DNA, 25 bp, Probe Sequence
actatatccgtaacctggatagtga

SEQ ID NO: 150573 - DNA, 25 bp, Probe Sequence
actagtccctgtgtcaggatggtac

SEQ ID NO: 150574 - DNA, 25 bp, Probe Sequence
acttccaccgctgtcagaaggcaat

SEQ ID NO: 150575 - DNA, 25 bp, Probe Sequence
acttcgactcctctgagaaggacgg

SEQ ID NO: 150576 - DNA, 25 bp, Probe Sequence
actttgaccttccgaagatcatgca

SEQ ID NO: 150577 - DNA, 25 bp, Probe Sequence
acttttcgcactttggtgatctcat

SEQ ID NO: 150578 - DNA, 25 bp, Probe Sequence
acttatatgccacaatcagttctct

SEQ ID NO: 150579 - DNA, 25 bp, Probe Sequence
actatttgcctgaacagaatcatcc

SEQ ID NO: 150580 - DNA, 25 bp, Probe Sequence
actatttcgcttcctgcattagcaa

SEQ ID NO: 150581 - DNA, 25 bp, Probe Sequence
actaccatcacttggtgagctaaga

SEQ ID NO: 150582 - DNA, 25 bp, Probe Sequence
actacgaatgctacgatggatatga

SEQ ID NO: 150583 - DNA, 25 bp, Probe Sequence
actaggtcatcttatttgatgcatc

SEQ ID NO: 150584 - DNA, 25 bp, Probe Sequence
actaggattgtaattcagatattta

SEQ ID NO: 150585 - DNA, 25 bp, Probe Sequence
actagagcatttcctgtgagcatac

SEQ ID NO: 150586 - DNA, 25 bp, Probe Sequence
acttagatttttggagctgccgccg

SEQ ID NO: 150587 - DNA, 25 bp, Probe Sequence
actttggttaggtagctccagcctc

SEQ ID NO: 150588 - DNA, 25 bp, Probe Sequence
cacttgctggtctaggtattaaccc

SEQ ID NO: 150589 - DNA, 25 bp, Probe Sequence
acttctgtcctaccatgcaaataca

SEQ ID NO: 150590 - DNA, 25 bp, Probe Sequence
actttgtccagaccctaatcagcac

SEQ ID NO: 150591 - DNA, 25 bp, Probe Sequence
actttgttgaagtcttaatcagcag

SEQ ID NO: 150592 - DNA, 25 bp, Probe Sequence
actttgatatgactgtttttcggac

SEQ ID NO: 150593 - DNA, 25 bp, Probe Sequence
gaattggaacgggcttttggctact

SEQ ID NO: 150594 - DNA, 25 bp, Probe Sequence
acatgggaccttctgtttagcttcc

SEQ ID NO: 150595 - DNA, 25 bp, Probe Sequence
acaggcctccctgtttgaagcctgc

SEQ ID NO: 150596 - DNA, 25 bp, Probe Sequence
acaggcctccctgtttgaagcctgc

SEQ ID NO: 150597 - DNA, 25 bp, Probe Sequence
acttctgtcccagccttgaaggctg

SEQ ID NO: 150598 - DNA, 25 bp, Probe Sequence
acttcgtgccatattttgttcctga

SEQ ID NO: 150599 - DNA, 25 bp, Probe Sequence
acttcctcattcattattgtaccag

SEQ ID NO: 150600 - DNA, 25 bp, Probe Sequence
acttctgactccaatttaaaccagg

SEQ ID NO: 150601 - DNA, 25 bp, Probe Sequence
acttcttatccctgctaataaagga

SEQ ID NO: 150602 - DNA, 25 bp, Probe Sequence
actttgtatctccggtaagtagatg

SEQ ID NO: 150603 - DNA, 25 bp, Probe Sequence
actattgtataccagcttaattgtt

SEQ ID NO: 150604 - DNA, 25 bp, Probe Sequence
actttgctaacttgcctctaatttt

SEQ ID NO: 150605 - DNA, 25 bp, Probe Sequence
actatctaaatttgctgctcacttt

SEQ ID NO: 150606 - DNA, 25 bp, Probe Sequence
actatgcataattctaggatggcct

SEQ ID NO: 150607 - DNA, 25 bp, Probe Sequence
actactcacaactagcagatggctt

SEQ ID NO: 150608 - DNA, 25 bp, Probe Sequence
actactgcgcgggagcatgtgagtt

SEQ ID NO: 150609 - DNA, 25 bp, Probe Sequence
actactgccggcaggtgcagcagct

SEQ ID NO: 150610 - DNA, 25 bp, Probe Sequence
acttcagttgagagggtgcagtcca

SEQ ID NO: 150611 - DNA, 25 bp, Probe Sequence
acttcagttgagagggtgcagtcca

SEQ ID NO: 150612 - DNA, 25 bp, Probe Sequence
acttcaggcatgcagggtgatggtg

SEQ ID NO: 150613 - DNA, 25 bp, Probe Sequence
acttcaagagaactgggctatggag

SEQ ID NO: 150614 - DNA, 25 bp, Probe Sequence
actatcaagagggctgggcattctc

SEQ ID NO: 150615 - DNA, 25 bp, Probe Sequence
actatacagcctactgtcgcagtcc

SEQ ID NO: 150616 - DNA, 25 bp, Probe Sequence
actatacacctcagtgactttcggc

SEQ ID NO: 150617 - DNA, 25 bp, Probe Sequence
actataagtcattttgagtgttggt

SEQ ID NO: 150618 - DNA, 25 bp, Probe Sequence
actattaatttttgaggaaggcagc

SEQ ID NO: 150619 - DNA, 25 bp, Probe Sequence
actttcaaatttgggtatagacaat

SEQ ID NO: 150620 - DNA, 25 bp, Probe Sequence
acttataacatcttattgttggtaa

SEQ ID NO: 150621 - DNA, 25 bp, Probe Sequence
actataacacttcatattttccaaa

SEQ ID NO: 150622 - DNA, 25 bp, Probe Sequence
acttgaaactctcatcaggcttcca

SEQ ID NO: 150623 - DNA, 25 bp, Probe Sequence
acttaatcacttctatggacttatc

SEQ ID NO: 150624 - DNA, 25 bp, Probe Sequence
acttaatgtcgttcttgtacagttg

SEQ ID NO: 150625 - DNA, 25 bp, Probe Sequence
acttaatggcttgcagtaccacttt

SEQ ID NO: 150626 - DNA, 25 bp, Probe Sequence
acttgattgagctctttactgccta

SEQ ID NO: 150627 - DNA, 25 bp, Probe Sequence
acttgcatatggtgaattactactg

SEQ ID NO: 150628 - DNA, 25 bp, Probe Sequence
acttgcttccattgtgtctgaaact

SEQ ID NO: 150629 - DNA, 25 bp, Probe Sequence
acttcatcccaattgtcaaacatcc

SEQ ID NO: 150630 - DNA, 25 bp, Probe Sequence
actatatccgaggagcaacaaccac

SEQ ID NO: 150631 - DNA, 25 bp, Probe Sequence
actttccagagctacaacatgccat

SEQ ID NO: 150632 - DNA, 25 bp, Probe Sequence
actttgccagcattgatgaacggat

SEQ ID NO: 150633 - DNA, 25 bp, Probe Sequence
acttggcctgtatataatggcatat

SEQ ID NO: 150634 - DNA, 25 bp, Probe Sequence
acttttgcttcactaattgtatctg

SEQ ID NO: 150635 - DNA, 25 bp, Probe Sequence
actttctcattacagagtttagtca

SEQ ID NO: 150636 - DNA, 25 bp, Probe Sequence
acttctccttagacactttggaatc

SEQ ID NO: 150637 - DNA, 25 bp, Probe Sequence
actttacttcaagtctttgtgcctc

SEQ ID NO: 150638 - DNA, 25 bp, Probe Sequence
actttgactctaagagtttctggct

SEQ ID NO: 150639 - DNA, 25 bp, Probe Sequence
actttggtgccattggtttcttctg

SEQ ID NO: 150640 - DNA, 25 bp, Probe Sequence
actttggggagcggtctatgtgacc

SEQ ID NO: 150641 - DNA, 25 bp, Probe Sequence
actttcccagggctatatggcaagc

SEQ ID NO: 150642 - DNA, 25 bp, Probe Sequence
acttctcacccgcgacaatggaagc

SEQ ID NO: 150643 - DNA, 25 bp, Probe Sequence
acttcatcaactggattgacaaaat

SEQ ID NO: 150644 - DNA, 25 bp, Probe Sequence
acttataacctgttgctattaatgg

SEQ ID NO: 150645 - DNA, 25 bp, Probe Sequence
acttagaaggtgtgtgactttggac

SEQ ID NO: 150646 - DNA, 25 bp, Probe Sequence
acaccaaaaggacctagttctgtag

SEQ ID NO: 150647 - DNA, 25 bp, Probe Sequence
acaccaaaaggacctagttctgtag

SEQ ID NO: 150648 - DNA, 25 bp, Probe Sequence
acactaaaagtacttgtttgcttga

SEQ ID NO: 150649 - DNA, 25 bp, Probe Sequence
acaggaatgaagaactgtggcctaa

SEQ ID NO: 150650 - DNA, 25 bp, Probe Sequence
acagctttggaaacttaggctaagt

SEQ ID NO: 150651 - DNA, 25 bp, Probe Sequence
acaattgggcaaaactacctaggct

SEQ ID NO: 150652 - DNA, 25 bp, Probe Sequence
acttctgtagaacactggccatagg

SEQ ID NO: 150653 - DNA, 25 bp, Probe Sequence
acttcagctcagtagctttggtcat

SEQ ID NO: 150654 - DNA, 25 bp, Probe Sequence
acttcagcgaattgctctgctgccc

SEQ ID NO: 150655 - DNA, 25 bp, Probe Sequence
acttcgcaagattcgagcagcccag

SEQ ID NO: 150656 - DNA, 25 bp, Probe Sequence
acttctcacagtgcaggagctcctc

SEQ ID NO: 150657 - DNA, 25 bp, Probe Sequence
actattcactgtcgagatggctaat

SEQ ID NO: 150658 - DNA, 25 bp, Probe Sequence
actttcctgctgtagttcttgcagc

SEQ ID NO: 150659 - DNA, 25 bp, Probe Sequence
actattctcatctctgttttgcagg

SEQ ID NO: 150660 - DNA, 25 bp, Probe Sequence
actttcacatcaacctctttcaagt

SEQ ID NO: 150661 - DNA, 25 bp, Probe Sequence
acttgtgctgtcgccttttagaagg

SEQ ID NO: 150662 - DNA, 25 bp, Probe Sequence
acttttctcgccctattcgggaatg

SEQ ID NO: 150663 - DNA, 25 bp, Probe Sequence
actttgtcaagctcatttcctggta

SEQ ID NO: 150664 - DNA, 25 bp, Probe Sequence
acataagtcaactcttctccttgaa

SEQ ID NO: 150665 - DNA, 25 bp, Probe Sequence
actatagtgcaacctatttgggtaa

SEQ ID NO: 150666 - DNA, 25 bp, Probe Sequence
acagtcccacccatctgtgggtaac

SEQ ID NO: 150667 - DNA, 25 bp, Probe Sequence
acttcccacaccacaaatgggacac

SEQ ID NO: 150668 - DNA, 25 bp, Probe Sequence
acatgtcctacagacttttggaccc

SEQ ID NO: 150669 - DNA, 25 bp, Probe Sequence
acttcctagcttgtcctatggacct

SEQ ID NO: 150670 - DNA, 25 bp, Probe Sequence
actatcattattacctcctagggcc

SEQ ID NO: 150671 - DNA, 25 bp, Probe Sequence
acttttattaactctcaattgcatt

SEQ ID NO: 150672 - DNA, 25 bp, Probe Sequence
actttccttttcactgatattgctt

SEQ ID NO: 150673 - DNA, 25 bp, Probe Sequence
actttgcctttttcactgtgtatgg

SEQ ID NO: 150674 - DNA, 25 bp, Probe Sequence
actaccacttctaatcagtgttata

SEQ ID NO: 150675 - DNA, 25 bp, Probe Sequence
actatctccgatattcattggttat

SEQ ID NO: 150676 - DNA, 25 bp, Probe Sequence
actacctaattgttactgtggagat

SEQ ID NO: 150677 - DNA, 25 bp, Probe Sequence
acttgctgtaaatctactactaaaa

SEQ ID NO: 150678 - DNA, 25 bp, Probe Sequence
actttgtgctaatgtccaattaaaa

SEQ ID NO: 150679 - DNA, 25 bp, Probe Sequence
actatttgcttttgccaagagtaag

SEQ ID NO: 150680 - DNA, 25 bp, Probe Sequence
acttttctttgaaggatgactacag

SEQ ID NO: 150681 - DNA, 25 bp, Probe Sequence
actttctatttagctgtcactagca

SEQ ID NO: 150682 - DNA, 25 bp, Probe Sequence
acttctctttttgtgttcaatccag

SEQ ID NO: 150683 - DNA, 25 bp, Probe Sequence
actttataatcgtcattgttcaatc

SEQ ID NO: 150684 - DNA, 25 bp, Probe Sequence
actttgacttcgtactgtctttcac

SEQ ID NO: 150685 - DNA, 25 bp, Probe Sequence
actattaatatacttctctccttcc

SEQ ID NO: 150686 - DNA, 25 bp, Probe Sequence
actattccattaagtttgccaaaca

SEQ ID NO: 150687 - DNA, 25 bp, Probe Sequence
actttctcttcaaatttagcaacct

SEQ ID NO: 150688 - DNA, 25 bp, Probe Sequence
aatttccccaacagtgtgaagttag

SEQ ID NO: 150689 - DNA, 25 bp, Probe Sequence
actttccccaccagatgctgaaaat

SEQ ID NO: 150690 - DNA, 25 bp, Probe Sequence
actattcctcactcaagattaagac

SEQ ID NO: 150691 - DNA, 25 bp, Probe Sequence
acttttgctctctgagccttgcaaa

SEQ ID NO: 150692 - DNA, 25 bp, Probe Sequence
actttctcctatggatcgcttacac

SEQ ID NO: 150693 - DNA, 25 bp, Probe Sequence
actagaccactaaatacttcatcac

SEQ ID NO: 150694 - DNA, 25 bp, Probe Sequence
acttaccagtaggaacattctcagc

SEQ ID NO: 150695 - DNA, 25 bp, Probe Sequence
acttacacgttcaacttttgcctgt

SEQ ID NO: 150696 - DNA, 25 bp, Probe Sequence
acatccccgattacttatttgactt

SEQ ID NO: 150697 - DNA, 25 bp, Probe Sequence
actagcatctggtattttatttatt

SEQ ID NO: 150698 - DNA, 25 bp, Probe Sequence
actataaggtattctatatttatat

SEQ ID NO: 150699 - DNA, 25 bp, Probe Sequence
acatatagggcttcctttggtatca

SEQ ID NO: 150700 - DNA, 25 bp, Probe Sequence
acatgaggggcttccattttctgtg

SEQ ID NO: 150701 - DNA, 25 bp, Probe Sequence
actagagtggcaagtctttgtgctt

SEQ ID NO: 150702 - DNA, 25 bp, Probe Sequence
actagactccattgtgccttactat

SEQ ID NO: 150703 - DNA, 25 bp, Probe Sequence
actatttacatagtgcttacattgt

SEQ ID NO: 150704 - DNA, 25 bp, Probe Sequence
actttttcatattattccttgagtc

SEQ ID NO: 150705 - DNA, 25 bp, Probe Sequence
acttttcaatagttgtttgtgagct

SEQ ID NO: 150706 - DNA, 25 bp, Probe Sequence
acttttgagactttttggtggatgt

SEQ ID NO: 150707 - DNA, 25 bp, Probe Sequence
acttttgagactttttggtggatgt

SEQ ID NO: 150708 - DNA, 25 bp, Probe Sequence
acttgtggaagtgcttaggggataa

SEQ ID NO: 150709 - DNA, 25 bp, Probe Sequence
acttgacaacagccctggaggggaa

SEQ ID NO: 150710 - DNA, 25 bp, Probe Sequence
acatatgtaacatctcagaagggtg

SEQ ID NO: 150711 - DNA, 25 bp, Probe Sequence
actagattgactgaggaatgtatgt

SEQ ID NO: 150712 - DNA, 25 bp, Probe Sequence
actagatgtctttaggcagcagctt

SEQ ID NO: 150713 - DNA, 25 bp, Probe Sequence
actagatgcctgtaagggtgattct

SEQ ID NO: 150714 - DNA, 25 bp, Probe Sequence
actagtgtctaatgaagcttttaaa

SEQ ID NO: 150715 - DNA, 25 bp, Probe Sequence
actagttttatctctcttttatgaa

SEQ ID NO: 150716 - DNA, 25 bp, Probe Sequence
actttttctcatgttctaattataa

SEQ ID NO: 150717 - DNA, 25 bp, Probe Sequence
acttttgaccacttgcgctaataaa

SEQ ID NO: 150718 - DNA, 25 bp, Probe Sequence
actttaatcctctatccagaaaaca

SEQ ID NO: 150719 - DNA, 25 bp, Probe Sequence
actttggtcccatgccggagaaaga

SEQ ID NO: 150720 - DNA, 25 bp, Probe Sequence
acttctggtccctagcattttggat

SEQ ID NO: 150721 - DNA, 25 bp, Probe Sequence
acttctggtccctagcattttggat

SEQ ID NO: 150722 - DNA, 25 bp, Probe Sequence
acttctggctcacaggaaagtgtct

SEQ ID NO: 150723 - DNA, 25 bp, Probe Sequence
actatctgactccaaggaatggggc

SEQ ID NO: 150724 - DNA, 25 bp, Probe Sequence
acactcaactactgcgtatggcggg

SEQ ID NO: 150725 - DNA, 25 bp, Probe Sequence
acactcaactactgcgtatggcggg

SEQ ID NO: 150726 - DNA, 25 bp, Probe Sequence
acactcaactactgcgtatggcggg

SEQ ID NO: 150727 - DNA, 25 bp, Probe Sequence
acttgcaaccgtggaggagccagag

SEQ ID NO: 150728 - DNA, 25 bp, Probe Sequence
acttgcagaccttcacggaacagtt

SEQ ID NO: 150729 - DNA, 25 bp, Probe Sequence
acttgtcaacaatgctgggatcagc

SEQ ID NO: 150730 - DNA, 25 bp, Probe Sequence
acttgtcaacactgctgtatgaagc

SEQ ID NO: 150731 - DNA, 25 bp, Probe Sequence
acttgcctactgatcagttacacaa

SEQ ID NO: 150732 - DNA, 25 bp, Probe Sequence
acttgctcgggttcaattaaaggca

SEQ ID NO: 150733 - DNA, 25 bp, Probe Sequence
acttcctgggtatatgactcggcac

SEQ ID NO: 150734 - DNA, 25 bp, Probe Sequence
acttcctgggtatatgactcggcac

SEQ ID NO: 150735 - DNA, 25 bp, Probe Sequence
acttcctgggtatatgactcggcac

SEQ ID NO: 150736 - DNA, 25 bp, Probe Sequence
acttccaggagttcctcattctggt

SEQ ID NO: 150737 - DNA, 25 bp, Probe Sequence
acttcaaggttatcaatcttggatt

SEQ ID NO: 150738 - DNA, 25 bp, Probe Sequence
acttcaatttgaacccatttgaggt

SEQ ID NO: 150739 - DNA, 25 bp, Probe Sequence
acttcatttctagcccagttgggtt

SEQ ID NO: 150740 - DNA, 25 bp, Probe Sequence
acattatccctagccaagcttcaag

SEQ ID NO: 150741 - DNA, 25 bp, Probe Sequence
acttcctccatacataagcttcaag

SEQ ID NO: 150742 - DNA, 25 bp, Probe Sequence
acattttcctgtctgaagtctagaa

SEQ ID NO: 150743 - DNA, 25 bp, Probe Sequence
acatttggctttcttgaggctacta

SEQ ID NO: 150744 - DNA, 25 bp, Probe Sequence
actttggctggtctgtatcattatt

SEQ ID NO: 150745 - DNA, 25 bp, Probe Sequence
actttgaggagaagtttcttatttg

SEQ ID NO: 150746 - DNA, 25 bp, Probe Sequence
acttactgtgagaagttttctacat

SEQ ID NO: 150747 - DNA, 25 bp, Probe Sequence
acttgagtggaatcctttcctcacg

SEQ ID NO: 150748 - DNA, 25 bp, Probe Sequence
actatttgtaactccttgaccatgg

SEQ ID NO: 150749 - DNA, 25 bp, Probe Sequence
acttttgtgaacgcttctgccacat

SEQ ID NO: 150750 - DNA, 25 bp, Probe Sequence
acttttgtatactttatcacccatg

SEQ ID NO: 150751 - DNA, 25 bp, Probe Sequence
acttgggtttgtctaactccagagt

SEQ ID NO: 150752 - DNA, 25 bp, Probe Sequence
acttgcgagtatttgtctaaataag

SEQ ID NO: 150753 - DNA, 25 bp, Probe Sequence
actagtgttgcttggactattataa

SEQ ID NO: 150754 - DNA, 25 bp, Probe Sequence
actatgtgttctggtgtgtcttaaa

SEQ ID NO: 150755 - DNA, 25 bp, Probe Sequence
actagtgtttgtttgtatccttgca

SEQ ID NO: 150756 - DNA, 25 bp, Probe Sequence
actatggtttgttgcctacctagct

SEQ ID NO: 150757 - DNA, 25 bp, Probe Sequence
actttggttgattccatatttggct

SEQ ID NO: 150758 - DNA, 25 bp, Probe Sequence
actatgggttaccaggatttcgctg

SEQ ID NO: 150759 - DNA, 25 bp, Probe Sequence
acttaatttcccttgtattgccttg

SEQ ID NO: 150760 - DNA, 25 bp, Probe Sequence
acttaatttcagtcctttacttgtg

SEQ ID NO: 150761 - DNA, 25 bp, Probe Sequence
acttaggtggcgtgtttcagcttgg

SEQ ID NO: 150762 - DNA, 25 bp, Probe Sequence
actttgggctgtgggtttcagcttg

SEQ ID NO: 150763 - DNA, 25 bp, Probe Sequence
actttgggatttcttctcagctttc

SEQ ID NO: 150764 - DNA, 25 bp, Probe Sequence
actttagtatttttcaccatttgtg

SEQ ID NO: 150765 - DNA, 25 bp, Probe Sequence
acttgataatatgttactggtttgt

SEQ ID NO: 150766 - DNA, 25 bp, Probe Sequence
acatcgtggttaaggactggtttgc

SEQ ID NO: 150767 - DNA, 25 bp, Probe Sequence
acagggacttaccagaatggttatg

SEQ ID NO: 150768 - DNA, 25 bp, Probe Sequence
acagactggcttggtcgcagtgact

SEQ ID NO: 150769 - DNA, 25 bp, Probe Sequence
acagcaagccagaagtgccagtcag

SEQ ID NO: 150770 - DNA, 25 bp, Probe Sequence
acaccccgtagacagaagaggcttt

SEQ ID NO: 150771 - DNA, 25 bp, Probe Sequence
acaccccccaccatggtgggcttgt

SEQ ID NO: 150772 - DNA, 25 bp, Probe Sequence
acaccccccaccatggtgggcttgt

SEQ ID NO: 150773 - DNA, 25 bp, Probe Sequence
acacaaagcccaacgggacaggttg

SEQ ID NO: 150774 - DNA, 25 bp, Probe Sequence
acatcaattccctcaggctgaagga

SEQ ID NO: 150775 - DNA, 25 bp, Probe Sequence
acataatttctaccagggccatatt

SEQ ID NO: 150776 - DNA, 25 bp, Probe Sequence
acttcatctgacatccaggtgtaat

SEQ ID NO: 150777 - DNA, 25 bp, Probe Sequence
acttactggataccaggttgacaaa

SEQ ID NO: 150778 - DNA, 25 bp, Probe Sequence
actttgtttacctgcttgcagcata

SEQ ID NO: 150779 - DNA, 25 bp, Probe Sequence
actatttctacacctacttggatat

SEQ ID NO: 150780 - DNA, 25 bp, Probe Sequence
actatttctagccagtgaattgtgt

SEQ ID NO: 150781 - DNA, 25 bp, Probe Sequence
actattttgggcttgatgtgctgtg

SEQ ID NO: 150782 - DNA, 25 bp, Probe Sequence
actatatttcaggcatctattggtg

SEQ ID NO: 150783 - DNA, 25 bp, Probe Sequence
actattttcggttctctggctaata

SEQ ID NO: 150784 - DNA, 25 bp, Probe Sequence
actatctttttatctgaagtaataa

SEQ ID NO: 150785 - DNA, 25 bp, Probe Sequence
acttctttcccttcaaagtggcatt

SEQ ID NO: 150786 - DNA, 25 bp, Probe Sequence
acttctttctacacagacacggcaa

SEQ ID NO: 150787 - DNA, 25 bp, Probe Sequence
acttctttctacacagacacggcaa

SEQ ID NO: 150788 - DNA, 25 bp, Probe Sequence
acttgcattgttttccaaaggtcag

SEQ ID NO: 150789 - DNA, 25 bp, Probe Sequence
acttctggcttgttaacagattgtt

SEQ ID NO: 150790 - DNA, 25 bp, Probe Sequence
acttcttgctggtctagtcacgcat

SEQ ID NO: 150791 - DNA, 25 bp, Probe Sequence
acttcttgtcagacataaagccatg

SEQ ID NO: 150792 - DNA, 25 bp, Probe Sequence
actattttgcagcatagctaccttc

SEQ ID NO: 150793 - DNA, 25 bp, Probe Sequence
actatacttggatagcacagctctt

SEQ ID NO: 150794 - DNA, 25 bp, Probe Sequence
acatcaacaccgtcacagagagctt

SEQ ID NO: 150795 - DNA, 25 bp, Probe Sequence
acataagcattgggccatagtttgt

SEQ ID NO: 150796 - DNA, 25 bp, Probe Sequence
acatcaatgggcgtggatagcggtt

SEQ ID NO: 150797 - DNA, 25 bp, Probe Sequence
acatacatgggcgtgatagcggtct

SEQ ID NO: 150798 - DNA, 25 bp, Probe Sequence
acatcaatgcgcgtggatagtcggt

SEQ ID NO: 150799 - DNA, 25 bp, Probe Sequence
actatgaggctgcgaaggcagatgc

SEQ ID NO: 150800 - DNA, 25 bp, Probe Sequence
acttgactgggctaagggatgctca

SEQ ID NO: 150801 - DNA, 25 bp, Probe Sequence
acttgtcatggtgagaaggcaggac

SEQ ID NO: 150802 - DNA, 25 bp, Probe Sequence
actttgtgagtaataatgtcaggtc

SEQ ID NO: 150803 - DNA, 25 bp, Probe Sequence
actttggatgtattacttaggccaa

SEQ ID NO: 150804 - DNA, 25 bp, Probe Sequence
acttatctgatttatagctttggcc

SEQ ID NO: 150805 - DNA, 25 bp, Probe Sequence
acttgtttttcaagctcactcaggc

SEQ ID NO: 150806 - DNA, 25 bp, Probe Sequence
acttattctattgagctattacacc

SEQ ID NO: 150807 - DNA, 25 bp, Probe Sequence
acttctttaggatgttattcagcca

SEQ ID NO: 150808 - DNA, 25 bp, Probe Sequence
actttctctagttagatgtcagtcc

SEQ ID NO: 150809 - DNA, 25 bp, Probe Sequence
acttcacattctcaagtggcagttt

SEQ ID NO: 150810 - DNA, 25 bp, Probe Sequence
acttgcgttgctttagggcaggatt

SEQ ID NO: 150811 - DNA, 25 bp, Probe Sequence
acaggctttgaaacgaggcagaatt

SEQ ID NO: 150812 - DNA, 25 bp, Probe Sequence
acagttattaaccagactcagaaag

SEQ ID NO: 150813 - DNA, 25 bp, Probe Sequence
acttgtagtacagagatccagataa

SEQ ID NO: 150814 - DNA, 25 bp, Probe Sequence
acttcacactactagatgttaaaac

SEQ ID NO: 150815 - DNA, 25 bp, Probe Sequence
actatcctccagtatgggtgacaga

SEQ ID NO: 150816 - DNA, 25 bp, Probe Sequence
acttcctcaatgtatttgggcttcg

SEQ ID NO: 150817 - DNA, 25 bp, Probe Sequence
acttctccgtgatcctgaagctgtc

SEQ ID NO: 150818 - DNA, 25 bp, Probe Sequence
actttgctctgaaacacagagggta

SEQ ID NO: 150819 - DNA, 25 bp, Probe Sequence
actttctcagcaacatgtcgatgga

SEQ ID NO: 150820 - DNA, 25 bp, Probe Sequence
acttctccagcatatgtaagtggaa

SEQ ID NO: 150821 - DNA, 25 bp, Probe Sequence
acttctccacacagattgagaggta

SEQ ID NO: 150822 - DNA, 25 bp, Probe Sequence
actttgtcacatctaagctgtggtg

SEQ ID NO: 150823 - DNA, 25 bp, Probe Sequence
acttatttacttggacttgcatgtg

SEQ ID NO: 150824 - DNA, 25 bp, Probe Sequence
actttgttgtttcacttcatgctct

SEQ ID NO: 150825 - DNA, 25 bp, Probe Sequence
acttatattgttagtaattgcatca

SEQ ID NO: 150826 - DNA, 25 bp, Probe Sequence
actatagcatagattgtcaaatgta

SEQ ID NO: 150827 - DNA, 25 bp, Probe Sequence
acttatgctcatatattaggatgtg

SEQ ID NO: 150828 - DNA, 25 bp, Probe Sequence
acttcatgcgcaatgctgacttgga

SEQ ID NO: 150829 - DNA, 25 bp, Probe Sequence
acttatcggtgaatcattgatgaga

SEQ ID NO: 150830 - DNA, 25 bp, Probe Sequence
acttatctgcgaacttatgacacca

SEQ ID NO: 150831 - DNA, 25 bp, Probe Sequence
acttttgcagattgggtaacacagg

SEQ ID NO: 150832 - DNA, 25 bp, Probe Sequence
actttatagccacggctgcacagaa

SEQ ID NO: 150833 - DNA, 25 bp, Probe Sequence
actattatcttcatgggcagagtag

SEQ ID NO: 150834 - DNA, 25 bp, Probe Sequence
acttccatcagtattgagccaggag

SEQ ID NO: 150835 - DNA, 25 bp, Probe Sequence
acttctctactgactggatgcatat

SEQ ID NO: 150836 - DNA, 25 bp, Probe Sequence
acttctcagatcaatcgtgcatcct

SEQ ID NO: 150837 - DNA, 25 bp, Probe Sequence
cactgtgccatgtcagcaagtcata

SEQ ID NO: 150838 - DNA, 25 bp, Probe Sequence
acttcatcatgctgcagaacaacga

SEQ ID NO: 150839 - DNA, 25 bp, Probe Sequence
acttggctcccaaaagcacagcaat

SEQ ID NO: 150840 - DNA, 25 bp, Probe Sequence
acatttgcctactaatggaaaaggt
